United States Patent Application Publication US 2022/0259616 A1 - sequence listing, part 5

SEQ ID NO: 108823 - DNA, 20 bp, Artificial Sequence
  MKO10108823_B_Plekhb2
  gRNA
ctatgctacaccaacccctg

SEQ ID NO: 108824 - DNA, 20 bp, Artificial Sequence
  MKO10108824_B_Plekhd1
  gRNA
ggaagctatgatcaaaagcc

SEQ ID NO: 108825 - DNA, 20 bp, Artificial Sequence
  MKO10108825_B_Plekhd1
  gRNA
tcttcagggtgtcattccac

SEQ ID NO: 108826 - DNA, 20 bp, Artificial Sequence
  MKO10108826_B_Plekhd1
  gRNA
ctggcaggggaatgtcttgt

SEQ ID NO: 108827 - DNA, 20 bp, Artificial Sequence
  MKO10108827_B_Plekhf1
  gRNA
cgcgcttctccgcactcacc

SEQ ID NO: 108828 - DNA, 20 bp, Artificial Sequence
  MKO10108828_B_Plekhf1
  gRNA
ggccttcttgcggcactcct

SEQ ID NO: 108829 - DNA, 20 bp, Artificial Sequence
  MKO10108829_B_Plekhf1
  gRNA
gcacaatactgccatacacc

SEQ ID NO: 108830 - DNA, 20 bp, Artificial Sequence
  MKO10108830_B_Plekhf2
  gRNA
tctccaataagcactcgccc

SEQ ID NO: 108831 - DNA, 20 bp, Artificial Sequence
  MKO10108831_B_Plekhf2
  gRNA
gacagcagcatgctcgttgc

SEQ ID NO: 108832 - DNA, 20 bp, Artificial Sequence
  MKO10108832_B_Plekhf2
  gRNA
cagaagtcacaaatccgcac

SEQ ID NO: 108833 - DNA, 20 bp, Artificial Sequence
  MKO10108833_B_Plekhg1
  gRNA
caagccataccttgggtaat

SEQ ID NO: 108834 - DNA, 20 bp, Artificial Sequence
  MKO10108834_B_Plekhg1
  gRNA
agtattgcaccaattaccca

SEQ ID NO: 108835 - DNA, 20 bp, Artificial Sequence
  MKO10108835_B_Plekhg1
  gRNA
cattaacttacctattgaag

SEQ ID NO: 108836 - DNA, 20 bp, Artificial Sequence
  MKO10108836_B_Plekhg2
  gRNA
gccacacccgagcctaaggc

SEQ ID NO: 108837 - DNA, 20 bp, Artificial Sequence
  MKO10108837_B_Plekhg2
  gRNA
cactctttgcacgaagcact

SEQ ID NO: 108838 - DNA, 20 bp, Artificial Sequence
  MKO10108838_B_Plekhg2
  gRNA
cacactgtttgccaacatcg

SEQ ID NO: 108839 - DNA, 20 bp, Artificial Sequence
  MKO10108839_B_Plekhg3
  gRNA
taccctttccacgaagcagc

SEQ ID NO: 108840 - DNA, 20 bp, Artificial Sequence
  MKO10108840_B_Plekhg3
  gRNA
tggccagctgcttcgtggaa

SEQ ID NO: 108841 - DNA, 20 bp, Artificial Sequence
  MKO10108841_B_Plekhg3
  gRNA
tgtcttgcatgcactctgtg

SEQ ID NO: 108842 - DNA, 20 bp, Artificial Sequence
  MKO10108842_B_Plekhg4
  gRNA
ctaacctggggatgcctcgc

SEQ ID NO: 108843 - DNA, 20 bp, Artificial Sequence
  MKO10108843_B_Plekhg4
  gRNA
tcctagctcgagacctcgcc

SEQ ID NO: 108844 - DNA, 20 bp, Artificial Sequence
  MKO10108844_B_Plekhg4
  gRNA
accgtttaggcctgaagtgc

SEQ ID NO: 108845 - DNA, 20 bp, Artificial Sequence
  MKO10108845_B_Plekhg5
  gRNA
cacagcaccctgcactacga

SEQ ID NO: 108846 - DNA, 20 bp, Artificial Sequence
  MKO10108846_B_Plekhg5
  gRNA
gtcctctcaggacccgagca

SEQ ID NO: 108847 - DNA, 20 bp, Artificial Sequence
  MKO10108847_B_Plekhg5
  gRNA
aggaccgggtggaaacattc

SEQ ID NO: 108848 - DNA, 20 bp, Artificial Sequence
  MKO10108848_B_Plekhg6
  gRNA
ccgccagctttgccaccagc

SEQ ID NO: 108849 - DNA, 20 bp, Artificial Sequence
  MKO10108849_B_Plekhg6
  gRNA
gatgccccgcctgccaccag

SEQ ID NO: 108850 - DNA, 20 bp, Artificial Sequence
  MKO10108850_B_Plekhg6
  gRNA
tctgctgaatttgcagcggg

SEQ ID NO: 108851 - DNA, 20 bp, Artificial Sequence
  MKO10108851_B_Plekhh1
  gRNA
ggtgacagtaaagttagcag

SEQ ID NO: 108852 - DNA, 20 bp, Artificial Sequence
  MKO10108852_B_Plekhh1
  gRNA
ggcccttcaggatgctcttg

SEQ ID NO: 108853 - DNA, 20 bp, Artificial Sequence
  MKO10108853_B_Plekhh1
  gRNA
gcccgaacagatgcaggagc

SEQ ID NO: 108854 - DNA, 20 bp, Artificial Sequence
  MKO10108854_B_Plekhh2
  gRNA
gcgatacagtccaagttgca

SEQ ID NO: 108855 - DNA, 20 bp, Artificial Sequence
  MKO10108855_B_Plekhh2
  gRNA
gacaagttatcgatgcagag

SEQ ID NO: 108856 - DNA, 20 bp, Artificial Sequence
  MKO10108856_B_Plekhh2
  gRNA
ccacctacagatgcaacagt

SEQ ID NO: 108857 - DNA, 20 bp, Artificial Sequence
  MKO10108857_B_Plekhh3
  gRNA
ggcaaggcgactcggaagcc

SEQ ID NO: 108858 - DNA, 20 bp, Artificial Sequence
  MKO10108858_B_Plekhh3
  gRNA
ccgcctctgctctccgcgcc

SEQ ID NO: 108859 - DNA, 20 bp, Artificial Sequence
  MKO10108859_B_Plekhh3
  gRNA
aggggtctccagcggagctt

SEQ ID NO: 108860 - DNA, 20 bp, Artificial Sequence
  MKO10108860_B_Plekhj1
  gRNA
ttactgatggagaagccgcc

SEQ ID NO: 108861 - DNA, 20 bp, Artificial Sequence
  MKO10108861_B_Plekhj1
  gRNA
gcccctcggagccctgttgc

SEQ ID NO: 108862 - DNA, 20 bp, Artificial Sequence
  MKO10108862_B_Plekhj1
  gRNA
gacagagcctcatcttctac

SEQ ID NO: 108863 - DNA, 20 bp, Artificial Sequence
  MKO10108863_B_Plekhm1
  gRNA
tgcacactcaccggactcgt

SEQ ID NO: 108864 - DNA, 20 bp, Artificial Sequence
  MKO10108864_B_Plekhm1
  gRNA
cgcggatgtgcttggcatgc

SEQ ID NO: 108865 - DNA, 20 bp, Artificial Sequence
  MKO10108865_B_Plekhm1
  gRNA
cagagtcggaccgaagcttg

SEQ ID NO: 108866 - DNA, 20 bp, Artificial Sequence
  MKO10108866_B_Plekhm2
  gRNA
tagcacctcaatttgcctga

SEQ ID NO: 108867 - DNA, 20 bp, Artificial Sequence
  MKO10108867_B_Plekhm2
  gRNA
tgacatagtacttctgtagc

SEQ ID NO: 108868 - DNA, 20 bp, Artificial Sequence
  MKO10108868_B_Plekhm2
  gRNA
acagcatgtagccaccaacc

SEQ ID NO: 108869 - DNA, 20 bp, Artificial Sequence
  MKO10108869_B_Plekhm3
  gRNA
gtttgttcttccgcagctcg

SEQ ID NO: 108870 - DNA, 20 bp, Artificial Sequence
  MKO10108870_B_Plekhm3
  gRNA
tccgggctgagacccgacag

SEQ ID NO: 108871 - DNA, 20 bp, Artificial Sequence
  MKO10108871_B_Plekhm3
  gRNA
cagcacgcatagttcacaac

SEQ ID NO: 108872 - DNA, 20 bp, Artificial Sequence
  MKO10108872_B_Plekhn1
  gRNA
tcaccgtcccagggatgtag

SEQ ID NO: 108873 - DNA, 20 bp, Artificial Sequence
  MKO10108873_B_Plekhn1
  gRNA
caaggttgttcactactcca

SEQ ID NO: 108874 - DNA, 20 bp, Artificial Sequence
  MKO10108874_B_Plekhn1
  gRNA
ttctgagggacttacattcc

SEQ ID NO: 108875 - DNA, 20 bp, Artificial Sequence
  MKO10108875_B_Plekho1
  gRNA
ccagctctacgtctccgaga

SEQ ID NO: 108876 - DNA, 20 bp, Artificial Sequence
  MKO10108876_B_Plekho1
  gRNA
cagagctaaaaaccgtatct

SEQ ID NO: 108877 - DNA, 20 bp, Artificial Sequence
  MKO10108877_B_Plekho1
  gRNA
actcccgccgtcctccaacc

SEQ ID NO: 108878 - DNA, 20 bp, Artificial Sequence
  MKO10108878_B_Plekho2
  gRNA
ttgttggtggccgccgccgc

SEQ ID NO: 108879 - DNA, 20 bp, Artificial Sequence
  MKO10108879_B_Plekho2
  gRNA
tttatcctgctgcgatcccc

SEQ ID NO: 108880 - DNA, 20 bp, Artificial Sequence
  MKO10108880_B_Plekho2
  gRNA
gcgagaagcctcgtggagca

SEQ ID NO: 108881 - DNA, 20 bp, Artificial Sequence
  MKO10108881_B_Plekhs1
  gRNA
gtgctgatggtctttgtaat

SEQ ID NO: 108882 - DNA, 20 bp, Artificial Sequence
  MKO10108882_B_Plekhs1
  gRNA
gttcaagtgccacccagatg

SEQ ID NO: 108883 - DNA, 20 bp, Artificial Sequence
  MKO10108883_B_Plekhs1
  gRNA
atggaagccagacctccaaa

SEQ ID NO: 108884 - DNA, 20 bp, Artificial Sequence
  MKO10108884_B_Plek
  gRNA
tctatgaaagaccccgagaa

SEQ ID NO: 108885 - DNA, 20 bp, Artificial Sequence
  MKO10108885_B_Plek
  gRNA
taccccaagtcaattgtctc

SEQ ID NO: 108886 - DNA, 20 bp, Artificial Sequence
  MKO10108886_B_Plek
  gRNA
caggtagtggtgtcattgac

SEQ ID NO: 108887 - DNA, 20 bp, Artificial Sequence
  MKO10108887_B_Plet1
  gRNA
ctggacagttcctacttccg

SEQ ID NO: 108888 - DNA, 20 bp, Artificial Sequence
  MKO10108888_B_Plet1
  gRNA
cacagttggagtcgtgttta

SEQ ID NO: 108889 - DNA, 20 bp, Artificial Sequence
  MKO10108889_B_Plet1
  gRNA
tgccgagagtgcggatggcc

SEQ ID NO: 108890 - DNA, 20 bp, Artificial Sequence
  MKO10108890_B_Plgrkt
  gRNA
actataggaacgagaaaggc

SEQ ID NO: 108891 - DNA, 20 bp, Artificial Sequence
  MKO10108891_B_Plgrkt
  gRNA
cttcacctaccagtatgacc

SEQ ID NO: 108892 - DNA, 20 bp, Artificial Sequence
  MKO10108892_B_Plgrkt
  gRNA
tcaaaggtgatcagtccttt

SEQ ID NO: 108893 - DNA, 20 bp, Artificial Sequence
  MKO10108893_B_Plg
  gRNA
gtcatcttattcgaaaagag

SEQ ID NO: 108894 - DNA, 20 bp, Artificial Sequence
  MKO10108894_B_Plg
  gRNA
tgcaggacaaggggactcgc

SEQ ID NO: 108895 - DNA, 20 bp, Artificial Sequence
  MKO10108895_B_Plg
  gRNA
ataagatgacgtctctcatc

SEQ ID NO: 108896 - DNA, 20 bp, Artificial Sequence
  MKO10108896_B_Plin1
  gRNA
gatcccgggtgtggcacccc

SEQ ID NO: 108897 - DNA, 20 bp, Artificial Sequence
  MKO10108897_B_Plin1
  gRNA
cacactgggtggacagccga

SEQ ID NO: 108898 - DNA, 20 bp, Artificial Sequence
  MKO10108898_B_Plin1
  gRNA
gcctctgcaggccaactcat

SEQ ID NO: 108899 - DNA, 20 bp, Artificial Sequence
  MKO10108899_B_Plin2
  gRNA
tccagccgttcatagttgct

SEQ ID NO: 108900 - DNA, 20 bp, Artificial Sequence
  MKO10108900_B_Plin2
  gRNA
agaagccgagcaactatgaa

SEQ ID NO: 108901 - DNA, 20 bp, Artificial Sequence
  MKO10108901_B_Plin2
  gRNA
cacggtcttcacgcccttct

SEQ ID NO: 108902 - DNA, 20 bp, Artificial Sequence
  MKO10108902_B_Plin3
  gRNA
cttgccgagggagtgttcat

SEQ ID NO: 108903 - DNA, 20 bp, Artificial Sequence
  MKO10108903_B_Plin3
  gRNA
tagctcagtgtctagtgcga

SEQ ID NO: 108904 - DNA, 20 bp, Artificial Sequence
  MKO10108904_B_Plin3
  gRNA
agcggtggatgtgaccctcg

SEQ ID NO: 108905 - DNA, 20 bp, Artificial Sequence
  MKO10108905_B_Plin4
  gRNA
actcctgccccctcatctaa

SEQ ID NO: 108906 - DNA, 20 bp, Artificial Sequence
  MKO10108906_B_Plin4
  gRNA
ttccgggcagagctgaagcc

SEQ ID NO: 108907 - DNA, 20 bp, Artificial Sequence
  MKO10108907_B_Plin4
  gRNA
gctgctccaaccttctgaac

SEQ ID NO: 108908 - DNA, 20 bp, Artificial Sequence
  MKO10108908_B_Plin5
  gRNA
caaggacaggcacccgctgc

SEQ ID NO: 108909 - DNA, 20 bp, Artificial Sequence
  MKO10108909_B_Plin5
  gRNA
tcagctccccactccaacgc

SEQ ID NO: 108910 - DNA, 20 bp, Artificial Sequence
  MKO10108910_B_Plin5
  gRNA
caccatgcctgtgacacttt

SEQ ID NO: 108911 - DNA, 20 bp, Artificial Sequence
  MKO10108911_B_Plk1s1
  gRNA
gaggatgcgcctcctgtcaa

SEQ ID NO: 108912 - DNA, 20 bp, Artificial Sequence
  MKO10108912_B_Plk1s1
  gRNA
tcaagtgttcaacatacgtc

SEQ ID NO: 108913 - DNA, 20 bp, Artificial Sequence
  MKO10108913_B_Plk1s1
  gRNA
acaataaatctgataagtgc

SEQ ID NO: 108914 - DNA, 20 bp, Artificial Sequence
  MKO10108914_B_Plk1
  gRNA
gagcgattgaaaaccttggt

SEQ ID NO: 108915 - DNA, 20 bp, Artificial Sequence
  MKO10108915_B_Plk1
  gRNA
aacttacatgatgcacccaa

SEQ ID NO: 108916 - DNA, 20 bp, Artificial Sequence
  MKO10108916_B_Plk1
  gRNA
ccccaggtataccttgctag

SEQ ID NO: 108917 - DNA, 20 bp, Artificial Sequence
  MKO10108917_B_Plk2
  gRNA
gagtagctaaacctcatcag

SEQ ID NO: 108918 - DNA, 20 bp, Artificial Sequence
  MKO10108918_B_Plk2
  gRNA
gaaggtgggagactttggtt

SEQ ID NO: 108919 - DNA, 20 bp, Artificial Sequence
  MKO10108919_B_Plk2
  gRNA
cacctccttctgtgttccag

SEQ ID NO: 108920 - DNA, 20 bp, Artificial Sequence
  MKO10108920_B_Plk3
  gRNA
cgcaggtagtagcgaacctc

SEQ ID NO: 108921 - DNA, 20 bp, Artificial Sequence
  MKO10108921_B_Plk3
  gRNA
tacctgcgccagatcctttc

SEQ ID NO: 108922 - DNA, 20 bp, Artificial Sequence
  MKO10108922_B_Plk3
  gRNA
cctttcggctacagagctcc

SEQ ID NO: 108923 - DNA, 20 bp, Artificial Sequence
  MKO10108923_B_Plk4
  gRNA
agagctgagtccatacacac

SEQ ID NO: 108924 - DNA, 20 bp, Artificial Sequence
  MKO10108924_B_Plk4
  gRNA
gtatcttacctccaagacag

SEQ ID NO: 108925 - DNA, 20 bp, Artificial Sequence
  MKO10108925_B_Plk4
  gRNA
agataacaattatgtctacc

SEQ ID NO: 108926 - DNA, 20 bp, Artificial Sequence
  MKO10108926_B_Plk5
  gRNA
ctgaagtgcgctattacctt

SEQ ID NO: 108927 - DNA, 20 bp, Artificial Sequence
  MKO10108927_B_Plk5
  gRNA
tgtgtctcaccttcccgcgc

SEQ ID NO: 108928 - DNA, 20 bp, Artificial Sequence
  MKO10108928_B_Plk5
  gRNA
cttaagagcgaacacagcgc

SEQ ID NO: 108929 - DNA, 20 bp, Artificial Sequence
  MKO10108929_B_Pllp
  gRNA
cggtcgatctgacatccctg

SEQ ID NO: 108930 - DNA, 20 bp, Artificial Sequence
  MKO10108930_B_Pllp
  gRNA
cagatcgaccgccgctgcac

SEQ ID NO: 108931 - DNA, 20 bp, Artificial Sequence
  MKO10108931_B_Pllp
  gRNA
gcccccagccatctgactcg

SEQ ID NO: 108932 - DNA, 20 bp, Artificial Sequence
  MKO10108932_B_Pln
  gRNA
gcagcagacatatcaagatg

SEQ ID NO: 108933 - DNA, 20 bp, Artificial Sequence
  MKO10108933_B_Pln
  gRNA
agattctgacgtgcttgctg

SEQ ID NO: 108934 - DNA, 20 bp, Artificial Sequence
  MKO10108934_B_Plod1
  gRNA
gttcttcaactacaagatcc

SEQ ID NO: 108935 - DNA, 20 bp, Artificial Sequence
  MKO10108935_B_Plod1
  gRNA
tgtcaacgaagagaataacc

SEQ ID NO: 108936 - DNA, 20 bp, Artificial Sequence
  MKO10108936_B_Plod1
  gRNA
taccaagatcttcttgaacc

SEQ ID NO: 108937 - DNA, 20 bp, Artificial Sequence
  MKO10108937_B_Plod2
  gRNA
ctcacctgcagggatgcgcc

SEQ ID NO: 108938 - DNA, 20 bp, Artificial Sequence
  MKO10108938_B_Plod2
  gRNA
gtatttcaattacactgtga

SEQ ID NO: 108939 - DNA, 20 bp, Artificial Sequence
  MKO10108939_B_Plod2
  gRNA
ctacgccagtcaggaagatc

SEQ ID NO: 108940 - DNA, 20 bp, Artificial Sequence
  MKO10108940_B_Plod3
  gRNA
ggctatgacagacaaattgc

SEQ ID NO: 108941 - DNA, 20 bp, Artificial Sequence
  MKO10108941_B_Plod3
  gRNA
ccgcagactgcagaaaacgc

SEQ ID NO: 108942 - DNA, 20 bp, Artificial Sequence
  MKO10108942_B_Plod3
  gRNA
gccactcaccaccagagttg

SEQ ID NO: 108943 - DNA, 20 bp, Artificial Sequence
  MKO10108943_B_Plp1
  gRNA
ccatacaacagtcagggcat

SEQ ID NO: 108944 - DNA, 20 bp, Artificial Sequence
  MKO10108944_B_Plp1
  gRNA
agagtgttgtgctagatgtc

SEQ ID NO: 108945 - DNA, 20 bp, Artificial Sequence
  MKO10108945_B_Plp1
  gRNA
taatgagatactcatagtcc

SEQ ID NO: 108946 - DNA, 20 bp, Artificial Sequence
  MKO10108946_B_Plp2
  gRNA
tgaagcaaatcaagatcacc

SEQ ID NO: 108947 - DNA, 20 bp, Artificial Sequence
  MKO10108947_B_Plp2
  gRNA
cctcctgcagaccccactga

SEQ ID NO: 108948 - DNA, 20 bp, Artificial Sequence
  MKO10108948_B_Plp2
  gRNA
agacgatcacgggccatcag

SEQ ID NO: 108949 - DNA, 20 bp, Artificial Sequence
  MKO10108949_B_Plrg1
  gRNA
tgttacttaccgggtcctgc

SEQ ID NO: 108950 - DNA, 20 bp, Artificial Sequence
  MKO10108950_B_Plrg1
  gRNA
ggcacccatccatacccagc

SEQ ID NO: 108951 - DNA, 20 bp, Artificial Sequence
  MKO10108951_B_Plrg1
  gRNA
taatggaaaacccgtgcctt

SEQ ID NO: 108952 - DNA, 20 bp, Artificial Sequence
  MKO10108952_B_Pls1
  gRNA
atctcgcgcaccttgtaccc

SEQ ID NO: 108953 - DNA, 20 bp, Artificial Sequence
  MKO10108953_B_Pls1
  gRNA
gaagggatcactgccatcgg

SEQ ID NO: 108954 - DNA, 20 bp, Artificial Sequence
  MKO10108954_B_Pls1
  gRNA
gtactcaccgacaccgtgaa

SEQ ID NO: 108955 - DNA, 20 bp, Artificial Sequence
  MKO10108955_B_Pls3
  gRNA
gattacctgaataggaatgc

SEQ ID NO: 108956 - DNA, 20 bp, Artificial Sequence
  MKO10108956_B_Pls3
  gRNA
gatgacctgttcaaagcagt

SEQ ID NO: 108957 - DNA, 20 bp, Artificial Sequence
  MKO10108957_B_Pls3
  gRNA
tcatcagtatttgggttcat

SEQ ID NO: 108958 - DNA, 20 bp, Artificial Sequence
  MKO10108958_B_Plscr1
  gRNA
tagacgccccacagcagttt

SEQ ID NO: 108959 - DNA, 20 bp, Artificial Sequence
  MKO10108959_B_Plscr1
  gRNA
tgctgtacccgaaactgctg

SEQ ID NO: 108960 - DNA, 20 bp, Artificial Sequence
  MKO10108960_B_Plscr1
  gRNA
cagccagcatataatcatcc

SEQ ID NO: 108961 - DNA, 20 bp, Artificial Sequence
  MKO10108961_B_Plscr2
  gRNA
caacataaaccatctgcccg

SEQ ID NO: 108962 - DNA, 20 bp, Artificial Sequence
  MKO10108962_B_Plscr2
  gRNA
gcagatggtttatgttgcag

SEQ ID NO: 108963 - DNA, 20 bp, Artificial Sequence
  MKO10108963_B_Plscr2
  gRNA
tcgttctgaagagtgagctt

SEQ ID NO: 108964 - DNA, 20 bp, Artificial Sequence
  MKO10108964_B_Plscr3
  gRNA
caacctgttctacgagttgt

SEQ ID NO: 108965 - DNA, 20 bp, Artificial Sequence
  MKO10108965_B_Plscr3
  gRNA
ctacaactcgtagaacaggt

SEQ ID NO: 108966 - DNA, 20 bp, Artificial Sequence
  MKO10108966_B_Plscr3
  gRNA
tcacctgcactaggaattcg

SEQ ID NO: 108967 - DNA, 20 bp, Artificial Sequence
  MKO10108967_B_Plscr4
  gRNA
gccatccacattatgggagc

SEQ ID NO: 108968 - DNA, 20 bp, Artificial Sequence
  MKO10108968_B_Plscr4
  gRNA
gcaaaatgagaattgtagtc

SEQ ID NO: 108969 - DNA, 20 bp, Artificial Sequence
  MKO10108969_B_Plscr4
  gRNA
tcttcagcatgttgagcctc

SEQ ID NO: 108970 - DNA, 20 bp, Artificial Sequence
  MKO10108970_B_Plscr5
  gRNA
acataaccaactatagtacc

SEQ ID NO: 108971 - DNA, 20 bp, Artificial Sequence
  MKO10108971_B_Plscr5
  gRNA
cacatcgccaaaacagccac

SEQ ID NO: 108972 - DNA, 20 bp, Artificial Sequence
  MKO10108972_B_Plscr5
  gRNA
tggcttaaatactctagacc

SEQ ID NO: 108973 - DNA, 20 bp, Artificial Sequence
  MKO10108973_B_Pltp
  gRNA
ccctttgcgccgtacacgtc

SEQ ID NO: 108974 - DNA, 20 bp, Artificial Sequence
  MKO10108974_B_Pltp
  gRNA
tcacctgaaggttcccccga

SEQ ID NO: 108975 - DNA, 20 bp, Artificial Sequence
  MKO10108975_B_Pltp
  gRNA
gtgcagccccaaggatgcgt

SEQ ID NO: 108976 - DNA, 20 bp, Artificial Sequence
  MKO10108976_B_Plvap
  gRNA
cttctcgctcaggatgatag

SEQ ID NO: 108977 - DNA, 20 bp, Artificial Sequence
  MKO10108977_B_Plvap
  gRNA
gaggtcaacaagacctgcga

SEQ ID NO: 108978 - DNA, 20 bp, Artificial Sequence
  MKO10108978_B_Plvap
  gRNA
tgttactcaccaatgggtgg

SEQ ID NO: 108979 - DNA, 20 bp, Artificial Sequence
  MKO10108979_B_Plxdc1
  gRNA
accacccgagtcctgttgtc

SEQ ID NO: 108980 - DNA, 20 bp, Artificial Sequence
  MKO10108980_B_Plxdc1
  gRNA
gtccttacctccggttgcta

SEQ ID NO: 108981 - DNA, 20 bp, Artificial Sequence
  MKO10108981_B_Plxdc1
  gRNA
cgtcctacctgcgggtgttg

SEQ ID NO: 108982 - DNA, 20 bp, Artificial Sequence
  MKO10108982_B_Plxdc2
  gRNA
cctgtccgtcatccagtagc

SEQ ID NO: 108983 - DNA, 20 bp, Artificial Sequence
  MKO10108983_B_Plxdc2
  gRNA
ggatcaaaatttgccattaa

SEQ ID NO: 108984 - DNA, 20 bp, Artificial Sequence
  MKO10108984_B_Plxdc2
  gRNA
attgtaggtttcatatatac

SEQ ID NO: 108985 - DNA, 20 bp, Artificial Sequence
  MKO10108985_B_Plxna1
  gRNA
agtgggggtcccgagacccc

SEQ ID NO: 108986 - DNA, 20 bp, Artificial Sequence
  MKO10108986_B_Plxna1
  gRNA
gcgagtgccagcaaaaacca

SEQ ID NO: 108987 - DNA, 20 bp, Artificial Sequence
  MKO10108987_B_Plxna1
  gRNA
gggctcttctgcccgctcac

SEQ ID NO: 108988 - DNA, 20 bp, Artificial Sequence
  MKO10108988_B_Plxna2
  gRNA
tggtggggtccagtatgaga

SEQ ID NO: 108989 - DNA, 20 bp, Artificial Sequence
  MKO10108989_B_Plxna2
  gRNA
cacaaacttacatgttgtgc

SEQ ID NO: 108990 - DNA, 20 bp, Artificial Sequence
  MKO10108990_B_Plxna2
  gRNA
gtacctcaaggctcatgcac

SEQ ID NO: 108991 - DNA, 20 bp, Artificial Sequence
  MKO10108991_B_Plxna3
  gRNA
acgcagcggtaatttgaaga

SEQ ID NO: 108992 - DNA, 20 bp, Artificial Sequence
  MKO10108992_B_Plxna3
  gRNA
cagagaccgtttcatatagc

SEQ ID NO: 108993 - DNA, 20 bp, Artificial Sequence
  MKO10108993_B_Plxna3
  gRNA
aggtagatgtgtcggtggtc

SEQ ID NO: 108994 - DNA, 20 bp, Artificial Sequence
  MKO10108994_B_Plxna4
  gRNA
tctctgcagatccgggttga

SEQ ID NO: 108995 - DNA, 20 bp, Artificial Sequence
  MKO10108995_B_Plxna4
  gRNA
cctggatatgaatgctcctc

SEQ ID NO: 108996 - DNA, 20 bp, Artificial Sequence
  MKO10108996_B_Plxna4
  gRNA
caagacactcgccacagctc

SEQ ID NO: 108997 - DNA, 20 bp, Artificial Sequence
  MKO10108997_B_Plxnb1
  gRNA
ttcttcttaggtgtagtcgc

SEQ ID NO: 108998 - DNA, 20 bp, Artificial Sequence
  MKO10108998_B_Plxnb1
  gRNA
tttggaagccacgccaattc

SEQ ID NO: 108999 - DNA, 20 bp, Artificial Sequence
  MKO10108999_B_Plxnb1
  gRNA
ttgcggatggtgtgtgctcc

SEQ ID NO: 109000 - DNA, 20 bp, Artificial Sequence
  MKO10109000_B_Plxnb2
  gRNA
tgcccaggaacgcaacagtg

SEQ ID NO: 109001 - DNA, 20 bp, Artificial Sequence
  MKO10109001_B_Plxnb2
  gRNA
gcacctctccttgggcccgc

SEQ ID NO: 109002 - DNA, 20 bp, Artificial Sequence
  MKO10109002_B_Plxnb2
  gRNA
ttcctcggcccgtgagcact

SEQ ID NO: 109003 - DNA, 20 bp, Artificial Sequence
  MKO10109003_B_Plxnb3
  gRNA
tcccccgagtcatacccctg

SEQ ID NO: 109004 - DNA, 20 bp, Artificial Sequence
  MKO10109004_B_Plxnb3
  gRNA
caggggttggcggcctgcga

SEQ ID NO: 109005 - DNA, 20 bp, Artificial Sequence
  MKO10109005_B_Plxnb3
  gRNA
gacaggctgccacaagtatc

SEQ ID NO: 109006 - DNA, 20 bp, Artificial Sequence
  MKO10109006_B_Plxnc1
  gRNA
ggaacgagcttgtagaacac

SEQ ID NO: 109007 - DNA, 20 bp, Artificial Sequence
  MKO10109007_B_Plxnc1
  gRNA
cggagatggccagttactga

SEQ ID NO: 109008 - DNA, 20 bp, Artificial Sequence
  MKO10109008_B_Plxnc1
  gRNA
atctacatctacctaacagc

SEQ ID NO: 109009 - DNA, 20 bp, Artificial Sequence
  MKO10109009_B_Plxnd1
  gRNA
cgtcatgcagtttgacccca

SEQ ID NO: 109010 - DNA, 20 bp, Artificial Sequence
  MKO10109010_B_Plxnd1
  gRNA
ggtgcggccgatgcctactg

SEQ ID NO: 109011 - DNA, 20 bp, Artificial Sequence
  MKO10109011_B_Plxnd1
  gRNA
cctacagatggcccgagtga

SEQ ID NO: 109012 - DNA, 20 bp, Artificial Sequence
  MKO10109012_B_Pm20d1
  gRNA
ggctgtagtttctgatcaac

SEQ ID NO: 109013 - DNA, 20 bp, Artificial Sequence
  MKO10109013_B_Pm20d1
  gRNA
gaagatctcagcactcttac

SEQ ID NO: 109014 - DNA, 20 bp, Artificial Sequence
  MKO10109014_B_Pm20d1
  gRNA
ggcggcttacctcctcatca

SEQ ID NO: 109015 - DNA, 20 bp, Artificial Sequence
  MKO10109015_B_Pm20d2
  gRNA
ctcacgctgccgcttaccct

SEQ ID NO: 109016 - DNA, 20 bp, Artificial Sequence
  MKO10109016_B_Pm20d2
  gRNA
cactcgtgctcggccacatc

SEQ ID NO: 109017 - DNA, 20 bp, Artificial Sequence
  MKO10109017_B_Pm20d2
  gRNA
gcttcaagttctgaccaaaa

SEQ ID NO: 109018 - DNA, 20 bp, Artificial Sequence
  MKO10109018_B_Pmaip1
  gRNA
aggacgagtgtgctcaactc

SEQ ID NO: 109019 - DNA, 20 bp, Artificial Sequence
  MKO10109019_B_Pmaip1
  gRNA
accggacataactgtggttc

SEQ ID NO: 109020 - DNA, 20 bp, Artificial Sequence
  MKO10109020_B_Pmaip1
  gRNA
ggttactaaattgaagagct

SEQ ID NO: 109021 - DNA, 20 bp, Artificial Sequence
  MKO10109021_B_Pmch
  gRNA
caatacaaaaacgacgagag

SEQ ID NO: 109022 - DNA, 20 bp, Artificial Sequence
  MKO10109022_B_Pmch
  gRNA
aaaccttacctcgctctgaa

SEQ ID NO: 109023 - DNA, 20 bp, Artificial Sequence
  MKO10109023_B_Pmch
  gRNA
aggtatcagacttgccaaca

SEQ ID NO: 109024 - DNA, 20 bp, Artificial Sequence
  MKO10109024_B_Pmel
  gRNA
cattaatgatgggcctacac

SEQ ID NO: 109025 - DNA, 20 bp, Artificial Sequence
  MKO10109025_B_Pmel
  gRNA
acaggcagctgtaccccgag

SEQ ID NO: 109026 - DNA, 20 bp, Artificial Sequence
  MKO10109026_B_Pmel
  gRNA
gtccaggctgagcattgcta

SEQ ID NO: 109027 - DNA, 20 bp, Artificial Sequence
  MKO10109027_B_Pmepa1
  gRNA
gcgctggcagttgcacgcgc

SEQ ID NO: 109028 - DNA, 20 bp, Artificial Sequence
  MKO10109028_B_Pmepa1
  gRNA
gcagggcaatttcgtgctgc

SEQ ID NO: 109029 - DNA, 20 bp, Artificial Sequence
  MKO10109029_B_Pmepa1
  gRNA
ccctcagagagtacggtgtc

SEQ ID NO: 109030 - DNA, 20 bp, Artificial Sequence
  MKO10109030_B_Pmf1
  gRNA
cttccaccagttgaaccctg

SEQ ID NO: 109031 - DNA, 20 bp, Artificial Sequence
  MKO10109031_B_Pmf1
  gRNA
cttcttctatgatcttatcc

SEQ ID NO: 109032 - DNA, 20 bp, Artificial Sequence
  MKO10109032_B_Pmf1
  gRNA
agaagctgtcctgaactccc

SEQ ID NO: 109033 - DNA, 20 bp, Artificial Sequence
  MKO10109033_B_Pmfbp1
  gRNA
ctaacaggtcattctctacg

SEQ ID NO: 109034 - DNA, 20 bp, Artificial Sequence
  MKO10109034_B_Pmfbp1
  gRNA
gaagtgtagattcgaacctt

SEQ ID NO: 109035 - DNA, 20 bp, Artificial Sequence
  MKO10109035_B_Pmfbp1
  gRNA
gatggtattgcttattgacc

SEQ ID NO: 109036 - DNA, 20 bp, Artificial Sequence
  MKO10109036_B_Pml
  gRNA
tggatctccctgtcgacaac

SEQ ID NO: 109037 - DNA, 20 bp, Artificial Sequence
  MKO10109037_B_Pml
  gRNA
agctgctcactgaattgtcg

SEQ ID NO: 109038 - DNA, 20 bp, Artificial Sequence
  MKO10109038_B_Pml
  gRNA
ggcagagtcctgttgtcgac

SEQ ID NO: 109039 - DNA, 20 bp, Artificial Sequence
  MKO10109039_B_Pmm1
  gRNA
tcctgcagaagctacgaagc

SEQ ID NO: 109040 - DNA, 20 bp, Artificial Sequence
  MKO10109040_B_Pmm1
  gRNA
agaagttgatcaagtcctgc

SEQ ID NO: 109041 - DNA, 20 bp, Artificial Sequence
  MKO10109041_B_Pmm1
  gRNA
cagtgcagtataaacacgga

SEQ ID NO: 109042 - DNA, 20 bp, Artificial Sequence
  MKO10109042_B_Pmm2
  gRNA
cccacctaccactccaattt

SEQ ID NO: 109043 - DNA, 20 bp, Artificial Sequence
  MKO10109043_B_Pmm2
  gRNA
acacattcaacatgccattt

SEQ ID NO: 109044 - DNA, 20 bp, Artificial Sequence
  MKO10109044_B_Pmm2
  gRNA
atggctttctacaaaaattg

SEQ ID NO: 109045 - DNA, 20 bp, Artificial Sequence
  MKO10109045_B_Pmp22
  gRNA
gaactgtaccacatccgcct

SEQ ID NO: 109046 - DNA, 20 bp, Artificial Sequence
  MKO10109046_B_Pmp22
  gRNA
cgcctcattcgcgtttccgc

SEQ ID NO: 109047 - DNA, 20 bp, Artificial Sequence
  MKO10109047_B_Pmp22
  gRNA
atggacacacgactgatctc

SEQ ID NO: 109048 - DNA, 20 bp, Artificial Sequence
  MKO10109048_B_Pmp2
  gRNA
gtagtcatcgaagtgctcac

SEQ ID NO: 109049 - DNA, 20 bp, Artificial Sequence
  MKO10109049_B_Pmp2
  gRNA
tttgtagagcatcgtgacac

SEQ ID NO: 109050 - DNA, 20 bp, Artificial Sequence
  MKO10109050_B_Pmp2
  gRNA
acaatgagcaacaaattcct

SEQ ID NO: 109051 - DNA, 20 bp, Artificial Sequence
  MKO10109051_B_Pmpca
  gRNA
tatgaagcgaaatatcttag

SEQ ID NO: 109052 - DNA, 20 bp, Artificial Sequence
  MKO10109052_B_Pmpca
  gRNA
ccatcaactgttgcaaaaat

SEQ ID NO: 109053 - DNA, 20 bp, Artificial Sequence
  MKO10109053_B_Pmpca
  gRNA
tgaaaccaaagttaccactc

SEQ ID NO: 109054 - DNA, 20 bp, Artificial Sequence
  MKO10109054_B_Pmpcb
  gRNA
ttctcgagagatttgcccag

SEQ ID NO: 109055 - DNA, 20 bp, Artificial Sequence
  MKO10109055_B_Pmpcb
  gRNA
gcctatcaaaatactgcact

SEQ ID NO: 109056 - DNA, 20 bp, Artificial Sequence
  MKO10109056_B_Pmpcb
  gRNA
aaaaacaacttcttgcaagt

SEQ ID NO: 109057 - DNA, 20 bp, Artificial Sequence
  MKO10109057_B_Pms1
  gRNA
tagtacttcactgccattac

SEQ ID NO: 109058 - DNA, 20 bp, Artificial Sequence
  MKO10109058_B_Pms1
  gRNA
atggctctaatgtcggttct

SEQ ID NO: 109059 - DNA, 20 bp, Artificial Sequence
  MKO10109059_B_Pms1
  gRNA
acaaaagtaatcctcacatc

SEQ ID NO: 109060 - DNA, 20 bp, Artificial Sequence
  MKO10109060_B_Pms2
  gRNA
caaaagtttcaacctgcgtg

SEQ ID NO: 109061 - DNA, 20 bp, Artificial Sequence
  MKO10109061_B_Pms2
  gRNA
cagtttaagcaccgctgtga

SEQ ID NO: 109062 - DNA, 20 bp, Artificial Sequence
  MKO10109062_B_Pms2
  gRNA
cttcccatcaataggcttga

SEQ ID NO: 109063 - DNA, 20 bp, Artificial Sequence
  MKO10109063_B_Pmvk
  gRNA
gatacagacagtccgagtag

SEQ ID NO: 109064 - DNA, 20 bp, Artificial Sequence
  MKO10109064_B_Pmvk
  gRNA
cggagcagagtcgacagcaa

SEQ ID NO: 109065 - DNA, 20 bp, Artificial Sequence
  MKO10109065_B_Pmvk
  gRNA
ccacggagatgagcagtgcc

SEQ ID NO: 109066 - DNA, 20 bp, Artificial Sequence
  MKO10109066_B_Pnck
  gRNA
cctcaaaaggtgtggcatag

SEQ ID NO: 109067 - DNA, 20 bp, Artificial Sequence
  MKO10109067_B_Pnck
  gRNA
ccgcgatctcattctccacc

SEQ ID NO: 109068 - DNA, 20 bp, Artificial Sequence
  MKO10109068_B_Pnck
  gRNA
atacaagctggcaacatgct

SEQ ID NO: 109069 - DNA, 20 bp, Artificial Sequence
  MKO10109069_B_Pnkd
  gRNA
tgcgcgtcatgaggaggccg

SEQ ID NO: 109070 - DNA, 20 bp, Artificial Sequence
  MKO10109070_B_Pnkd
  gRNA
aactcaccaggctagcccca

SEQ ID NO: 109071 - DNA, 20 bp, Artificial Sequence
  MKO10109071_B_Pnkd
  gRNA
tcattcacagggatcctctc

SEQ ID NO: 109072 - DNA, 20 bp, Artificial Sequence
  MKO10109072_B_Pnkp
  gRNA
tgctgagctcttcccaacgc

SEQ ID NO: 109073 - DNA, 20 bp, Artificial Sequence
  MKO10109073_B_Pnkp
  gRNA
gctggctgctgaaggctaca

SEQ ID NO: 109074 - DNA, 20 bp, Artificial Sequence
  MKO10109074_B_Pnkp
  gRNA
tgattgcagaccctgaaagc

SEQ ID NO: 109075 - DNA, 20 bp, Artificial Sequence
  MKO10109075_B_Pnldc1
  gRNA
taaactgctgaacactctgc

SEQ ID NO: 109076 - DNA, 20 bp, Artificial Sequence
  MKO10109076_B_Pnldc1
  gRNA
gtaattagtacctgatctgt

SEQ ID NO: 109077 - DNA, 20 bp, Artificial Sequence
  MKO10109077_B_Pnldc1
  gRNA
gtcttcagataccactcaga

SEQ ID NO: 109078 - DNA, 20 bp, Artificial Sequence
  MKO10109078_B_Pnliprp1
  gRNA
ttctgacccatcgaccattg

SEQ ID NO: 109079 - DNA, 20 bp, Artificial Sequence
  MKO10109079_B_Pnliprp1
  gRNA
ggcccctaaaacttctccct

SEQ ID NO: 109080 - DNA, 20 bp, Artificial Sequence
  MKO10109080_B_Pnliprp1
  gRNA
gaagcaggaagtcggactcc

SEQ ID NO: 109081 - DNA, 20 bp, Artificial Sequence
  MKO10109081_B_Pnliprp2
  gRNA
ccagagaacgtgcacctcat

SEQ ID NO: 109082 - DNA, 20 bp, Artificial Sequence
  MKO10109082_B_Pnliprp2
  gRNA
gggcgctgagattgccttct

SEQ ID NO: 109083 - DNA, 20 bp, Artificial Sequence
  MKO10109083_B_Pnliprp2
  gRNA
gcccacgacccgagtgttgt

SEQ ID NO: 109084 - DNA, 20 bp, Artificial Sequence
  MKO10109084_B_Pnlip
  gRNA
ctcccttgtcgatgaagccg

SEQ ID NO: 109085 - DNA, 20 bp, Artificial Sequence
  MKO10109085_B_Pnlip
  gRNA
cttaacaatgtccacctgat

SEQ ID NO: 109086 - DNA, 20 bp, Artificial Sequence
  MKO10109086_B_Pnlip
  gRNA
cgagaatccagacaactacc

SEQ ID NO: 109087 - DNA, 20 bp, Artificial Sequence
  MKO10109087_B_Pnma1
  gRNA
tagctgcaagagggcggcct

SEQ ID NO: 109088 - DNA, 20 bp, Artificial Sequence
  MKO10109088_B_Pnma1
  gRNA
caagatgttgctcgtgtgct

SEQ ID NO: 109089 - DNA, 20 bp, Artificial Sequence
  MKO10109089_B_Pnma1
  gRNA
cctccaagctgcgatgcccc

SEQ ID NO: 109090 - DNA, 20 bp, Artificial Sequence
  MKO10109090_B_Pnma2
  gRNA
tcttacaccactcctccagc

SEQ ID NO: 109091 - DNA, 20 bp, Artificial Sequence
  MKO10109091_B_Pnma2
  gRNA
gttgacattccggtggactg

SEQ ID NO: 109092 - DNA, 20 bp, Artificial Sequence
  MKO10109092_B_Pnma2
  gRNA
aaatctcagcctacgtgctc

SEQ ID NO: 109093 - DNA, 20 bp, Artificial Sequence
  MKO10109093_B_Pnma3
  gRNA
caataaccctgggattgata

SEQ ID NO: 109094 - DNA, 20 bp, Artificial Sequence
  MKO10109094_B_Pnma3
  gRNA
ccccacctaaaattcgtttc

SEQ ID NO: 109095 - DNA, 20 bp, Artificial Sequence
  MKO10109095_B_Pnma3
  gRNA
acgtgcaagttccaccaaaa

SEQ ID NO: 109096 - DNA, 20 bp, Artificial Sequence
  MKO10109096_B_Pnma5
  gRNA
tctcaagcacgtcttatctc

SEQ ID NO: 109097 - DNA, 20 bp, Artificial Sequence
  MKO10109097_B_Pnma5
  gRNA
ccgtggctctattagatgac

SEQ ID NO: 109098 - DNA, 20 bp, Artificial Sequence
  MKO10109098_B_Pnma5
  gRNA
tcaagcactgctccacggtt

SEQ ID NO: 109099 - DNA, 20 bp, Artificial Sequence
  MKO10109099_B_Pnmal1
  gRNA
cgcagaccgaggaagatcgc

SEQ ID NO: 109100 - DNA, 20 bp, Artificial Sequence
  MKO10109100_B_Pnmal1
  gRNA
ctggaggtaagattcgctcc

SEQ ID NO: 109101 - DNA, 20 bp, Artificial Sequence
  MKO10109101_B_Pnmal1
  gRNA
ttgcttcttcatcccgacta

SEQ ID NO: 109102 - DNA, 20 bp, Artificial Sequence
  MKO10109102_B_Pnmal2
  gRNA
gacagcgaagagtccgaacc

SEQ ID NO: 109103 - DNA, 20 bp, Artificial Sequence
  MKO10109103_B_Pnmal2
  gRNA
tcctgatttagtcgcgctac

SEQ ID NO: 109104 - DNA, 20 bp, Artificial Sequence
  MKO10109104_B_Pnmal2
  gRNA
tctcctctatgacgataccc

SEQ ID NO: 109105 - DNA, 20 bp, Artificial Sequence
  MKO10109105_B_Pnmt
  gRNA
cactccctgtagcgtgcttc

SEQ ID NO: 109106 - DNA, 20 bp, Artificial Sequence
  MKO10109106_B_Pnmt
  gRNA
actatacacactccagtcaa

SEQ ID NO: 109107 - DNA, 20 bp, Artificial Sequence
  MKO10109107_B_Pnmt
  gRNA
gatgtcctcaaagtgggcac

SEQ ID NO: 109108 - DNA, 20 bp, Artificial Sequence
  MKO10109108_B_Pnn
  gRNA
accagaaagggccagcaatc

SEQ ID NO: 109109 - DNA, 20 bp, Artificial Sequence
  MKO10109109_B_Pnn
  gRNA
aggcgtggattctcagatag

SEQ ID NO: 109110 - DNA, 20 bp, Artificial Sequence
  MKO10109110_B_Pnn
  gRNA
ctaggctgggtggggagcgt

SEQ ID NO: 109111 - DNA, 20 bp, Artificial Sequence
  MKO10109111_B_Pno1
  gRNA
tactccgattgtagaacatt

SEQ ID NO: 109112 - DNA, 20 bp, Artificial Sequence
  MKO10109112_B_Pno1
  gRNA
gaccacctgtcaagggcaat

SEQ ID NO: 109113 - DNA, 20 bp, Artificial Sequence
  MKO10109113_B_Pno1
  gRNA
tgtcagtgccctgacaaaag

SEQ ID NO: 109114 - DNA, 20 bp, Artificial Sequence
  MKO10109114_B_Pnoc
  gRNA
gggacagctgctgaacacgc

SEQ ID NO: 109115 - DNA, 20 bp, Artificial Sequence
  MKO10109115_B_Pnoc
  gRNA
taaactcactgaaccgcttc

SEQ ID NO: 109116 - DNA, 20 bp, Artificial Sequence
  MKO10109116_B_Pnoc
  gRNA
tgagtttatgaggcagtacc

SEQ ID NO: 109117 - DNA, 20 bp, Artificial Sequence
  MKO10109117_B_Pnp2
  gRNA
ccagccagtacctgtgcttt

SEQ ID NO: 109118 - DNA, 20 bp, Artificial Sequence
  MKO10109118_B_Pnp2
  gRNA
attatgagaccactgccaag

SEQ ID NO: 109119 - DNA, 20 bp, Artificial Sequence
  MKO10109119_B_Pnp2
  gRNA
agatgtgtacctttcatcgt

SEQ ID NO: 109120 - DNA, 20 bp, Artificial Sequence
  MKO10109120_B_Pnpla1
  gRNA
cgttctctccgtccgtgact

SEQ ID NO: 109121 - DNA, 20 bp, Artificial Sequence
  MKO10109121_B_Pnpla1
  gRNA
ggtactcactcagtctccgc

SEQ ID NO: 109122 - DNA, 20 bp, Artificial Sequence
  MKO10109122_B_Pnpla1
  gRNA
tccctgcagagatacatcga

SEQ ID NO: 109123 - DNA, 20 bp, Artificial Sequence
  MKO10109123_B_Pnpla2
  gRNA
ctccgtctgaaacacgagtc

SEQ ID NO: 109124 - DNA, 20 bp, Artificial Sequence
  MKO10109124_B_Pnpla2
  gRNA
ttcctcggggtctaccacat

SEQ ID NO: 109125 - DNA, 20 bp, Artificial Sequence
  MKO10109125_B_Pnpla2
  gRNA
caatctctaccgcctctcga

SEQ ID NO: 109126 - DNA, 20 bp, Artificial Sequence
  MKO10109126_B_Pnpla3
  gRNA
tccccacagcggtacgtgga

SEQ ID NO: 109127 - DNA, 20 bp, Artificial Sequence
  MKO10109127_B_Pnpla3
  gRNA
aacacttacctcgcctcgga

SEQ ID NO: 109128 - DNA, 20 bp, Artificial Sequence
  MKO10109128_B_Pnpla3
  gRNA
cctggacgccttccggttcc

SEQ ID NO: 109129 - DNA, 20 bp, Artificial Sequence
  MKO10109129_B_Pnpla5
  gRNA
gtgatccccccggcattcag

SEQ ID NO: 109130 - DNA, 20 bp, Artificial Sequence
  MKO10109130_B_Pnpla5
  gRNA
ctggatgaattcatcccgag

SEQ ID NO: 109131 - DNA, 20 bp, Artificial Sequence
  MKO10109131_B_Pnpla5
  gRNA
attaccgtctctcctttcaa

SEQ ID NO: 109132 - DNA, 20 bp, Artificial Sequence
  MKO10109132_B_Pnpla6
  gRNA
gactccgaccctacaacgga

SEQ ID NO: 109133 - DNA, 20 bp, Artificial Sequence
  MKO10109133_B_Pnpla6
  gRNA
caggtgctgggcgtgatgat

SEQ ID NO: 109134 - DNA, 20 bp, Artificial Sequence
  MKO10109134_B_Pnpla6
  gRNA
gcagccttcgcaccaccaag

SEQ ID NO: 109135 - DNA, 20 bp, Artificial Sequence
  MKO10109135_B_Pnpla7
  gRNA
tagggattaccatggtggac

SEQ ID NO: 109136 - DNA, 20 bp, Artificial Sequence
  MKO10109136_B_Pnpla7
  gRNA
tgcagaggtattcccaacca

SEQ ID NO: 109137 - DNA, 20 bp, Artificial Sequence
  MKO10109137_B_Pnpla7
  gRNA
gaccacactcccccatacct

SEQ ID NO: 109138 - DNA, 20 bp, Artificial Sequence
  MKO10109138_B_Pnpla8
  gRNA
accctagtaatacagagctt

SEQ ID NO: 109139 - DNA, 20 bp, Artificial Sequence
  MKO10109139_B_Pnpla8
  gRNA
catgccgctggatgaatgtg

SEQ ID NO: 109140 - DNA, 20 bp, Artificial Sequence
  MKO10109140_B_Pnpla8
  gRNA
cagaactcgagccttagttc

SEQ ID NO: 109141 - DNA, 20 bp, Artificial Sequence
  MKO10109141_B_Pnpo
  gRNA
ctgaacagcctcgtcaaacc

SEQ ID NO: 109142 - DNA, 20 bp, Artificial Sequence
  MKO10109142_B_Pnpo
  gRNA
tctcgtagttagtgaagaag

SEQ ID NO: 109143 - DNA, 20 bp, Artificial Sequence
  MKO10109143_B_Pnpo
  gRNA
gactgaccacagccccaatc

SEQ ID NO: 109144 - DNA, 20 bp, Artificial Sequence
  MKO10109144_B_Pnpt1
  gRNA
ctcccttctaaggtagtttg

SEQ ID NO: 109145 - DNA, 20 bp, Artificial Sequence
  MKO10109145_B_Pnpt1
  gRNA
attcgccctctctttccagc

SEQ ID NO: 109146 - DNA, 20 bp, Artificial Sequence
  MKO10109146_B_Pnpt1
  gRNA
ctgagtatcataaaaatagc

SEQ ID NO: 109147 - DNA, 20 bp, Artificial Sequence
  MKO10109147_B_Pnp
  gRNA
ccagccagtacctgtgcttt

SEQ ID NO: 109148 - DNA, 20 bp, Artificial Sequence
  MKO10109148_B_Pnp
  gRNA
attatgagaccactgccaag

SEQ ID NO: 109149 - DNA, 20 bp, Artificial Sequence
  MKO10109149_B_Pnp
  gRNA
agatgtgtacctttcatcgt

SEQ ID NO: 109150 - DNA, 20 bp, Artificial Sequence
  MKO10109150_B_Pnrc1
  gRNA
tcccaaagcctccgagtcac

SEQ ID NO: 109151 - DNA, 20 bp, Artificial Sequence
  MKO10109151_B_Pnrc1
  gRNA
ggaacccgagcggcgctaag

SEQ ID NO: 109152 - DNA, 20 bp, Artificial Sequence
  MKO10109152_B_Pnrc1
  gRNA
gccggggccaatcgtcgcgc

SEQ ID NO: 109153 - DNA, 20 bp, Artificial Sequence
  MKO10109153_B_Pnrc2
  gRNA
caagctagtcagaactatgc

SEQ ID NO: 109154 - DNA, 20 bp, Artificial Sequence
  MKO10109154_B_Pnrc2
  gRNA
ttactagcatttctagattg

SEQ ID NO: 109155 - DNA, 20 bp, Artificial Sequence
  MKO10109155_B_Pnrc2
  gRNA
ttatacctgtaccttaagta

SEQ ID NO: 109156 - DNA, 20 bp, Artificial Sequence
  MKO10109156_B_Poc1a
  gRNA
gagacaagactgttcgcatc

SEQ ID NO: 109157 - DNA, 20 bp, Artificial Sequence
  MKO10109157_B_Poc1a
  gRNA
agtgtccacttctgcagcga

SEQ ID NO: 109158 - DNA, 20 bp, Artificial Sequence
  MKO10109158_B_Poc1a
  gRNA
cccagttgatgtgctgggtc

SEQ ID NO: 109159 - DNA, 20 bp, Artificial Sequence
  MKO10109159_B_Poc1b
  gRNA
cccagtgtgtgtgtcgatac

SEQ ID NO: 109160 - DNA, 20 bp, Artificial Sequence
  MKO10109160_B_Poc1b
  gRNA
gaaaagtccacactccgaac

SEQ ID NO: 109161 - DNA, 20 bp, Artificial Sequence
  MKO10109161_B_Poc1b
  gRNA
gaggctaataggtttccttg

SEQ ID NO: 109162 - DNA, 20 bp, Artificial Sequence
  MKO10109162_B_Poc5
  gRNA
tgaggcataccagctagcgt

SEQ ID NO: 109163 - DNA, 20 bp, Artificial Sequence
  MKO10109163_B_Poc5
  gRNA
ccctgtaagagacactgaac

SEQ ID NO: 109164 - DNA, 20 bp, Artificial Sequence
  MKO10109164_B_Poc5
  gRNA
gagctgaaaaagtccatgac

SEQ ID NO: 109165 - DNA, 20 bp, Artificial Sequence
  MKO10109165_B_Podnl1
  gRNA
tgtaggggagctcccgaagc

SEQ ID NO: 109166 - DNA, 20 bp, Artificial Sequence
  MKO10109166_B_Podnl1
  gRNA
ctaacgaccactttagcatc

SEQ ID NO: 109167 - DNA, 20 bp, Artificial Sequence
  MKO10109167_B_Podnl1
  gRNA
ccacatagaagttctctagc

SEQ ID NO: 109168 - DNA, 20 bp, Artificial Sequence
  MKO10109168_B_Podn
  gRNA
ctgctagcttgttgttatgc

SEQ ID NO: 109169 - DNA, 20 bp, Artificial Sequence
  MKO10109169_B_Podn
  gRNA
ctgccggaccacatgttcaa

SEQ ID NO: 109170 - DNA, 20 bp, Artificial Sequence
  MKO10109170_B_Podn
  gRNA
tagcctcaattacctgtacc

SEQ ID NO: 109171 - DNA, 20 bp, Artificial Sequence
  MKO10109171_B_Podxl2
  gRNA
gtgggagcagctgacttcga

SEQ ID NO: 109172 - DNA, 20 bp, Artificial Sequence
  MKO10109172_B_Podxl2
  gRNA
gggactacggctcctagctc

SEQ ID NO: 109173 - DNA, 20 bp, Artificial Sequence
  MKO10109173_B_Podxl2
  gRNA
tctcgcacaggtgatctgca

SEQ ID NO: 109174 - DNA, 20 bp, Artificial Sequence
  MKO10109174_B_Podxl
  gRNA
cgggagtcccattagagatg

SEQ ID NO: 109175 - DNA, 20 bp, Artificial Sequence
  MKO10109175_B_Podxl
  gRNA
agaataaggagttcctcatc

SEQ ID NO: 109176 - DNA, 20 bp, Artificial Sequence
  MKO10109176_B_Podxl
  gRNA
taaactgtgaacctcccata

SEQ ID NO: 109177 - DNA, 20 bp, Artificial Sequence
  MKO10109177_B_Pof1b
  gRNA
catagtacaaaaccctgaac

SEQ ID NO: 109178 - DNA, 20 bp, Artificial Sequence
  MKO10109178_B_Pof1b
  gRNA
aattgacttcctcttaggaa

SEQ ID NO: 109179 - DNA, 20 bp, Artificial Sequence
  MKO10109179_B_Pof1b
  gRNA
ccattgtctcctttcctaag

SEQ ID NO: 109180 - DNA, 20 bp, Artificial Sequence
  MKO10109180_B_Pofut1
  gRNA
gcgagtggcatactgctttg

SEQ ID NO: 109181 - DNA, 20 bp, Artificial Sequence
  MKO10109181_B_Pofut1
  gRNA
gaagctgctgaaccgcacct

SEQ ID NO: 109182 - DNA, 20 bp, Artificial Sequence
  MKO10109182_B_Pofut1
  gRNA
tcagcagcttcgcaaatgcc

SEQ ID NO: 109183 - DNA, 20 bp, Artificial Sequence
  MKO10109183_B_Pofut2
  gRNA
tccgcagggatgtctatatc

SEQ ID NO: 109184 - DNA, 20 bp, Artificial Sequence
  MKO10109184_B_Pofut2
  gRNA
gtgctagtcctgcccccgtg

SEQ ID NO: 109185 - DNA, 20 bp, Artificial Sequence
  MKO10109185_B_Pofut2
  gRNA
tgtctcctgcctgtccgtcc

SEQ ID NO: 109186 - DNA, 20 bp, Artificial Sequence
  MKO10109186_B_Pogk
  gRNA
ccaagccagatatgatcaat

SEQ ID NO: 109187 - DNA, 20 bp, Artificial Sequence
  MKO10109187_B_Pogk
  gRNA
ggtaccagctctatttgatg

SEQ ID NO: 109188 - DNA, 20 bp, Artificial Sequence
  MKO10109188_B_Pogk
  gRNA
tcaaattcagagggtaggcc

SEQ ID NO: 109189 - DNA, 20 bp, Artificial Sequence
  MKO10109189_B_Poglut1
  gRNA
catccatcgcctccctgaca

SEQ ID NO: 109190 - DNA, 20 bp, Artificial Sequence
  MKO10109190_B_Poglut1
  gRNA
acctgactcctttccgaggt

SEQ ID NO: 109191 - DNA, 20 bp, Artificial Sequence
  MKO10109191_B_Poglut1
  gRNA
tctccaaagccctgttaatt

SEQ ID NO: 109192 - DNA, 20 bp, Artificial Sequence
  MKO10109192_B_Pogz
  gRNA
atcccacttaccattgttgt

SEQ ID NO: 109193 - DNA, 20 bp, Artificial Sequence
  MKO10109193_B_Pogz
  gRNA
attgtgctgaacgtacagca

SEQ ID NO: 109194 - DNA, 20 bp, Artificial Sequence
  MKO10109194_B_Pogz
  gRNA
cccactgttactaacagtag

SEQ ID NO: 109195 - DNA, 20 bp, Artificial Sequence
  MKO10109195_B_Pola1
  gRNA
ttcagatgggataggctatg

SEQ ID NO: 109196 - DNA, 20 bp, Artificial Sequence
  MKO10109196_B_Pola1
  gRNA
tgtcaagtgcatcatcctca

SEQ ID NO: 109197 - DNA, 20 bp, Artificial Sequence
  MKO10109197_B_Pola1
  gRNA
tttccagctgtgtcagattc

SEQ ID NO: 109198 - DNA, 20 bp, Artificial Sequence
  MKO10109198_B_Pola2
  gRNA
gggactcacgtttctccaac

SEQ ID NO: 109199 - DNA, 20 bp, Artificial Sequence
  MKO10109199_B_Pola2
  gRNA
catgttcaccttagagggtg

SEQ ID NO: 109200 - DNA, 20 bp, Artificial Sequence
  MKO10109200_B_Pola2
  gRNA
tcctgcatgcccactgtctt

SEQ ID NO: 109201 - DNA, 20 bp, Artificial Sequence
  MKO10109201_B_Polb
  gRNA
aatttcctgactcgagttac

SEQ ID NO: 109202 - DNA, 20 bp, Artificial Sequence
  MKO10109202_B_Polb
  gRNA
aaaattgcgtaaactggaaa

SEQ ID NO: 109203 - DNA, 20 bp, Artificial Sequence
  MKO10109203_B_Polb
  gRNA
tacccacacaaaatcaagag

SEQ ID NO: 109204 - DNA, 20 bp, Artificial Sequence
  MKO10109204_B_Pold1
  gRNA
gcctttggggtcaccgatga

SEQ ID NO: 109205 - DNA, 20 bp, Artificial Sequence
  MKO10109205_B_Pold1
  gRNA
agagctccttcccaccgcgc

SEQ ID NO: 109206 - DNA, 20 bp, Artificial Sequence
  MKO10109206_B_Pold1
  gRNA
agggggcaaagccctgtatg

SEQ ID NO: 109207 - DNA, 20 bp, Artificial Sequence
  MKO10109207_B_Pold2
  gRNA
cctcctcgctgatctcccgc

SEQ ID NO: 109208 - DNA, 20 bp, Artificial Sequence
  MKO10109208_B_Pold2
  gRNA
cctttccccaggaacggtct

SEQ ID NO: 109209 - DNA, 20 bp, Artificial Sequence
  MKO10109209_B_Pold2
  gRNA
tccggactgggcctgggcgg

SEQ ID NO: 109210 - DNA, 20 bp, Artificial Sequence
  MKO10109210_B_Pold3
  gRNA
aatgaacttactgtttggcc

SEQ ID NO: 109211 - DNA, 20 bp, Artificial Sequence
  MKO10109211_B_Pold3
  gRNA
ctctcactactgcaaccttg

SEQ ID NO: 109212 - DNA, 20 bp, Artificial Sequence
  MKO10109212_B_Pold3
  gRNA
agtagtgagagaagataaac

SEQ ID NO: 109213 - DNA, 20 bp, Artificial Sequence
  MKO10109213_B_Pold4
  gRNA
tttgacctggcctggcagta

SEQ ID NO: 109214 - DNA, 20 bp, Artificial Sequence
  MKO10109214_B_Pold4
  gRNA
cctgacctgcattggaagtg

SEQ ID NO: 109215 - DNA, 20 bp, Artificial Sequence
  MKO10109215_B_Pold4
  gRNA
aagaccctcacttccaatgc

SEQ ID NO: 109216 - DNA, 20 bp, Artificial Sequence
  MKO10109216_B_Poldip2
  gRNA
ctcggtagccaaaaacacta

SEQ ID NO: 109217 - DNA, 20 bp, Artificial Sequence
  MKO10109217_B_Poldip2
  gRNA
gaggggtcgtcctgtttccc

SEQ ID NO: 109218 - DNA, 20 bp, Artificial Sequence
  MKO10109218_B_Poldip2
  gRNA
ttactatatgtgggcagtca

SEQ ID NO: 109219 - DNA, 20 bp, Artificial Sequence
  MKO10109219_B_Poldip3
  gRNA
ctctcagaacttgtatgacc

SEQ ID NO: 109220 - DNA, 20 bp, Artificial Sequence
  MKO10109220_B_Poldip3
  gRNA
caatgttgtcaataaccacc

SEQ ID NO: 109221 - DNA, 20 bp, Artificial Sequence
  MKO10109221_B_Poldip3
  gRNA
ggcataccatgtggtgaaca

SEQ ID NO: 109222 - DNA, 20 bp, Artificial Sequence
  MKO10109222_B_Pole2
  gRNA
atagcgttcaagatacagct

SEQ ID NO: 109223 - DNA, 20 bp, Artificial Sequence
  MKO10109223_B_Pole2
  gRNA
ctgcatcgatgatctttcct

SEQ ID NO: 109224 - DNA, 20 bp, Artificial Sequence
  MKO10109224_B_Pole2
  gRNA
gctccaattcagtgacagac

SEQ ID NO: 109225 - DNA, 20 bp, Artificial Sequence
  MKO10109225_B_Pole3
  gRNA
cgaggacgaccagaacgaag

SEQ ID NO: 109226 - DNA, 20 bp, Artificial Sequence
  MKO10109226_B_Pole3
  gRNA
cttccttacagcgtacaggc

SEQ ID NO: 109227 - DNA, 20 bp, Artificial Sequence
  MKO10109227_B_Pole3
  gRNA
ccattgaaagaagctctaga

SEQ ID NO: 109228 - DNA, 20 bp, Artificial Sequence
  MKO10109228_B_Pole4
  gRNA
ctctacccaaatctctcctc

SEQ ID NO: 109229 - DNA, 20 bp, Artificial Sequence
  MKO10109229_B_Pole4
  gRNA
agataatgcaatagaagctg

SEQ ID NO: 109230 - DNA, 20 bp, Artificial Sequence
  MKO10109230_B_Pole4
  gRNA
caagccccgacgagtgcacc

SEQ ID NO: 109231 - DNA, 20 bp, Artificial Sequence
  MKO10109231_B_Pole
  gRNA
tttctacattgcagcgagaa

SEQ ID NO: 109232 - DNA, 20 bp, Artificial Sequence
  MKO10109232_B_Pole
  gRNA
taccaagtccagatcttctt

SEQ ID NO: 109233 - DNA, 20 bp, Artificial Sequence
  MKO10109233_B_Pole
  gRNA
tactacttcattcaagatga

SEQ ID NO: 109234 - DNA, 20 bp, Artificial Sequence
  MKO10109234_B_Polg2
  gRNA
ggagcactatgttaattgcc

SEQ ID NO: 109235 - DNA, 20 bp, Artificial Sequence
  MKO10109235_B_Polg2
  gRNA
cttcagcagcgctgattgtc

SEQ ID NO: 109236 - DNA, 20 bp, Artificial Sequence
  MKO10109236_B_Polg2
  gRNA
tgtatcgtagacacatttcc

SEQ ID NO: 109237 - DNA, 20 bp, Artificial Sequence
  MKO10109237_B_Polg
  gRNA
agtactgcgcccgtgatgtg

SEQ ID NO: 109238 - DNA, 20 bp, Artificial Sequence
  MKO10109238_B_Polg
  gRNA
tagtatcgagaaaacgcatc

SEQ ID NO: 109239 - DNA, 20 bp, Artificial Sequence
  MKO10109239_B_Polg
  gRNA
cctttgacgaacagctcccg

SEQ ID NO: 109240 - DNA, 20 bp, Artificial Sequence
  MKO10109240_B_Polh
  gRNA
gttatgtccagatcttctcc

SEQ ID NO: 109241 - DNA, 20 bp, Artificial Sequence
  MKO10109241_B_Polh
  gRNA
tgaacgtgccagcatcgatg

SEQ ID NO: 109242 - DNA, 20 bp, Artificial Sequence
  MKO10109242_B_Polh
  gRNA
taagcccaaccgccaaaccc

SEQ ID NO: 109243 - DNA, 20 bp, Artificial Sequence
  MKO10109243_B_Poli
  gRNA
gctcacaggctgcgccggag

SEQ ID NO: 109244 - DNA, 20 bp, Artificial Sequence
  MKO10109244_B_Poli
  gRNA
actgacggaacctcctcact

SEQ ID NO: 109245 - DNA, 20 bp, Artificial Sequence
  MKO10109245_B_Poli
  gRNA
gttccgtcagtgactgtgtt

SEQ ID NO: 109246 - DNA, 20 bp, Artificial Sequence
  MKO10109246_B_Polk
  gRNA
gtgctgtgttatattcaagt

SEQ ID NO: 109247 - DNA, 20 bp, Artificial Sequence
  MKO10109247_B_Polk
  gRNA
taccatagttcatgttgaca

SEQ ID NO: 109248 - DNA, 20 bp, Artificial Sequence
  MKO10109248_B_Polk
  gRNA
atgggtttatccttcagttc

SEQ ID NO: 109249 - DNA, 20 bp, Artificial Sequence
  MKO10109249_B_Poll
  gRNA
ggggtagtgcccagtgatca

SEQ ID NO: 109250 - DNA, 20 bp, Artificial Sequence
  MKO10109250_B_Poll
  gRNA
tgacctgatggtaccacatc

SEQ ID NO: 109251 - DNA, 20 bp, Artificial Sequence
  MKO10109251_B_Poll
  gRNA
gcagatctgctgagctaacc

SEQ ID NO: 109252 - DNA, 20 bp, Artificial Sequence
  MKO10109252_B_Polm
  gRNA
aacaagtccgttgctcagaa

SEQ ID NO: 109253 - DNA, 20 bp, Artificial Sequence
  MKO10109253_B_Polm
  gRNA
catcacgcaccttcatggtc

SEQ ID NO: 109254 - DNA, 20 bp, Artificial Sequence
  MKO10109254_B_Polm
  gRNA
gatggaagggacctcagcca

SEQ ID NO: 109255 - DNA, 20 bp, Artificial Sequence
  MKO10109255_B_Poln
  gRNA
gactcaatcactaggaacaa

SEQ ID NO: 109256 - DNA, 20 bp, Artificial Sequence
  MKO10109256_B_Poln
  gRNA
aagcacatagtctatttgtc

SEQ ID NO: 109257 - DNA, 20 bp, Artificial Sequence
  MKO10109257_B_Poln
  gRNA
gctttaacttgtactgttaa

SEQ ID NO: 109258 - DNA, 20 bp, Artificial Sequence
  MKO10109258_B_Polq
  gRNA
ccaagacgtgaccaagcaaa

SEQ ID NO: 109259 - DNA, 20 bp, Artificial Sequence
  MKO10109259_B_Polq
  gRNA
ggagaactgtcccgttggtg

SEQ ID NO: 109260 - DNA, 20 bp, Artificial Sequence
  MKO10109260_B_Polq
  gRNA
gtgtaagaaagatgttcgaa

SEQ ID NO: 109261 - DNA, 20 bp, Artificial Sequence
  MKO10109261_B_Polr1a
  gRNA
gcaaacttgtcgctcagttc

SEQ ID NO: 109262 - DNA, 20 bp, Artificial Sequence
  MKO10109262_B_Polr1a
  gRNA
agcttgagcgaattctcagc

SEQ ID NO: 109263 - DNA, 20 bp, Artificial Sequence
  MKO10109263_B_Polr1a
  gRNA
taactcttcttgaatttcga

SEQ ID NO: 109264 - DNA, 20 bp, Artificial Sequence
  MKO10109264_B_Polr1b
  gRNA
atttccccatcgccatggta

SEQ ID NO: 109265 - DNA, 20 bp, Artificial Sequence
  MKO10109265_B_Polr1b
  gRNA
gtttatccagctgagtgtcg

SEQ ID NO: 109266 - DNA, 20 bp, Artificial Sequence
  MKO10109266_B_Polr1b
  gRNA
ccatttaggctgatatcagc

SEQ ID NO: 109267 - DNA, 20 bp, Artificial Sequence
  MKO10109267_B_Polr1c
  gRNA
taacaacacgtccatagtcc

SEQ ID NO: 109268 - DNA, 20 bp, Artificial Sequence
  MKO10109268_B_Polr1c
  gRNA
acgccggttatgatgatgcc

SEQ ID NO: 109269 - DNA, 20 bp, Artificial Sequence
  MKO10109269_B_Polr1c
  gRNA
atcctcgtctctttgaatat

SEQ ID NO: 109270 - DNA, 20 bp, Artificial Sequence
  MKO10109270_B_Polr1d
  gRNA
aggatgaagtgtcctcttgc

SEQ ID NO: 109271 - DNA, 20 bp, Artificial Sequence
  MKO10109271_B_Polr1d
  gRNA
tcccgcgatggaagacgatc

SEQ ID NO: 109272 - DNA, 20 bp, Artificial Sequence
  MKO10109272_B_Polr1d
  gRNA
cggccccattgtctccgctc

SEQ ID NO: 109273 - DNA, 20 bp, Artificial Sequence
  MKO10109273_B_Polr1e
  gRNA
tattgagcgagagcctcctc

SEQ ID NO: 109274 - DNA, 20 bp, Artificial Sequence
  MKO10109274_B_Polr1e
  gRNA
tcctatgtcggaaacaattt

SEQ ID NO: 109275 - DNA, 20 bp, Artificial Sequence
  MKO10109275_B_Polr1e
  gRNA
cggaacctaccagcaaacag

SEQ ID NO: 109276 - DNA, 20 bp, Artificial Sequence
  MKO10109276_B_Polr2a
  gRNA
ccaattcgatgtggccaaag

SEQ ID NO: 109277 - DNA, 20 bp, Artificial Sequence
  MKO10109277_B_Polr2a
  gRNA
cgacctccctccgttgtttc

SEQ ID NO: 109278 - DNA, 20 bp, Artificial Sequence
  MKO10109278_B_Polr2a
  gRNA
ccactttggccacatcgaat

SEQ ID NO: 109279 - DNA, 20 bp, Artificial Sequence
  MKO10109279_B_Polr2b
  gRNA
tgcaccaccgattgacctac

SEQ ID NO: 109280 - DNA, 20 bp, Artificial Sequence
  MKO10109280_B_Polr2b
  gRNA
tcatttggcatcattggcga

SEQ ID NO: 109281 - DNA, 20 bp, Artificial Sequence
  MKO10109281_B_Polr2b
  gRNA
ttacgtgagatttcttaacc

SEQ ID NO: 109282 - DNA, 20 bp, Artificial Sequence
  MKO10109282_B_Polr2c
  gRNA
gcgcgatgaattcatcatga

SEQ ID NO: 109283 - DNA, 20 bp, Artificial Sequence
  MKO10109283_B_Polr2c
  gRNA
gtcaatctgaacccagtcga

SEQ ID NO: 109284 - DNA, 20 bp, Artificial Sequence
  MKO10109284_B_Polr2c
  gRNA
ccacaatgtcatcactagtg

SEQ ID NO: 109285 - DNA, 20 bp, Artificial Sequence
  MKO10109285_B_Polr2d
  gRNA
agcagtctccgggcaaagat

SEQ ID NO: 109286 - DNA, 20 bp, Artificial Sequence
  MKO10109286_B_Polr2d
  gRNA
ctgtttagccaatctttgcc

SEQ ID NO: 109287 - DNA, 20 bp, Artificial Sequence
  MKO10109287_B_Polr2d
  gRNA
tcccagcttatctttcccaa

SEQ ID NO: 109288 - DNA, 20 bp, Artificial Sequence
  MKO10109288_B_Polr2e
  gRNA
catggccccgaagtatgtgc

SEQ ID NO: 109289 - DNA, 20 bp, Artificial Sequence
  MKO10109289_B_Polr2e
  gRNA
ctgcagctgtgtcatgaccg

SEQ ID NO: 109290 - DNA, 20 bp, Artificial Sequence
  MKO10109290_B_Polr2e
  gRNA
gacccagtggcacggtactt

SEQ ID NO: 109291 - DNA, 20 bp, Artificial Sequence
  MKO10109291_B_Polr2f
  gRNA
cagtcctcatagctgccgtc

SEQ ID NO: 109292 - DNA, 20 bp, Artificial Sequence
  MKO10109292_B_Polr2f
  gRNA
cacccgggcccgctcatact

SEQ ID NO: 109293 - DNA, 20 bp, Artificial Sequence
  MKO10109293_B_Polr2f
  gRNA
cgacgactttgatgacgttg

SEQ ID NO: 109294 - DNA, 20 bp, Artificial Sequence
  MKO10109294_B_Polr2g
  gRNA
ttcaccgtgttgagcaagtt

SEQ ID NO: 109295 - DNA, 20 bp, Artificial Sequence
  MKO10109295_B_Polr2g
  gRNA
tcgtccatggtcttatagca

SEQ ID NO: 109296 - DNA, 20 bp, Artificial Sequence
  MKO10109296_B_Polr2g
  gRNA
accagcaccaatattgtcga

SEQ ID NO: 109297 - DNA, 20 bp, Artificial Sequence
  MKO10109297_B_Polr2h
  gRNA
tctattcaggtgacaagttc

SEQ ID NO: 109298 - DNA, 20 bp, Artificial Sequence
  MKO10109298_B_Polr2h
  gRNA
caggcgtgtggctgcttcag

SEQ ID NO: 109299 - DNA, 20 bp, Artificial Sequence
  MKO10109299_B_Polr2h
  gRNA
gaaagtgtacaggatcgaag

SEQ ID NO: 109300 - DNA, 20 bp, Artificial Sequence
  MKO10109300_B_Polr2i
  gRNA
cctgctggtaatcgcaattc

SEQ ID NO: 109301 - DNA, 20 bp, Artificial Sequence
  MKO10109301_B_Polr2i
  gRNA
aaatcgcattctgctgtacg

SEQ ID NO: 109302 - DNA, 20 bp, Artificial Sequence
  MKO10109302_B_Polr2i
  gRNA
gtcacacagtgcccgagctg

SEQ ID NO: 109303 - DNA, 20 bp, Artificial Sequence
  MKO10109303_B_Polr2j
  gRNA
tttgttgatggtgaacaagc

SEQ ID NO: 109304 - DNA, 20 bp, Artificial Sequence
  MKO10109304_B_Polr2j
  gRNA
ttccagaatcaccattaaca

SEQ ID NO: 109305 - DNA, 20 bp, Artificial Sequence
  MKO10109305_B_Polr2j
  gRNA
caccccagactacagtcccc

SEQ ID NO: 109306 - DNA, 20 bp, Artificial Sequence
  MKO10109306_B_Polr2k
  gRNA
cagccaatgatatatatttg

SEQ ID NO: 109307 - DNA, 20 bp, Artificial Sequence
  MKO10109307_B_Polr2k
  gRNA
tccacattctctgcatctga

SEQ ID NO: 109308 - DNA, 20 bp, Artificial Sequence
  MKO10109308_B_Polr2k
  gRNA
ccgaaaatgagataaagtcc

SEQ ID NO: 109309 - DNA, 20 bp, Artificial Sequence
  MKO10109309_B_Polr2l
  gRNA
gctccagcggtcacttctct

SEQ ID NO: 109310 - DNA, 20 bp, Artificial Sequence
  MKO10109310_B_Polr2l
  gRNA
ttcacctgcgggaagatcgt

SEQ ID NO: 109311 - DNA, 20 bp, Artificial Sequence
  MKO10109311_B_Polr2l
  gRNA
gttgccgacgatcttcccgc

SEQ ID NO: 109312 - DNA, 20 bp, Artificial Sequence
  MKO10109312_B_Polr2m
  gRNA
cagctgcccacatccgagcc

SEQ ID NO: 109313 - DNA, 20 bp, Artificial Sequence
  MKO10109313_B_Polr2m
  gRNA
gagctgggggctcgaagccg

SEQ ID NO: 109314 - DNA, 20 bp, Artificial Sequence
  MKO10109314_B_Polr2m
  gRNA
cctcagaagagcagcgacga

SEQ ID NO: 109315 - DNA, 20 bp, Artificial Sequence
  MKO10109315_B_Polr3a
  gRNA
gatcgtccttgtgagacctg

SEQ ID NO: 109316 - DNA, 20 bp, Artificial Sequence
  MKO10109316_B_Polr3a
  gRNA
ggctgtcattggtatcttac

SEQ ID NO: 109317 - DNA, 20 bp, Artificial Sequence
  MKO10109317_B_Polr3a
  gRNA
ccctgaggagatgcgccagc

SEQ ID NO: 109318 - DNA, 20 bp, Artificial Sequence
  MKO10109318_B_Polr3b
  gRNA
agtacctcatgaggggacac

SEQ ID NO: 109319 - DNA, 20 bp, Artificial Sequence
  MKO10109319_B_Polr3b
  gRNA
ttcttactttaagtaccaca

SEQ ID NO: 109320 - DNA, 20 bp, Artificial Sequence
  MKO10109320_B_Polr3b
  gRNA
ctctgcttaggttaaaggcc

SEQ ID NO: 109321 - DNA, 20 bp, Artificial Sequence
  MKO10109321_B_Polr3c
  gRNA
cgcgcttgtgcacatgatag

SEQ ID NO: 109322 - DNA, 20 bp, Artificial Sequence
  MKO10109322_B_Polr3c
  gRNA
tacaccaccaaaacgctgta

SEQ ID NO: 109323 - DNA, 20 bp, Artificial Sequence
  MKO10109323_B_Polr3c
  gRNA
gttcccaaactgagcttgat

SEQ ID NO: 109324 - DNA, 20 bp, Artificial Sequence
  MKO10109324_B_Polr3d
  gRNA
cggacggggacgtggccgcc

SEQ ID NO: 109325 - DNA, 20 bp, Artificial Sequence
  MKO10109325_B_Polr3d
  gRNA
tcccatgtcggacatgtcca

SEQ ID NO: 109326 - DNA, 20 bp, Artificial Sequence
  MKO10109326_B_Polr3d
  gRNA
catccttctccagcatgcgc

SEQ ID NO: 109327 - DNA, 20 bp, Artificial Sequence
  MKO10109327_B_Polr3e
  gRNA
gcagttacctcctgtatgac

SEQ ID NO: 109328 - DNA, 20 bp, Artificial Sequence
  MKO10109328_B_Polr3e
  gRNA
ttcccagatcgatgtgtact

SEQ ID NO: 109329 - DNA, 20 bp, Artificial Sequence
  MKO10109329_B_Polr3e
  gRNA
agaagatgacccagtcatac

SEQ ID NO: 109330 - DNA, 20 bp, Artificial Sequence
  MKO10109330_B_Polr3f
  gRNA
tatcaaatcatagaggatgc

SEQ ID NO: 109331 - DNA, 20 bp, Artificial Sequence
  MKO10109331_B_Polr3f
  gRNA
aggcctcttatatagaataa

SEQ ID NO: 109332 - DNA, 20 bp, Artificial Sequence
  MKO10109332_B_Polr3f
  gRNA
aatcctttattctatataag

SEQ ID NO: 109333 - DNA, 20 bp, Artificial Sequence
  MKO10109333_B_Polr3gl
  gRNA
ccctaagagcacagacgata

SEQ ID NO: 109334 - DNA, 20 bp, Artificial Sequence
  MKO10109334_B_Polr3gl
  gRNA
cactcgaatcttgagctcac

SEQ ID NO: 109335 - DNA, 20 bp, Artificial Sequence
  MKO10109335_B_Polr3gl
  gRNA
ccaccattatccttcccaag

SEQ ID NO: 109336 - DNA, 20 bp, Artificial Sequence
  MKO10109336_B_Polr3g
  gRNA
gctttgctcggcttggattt

SEQ ID NO: 109337 - DNA, 20 bp, Artificial Sequence
  MKO10109337_B_Polr3g
  gRNA
tcaccctagatgatattgaa

SEQ ID NO: 109338 - DNA, 20 bp, Artificial Sequence
  MKO10109338_B_Polr3g
  gRNA
ttccaagagagatgatgcca

SEQ ID NO: 109339 - DNA, 20 bp, Artificial Sequence
  MKO10109339_B_Polr3h
  gRNA
ctcggcggaactgggtcctg

SEQ ID NO: 109340 - DNA, 20 bp, Artificial Sequence
  MKO10109340_B_Polr3h
  gRNA
aggggtgaaacaccacgtag

SEQ ID NO: 109341 - DNA, 20 bp, Artificial Sequence
  MKO10109341_B_Polr3h
  gRNA
gatggagcatcccacaccaa

SEQ ID NO: 109342 - DNA, 20 bp, Artificial Sequence
  MKO10109342_B_Polr3k
  gRNA
agcattgcagcacttataga

SEQ ID NO: 109343 - DNA, 20 bp, Artificial Sequence
  MKO10109343_B_Polr3k
  gRNA
aagtgctgcaatgctcagtg

SEQ ID NO: 109344 - DNA, 20 bp, Artificial Sequence
  MKO10109344_B_Polr3k
  gRNA
gtatccaaagctaaaagaag

SEQ ID NO: 109345 - DNA, 20 bp, Artificial Sequence
  MKO10109345_B_Polrmt
  gRNA
tgcctttcgtccaccgccac

SEQ ID NO: 109346 - DNA, 20 bp, Artificial Sequence
  MKO10109346_B_Polrmt
  gRNA
ccgctgggcgcaaaagctag

SEQ ID NO: 109347 - DNA, 20 bp, Artificial Sequence
  MKO10109347_B_Polrmt
  gRNA
tctggatggtgcgaacatcc

SEQ ID NO: 109348 - DNA, 20 bp, Artificial Sequence
  MKO10109348_B_Pom121l12
  gRNA
cttgactgtcaccgggctgc

SEQ ID NO: 109349 - DNA, 20 bp, Artificial Sequence
  MKO10109349_B_Pom121l12
  gRNA
cctatatgaaacgatggatt

SEQ ID NO: 109350 - DNA, 20 bp, Artificial Sequence
  MKO10109350_B_Pom121l12
  gRNA
gcaagtattgcaacccaaac

SEQ ID NO: 109351 - DNA, 20 bp, Artificial Sequence
  MKO10109351_B_Pom121l2
  gRNA
ccaagaaagatgtcttgagt

SEQ ID NO: 109352 - DNA, 20 bp, Artificial Sequence
  MKO10109352_B_Pom121l2
  gRNA
atacggaggccgaatgcctt

SEQ ID NO: 109353 - DNA, 20 bp, Artificial Sequence
  MKO10109353_B_Pom121l2
  gRNA
gcaaagcggggtcctcgccg

SEQ ID NO: 109354 - DNA, 20 bp, Artificial Sequence
  MKO10109354_B_Pom121
  gRNA
cttccaaccgtctgctggaa

SEQ ID NO: 109355 - DNA, 20 bp, Artificial Sequence
  MKO10109355_B_Pom121
  gRNA
gactgtcctgaacgccctca

SEQ ID NO: 109356 - DNA, 20 bp, Artificial Sequence
  MKO10109356_B_Pom121
  gRNA
tatcacaggcgccatgatag

SEQ ID NO: 109357 - DNA, 20 bp, Artificial Sequence
  MKO10109357_B_Pomc
  gRNA
agattctgctacagtcgctc

SEQ ID NO: 109358 - DNA, 20 bp, Artificial Sequence
  MKO10109358_B_Pomc
  gRNA
gcaggtcctggagtccgacg

SEQ ID NO: 109359 - DNA, 20 bp, Artificial Sequence
  MKO10109359_B_Pomc
  gRNA
acacgggcgtctccagcgag

SEQ ID NO: 109360 - DNA, 20 bp, Artificial Sequence
  MKO10109360_B_Pomgnt1
  gRNA
cactcggagagcaatcagcg

SEQ ID NO: 109361 - DNA, 20 bp, Artificial Sequence
  MKO10109361_B_Pomgnt1
  gRNA
aacggagctggtaccttacc

SEQ ID NO: 109362 - DNA, 20 bp, Artificial Sequence
  MKO10109362_B_Pomgnt1
  gRNA
ccgtttcttcctagccccaa

SEQ ID NO: 109363 - DNA, 20 bp, Artificial Sequence
  MKO10109363_B_Pomgnt2
  gRNA
tcatgaagcgcgtgaactgc

SEQ ID NO: 109364 - DNA, 20 bp, Artificial Sequence
  MKO10109364_B_Pomgnt2
  gRNA
gggcgttgaatacggcagag

SEQ ID NO: 109365 - DNA, 20 bp, Artificial Sequence
  MKO10109365_B_Pomgnt2
  gRNA
gggtccgctgtatatttaac

SEQ ID NO: 109366 - DNA, 20 bp, Artificial Sequence
  MKO10109366_B_Pomk
  gRNA
tctggctcttgcacgcctta

SEQ ID NO: 109367 - DNA, 20 bp, Artificial Sequence
  MKO10109367_B_Pomk
  gRNA
ggtagagcgccacgttcata

SEQ ID NO: 109368 - DNA, 20 bp, Artificial Sequence
  MKO10109368_B_Pomk
  gRNA
gcacgtggaagggagtgata

SEQ ID NO: 109369 - DNA, 20 bp, Artificial Sequence
  MKO10109369_B_Pomp
  gRNA
accctggatgttcctcagcg

SEQ ID NO: 109370 - DNA, 20 bp, Artificial Sequence
  MKO10109370_B_Pomp
  gRNA
agctcgggagaaacgggaga

SEQ ID NO: 109371 - DNA, 20 bp, Artificial Sequence
  MKO10109371_B_Pomp
  gRNA
aggggcaacgatgagaccat

SEQ ID NO: 109372 - DNA, 20 bp, Artificial Sequence
  MKO10109372_B_Pomt1
  gRNA
gattcgatggtaactttctg

SEQ ID NO: 109373 - DNA, 20 bp, Artificial Sequence
  MKO10109373_B_Pomt1
  gRNA
gaagatgcgcttcatgtaga

SEQ ID NO: 109374 - DNA, 20 bp, Artificial Sequence
  MKO10109374_B_Pomt1
  gRNA
accatttggccacatgctac

SEQ ID NO: 109375 - DNA, 20 bp, Artificial Sequence
  MKO10109375_B_Pomt2
  gRNA
cagatgctgatcggtcttgc

SEQ ID NO: 109376 - DNA, 20 bp, Artificial Sequence
  MKO10109376_B_Pomt2
  gRNA
agttgggatgagactcactt

SEQ ID NO: 109377 - DNA, 20 bp, Artificial Sequence
  MKO10109377_B_Pomt2
  gRNA
ggacttggacagatccagta

SEQ ID NO: 109378 - DNA, 20 bp, Artificial Sequence
  MKO10109378_B_Pon1
  gRNA
cctttaactaaattacagtt

SEQ ID NO: 109379 - DNA, 20 bp, Artificial Sequence
  MKO10109379_B_Pon1
  gRNA
ctaaagaaagttagtccatt

SEQ ID NO: 109380 - DNA, 20 bp, Artificial Sequence
  MKO10109380_B_Pon1
  gRNA
ctggatggtttaccaccagt

SEQ ID NO: 109381 - DNA, 20 bp, Artificial Sequence
  MKO10109381_B_Pon2
  gRNA
ttaaacacgagctccttcca

SEQ ID NO: 109382 - DNA, 20 bp, Artificial Sequence
  MKO10109382_B_Pon2
  gRNA
ccaaactgccacctcattaa

SEQ ID NO: 109383 - DNA, 20 bp, Artificial Sequence
  MKO10109383_B_Pon2
  gRNA
tccactgtactcttgaattg

SEQ ID NO: 109384 - DNA, 20 bp, Artificial Sequence
  MKO10109384_B_Pon3
  gRNA
gagataaaagccagcccgct

SEQ ID NO: 109385 - DNA, 20 bp, Artificial Sequence
  MKO10109385_B_Pon3
  gRNA
tagtacaactcgagaaataa

SEQ ID NO: 109386 - DNA, 20 bp, Artificial Sequence
  MKO10109386_B_Pon3
  gRNA
tgtcgtgaatcaccccaaca

SEQ ID NO: 109387 - DNA, 20 bp, Artificial Sequence
  MKO10109387_B_Pop1
  gRNA
gagatccccaagtatataac

SEQ ID NO: 109388 - DNA, 20 bp, Artificial Sequence
  MKO10109388_B_Pop1
  gRNA
ccagaagtcatctaactcac

SEQ ID NO: 109389 - DNA, 20 bp, Artificial Sequence
  MKO10109389_B_Pop1
  gRNA
cttcaccatatgaaaccgtt

SEQ ID NO: 109390 - DNA, 20 bp, Artificial Sequence
  MKO10109390_B_Pop4
  gRNA
tacatccgggacctgtgcaa

SEQ ID NO: 109391 - DNA, 20 bp, Artificial Sequence
  MKO10109391_B_Pop4
  gRNA
agcttggcctgaatcatctg

SEQ ID NO: 109392 - DNA, 20 bp, Artificial Sequence
  MKO10109392_B_Pop4
  gRNA
taggcagccacagatgattc

SEQ ID NO: 109393 - DNA, 20 bp, Artificial Sequence
  MKO10109393_B_Pop5
  gRNA
cagtagcacgactccagtgt

SEQ ID NO: 109394 - DNA, 20 bp, Artificial Sequence
  MKO10109394_B_Pop5
  gRNA
agttcctgatccagtacaac

SEQ ID NO: 109395 - DNA, 20 bp, Artificial Sequence
  MKO10109395_B_Pop5
  gRNA
ttgcagaattgcactgacga

SEQ ID NO: 109396 - DNA, 20 bp, Artificial Sequence
  MKO10109396_B_Pop7
  gRNA
gatgttgatggcccggttga

SEQ ID NO: 109397 - DNA, 20 bp, Artificial Sequence
  MKO10109397_B_Pop7
  gRNA
agggtccagctcagcctcga

SEQ ID NO: 109398 - DNA, 20 bp, Artificial Sequence
  MKO10109398_B_Pop7
  gRNA
gccccctagtgcctccgtcc

SEQ ID NO: 109399 - DNA, 20 bp, Artificial Sequence
  MKO10109399_B_Popdc2
  gRNA
gtggactagacatcgtcctt

SEQ ID NO: 109400 - DNA, 20 bp, Artificial Sequence
  MKO10109400_B_Popdc2
  gRNA
tggaaggtcccctcttcaga

SEQ ID NO: 109401 - DNA, 20 bp, Artificial Sequence
  MKO10109401_B_Popdc2
  gRNA
agggttcgagtgagccaaga

SEQ ID NO: 109402 - DNA, 20 bp, Artificial Sequence
  MKO10109402_B_Popdc3
  gRNA
tgccaattaaaaccgaaaac

SEQ ID NO: 109403 - DNA, 20 bp, Artificial Sequence
  MKO10109403_B_Popdc3
  gRNA
acctactacaaacaagatac

SEQ ID NO: 109404 - DNA, 20 bp, Artificial Sequence
  MKO10109404_B_Popdc3
  gRNA
agaatcagagtgacagtcga

SEQ ID NO: 109405 - DNA, 20 bp, Artificial Sequence
  MKO10109405_B_Porcn
  gRNA
atccttccacagctacctac

SEQ ID NO: 109406 - DNA, 20 bp, Artificial Sequence
  MKO10109406_B_Porcn
  gRNA
cctgaagcatgcaagcaccg

SEQ ID NO: 109407 - DNA, 20 bp, Artificial Sequence
  MKO10109407_B_Porcn
  gRNA
tcgcatcttgtgccatgtca

SEQ ID NO: 109408 - DNA, 20 bp, Artificial Sequence
  MKO10109408_B_Por
  gRNA
actcctccgcggttcccgtc

SEQ ID NO: 109409 - DNA, 20 bp, Artificial Sequence
  MKO10109409_B_Por
  gRNA
ctatgagcacttcaacgcca

SEQ ID NO: 109410 - DNA, 20 bp, Artificial Sequence
  MKO10109410_B_Por
  gRNA
acttcccgtcgtcatcacca

SEQ ID NO: 109411 - DNA, 20 bp, Artificial Sequence
  MKO10109411_B_Postn
  gRNA
tcctggctcacagccgcatc

SEQ ID NO: 109412 - DNA, 20 bp, Artificial Sequence
  MKO10109412_B_Postn
  gRNA
ctgtgccctccagcaaattc

SEQ ID NO: 109413 - DNA, 20 bp, Artificial Sequence
  MKO10109413_B_Postn
  gRNA
ccttccattctcatatagcc

SEQ ID NO: 109414 - DNA, 20 bp, Artificial Sequence
  MKO10109414_B_Pot1a
  gRNA
tgaagacgccgagatgtgct

SEQ ID NO: 109415 - DNA, 20 bp, Artificial Sequence
  MKO10109415_B_Pot1a
  gRNA
tacacccctgaatctactca

SEQ ID NO: 109416 - DNA, 20 bp, Artificial Sequence
  MKO10109416_B_Pot1a
  gRNA
agtgaagctaaaaactttgc

SEQ ID NO: 109417 - DNA, 20 bp, Artificial Sequence
  MKO10109417_B_Pot1b
  gRNA
gtgtatgtagaaggtgctac

SEQ ID NO: 109418 - DNA, 20 bp, Artificial Sequence
  MKO10109418_B_Pot1b
  gRNA
ttgctctgttgtcacgattg

SEQ ID NO: 109419 - DNA, 20 bp, Artificial Sequence
  MKO10109419_B_Pot1b
  gRNA
gtctccaactttataaacgc

SEQ ID NO: 109420 - DNA, 20 bp, Artificial Sequence
  MKO10109420_B_Poteg
  gRNA
tggtagccggccatagacac

SEQ ID NO: 109421 - DNA, 20 bp, Artificial Sequence
  MKO10109421_B_Poteg
  gRNA
acatcttatagcgtatatca

SEQ ID NO: 109422 - DNA, 20 bp, Artificial Sequence
  MKO10109422_B_Poteg
  gRNA
ccataccacacctctgatga

SEQ ID NO: 109423 - DNA, 20 bp, Artificial Sequence
  MKO10109423_B_Pou1f1
  gRNA
gccatccacctatggagtga

SEQ ID NO: 109424 - DNA, 20 bp, Artificial Sequence
  MKO10109424_B_Pou1f1
  gRNA
cttacctgccatcactccat

SEQ ID NO: 109425 - DNA, 20 bp, Artificial Sequence
  MKO10109425_B_Pou1f1
  gRNA
aggatacacccagacaaacg

SEQ ID NO: 109426 - DNA, 20 bp, Artificial Sequence
  MKO10109426_B_Pou2af1
  gRNA
tactccgtgtagggtgtcca

SEQ ID NO: 109427 - DNA, 20 bp, Artificial Sequence
  MKO10109427_B_Pou2af1
  gRNA
gctggagggtcccgagcacc

SEQ ID NO: 109428 - DNA, 20 bp, Artificial Sequence
  MKO10109428_B_Pou2af1
  gRNA
agggaacattatgtgctggc

SEQ ID NO: 109429 - DNA, 20 bp, Artificial Sequence
  MKO10109429_B_Pou2f1
  gRNA
gtaaacttgtcccagctagc

SEQ ID NO: 109430 - DNA, 20 bp, Artificial Sequence
  MKO10109430_B_Pou2f1
  gRNA
tccccagacccagctaatgc

SEQ ID NO: 109431 - DNA, 20 bp, Artificial Sequence
  MKO10109431_B_Pou2f1
  gRNA
actctccatagatgatttat

SEQ ID NO: 109432 - DNA, 20 bp, Artificial Sequence
  MKO10109432_B_Pou2f2
  gRNA
cttacctggagcccccatgc

SEQ ID NO: 109433 - DNA, 20 bp, Artificial Sequence
  MKO10109433_B_Pou2f2
  gRNA
tttacagacaccgaaagaaa

SEQ ID NO: 109434 - DNA, 20 bp, Artificial Sequence
  MKO10109434_B_Pou2f2
  gRNA
cgctcacctgtgtgctctga

SEQ ID NO: 109435 - DNA, 20 bp, Artificial Sequence
  MKO10109435_B_Pou2f3
  gRNA
gatacagactgcaagtggcc

SEQ ID NO: 109436 - DNA, 20 bp, Artificial Sequence
  MKO10109436_B_Pou2f3
  gRNA
ttacctgtctgttgaaatct

SEQ ID NO: 109437 - DNA, 20 bp, Artificial Sequence
  MKO10109437_B_Pou2f3
  gRNA
tccactccagcagctcgtgc

SEQ ID NO: 109438 - DNA, 20 bp, Artificial Sequence
  MKO10109438_B_Pou3f1
  gRNA
gcgagaacacgttaccgtag

SEQ ID NO: 109439 - DNA, 20 bp, Artificial Sequence
  MKO10109439_B_Pou3f1
  gRNA
cctgcgccgcgatcttgtcc

SEQ ID NO: 109440 - DNA, 20 bp, Artificial Sequence
  MKO10109440_B_Pou3f1
  gRNA
tacgctcaggcggcctaccc

SEQ ID NO: 109441 - DNA, 20 bp, Artificial Sequence
  MKO10109441_B_Pou3f2
  gRNA
cggctcggcatgtacgatgg

SEQ ID NO: 109442 - DNA, 20 bp, Artificial Sequence
  MKO10109442_B_Pou3f2
  gRNA
cggatttactcaagcagacg

SEQ ID NO: 109443 - DNA, 20 bp, Artificial Sequence
  MKO10109443_B_Pou3f2
  gRNA
gcgagaacacgttgccgtac

SEQ ID NO: 109444 - DNA, 20 bp, Artificial Sequence
  MKO10109444_B_Pou3f3
  gRNA
gggaagcgccgccgtgacct

SEQ ID NO: 109445 - DNA, 20 bp, Artificial Sequence
  MKO10109445_B_Pou3f3
  gRNA
gcagcgcggtaccggcgtgc

SEQ ID NO: 109446 - DNA, 20 bp, Artificial Sequence
  MKO10109446_B_Pou3f3
  gRNA
cagcatatggccgccgttgc

SEQ ID NO: 109447 - DNA, 20 bp, Artificial Sequence
  MKO10109447_B_Pou3f4
  gRNA
ctacgtgcggcgagcggtga

SEQ ID NO: 109448 - DNA, 20 bp, Artificial Sequence
  MKO10109448_B_Pou3f4
  gRNA
gggctcgctccccaggcgtt

SEQ ID NO: 109449 - DNA, 20 bp, Artificial Sequence
  MKO10109449_B_Pou3f4
  gRNA
ctcaatgtgtactcgcagcc

SEQ ID NO: 109450 - DNA, 20 bp, Artificial Sequence
  MKO10109450_B_Pou4f1
  gRNA
ggggcgcttaccggcggcgt

SEQ ID NO: 109451 - DNA, 20 bp, Artificial Sequence
  MKO10109451_B_Pou4f1
  gRNA
gtcgccgtcgctcgcgctca

SEQ ID NO: 109452 - DNA, 20 bp, Artificial Sequence
  MKO10109452_B_Pou4f1
  gRNA
ccgagtcgcagatggacgcc

SEQ ID NO: 109453 - DNA, 20 bp, Artificial Sequence
  MKO10109453_B_Pou4f2
  gRNA
actgtgtagcgccgagtact

SEQ ID NO: 109454 - DNA, 20 bp, Artificial Sequence
  MKO10109454_B_Pou4f2
  gRNA
gcgcaagcgcacgtccatcg

SEQ ID NO: 109455 - DNA, 20 bp, Artificial Sequence
  MKO10109455_B_Pou4f2
  gRNA
gaacaccatcccgtgcacgt

SEQ ID NO: 109456 - DNA, 20 bp, Artificial Sequence
  MKO10109456_B_Pou4f3
  gRNA
ccgctacgtacctgcggggc

SEQ ID NO: 109457 - DNA, 20 bp, Artificial Sequence
  MKO10109457_B_Pou4f3
  gRNA
cgaacgcttccagctctcga

SEQ ID NO: 109458 - DNA, 20 bp, Artificial Sequence
  MKO10109458_B_Pou4f3
  gRNA
cacctcgcacccgcatcacg

SEQ ID NO: 109459 - DNA, 20 bp, Artificial Sequence
  MKO10109459_B_Pou5f1
  gRNA
acccaccaaagagaacgccc

SEQ ID NO: 109460 - DNA, 20 bp, Artificial Sequence
  MKO10109460_B_Pou5f1
  gRNA
tagcctcatactcttctcgt

SEQ ID NO: 109461 - DNA, 20 bp, Artificial Sequence
  MKO10109461_B_Pou5f1
  gRNA
gaccaccatctgtcgcttcg

SEQ ID NO: 109462 - DNA, 20 bp, Artificial Sequence
  MKO10109462_B_Pou5f2
  gRNA
tcctcaccttatgaattccg

SEQ ID NO: 109463 - DNA, 20 bp, Artificial Sequence
  MKO10109463_B_Pou5f2
  gRNA
tcccacagcgaatcccacat

SEQ ID NO: 109464 - DNA, 20 bp, Artificial Sequence
  MKO10109464_B_Pou5f2
  gRNA
gacaaaagggctcctcgtac

SEQ ID NO: 109465 - DNA, 20 bp, Artificial Sequence
  MKO10109465_B_Pou6f1
  gRNA
gggctggtgaggattactgc

SEQ ID NO: 109466 - DNA, 20 bp, Artificial Sequence
  MKO10109466_B_Pou6f1
  gRNA
atcccgtcctcatccagact

SEQ ID NO: 109467 - DNA, 20 bp, Artificial Sequence
  MKO10109467_B_Pou6f1
  gRNA
aggttattggagcacttccg

SEQ ID NO: 109468 - DNA, 20 bp, Artificial Sequence
  MKO10109468_B_Pou6f2
  gRNA
cgatgacggtggcaatgatt

SEQ ID NO: 109469 - DNA, 20 bp, Artificial Sequence
  MKO10109469_B_Pou6f2
  gRNA
ccacttgctgcttgactcga

SEQ ID NO: 109470 - DNA, 20 bp, Artificial Sequence
  MKO10109470_B_Pou6f2
  gRNA
taataatcctctagcaagcc

SEQ ID NO: 109471 - DNA, 20 bp, Artificial Sequence
  MKO10109471_B_Pp2d1
  gRNA
cataacagtgatgctgtctc

SEQ ID NO: 109472 - DNA, 20 bp, Artificial Sequence
  MKO10109472_B_Pp2d1
  gRNA
aactgtattcttctccttta

SEQ ID NO: 109473 - DNA, 20 bp, Artificial Sequence
  MKO10109473_B_Pp2d1
  gRNA
agcagccgctccagcgaacc

SEQ ID NO: 109474 - DNA, 20 bp, Artificial Sequence
  MKO10109474_B_Ppa1
  gRNA
ccaatcgatgtttgtgaaat

SEQ ID NO: 109475 - DNA, 20 bp, Artificial Sequence
  MKO10109475_B_Ppa1
  gRNA
gtggaacctcaaccaccatg

SEQ ID NO: 109476 - DNA, 20 bp, Artificial Sequence
  MKO10109476_B_Ppa1
  gRNA
ttccaaatataccctttata

SEQ ID NO: 109477 - DNA, 20 bp, Artificial Sequence
  MKO10109477_B_Ppa2
  gRNA
tcggtggacaaatgccaaga

SEQ ID NO: 109478 - DNA, 20 bp, Artificial Sequence
  MKO10109478_B_Ppa2
  gRNA
tttccacgacattcctctga

SEQ ID NO: 109479 - DNA, 20 bp, Artificial Sequence
  MKO10109479_B_Ppa2
  gRNA
tctttacagtccgccttcag

SEQ ID NO: 109480 - DNA, 20 bp, Artificial Sequence
  MKO10109480_B_Ppan
  gRNA
gcccaccgtgtgcacgttga

SEQ ID NO: 109481 - DNA, 20 bp, Artificial Sequence
  MKO10109481_B_Ppan
  gRNA
tcgaaagaagaactccctga

SEQ ID NO: 109482 - DNA, 20 bp, Artificial Sequence
  MKO10109482_B_Ppan
  gRNA
taaggaagtgtgtgaccccc

SEQ ID NO: 109483 - DNA, 20 bp, Artificial Sequence
  MKO10109483_B_Ppap2a
  gRNA
cagtttgcggccgcacttct

SEQ ID NO: 109484 - DNA, 20 bp, Artificial Sequence
  MKO10109484_B_Ppap2a
  gRNA
ttacgacccatgctccagtt

SEQ ID NO: 109485 - DNA, 20 bp, Artificial Sequence
  MKO10109485_B_Ppap2a
  gRNA
cgtcacagttggactcattc

SEQ ID NO: 109486 - DNA, 20 bp, Artificial Sequence
  MKO10109486_B_Ppap2b
  gRNA
gcatcatcctagcgatgtcc

SEQ ID NO: 109487 - DNA, 20 bp, Artificial Sequence
  MKO10109487_B_Ppap2b
  gRNA
caggcgcccgatggacactt

SEQ ID NO: 109488 - DNA, 20 bp, Artificial Sequence
  MKO10109488_B_Ppap2b
  gRNA
ccgtgacaatcccgtgtaga

SEQ ID NO: 109489 - DNA, 20 bp, Artificial Sequence
  MKO10109489_B_Ppap2c
  gRNA
aaagacggtctgtgtacacc

SEQ ID NO: 109490 - DNA, 20 bp, Artificial Sequence
  MKO10109490_B_Ppap2c
  gRNA
atagcccacatagattgcaa

SEQ ID NO: 109491 - DNA, 20 bp, Artificial Sequence
  MKO10109491_B_Ppap2c
  gRNA
catgtattgcatgttgttcc

SEQ ID NO: 109492 - DNA, 20 bp, Artificial Sequence
  MKO10109492_B_Ppapdc1a
  gRNA
tttcagtcttgtctgtccgc

SEQ ID NO: 109493 - DNA, 20 bp, Artificial Sequence
  MKO10109493_B_Ppapdc1a
  gRNA
attccagagagtcatccagc

SEQ ID NO: 109494 - DNA, 20 bp, Artificial Sequence
  MKO10109494_B_Ppapdc1a
  gRNA
atgttgtctgactgcaccaa

SEQ ID NO: 109495 - DNA, 20 bp, Artificial Sequence
  MKO10109495_B_Ppapdc1b
  gRNA
ccgtgcacgtcagatcagaa

SEQ ID NO: 109496 - DNA, 20 bp, Artificial Sequence
  MKO10109496_B_Ppapdc1b
  gRNA
cactatcagtttgattatgt

SEQ ID NO: 109497 - DNA, 20 bp, Artificial Sequence
  MKO10109497_B_Ppapdc1b
  gRNA
agccttgccctagctctgaa

SEQ ID NO: 109498 - DNA, 20 bp, Artificial Sequence
  MKO10109498_B_Ppapdc2
  gRNA
gcgccggtgcaccgggctgt

SEQ ID NO: 109499 - DNA, 20 bp, Artificial Sequence
  MKO10109499_B_Ppapdc2
  gRNA
ttccctcgggccacgccacg

SEQ ID NO: 109500 - DNA, 20 bp, Artificial Sequence
  MKO10109500_B_Ppapdc2
  gRNA
cgtccgacagcccggtgcac

SEQ ID NO: 109501 - DNA, 20 bp, Artificial Sequence
  MKO10109501_B_Ppapdc3
  gRNA
cgcggcgcttgatgagcttc

SEQ ID NO: 109502 - DNA, 20 bp, Artificial Sequence
  MKO10109502_B_Ppapdc3
  gRNA
cacattacagacgtcatctc

SEQ ID NO: 109503 - DNA, 20 bp, Artificial Sequence
  MKO10109503_B_Ppapdc3
  gRNA
ccacgccagccgtgccgcca

SEQ ID NO: 109504 - DNA, 20 bp, Artificial Sequence
  MKO10109504_B_Ppara
  gRNA
atgctgatcgcgtacggcaa

SEQ ID NO: 109505 - DNA, 20 bp, Artificial Sequence
  MKO10109505_B_Ppara
  gRNA
ctctttgtcttcgacgccgt

SEQ ID NO: 109506 - DNA, 20 bp, Artificial Sequence
  MKO10109506_B_Ppara
  gRNA
tctttcccgcgagtatgacc

SEQ ID NO: 109507 - DNA, 20 bp, Artificial Sequence
  MKO10109507_B_Ppard
  gRNA
ccttgcacccctcgcacgcg

SEQ ID NO: 109508 - DNA, 20 bp, Artificial Sequence
  MKO10109508_B_Ppard
  gRNA
cagcccgtctttgttgacga

SEQ ID NO: 109509 - DNA, 20 bp, Artificial Sequence
  MKO10109509_B_Ppard
  gRNA
ctacggggtccacgcgtgcg

SEQ ID NO: 109510 - DNA, 20 bp, Artificial Sequence
  MKO10109510_B_Ppargc1a
  gRNA
agccgtgaccactgacaacg

SEQ ID NO: 109511 - DNA, 20 bp, Artificial Sequence
  MKO10109511_B_Ppargc1a
  gRNA
gtgaggagggtcatcgtttg

SEQ ID NO: 109512 - DNA, 20 bp, Artificial Sequence
  MKO10109512_B_Ppargc1a
  gRNA
ccttgagcatgttgcgactg

SEQ ID NO: 109513 - DNA, 20 bp, Artificial Sequence
  MKO10109513_B_Ppargc1b
  gRNA
tgacatccccgaagacgatg

SEQ ID NO: 109514 - DNA, 20 bp, Artificial Sequence
  MKO10109514_B_Ppargc1b
  gRNA
tgcggaaataccttgacaca

SEQ ID NO: 109515 - DNA, 20 bp, Artificial Sequence
  MKO10109515_B_Ppargc1b
  gRNA
caaagtcactggcgtccagc

SEQ ID NO: 109516 - DNA, 20 bp, Artificial Sequence
  MKO10109516_B_Pparg
  gRNA
ccattgagtgccgagtctgt

SEQ ID NO: 109517 - DNA, 20 bp, Artificial Sequence
  MKO10109517_B_Pparg
  gRNA
tatttgtaatcagcaaccat

SEQ ID NO: 109518 - DNA, 20 bp, Artificial Sequence
  MKO10109518_B_Pparg
  gRNA
agaaccttctaactccctca

SEQ ID NO: 109519 - DNA, 20 bp, Artificial Sequence
  MKO10109519_B_Ppat
  gRNA
agcgcccgcagcatactccc

SEQ ID NO: 109520 - DNA, 20 bp, Artificial Sequence
  MKO10109520_B_Ppat
  gRNA
ggagtgcagtgcctaaattc

SEQ ID NO: 109521 - DNA, 20 bp, Artificial Sequence
  MKO10109521_B_Ppat
  gRNA
ggtaatcatttcactatcag

SEQ ID NO: 109522 - DNA, 20 bp, Artificial Sequence
  MKO10109522_B_Ppbp
  gRNA
gacctacatcgtcctgcacc

SEQ ID NO: 109523 - DNA, 20 bp, Artificial Sequence
  MKO10109523_B_Ppbp
  gRNA
agatgtacgaataccatctc

SEQ ID NO: 109524 - DNA, 20 bp, Artificial Sequence
  MKO10109524_B_Ppbp
  gRNA
gagaatcgtcatgaaaatct

SEQ ID NO: 109525 - DNA, 20 bp, Artificial Sequence
  MKO10109525_B_Ppcdc
  gRNA
gcatcctctcaccgcacagc

SEQ ID NO: 109526 - DNA, 20 bp, Artificial Sequence
  MKO10109526_B_Ppcdc
  gRNA
attcatcagcgtcactgtag

SEQ ID NO: 109527 - DNA, 20 bp, Artificial Sequence
  MKO10109527_B_Ppcdc
  gRNA
tctacagtgacgctgatgaa

SEQ ID NO: 109528 - DNA, 20 bp, Artificial Sequence
  MKO10109528_B_Ppcs
  gRNA
agcccagtctttgaccagag

SEQ ID NO: 109529 - DNA, 20 bp, Artificial Sequence
  MKO10109529_B_Ppcs
  gRNA
atagaaatctgacactgccg

SEQ ID NO: 109530 - DNA, 20 bp, Artificial Sequence
  MKO10109530_B_Ppcs
  gRNA
gcagtgggccaccagatgag

SEQ ID NO: 109531 - DNA, 20 bp, Artificial Sequence
  MKO10109531_B_Ppdpf
  gRNA
aggtcttcccaaagccgacc

SEQ ID NO: 109532 - DNA, 20 bp, Artificial Sequence
  MKO10109532_B_Ppdpf
  gRNA
atggcagccatcccttccag

SEQ ID NO: 109533 - DNA, 20 bp, Artificial Sequence
  MKO10109533_B_Ppdpf
  gRNA
tcctcgtccagcagcagctc

SEQ ID NO: 109534 - DNA, 20 bp, Artificial Sequence
  MKO10109534_B_Ppef1
  gRNA
tggatgtcagtaaacgtcag

SEQ ID NO: 109535 - DNA, 20 bp, Artificial Sequence
  MKO10109535_B_Ppef1
  gRNA
ctgcagccgaggaccatcat

SEQ ID NO: 109536 - DNA, 20 bp, Artificial Sequence
  MKO10109536_B_Ppef1
  gRNA
gccaaagagataacaatatg

SEQ ID NO: 109537 - DNA, 20 bp, Artificial Sequence
  MKO10109537_B_Ppef2
  gRNA
atctctcttcggtgaacatg

SEQ ID NO: 109538 - DNA, 20 bp, Artificial Sequence
  MKO10109538_B_Ppef2
  gRNA
ctcggttgatgttgggcagc

SEQ ID NO: 109539 - DNA, 20 bp, Artificial Sequence
  MKO10109539_B_Ppef2
  gRNA
ccctgatccagagatggtac

SEQ ID NO: 109540 - DNA, 20 bp, Artificial Sequence
  MKO10109540_B_Ppfia1
  gRNA
gctcaatactgcacttccac

SEQ ID NO: 109541 - DNA, 20 bp, Artificial Sequence
  MKO10109541_B_Ppfia1
  gRNA
caggggaagttgcatgaagt

SEQ ID NO: 109542 - DNA, 20 bp, Artificial Sequence
  MKO10109542_B_Ppfia1
  gRNA
ggtgttcaaacagtgacttc

SEQ ID NO: 109543 - DNA, 20 bp, Artificial Sequence
  MKO10109543_B_Ppfia2
  gRNA
ggaactagctgcagctaatc

SEQ ID NO: 109544 - DNA, 20 bp, Artificial Sequence
  MKO10109544_B_Ppfia2
  gRNA
tctaggtaagggagcgactg

SEQ ID NO: 109545 - DNA, 20 bp, Artificial Sequence
  MKO10109545_B_Ppfia2
  gRNA
aaccagtcagccctcctgtt

SEQ ID NO: 109546 - DNA, 20 bp, Artificial Sequence
  MKO10109546_B_Ppfia3
  gRNA
ctgaccgccttctagatagc

SEQ ID NO: 109547 - DNA, 20 bp, Artificial Sequence
  MKO10109547_B_Ppfia3
  gRNA
cttatgtcgggaacagcttc

SEQ ID NO: 109548 - DNA, 20 bp, Artificial Sequence
  MKO10109548_B_Ppfia3
  gRNA
ggagtttgcggctctgacga

SEQ ID NO: 109549 - DNA, 20 bp, Artificial Sequence
  MKO10109549_B_Ppfia4
  gRNA
cccactttccacaggcgttt

SEQ ID NO: 109550 - DNA, 20 bp, Artificial Sequence
  MKO10109550_B_Ppfia4
  gRNA
gcttagctcccgagttaaag

SEQ ID NO: 109551 - DNA, 20 bp, Artificial Sequence
  MKO10109551_B_Ppfia4
  gRNA
taacgcgctctagagctgcc

SEQ ID NO: 109552 - DNA, 20 bp, Artificial Sequence
  MKO10109552_B_Ppfibp1
  gRNA
gtccatctgctccagcgccg

SEQ ID NO: 109553 - DNA, 20 bp, Artificial Sequence
  MKO10109553_B_Ppfibp1
  gRNA
taccacttgcctgaagaacg

SEQ ID NO: 109554 - DNA, 20 bp, Artificial Sequence
  MKO10109554_B_Ppfibp1
  gRNA
gagtgacgctagtgacatgc

SEQ ID NO: 109555 - DNA, 20 bp, Artificial Sequence
  MKO10109555_B_Ppfibp2
  gRNA
atgactagcgtcagaagtca

SEQ ID NO: 109556 - DNA, 20 bp, Artificial Sequence
  MKO10109556_B_Ppfibp2
  gRNA
tagctgttgggccagggacc

SEQ ID NO: 109557 - DNA, 20 bp, Artificial Sequence
  MKO10109557_B_Ppfibp2
  gRNA
gagcgtcctcacagatcaag

SEQ ID NO: 109558 - DNA, 20 bp, Artificial Sequence
  MKO10109558_B_Pphln1
  gRNA
gacttacactgggatggctc

SEQ ID NO: 109559 - DNA, 20 bp, Artificial Sequence
  MKO10109559_B_Pphln1
  gRNA
cttacctgtagtcaggctgc

SEQ ID NO: 109560 - DNA, 20 bp, Artificial Sequence
  MKO10109560_B_Pphln1
  gRNA
gctattctccagagcgaagc

SEQ ID NO: 109561 - DNA, 20 bp, Artificial Sequence
  MKO10109561_B_Ppia
  gRNA
caggctggatggcaagcatg

SEQ ID NO: 109562 - DNA, 20 bp, Artificial Sequence
  MKO10109562_B_Ppia
  gRNA
gacaaagttccaaagacagc

SEQ ID NO: 109563 - DNA, 20 bp, Artificial Sequence
  MKO10109563_B_Ppia
  gRNA
aactttcgagctctgagcac

SEQ ID NO: 109564 - DNA, 20 bp, Artificial Sequence
  MKO10109564_B_Ppib
  gRNA
tttctccacttcgatcttgc

SEQ ID NO: 109565 - DNA, 20 bp, Artificial Sequence
  MKO10109565_B_Ppib
  gRNA
tgaagtccttgatgacacga

SEQ ID NO: 109566 - DNA, 20 bp, Artificial Sequence
  MKO10109566_B_Ppib
  gRNA
caagttccatcgtgtcatca

SEQ ID NO: 109567 - DNA, 20 bp, Artificial Sequence
  MKO10109567_B_Ppic
  gRNA
cgccatttctgtcaccaatc

SEQ ID NO: 109568 - DNA, 20 bp, Artificial Sequence
  MKO10109568_B_Ppic
  gRNA
catctctttagaaaggctac

SEQ ID NO: 109569 - DNA, 20 bp, Artificial Sequence
  MKO10109569_B_Ppic
  gRNA
gatggcaaacacgttgtatt

SEQ ID NO: 109570 - DNA, 20 bp, Artificial Sequence
  MKO10109570_B_Ppid
  gRNA
cagtcatccagacttccctg

SEQ ID NO: 109571 - DNA, 20 bp, Artificial Sequence
  MKO10109571_B_Ppid
  gRNA
caaacaattctaaaacaatt

SEQ ID NO: 109572 - DNA, 20 bp, Artificial Sequence
  MKO10109572_B_Ppid
  gRNA
atcttccccaaagatggctc

SEQ ID NO: 109573 - DNA, 20 bp, Artificial Sequence
  MKO10109573_B_Ppie
  gRNA
gagccctctttaattctcat

SEQ ID NO: 109574 - DNA, 20 bp, Artificial Sequence
  MKO10109574_B_Ppie
  gRNA
ccacctgtttcatagtccag

SEQ ID NO: 109575 - DNA, 20 bp, Artificial Sequence
  MKO10109575_B_Ppie
  gRNA
actcaacaaaagcaaaccct

SEQ ID NO: 109576 - DNA, 20 bp, Artificial Sequence
  MKO10109576_B_Ppif
  gRNA
tctgcacgataaagacagac

SEQ ID NO: 109577 - DNA, 20 bp, Artificial Sequence
  MKO10109577_B_Ppif
  gRNA
cttcagtgtgaagttctcgt

SEQ ID NO: 109578 - DNA, 20 bp, Artificial Sequence
  MKO10109578_B_Ppif
  gRNA
aacttcagagccctatgcac

SEQ ID NO: 109579 - DNA, 20 bp, Artificial Sequence
  MKO10109579_B_Ppig
  gRNA
aactttcgctgcctttgcac

SEQ ID NO: 109580 - DNA, 20 bp, Artificial Sequence
  MKO10109580_B_Ppig
  gRNA
tcataactagggaatggaag

SEQ ID NO: 109581 - DNA, 20 bp, Artificial Sequence
  MKO10109581_B_Ppig
  gRNA
atttgtatccttccctctgt

SEQ ID NO: 109582 - DNA, 20 bp, Artificial Sequence
  MKO10109582_B_Ppih
  gRNA
ctgacatcgaagaagaccac

SEQ ID NO: 109583 - DNA, 20 bp, Artificial Sequence
  MKO10109583_B_Ppih
  gRNA
aatcgagctctttgcagacg

SEQ ID NO: 109584 - DNA, 20 bp, Artificial Sequence
  MKO10109584_B_Ppih
  gRNA
ctaaagttctctgccgtctt

SEQ ID NO: 109585 - DNA, 20 bp, Artificial Sequence
  MKO10109585_B_Ppil1
  gRNA
atccaaggcggcgacccgac

SEQ ID NO: 109586 - DNA, 20 bp, Artificial Sequence
  MKO10109586_B_Ppil1
  gRNA
gctcggcggggctactacaa

SEQ ID NO: 109587 - DNA, 20 bp, Artificial Sequence
  MKO10109587_B_Ppil1
  gRNA
cggcgattcccccagacacc

SEQ ID NO: 109588 - DNA, 20 bp, Artificial Sequence
  MKO10109588_B_Ppil2
  gRNA
tatgggacgaatcccagcac

SEQ ID NO: 109589 - DNA, 20 bp, Artificial Sequence
  MKO10109589_B_Ppil2
  gRNA
gctgagtacactcatttcta

SEQ ID NO: 109590 - DNA, 20 bp, Artificial Sequence
  MKO10109590_B_Ppil2
  gRNA
tctcacctgcagtggtcaaa

SEQ ID NO: 109591 - DNA, 20 bp, Artificial Sequence
  MKO10109591_B_Ppil3
  gRNA
tgaatacagtgaatatctga

SEQ ID NO: 109592 - DNA, 20 bp, Artificial Sequence
  MKO10109592_B_Ppil3
  gRNA
gatactcacctcacatgttt

SEQ ID NO: 109593 - DNA, 20 bp, Artificial Sequence
  MKO10109593_B_Ppil3
  gRNA
gagaacacccaaaacatgtg

SEQ ID NO: 109594 - DNA, 20 bp, Artificial Sequence
  MKO10109594_B_Ppil4
  gRNA
caaatatagactctcctccg

SEQ ID NO: 109595 - DNA, 20 bp, Artificial Sequence
  MKO10109595_B_Ppil4
  gRNA
tcctgacctgagacccgtgc

SEQ ID NO: 109596 - DNA, 20 bp, Artificial Sequence
  MKO10109596_B_Ppil4
  gRNA
ttgaagcagaaaaagtacca

SEQ ID NO: 109597 - DNA, 20 bp, Artificial Sequence
  MKO10109597_B_Ppil6
  gRNA
agtcagcgcctcatacagag

SEQ ID NO: 109598 - DNA, 20 bp, Artificial Sequence
  MKO10109598_B_Ppil6
  gRNA
tttcatcgagtagttcagaa

SEQ ID NO: 109599 - DNA, 20 bp, Artificial Sequence
  MKO10109599_B_Ppil6
  gRNA
tcaaaaatcagtcttccaat

SEQ ID NO: 109600 - DNA, 20 bp, Artificial Sequence
  MKO10109600_B_Ppip5k1
  gRNA
tgcagtattacatccaagat

SEQ ID NO: 109601 - DNA, 20 bp, Artificial Sequence
  MKO10109601_B_Ppip5k1
  gRNA
tgcagagtcgctctagaatt

SEQ ID NO: 109602 - DNA, 20 bp, Artificial Sequence
  MKO10109602_B_Ppip5k1
  gRNA
atgataggagggaggtgtac

SEQ ID NO: 109603 - DNA, 20 bp, Artificial Sequence
  MKO10109603_B_Ppip5k2
  gRNA
ctctgacctttcgggttatt

SEQ ID NO: 109604 - DNA, 20 bp, Artificial Sequence
  MKO10109604_B_Ppip5k2
  gRNA
tgcagtatctcatacaagat

SEQ ID NO: 109605 - DNA, 20 bp, Artificial Sequence
  MKO10109605_B_Ppip5k2
  gRNA
cagttgcctatgcaaaactc

SEQ ID NO: 109606 - DNA, 20 bp, Artificial Sequence
  MKO10109606_B_Ppl
  gRNA
aaggaacattgtggacaccg

SEQ ID NO: 109607 - DNA, 20 bp, Artificial Sequence
  MKO10109607_B_Ppl
  gRNA
ctgagtcagacacgttctgc

SEQ ID NO: 109608 - DNA, 20 bp, Artificial Sequence
  MKO10109608_B_Ppl
  gRNA
ggcactcacgctctgcatct

SEQ ID NO: 109609 - DNA, 20 bp, Artificial Sequence
  MKO10109609_B_Ppm1a
  gRNA
cgcatcacgtggactaagtc

SEQ ID NO: 109610 - DNA, 20 bp, Artificial Sequence
  MKO10109610_B_Ppm1a
  gRNA
tccaagtgcacccaaagtct

SEQ ID NO: 109611 - DNA, 20 bp, Artificial Sequence
  MKO10109611_B_Ppm1a
  gRNA
gaggctggggatgttctcac

SEQ ID NO: 109612 - DNA, 20 bp, Artificial Sequence
  MKO10109612_B_Ppm1b
  gRNA
cgtgaagagagattcagagt

SEQ ID NO: 109613 - DNA, 20 bp, Artificial Sequence
  MKO10109613_B_Ppm1b
  gRNA
actctcgagctgttctgtgt

SEQ ID NO: 109614 - DNA, 20 bp, Artificial Sequence
  MKO10109614_B_Ppm1b
  gRNA
accccatcattgtctttgtg

SEQ ID NO: 109615 - DNA, 20 bp, Artificial Sequence
  MKO10109615_B_Ppm1d
  gRNA
ataatatacttgtgcttccg

SEQ ID NO: 109616 - DNA, 20 bp, Artificial Sequence
  MKO10109616_B_Ppm1d
  gRNA
gtgtccacactcttgacccc

SEQ ID NO: 109617 - DNA, 20 bp, Artificial Sequence
  MKO10109617_B_Ppm1d
  gRNA
tctagtgtgatgaacaagtc

SEQ ID NO: 109618 - DNA, 20 bp, Artificial Sequence
  MKO10109618_B_Ppm1e
  gRNA
ggcgcactaagttaacgtgt

SEQ ID NO: 109619 - DNA, 20 bp, Artificial Sequence
  MKO10109619_B_Ppm1e
  gRNA
caacatgctccacgtggcat

SEQ ID NO: 109620 - DNA, 20 bp, Artificial Sequence
  MKO10109620_B_Ppm1e
  gRNA
atgccatcaagaacatgcga

SEQ ID NO: 109621 - DNA, 20 bp, Artificial Sequence
  MKO10109621_B_Ppm1f
  gRNA
ctacccgtccttgctgtacc

SEQ ID NO: 109622 - DNA, 20 bp, Artificial Sequence
  MKO10109622_B_Ppm1f
  gRNA
gtggaacttacaggtcacga

SEQ ID NO: 109623 - DNA, 20 bp, Artificial Sequence
  MKO10109623_B_Ppm1f
  gRNA
gaaacatctcatcggtgagc

SEQ ID NO: 109624 - DNA, 20 bp, Artificial Sequence
  MKO10109624_B_Ppm1g
  gRNA
aaggaactggcccagattgc

SEQ ID NO: 109625 - DNA, 20 bp, Artificial Sequence
  MKO10109625_B_Ppm1g
  gRNA
cttggcatcaatagccaaga

SEQ ID NO: 109626 - DNA, 20 bp, Artificial Sequence
  MKO10109626_B_Ppm1g
  gRNA
ttctgatctttgataatatc

SEQ ID NO: 109627 - DNA, 20 bp, Artificial Sequence
  MKO10109627_B_Ppm1h
  gRNA
acccgcgcggcctcactgcg

SEQ ID NO: 109628 - DNA, 20 bp, Artificial Sequence
  MKO10109628_B_Ppm1h
  gRNA
ccgatgaccagacactcgtg

SEQ ID NO: 109629 - DNA, 20 bp, Artificial Sequence
  MKO10109629_B_Ppm1h
  gRNA
tcctctcgcgttcgatttga

SEQ ID NO: 109630 - DNA, 20 bp, Artificial Sequence
  MKO10109630_B_Ppm1j
  gRNA
ggcctgtttgatgggcacgc

SEQ ID NO: 109631 - DNA, 20 bp, Artificial Sequence
  MKO10109631_B_Ppm1j
  gRNA
agggccatcattgtccgaaa

SEQ ID NO: 109632 - DNA, 20 bp, Artificial Sequence
  MKO10109632_B_Ppm1j
  gRNA
agtattacctggttatggct

SEQ ID NO: 109633 - DNA, 20 bp, Artificial Sequence
  MKO10109633_B_Ppm1k
  gRNA
accttaatccttgttgtctc

SEQ ID NO: 109634 - DNA, 20 bp, Artificial Sequence
  MKO10109634_B_Ppm1k
  gRNA
ccaggaaactgtcgtcagca

SEQ ID NO: 109635 - DNA, 20 bp, Artificial Sequence
  MKO10109635_B_Ppm1k
  gRNA
ctcacttaccatctgcagac

SEQ ID NO: 109636 - DNA, 20 bp, Artificial Sequence
  MKO10109636_B_Ppm1l
  gRNA
tgtaaaatctcgactcccag

SEQ ID NO: 109637 - DNA, 20 bp, Artificial Sequence
  MKO10109637_B_Ppm1l
  gRNA
tccccgagagtcaccaacgt

SEQ ID NO: 109638 - DNA, 20 bp, Artificial Sequence
  MKO10109638_B_Ppm1l
  gRNA
gtctcccagggatcgagaca

SEQ ID NO: 109639 - DNA, 20 bp, Artificial Sequence
  MKO10109639_B_Ppm1m
  gRNA
cgatcccaaactcacatcgc

SEQ ID NO: 109640 - DNA, 20 bp, Artificial Sequence
  MKO10109640_B_Ppm1m
  gRNA
atccgctgccgctctgtttc

SEQ ID NO: 109641 - DNA, 20 bp, Artificial Sequence
  MKO10109641_B_Ppm1m
  gRNA
gggtggctgtacagccctgg

SEQ ID NO: 109642 - DNA, 20 bp, Artificial Sequence
  MKO10109642_B_Ppm1n
  gRNA
cctgctcaccagcaactttg

SEQ ID NO: 109643 - DNA, 20 bp, Artificial Sequence
  MKO10109643_B_Ppm1n
  gRNA
ttgctgtgtagccctcctcc

SEQ ID NO: 109644 - DNA, 20 bp, Artificial Sequence
  MKO10109644_B_Ppm1n
  gRNA
tctaagctgcatcagacccc

SEQ ID NO: 109645 - DNA, 20 bp, Artificial Sequence
  MKO10109645_B_Ppme1
  gRNA
acttaccgtgaacactgccc

SEQ ID NO: 109646 - DNA, 20 bp, Artificial Sequence
  MKO10109646_B_Ppme1
  gRNA
attgtggctctggatctgcg

SEQ ID NO: 109647 - DNA, 20 bp, Artificial Sequence
  MKO10109647_B_Ppme1
  gRNA
tcatcagtagagtacagtgt

SEQ ID NO: 109648 - DNA, 20 bp, Artificial Sequence
  MKO10109648_B_Ppox
  gRNA
gcagggtaccgcctacatac

SEQ ID NO: 109649 - DNA, 20 bp, Artificial Sequence
  MKO10109649_B_Ppox
  gRNA
gaggtgttacctgaggccgg

SEQ ID NO: 109650 - DNA, 20 bp, Artificial Sequence
  MKO10109650_B_Ppox
  gRNA
cgctcaatccgaggatcaga

SEQ ID NO: 109651 - DNA, 20 bp, Artificial Sequence
  MKO10109651_B_Ppp1ca
  gRNA
gaggcgcccctcaagatctg

SEQ ID NO: 109652 - DNA, 20 bp, Artificial Sequence
  MKO10109652_B_Ppp1ca
  gRNA
ggctggggcgagaatgaccg

SEQ ID NO: 109653 - DNA, 20 bp, Artificial Sequence
  MKO10109653_B_Ppp1ca
  gRNA
cttctacggctgtttgagta

SEQ ID NO: 109654 - DNA, 20 bp, Artificial Sequence
  MKO10109654_B_Ppp1cb
  gRNA
gctagcatcaatcgcattta

SEQ ID NO: 109655 - DNA, 20 bp, Artificial Sequence
  MKO10109655_B_Ppp1cb
  gRNA
atgactgaagcagaagtccg

SEQ ID NO: 109656 - DNA, 20 bp, Artificial Sequence
  MKO10109656_B_Ppp1cb
  gRNA
gagaaaatcttctgttgtca

SEQ ID NO: 109657 - DNA, 20 bp, Artificial Sequence
  MKO10109657_B_Ppp1cc
  gRNA
tccgtagatcctattgatgc

SEQ ID NO: 109658 - DNA, 20 bp, Artificial Sequence
  MKO10109658_B_Ppp1cc
  gRNA
gaatatcttctcgtccacga

SEQ ID NO: 109659 - DNA, 20 bp, Artificial Sequence
  MKO10109659_B_Ppp1cc
  gRNA
gaagatacaacattaagctg

SEQ ID NO: 109660 - DNA, 20 bp, Artificial Sequence
  MKO10109660_B_Ppp1r10
  gRNA
gcagcacctcccgctcactg

SEQ ID NO: 109661 - DNA, 20 bp, Artificial Sequence
  MKO10109661_B_Ppp1r10
  gRNA
ctctcctagtctaatgaagg

SEQ ID NO: 109662 - DNA, 20 bp, Artificial Sequence
  MKO10109662_B_Ppp1r10
  gRNA
gcagctcagcaagtcaagtg

SEQ ID NO: 109663 - DNA, 20 bp, Artificial Sequence
  MKO10109663_B_Ppp1r11
  gRNA
gagctctcgccaaaggcccg

SEQ ID NO: 109664 - DNA, 20 bp, Artificial Sequence
  MKO10109664_B_Ppp1r11
  gRNA
gtttccgaagtttcatagtt

SEQ ID NO: 109665 - DNA, 20 bp, Artificial Sequence
  MKO10109665_B_Ppp1r11
  gRNA
cactgtggacaatgagcata

SEQ ID NO: 109666 - DNA, 20 bp, Artificial Sequence
  MKO10109666_B_Ppp1r12a
  gRNA
ggtatccagccttcattgtc

SEQ ID NO: 109667 - DNA, 20 bp, Artificial Sequence
  MKO10109667_B_Ppp1r12a
  gRNA
cacacctttagatattgcag

SEQ ID NO: 109668 - DNA, 20 bp, Artificial Sequence
  MKO10109668_B_Ppp1r12a
  gRNA
ggaagagctacttcaaaatg

SEQ ID NO: 109669 - DNA, 20 bp, Artificial Sequence
  MKO10109669_B_Ppp1r12b
  gRNA
cactctgtgacatggatatc

SEQ ID NO: 109670 - DNA, 20 bp, Artificial Sequence
  MKO10109670_B_Ppp1r12b
  gRNA
tgctatgttgagataaccac

SEQ ID NO: 109671 - DNA, 20 bp, Artificial Sequence
  MKO10109671_B_Ppp1r12b
  gRNA
tgtcacagagtgcttctgcc

SEQ ID NO: 109672 - DNA, 20 bp, Artificial Sequence
  MKO10109672_B_Ppp1r12c
  gRNA
gaatgggggtgctatgccag

SEQ ID NO: 109673 - DNA, 20 bp, Artificial Sequence
  MKO10109673_B_Ppp1r12c
  gRNA
agtaggttgctactccaagc

SEQ ID NO: 109674 - DNA, 20 bp, Artificial Sequence
  MKO10109674_B_Ppp1r12c
  gRNA
gtccgggggtgcctggcctc

SEQ ID NO: 109675 - DNA, 20 bp, Artificial Sequence
  MKO10109675_B_Ppp1r13b
  gRNA
gcaggtgctcatacatcatg

SEQ ID NO: 109676 - DNA, 20 bp, Artificial Sequence
  MKO10109676_B_Ppp1r13b
  gRNA
ggagaaaagcgcactgaaaa

SEQ ID NO: 109677 - DNA, 20 bp, Artificial Sequence
  MKO10109677_B_Ppp1r13b
  gRNA
tgtatgagcacctgcagaag

SEQ ID NO: 109678 - DNA, 20 bp, Artificial Sequence
  MKO10109678_B_Ppp1r13l
  gRNA
ccaagcagttagagtcgttg

SEQ ID NO: 109679 - DNA, 20 bp, Artificial Sequence
  MKO10109679_B_Ppp1r13l
  gRNA
atccaagtcagactcgttcc

SEQ ID NO: 109680 - DNA, 20 bp, Artificial Sequence
  MKO10109680_B_Ppp1r13l
  gRNA
ttcgtccactttggcggcag

SEQ ID NO: 109681 - DNA, 20 bp, Artificial Sequence
  MKO10109681_B_Ppp1r14a
  gRNA
tcatcgatgttgacctcgtc

SEQ ID NO: 109682 - DNA, 20 bp, Artificial Sequence
  MKO10109682_B_Ppp1r14a
  gRNA
cccggtcctggcgggggctc

SEQ ID NO: 109683 - DNA, 20 bp, Artificial Sequence
  MKO10109683_B_Ppp1r14a
  gRNA
ctgtctgtaggacttcgtcc

SEQ ID NO: 109684 - DNA, 20 bp, Artificial Sequence
  MKO10109684_B_Ppp1r14b
  gRNA
agcacaccccagaagaaatg

SEQ ID NO: 109685 - DNA, 20 bp, Artificial Sequence
  MKO10109685_B_Ppp1r14b
  gRNA
gttctaaaatccactcctcc

SEQ ID NO: 109686 - DNA, 20 bp, Artificial Sequence
  MKO10109686_B_Ppp1r14b
  gRNA
gcggccgccatggcggacag

SEQ ID NO: 109687 - DNA, 20 bp, Artificial Sequence
  MKO10109687_B_Ppp1r14c
  gRNA
agctctttcctcctcgctgt

SEQ ID NO: 109688 - DNA, 20 bp, Artificial Sequence
  MKO10109688_B_Ppp1r14c
  gRNA
agactgctataaaccaacag

SEQ ID NO: 109689 - DNA, 20 bp, Artificial Sequence
  MKO10109689_B_Ppp1r14c
  gRNA
gcttcctcatgcctcttatc

SEQ ID NO: 109690 - DNA, 20 bp, Artificial Sequence
  MKO10109690_B_Ppp1r14d
  gRNA
ttctgagccagagattgatc

SEQ ID NO: 109691 - DNA, 20 bp, Artificial Sequence
  MKO10109691_B_Ppp1r14d
  gRNA
tcagtcaactcaagagactt

SEQ ID NO: 109692 - DNA, 20 bp, Artificial Sequence
  MKO10109692_B_Ppp1r14d
  gRNA
gccattctccaagactgccc

SEQ ID NO: 109693 - DNA, 20 bp, Artificial Sequence
  MKO10109693_B_Ppp1r15a
  gRNA
ctctctagagtagtactccc

SEQ ID NO: 109694 - DNA, 20 bp, Artificial Sequence
  MKO10109694_B_Ppp1r15a
  gRNA
cctcgacgggcagcttgggc

SEQ ID NO: 109695 - DNA, 20 bp, Artificial Sequence
  MKO10109695_B_Ppp1r15a
  gRNA
tctctcctggtagacaacgc

SEQ ID NO: 109696 - DNA, 20 bp, Artificial Sequence
  MKO10109696_B_Ppp1r15b
  gRNA
atgaggatcgcaaaggacca

SEQ ID NO: 109697 - DNA, 20 bp, Artificial Sequence
  MKO10109697_B_Ppp1r15b
  gRNA
cggcgggaactccgaagagc

SEQ ID NO: 109698 - DNA, 20 bp, Artificial Sequence
  MKO10109698_B_Ppp1r15b
  gRNA
cagagatgtcggcaaccgcc

SEQ ID NO: 109699 - DNA, 20 bp, Artificial Sequence
  MKO10109699_B_Ppp1r16a
  gRNA
tatgccctacgacctgtgtg

SEQ ID NO: 109700 - DNA, 20 bp, Artificial Sequence
  MKO10109700_B_Ppp1r16a
  gRNA
cattgacgacttccaagaga

SEQ ID NO: 109701 - DNA, 20 bp, Artificial Sequence
  MKO10109701_B_Ppp1r16a
  gRNA
tgcagtcaagccatcttcat

SEQ ID NO: 109702 - DNA, 20 bp, Artificial Sequence
  MKO10109702_B_Ppp1r16b
  gRNA
ttgcacgcggcagccacctg

SEQ ID NO: 109703 - DNA, 20 bp, Artificial Sequence
  MKO10109703_B_Ppp1r16b
  gRNA
catgccatatgacctctgcg

SEQ ID NO: 109704 - DNA, 20 bp, Artificial Sequence
  MKO10109704_B_Ppp1r16b
  gRNA
tagccctgatttgtgcaatg

SEQ ID NO: 109705 - DNA, 20 bp, Artificial Sequence
  MKO10109705_B_Ppp1r17
  gRNA
cctttcagaccagttcatta

SEQ ID NO: 109706 - DNA, 20 bp, Artificial Sequence
  MKO10109706_B_Ppp1r17
  gRNA
gagtgcaggagtgattctag

SEQ ID NO: 109707 - DNA, 20 bp, Artificial Sequence
  MKO10109707_B_Ppp1r17
  gRNA
cgccccttacctgggatgaa

SEQ ID NO: 109708 - DNA, 20 bp, Artificial Sequence
  MKO10109708_B_Ppp1r18
  gRNA
cagccgcttacccacgatta

SEQ ID NO: 109709 - DNA, 20 bp, Artificial Sequence
  MKO10109709_B_Ppp1r18
  gRNA
cttagcaacccagcctgacg

SEQ ID NO: 109710 - DNA, 20 bp, Artificial Sequence
  MKO10109710_B_Ppp1r18
  gRNA
ttcctgcagatgagtcctgc

SEQ ID NO: 109711 - DNA, 20 bp, Artificial Sequence
  MKO10109711_B_Ppp1r1a
  gRNA
ggatgccaaacctttcatgg

SEQ ID NO: 109712 - DNA, 20 bp, Artificial Sequence
  MKO10109712_B_Ppp1r1a
  gRNA
acctggggaggactgatcac

SEQ ID NO: 109713 - DNA, 20 bp, Artificial Sequence
  MKO10109713_B_Ppp1r1a
  gRNA
gctcaccttgagaagtgagt

SEQ ID NO: 109714 - DNA, 20 bp, Artificial Sequence
  MKO10109714_B_Ppp1r1b
  gRNA
gcatggcaggggttggtctc

SEQ ID NO: 109715 - DNA, 20 bp, Artificial Sequence
  MKO10109715_B_Ppp1r1b
  gRNA
gttctcactcaagttgctaa

SEQ ID NO: 109716 - DNA, 20 bp, Artificial Sequence
  MKO10109716_B_Ppp1r1b
  gRNA
tcgggagcttgggtacccac

SEQ ID NO: 109717 - DNA, 20 bp, Artificial Sequence
  MKO10109717_B_Ppp1r1c
  gRNA
tatgttcattgagaatcaca

SEQ ID NO: 109718 - DNA, 20 bp, Artificial Sequence
  MKO10109718_B_Ppp1r1c
  gRNA
cttgcactttcttcttcttc

SEQ ID NO: 109719 - DNA, 20 bp, Artificial Sequence
  MKO10109719_B_Ppp1r1c
  gRNA
aagcatctgaaagaccagaa

SEQ ID NO: 109720 - DNA, 20 bp, Artificial Sequence
  MKO10109720_B_Ppp1r21
  gRNA
cagcaccaagctgtgatcga

SEQ ID NO: 109721 - DNA, 20 bp, Artificial Sequence
  MKO10109721_B_Ppp1r21
  gRNA
tcagcttcgagctcagaatc

SEQ ID NO: 109722 - DNA, 20 bp, Artificial Sequence
  MKO10109722_B_Ppp1r21
  gRNA
ttagtgctagctcatcttga

SEQ ID NO: 109723 - DNA, 20 bp, Artificial Sequence
  MKO10109723_B_Ppp1r26
  gRNA
ccagggcttccgtgagcgcc

SEQ ID NO: 109724 - DNA, 20 bp, Artificial Sequence
  MKO10109724_B_Ppp1r26
  gRNA
tgcagtttgccacgagacca

SEQ ID NO: 109725 - DNA, 20 bp, Artificial Sequence
  MKO10109725_B_Ppp1r26
  gRNA
ccaaagcatctccgccaagc

SEQ ID NO: 109726 - DNA, 20 bp, Artificial Sequence
  MKO10109726_B_Ppp1r27
  gRNA
attcaccagcgggatgagac

SEQ ID NO: 109727 - DNA, 20 bp, Artificial Sequence
  MKO10109727_B_Ppp1r27
  gRNA
tccagcctgtctcatcccgc

SEQ ID NO: 109728 - DNA, 20 bp, Artificial Sequence
  MKO10109728_B_Ppp1r27
  gRNA
gggcagatcgccatcatcat

SEQ ID NO: 109729 - DNA, 20 bp, Artificial Sequence
  MKO10109729_B_Ppp1r2
  gRNA
tacttcttagctaagatatc

SEQ ID NO: 109730 - DNA, 20 bp, Artificial Sequence
  MKO10109730_B_Ppp1r2
  gRNA
tcagtaagaagtctcagaag

SEQ ID NO: 109731 - DNA, 20 bp, Artificial Sequence
  MKO10109731_B_Ppp1r2
  gRNA
agcgacagtttgaaatgaaa

SEQ ID NO: 109732 - DNA, 20 bp, Artificial Sequence
  MKO10109732_B_Ppp1r32
  gRNA
ggtctcctaccaaccgcacc

SEQ ID NO: 109733 - DNA, 20 bp, Artificial Sequence
  MKO10109733_B_Ppp1r32
  gRNA
gtttaccatcgggcacttct

SEQ ID NO: 109734 - DNA, 20 bp, Artificial Sequence
  MKO10109734_B_Ppp1r32
  gRNA
caggctacaaatccaactat

SEQ ID NO: 109735 - DNA, 20 bp, Artificial Sequence
  MKO10109735_B_Ppp1r35
  gRNA
accgggcgacgatcatgagc

SEQ ID NO: 109736 - DNA, 20 bp, Artificial Sequence
  MKO10109736_B_Ppp1r35
  gRNA
taagcgactctaccgagacc

SEQ ID NO: 109737 - DNA, 20 bp, Artificial Sequence
  MKO10109737_B_Ppp1r35
  gRNA
cgcgttcagtacctgctcct

SEQ ID NO: 109738 - DNA, 20 bp, Artificial Sequence
  MKO10109738_B_Ppp1r36
  gRNA
tccgctgcatttcagtgtcc

SEQ ID NO: 109739 - DNA, 20 bp, Artificial Sequence
  MKO10109739_B_Ppp1r36
  gRNA
tttggagaaacgaagtcagc

SEQ ID NO: 109740 - DNA, 20 bp, Artificial Sequence
  MKO10109740_B_Ppp1r36
  gRNA
ttctccttgagttctattgc

SEQ ID NO: 109741 - DNA, 20 bp, Artificial Sequence
  MKO10109741_B_Ppp1r37
  gRNA
cctcgtccaccgtcacattc

SEQ ID NO: 109742 - DNA, 20 bp, Artificial Sequence
  MKO10109742_B_Ppp1r37
  gRNA
gacacatacctttcaggtcc

SEQ ID NO: 109743 - DNA, 20 bp, Artificial Sequence
  MKO10109743_B_Ppp1r37
  gRNA
ggtgatcagtgcctacagac

SEQ ID NO: 109744 - DNA, 20 bp, Artificial Sequence
  MKO10109744_B_Ppp1r3a
  gRNA
ccagaaagcgcgtctgctag

SEQ ID NO: 109745 - DNA, 20 bp, Artificial Sequence
  MKO10109745_B_Ppp1r3a
  gRNA
ttgttgatatcgtctacatt

SEQ ID NO: 109746 - DNA, 20 bp, Artificial Sequence
  MKO10109746_B_Ppp1r3a
  gRNA
aacaatcatttgttctcacg

SEQ ID NO: 109747 - DNA, 20 bp, Artificial Sequence
  MKO10109747_B_Ppp1r3b
  gRNA
cagcccctggttgtcggcga

SEQ ID NO: 109748 - DNA, 20 bp, Artificial Sequence
  MKO10109748_B_Ppp1r3b
  gRNA
ggaaagattgagccgtacaa

SEQ ID NO: 109749 - DNA, 20 bp, Artificial Sequence
  MKO10109749_B_Ppp1r3b
  gRNA
ttgtacggctcaatctttcc

SEQ ID NO: 109750 - DNA, 20 bp, Artificial Sequence
  MKO10109750_B_Ppp1r3c
  gRNA
caaccgactacttaagtttc

SEQ ID NO: 109751 - DNA, 20 bp, Artificial Sequence
  MKO10109751_B_Ppp1r3c
  gRNA
ggcatgacggaacttgtcaa

SEQ ID NO: 109752 - DNA, 20 bp, Artificial Sequence
  MKO10109752_B_Ppp1r3c
  gRNA
tgcatttcttatcacgctaa

SEQ ID NO: 109753 - DNA, 20 bp, Artificial Sequence
  MKO10109753_B_Ppp1r3d
  gRNA
accgaggacatcttcgcctt

SEQ ID NO: 109754 - DNA, 20 bp, Artificial Sequence
  MKO10109754_B_Ppp1r3d
  gRNA
ttcgatgggcggcgagaagt

SEQ ID NO: 109755 - DNA, 20 bp, Artificial Sequence
  MKO10109755_B_Ppp1r3d
  gRNA
tcgccgcccatcgaaacccc

SEQ ID NO: 109756 - DNA, 20 bp, Artificial Sequence
  MKO10109756_B_Ppp1r3e
  gRNA
gctgcggtagtacgcccgct

SEQ ID NO: 109757 - DNA, 20 bp, Artificial Sequence
  MKO10109757_B_Ppp1r3e
  gRNA
cccgagcatcctgccggtgc

SEQ ID NO: 109758 - DNA, 20 bp, Artificial Sequence
  MKO10109758_B_Ppp1r3e
  gRNA
cacgctcacgcgcttctcgt

SEQ ID NO: 109759 - DNA, 20 bp, Artificial Sequence
  MKO10109759_B_Ppp1r3f
  gRNA
tggggcgcgcctcgacttcg

SEQ ID NO: 109760 - DNA, 20 bp, Artificial Sequence
  MKO10109760_B_Ppp1r3f
  gRNA
cctagtgactctcgaacatc

SEQ ID NO: 109761 - DNA, 20 bp, Artificial Sequence
  MKO10109761_B_Ppp1r3f
  gRNA
cggcagcccctacgagaacc

SEQ ID NO: 109762 - DNA, 20 bp, Artificial Sequence
  MKO10109762_B_Ppp1r3g
  gRNA
cgtgcagttcgccgactccc

SEQ ID NO: 109763 - DNA, 20 bp, Artificial Sequence
  MKO10109763_B_Ppp1r3g
  gRNA
cggcccctgtcgccgcagaa

SEQ ID NO: 109764 - DNA, 20 bp, Artificial Sequence
  MKO10109764_B_Ppp1r3g
  gRNA
ctgcccctttctgcggcgac

SEQ ID NO: 109765 - DNA, 20 bp, Artificial Sequence
  MKO10109765_B_Ppp1r42
  gRNA
aattacattgcggtcataga

SEQ ID NO: 109766 - DNA, 20 bp, Artificial Sequence
  MKO10109766_B_Ppp1r42
  gRNA
aagaactcttcgttctctag

SEQ ID NO: 109767 - DNA, 20 bp, Artificial Sequence
  MKO10109767_B_Ppp1r42
  gRNA
atcagtttgtccctgtattt

SEQ ID NO: 109768 - DNA, 20 bp, Artificial Sequence
  MKO10109768_B_Ppp1r7
  gRNA
tgtgggttcagttgacaggc

SEQ ID NO: 109769 - DNA, 20 bp, Artificial Sequence
  MKO10109769_B_Ppp1r7
  gRNA
gcagcattacctctgcatct

SEQ ID NO: 109770 - DNA, 20 bp, Artificial Sequence
  MKO10109770_B_Ppp1r7
  gRNA
agatatggaaaccatcaacc

SEQ ID NO: 109771 - DNA, 20 bp, Artificial Sequence
  MKO10109771_B_Ppp1r8
  gRNA
ctctcgagtccacgcagcgc

SEQ ID NO: 109772 - DNA, 20 bp, Artificial Sequence
  MKO10109772_B_Ppp1r8
  gRNA
gatctcgtcatcctcactga

SEQ ID NO: 109773 - DNA, 20 bp, Artificial Sequence
  MKO10109773_B_Ppp1r8
  gRNA
ggttcccctcctcaatagtg

SEQ ID NO: 109774 - DNA, 20 bp, Artificial Sequence
  MKO10109774_B_Ppp1r9a
  gRNA
gatttacctgacgttgccct

SEQ ID NO: 109775 - DNA, 20 bp, Artificial Sequence
  MKO10109775_B_Ppp1r9a
  gRNA
agcatcattggaatgggcgt

SEQ ID NO: 109776 - DNA, 20 bp, Artificial Sequence
  MKO10109776_B_Ppp1r9a
  gRNA
tcaagtcaatgaccagattg

SEQ ID NO: 109777 - DNA, 20 bp, Artificial Sequence
  MKO10109777_B_Ppp1r9b
  gRNA
agcatcattggcatgggcgc

SEQ ID NO: 109778 - DNA, 20 bp, Artificial Sequence
  MKO10109778_B_Ppp1r9b
  gRNA
ctctagctcatattccgcag

SEQ ID NO: 109779 - DNA, 20 bp, Artificial Sequence
  MKO10109779_B_Ppp1r9b
  gRNA
ctctcaccgcactcggcctt

SEQ ID NO: 109780 - DNA, 20 bp, Artificial Sequence
  MKO10109780_B_Ppp2ca
  gRNA
gagcgcatcaccatactccg

SEQ ID NO: 109781 - DNA, 20 bp, Artificial Sequence
  MKO10109781_B_Ppp2ca
  gRNA
ggttctacgacgagtgttta

SEQ ID NO: 109782 - DNA, 20 bp, Artificial Sequence
  MKO10109782_B_Ppp2ca
  gRNA
aaggtataaccagctccccg

SEQ ID NO: 109783 - DNA, 20 bp, Artificial Sequence
  MKO10109783_B_Ppp2cb
  gRNA
agacaccagtgtgagaccgt

SEQ ID NO: 109784 - DNA, 20 bp, Artificial Sequence
  MKO10109784_B_Ppp2cb
  gRNA
ggcatttctccacgtggtgc

SEQ ID NO: 109785 - DNA, 20 bp, Artificial Sequence
  MKO10109785_B_Ppp2cb
  gRNA
ctacatagtcccccatgaat

SEQ ID NO: 109786 - DNA, 20 bp, Artificial Sequence
  MKO10109786_B_Ppp2r1a
  gRNA
accttcacaactttggtggg

SEQ ID NO: 109787 - DNA, 20 bp, Artificial Sequence
  MKO10109787_B_Ppp2r1a
  gRNA
gcgggccgctgcctccaagc

SEQ ID NO: 109788 - DNA, 20 bp, Artificial Sequence
  MKO10109788_B_Ppp2r1a
  gRNA
ccctcccaccaaagttgtga

SEQ ID NO: 109789 - DNA, 20 bp, Artificial Sequence
  MKO10109789_B_Ppp2r1b
  gRNA
gttagctctcgccgagcagc

SEQ ID NO: 109790 - DNA, 20 bp, Artificial Sequence
  MKO10109790_B_Ppp2r1b
  gRNA
agcgcctggcaagcggggac

SEQ ID NO: 109791 - DNA, 20 bp, Artificial Sequence
  MKO10109791_B_Ppp2r1b
  gRNA
aatttcactggtttggtggg

SEQ ID NO: 109792 - DNA, 20 bp, Artificial Sequence
  MKO10109792_B_Ppp2r2a
  gRNA
aagagaagatcaacaaaatt

SEQ ID NO: 109793 - DNA, 20 bp, Artificial Sequence
  MKO10109793_B_Ppp2r2a
  gRNA
cagataaaacaataaaatta

SEQ ID NO: 109794 - DNA, 20 bp, Artificial Sequence
  MKO10109794_B_Ppp2r2a
  gRNA
acagtagagtttaatcattc

SEQ ID NO: 109795 - DNA, 20 bp, Artificial Sequence
  MKO10109795_B_Ppp2r2b
  gRNA
attcacccctacgatgaacc

SEQ ID NO: 109796 - DNA, 20 bp, Artificial Sequence
  MKO10109796_B_Ppp2r2b
  gRNA
gcattggcaaacactcttcg

SEQ ID NO: 109797 - DNA, 20 bp, Artificial Sequence
  MKO10109797_B_Ppp2r2b
  gRNA
actcacccgcagggttgtga

SEQ ID NO: 109798 - DNA, 20 bp, Artificial Sequence
  MKO10109798_B_Ppp2r2c
  gRNA
actgtcgagttcaaccacac

SEQ ID NO: 109799 - DNA, 20 bp, Artificial Sequence
  MKO10109799_B_Ppp2r2c
  gRNA
agattaccgaacgagacaag

SEQ ID NO: 109800 - DNA, 20 bp, Artificial Sequence
  MKO10109800_B_Ppp2r2c
  gRNA
tgtatacatcgtactcaccc

SEQ ID NO: 109801 - DNA, 20 bp, Artificial Sequence
  MKO10109801_B_Ppp2r2d
  gRNA
tcgagacccatttagaatta

SEQ ID NO: 109802 - DNA, 20 bp, Artificial Sequence
  MKO10109802_B_Ppp2r2d
  gRNA
cactgacctcttgttcccgc

SEQ ID NO: 109803 - DNA, 20 bp, Artificial Sequence
  MKO10109803_B_Ppp2r2d
  gRNA
actctcccctagagtgagcg

SEQ ID NO: 109804 - DNA, 20 bp, Artificial Sequence
  MKO10109804_B_Ppp2r3a
  gRNA
gcccccatgttcagggctgc

SEQ ID NO: 109805 - DNA, 20 bp, Artificial Sequence
  MKO10109805_B_Ppp2r3a
  gRNA
ttgttctagatagctgcagc

SEQ ID NO: 109806 - DNA, 20 bp, Artificial Sequence
  MKO10109806_B_Ppp2r3a
  gRNA
ccttccaagtagtccccagc

SEQ ID NO: 109807 - DNA, 20 bp, Artificial Sequence
  MKO10109807_B_Ppp2r3c
  gRNA
agttctataagaccataccc

SEQ ID NO: 109808 - DNA, 20 bp, Artificial Sequence
  MKO10109808_B_Ppp2r3c
  gRNA
gtagttaaagaactgcatga

SEQ ID NO: 109809 - DNA, 20 bp, Artificial Sequence
  MKO10109809_B_Ppp2r3c
  gRNA
cacttaccctgtaataaaac

SEQ ID NO: 109810 - DNA, 20 bp, Artificial Sequence
  MKO10109810_B_Ppp2r3d
  gRNA
gagatctatggggtcggacc

SEQ ID NO: 109811 - DNA, 20 bp, Artificial Sequence
  MKO10109811_B_Ppp2r3d
  gRNA
cgcacagtagggcgtcacag

SEQ ID NO: 109812 - DNA, 20 bp, Artificial Sequence
  MKO10109812_B_Ppp2r3d
  gRNA
caggggtgacatcgggggct

SEQ ID NO: 109813 - DNA, 20 bp, Artificial Sequence
  MKO10109813_B_Ppp2r4
  gRNA
cgcttccatttgcccatatc

SEQ ID NO: 109814 - DNA, 20 bp, Artificial Sequence
  MKO10109814_B_Ppp2r4
  gRNA
gattgatgaaaccccgccag

SEQ ID NO: 109815 - DNA, 20 bp, Artificial Sequence
  MKO10109815_B_Ppp2r4
  gRNA
aactccacacgaattgacta

SEQ ID NO: 109816 - DNA, 20 bp, Artificial Sequence
  MKO10109816_B_Ppp2r5a
  gRNA
gtattctgatatagtaaaaa

SEQ ID NO: 109817 - DNA, 20 bp, Artificial Sequence
  MKO10109817_B_Ppp2r5a
  gRNA
tgaattcttcttgagattct

SEQ ID NO: 109818 - DNA, 20 bp, Artificial Sequence
  MKO10109818_B_Ppp2r5a
  gRNA
aagagcgacgctgaatgaac

SEQ ID NO: 109819 - DNA, 20 bp, Artificial Sequence
  MKO10109819_B_Ppp2r5b
  gRNA
ctggactctccaagaaacgc

SEQ ID NO: 109820 - DNA, 20 bp, Artificial Sequence
  MKO10109820_B_Ppp2r5b
  gRNA
cctcgctgtcaaatagctcc

SEQ ID NO: 109821 - DNA, 20 bp, Artificial Sequence
  MKO10109821_B_Ppp2r5b
  gRNA
gtcaaactcagggttctcgc

SEQ ID NO: 109822 - DNA, 20 bp, Artificial Sequence
  MKO10109822_B_Ppp2r5c
  gRNA
cacgggctggaaaggcccgt

SEQ ID NO: 109823 - DNA, 20 bp, Artificial Sequence
  MKO10109823_B_Ppp2r5c
  gRNA
agcagaattcgacccagaag

SEQ ID NO: 109824 - DNA, 20 bp, Artificial Sequence
  MKO10109824_B_Ppp2r5c
  gRNA
aacgttggttcatcctcttc

SEQ ID NO: 109825 - DNA, 20 bp, Artificial Sequence
  MKO10109825_B_Ppp2r5d
  gRNA
gtagctcccggttcttgttg

SEQ ID NO: 109826 - DNA, 20 bp, Artificial Sequence
  MKO10109826_B_Ppp2r5d
  gRNA
gctcctgtgggattcgatga

SEQ ID NO: 109827 - DNA, 20 bp, Artificial Sequence
  MKO10109827_B_Ppp2r5d
  gRNA
ggtctgacacgaagtcaaag

SEQ ID NO: 109828 - DNA, 20 bp, Artificial Sequence
  MKO10109828_B_Ppp2r5e
  gRNA
gtccaccagttcattaagag

SEQ ID NO: 109829 - DNA, 20 bp, Artificial Sequence
  MKO10109829_B_Ppp2r5e
  gRNA
tcgaattcattgctgtcact

SEQ ID NO: 109830 - DNA, 20 bp, Artificial Sequence
  MKO10109830_B_Ppp2r5e
  gRNA
agttgaagtacctgtaagtg

SEQ ID NO: 109831 - DNA, 20 bp, Artificial Sequence
  MKO10109831_B_Ppp3ca
  gRNA
taaacgtgaaatactctgtg

SEQ ID NO: 109832 - DNA, 20 bp, Artificial Sequence
  MKO10109832_B_Ppp3ca
  gRNA
gcgaagtaaaaacagtgttt

SEQ ID NO: 109833 - DNA, 20 bp, Artificial Sequence
  MKO10109833_B_Ppp3ca
  gRNA
aacactcgctacctcttctt

SEQ ID NO: 109834 - DNA, 20 bp, Artificial Sequence
  MKO10109834_B_Ppp3cb
  gRNA
gtacttacattcctgcttaa

SEQ ID NO: 109835 - DNA, 20 bp, Artificial Sequence
  MKO10109835_B_Ppp3cb
  gRNA
agcacattattccttctgag

SEQ ID NO: 109836 - DNA, 20 bp, Artificial Sequence
  MKO10109836_B_Ppp3cb
  gRNA
gtttcatcagatcaaaaaat

SEQ ID NO: 109837 - DNA, 20 bp, Artificial Sequence
  MKO10109837_B_Ppp3cc
  gRNA
aagaggtagcgagtattact

SEQ ID NO: 109838 - DNA, 20 bp, Artificial Sequence
  MKO10109838_B_Ppp3cc
  gRNA
tcggatcaagtattcagaga

SEQ ID NO: 109839 - DNA, 20 bp, Artificial Sequence
  MKO10109839_B_Ppp3cc
  gRNA
tcctgaaattacttgtttag

SEQ ID NO: 109840 - DNA, 20 bp, Artificial Sequence
  MKO10109840_B_Ppp3r1
  gRNA
agatggaagaatatcctttg

SEQ ID NO: 109841 - DNA, 20 bp, Artificial Sequence
  MKO10109841_B_Ppp3r1
  gRNA
gtgtctcagttcagtgtcaa

SEQ ID NO: 109842 - DNA, 20 bp, Artificial Sequence
  MKO10109842_B_Ppp3r1
  gRNA
atccttatctgcatttatta

SEQ ID NO: 109843 - DNA, 20 bp, Artificial Sequence
  MKO10109843_B_Ppp3r2
  gRNA
aggtgcccacgatgaactcg

SEQ ID NO: 109844 - DNA, 20 bp, Artificial Sequence
  MKO10109844_B_Ppp3r2
  gRNA
catcacccttgacgctgaac

SEQ ID NO: 109845 - DNA, 20 bp, Artificial Sequence
  MKO10109845_B_Ppp3r2
  gRNA
atcgacatcttcgacacaga

SEQ ID NO: 109846 - DNA, 20 bp, Artificial Sequence
  MKO10109846_B_Ppp4c
  gRNA
tgagaccaactacctcttca

SEQ ID NO: 109847 - DNA, 20 bp, Artificial Sequence
  MKO10109847_B_Ppp4c
  gRNA
caggtatgcggtgacatcca

SEQ ID NO: 109848 - DNA, 20 bp, Artificial Sequence
  MKO10109848_B_Ppp4c
  gRNA
tagaagagagcaacgtgcag

SEQ ID NO: 109849 - DNA, 20 bp, Artificial Sequence
  MKO10109849_B_Ppp4r1
  gRNA
taccggagtcatcagctaat

SEQ ID NO: 109850 - DNA, 20 bp, Artificial Sequence
  MKO10109850_B_Ppp4r1
  gRNA
caagtgagaacgtatttaac

SEQ ID NO: 109851 - DNA, 20 bp, Artificial Sequence
  MKO10109851_B_Ppp4r1
  gRNA
catcttgtgagacgaagtcc

SEQ ID NO: 109852 - DNA, 20 bp, Artificial Sequence
  MKO10109852_B_Ppp4r2
  gRNA
aaaggaagtttgtcctgtac

SEQ ID NO: 109853 - DNA, 20 bp, Artificial Sequence
  MKO10109853_B_Ppp4r2
  gRNA
tctttccttcatttcatcaa

SEQ ID NO: 109854 - DNA, 20 bp, Artificial Sequence
  MKO10109854_B_Ppp4r2
  gRNA
attcagtggtcccaatttaa

SEQ ID NO: 109855 - DNA, 20 bp, Artificial Sequence
  MKO10109855_B_Ppp4r4
  gRNA
agtgctggtcaagatgtcca

SEQ ID NO: 109856 - DNA, 20 bp, Artificial Sequence
  MKO10109856_B_Ppp4r4
  gRNA
actctccgaagtgtctcagt

SEQ ID NO: 109857 - DNA, 20 bp, Artificial Sequence
  MKO10109857_B_Ppp4r4
  gRNA
aaagtattacctcatgcctc

SEQ ID NO: 109858 - DNA, 20 bp, Artificial Sequence
  MKO10109858_B_Ppp5c
  gRNA
cgagcacagacgctctgtcg

SEQ ID NO: 109859 - DNA, 20 bp, Artificial Sequence
  MKO10109859_B_Ppp5c
  gRNA
ttacctggtaggcgcacttc

SEQ ID NO: 109860 - DNA, 20 bp, Artificial Sequence
  MKO10109860_B_Ppp5c
  gRNA
gatccttgtaccactgcatg

SEQ ID NO: 109861 - DNA, 20 bp, Artificial Sequence
  MKO10109861_B_Ppp6c
  gRNA
ctttgtgaactgttcagaac

SEQ ID NO: 109862 - DNA, 20 bp, Artificial Sequence
  MKO10109862_B_Ppp6c
  gRNA
tgtgagcatatcaaaaactt

SEQ ID NO: 109863 - DNA, 20 bp, Artificial Sequence
  MKO10109863_B_Ppp6c
  gRNA
tgagagtagacagataacac

SEQ ID NO: 109864 - DNA, 20 bp, Artificial Sequence
  MKO10109864_B_Ppp6r1
  gRNA
gaatctgctcaattagccgc

SEQ ID NO: 109865 - DNA, 20 bp, Artificial Sequence
  MKO10109865_B_Ppp6r1
  gRNA
taccaatgtgccgcagcaac

SEQ ID NO: 109866 - DNA, 20 bp, Artificial Sequence
  MKO10109866_B_Ppp6r1
  gRNA
ggccttggatcatctgctcg

SEQ ID NO: 109867 - DNA, 20 bp, Artificial Sequence
  MKO10109867_B_Ppp6r2
  gRNA
cctagtctgtcgctgatctg

SEQ ID NO: 109868 - DNA, 20 bp, Artificial Sequence
  MKO10109868_B_Ppp6r2
  gRNA
tcacatgtaggacctcctgc

SEQ ID NO: 109869 - DNA, 20 bp, Artificial Sequence
  MKO10109869_B_Ppp6r2
  gRNA
ggatcaatgccacaattctc

SEQ ID NO: 109870 - DNA, 20 bp, Artificial Sequence
  MKO10109870_B_Ppp6r3
  gRNA
ctcccagatgaatgatagac

SEQ ID NO: 109871 - DNA, 20 bp, Artificial Sequence
  MKO10109871_B_Ppp6r3
  gRNA
gaactatttccacaagcctc

SEQ ID NO: 109872 - DNA, 20 bp, Artificial Sequence
  MKO10109872_B_Ppp6r3
  gRNA
ggatgaggaggatgttctac

SEQ ID NO: 109873 - DNA, 20 bp, Artificial Sequence
  MKO10109873_B_Pprc1
  gRNA
gacacgagcagctctgaatc

SEQ ID NO: 109874 - DNA, 20 bp, Artificial Sequence
  MKO10109874_B_Pprc1
  gRNA
tgagcagcgacatttcattc

SEQ ID NO: 109875 - DNA, 20 bp, Artificial Sequence
  MKO10109875_B_Pprc1
  gRNA
ctttgtcagtctttctcgac

SEQ ID NO: 109876 - DNA, 20 bp, Artificial Sequence
  MKO10109876_B_Ppt1
  gRNA
tctgacacaccatgttgact

SEQ ID NO: 109877 - DNA, 20 bp, Artificial Sequence
  MKO10109877_B_Ppt1
  gRNA
gttgtcctccaactgagatc

SEQ ID NO: 109878 - DNA, 20 bp, Artificial Sequence
  MKO10109878_B_Ppt1
  gRNA
ttgtatccctgctgcaactt

SEQ ID NO: 109879 - DNA, 20 bp, Artificial Sequence
  MKO10109879_B_Ppt2
  gRNA
acagtgcttgatctcttcga

SEQ ID NO: 109880 - DNA, 20 bp, Artificial Sequence
  MKO10109880_B_Ppt2
  gRNA
acaggtacaagggttccgag

SEQ ID NO: 109881 - DNA, 20 bp, Artificial Sequence
  MKO10109881_B_Ppt2
  gRNA
cctccatactggcccatctg

SEQ ID NO: 109882 - DNA, 20 bp, Artificial Sequence
  MKO10109882_B_Pptc7
  gRNA
tctgtccagcaccacgatgc

SEQ ID NO: 109883 - DNA, 20 bp, Artificial Sequence
  MKO10109883_B_Pptc7
  gRNA
ctttaatgcgaacatgcgag

SEQ ID NO: 109884 - DNA, 20 bp, Artificial Sequence
  MKO10109884_B_Pptc7
  gRNA
cagcaactcacagtagctcg

SEQ ID NO: 109885 - DNA, 20 bp, Artificial Sequence
  MKO10109885_B_Ppwd1
  gRNA
catgtaactgcgctcataca

SEQ ID NO: 109886 - DNA, 20 bp, Artificial Sequence
  MKO10109886_B_Ppwd1
  gRNA
tttaacatgtccatcatgac

SEQ ID NO: 109887 - DNA, 20 bp, Artificial Sequence
  MKO10109887_B_Ppwd1
  gRNA
atgatcaacatgctgaagct

SEQ ID NO: 109888 - DNA, 20 bp, Artificial Sequence
  MKO10109888_B_Ppy
  gRNA
cagggggagagctgcactcc

SEQ ID NO: 109889 - DNA, 20 bp, Artificial Sequence
  MKO10109889_B_Ppy
  gRNA
ggagaggcagcagtatgcga

SEQ ID NO: 109890 - DNA, 20 bp, Artificial Sequence
  MKO10109890_B_Ppy
  gRNA
ctatgcgacacctgagcaga

SEQ ID NO: 109891 - DNA, 20 bp, Artificial Sequence
  MKO10109891_B_Pqbp1
  gRNA
acagcggactcccttactat

SEQ ID NO: 109892 - DNA, 20 bp, Artificial Sequence
  MKO10109892_B_Pqbp1
  gRNA
ccgacgccaccatcgcagag

SEQ ID NO: 109893 - DNA, 20 bp, Artificial Sequence
  MKO10109893_B_Pqbp1
  gRNA
tgatgatcctgttgactatg

SEQ ID NO: 109894 - DNA, 20 bp, Artificial Sequence
  MKO10109894_B_Pqlc1
  gRNA
cggaggactcagaatgccga

SEQ ID NO: 109895 - DNA, 20 bp, Artificial Sequence
  MKO10109895_B_Pqlc1
  gRNA
tactacccctccgaagacca

SEQ ID NO: 109896 - DNA, 20 bp, Artificial Sequence
  MKO10109896_B_Pqlc1
  gRNA
atcaagcgccgctcctttgc

SEQ ID NO: 109897 - DNA, 20 bp, Artificial Sequence
  MKO10109897_B_Pqlc2
  gRNA
tggaccaggccctatcactg

SEQ ID NO: 109898 - DNA, 20 bp, Artificial Sequence
  MKO10109898_B_Pqlc2
  gRNA
cagacaggagtgtccgcccc

SEQ ID NO: 109899 - DNA, 20 bp, Artificial Sequence
  MKO10109899_B_Pqlc2
  gRNA
ctccaccgatccagcccagc

SEQ ID NO: 109900 - DNA, 20 bp, Artificial Sequence
  MKO10109900_B_Pqlc3
  gRNA
gaatggaggccggactgcta

SEQ ID NO: 109901 - DNA, 20 bp, Artificial Sequence
  MKO10109901_B_Pqlc3
  gRNA
gccagctgcgcgtaaatctg

SEQ ID NO: 109902 - DNA, 20 bp, Artificial Sequence
  MKO10109902_B_Pqlc3
  gRNA
tgaaatgaaagacgaagagc

SEQ ID NO: 109903 - DNA, 20 bp, Artificial Sequence
  MKO10109903_B_Pradc1
  gRNA
ttgagctactgcaacctccg

SEQ ID NO: 109904 - DNA, 20 bp, Artificial Sequence
  MKO10109904_B_Pradc1
  gRNA
gccgttgctgagttccccgc

SEQ ID NO: 109905 - DNA, 20 bp, Artificial Sequence
  MKO10109905_B_Pradc1
  gRNA
ccctttccaccagagcgatc

SEQ ID NO: 109906 - DNA, 20 bp, Artificial Sequence
  MKO10109906_B_Praf2
  gRNA
aggcagcagggtggctgcga

SEQ ID NO: 109907 - DNA, 20 bp, Artificial Sequence
  MKO10109907_B_Praf2
  gRNA
gcctctagaagcaatcccat

SEQ ID NO: 109908 - DNA, 20 bp, Artificial Sequence
  MKO10109908_B_Praf2
  gRNA
gagaacaagatcgagagcat

SEQ ID NO: 109909 - DNA, 20 bp, Artificial Sequence
  MKO10109909_B_Pram1
  gRNA
tccacagcggtactgaagac

SEQ ID NO: 109910 - DNA, 20 bp, Artificial Sequence
  MKO10109910_B_Pram1
  gRNA
gctgatactagagtcatctg

SEQ ID NO: 109911 - DNA, 20 bp, Artificial Sequence
  MKO10109911_B_Pram1
  gRNA
actcactgtgcaatatgttg

SEQ ID NO: 109912 - DNA, 20 bp, Artificial Sequence
  MKO10109912_B_Pramef12
  gRNA
caagcttaaatagttcagcc

SEQ ID NO: 109913 - DNA, 20 bp, Artificial Sequence
  MKO10109913_B_Pramef12
  gRNA
ttgacctttgaggaagtcga

SEQ ID NO: 109914 - DNA, 20 bp, Artificial Sequence
  MKO10109914_B_Pramef12
  gRNA
acaaacgacttaacatcctg

SEQ ID NO: 109915 - DNA, 20 bp, Artificial Sequence
  MKO10109915_B_Pramef17
  gRNA
gctgatagataaaaccaact

SEQ ID NO: 109916 - DNA, 20 bp, Artificial Sequence
  MKO10109916_B_Pramef17
  gRNA
tatgcctgagaagcaagaag

SEQ ID NO: 109917 - DNA, 20 bp, Artificial Sequence
  MKO10109917_B_Pramef17
  gRNA
cccacccacactcctgcagc

SEQ ID NO: 109918 - DNA, 20 bp, Artificial Sequence
  MKO10109918_B_Pramef25
  gRNA
aattgcctattcacactgtc

SEQ ID NO: 109919 - DNA, 20 bp, Artificial Sequence
  MKO10109919_B_Pramef25
  gRNA
tcatctcaaacacttgcatt

SEQ ID NO: 109920 - DNA, 20 bp, Artificial Sequence
  MKO10109920_B_Pramef25
  gRNA
aatgcaagtgtttgagatga

SEQ ID NO: 109921 - DNA, 20 bp, Artificial Sequence
  MKO10109921_B_Pramef6
  gRNA
tctccagggtcagctttgtg

SEQ ID NO: 109922 - DNA, 20 bp, Artificial Sequence
  MKO10109922_B_Pramef6
  gRNA
ttcccctgccagctcattct

SEQ ID NO: 109923 - DNA, 20 bp, Artificial Sequence
  MKO10109923_B_Pramef6
  gRNA
tccaggcaccaagaatgagc

SEQ ID NO: 109924 - DNA, 20 bp, Artificial Sequence
  MKO10109924_B_Pramef8
  gRNA
agacaaaactttgtcgttgt

SEQ ID NO: 109925 - DNA, 20 bp, Artificial Sequence
  MKO10109925_B_Pramef8
  gRNA
gagcagtgggaaaagcgccc

SEQ ID NO: 109926 - DNA, 20 bp, Artificial Sequence
  MKO10109926_B_Pramef8
  gRNA
cctgatgaagactccccacc

SEQ ID NO: 109927 - DNA, 20 bp, Artificial Sequence
  MKO10109927_B_Pramel1
  gRNA
ctactgatcatggcccccag

SEQ ID NO: 109928 - DNA, 20 bp, Artificial Sequence
  MKO10109928_B_Pramel1
  gRNA
taaagcgtatctttgactgt

SEQ ID NO: 109929 - DNA, 20 bp, Artificial Sequence
  MKO10109929_B_Pramel1
  gRNA
tttgacagccctccaaatcc

SEQ ID NO: 109930 - DNA, 20 bp, Artificial Sequence
  MKO10109930_B_Pramel3
  gRNA
cttacctagtagctgagttc

SEQ ID NO: 109931 - DNA, 20 bp, Artificial Sequence
  MKO10109931_B_Pramel3
  gRNA
cagtttcaagatgatctgtg

SEQ ID NO: 109932 - DNA, 20 bp, Artificial Sequence
  MKO10109932_B_Pramel3
  gRNA
aatgccacctcccatagcaa

SEQ ID NO: 109933 - DNA, 20 bp, Artificial Sequence
  MKO10109933_B_Pramel4
  gRNA
tcctttcttacctgagcatt

SEQ ID NO: 109934 - DNA, 20 bp, Artificial Sequence
  MKO10109934_B_Pramel4
  gRNA
tgatttgcgagatgcccacc

SEQ ID NO: 109935 - DNA, 20 bp, Artificial Sequence
  MKO10109935_B_Pramel4
  gRNA
ccacgacctctccttcttaa

SEQ ID NO: 109936 - DNA, 20 bp, Artificial Sequence
  MKO10109936_B_Pramel5
  gRNA
cacggatttggaagtccgtg

SEQ ID NO: 109937 - DNA, 20 bp, Artificial Sequence
  MKO10109937_B_Pramel5
  gRNA
tctgggtgggattgatcacc

SEQ ID NO: 109938 - DNA, 20 bp, Artificial Sequence
  MKO10109938_B_Pramel5
  gRNA
atcccacccagagctcccac

SEQ ID NO: 109939 - DNA, 20 bp, Artificial Sequence
  MKO10109939_B_Pramel6
  gRNA
aggcagacaccattgcaatc

SEQ ID NO: 109940 - DNA, 20 bp, Artificial Sequence
  MKO10109940_B_Pramel6
  gRNA
aatgaaccttccctgttacc

SEQ ID NO: 109941 - DNA, 20 bp, Artificial Sequence
  MKO10109941_B_Pramel6
  gRNA
tttgaagaccttgtcaatta

SEQ ID NO: 109942 - DNA, 20 bp, Artificial Sequence
  MKO10109942_B_Pramel7
  gRNA
agtattgaccgtctctgatg

SEQ ID NO: 109943 - DNA, 20 bp, Artificial Sequence
  MKO10109943_B_Pramel7
  gRNA
gtgggaagaattcccttatt

SEQ ID NO: 109944 - DNA, 20 bp, Artificial Sequence
  MKO10109944_B_Pramel7
  gRNA
cttaaacatctatgcttgag

SEQ ID NO: 109945 - DNA, 20 bp, Artificial Sequence
  MKO10109945_B_Prame
  gRNA
tatagccagatccaaaagcg

SEQ ID NO: 109946 - DNA, 20 bp, Artificial Sequence
  MKO10109946_B_Prame
  gRNA
ttagtaacaacccaatgtat

SEQ ID NO: 109947 - DNA, 20 bp, Artificial Sequence
  MKO10109947_B_Prame
  gRNA
agagtatggcatctgttaaa

SEQ ID NO: 109948 - DNA, 20 bp, Artificial Sequence
  MKO10109948_B_Prap1
  gRNA
tcttgaaaaggacaaccagc

SEQ ID NO: 109949 - DNA, 20 bp, Artificial Sequence
  MKO10109949_B_Prap1
  gRNA
gtttctcctggccacctgtt

SEQ ID NO: 109950 - DNA, 20 bp, Artificial Sequence
  MKO10109950_B_Prap1
  gRNA
caaacatgtgttccctgaac

SEQ ID NO: 109951 - DNA, 20 bp, Artificial Sequence
  MKO10109951_B_Prb1
  gRNA
cttgtctctgagctgagctc

SEQ ID NO: 109952 - DNA, 20 bp, Artificial Sequence
  MKO10109952_B_Prb1
  gRNA
gactcaaattctcagctcct

SEQ ID NO: 109953 - DNA, 20 bp, Artificial Sequence
  MKO10109953_B_Prb1
  gRNA
ctgagaatttgagtcttcgt

SEQ ID NO: 109954 - DNA, 20 bp, Artificial Sequence
  MKO10109954_B_Prc1
  gRNA
gcaggaactgaagctacttc

SEQ ID NO: 109955 - DNA, 20 bp, Artificial Sequence
  MKO10109955_B_Prc1
  gRNA
gcagaggctacaaagaaccg

SEQ ID NO: 109956 - DNA, 20 bp, Artificial Sequence
  MKO10109956_B_Prc1
  gRNA
tacaagctttgaaagagatg

SEQ ID NO: 109957 - DNA, 20 bp, Artificial Sequence
  MKO10109957_B_Prcc
  gRNA
tggctataggattactacag

SEQ ID NO: 109958 - DNA, 20 bp, Artificial Sequence
  MKO10109958_B_Prcc
  gRNA
aggacaactttcttcttcgc

SEQ ID NO: 109959 - DNA, 20 bp, Artificial Sequence
  MKO10109959_B_Prcc
  gRNA
gaagaagaaagttgtcctgc

SEQ ID NO: 109960 - DNA, 20 bp, Artificial Sequence
  MKO10109960_B_Prcp
  gRNA
acctagtcgctgataaacac

SEQ ID NO: 109961 - DNA, 20 bp, Artificial Sequence
  MKO10109961_B_Prcp
  gRNA
ataccatcaagctgccagat

SEQ ID NO: 109962 - DNA, 20 bp, Artificial Sequence
  MKO10109962_B_Prcp
  gRNA
agattgtaactaacgatttc

SEQ ID NO: 109963 - DNA, 20 bp, Artificial Sequence
  MKO10109963_B_Prdm10
  gRNA
accgtccactgacgtgtagg

SEQ ID NO: 109964 - DNA, 20 bp, Artificial Sequence
  MKO10109964_B_Prdm10
  gRNA
ctgctgtatacaccacctgc

SEQ ID NO: 109965 - DNA, 20 bp, Artificial Sequence
  MKO10109965_B_Prdm10
  gRNA
cctgttggacataagctacc

SEQ ID NO: 109966 - DNA, 20 bp, Artificial Sequence
  MKO10109966_B_Prdm11
  gRNA
acagcgagcgcatctacttc

SEQ ID NO: 109967 - DNA, 20 bp, Artificial Sequence
  MKO10109967_B_Prdm11
  gRNA
atggtgagggctgcccgatc

SEQ ID NO: 109968 - DNA, 20 bp, Artificial Sequence
  MKO10109968_B_Prdm11
  gRNA
ccggagcagctctcggagac

SEQ ID NO: 109969 - DNA, 20 bp, Artificial Sequence
  MKO10109969_B_Prdm12
  gRNA
tcatacctaggtattcaacg

SEQ ID NO: 109970 - DNA, 20 bp, Artificial Sequence
  MKO10109970_B_Prdm12
  gRNA
aggcacgagcatcttctaca

SEQ ID NO: 109971 - DNA, 20 bp, Artificial Sequence
  MKO10109971_B_Prdm12
  gRNA
ggcaatgacgcggccagtga

SEQ ID NO: 109972 - DNA, 20 bp, Artificial Sequence
  MKO10109972_B_Prdm13
  gRNA
gcattgttgccaccgccgcc

SEQ ID NO: 109973 - DNA, 20 bp, Artificial Sequence
  MKO10109973_B_Prdm13
  gRNA
gcattgcgagacgtccagcc

SEQ ID NO: 109974 - DNA, 20 bp, Artificial Sequence
  MKO10109974_B_Prdm13
  gRNA
actccaacgcatgatgagaa

SEQ ID NO: 109975 - DNA, 20 bp, Artificial Sequence
  MKO10109975_B_Prdm14
  gRNA
gcagcctaccttccggaagc

SEQ ID NO: 109976 - DNA, 20 bp, Artificial Sequence
  MKO10109976_B_Prdm14
  gRNA
tgcctcatgcagacctcatt

SEQ ID NO: 109977 - DNA, 20 bp, Artificial Sequence
  MKO10109977_B_Prdm14
  gRNA
gaaccgagcacagttgacat

SEQ ID NO: 109978 - DNA, 20 bp, Artificial Sequence
  MKO10109978_B_Prdm15
  gRNA
ccagttgcagtcatcctcat

SEQ ID NO: 109979 - DNA, 20 bp, Artificial Sequence
  MKO10109979_B_Prdm15
  gRNA
ctgcagccagtaccatgact

SEQ ID NO: 109980 - DNA, 20 bp, Artificial Sequence
  MKO10109980_B_Prdm15
  gRNA
aggactcctttgtgctgagc

SEQ ID NO: 109981 - DNA, 20 bp, Artificial Sequence
  MKO10109981_B_Prdm16
  gRNA
gctgccagaccccgcctgat

SEQ ID NO: 109982 - DNA, 20 bp, Artificial Sequence
  MKO10109982_B_Prdm16
  gRNA
catgtgtcagatcaacgaac

SEQ ID NO: 109983 - DNA, 20 bp, Artificial Sequence
  MKO10109983_B_Prdm16
  gRNA
tagcttcctcgccctcgcct

SEQ ID NO: 109984 - DNA, 20 bp, Artificial Sequence
  MKO10109984_B_Prdm1
  gRNA
acatagtgaacgaccacccc

SEQ ID NO: 109985 - DNA, 20 bp, Artificial Sequence
  MKO10109985_B_Prdm1
  gRNA
gatgttcatcccgttctgac

SEQ ID NO: 109986 - DNA, 20 bp, Artificial Sequence
  MKO10109986_B_Prdm1
  gRNA
ccgagttccctgcctaccga

SEQ ID NO: 109987 - DNA, 20 bp, Artificial Sequence
  MKO10109987_B_Prdm2
  gRNA
agctcctcgccaggcgcgat

SEQ ID NO: 109988 - DNA, 20 bp, Artificial Sequence
  MKO10109988_B_Prdm2
  gRNA
ctaggtgtactacccaaatt

SEQ ID NO: 109989 - DNA, 20 bp, Artificial Sequence
  MKO10109989_B_Prdm2
  gRNA
actggctccgctatgtgaac

SEQ ID NO: 109990 - DNA, 20 bp, Artificial Sequence
  MKO10109990_B_Prdm4
  gRNA
gagtgccacgcttacagagt

SEQ ID NO: 109991 - DNA, 20 bp, Artificial Sequence
  MKO10109991_B_Prdm4
  gRNA
ctccagaccattcccgtgaa

SEQ ID NO: 109992 - DNA, 20 bp, Artificial Sequence
  MKO10109992_B_Prdm4
  gRNA
cccccctttaggacttccag

SEQ ID NO: 109993 - DNA, 20 bp, Artificial Sequence
  MKO10109993_B_Prdm5
  gRNA
gtgaacaaagcgaagccagt

SEQ ID NO: 109994 - DNA, 20 bp, Artificial Sequence
  MKO10109994_B_Prdm5
  gRNA
gagttcaaatgcgagaactg

SEQ ID NO: 109995 - DNA, 20 bp, Artificial Sequence
  MKO10109995_B_Prdm5
  gRNA
tgaccactctaagggacagt

SEQ ID NO: 109996 - DNA, 20 bp, Artificial Sequence
  MKO10109996_B_Prdm6
  gRNA
cacaggttgcgatatgtgcg

SEQ ID NO: 109997 - DNA, 20 bp, Artificial Sequence
  MKO10109997_B_Prdm6
  gRNA
cacggagcgctgctggcccg

SEQ ID NO: 109998 - DNA, 20 bp, Artificial Sequence
  MKO10109998_B_Prdm6
  gRNA
gaacgtcccttccaccgtaa

SEQ ID NO: 109999 - DNA, 20 bp, Artificial Sequence
  MKO10109999_B_Prdm8
  gRNA
ggtccaatcagcccgagata

SEQ ID NO: 110000 - DNA, 20 bp, Artificial Sequence
  MKO10110000_B_Prdm8
  gRNA
tgttctaccgctctctccgc

SEQ ID NO: 110001 - DNA, 20 bp, Artificial Sequence
  MKO10110001_B_Prdm8
  gRNA
gaacagtaccttacatcttc

SEQ ID NO: 110002 - DNA, 20 bp, Artificial Sequence
  MKO10110002_B_Prdm9
  gRNA
ttcgctatagaaatgtgaaa

SEQ ID NO: 110003 - DNA, 20 bp, Artificial Sequence
  MKO10110003_B_Prdm9
  gRNA
gctgtttactgtgcttcacc

SEQ ID NO: 110004 - DNA, 20 bp, Artificial Sequence
  MKO10110004_B_Prdm9
  gRNA
accccaaataaatgacagtg

SEQ ID NO: 110005 - DNA, 20 bp, Artificial Sequence
  MKO10110005_B_Prdx1
  gRNA
gttgagtttcttaaattcat

SEQ ID NO: 110006 - DNA, 20 bp, Artificial Sequence
  MKO10110006_B_Prdx1
  gRNA
gactccataatcctgagcaa

SEQ ID NO: 110007 - DNA, 20 bp, Artificial Sequence
  MKO10110007_B_Prdx1
  gRNA
attaacacacccaagaaaca

SEQ ID NO: 110008 - DNA, 20 bp, Artificial Sequence
  MKO10110008_B_Prdx2
  gRNA
ttccttgctgtcatccacat

SEQ ID NO: 110009 - DNA, 20 bp, Artificial Sequence
  MKO10110009_B_Prdx2
  gRNA
ctgccgggcttccagccagc

SEQ ID NO: 110010 - DNA, 20 bp, Artificial Sequence
  MKO10110010_B_Prdx2
  gRNA
cccaagcctccctccttccg

SEQ ID NO: 110011 - DNA, 20 bp, Artificial Sequence
  MKO10110011_B_Prdx3
  gRNA
ccacagtatgtctgtcaaac

SEQ ID NO: 110012 - DNA, 20 bp, Artificial Sequence
  MKO10110012_B_Prdx3
  gRNA
aagcagatatcccgagacta

SEQ ID NO: 110013 - DNA, 20 bp, Artificial Sequence
  MKO10110013_B_Prdx3
  gRNA
gcgcgtgctgggtgacagca

SEQ ID NO: 110014 - DNA, 20 bp, Artificial Sequence
  MKO10110014_B_Prdx4
  gRNA
attaatacccctcgaagaca

SEQ ID NO: 110015 - DNA, 20 bp, Artificial Sequence
  MKO10110015_B_Prdx4
  gRNA
tctccaagccagcaccttat

SEQ ID NO: 110016 - DNA, 20 bp, Artificial Sequence
  MKO10110016_B_Prdx4
  gRNA
ctcaaactgactgactatcg

SEQ ID NO: 110017 - DNA, 20 bp, Artificial Sequence
  MKO10110017_B_Prdx5
  gRNA
ctgaccccactggagccttt

SEQ ID NO: 110018 - DNA, 20 bp, Artificial Sequence
  MKO10110018_B_Prdx5
  gRNA
atttacacctggctgttcta

SEQ ID NO: 110019 - DNA, 20 bp, Artificial Sequence
  MKO10110019_B_Prdx5
  gRNA
agtctcaccttagaacagcc

SEQ ID NO: 110020 - DNA, 20 bp, Artificial Sequence
  MKO10110020_B_Prdx6b
  gRNA
ccttcccgacctccccgaag

SEQ ID NO: 110021 - DNA, 20 bp, Artificial Sequence
  MKO10110021_B_Prdx6b
  gRNA
gtggaagcggatacggccga

SEQ ID NO: 110022 - DNA, 20 bp, Artificial Sequence
  MKO10110022_B_Prdx6b
  gRNA
tggtattggcctcaaagtcg

SEQ ID NO: 110023 - DNA, 20 bp, Artificial Sequence
  MKO10110023_B_Prdx6
  gRNA
ttcaccaaagagctcccgtc

SEQ ID NO: 110024 - DNA, 20 bp, Artificial Sequence
  MKO10110024_B_Prdx6
  gRNA
tgccaccccagttgactgga

SEQ ID NO: 110025 - DNA, 20 bp, Artificial Sequence
  MKO10110025_B_Prdx6
  gRNA
cacactggggtaaagtcccg

SEQ ID NO: 110026 - DNA, 20 bp, Artificial Sequence
  MKO10110026_B_Preb
  gRNA
ctgatggtcatgttcgtgtc

SEQ ID NO: 110027 - DNA, 20 bp, Artificial Sequence
  MKO10110027_B_Preb
  gRNA
gcggtatggtgtattagaag

SEQ ID NO: 110028 - DNA, 20 bp, Artificial Sequence
  MKO10110028_B_Preb
  gRNA
gacacgggccaccatgaatt

SEQ ID NO: 110029 - DNA, 20 bp, Artificial Sequence
  MKO10110029_B_Prelid1
  gRNA
gccaggaatttggtcttgcc

SEQ ID NO: 110030 - DNA, 20 bp, Artificial Sequence
  MKO10110030_B_Prelid1
  gRNA
tggcgtctccagagctgtcc

SEQ ID NO: 110031 - DNA, 20 bp, Artificial Sequence
  MKO10110031_B_Prelid1
  gRNA
agggccctcaccttgtagct

SEQ ID NO: 110032 - DNA, 20 bp, Artificial Sequence
  MKO10110032_B_Prelid2
  gRNA
aaagcgtagaaaatccaaat

SEQ ID NO: 110033 - DNA, 20 bp, Artificial Sequence
  MKO10110033_B_Prelid2
  gRNA
atgcatactgtgtccacgtg

SEQ ID NO: 110034 - DNA, 20 bp, Artificial Sequence
  MKO10110034_B_Prelid2
  gRNA
tgtcatctctgtaaaaactg

SEQ ID NO: 110035 - DNA, 20 bp, Artificial Sequence
  MKO10110035_B_Prelp
  gRNA
gaaaatttccatccagccgc

SEQ ID NO: 110036 - DNA, 20 bp, Artificial Sequence
  MKO10110036_B_Prelp
  gRNA
gtgacagccgaaacctgcga

SEQ ID NO: 110037 - DNA, 20 bp, Artificial Sequence
  MKO10110037_B_Prelp
  gRNA
ttaggcgtaaacccaagccg

SEQ ID NO: 110038 - DNA, 20 bp, Artificial Sequence
  MKO10110038_B_Prepl
  gRNA
acgacttcgtactcttcctg

SEQ ID NO: 110039 - DNA, 20 bp, Artificial Sequence
  MKO10110039_B_Prepl
  gRNA
acgacgcttccattacaggc

SEQ ID NO: 110040 - DNA, 20 bp, Artificial Sequence
  MKO10110040_B_Prepl
  gRNA
gtacgaagtcgtcaatgcag

SEQ ID NO: 110041 - DNA, 20 bp, Artificial Sequence
  MKO10110041_B_Prep
  gRNA
gaacttgatcgtcacccagt

SEQ ID NO: 110042 - DNA, 20 bp, Artificial Sequence
  MKO10110042_B_Prep
  gRNA
gatggtacagtggcactccg

SEQ ID NO: 110043 - DNA, 20 bp, Artificial Sequence
  MKO10110043_B_Prep
  gRNA
accttagtctgctcgctgtc

SEQ ID NO: 110044 - DNA, 20 bp, Artificial Sequence
  MKO10110044_B_Prex1
  gRNA
cggggtgtaagcagtactcc

SEQ ID NO: 110045 - DNA, 20 bp, Artificial Sequence
  MKO10110045_B_Prex1
  gRNA
gcagaatgtggccgactctg

SEQ ID NO: 110046 - DNA, 20 bp, Artificial Sequence
  MKO10110046_B_Prex1
  gRNA
tttgtagagctgcatgcttc

SEQ ID NO: 110047 - DNA, 20 bp, Artificial Sequence
  MKO10110047_B_Prex2
  gRNA
gatgttattctccaatatcg

SEQ ID NO: 110048 - DNA, 20 bp, Artificial Sequence
  MKO10110048_B_Prex2
  gRNA
caacctttgctgctgcacat

SEQ ID NO: 110049 - DNA, 20 bp, Artificial Sequence
  MKO10110049_B_Prex2
  gRNA
atattgcagcaaccatgaaa

SEQ ID NO: 110050 - DNA, 20 bp, Artificial Sequence
  MKO10110050_B_Prf1
  gRNA
cagtagagtgtcgcatgtac

SEQ ID NO: 110051 - DNA, 20 bp, Artificial Sequence
  MKO10110051_B_Prf1
  gRNA
cccgaagagcagatcatgcg

SEQ ID NO: 110052 - DNA, 20 bp, Artificial Sequence
  MKO10110052_B_Prf1
  gRNA
gtacttcgacgtgacgctca

SEQ ID NO: 110053 - DNA, 20 bp, Artificial Sequence
  MKO10110053_B_Prg2
  gRNA
cagcctcaccttgagtacac

SEQ ID NO: 110054 - DNA, 20 bp, Artificial Sequence
  MKO10110054_B_Prg2
  gRNA
cacagtgagatagacgccag

SEQ ID NO: 110055 - DNA, 20 bp, Artificial Sequence
  MKO10110055_B_Prg2
  gRNA
cgtggaccttcagtgcccca

SEQ ID NO: 110056 - DNA, 20 bp, Artificial Sequence
  MKO10110056_B_Prg3
  gRNA
tgcatgaagctcttcgccaa

SEQ ID NO: 110057 - DNA, 20 bp, Artificial Sequence
  MKO10110057_B_Prg3
  gRNA
gatggactgattgatcttcc

SEQ ID NO: 110058 - DNA, 20 bp, Artificial Sequence
  MKO10110058_B_Prg3
  gRNA
gatgggagctgctgggattt

SEQ ID NO: 110059 - DNA, 20 bp, Artificial Sequence
  MKO10110059_B_Prg4
  gRNA
gtgcagactctcttgaaatc

SEQ ID NO: 110060 - DNA, 20 bp, Artificial Sequence
  MKO10110060_B_Prg4
  gRNA
tcctgttgtcttgattcaac

SEQ ID NO: 110061 - DNA, 20 bp, Artificial Sequence
  MKO10110061_B_Prg4
  gRNA
aatgccttgattgagtctcc

SEQ ID NO: 110062 - DNA, 20 bp, Artificial Sequence
  MKO10110062_B_Prh1
  gRNA
gctggtggtcctgtttacag

SEQ ID NO: 110063 - DNA, 20 bp, Artificial Sequence
  MKO10110063_B_Prh1
  gRNA
ggtgggccttgagtgggact

SEQ ID NO: 110064 - DNA, 20 bp, Artificial Sequence
  MKO10110064_B_Prh1
  gRNA
ggtgggccttgagtaggtct

SEQ ID NO: 110065 - DNA, 20 bp, Artificial Sequence
  MKO10110065_B_Prickle1
  gRNA
cttcacgtgtaatgaactac

SEQ ID NO: 110066 - DNA, 20 bp, Artificial Sequence
  MKO10110066_B_Prickle1
  gRNA
gatgcacgccgtgtgtgagc

SEQ ID NO: 110067 - DNA, 20 bp, Artificial Sequence
  MKO10110067_B_Prickle1
  gRNA
tctcttcttcgctcaaagac

SEQ ID NO: 110068 - DNA, 20 bp, Artificial Sequence
  MKO10110068_B_Prickle2
  gRNA
gctgccgccccatgacaatg

SEQ ID NO: 110069 - DNA, 20 bp, Artificial Sequence
  MKO10110069_B_Prickle2
  gRNA
ggttcggtattgcaactccc

SEQ ID NO: 110070 - DNA, 20 bp, Artificial Sequence
  MKO10110070_B_Prickle2
  gRNA
cctttccccgtcaccatgac

SEQ ID NO: 110071 - DNA, 20 bp, Artificial Sequence
  MKO10110071_B_Prickle3
  gRNA
gctacccccacacgacagtg

SEQ ID NO: 110072 - DNA, 20 bp, Artificial Sequence
  MKO10110072_B_Prickle3
  gRNA
ctcctcacctcactgtcgtg

SEQ ID NO: 110073 - DNA, 20 bp, Artificial Sequence
  MKO10110073_B_Prickle3
  gRNA
cacaaacctcatcacacgct

SEQ ID NO: 110074 - DNA, 20 bp, Artificial Sequence
  MKO10110074_B_Prim1
  gRNA
tggccatgcgcatcatagac

SEQ ID NO: 110075 - DNA, 20 bp, Artificial Sequence
  MKO10110075_B_Prim1
  gRNA
ggagtacttgagtcttgtaa

SEQ ID NO: 110076 - DNA, 20 bp, Artificial Sequence
  MKO10110076_B_Prim1
  gRNA
gacacatacccttcaatgcc

SEQ ID NO: 110077 - DNA, 20 bp, Artificial Sequence
  MKO10110077_B_Prim2
  gRNA
tctgctgtagatcagtgacg

SEQ ID NO: 110078 - DNA, 20 bp, Artificial Sequence
  MKO10110078_B_Prim2
  gRNA
aaacttgagctttcgaatct

SEQ ID NO: 110079 - DNA, 20 bp, Artificial Sequence
  MKO10110079_B_Prim2
  gRNA
ctttcacatagctcacaccg

SEQ ID NO: 110080 - DNA, 20 bp, Artificial Sequence
  MKO10110080_B_Prima1
  gRNA
cgttcacatccacccctttg

SEQ ID NO: 110081 - DNA, 20 bp, Artificial Sequence
  MKO10110081_B_Prima1
  gRNA
agcagccatggcgcagcacc

SEQ ID NO: 110082 - DNA, 20 bp, Artificial Sequence
  MKO10110082_B_Prima1
  gRNA
cccagactactctccgcccc

SEQ ID NO: 110083 - DNA, 20 bp, Artificial Sequence
  MKO10110083_B_Primpol
  gRNA
aatatttcagctccacaatg

SEQ ID NO: 110084 - DNA, 20 bp, Artificial Sequence
  MKO10110084_B_Primpol
  gRNA
gagcgttcacgtatttgctt

SEQ ID NO: 110085 - DNA, 20 bp, Artificial Sequence
  MKO10110085_B_Primpol
  gRNA
tttaaagataacaggcatgc

SEQ ID NO: 110086 - DNA, 20 bp, Artificial Sequence
  MKO10110086_B_Prkaa1
  gRNA
aatgcaaagatagccgactt

SEQ ID NO: 110087 - DNA, 20 bp, Artificial Sequence
  MKO10110087_B_Prkaa1
  gRNA
cattcatgtgtgcatcaagc

SEQ ID NO: 110088 - DNA, 20 bp, Artificial Sequence
  MKO10110088_B_Prkaa1
  gRNA
taccttcctgaaatgacttc

SEQ ID NO: 110089 - DNA, 20 bp, Artificial Sequence
  MKO10110089_B_Prkaa2
  gRNA
acaggcatatggttgtccat

SEQ ID NO: 110090 - DNA, 20 bp, Artificial Sequence
  MKO10110090_B_Prkaa2
  gRNA
attcgcagtttagatgttgt

SEQ ID NO: 110091 - DNA, 20 bp, Artificial Sequence
  MKO10110091_B_Prkaa2
  gRNA
gccaaattatgcagcacctg

SEQ ID NO: 110092 - DNA, 20 bp, Artificial Sequence
  MKO10110092_B_Prkab1
  gRNA
caaaagtgctccgatgtgtc

SEQ ID NO: 110093 - DNA, 20 bp, Artificial Sequence
  MKO10110093_B_Prkab1
  gRNA
gagctgtccagctcgccccc

SEQ ID NO: 110094 - DNA, 20 bp, Artificial Sequence
  MKO10110094_B_Prkab1
  gRNA
gtggacccatgatccttctg

SEQ ID NO: 110095 - DNA, 20 bp, Artificial Sequence
  MKO10110095_B_Prkab2
  gRNA
gtgggttcatgatccgtcag

SEQ ID NO: 110096 - DNA, 20 bp, Artificial Sequence
  MKO10110096_B_Prkab2
  gRNA
ttctgtgaagcccgcccagc

SEQ ID NO: 110097 - DNA, 20 bp, Artificial Sequence
  MKO10110097_B_Prkab2
  gRNA
caaaatcagatttcttgacg

SEQ ID NO: 110098 - DNA, 20 bp, Artificial Sequence
  MKO10110098_B_Prkaca
  gRNA
ggacaactcaaacctgtaca

SEQ ID NO: 110099 - DNA, 20 bp, Artificial Sequence
  MKO10110099_B_Prkaca
  gRNA
caccagcatcactcgcccaa

SEQ ID NO: 110100 - DNA, 20 bp, Artificial Sequence
  MKO10110100_B_Prkaca
  gRNA
acgggaagttgacggcctgc

SEQ ID NO: 110101 - DNA, 20 bp, Artificial Sequence
  MKO10110101_B_Prkacb
  gRNA
caccaacatgactcttccaa

SEQ ID NO: 110102 - DNA, 20 bp, Artificial Sequence
  MKO10110102_B_Prkacb
  gRNA
ggataattctaatttataca

SEQ ID NO: 110103 - DNA, 20 bp, Artificial Sequence
  MKO10110103_B_Prkacb
  gRNA
tgtgagaacatctctccccc

SEQ ID NO: 110104 - DNA, 20 bp, Artificial Sequence
  MKO10110104_B_Prkag1
  gRNA
agtgtcaaataccaccaact

SEQ ID NO: 110105 - DNA, 20 bp, Artificial Sequence
  MKO10110105_B_Prkag1
  gRNA
ccagggctgacttatagtat

SEQ ID NO: 110106 - DNA, 20 bp, Artificial Sequence
  MKO10110106_B_Prkag1
  gRNA
aatgttgatgaagtcggtga

SEQ ID NO: 110107 - DNA, 20 bp, Artificial Sequence
  MKO10110107_B_Prkag2
  gRNA
cagatactataaatcaccca

SEQ ID NO: 110108 - DNA, 20 bp, Artificial Sequence
  MKO10110108_B_Prkag2
  gRNA
agccggcatgctggagaagc

SEQ ID NO: 110109 - DNA, 20 bp, Artificial Sequence
  MKO10110109_B_Prkag2
  gRNA
gtgatttatagtatctgtgt

SEQ ID NO: 110110 - DNA, 20 bp, Artificial Sequence
  MKO10110110_B_Prkag3
  gRNA
ccccacttctcggcctgagt

SEQ ID NO: 110111 - DNA, 20 bp, Artificial Sequence
  MKO10110111_B_Prkag3
  gRNA
cctcacaccgttggccacca

SEQ ID NO: 110112 - DNA, 20 bp, Artificial Sequence
  MKO10110112_B_Prkag3
  gRNA
agtgggggtccagagagtca

SEQ ID NO: 110113 - DNA, 20 bp, Artificial Sequence
  MKO10110113_B_Prkar1a
  gRNA
accttctctcgttatcatca

SEQ ID NO: 110114 - DNA, 20 bp, Artificial Sequence
  MKO10110114_B_Prkar1a
  gRNA
tttccagtctcctttattgc

SEQ ID NO: 110115 - DNA, 20 bp, Artificial Sequence
  MKO10110115_B_Prkar1a
  gRNA
aaccgtctctccagcaataa

SEQ ID NO: 110116 - DNA, 20 bp, Artificial Sequence
  MKO10110116_B_Prkar1b
  gRNA
accttctctcgttgtcgtcc

SEQ ID NO: 110117 - DNA, 20 bp, Artificial Sequence
  MKO10110117_B_Prkar1b
  gRNA
tccccaccgatgtgagtgac

SEQ ID NO: 110118 - DNA, 20 bp, Artificial Sequence
  MKO10110118_B_Prkar1b
  gRNA
aatttctatgtgattgacca

SEQ ID NO: 110119 - DNA, 20 bp, Artificial Sequence
  MKO10110119_B_Prkar2a
  gRNA
gacgagcatgtcattgacca

SEQ ID NO: 110120 - DNA, 20 bp, Artificial Sequence
  MKO10110120_B_Prkar2a
  gRNA
gtttaaccctgatgaagaag

SEQ ID NO: 110121 - DNA, 20 bp, Artificial Sequence
  MKO10110121_B_Prkar2a
  gRNA
ctttacaagcttcctgaagc

SEQ ID NO: 110122 - DNA, 20 bp, Artificial Sequence
  MKO10110122_B_Prkar2b
  gRNA
gatccaggttcttaaacagc

SEQ ID NO: 110123 - DNA, 20 bp, Artificial Sequence
  MKO10110123_B_Prkar2b
  gRNA
agcttataatcctgatgaag

SEQ ID NO: 110124 - DNA, 20 bp, Artificial Sequence
  MKO10110124_B_Prkar2b
  gRNA
caatctgtttctctgatcat

SEQ ID NO: 110125 - DNA, 20 bp, Artificial Sequence
  MKO10110125_B_Prkca
  gRNA
agattacttacgtcagtgtc

SEQ ID NO: 110126 - DNA, 20 bp, Artificial Sequence
  MKO10110126_B_Prkca
  gRNA
ctctatggacttatccacca

SEQ ID NO: 110127 - DNA, 20 bp, Artificial Sequence
  MKO10110127_B_Prkca
  gRNA
tccagggggtttgggaaaca

SEQ ID NO: 110128 - DNA, 20 bp, Artificial Sequence
  MKO10110128_B_Prkcb
  gRNA
aggtaggactggagtacgtg

SEQ ID NO: 110129 - DNA, 20 bp, Artificial Sequence
  MKO10110129_B_Prkcb
  gRNA
gcccttgtccgcaccggggc

SEQ ID NO: 110130 - DNA, 20 bp, Artificial Sequence
  MKO10110130_B_Prkcb
  gRNA
ttacaggggcttcgggaagc

SEQ ID NO: 110131 - DNA, 20 bp, Artificial Sequence
  MKO10110131_B_Prkcdbp
  gRNA
ccagtcaagccgccacgcgt

SEQ ID NO: 110132 - DNA, 20 bp, Artificial Sequence
  MKO10110132_B_Prkcdbp
  gRNA
cctgtgcctgagacgcccgc

SEQ ID NO: 110133 - DNA, 20 bp, Artificial Sequence
  MKO10110133_B_Prkcdbp
  gRNA
ctcgcacgccgacgcagccc

SEQ ID NO: 110134 - DNA, 20 bp, Artificial Sequence
  MKO10110134_B_Prkcd
  gRNA
tttccaaccatgaaccgtcg

SEQ ID NO: 110135 - DNA, 20 bp, Artificial Sequence
  MKO10110135_B_Prkcd
  gRNA
gggtcttacccccatcctcc

SEQ ID NO: 110136 - DNA, 20 bp, Artificial Sequence
  MKO10110136_B_Prkcd
  gRNA
ttcaggggcctcaacaagca

SEQ ID NO: 110137 - DNA, 20 bp, Artificial Sequence
  MKO10110137_B_Prkce
  gRNA
gtaggtgggttgccgcaagt

SEQ ID NO: 110138 - DNA, 20 bp, Artificial Sequence
  MKO10110138_B_Prkce
  gRNA
acaatgaagaacgagtgttc

SEQ ID NO: 110139 - DNA, 20 bp, Artificial Sequence
  MKO10110139_B_Prkce
  gRNA
cttcctttcaggggtgtcat

SEQ ID NO: 110140 - DNA, 20 bp, Artificial Sequence
  MKO10110140_B_Prkcg
  gRNA
ctgtgtggtccacaccgcaa

SEQ ID NO: 110141 - DNA, 20 bp, Artificial Sequence
  MKO10110141_B_Prkcg
  gRNA
cctttacgggctggtgcacc

SEQ ID NO: 110142 - DNA, 20 bp, Artificial Sequence
  MKO10110142_B_Prkcg
  gRNA
agctcttaccttgacattgc

SEQ ID NO: 110143 - DNA, 20 bp, Artificial Sequence
  MKO10110143_B_Prkch
  gRNA
tttgtggtaataaccctaac

SEQ ID NO: 110144 - DNA, 20 bp, Artificial Sequence
  MKO10110144_B_Prkch
  gRNA
aggctgtaacaattagatga

SEQ ID NO: 110145 - DNA, 20 bp, Artificial Sequence
  MKO10110145_B_Prkch
  gRNA
cttcagtgaaactccctgtt

SEQ ID NO: 110146 - DNA, 20 bp, Artificial Sequence
  MKO10110146_B_Prkci
  gRNA
agcagccgttcaccatgaaa

SEQ ID NO: 110147 - DNA, 20 bp, Artificial Sequence
  MKO10110147_B_Prkci
  gRNA
caaggcattccaggacgctc

SEQ ID NO: 110148 - DNA, 20 bp, Artificial Sequence
  MKO10110148_B_Prkci
  gRNA
caggctgtacgagctgaaca

SEQ ID NO: 110149 - DNA, 20 bp, Artificial Sequence
  MKO10110149_B_Prkcq
  gRNA
tgtcaagtgtcacgagttca

SEQ ID NO: 110150 - DNA, 20 bp, Artificial Sequence
  MKO10110150_B_Prkcq
  gRNA
ttacaggggcctgaacaagc

SEQ ID NO: 110151 - DNA, 20 bp, Artificial Sequence
  MKO10110151_B_Prkcq
  gRNA
atcttgcattcattagcatt

SEQ ID NO: 110152 - DNA, 20 bp, Artificial Sequence
  MKO10110152_B_Prkcsh
  gRNA
ccccagagagaagggtcgca

SEQ ID NO: 110153 - DNA, 20 bp, Artificial Sequence
  MKO10110153_B_Prkcsh
  gRNA
ggcacagctgcttgtcccaa

SEQ ID NO: 110154 - DNA, 20 bp, Artificial Sequence
  MKO10110154_B_Prkcsh
  gRNA
cacataccccatcattgacc

SEQ ID NO: 110155 - DNA, 20 bp, Artificial Sequence
  MKO10110155_B_Prkcz
  gRNA
ccagtagatgacaagaacga

SEQ ID NO: 110156 - DNA, 20 bp, Artificial Sequence
  MKO10110156_B_Prkcz
  gRNA
ttgcttatatttcttcatct

SEQ ID NO: 110157 - DNA, 20 bp, Artificial Sequence
  MKO10110157_B_Prkcz
  gRNA
taatatcaaagatgattctg

SEQ ID NO: 110158 - DNA, 20 bp, Artificial Sequence
  MKO10110158_B_Prkd1
  gRNA
ccggatctggaagtcttcga

SEQ ID NO: 110159 - DNA, 20 bp, Artificial Sequence
  MKO10110159_B_Prkd1
  gRNA
ctgtgggggctggtgcgtca

SEQ ID NO: 110160 - DNA, 20 bp, Artificial Sequence
  MKO10110160_B_Prkd1
  gRNA
tgtccctgatgagcctttac

SEQ ID NO: 110161 - DNA, 20 bp, Artificial Sequence
  MKO10110161_B_Prkd2
  gRNA
ccgcctgtcatccacgtctc

SEQ ID NO: 110162 - DNA, 20 bp, Artificial Sequence
  MKO10110162_B_Prkd2
  gRNA
gcgatcagctgcagatatcc

SEQ ID NO: 110163 - DNA, 20 bp, Artificial Sequence
  MKO10110163_B_Prkd2
  gRNA
gccgtgtgtagctatgtata

SEQ ID NO: 110164 - DNA, 20 bp, Artificial Sequence
  MKO10110164_B_Prkd3
  gRNA
ctgacaggacaacttctacc

SEQ ID NO: 110165 - DNA, 20 bp, Artificial Sequence
  MKO10110165_B_Prkd3
  gRNA
gaatgtacatagagagcgtg

SEQ ID NO: 110166 - DNA, 20 bp, Artificial Sequence
  MKO10110166_B_Prkd3
  gRNA
ctggtagaagttgtcctgtc

SEQ ID NO: 110167 - DNA, 20 bp, Artificial Sequence
  MKO10110167_B_Prkdc
  gRNA
gagagtaatgcataaccttc

SEQ ID NO: 110168 - DNA, 20 bp, Artificial Sequence
  MKO10110168_B_Prkdc
  gRNA
agccttagaccttctgatta

SEQ ID NO: 110169 - DNA, 20 bp, Artificial Sequence
  MKO10110169_B_Prkdc
  gRNA
gcattactctcttgatatta

SEQ ID NO: 110170 - DNA, 20 bp, Artificial Sequence
  MKO10110170_B_Prkg1
  gRNA
tgtatgtaccccgtggaata

SEQ ID NO: 110171 - DNA, 20 bp, Artificial Sequence
  MKO10110171_B_Prkg1
  gRNA
catcaagcataccgagtaca

SEQ ID NO: 110172 - DNA, 20 bp, Artificial Sequence
  MKO10110172_B_Prkg1
  gRNA
ctatactttacaactgtacc

SEQ ID NO: 110173 - DNA, 20 bp, Artificial Sequence
  MKO10110173_B_Prkg2
  gRNA
tgctatcatccatcccaatg

SEQ ID NO: 110174 - DNA, 20 bp, Artificial Sequence
  MKO10110174_B_Prkg2
  gRNA
aacagcccaagcccgggatg

SEQ ID NO: 110175 - DNA, 20 bp, Artificial Sequence
  MKO10110175_B_Prkg2
  gRNA
cgattaccaatgttaaaact

SEQ ID NO: 110176 - DNA, 20 bp, Artificial Sequence
  MKO10110176_B_Prkra
  gRNA
cagctggttcttcggctgtt

SEQ ID NO: 110177 - DNA, 20 bp, Artificial Sequence
  MKO10110177_B_Prkra
  gRNA
tgattcaagcctgcagatcg

SEQ ID NO: 110178 - DNA, 20 bp, Artificial Sequence
  MKO10110178_B_Prkra
  gRNA
ggatcaggcattaaggggtc

SEQ ID NO: 110179 - DNA, 20 bp, Artificial Sequence
  MKO10110179_B_Prkrip1
  gRNA
acaaattctggaggcgctcg

SEQ ID NO: 110180 - DNA, 20 bp, Artificial Sequence
  MKO10110180_B_Prkrip1
  gRNA
agaatttgtccgagatgtca

SEQ ID NO: 110181 - DNA, 20 bp, Artificial Sequence
  MKO10110181_B_Prkrip1
  gRNA
aaagaataaaattgctgcag

SEQ ID NO: 110182 - DNA, 20 bp, Artificial Sequence
  MKO10110182_B_Prkrir
  gRNA
tacaattctcaacccacttc

SEQ ID NO: 110183 - DNA, 20 bp, Artificial Sequence
  MKO10110183_B_Prkrir
  gRNA
tacagttctacaaatcatag

SEQ ID NO: 110184 - DNA, 20 bp, Artificial Sequence
  MKO10110184_B_Prkrir
  gRNA
tttagagtgaagatgaaatc

SEQ ID NO: 110185 - DNA, 20 bp, Artificial Sequence
  MKO10110185_B_Prkx
  gRNA
agatgtcatccgcctgaaac

SEQ ID NO: 110186 - DNA, 20 bp, Artificial Sequence
  MKO10110186_B_Prkx
  gRNA
tgggatactcataatcttca

SEQ ID NO: 110187 - DNA, 20 bp, Artificial Sequence
  MKO10110187_B_Prkx
  gRNA
agaggtgaaatccaattgtc

SEQ ID NO: 110188 - DNA, 20 bp, Artificial Sequence
  MKO10110188_B_Prl2a1
  gRNA
tctctcgaccttccaaaacc

SEQ ID NO: 110189 - DNA, 20 bp, Artificial Sequence
  MKO10110189_B_Prl2a1
  gRNA
tccattccttactgagcata

SEQ ID NO: 110190 - DNA, 20 bp, Artificial Sequence
  MKO10110190_B_Prl2a1
  gRNA
tgctgcccatatgctcagta

SEQ ID NO: 110191 - DNA, 20 bp, Artificial Sequence
  MKO10110191_B_Prl2b1
  gRNA
gccagaaacactattgacat

SEQ ID NO: 110192 - DNA, 20 bp, Artificial Sequence
  MKO10110192_B_Prl2b1
  gRNA
tcagaataatcagtatgccc

SEQ ID NO: 110193 - DNA, 20 bp, Artificial Sequence
  MKO10110193_B_Prl2b1
  gRNA
caaagatgccagtccagacc

SEQ ID NO: 110194 - DNA, 20 bp, Artificial Sequence
  MKO10110194_B_Prl2c1
  gRNA
tcgctcactagatcatccag

SEQ ID NO: 110195 - DNA, 20 bp, Artificial Sequence
  MKO10110195_B_Prl2c1
  gRNA
attcttccacaataacaagt

SEQ ID NO: 110196 - DNA, 20 bp, Artificial Sequence
  MKO10110196_B_Prl2c1
  gRNA
gaaagaagtatggcatctcg

SEQ ID NO: 110197 - DNA, 20 bp, Artificial Sequence
  MKO10110197_B_Prl2c2
  gRNA
aaacattattctaacgtgtc

SEQ ID NO: 110198 - DNA, 20 bp, Artificial Sequence
  MKO10110198_B_Prl2c2
  gRNA
caaactcacgtgtgtgagcc

SEQ ID NO: 110199 - DNA, 20 bp, Artificial Sequence
  MKO10110199_B_Prl2c2
  gRNA
tactcaccatggtgctcatg

SEQ ID NO: 110200 - DNA, 20 bp, Artificial Sequence
  MKO10110200_B_Prl2c3
  gRNA
caaactcacgtgtgtgagcc

SEQ ID NO: 110201 - DNA, 20 bp, Artificial Sequence
  MKO10110201_B_Prl2c3
  gRNA
tatgcagctcttctgaaatc

SEQ ID NO: 110202 - DNA, 20 bp, Artificial Sequence
  MKO10110202_B_Prl2c3
  gRNA
tactcaccatggtgctcatg

SEQ ID NO: 110203 - DNA, 20 bp, Artificial Sequence
  MKO10110203_B_Prl2c4
  gRNA
caaactcacgtgtgtgagcc

SEQ ID NO: 110204 - DNA, 20 bp, Artificial Sequence
  MKO10110204_B_Prl2c4
  gRNA
tatgcagctcttctgaaatc

SEQ ID NO: 110205 - DNA, 20 bp, Artificial Sequence
  MKO10110205_B_Prl2c4
  gRNA
tactcaccatggtgctcatg

SEQ ID NO: 110206 - DNA, 20 bp, Artificial Sequence
  MKO10110206_B_Prl2c5
  gRNA
aagatcaacgcagtccagaa

SEQ ID NO: 110207 - DNA, 20 bp, Artificial Sequence
  MKO10110207_B_Prl2c5
  gRNA
atcattcctcattgcacaca

SEQ ID NO: 110208 - DNA, 20 bp, Artificial Sequence
  MKO10110208_B_Prl2c5
  gRNA
cattgcccatgtgtgcaatg

SEQ ID NO: 110209 - DNA, 20 bp, Artificial Sequence
  MKO10110209_B_Prl3a1
  gRNA
catgcccatgtgctttgaca

SEQ ID NO: 110210 - DNA, 20 bp, Artificial Sequence
  MKO10110210_B_Prl3a1
  gRNA
cctcaccacacaaatgtctg

SEQ ID NO: 110211 - DNA, 20 bp, Artificial Sequence
  MKO10110211_B_Prl3a1
  gRNA
cttgagagcttcaagataag

SEQ ID NO: 110212 - DNA, 20 bp, Artificial Sequence
  MKO10110212_B_Prl3b1
  gRNA
tatgaacatcacgacacttc

SEQ ID NO: 110213 - DNA, 20 bp, Artificial Sequence
  MKO10110213_B_Prl3b1
  gRNA
gttcttgacagcagagtatc

SEQ ID NO: 110214 - DNA, 20 bp, Artificial Sequence
  MKO10110214_B_Prl3b1
  gRNA
tgtggcaggggcttaacatc

SEQ ID NO: 110215 - DNA, 20 bp, Artificial Sequence
  MKO10110215_B_Prl3c1
  gRNA
agagctgtagagcttaacta

SEQ ID NO: 110216 - DNA, 20 bp, Artificial Sequence
  MKO10110216_B_Prl3c1
  gRNA
tggaggacctcaattctctt

SEQ ID NO: 110217 - DNA, 20 bp, Artificial Sequence
  MKO10110217_B_Prl3c1
  gRNA
gagcaaaagctttacttagt

SEQ ID NO: 110218 - DNA, 20 bp, Artificial Sequence
  MKO10110218_B_Prl3d1
  gRNA
gaagtccctccagaattaca

SEQ ID NO: 110219 - DNA, 20 bp, Artificial Sequence
  MKO10110219_B_Prl3d1
  gRNA
atctatgccgctgcattaaa

SEQ ID NO: 110220 - DNA, 20 bp, Artificial Sequence
  MKO10110220_B_Prl3d1
  gRNA
aaattccctatacacatctg

SEQ ID NO: 110221 - DNA, 20 bp, Artificial Sequence
  MKO10110221_B_Prl3d2
  gRNA
gaaaacctactttaatttca

SEQ ID NO: 110222 - DNA, 20 bp, Artificial Sequence
  MKO10110222_B_Prl3d2
  gRNA
cctctcgattctctggagta

SEQ ID NO: 110223 - DNA, 20 bp, Artificial Sequence
  MKO10110223_B_Prl3d2
  gRNA
gaagtccctccagaattata

SEQ ID NO: 110224 - DNA, 20 bp, Artificial Sequence
  MKO10110224_B_Prl3d3
  gRNA
cctctcgattctctggagta

SEQ ID NO: 110225 - DNA, 20 bp, Artificial Sequence
  MKO10110225_B_Prl3d3
  gRNA
gaagtccctccagaattata

SEQ ID NO: 110226 - DNA, 20 bp, Artificial Sequence
  MKO10110226_B_Prl3d3
  gRNA
tgatcaatgtttcaatttcc

SEQ ID NO: 110227 - DNA, 20 bp, Artificial Sequence
  MKO10110227_B_Prl4a1
  gRNA
ctgattccacgtgttcccaa

SEQ ID NO: 110228 - DNA, 20 bp, Artificial Sequence
  MKO10110228_B_Prl4a1
  gRNA
gaaaaaagactcgagtcatg

SEQ ID NO: 110229 - DNA, 20 bp, Artificial Sequence
  MKO10110229_B_Prl4a1
  gRNA
caagagttccaattcagacc

SEQ ID NO: 110230 - DNA, 20 bp, Artificial Sequence
  MKO10110230_B_Prl5a1
  gRNA
gtcacattcagaagcaccac

SEQ ID NO: 110231 - DNA, 20 bp, Artificial Sequence
  MKO10110231_B_Prl5a1
  gRNA
cttgaacaatgatgcacaga

SEQ ID NO: 110232 - DNA, 20 bp, Artificial Sequence
  MKO10110232_B_Prl5a1
  gRNA
aaaatgaagactaccctgcc

SEQ ID NO: 110233 - DNA, 20 bp, Artificial Sequence
  MKO10110233_B_Prl6a1
  gRNA
gtaagattgactctagtatc

SEQ ID NO: 110234 - DNA, 20 bp, Artificial Sequence
  MKO10110234_B_Prl6a1
  gRNA
tgatcagtatgttgacagct

SEQ ID NO: 110235 - DNA, 20 bp, Artificial Sequence
  MKO10110235_B_Prl6a1
  gRNA
gtacttatagaagctcttag

SEQ ID NO: 110236 - DNA, 20 bp, Artificial Sequence
  MKO10110236_B_Prl7a1
  gRNA
tttagctgacatctcactga

SEQ ID NO: 110237 - DNA, 20 bp, Artificial Sequence
  MKO10110237_B_Prl7a1
  gRNA
catggttgagtgaaagacag

SEQ ID NO: 110238 - DNA, 20 bp, Artificial Sequence
  MKO10110238_B_Prl7a1
  gRNA
gaatatcactgacctcaaca

SEQ ID NO: 110239 - DNA, 20 bp, Artificial Sequence
  MKO10110239_B_Prl7a2
  gRNA
tcttgcgcagttccatgttg

SEQ ID NO: 110240 - DNA, 20 bp, Artificial Sequence
  MKO10110240_B_Prl7a2
  gRNA
attagcaggggcacttctgc

SEQ ID NO: 110241 - DNA, 20 bp, Artificial Sequence
  MKO10110241_B_Prl7a2
  gRNA
acagatgcttgactttattg

SEQ ID NO: 110242 - DNA, 20 bp, Artificial Sequence
  MKO10110242_B_Prl7b1
  gRNA
tcttcatgatgcgatccaga

SEQ ID NO: 110243 - DNA, 20 bp, Artificial Sequence
  MKO10110243_B_Prl7b1
  gRNA
catgatgaatttgttgtcaa

SEQ ID NO: 110244 - DNA, 20 bp, Artificial Sequence
  MKO10110244_B_Prl7b1
  gRNA
catgtctgatgagaaattat

SEQ ID NO: 110245 - DNA, 20 bp, Artificial Sequence
  MKO10110245_B_Prl7c1
  gRNA
cctcagtgttccagaaacct

SEQ ID NO: 110246 - DNA, 20 bp, Artificial Sequence
  MKO10110246_B_Prl7c1
  gRNA
ccaaggtttctggaacactg

SEQ ID NO: 110247 - DNA, 20 bp, Artificial Sequence
  MKO10110247_B_Prl7c1
  gRNA
ttaccctgctgagtatcatc

SEQ ID NO: 110248 - DNA, 20 bp, Artificial Sequence
  MKO10110248_B_Prl7d1
  gRNA
cctttgataggatcctataa

SEQ ID NO: 110249 - DNA, 20 bp, Artificial Sequence
  MKO10110249_B_Prl7d1
  gRNA
gataatgccactgtactttc

SEQ ID NO: 110250 - DNA, 20 bp, Artificial Sequence
  MKO10110250_B_Prl7d1
  gRNA
tgcacccataaatgccagtg

SEQ ID NO: 110251 - DNA, 20 bp, Artificial Sequence
  MKO10110251_B_Prl8a1
  gRNA
tgcaggcacattcctactgt

SEQ ID NO: 110252 - DNA, 20 bp, Artificial Sequence
  MKO10110252_B_Prl8a1
  gRNA
cattgttaaatgtttctaca

SEQ ID NO: 110253 - DNA, 20 bp, Artificial Sequence
  MKO10110253_B_Prl8a1
  gRNA
tacaaagtgtgtgaagtgtc

SEQ ID NO: 110254 - DNA, 20 bp, Artificial Sequence
  MKO10110254_B_Prl8a2
  gRNA
tgatgacttcagctcgctga

SEQ ID NO: 110255 - DNA, 20 bp, Artificial Sequence
  MKO10110255_B_Prl8a2
  gRNA
gtgggtttgtgacattagag

SEQ ID NO: 110256 - DNA, 20 bp, Artificial Sequence
  MKO10110256_B_Prl8a2
  gRNA
taccacaacccattctcagc

SEQ ID NO: 110257 - DNA, 20 bp, Artificial Sequence
  MKO10110257_B_Prl8a6
  gRNA
tggttgctggaacccacttt

SEQ ID NO: 110258 - DNA, 20 bp, Artificial Sequence
  MKO10110258_B_Prl8a6
  gRNA
tggtgtcaaatttgctgttg

SEQ ID NO: 110259 - DNA, 20 bp, Artificial Sequence
  MKO10110259_B_Prl8a6
  gRNA
gttgttctcttcgatctcct

SEQ ID NO: 110260 - DNA, 20 bp, Artificial Sequence
  MKO10110260_B_Prl8a8
  gRNA
atgtattgaattcccttatt

SEQ ID NO: 110261 - DNA, 20 bp, Artificial Sequence
  MKO10110261_B_Prl8a8
  gRNA
agtttgacaacagtagcagc

SEQ ID NO: 110262 - DNA, 20 bp, Artificial Sequence
  MKO10110262_B_Prl8a8
  gRNA
cctcagtgattatccaccta

SEQ ID NO: 110263 - DNA, 20 bp, Artificial Sequence
  MKO10110263_B_Prl8a9
  gRNA
ctgttaaatgtttccacgag

SEQ ID NO: 110264 - DNA, 20 bp, Artificial Sequence
  MKO10110264_B_Prl8a9
  gRNA
cattcagttcaattactaca

SEQ ID NO: 110265 - DNA, 20 bp, Artificial Sequence
  MKO10110265_B_Prl8a9
  gRNA
aaaaactttgatcaactatg

SEQ ID NO: 110266 - DNA, 20 bp, Artificial Sequence
  MKO10110266_B_Prlhr
  gRNA
gccaacgccagatctacgcc

SEQ ID NO: 110267 - DNA, 20 bp, Artificial Sequence
  MKO10110267_B_Prlhr
  gRNA
gcgcgatcaccagcacaagc

SEQ ID NO: 110268 - DNA, 20 bp, Artificial Sequence
  MKO10110268_B_Prlhr
  gRNA
tttcaacctattgcgagacc

SEQ ID NO: 110269 - DNA, 20 bp, Artificial Sequence
  MKO10110269_B_Prlh
  gRNA
ccgagcccaccagcactcca

SEQ ID NO: 110270 - DNA, 20 bp, Artificial Sequence
  MKO10110270_B_Prlh
  gRNA
atgtcaccggacctggcctg

SEQ ID NO: 110271 - DNA, 20 bp, Artificial Sequence
  MKO10110271_B_Prlh
  gRNA
cccctgacatcaatcctgcc

SEQ ID NO: 110272 - DNA, 20 bp, Artificial Sequence
  MKO10110272_B_Prlr
  gRNA
caaatgtcgttcccctgaca

SEQ ID NO: 110273 - DNA, 20 bp, Artificial Sequence
  MKO10110273_B_Prlr
  gRNA
gttgtttcacttctaaagtc

SEQ ID NO: 110274 - DNA, 20 bp, Artificial Sequence
  MKO10110274_B_Prlr
  gRNA
cagttgaaccagagcctcct

SEQ ID NO: 110275 - DNA, 20 bp, Artificial Sequence
  MKO10110275_B_Prl
  gRNA
gttgcgcaaagacaagattt

SEQ ID NO: 110276 - DNA, 20 bp, Artificial Sequence
  MKO10110276_B_Prl
  gRNA
ccttgtcttcaggtgtagcc

SEQ ID NO: 110277 - DNA, 20 bp, Artificial Sequence
  MKO10110277_B_Prl
  gRNA
ctcttgataggatgtattcg

SEQ ID NO: 110278 - DNA, 20 bp, Artificial Sequence
  MKO10110278_B_Prm1
  gRNA
ggaggcgatgctgccggcgg

SEQ ID NO: 110279 - DNA, 20 bp, Artificial Sequence
  MKO10110279_B_Prm1
  gRNA
acttacttcgcctcctccgc

SEQ ID NO: 110280 - DNA, 20 bp, Artificial Sequence
  MKO10110280_B_Prm1
  gRNA
gatgctgccgcagcaaaagc

SEQ ID NO: 110281 - DNA, 20 bp, Artificial Sequence
  MKO10110281_B_Prm2
  gRNA
acctgcatctcctcctcctt

SEQ ID NO: 110282 - DNA, 20 bp, Artificial Sequence
  MKO10110282_B_Prm2
  gRNA
ccccagtgagggtccgcacc

SEQ ID NO: 110283 - DNA, 20 bp, Artificial Sequence
  MKO10110283_B_Prm2
  gRNA
gcccctgctcctcgcgttca

SEQ ID NO: 110284 - DNA, 20 bp, Artificial Sequence
  MKO10110284_B_Prm3
  gRNA
gcttcttcatggaggactcg

SEQ ID NO: 110285 - DNA, 20 bp, Artificial Sequence
  MKO10110285_B_Prm3
  gRNA
cacggctgtgaccagtgttc

SEQ ID NO: 110286 - DNA, 20 bp, Artificial Sequence
  MKO10110286_B_Prm3
  gRNA
cttcctcgccctctgatgac

SEQ ID NO: 110287 - DNA, 20 bp, Artificial Sequence
  MKO10110287_B_Prmt10
  gRNA
tgaactcgcctgtgatgtag

SEQ ID NO: 110288 - DNA, 20 bp, Artificial Sequence
  MKO10110288_B_Prmt10
  gRNA
gtaacagaaactgtcgatgc

SEQ ID NO: 110289 - DNA, 20 bp, Artificial Sequence
  MKO10110289_B_Prmt10
  gRNA
aaccaagtaagtcttgtatt

SEQ ID NO: 110290 - DNA, 20 bp, Artificial Sequence
  MKO10110290_B_Prmt1
  gRNA
tagtgagaagcccaacgctg

SEQ ID NO: 110291 - DNA, 20 bp, Artificial Sequence
  MKO10110291_B_Prmt1
  gRNA
gacttaccccaataaccttg

SEQ ID NO: 110292 - DNA, 20 bp, Artificial Sequence
  MKO10110292_B_Prmt1
  gRNA
ggagtcaaagtagtagtctt

SEQ ID NO: 110293 - DNA, 20 bp, Artificial Sequence
  MKO10110293_B_Prmt2
  gRNA
gcaatggccacgaactcctc

SEQ ID NO: 110294 - DNA, 20 bp, Artificial Sequence
  MKO10110294_B_Prmt2
  gRNA
tcttctgcgcacaccatgcc

SEQ ID NO: 110295 - DNA, 20 bp, Artificial Sequence
  MKO10110295_B_Prmt2
  gRNA
acacactcaccgccttgggc

SEQ ID NO: 110296 - DNA, 20 bp, Artificial Sequence
  MKO10110296_B_Prmt3
  gRNA
ccatatataaccctgtgcct

SEQ ID NO: 110297 - DNA, 20 bp, Artificial Sequence
  MKO10110297_B_Prmt3
  gRNA
tcaatttaatattgatagta

SEQ ID NO: 110298 - DNA, 20 bp, Artificial Sequence
  MKO10110298_B_Prmt3
  gRNA
tgaaaacgtttcctcagcag

SEQ ID NO: 110299 - DNA, 20 bp, Artificial Sequence
  MKO10110299_B_Prmt5
  gRNA
ttaccgcttcagagttcctt

SEQ ID NO: 110300 - DNA, 20 bp, Artificial Sequence
  MKO10110300_B_Prmt5
  gRNA
tttcctattgccccttaatc

SEQ ID NO: 110301 - DNA, 20 bp, Artificial Sequence
  MKO10110301_B_Prmt5
  gRNA
tgtgtttcaggctatgttac

SEQ ID NO: 110302 - DNA, 20 bp, Artificial Sequence
  MKO10110302_B_Prmt6
  gRNA
ctctacatggtttcgccgtc

SEQ ID NO: 110303 - DNA, 20 bp, Artificial Sequence
  MKO10110303_B_Prmt6
  gRNA
aagaactgggccgcgctgcg

SEQ ID NO: 110304 - DNA, 20 bp, Artificial Sequence
  MKO10110304_B_Prmt6
  gRNA
ggaccgcgtgcacgtcctgc

SEQ ID NO: 110305 - DNA, 20 bp, Artificial Sequence
  MKO10110305_B_Prmt7
  gRNA
gtctttgtcatgtagcatgt

SEQ ID NO: 110306 - DNA, 20 bp, Artificial Sequence
  MKO10110306_B_Prmt7
  gRNA
tcgtgctaacattctgatca

SEQ ID NO: 110307 - DNA, 20 bp, Artificial Sequence
  MKO10110307_B_Prmt7
  gRNA
cattaacaagcactccactg

SEQ ID NO: 110308 - DNA, 20 bp, Artificial Sequence
  MKO10110308_B_Prmt8
  gRNA
ctccgagtagtcagaaatac

SEQ ID NO: 110309 - DNA, 20 bp, Artificial Sequence
  MKO10110309_B_Prmt8
  gRNA
ttcgactcatacgctcactt

SEQ ID NO: 110310 - DNA, 20 bp, Artificial Sequence
  MKO10110310_B_Prmt8
  gRNA
gtccaagctgctgaaccccg

SEQ ID NO: 110311 - DNA, 20 bp, Artificial Sequence
  MKO10110311_B_Prnd
  gRNA
cggaagctggacatcgactt

SEQ ID NO: 110312 - DNA, 20 bp, Artificial Sequence
  MKO10110312_B_Prnd
  gRNA
cagctgcgtcaacgccaccc

SEQ ID NO: 110313 - DNA, 20 bp, Artificial Sequence
  MKO10110313_B_Prnd
  gRNA
ccttcgtagtagatcccatc

SEQ ID NO: 110314 - DNA, 20 bp, Artificial Sequence
  MKO10110314_B_Prnp
  gRNA
accctaaccaagtgtactac

SEQ ID NO: 110315 - DNA, 20 bp, Artificial Sequence
  MKO10110315_B_Prnp
  gRNA
tggaagccggtatcccgggc

SEQ ID NO: 110316 - DNA, 20 bp, Artificial Sequence
  MKO10110316_B_Prnp
  gRNA
agtcccaggcctattacgac

SEQ ID NO: 110317 - DNA, 20 bp, Artificial Sequence
  MKO10110317_B_Prn
  gRNA
tgcgacgcagcgcccagaat

SEQ ID NO: 110318 - DNA, 20 bp, Artificial Sequence
  MKO10110318_B_Prn
  gRNA
tctgctgatccgacaacgcg

SEQ ID NO: 110319 - DNA, 20 bp, Artificial Sequence
  MKO10110319_B_Prn
  gRNA
atgcttcagctcggttgaaa

SEQ ID NO: 110320 - DNA, 20 bp, Artificial Sequence
  MKO10110320_B_Prob1
  gRNA
tctgttcaaccgctccgacg

SEQ ID NO: 110321 - DNA, 20 bp, Artificial Sequence
  MKO10110321_B_Prob1
  gRNA
cgcacttgagtcgcccgccc

SEQ ID NO: 110322 - DNA, 20 bp, Artificial Sequence
  MKO10110322_B_Prob1
  gRNA
tctgtgtccggcccaacgtc

SEQ ID NO: 110323 - DNA, 20 bp, Artificial Sequence
  MKO10110323_B_Proca1
  gRNA
acctagattcacagtcgcat

SEQ ID NO: 110324 - DNA, 20 bp, Artificial Sequence
  MKO10110324_B_Proca1
  gRNA
gtatatgacagatgacgatc

SEQ ID NO: 110325 - DNA, 20 bp, Artificial Sequence
  MKO10110325_B_Proca1
  gRNA
agagcgagtacagttgtgaa

SEQ ID NO: 110326 - DNA, 20 bp, Artificial Sequence
  MKO10110326_B_Procr
  gRNA
cgcgatataccagcttcacc

SEQ ID NO: 110327 - DNA, 20 bp, Artificial Sequence
  MKO10110327_B_Procr
  gRNA
cctgcagttcataccgagtc

SEQ ID NO: 110328 - DNA, 20 bp, Artificial Sequence
  MKO10110328_B_Procr
  gRNA
atgggctgtttcataatcgc

SEQ ID NO: 110329 - DNA, 20 bp, Artificial Sequence
  MKO10110329_B_Proc
  gRNA
cttcagctgcagctgcgata

SEQ ID NO: 110330 - DNA, 20 bp, Artificial Sequence
  MKO10110330_B_Proc
  gRNA
cacgtctgacccgaagcacc

SEQ ID NO: 110331 - DNA, 20 bp, Artificial Sequence
  MKO10110331_B_Proc
  gRNA
cagcagcgagcatgcccacc

SEQ ID NO: 110332 - DNA, 20 bp, Artificial Sequence
  MKO10110332_B_Prodh2
  gRNA
ccttacccgacccgagtcca

SEQ ID NO: 110333 - DNA, 20 bp, Artificial Sequence
  MKO10110333_B_Prodh2
  gRNA
cctcggtgggtactgccaac

SEQ ID NO: 110334 - DNA, 20 bp, Artificial Sequence
  MKO10110334_B_Prodh2
  gRNA
gaagaagtgcgcctgagagc

SEQ ID NO: 110335 - DNA, 20 bp, Artificial Sequence
  MKO10110335_B_Prodh
  gRNA
tctttgcgctccgcctcctc

SEQ ID NO: 110336 - DNA, 20 bp, Artificial Sequence
  MKO10110336_B_Prodh
  gRNA
gaacttactgcagtgcatca

SEQ ID NO: 110337 - DNA, 20 bp, Artificial Sequence
  MKO10110337_B_Prodh
  gRNA
ccccagtgcagtgagcttaa

SEQ ID NO: 110338 - DNA, 20 bp, Artificial Sequence
  MKO10110338_B_Prok1
  gRNA
cctgcggttgtgtaccccac

SEQ ID NO: 110339 - DNA, 20 bp, Artificial Sequence
  MKO10110339_B_Prok1
  gRNA
ccctgtgatgaccgcacagt

SEQ ID NO: 110340 - DNA, 20 bp, Artificial Sequence
  MKO10110340_B_Prok1
  gRNA
acggcaggtaccgctgcttc

SEQ ID NO: 110341 - DNA, 20 bp, Artificial Sequence
  MKO10110341_B_Prok2
  gRNA
tccgggccaagcaaataaac

SEQ ID NO: 110342 - DNA, 20 bp, Artificial Sequence
  MKO10110342_B_Prok2
  gRNA
gtccttaaacacgccaagcc

SEQ ID NO: 110343 - DNA, 20 bp, Artificial Sequence
  MKO10110343_B_Prok2
  gRNA
ggtggcagctgtcgcccact

SEQ ID NO: 110344 - DNA, 20 bp, Artificial Sequence
  MKO10110344_B_Prokr1
  gRNA
caacctgcttatcgccaacc

SEQ ID NO: 110345 - DNA, 20 bp, Artificial Sequence
  MKO10110345_B_Prokr1
  gRNA
cacgggaatacctgccaccg

SEQ ID NO: 110346 - DNA, 20 bp, Artificial Sequence
  MKO10110346_B_Prokr1
  gRNA
ttgtgcacccgctgagaccg

SEQ ID NO: 110347 - DNA, 20 bp, Artificial Sequence
  MKO10110347_B_Prokr2
  gRNA
aagcacgtgaccatgcgccc

SEQ ID NO: 110348 - DNA, 20 bp, Artificial Sequence
  MKO10110348_B_Prokr2
  gRNA
aatgcactccacgacgtaga

SEQ ID NO: 110349 - DNA, 20 bp, Artificial Sequence
  MKO10110349_B_Prokr2
  gRNA
agacggagcaaatccgcaag

SEQ ID NO: 110350 - DNA, 20 bp, Artificial Sequence
  MKO10110350_B_Prol1
  gRNA
aatatgaagtaagagccaac

SEQ ID NO: 110351 - DNA, 20 bp, Artificial Sequence
  MKO10110351_B_Prol1
  gRNA
gacttgtgatgactttcacc

SEQ ID NO: 110352 - DNA, 20 bp, Artificial Sequence
  MKO10110352_B_Prol1
  gRNA
atcagcattaaggtagttcc

SEQ ID NO: 110353 - DNA, 20 bp, Artificial Sequence
  MKO10110353_B_Prom1
  gRNA
cagccgaatgacttccctct

SEQ ID NO: 110354 - DNA, 20 bp, Artificial Sequence
  MKO10110354_B_Prom1
  gRNA
tacagccttggcattatata

SEQ ID NO: 110355 - DNA, 20 bp, Artificial Sequence
  MKO10110355_B_Prom1
  gRNA
ttgtggctaaccagcagacc

SEQ ID NO: 110356 - DNA, 20 bp, Artificial Sequence
  MKO10110356_B_Prom2
  gRNA
ctcctattggtgcccatcac

SEQ ID NO: 110357 - DNA, 20 bp, Artificial Sequence
  MKO10110357_B_Prom2
  gRNA
gagaccctgctcagcctaag

SEQ ID NO: 110358 - DNA, 20 bp, Artificial Sequence
  MKO10110358_B_Prom2
  gRNA
cttaggctgagcagggtctc

SEQ ID NO: 110359 - DNA, 20 bp, Artificial Sequence
  MKO10110359_B_Prop1
  gRNA
ccatcaggaaaagcaaacga

SEQ ID NO: 110360 - DNA, 20 bp, Artificial Sequence
  MKO10110360_B_Prop1
  gRNA
ggaaccagtatcctgacatc

SEQ ID NO: 110361 - DNA, 20 bp, Artificial Sequence
  MKO10110361_B_Prop1
  gRNA
ctcgtggctcaggcagggat

SEQ ID NO: 110362 - DNA, 20 bp, Artificial Sequence
  MKO10110362_B_Prorsd1
  gRNA
taaaactacagttcctcttt

SEQ ID NO: 110363 - DNA, 20 bp, Artificial Sequence
  MKO10110363_B_Prorsd1
  gRNA
tgcgggctgagttagaacag

SEQ ID NO: 110364 - DNA, 20 bp, Artificial Sequence
  MKO10110364_B_Prorsd1
  gRNA
agaggggaaaatggcaggct

SEQ ID NO: 110365 - DNA, 20 bp, Artificial Sequence
  MKO10110365_B_Pros1
  gRNA
tagctgactgcctcgcagca

SEQ ID NO: 110366 - DNA, 20 bp, Artificial Sequence
  MKO10110366_B_Pros1
  gRNA
cctataccatgcaatgaaga

SEQ ID NO: 110367 - DNA, 20 bp, Artificial Sequence
  MKO10110367_B_Pros1
  gRNA
agggtcacattggtctgaga

SEQ ID NO: 110368 - DNA, 20 bp, Artificial Sequence
  MKO10110368_B_Prosc
  gRNA
gccgccgcgccacactctgc

SEQ ID NO: 110369 - DNA, 20 bp, Artificial Sequence
  MKO10110369_B_Prosc
  gRNA
tgccagcttcaccgagtcta

SEQ ID NO: 110370 - DNA, 20 bp, Artificial Sequence
  MKO10110370_B_Prosc
  gRNA
aaccgtagactcggtgaagc

SEQ ID NO: 110371 - DNA, 20 bp, Artificial Sequence
  MKO10110371_B_Proser1
  gRNA
cgaggccaagagctccagag

SEQ ID NO: 110372 - DNA, 20 bp, Artificial Sequence
  MKO10110372_B_Proser1
  gRNA
aaagcaattgagtatgttca

SEQ ID NO: 110373 - DNA, 20 bp, Artificial Sequence
  MKO10110373_B_Proser1
  gRNA
gattctgaataaatcttcaa

SEQ ID NO: 110374 - DNA, 20 bp, Artificial Sequence
  MKO10110374_B_Proser2
  gRNA
gtgcagcccgcacctgcgtc

SEQ ID NO: 110375 - DNA, 20 bp, Artificial Sequence
  MKO10110375_B_Proser2
  gRNA
caagtcgctgagcccgcagc

SEQ ID NO: 110376 - DNA, 20 bp, Artificial Sequence
  MKO10110376_B_Proser2
  gRNA
agagccggtgcagcagttcg

SEQ ID NO: 110377 - DNA, 20 bp, Artificial Sequence
  MKO10110377_B_Prox1
  gRNA
acgtgatctgcgcaacttcc

SEQ ID NO: 110378 - DNA, 20 bp, Artificial Sequence
  MKO10110378_B_Prox1
  gRNA
gacgcgcatacttctccatc

SEQ ID NO: 110379 - DNA, 20 bp, Artificial Sequence
  MKO10110379_B_Prox1
  gRNA
taccttcacgtccgagaagt

SEQ ID NO: 110380 - DNA, 20 bp, Artificial Sequence
  MKO10110380_B_Prox2
  gRNA
tgttaactcgggaacagtcc

SEQ ID NO: 110381 - DNA, 20 bp, Artificial Sequence
  MKO10110381_B_Prox2
  gRNA
gcccggcaagcactttcaga

SEQ ID NO: 110382 - DNA, 20 bp, Artificial Sequence
  MKO10110382_B_Prox2
  gRNA
gattgccgccctgacactga

SEQ ID NO: 110383 - DNA, 20 bp, Artificial Sequence
  MKO10110383_B_Proz
  gRNA
cgcagaacgttgtttgcctt

SEQ ID NO: 110384 - DNA, 20 bp, Artificial Sequence
  MKO10110384_B_Proz
  gRNA
ggcatccatccgtcctctct

SEQ ID NO: 110385 - DNA, 20 bp, Artificial Sequence
  MKO10110385_B_Proz
  gRNA
ggcaaggaccagaaatcatg

SEQ ID NO: 110386 - DNA, 20 bp, Artificial Sequence
  MKO10110386_B_Prp2
  gRNA
gctggtggtcctgtttacag

SEQ ID NO: 110387 - DNA, 20 bp, Artificial Sequence
  MKO10110387_B_Prp2
  gRNA
ctgccttgtggtgggccttg

SEQ ID NO: 110388 - DNA, 20 bp, Artificial Sequence
  MKO10110388_B_Prp2
  gRNA
ccacacctgagacccactca

SEQ ID NO: 110389 - DNA, 20 bp, Artificial Sequence
  MKO10110389_B_Prpf18
  gRNA
ttgacgatgttagtggtttc

SEQ ID NO: 110390 - DNA, 20 bp, Artificial Sequence
  MKO10110390_B_Prpf18
  gRNA
ttacgaaagatgtggctaca

SEQ ID NO: 110391 - DNA, 20 bp, Artificial Sequence
  MKO10110391_B_Prpf18
  gRNA
gcagtacttgaatgagattg

SEQ ID NO: 110392 - DNA, 20 bp, Artificial Sequence
  MKO10110392_B_Prpf19
  gRNA
actcacccactcatcctgca

SEQ ID NO: 110393 - DNA, 20 bp, Artificial Sequence
  MKO10110393_B_Prpf19
  gRNA
cgggtgctctggcacttcat

SEQ ID NO: 110394 - DNA, 20 bp, Artificial Sequence
  MKO10110394_B_Prpf19
  gRNA
aagctcacagcccagtgttg

SEQ ID NO: 110395 - DNA, 20 bp, Artificial Sequence
  MKO10110395_B_Prpf31
  gRNA
cagcaagcaagccaacgtgt

SEQ ID NO: 110396 - DNA, 20 bp, Artificial Sequence
  MKO10110396_B_Prpf31
  gRNA
tcctgtacatcctcaattgc

SEQ ID NO: 110397 - DNA, 20 bp, Artificial Sequence
  MKO10110397_B_Prpf31
  gRNA
tcaagagcattgccaagcta

SEQ ID NO: 110398 - DNA, 20 bp, Artificial Sequence
  MKO10110398_B_Prpf38a
  gRNA
ttgtctcatacctgtagccg

SEQ ID NO: 110399 - DNA, 20 bp, Artificial Sequence
  MKO10110399_B_Prpf38a
  gRNA
gcttcagattcaacctgaga

SEQ ID NO: 110400 - DNA, 20 bp, Artificial Sequence
  MKO10110400_B_Prpf38a
  gRNA
tcgagttagtgccctagaag

SEQ ID NO: 110401 - DNA, 20 bp, Artificial Sequence
  MKO10110401_B_Prpf38b
  gRNA
cctttaaaggttcgaggtgt

SEQ ID NO: 110402 - DNA, 20 bp, Artificial Sequence
  MKO10110402_B_Prpf38b
  gRNA
aggactcaaaccagtcccac

SEQ ID NO: 110403 - DNA, 20 bp, Artificial Sequence
  MKO10110403_B_Prpf38b
  gRNA
cttgctttcgagttaacttc

SEQ ID NO: 110404 - DNA, 20 bp, Artificial Sequence
  MKO10110404_B_Prpf39
  gRNA
agacataactgatccagcaa

SEQ ID NO: 110405 - DNA, 20 bp, Artificial Sequence
  MKO10110405_B_Prpf39
  gRNA
ttccagtaaccatagcaata

SEQ ID NO: 110406 - DNA, 20 bp, Artificial Sequence
  MKO10110406_B_Prpf39
  gRNA
cctggtgatgaccttccatc

SEQ ID NO: 110407 - DNA, 20 bp, Artificial Sequence
  MKO10110407_B_Prpf3
  gRNA
tgattccactctccgatttg

SEQ ID NO: 110408 - DNA, 20 bp, Artificial Sequence
  MKO10110408_B_Prpf3
  gRNA
aatcatcgggggtaaagaag

SEQ ID NO: 110409 - DNA, 20 bp, Artificial Sequence
  MKO10110409_B_Prpf3
  gRNA
tggagctttgttagcatgcc

SEQ ID NO: 110410 - DNA, 20 bp, Artificial Sequence
  MKO10110410_B_Prpf40a
  gRNA
ttccatgcaacctgccttac

SEQ ID NO: 110411 - DNA, 20 bp, Artificial Sequence
  MKO10110411_B_Prpf40a
  gRNA
gcagcctggagtaaatagta

SEQ ID NO: 110412 - DNA, 20 bp, Artificial Sequence
  MKO10110412_B_Prpf40a
  gRNA
acatccatactatttactcc

SEQ ID NO: 110413 - DNA, 20 bp, Artificial Sequence
  MKO10110413_B_Prpf40b
  gRNA
gcccccattggtggaagcat

SEQ ID NO: 110414 - DNA, 20 bp, Artificial Sequence
  MKO10110414_B_Prpf40b
  gRNA
atcattggagggaccattcc

SEQ ID NO: 110415 - DNA, 20 bp, Artificial Sequence
  MKO10110415_B_Prpf40b
  gRNA
gtgcttaccgctgcagtgac

SEQ ID NO: 110416 - DNA, 20 bp, Artificial Sequence
  MKO10110416_B_Prpf4b
  gRNA
atcgaggcttccgacaaaga

SEQ ID NO: 110417 - DNA, 20 bp, Artificial Sequence
  MKO10110417_B_Prpf4b
  gRNA
caaatagagataggagccga

SEQ ID NO: 110418 - DNA, 20 bp, Artificial Sequence
  MKO10110418_B_Prpf4b
  gRNA
ggagacgactttcttctccg

SEQ ID NO: 110419 - DNA, 20 bp, Artificial Sequence
  MKO10110419_B_Prpf4
  gRNA
ataattagcaatccacaatc

SEQ ID NO: 110420 - DNA, 20 bp, Artificial Sequence
  MKO10110420_B_Prpf4
  gRNA
caaggcttgccttcgagcct

SEQ ID NO: 110421 - DNA, 20 bp, Artificial Sequence
  MKO10110421_B_Prpf4
  gRNA
aagcttccatagtagatgtg

SEQ ID NO: 110422 - DNA, 20 bp, Artificial Sequence
  MKO10110422_B_Prpf6
  gRNA
ggagtcagcttctcataacg

SEQ ID NO: 110423 - DNA, 20 bp, Artificial Sequence
  MKO10110423_B_Prpf6
  gRNA
tcttagtttaatggctatgc

SEQ ID NO: 110424 - DNA, 20 bp, Artificial Sequence
  MKO10110424_B_Prpf6
  gRNA
agagattgagaaataccgaa

SEQ ID NO: 110425 - DNA, 20 bp, Artificial Sequence
  MKO10110425_B_Prpf8
  gRNA
gatgtccacactctaccgac

SEQ ID NO: 110426 - DNA, 20 bp, Artificial Sequence
  MKO10110426_B_Prpf8
  gRNA
acgtcccggatctgctccca

SEQ ID NO: 110427 - DNA, 20 bp, Artificial Sequence
  MKO10110427_B_Prpf8
  gRNA
cctttgttaacgagattccc

SEQ ID NO: 110428 - DNA, 20 bp, Artificial Sequence
  MKO10110428_B_Prph2
  gRNA
gcgtcgtcacacttctcgtc

SEQ ID NO: 110429 - DNA, 20 bp, Artificial Sequence
  MKO10110429_B_Prph2
  gRNA
ccgctacctccacacagcgc

SEQ ID NO: 110430 - DNA, 20 bp, Artificial Sequence
  MKO10110430_B_Prph2
  gRNA
agaagagcgtgcccgagacc

SEQ ID NO: 110431 - DNA, 20 bp, Artificial Sequence
  MKO10110431_B_Prph
  gRNA
gtaggaacttcgagacctgc

SEQ ID NO: 110432 - DNA, 20 bp, Artificial Sequence
  MKO10110432_B_Prph
  gRNA
tgcacagtacgagaacatcg

SEQ ID NO: 110433 - DNA, 20 bp, Artificial Sequence
  MKO10110433_B_Prph
  gRNA
caacctggtgctcttccgta

SEQ ID NO: 110434 - DNA, 20 bp, Artificial Sequence
  MKO10110434_B_Prpmp5
  gRNA
cttgtctctgagctgagctc

SEQ ID NO: 110435 - DNA, 20 bp, Artificial Sequence
  MKO10110435_B_Prpmp5
  gRNA
gactcaaattctcagctcct

SEQ ID NO: 110436 - DNA, 20 bp, Artificial Sequence
  MKO10110436_B_Prpmp5
  gRNA
ctgagaatttgagtcttcgt

SEQ ID NO: 110437 - DNA, 20 bp, Artificial Sequence
  MKO10110437_B_Prps1l1
  gRNA
tcatggcgatgtcaatcacc

SEQ ID NO: 110438 - DNA, 20 bp, Artificial Sequence
  MKO10110438_B_Prps1l1
  gRNA
actctcaccaatttccacgc

SEQ ID NO: 110439 - DNA, 20 bp, Artificial Sequence
  MKO10110439_B_Prps1l1
  gRNA
caagagggtcacttccatcg

SEQ ID NO: 110440 - DNA, 20 bp, Artificial Sequence
  MKO10110440_B_Prps1l3
  gRNA
catctcctactagtaccatg

SEQ ID NO: 110441 - DNA, 20 bp, Artificial Sequence
  MKO10110441_B_Prps1l3
  gRNA
tgcaatggaggtcactctct

SEQ ID NO: 110442 - DNA, 20 bp, Artificial Sequence
  MKO10110442_B_Prps1l3
  gRNA
gaaattggagaaagcgttcg

SEQ ID NO: 110443 - DNA, 20 bp, Artificial Sequence
  MKO10110443_B_Prps1
  gRNA
catctcccacaagtaccatg

SEQ ID NO: 110444 - DNA, 20 bp, Artificial Sequence
  MKO10110444_B_Prps1
  gRNA
ccagggtttctttgatatcc

SEQ ID NO: 110445 - DNA, 20 bp, Artificial Sequence
  MKO10110445_B_Prps1
  gRNA
tgcagatcatattatcacca

SEQ ID NO: 110446 - DNA, 20 bp, Artificial Sequence
  MKO10110446_B_Prps2
  gRNA
cccagcaactgacagcatat

SEQ ID NO: 110447 - DNA, 20 bp, Artificial Sequence
  MKO10110447_B_Prps2
  gRNA
gcaagattgcgtcctcatcc

SEQ ID NO: 110448 - DNA, 20 bp, Artificial Sequence
  MKO10110448_B_Prps2
  gRNA
ttcgggagaacatcactgaa

SEQ ID NO: 110449 - DNA, 20 bp, Artificial Sequence
  MKO10110449_B_Prpsap1
  gRNA
gatgacgccaatgatattcc

SEQ ID NO: 110450 - DNA, 20 bp, Artificial Sequence
  MKO10110450_B_Prpsap1
  gRNA
gaaatcaaagaatctgttcg

SEQ ID NO: 110451 - DNA, 20 bp, Artificial Sequence
  MKO10110451_B_Prpsap1
  gRNA
tcattatacagacaataccc

SEQ ID NO: 110452 - DNA, 20 bp, Artificial Sequence
  MKO10110452_B_Prpsap2
  gRNA
cttctctaggcggctggggg

SEQ ID NO: 110453 - DNA, 20 bp, Artificial Sequence
  MKO10110453_B_Prpsap2
  gRNA
agaaacaagagttcaaatcc

SEQ ID NO: 110454 - DNA, 20 bp, Artificial Sequence
  MKO10110454_B_Prpsap2
  gRNA
ggacgtgaacaccaccatca

SEQ ID NO: 110455 - DNA, 20 bp, Artificial Sequence
  MKO10110455_B_Prr11
  gRNA
caagctccgagaaaacctga

SEQ ID NO: 110456 - DNA, 20 bp, Artificial Sequence
  MKO10110456_B_Prr11
  gRNA
gtcttagccagtttctgctt

SEQ ID NO: 110457 - DNA, 20 bp, Artificial Sequence
  MKO10110457_B_Prr11
  gRNA
gagtgttgacgaaagaaaga

SEQ ID NO: 110458 - DNA, 20 bp, Artificial Sequence
  MKO10110458_B_Prr12
  gRNA
tccggtgtggacgtgtcctt

SEQ ID NO: 110459 - DNA, 20 bp, Artificial Sequence
  MKO10110459_B_Prr12
  gRNA
ctcttcgtccagccgcttgc

SEQ ID NO: 110460 - DNA, 20 bp, Artificial Sequence
  MKO10110460_B_Prr12
  gRNA
aaccgacatcttgcatcgcc

SEQ ID NO: 110461 - DNA, 20 bp, Artificial Sequence
  MKO10110461_B_Prr13
  gRNA
cgttcagtcagagtcactgc

SEQ ID NO: 110462 - DNA, 20 bp, Artificial Sequence
  MKO10110462_B_Prr13
  gRNA
ggttggtatcctggacaccc

SEQ ID NO: 110463 - DNA, 20 bp, Artificial Sequence
  MKO10110463_B_Prr13
  gRNA
catgtgccccgtgaatcctc

SEQ ID NO: 110464 - DNA, 20 bp, Artificial Sequence
  MKO10110464_B_Prr14l
  gRNA
ctcccgagacaatccagcaa

SEQ ID NO: 110465 - DNA, 20 bp, Artificial Sequence
  MKO10110465_B_Prr14l
  gRNA
aagaggcacatttggtatgg

SEQ ID NO: 110466 - DNA, 20 bp, Artificial Sequence
  MKO10110466_B_Prr14l
  gRNA
gtgtgggcagctcccatgcc

SEQ ID NO: 110467 - DNA, 20 bp, Artificial Sequence
  MKO10110467_B_Prr14
  gRNA
acctgctttaccatcccaac

SEQ ID NO: 110468 - DNA, 20 bp, Artificial Sequence
  MKO10110468_B_Prr14
  gRNA
acctgttgggatggtaaagc

SEQ ID NO: 110469 - DNA, 20 bp, Artificial Sequence
  MKO10110469_B_Prr14
  gRNA
gttctctgcacaaatgcagt

SEQ ID NO: 110470 - DNA, 20 bp, Artificial Sequence
  MKO10110470_B_Prr15l
  gRNA
gggaccgccatgactgaagt

SEQ ID NO: 110471 - DNA, 20 bp, Artificial Sequence
  MKO10110471_B_Prr15l
  gRNA
gagcccccaggacctgacgc

SEQ ID NO: 110472 - DNA, 20 bp, Artificial Sequence
  MKO10110472_B_Prr15l
  gRNA
caaagtgctctacgaaatcc

SEQ ID NO: 110473 - DNA, 20 bp, Artificial Sequence
  MKO10110473_B_Prr15
  gRNA
tccggggtccccaaggatat

SEQ ID NO: 110474 - DNA, 20 bp, Artificial Sequence
  MKO10110474_B_Prr15
  gRNA
caggtcagataagttgtgtg

SEQ ID NO: 110475 - DNA, 20 bp, Artificial Sequence
  MKO10110475_B_Prr15
  gRNA
cctcaggttcggccagagac

SEQ ID NO: 110476 - DNA, 20 bp, Artificial Sequence
  MKO10110476_B_Prr16
  gRNA
agccttgtccaagttactgt

SEQ ID NO: 110477 - DNA, 20 bp, Artificial Sequence
  MKO10110477_B_Prr16
  gRNA
ggagcagatcaagatcatag

SEQ ID NO: 110478 - DNA, 20 bp, Artificial Sequence
  MKO10110478_B_Prr16
  gRNA
ggacgaggaggggttcccct

SEQ ID NO: 110479 - DNA, 20 bp, Artificial Sequence
  MKO10110479_B_Prr18
  gRNA
cagtgtccccaacgcgcctc

SEQ ID NO: 110480 - DNA, 20 bp, Artificial Sequence
  MKO10110480_B_Prr18
  gRNA
cgaagccctggtccggggac

SEQ ID NO: 110481 - DNA, 20 bp, Artificial Sequence
  MKO10110481_B_Prr18
  gRNA
acgtggtcgaggtcccccca

SEQ ID NO: 110482 - DNA, 20 bp, Artificial Sequence
  MKO10110482_B_Prr19
  gRNA
ggtgacctggaggttgcacc

SEQ ID NO: 110483 - DNA, 20 bp, Artificial Sequence
  MKO10110483_B_Prr19
  gRNA
gatcacacatggatcccgac

SEQ ID NO: 110484 - DNA, 20 bp, Artificial Sequence
  MKO10110484_B_Prr19
  gRNA
gtggcccggctgcttaacag

SEQ ID NO: 110485 - DNA, 20 bp, Artificial Sequence
  MKO10110485_B_Prr22
  gRNA
aagcacatcctggtccgagc

SEQ ID NO: 110486 - DNA, 20 bp, Artificial Sequence
  MKO10110486_B_Prr22
  gRNA
aacctgcactatcagacccc

SEQ ID NO: 110487 - DNA, 20 bp, Artificial Sequence
  MKO10110487_B_Prr22
  gRNA
ccagaaccccttcccaccgt

SEQ ID NO: 110488 - DNA, 20 bp, Artificial Sequence
  MKO10110488_B_Prr23a
  gRNA
gcgccaaccccgcgccctgc

SEQ ID NO: 110489 - DNA, 20 bp, Artificial Sequence
  MKO10110489_B_Prr23a
  gRNA
gggttgtgtcatgagtcctt

SEQ ID NO: 110490 - DNA, 20 bp, Artificial Sequence
  MKO10110490_B_Prr23a
  gRNA
acttggaattgctggaaccc

SEQ ID NO: 110491 - DNA, 20 bp, Artificial Sequence
  MKO10110491_B_Prr24
  gRNA
ggttcccacgcggccgcctg

SEQ ID NO: 110492 - DNA, 20 bp, Artificial Sequence
  MKO10110492_B_Prr24
  gRNA
cgactgtggcggcgactccg

SEQ ID NO: 110493 - DNA, 20 bp, Artificial Sequence
  MKO10110493_B_Prr24
  gRNA
tcgctcagccccgtaccacc

SEQ ID NO: 110494 - DNA, 20 bp, Artificial Sequence
  MKO10110494_B_Prr3
  gRNA
aacatctcgcactgtctgag

SEQ ID NO: 110495 - DNA, 20 bp, Artificial Sequence
  MKO10110495_B_Prr3
  gRNA
aagcctggtgatcccaagtc

SEQ ID NO: 110496 - DNA, 20 bp, Artificial Sequence
  MKO10110496_B_Prr3
  gRNA
caatccctcaccttaactgt

SEQ ID NO: 110497 - DNA, 20 bp, Artificial Sequence
  MKO10110497_B_Prr5l
  gRNA
attcattactgactatttcc

SEQ ID NO: 110498 - DNA, 20 bp, Artificial Sequence
  MKO10110498_B_Prr5l
  gRNA
gagaagatcaagctgtgtga

SEQ ID NO: 110499 - DNA, 20 bp, Artificial Sequence
  MKO10110499_B_Prr5l
  gRNA
cagaaccagcttcttgcaaa

SEQ ID NO: 110500 - DNA, 20 bp, Artificial Sequence
  MKO10110500_B_Prr5
  gRNA
tcagaaccagctgctcacga

SEQ ID NO: 110501 - DNA, 20 bp, Artificial Sequence
  MKO10110501_B_Prr5
  gRNA
tgatgtgctgccaaccctgc

SEQ ID NO: 110502 - DNA, 20 bp, Artificial Sequence
  MKO10110502_B_Prr5
  gRNA
cttcttcactgagtacctgc

SEQ ID NO: 110503 - DNA, 20 bp, Artificial Sequence
  MKO10110503_B_Prr7
  gRNA
accttggcgcggatagctcc

SEQ ID NO: 110504 - DNA, 20 bp, Artificial Sequence
  MKO10110504_B_Prr7
  gRNA
gcacggagcttggcgtctgc

SEQ ID NO: 110505 - DNA, 20 bp, Artificial Sequence
  MKO10110505_B_Prr7
  gRNA
tctccatccccttgttcggg

SEQ ID NO: 110506 - DNA, 20 bp, Artificial Sequence
  MKO10110506_B_Prr9
  gRNA
caaggaaactgcccacaaca

SEQ ID NO: 110507 - DNA, 20 bp, Artificial Sequence
  MKO10110507_B_Prr9
  gRNA
cttgttgtgggcagtttcct

SEQ ID NO: 110508 - DNA, 20 bp, Artificial Sequence
  MKO10110508_B_Prr9
  gRNA
gctagcacaaacaaaatgtg

SEQ ID NO: 110509 - DNA, 20 bp, Artificial Sequence
  MKO10110509_B_Prrc1
  gRNA
ccctatggtgaaatctgtcc

SEQ ID NO: 110510 - DNA, 20 bp, Artificial Sequence
  MKO10110510_B_Prrc1
  gRNA
gcaagccagcatgacgtctc

SEQ ID NO: 110511 - DNA, 20 bp, Artificial Sequence
  MKO10110511_B_Prrc1
  gRNA
aaaccccagatcccgccagc

SEQ ID NO: 110512 - DNA, 20 bp, Artificial Sequence
  MKO10110512_B_Prrc2a
  gRNA
tttaccccgcttggaaccga

SEQ ID NO: 110513 - DNA, 20 bp, Artificial Sequence
  MKO10110513_B_Prrc2a
  gRNA
gggtcgtttcggctggttgg

SEQ ID NO: 110514 - DNA, 20 bp, Artificial Sequence
  MKO10110514_B_Prrc2a
  gRNA
gtctcactagtgccgaaaga

SEQ ID NO: 110515 - DNA, 20 bp, Artificial Sequence
  MKO10110515_B_Prrc2b
  gRNA
catcgcaatgtccgatcgtt

SEQ ID NO: 110516 - DNA, 20 bp, Artificial Sequence
  MKO10110516_B_Prrc2b
  gRNA
ggcccatcctgtcccgtcct

SEQ ID NO: 110517 - DNA, 20 bp, Artificial Sequence
  MKO10110517_B_Prrc2b
  gRNA
tcgggaaagttgccacagcc

SEQ ID NO: 110518 - DNA, 20 bp, Artificial Sequence
  MKO10110518_B_Prrc2c
  gRNA
ctatactgagaagcaagtgc

SEQ ID NO: 110519 - DNA, 20 bp, Artificial Sequence
  MKO10110519_B_Prrc2c
  gRNA
ttgggagcaggtgctacttc

SEQ ID NO: 110520 - DNA, 20 bp, Artificial Sequence
  MKO10110520_B_Prrc2c
  gRNA
tagcacctgctcccaaatca

SEQ ID NO: 110521 - DNA, 20 bp, Artificial Sequence
  MKO10110521_B_Prrg1
  gRNA
aaacgctacccaagagccaa

SEQ ID NO: 110522 - DNA, 20 bp, Artificial Sequence
  MKO10110522_B_Prrg1
  gRNA
ccggccaggtgaacctgaga

SEQ ID NO: 110523 - DNA, 20 bp, Artificial Sequence
  MKO10110523_B_Prrg1
  gRNA
ttgactatgtcctcatattc

SEQ ID NO: 110524 - DNA, 20 bp, Artificial Sequence
  MKO10110524_B_Prrg2
  gRNA
aagctatacgtacaatggca

SEQ ID NO: 110525 - DNA, 20 bp, Artificial Sequence
  MKO10110525_B_Prrg2
  gRNA
ccgcctcatacctggagtaa

SEQ ID NO: 110526 - DNA, 20 bp, Artificial Sequence
  MKO10110526_B_Prrg2
  gRNA
tttggtatctgcattatcga

SEQ ID NO: 110527 - DNA, 20 bp, Artificial Sequence
  MKO10110527_B_Prrg3
  gRNA
ttccatgcactcccgctcaa

SEQ ID NO: 110528 - DNA, 20 bp, Artificial Sequence
  MKO10110528_B_Prrg3
  gRNA
cgaactgagtagactgcgtt

SEQ ID NO: 110529 - DNA, 20 bp, Artificial Sequence
  MKO10110529_B_Prrg3
  gRNA
tacgtcagggcaccattgag

SEQ ID NO: 110530 - DNA, 20 bp, Artificial Sequence
  MKO10110530_B_Prrg4
  gRNA
cagtgctactgcctgttcat

SEQ ID NO: 110531 - DNA, 20 bp, Artificial Sequence
  MKO10110531_B_Prrg4
  gRNA
gatgttatgagccttctgac

SEQ ID NO: 110532 - DNA, 20 bp, Artificial Sequence
  MKO10110532_B_Prrg4
  gRNA
cttcttcctagatcaaattt

SEQ ID NO: 110533 - DNA, 20 bp, Artificial Sequence
  MKO10110533_B_Prrt1
  gRNA
ccggtaggtgcgcacggctt

SEQ ID NO: 110534 - DNA, 20 bp, Artificial Sequence
  MKO10110534_B_Prrt1
  gRNA
ttgccacagccctacgcagg

SEQ ID NO: 110535 - DNA, 20 bp, Artificial Sequence
  MKO10110535_B_Prrt1
  gRNA
gcgatgggcatgtagtcgtg

SEQ ID NO: 110536 - DNA, 20 bp, Artificial Sequence
  MKO10110536_B_Prrt2
  gRNA
cgtggatggggctcaacgtc

SEQ ID NO: 110537 - DNA, 20 bp, Artificial Sequence
  MKO10110537_B_Prrt2
  gRNA
tctcccacagtgtataagtg

SEQ ID NO: 110538 - DNA, 20 bp, Artificial Sequence
  MKO10110538_B_Prrt2
  gRNA
ggccttcgcttatgccgtca

SEQ ID NO: 110539 - DNA, 20 bp, Artificial Sequence
  MKO10110539_B_Prrt3
  gRNA
tcagcagtatcctcgctgaa

SEQ ID NO: 110540 - DNA, 20 bp, Artificial Sequence
  MKO10110540_B_Prrt3
  gRNA
gagccgaccccagggactac

SEQ ID NO: 110541 - DNA, 20 bp, Artificial Sequence
  MKO10110541_B_Prrt3
  gRNA
gcctggagcccagctcgacc

SEQ ID NO: 110542 - DNA, 20 bp, Artificial Sequence
  MKO10110542_B_Prrt4
  gRNA
taacgaccgatgaccaagag

SEQ ID NO: 110543 - DNA, 20 bp, Artificial Sequence
  MKO10110543_B_Prrt4
  gRNA
gcatgctcaccttgttgcac

SEQ ID NO: 110544 - DNA, 20 bp, Artificial Sequence
  MKO10110544_B_Prrt4
  gRNA
gtcgcgtcctccacccctcc

SEQ ID NO: 110545 - DNA, 20 bp, Artificial Sequence
  MKO10110545_B_Prrx1
  gRNA
gcacgttctggagcggcaac

SEQ ID NO: 110546 - DNA, 20 bp, Artificial Sequence
  MKO10110546_B_Prrx1
  gRNA
cccaagatgttgtttacacg

SEQ ID NO: 110547 - DNA, 20 bp, Artificial Sequence
  MKO10110547_B_Prrx1
  gRNA
ccctcgtgtaaacaacatct

SEQ ID NO: 110548 - DNA, 20 bp, Artificial Sequence
  MKO10110548_B_Prrx2
  gRNA
accgccgtgccaagtttcgc

SEQ ID NO: 110549 - DNA, 20 bp, Artificial Sequence
  MKO10110549_B_Prrx2
  gRNA
gctcatcgtggtaggtcggg

SEQ ID NO: 110550 - DNA, 20 bp, Artificial Sequence
  MKO10110550_B_Prrx2
  gRNA
acttgaacctccggggctat

SEQ ID NO: 110551 - DNA, 20 bp, Artificial Sequence
  MKO10110551_B_Prrxl1
  gRNA
gggcatacgtggctgtgttc

SEQ ID NO: 110552 - DNA, 20 bp, Artificial Sequence
  MKO10110552_B_Prrxl1
  gRNA
cctccttcttgctccgggtc

SEQ ID NO: 110553 - DNA, 20 bp, Artificial Sequence
  MKO10110553_B_Prrxl1
  gRNA
tagggcccactgtgcgtccc

SEQ ID NO: 110554 - DNA, 20 bp, Artificial Sequence
  MKO10110554_B_Prss12
  gRNA
agcctatgtccatcgctgtc

SEQ ID NO: 110555 - DNA, 20 bp, Artificial Sequence
  MKO10110555_B_Prss12
  gRNA
gccccttgtagtagacctcc

SEQ ID NO: 110556 - DNA, 20 bp, Artificial Sequence
  MKO10110556_B_Prss12
  gRNA
ctcaattgacagctcgtttc

SEQ ID NO: 110557 - DNA, 20 bp, Artificial Sequence
  MKO10110557_B_Prss16
  gRNA
tgacagacgaaccttcctgc

SEQ ID NO: 110558 - DNA, 20 bp, Artificial Sequence
  MKO10110558_B_Prss16
  gRNA
gctctccacagggcatcctg

SEQ ID NO: 110559 - DNA, 20 bp, Artificial Sequence
  MKO10110559_B_Prss16
  gRNA
gtaccagtatttctgcacat

SEQ ID NO: 110560 - DNA, 20 bp, Artificial Sequence
  MKO10110560_B_Prss1
  gRNA
gagctgcagacaccacccac

SEQ ID NO: 110561 - DNA, 20 bp, Artificial Sequence
  MKO10110561_B_Prss1
  gRNA
tattcaagttgctttccctg

SEQ ID NO: 110562 - DNA, 20 bp, Artificial Sequence
  MKO10110562_B_Prss1
  gRNA
aggaatccttgcctccctct

SEQ ID NO: 110563 - DNA, 20 bp, Artificial Sequence
  MKO10110563_B_Prss21
  gRNA
caggaacccgacctattgtc

SEQ ID NO: 110564 - DNA, 20 bp, Artificial Sequence
  MKO10110564_B_Prss21
  gRNA
tcggttctcaaacttgtacg

SEQ ID NO: 110565 - DNA, 20 bp, Artificial Sequence
  MKO10110565_B_Prss21
  gRNA
caccttacctgacaataggt

SEQ ID NO: 110566 - DNA, 20 bp, Artificial Sequence
  MKO10110566_B_Prss22
  gRNA
aactctgcaaaagcttgtac

SEQ ID NO: 110567 - DNA, 20 bp, Artificial Sequence
  MKO10110567_B_Prss22
  gRNA
tggagtgttccaggcgcacc

SEQ ID NO: 110568 - DNA, 20 bp, Artificial Sequence
  MKO10110568_B_Prss22
  gRNA
tccctcccaagaccgactgc

SEQ ID NO: 110569 - DNA, 20 bp, Artificial Sequence
  MKO10110569_B_Prss23
  gRNA
ataatccatgccgatgtcat

SEQ ID NO: 110570 - DNA, 20 bp, Artificial Sequence
  MKO10110570_B_Prss23
  gRNA
cgggctgggcgtcacactgc

SEQ ID NO: 110571 - DNA, 20 bp, Artificial Sequence
  MKO10110571_B_Prss23
  gRNA
gctgcccactgcatacacga

SEQ ID NO: 110572 - DNA, 20 bp, Artificial Sequence
  MKO10110572_B_Prss27
  gRNA
caggtcagcatccagcgcaa

SEQ ID NO: 110573 - DNA, 20 bp, Artificial Sequence
  MKO10110573_B_Prss27
  gRNA
gcacttgggcgtgtcaatga

SEQ ID NO: 110574 - DNA, 20 bp, Artificial Sequence
  MKO10110574_B_Prss27
  gRNA
cagaccgactacccaaccca

SEQ ID NO: 110575 - DNA, 20 bp, Artificial Sequence
  MKO10110575_B_Prss28
  gRNA
gggggtcaatgtaccccacc

SEQ ID NO: 110576 - DNA, 20 bp, Artificial Sequence
  MKO10110576_B_Prss28
  gRNA
atccgacgagcacaaagctg

SEQ ID NO: 110577 - DNA, 20 bp, Artificial Sequence
  MKO10110577_B_Prss28
  gRNA
gcctccctatcaactgcatg

SEQ ID NO: 110578 - DNA, 20 bp, Artificial Sequence
  MKO10110578_B_Prss29
  gRNA
cacccagactttgtccacgc

SEQ ID NO: 110579 - DNA, 20 bp, Artificial Sequence
  MKO10110579_B_Prss29
  gRNA
tcagtttctggccacgattg

SEQ ID NO: 110580 - DNA, 20 bp, Artificial Sequence
  MKO10110580_B_Prss29
  gRNA
ctgcacataacatgtccttt

SEQ ID NO: 110581 - DNA, 20 bp, Artificial Sequence
  MKO10110581_B_Prss2
  gRNA
atgaattataattggggtgc

SEQ ID NO: 110582 - DNA, 20 bp, Artificial Sequence
  MKO10110582_B_Prss2
  gRNA
gcactggggcatcaacacac

SEQ ID NO: 110583 - DNA, 20 bp, Artificial Sequence
  MKO10110583_B_Prss2
  gRNA
atacaccaggagcatctggc

SEQ ID NO: 110584 - DNA, 20 bp, Artificial Sequence
  MKO10110584_B_Prss30
  gRNA
tcactaacctgcggaagcag

SEQ ID NO: 110585 - DNA, 20 bp, Artificial Sequence
  MKO10110585_B_Prss30
  gRNA
cgctagacgcatctgcccag

SEQ ID NO: 110586 - DNA, 20 bp, Artificial Sequence
  MKO10110586_B_Prss30
  gRNA
cgtggagatatattgccctc

SEQ ID NO: 110587 - DNA, 20 bp, Artificial Sequence
  MKO10110587_B_Prss32
  gRNA
tgctcgtccgctgaatagct

SEQ ID NO: 110588 - DNA, 20 bp, Artificial Sequence
  MKO10110588_B_Prss32
  gRNA
ccagtctgcctcccgaaacc

SEQ ID NO: 110589 - DNA, 20 bp, Artificial Sequence
  MKO10110589_B_Prss32
  gRNA
ctcctggtagtaggtattgc

SEQ ID NO: 110590 - DNA, 20 bp, Artificial Sequence
  MKO10110590_B_Prss33
  gRNA
gacctgccgtcaacacccac

SEQ ID NO: 110591 - DNA, 20 bp, Artificial Sequence
  MKO10110591_B_Prss33
  gRNA
gcctcgtcctcagagtagtc

SEQ ID NO: 110592 - DNA, 20 bp, Artificial Sequence
  MKO10110592_B_Prss33
  gRNA
gagcactgagtctggacgtc

SEQ ID NO: 110593 - DNA, 20 bp, Artificial Sequence
  MKO10110593_B_Prss34
  gRNA
catgtcgtctttgatgatcc

SEQ ID NO: 110594 - DNA, 20 bp, Artificial Sequence
  MKO10110594_B_Prss34
  gRNA
tcccgtggcaggtcagcttg

SEQ ID NO: 110595 - DNA, 20 bp, Artificial Sequence
  MKO10110595_B_Prss34
  gRNA
tcttgaccactttcatcagc

SEQ ID NO: 110596 - DNA, 20 bp, Artificial Sequence
  MKO10110596_B_Prss35
  gRNA
actcggaacagcagcgtaaa

SEQ ID NO: 110597 - DNA, 20 bp, Artificial Sequence
  MKO10110597_B_Prss35
  gRNA
cgtagtcgtagtccaaggcc

SEQ ID NO: 110598 - DNA, 20 bp, Artificial Sequence
  MKO10110598_B_Prss35
  gRNA
cagcatcgcaatactgatac

SEQ ID NO: 110599 - DNA, 20 bp, Artificial Sequence
  MKO10110599_B_Prss36
  gRNA
tgagccctcttcccgcattg

SEQ ID NO: 110600 - DNA, 20 bp, Artificial Sequence
  MKO10110600_B_Prss36
  gRNA
ctaggtcttcaaattctcct

SEQ ID NO: 110601 - DNA, 20 bp, Artificial Sequence
  MKO10110601_B_Prss36
  gRNA
ctagtggtcagtcctaccca

SEQ ID NO: 110602 - DNA, 20 bp, Artificial Sequence
  MKO10110602_B_Prss37
  gRNA
gtctaacttcaatccctgcg

SEQ ID NO: 110603 - DNA, 20 bp, Artificial Sequence
  MKO10110603_B_Prss37
  gRNA
cagtctttgtccgtcatcac

SEQ ID NO: 110604 - DNA, 20 bp, Artificial Sequence
  MKO10110604_B_Prss37
  gRNA
cacggtaaatagcagtgaga

SEQ ID NO: 110605 - DNA, 20 bp, Artificial Sequence
  MKO10110605_B_Prss38
  gRNA
acctagggattagtggcaac

SEQ ID NO: 110606 - DNA, 20 bp, Artificial Sequence
  MKO10110606_B_Prss38
  gRNA
tggggaatgatctcgccaca

SEQ ID NO: 110607 - DNA, 20 bp, Artificial Sequence
  MKO10110607_B_Prss38
  gRNA
tgcagattggaatagtgagc

SEQ ID NO: 110608 - DNA, 20 bp, Artificial Sequence
  MKO10110608_B_Prss39
  gRNA
ccctcctcctgcaatcgatt

SEQ ID NO: 110609 - DNA, 20 bp, Artificial Sequence
  MKO10110609_B_Prss39
  gRNA
gagacctccgcgtccagcag

SEQ ID NO: 110610 - DNA, 20 bp, Artificial Sequence
  MKO10110610_B_Prss39
  gRNA
cctgccacgaaagatcagac

SEQ ID NO: 110611 - DNA, 20 bp, Artificial Sequence
  MKO10110611_B_Prss3
  gRNA
cactctagttgccttccccg

SEQ ID NO: 110612 - DNA, 20 bp, Artificial Sequence
  MKO10110612_B_Prss3
  gRNA
cagccgcatccaagtgagat

SEQ ID NO: 110613 - DNA, 20 bp, Artificial Sequence
  MKO10110613_B_Prss3
  gRNA
atgagacactgagtgccagc

SEQ ID NO: 110614 - DNA, 20 bp, Artificial Sequence
  MKO10110614_B_Prss40
  gRNA
acgtggtagggctaaccagc

SEQ ID NO: 110615 - DNA, 20 bp, Artificial Sequence
  MKO10110615_B_Prss40
  gRNA
cggtgtagcctagcatgaca

SEQ ID NO: 110616 - DNA, 20 bp, Artificial Sequence
  MKO10110616_B_Prss40
  gRNA
tgacatcgtcctgctgtacc

SEQ ID NO: 110617 - DNA, 20 bp, Artificial Sequence
  MKO10110617_B_Prss41
  gRNA
taccctgtaccgtccagaat

SEQ ID NO: 110618 - DNA, 20 bp, Artificial Sequence
  MKO10110618_B_Prss41
  gRNA
agggtcacgtgaagaaagcc

SEQ ID NO: 110619 - DNA, 20 bp, Artificial Sequence
  MKO10110619_B_Prss41
  gRNA
ccacggccagcgcccttgca

SEQ ID NO: 110620 - DNA, 20 bp, Artificial Sequence
  MKO10110620_B_Prss42
  gRNA
ggcatcagctgtggtcgcaa

SEQ ID NO: 110621 - DNA, 20 bp, Artificial Sequence
  MKO10110621_B_Prss42
  gRNA
tgttccgacagaaatcctcc

SEQ ID NO: 110622 - DNA, 20 bp, Artificial Sequence
  MKO10110622_B_Prss42
  gRNA
aggatttctgtcggaacatc

SEQ ID NO: 110623 - DNA, 20 bp, Artificial Sequence
  MKO10110623_B_Prss43
  gRNA
acagcgtgttacagtgcttc

SEQ ID NO: 110624 - DNA, 20 bp, Artificial Sequence
  MKO10110624_B_Prss43
  gRNA
aagattccggagtgatgcac

SEQ ID NO: 110625 - DNA, 20 bp, Artificial Sequence
  MKO10110625_B_Prss43
  gRNA
ttgcggccatagaattacag

SEQ ID NO: 110626 - DNA, 20 bp, Artificial Sequence
  MKO10110626_B_Prss44
  gRNA
ggtcttggctgtggccgaat

SEQ ID NO: 110627 - DNA, 20 bp, Artificial Sequence
  MKO10110627_B_Prss44
  gRNA
gtggaaggcctgcgccagcg

SEQ ID NO: 110628 - DNA, 20 bp, Artificial Sequence
  MKO10110628_B_Prss44
  gRNA
ccaggacatcatcgttcacc

SEQ ID NO: 110629 - DNA, 20 bp, Artificial Sequence
  MKO10110629_B_Prss45
  gRNA
gcacaagtcctccccataat

SEQ ID NO: 110630 - DNA, 20 bp, Artificial Sequence
  MKO10110630_B_Prss45
  gRNA
acgtacttgttgaaagtgac

SEQ ID NO: 110631 - DNA, 20 bp, Artificial Sequence
  MKO10110631_B_Prss45
  gRNA
ccctgcagcccagttgacac

SEQ ID NO: 110632 - DNA, 20 bp, Artificial Sequence
  MKO10110632_B_Prss46
  gRNA
cagccatgctggtaaacttc

SEQ ID NO: 110633 - DNA, 20 bp, Artificial Sequence
  MKO10110633_B_Prss46
  gRNA
acaatgaaatctgcaatcat

SEQ ID NO: 110634 - DNA, 20 bp, Artificial Sequence
  MKO10110634_B_Prss46
  gRNA
cgctgcagatgtacattccc

SEQ ID NO: 110635 - DNA, 20 bp, Artificial Sequence
  MKO10110635_B_Prss48
  gRNA
ttgatgacccgctccagatc

SEQ ID NO: 110636 - DNA, 20 bp, Artificial Sequence
  MKO10110636_B_Prss48
  gRNA
gtcgaggaaggatagctgca

SEQ ID NO: 110637 - DNA, 20 bp, Artificial Sequence
  MKO10110637_B_Prss48
  gRNA
gggtggccaagatgctgctt

SEQ ID NO: 110638 - DNA, 20 bp, Artificial Sequence
  MKO10110638_B_Prss50
  gRNA
gttgatgatccgaaccagag

SEQ ID NO: 110639 - DNA, 20 bp, Artificial Sequence
  MKO10110639_B_Prss50
  gRNA
caccgccgagtcatggcttc

SEQ ID NO: 110640 - DNA, 20 bp, Artificial Sequence
  MKO10110640_B_Prss50
  gRNA
agcctgcacgctgaccatcc

SEQ ID NO: 110641 - DNA, 20 bp, Artificial Sequence
  MKO10110641_B_Prss51
  gRNA
gactcggagactctttcaag

SEQ ID NO: 110642 - DNA, 20 bp, Artificial Sequence
  MKO10110642_B_Prss51
  gRNA
gagtacctggcacttgccgt

SEQ ID NO: 110643 - DNA, 20 bp, Artificial Sequence
  MKO10110643_B_Prss51
  gRNA
ttggcgtggcaagtaggagc

SEQ ID NO: 110644 - DNA, 20 bp, Artificial Sequence
  MKO10110644_B_Prss52
  gRNA
accaggtgggcattgtcagc

SEQ ID NO: 110645 - DNA, 20 bp, Artificial Sequence
  MKO10110645_B_Prss52
  gRNA
gcccggcaagagagcaccaa

SEQ ID NO: 110646 - DNA, 20 bp, Artificial Sequence
  MKO10110646_B_Prss52
  gRNA
agtccaacccacaattctgc

SEQ ID NO: 110647 - DNA, 20 bp, Artificial Sequence
  MKO10110647_B_Prss53
  gRNA
ggtcttcaagcagctcagcg

SEQ ID NO: 110648 - DNA, 20 bp, Artificial Sequence
  MKO10110648_B_Prss53
  gRNA
acttaccatcactggtgttc

SEQ ID NO: 110649 - DNA, 20 bp, Artificial Sequence
  MKO10110649_B_Prss53
  gRNA
ctgggttggacagcaacctc

SEQ ID NO: 110650 - DNA, 20 bp, Artificial Sequence
  MKO10110650_B_Prss54
  gRNA
ggaaaccagcgggccttcga

SEQ ID NO: 110651 - DNA, 20 bp, Artificial Sequence
  MKO10110651_B_Prss54
  gRNA
gaactttgacaacgtctcaa

SEQ ID NO: 110652 - DNA, 20 bp, Artificial Sequence
  MKO10110652_B_Prss54
  gRNA
ggaactcggtgctgctcacg

SEQ ID NO: 110653 - DNA, 20 bp, Artificial Sequence
  MKO10110653_B_Prss55
  gRNA
agtgaccaccatttctgcgg

SEQ ID NO: 110654 - DNA, 20 bp, Artificial Sequence
  MKO10110654_B_Prss55
  gRNA
tagaggtcaccaccataatc

SEQ ID NO: 110655 - DNA, 20 bp, Artificial Sequence
  MKO10110655_B_Prss55
  gRNA
cccagggatatatactgtat

SEQ ID NO: 110656 - DNA, 20 bp, Artificial Sequence
  MKO10110656_B_Prss56
  gRNA
ggccataaagcgcgtgttga

SEQ ID NO: 110657 - DNA, 20 bp, Artificial Sequence
  MKO10110657_B_Prss56
  gRNA
ttagtttcacctggctccgg

SEQ ID NO: 110658 - DNA, 20 bp, Artificial Sequence
  MKO10110658_B_Prss56
  gRNA
agtccacagaagctcattcg

SEQ ID NO: 110659 - DNA, 20 bp, Artificial Sequence
  MKO10110659_B_Prss57
  gRNA
atgaggtaacgccacattcc

SEQ ID NO: 110660 - DNA, 20 bp, Artificial Sequence
  MKO10110660_B_Prss57
  gRNA
acagagcgtccagtagaacc

SEQ ID NO: 110661 - DNA, 20 bp, Artificial Sequence
  MKO10110661_B_Prss57
  gRNA
gcccgtcttccacagaccaa

SEQ ID NO: 110662 - DNA, 20 bp, Artificial Sequence
  MKO10110662_B_Prss58
  gRNA
ggaatcttgtcttatgcaga

SEQ ID NO: 110663 - DNA, 20 bp, Artificial Sequence
  MKO10110663_B_Prss58
  gRNA
ccatgtgctccgtgtctacc

SEQ ID NO: 110664 - DNA, 20 bp, Artificial Sequence
  MKO10110664_B_Prss58
  gRNA
agacttcaggtagaccaagt

SEQ ID NO: 110665 - DNA, 20 bp, Artificial Sequence
  MKO10110665_B_Prss8
  gRNA
tcgaggtaccactcatcagc

SEQ ID NO: 110666 - DNA, 20 bp, Artificial Sequence
  MKO10110666_B_Prss8
  gRNA
ggatgagcgcgatgtccccc

SEQ ID NO: 110667 - DNA, 20 bp, Artificial Sequence
  MKO10110667_B_Prss8
  gRNA
ccactcaagctaccgagaag

SEQ ID NO: 110668 - DNA, 20 bp, Artificial Sequence
  MKO10110668_B_Prtg
  gRNA
gcttcgctaaccatagttgc

SEQ ID NO: 110669 - DNA, 20 bp, Artificial Sequence
  MKO10110669_B_Prtg
  gRNA
gtgttgcagatctacgacgt

SEQ ID NO: 110670 - DNA, 20 bp, Artificial Sequence
  MKO10110670_B_Prtg
  gRNA
gagagccgttagatagaacc

SEQ ID NO: 110671 - DNA, 20 bp, Artificial Sequence
  MKO10110671_B_Prtn3
  gRNA
gccccactctcggccttatg

SEQ ID NO: 110672 - DNA, 20 bp, Artificial Sequence
  MKO10110672_B_Prtn3
  gRNA
cctcggggttgtaattgttc

SEQ ID NO: 110673 - DNA, 20 bp, Artificial Sequence
  MKO10110673_B_Prtn3
  gRNA
gcgtgcacacgttgtgttcc

SEQ ID NO: 110674 - DNA, 20 bp, Artificial Sequence
  MKO10110674_B_Prune2
  gRNA
tgagttctggagcctcacgc

SEQ ID NO: 110675 - DNA, 20 bp, Artificial Sequence
  MKO10110675_B_Prune2
  gRNA
ctgcatcagctgaacgatga

SEQ ID NO: 110676 - DNA, 20 bp, Artificial Sequence
  MKO10110676_B_Prune2
  gRNA
agtttcccaacctccctccg

SEQ ID NO: 110677 - DNA, 20 bp, Artificial Sequence
  MKO10110677_B_Prune
  gRNA
aagacattgtccccgcgcag

SEQ ID NO: 110678 - DNA, 20 bp, Artificial Sequence
  MKO10110678_B_Prune
  gRNA
ccttataggaaccatcatcc

SEQ ID NO: 110679 - DNA, 20 bp, Artificial Sequence
  MKO10110679_B_Prune
  gRNA
tgattccttaccatgcagta

SEQ ID NO: 110680 - DNA, 20 bp, Artificial Sequence
  MKO10110680_B_Prx
  gRNA
ctttgtccgtgagctgcgag

SEQ ID NO: 110681 - DNA, 20 bp, Artificial Sequence
  MKO10110681_B_Prx
  gRNA
ctcgtatccagacaccgtcc

SEQ ID NO: 110682 - DNA, 20 bp, Artificial Sequence
  MKO10110682_B_Prx
  gRNA
agggctctgcgcattgcagc

SEQ ID NO: 110683 - DNA, 20 bp, Artificial Sequence
  MKO10110683_B_Psapl1
  gRNA
agtccaacagtgcatcaccc

SEQ ID NO: 110684 - DNA, 20 bp, Artificial Sequence
  MKO10110684_B_Psapl1
  gRNA
aacactgccagcgcctcgtg

SEQ ID NO: 110685 - DNA, 20 bp, Artificial Sequence
  MKO10110685_B_Psapl1
  gRNA
atctgcaactcattcgtcct

SEQ ID NO: 110686 - DNA, 20 bp, Artificial Sequence
  MKO10110686_B_Psap
  gRNA
aaaactgttgtcaccgaagc

SEQ ID NO: 110687 - DNA, 20 bp, Artificial Sequence
  MKO10110687_B_Psap
  gRNA
gtccacctccgggatcttgt

SEQ ID NO: 110688 - DNA, 20 bp, Artificial Sequence
  MKO10110688_B_Psap
  gRNA
tggctgcgggggtgatcctg

SEQ ID NO: 110689 - DNA, 20 bp, Artificial Sequence
  MKO10110689_B_Psat1
  gRNA
ggcgtccgggttgaggttcc

SEQ ID NO: 110690 - DNA, 20 bp, Artificial Sequence
  MKO10110690_B_Psat1
  gRNA
ctctgtattgccaataatct

SEQ ID NO: 110691 - DNA, 20 bp, Artificial Sequence
  MKO10110691_B_Psat1
  gRNA
tgtcctcaaacttcttatcc

SEQ ID NO: 110692 - DNA, 20 bp, Artificial Sequence
  MKO10110692_B_Psca
  gRNA
ctgaagcttacctggatgca

SEQ ID NO: 110693 - DNA, 20 bp, Artificial Sequence
  MKO10110693_B_Psca
  gRNA
acctacttagccctgcatcc

SEQ ID NO: 110694 - DNA, 20 bp, Artificial Sequence
  MKO10110694_B_Psca
  gRNA
gaatgtacagaactgcagcc

SEQ ID NO: 110695 - DNA, 20 bp, Artificial Sequence
  MKO10110695_B_Psd2
  gRNA
ctgaagccatcacgtacatc

SEQ ID NO: 110696 - DNA, 20 bp, Artificial Sequence
  MKO10110696_B_Psd2
  gRNA
ccagacgacagcacatcaga

SEQ ID NO: 110697 - DNA, 20 bp, Artificial Sequence
  MKO10110697_B_Psd2
  gRNA
ggcagtaccggcgagagaag

SEQ ID NO: 110698 - DNA, 20 bp, Artificial Sequence
  MKO10110698_B_Psd3
  gRNA
gtcttgagtttaaacacgtt

SEQ ID NO: 110699 - DNA, 20 bp, Artificial Sequence
  MKO10110699_B_Psd3
  gRNA
aaccgttctttacttacaga

SEQ ID NO: 110700 - DNA, 20 bp, Artificial Sequence
  MKO10110700_B_Psd3
  gRNA
tcaagaacgagaagcttgaa

SEQ ID NO: 110701 - DNA, 20 bp, Artificial Sequence
  MKO10110701_B_Psd4
  gRNA
ggagcccgtgttctgcactt

SEQ ID NO: 110702 - DNA, 20 bp, Artificial Sequence
  MKO10110702_B_Psd4
  gRNA
gagcctctaccctcagattc

SEQ ID NO: 110703 - DNA, 20 bp, Artificial Sequence
  MKO10110703_B_Psd4
  gRNA
caacacatcctgtacagcct

SEQ ID NO: 110704 - DNA, 20 bp, Artificial Sequence
  MKO10110704_B_Psd
  gRNA
tccttggacgcccccagctc

SEQ ID NO: 110705 - DNA, 20 bp, Artificial Sequence
  MKO10110705_B_Psd
  gRNA
cactcaccgggccccctccg

SEQ ID NO: 110706 - DNA, 20 bp, Artificial Sequence
  MKO10110706_B_Psd
  gRNA
tataggaggtgcccttggcc

SEQ ID NO: 110707 - DNA, 20 bp, Artificial Sequence
  MKO10110707_B_Psen1
  gRNA
cgcccattagatattggctc

SEQ ID NO: 110708 - DNA, 20 bp, Artificial Sequence
  MKO10110708_B_Psen1
  gRNA
ccgcattcaggatcgagtgc

SEQ ID NO: 110709 - DNA, 20 bp, Artificial Sequence
  MKO10110709_B_Psen1
  gRNA
tcttctaggtcatccacgcc

SEQ ID NO: 110710 - DNA, 20 bp, Artificial Sequence
  MKO10110710_B_Psen2
  gRNA
cgagggcgtgtcctccgtga

SEQ ID NO: 110711 - DNA, 20 bp, Artificial Sequence
  MKO10110711_B_Psen2
  gRNA
tattgtgatcagcgcactca

SEQ ID NO: 110712 - DNA, 20 bp, Artificial Sequence
  MKO10110712_B_Psen2
  gRNA
cgacctaccgtacacagaga

SEQ ID NO: 110713 - DNA, 20 bp, Artificial Sequence
  MKO10110713_B_Psenen
  gRNA
gcgcaactatgaacttggag

SEQ ID NO: 110714 - DNA, 20 bp, Artificial Sequence
  MKO10110714_B_Psenen
  gRNA
gctctgtgtaggctggggcg

SEQ ID NO: 110715 - DNA, 20 bp, Artificial Sequence
  MKO10110715_B_Psenen
  gRNA
gaagttgttagggagtgccc

SEQ ID NO: 110716 - DNA, 20 bp, Artificial Sequence
  MKO10110716_B_Psg16
  gRNA
aaagccctcgaagcttatcc

SEQ ID NO: 110717 - DNA, 20 bp, Artificial Sequence
  MKO10110717_B_Psg16
  gRNA
tccccttctgcagcataccg

SEQ ID NO: 110718 - DNA, 20 bp, Artificial Sequence
  MKO10110718_B_Psg16
  gRNA
tgggagactggatttcgagc

SEQ ID NO: 110719 - DNA, 20 bp, Artificial Sequence
  MKO10110719_B_Psg17
  gRNA
cagttctccacgttgactta

SEQ ID NO: 110720 - DNA, 20 bp, Artificial Sequence
  MKO10110720_B_Psg17
  gRNA
agtatcttatatcacttacc

SEQ ID NO: 110721 - DNA, 20 bp, Artificial Sequence
  MKO10110721_B_Psg17
  gRNA
ggcactaattcaatagtggg

SEQ ID NO: 110722 - DNA, 20 bp, Artificial Sequence
  MKO10110722_B_Psg18
  gRNA
acttacgatggatgttgact

SEQ ID NO: 110723 - DNA, 20 bp, Artificial Sequence
  MKO10110723_B_Psg18
  gRNA
ttaccaccccaagtgtatga

SEQ ID NO: 110724 - DNA, 20 bp, Artificial Sequence
  MKO10110724_B_Psg18
  gRNA
gaacctggtccggcccacag

SEQ ID NO: 110725 - DNA, 20 bp, Artificial Sequence
  MKO10110725_B_Psg19
  gRNA
gtgacagagtctatcatcag

SEQ ID NO: 110726 - DNA, 20 bp, Artificial Sequence
  MKO10110726_B_Psg19
  gRNA
gtagaatccgatgtccttcc

SEQ ID NO: 110727 - DNA, 20 bp, Artificial Sequence
  MKO10110727_B_Psg19
  gRNA
tgtggatccaaagtgccacc

SEQ ID NO: 110728 - DNA, 20 bp, Artificial Sequence
  MKO10110728_B_Psg20
  gRNA
aggggaggtaggacgcccac

SEQ ID NO: 110729 - DNA, 20 bp, Artificial Sequence
  MKO10110729_B_Psg20
  gRNA
gcactgtttcaactttcaca

SEQ ID NO: 110730 - DNA, 20 bp, Artificial Sequence
  MKO10110730_B_Psg20
  gRNA
gtgtgcgtagccactgaaaa

SEQ ID NO: 110731 - DNA, 20 bp, Artificial Sequence
  MKO10110731_B_Psg21
  gRNA
aattcttgagtgttctgtgc

SEQ ID NO: 110732 - DNA, 20 bp, Artificial Sequence
  MKO10110732_B_Psg21
  gRNA
ctcttgactctgcccaactc

SEQ ID NO: 110733 - DNA, 20 bp, Artificial Sequence
  MKO10110733_B_Psg21
  gRNA
agtctttctcagtgacatcc

SEQ ID NO: 110734 - DNA, 20 bp, Artificial Sequence
  MKO10110734_B_Psg22
  gRNA
gtgacagagtctctcatcaa

SEQ ID NO: 110735 - DNA, 20 bp, Artificial Sequence
  MKO10110735_B_Psg22
  gRNA
agttcgaatacagggctcag

SEQ ID NO: 110736 - DNA, 20 bp, Artificial Sequence
  MKO10110736_B_Psg22
  gRNA
agaatcttcgagtctttgtc

SEQ ID NO: 110737 - DNA, 20 bp, Artificial Sequence
  MKO10110737_B_Psg23
  gRNA
aatatcgattcacagtttgt

SEQ ID NO: 110738 - DNA, 20 bp, Artificial Sequence
  MKO10110738_B_Psg23
  gRNA
tacaaactgtgaatcgatat

SEQ ID NO: 110739 - DNA, 20 bp, Artificial Sequence
  MKO10110739_B_Psg23
  gRNA
tcaccacaacacgtagttga

SEQ ID NO: 110740 - DNA, 20 bp, Artificial Sequence
  MKO10110740_B_Psg25
  gRNA
atttagcaaccctctgtacc

SEQ ID NO: 110741 - DNA, 20 bp, Artificial Sequence
  MKO10110741_B_Psg25
  gRNA
agcatcttcaatcgctattc

SEQ ID NO: 110742 - DNA, 20 bp, Artificial Sequence
  MKO10110742_B_Psg25
  gRNA
aaaggtgtgcataacactca

SEQ ID NO: 110743 - DNA, 20 bp, Artificial Sequence
  MKO10110743_B_Psg26
  gRNA
caggtccataatctgccaga

SEQ ID NO: 110744 - DNA, 20 bp, Artificial Sequence
  MKO10110744_B_Psg26
  gRNA
tgaatccttaccaccccaag

SEQ ID NO: 110745 - DNA, 20 bp, Artificial Sequence
  MKO10110745_B_Psg26
  gRNA
agagtttgcagctcacagag

SEQ ID NO: 110746 - DNA, 20 bp, Artificial Sequence
  MKO10110746_B_Psg27
  gRNA
tcagtagcatgccgagtcac

SEQ ID NO: 110747 - DNA, 20 bp, Artificial Sequence
  MKO10110747_B_Psg27
  gRNA
gatatcgattcagagtttgt

SEQ ID NO: 110748 - DNA, 20 bp, Artificial Sequence
  MKO10110748_B_Psg27
  gRNA
gaccagtcttccagtcaacc

SEQ ID NO: 110749 - DNA, 20 bp, Artificial Sequence
  MKO10110749_B_Psg28
  gRNA
accaggttcccttgatttct

SEQ ID NO: 110750 - DNA, 20 bp, Artificial Sequence
  MKO10110750_B_Psg28
  gRNA
agtggtgggcaggtgccagc

SEQ ID NO: 110751 - DNA, 20 bp, Artificial Sequence
  MKO10110751_B_Psg28
  gRNA
cttctggcagattatagacc

SEQ ID NO: 110752 - DNA, 20 bp, Artificial Sequence
  MKO10110752_B_Psg29
  gRNA
tcaaagggatgaccgtgcac

SEQ ID NO: 110753 - DNA, 20 bp, Artificial Sequence
  MKO10110753_B_Psg29
  gRNA
acactgtcccctacgaagtg

SEQ ID NO: 110754 - DNA, 20 bp, Artificial Sequence
  MKO10110754_B_Psg29
  gRNA
tccctggcagattattgaca

SEQ ID NO: 110755 - DNA, 20 bp, Artificial Sequence
  MKO10110755_B_Psip1
  gRNA
ttaaaacctttccgtttatt

SEQ ID NO: 110756 - DNA, 20 bp, Artificial Sequence
  MKO10110756_B_Psip1
  gRNA
caggtagatgaagttcctga

SEQ ID NO: 110757 - DNA, 20 bp, Artificial Sequence
  MKO10110757_B_Psip1
  gRNA
ctttctctttcttcctcgcc

SEQ ID NO: 110758 - DNA, 20 bp, Artificial Sequence
  MKO10110758_B_Pskh1
  gRNA
ggtgctccacacgtaccact

SEQ ID NO: 110759 - DNA, 20 bp, Artificial Sequence
  MKO10110759_B_Pskh1
  gRNA
ccaacaagtcacgccgtgtt

SEQ ID NO: 110760 - DNA, 20 bp, Artificial Sequence
  MKO10110760_B_Pskh1
  gRNA
taaagctgcctcgcccaatt

SEQ ID NO: 110761 - DNA, 20 bp, Artificial Sequence
  MKO10110761_B_Psma1
  gRNA
ccgcaattgagataccaata

SEQ ID NO: 110762 - DNA, 20 bp, Artificial Sequence
  MKO10110762_B_Psma1
  gRNA
aagcaaggttcagcaacagt

SEQ ID NO: 110763 - DNA, 20 bp, Artificial Sequence
  MKO10110763_B_Psma1
  gRNA
tctcgtcttgtgtctctaat

SEQ ID NO: 110764 - DNA, 20 bp, Artificial Sequence
  MKO10110764_B_Psma2
  gRNA
cgtgtactcctgcatcacag

SEQ ID NO: 110765 - DNA, 20 bp, Artificial Sequence
  MKO10110765_B_Psma2
  gRNA
gaatgggttcttggtaaaca

SEQ ID NO: 110766 - DNA, 20 bp, Artificial Sequence
  MKO10110766_B_Psma2
  gRNA
agctggaggggccccgtcag

SEQ ID NO: 110767 - DNA, 20 bp, Artificial Sequence
  MKO10110767_B_Psma3
  gRNA
ccagcatcttgcagacagag

SEQ ID NO: 110768 - DNA, 20 bp, Artificial Sequence
  MKO10110768_B_Psma3
  gRNA
gcctctacgttctctcctga

SEQ ID NO: 110769 - DNA, 20 bp, Artificial Sequence
  MKO10110769_B_Psma3
  gRNA
acttggaaaactcttccatc

SEQ ID NO: 110770 - DNA, 20 bp, Artificial Sequence
  MKO10110770_B_Psma4
  gRNA
tgtaggtcgcttataccaag

SEQ ID NO: 110771 - DNA, 20 bp, Artificial Sequence
  MKO10110771_B_Psma4
  gRNA
tagggacatggcttgcagcg

SEQ ID NO: 110772 - DNA, 20 bp, Artificial Sequence
  MKO10110772_B_Psma4
  gRNA
agtctcgaagatatgactcc

SEQ ID NO: 110773 - DNA, 20 bp, Artificial Sequence
  MKO10110773_B_Psma5
  gRNA
aactaactcaccatagcacc

SEQ ID NO: 110774 - DNA, 20 bp, Artificial Sequence
  MKO10110774_B_Psma5
  gRNA
tagcttggttctacagccat

SEQ ID NO: 110775 - DNA, 20 bp, Artificial Sequence
  MKO10110775_B_Psma5
  gRNA
acttgaaataatcttccttc

SEQ ID NO: 110776 - DNA, 20 bp, Artificial Sequence
  MKO10110776_B_Psma6
  gRNA
cacgctatgaggcagctaat

SEQ ID NO: 110777 - DNA, 20 bp, Artificial Sequence
  MKO10110777_B_Psma6
  gRNA
tgttctttaggacaaactac

SEQ ID NO: 110778 - DNA, 20 bp, Artificial Sequence
  MKO10110778_B_Psma6
  gRNA
gactcacttgttcaagataa

SEQ ID NO: 110779 - DNA, 20 bp, Artificial Sequence
  MKO10110779_B_Psma7
  gRNA
caggtctcaccgctgatgca

SEQ ID NO: 110780 - DNA, 20 bp, Artificial Sequence
  MKO10110780_B_Psma7
  gRNA
gcttcagactcgcaatgtag

SEQ ID NO: 110781 - DNA, 20 bp, Artificial Sequence
  MKO10110781_B_Psma7
  gRNA
gcgcaggccatttggtatct

SEQ ID NO: 110782 - DNA, 20 bp, Artificial Sequence
  MKO10110782_B_Psma8
  gRNA
tctttataggttggaattcg

SEQ ID NO: 110783 - DNA, 20 bp, Artificial Sequence
  MKO10110783_B_Psma8
  gRNA
aaggccttcgtccattgctc

SEQ ID NO: 110784 - DNA, 20 bp, Artificial Sequence
  MKO10110784_B_Psma8
  gRNA
gagtggtgatcagcagagcg

SEQ ID NO: 110785 - DNA, 20 bp, Artificial Sequence
  MKO10110785_B_Psmb10
  gRNA
tcggaacacaagccccgcga

SEQ ID NO: 110786 - DNA, 20 bp, Artificial Sequence
  MKO10110786_B_Psmb10
  gRNA
ttgctcaccggaaaagcgtc

SEQ ID NO: 110787 - DNA, 20 bp, Artificial Sequence
  MKO10110787_B_Psmb10
  gRNA
gaacggacctcagctctacg

SEQ ID NO: 110788 - DNA, 20 bp, Artificial Sequence
  MKO10110788_B_Psmb11
  gRNA
cgtgacgaaagcgaaaagcc

SEQ ID NO: 110789 - DNA, 20 bp, Artificial Sequence
  MKO10110789_B_Psmb11
  gRNA
gccacgatcaagcacaccat

SEQ ID NO: 110790 - DNA, 20 bp, Artificial Sequence
  MKO10110790_B_Psmb11
  gRNA
cagtggacctcttccacgtt

SEQ ID NO: 110791 - DNA, 20 bp, Artificial Sequence
  MKO10110791_B_Psmb1
  gRNA
tcgagtgtctgaagcgacga

SEQ ID NO: 110792 - DNA, 20 bp, Artificial Sequence
  MKO10110792_B_Psmb1
  gRNA
tcagacactcgattgagtga

SEQ ID NO: 110793 - DNA, 20 bp, Artificial Sequence
  MKO10110793_B_Psmb1
  gRNA
gaagcgccgtgagtacagga

SEQ ID NO: 110794 - DNA, 20 bp, Artificial Sequence
  MKO10110794_B_Psmb2
  gRNA
cctttactacatggactacc

SEQ ID NO: 110795 - DNA, 20 bp, Artificial Sequence
  MKO10110795_B_Psmb2
  gRNA
acgtgcaactttataaaatg

SEQ ID NO: 110796 - DNA, 20 bp, Artificial Sequence
  MKO10110796_B_Psmb2
  gRNA
ggaacctggctgactgtctt

SEQ ID NO: 110797 - DNA, 20 bp, Artificial Sequence
  MKO10110797_B_Psmb3
  gRNA
tcagctcatacaagttcagt

SEQ ID NO: 110798 - DNA, 20 bp, Artificial Sequence
  MKO10110798_B_Psmb3
  gRNA
acacatcccatacatttgtt

SEQ ID NO: 110799 - DNA, 20 bp, Artificial Sequence
  MKO10110799_B_Psmb3
  gRNA
tacacagagcctgtcattgc

SEQ ID NO: 110800 - DNA, 20 bp, Artificial Sequence
  MKO10110800_B_Psmb4
  gRNA
gtactcggggtgaagttcga

SEQ ID NO: 110801 - DNA, 20 bp, Artificial Sequence
  MKO10110801_B_Psmb4
  gRNA
gccctagagctattcattca

SEQ ID NO: 110802 - DNA, 20 bp, Artificial Sequence
  MKO10110802_B_Psmb4
  gRNA
caagcatgtccacataaccg

SEQ ID NO: 110803 - DNA, 20 bp, Artificial Sequence
  MKO10110803_B_Psmb5
  gRNA
cgctggctagcgtgttgcag

SEQ ID NO: 110804 - DNA, 20 bp, Artificial Sequence
  MKO10110804_B_Psmb5
  gRNA
cctctactacgtagacagcg

SEQ ID NO: 110805 - DNA, 20 bp, Artificial Sequence
  MKO10110805_B_Psmb5
  gRNA
taagtcagctacattgtcac

SEQ ID NO: 110806 - DNA, 20 bp, Artificial Sequence
  MKO10110806_B_Psmb6
  gRNA
cagaagatgtgatcgtggat

SEQ ID NO: 110807 - DNA, 20 bp, Artificial Sequence
  MKO10110807_B_Psmb6
  gRNA
aaactgcacagccatgatcg

SEQ ID NO: 110808 - DNA, 20 bp, Artificial Sequence
  MKO10110808_B_Psmb6
  gRNA
ctgacctgccctccttcttg

SEQ ID NO: 110809 - DNA, 20 bp, Artificial Sequence
  MKO10110809_B_Psmb7
  gRNA
ttggggggagtagatgttac

SEQ ID NO: 110810 - DNA, 20 bp, Artificial Sequence
  MKO10110810_B_Psmb7
  gRNA
gcagacacgagagcaactga

SEQ ID NO: 110811 - DNA, 20 bp, Artificial Sequence
  MKO10110811_B_Psmb7
  gRNA
ggcggccagtggtcagagag

SEQ ID NO: 110812 - DNA, 20 bp, Artificial Sequence
  MKO10110812_B_Psmb8
  gRNA
aggcgagtgtggttgtgccg

SEQ ID NO: 110813 - DNA, 20 bp, Artificial Sequence
  MKO10110813_B_Psmb8
  gRNA
cagccacgatgacgccatgc

SEQ ID NO: 110814 - DNA, 20 bp, Artificial Sequence
  MKO10110814_B_Psmb8
  gRNA
gatggacagtggttaccggc

SEQ ID NO: 110815 - DNA, 20 bp, Artificial Sequence
  MKO10110815_B_Psmb9
  gRNA
gtggacgcagcttataagcc

SEQ ID NO: 110816 - DNA, 20 bp, Artificial Sequence
  MKO10110816_B_Psmb9
  gRNA
ctactcaccccgctgacacc

SEQ ID NO: 110817 - DNA, 20 bp, Artificial Sequence
  MKO10110817_B_Psmb9
  gRNA
ggagtttgacgggggtgtcg

SEQ ID NO: 110818 - DNA, 20 bp, Artificial Sequence
  MKO10110818_B_Psmc1
  gRNA
ggaggaattcattagaaacc

SEQ ID NO: 110819 - DNA, 20 bp, Artificial Sequence
  MKO10110819_B_Psmc1
  gRNA
tttcagggtcaaagccagag

SEQ ID NO: 110820 - DNA, 20 bp, Artificial Sequence
  MKO10110820_B_Psmc1
  gRNA
gaaaaagaagaagaaaacaa

SEQ ID NO: 110821 - DNA, 20 bp, Artificial Sequence
  MKO10110821_B_Psmc2
  gRNA
agggccaaagtacttattca

SEQ ID NO: 110822 - DNA, 20 bp, Artificial Sequence
  MKO10110822_B_Psmc2
  gRNA
gcataccttgccacctgtaa

SEQ ID NO: 110823 - DNA, 20 bp, Artificial Sequence
  MKO10110823_B_Psmc2
  gRNA
tctgccttgaataagtactt

SEQ ID NO: 110824 - DNA, 20 bp, Artificial Sequence
  MKO10110824_B_Psmc3ip
  gRNA
cctctgctaggcggtagtga

SEQ ID NO: 110825 - DNA, 20 bp, Artificial Sequence
  MKO10110825_B_Psmc3ip
  gRNA
gaacacgtcctgggcgctgt

SEQ ID NO: 110826 - DNA, 20 bp, Artificial Sequence
  MKO10110826_B_Psmc3ip
  gRNA
tctctttgatcttgccttcc

SEQ ID NO: 110827 - DNA, 20 bp, Artificial Sequence
  MKO10110827_B_Psmc3
  gRNA
ccttgtctccaatgtcatcg

SEQ ID NO: 110828 - DNA, 20 bp, Artificial Sequence
  MKO10110828_B_Psmc3
  gRNA
aagagattgtccagcgcaca

SEQ ID NO: 110829 - DNA, 20 bp, Artificial Sequence
  MKO10110829_B_Psmc3
  gRNA
gcatccaccaacccaatcac

SEQ ID NO: 110830 - DNA, 20 bp, Artificial Sequence
  MKO10110830_B_Psmc4
  gRNA
gcggatccagagcatcccct

SEQ ID NO: 110831 - DNA, 20 bp, Artificial Sequence
  MKO10110831_B_Psmc4
  gRNA
cgggaggcagcacgtccacc

SEQ ID NO: 110832 - DNA, 20 bp, Artificial Sequence
  MKO10110832_B_Psmc4
  gRNA
gcatcctgagtaccatcgac

SEQ ID NO: 110833 - DNA, 20 bp, Artificial Sequence
  MKO10110833_B_Psmc5
  gRNA
cctcacgacttctccaacgt

SEQ ID NO: 110834 - DNA, 20 bp, Artificial Sequence
  MKO10110834_B_Psmc5
  gRNA
cacctggagttcttcaatct

SEQ ID NO: 110835 - DNA, 20 bp, Artificial Sequence
  MKO10110835_B_Psmc5
  gRNA
ccagaatctccgtagactgc

SEQ ID NO: 110836 - DNA, 20 bp, Artificial Sequence
  MKO10110836_B_Psmc6
  gRNA
tccaaagcaactctggttcc

SEQ ID NO: 110837 - DNA, 20 bp, Artificial Sequence
  MKO10110837_B_Psmc6
  gRNA
aaagtctgaaaatgatttga

SEQ ID NO: 110838 - DNA, 20 bp, Artificial Sequence
  MKO10110838_B_Psmc6
  gRNA
gtcatcgttaaagcaacaaa

SEQ ID NO: 110839 - DNA, 20 bp, Artificial Sequence
  MKO10110839_B_Psmd10
  gRNA
tattcttcgaagctgcataa

SEQ ID NO: 110840 - DNA, 20 bp, Artificial Sequence
  MKO10110840_B_Psmd10
  gRNA
acgtcatctttatcattcac

SEQ ID NO: 110841 - DNA, 20 bp, Artificial Sequence
  MKO10110841_B_Psmd10
  gRNA
gttgaattcttgctgcaact

SEQ ID NO: 110842 - DNA, 20 bp, Artificial Sequence
  MKO10110842_B_Psmd11
  gRNA
aggcacctacctccaatgct

SEQ ID NO: 110843 - DNA, 20 bp, Artificial Sequence
  MKO10110843_B_Psmd11
  gRNA
tacccaaatgcaatgcttcc

SEQ ID NO: 110844 - DNA, 20 bp, Artificial Sequence
  MKO10110844_B_Psmd11
  gRNA
tgacattcaagaaaatgatg

SEQ ID NO: 110845 - DNA, 20 bp, Artificial Sequence
  MKO10110845_B_Psmd12
  gRNA
ttatgcttctgtcaaaacga

SEQ ID NO: 110846 - DNA, 20 bp, Artificial Sequence
  MKO10110846_B_Psmd12
  gRNA
tcactactgcaaccaagatg

SEQ ID NO: 110847 - DNA, 20 bp, Artificial Sequence
  MKO10110847_B_Psmd12
  gRNA
gcaactattaaagagcaaaa

SEQ ID NO: 110848 - DNA, 20 bp, Artificial Sequence
  MKO10110848_B_Psmd13
  gRNA
ttctattctagatcctaatg

SEQ ID NO: 110849 - DNA, 20 bp, Artificial Sequence
  MKO10110849_B_Psmd13
  gRNA
caggacccatgctttgccca

SEQ ID NO: 110850 - DNA, 20 bp, Artificial Sequence
  MKO10110850_B_Psmd13
  gRNA
tcatcagtgagtttgagcac

SEQ ID NO: 110851 - DNA, 20 bp, Artificial Sequence
  MKO10110851_B_Psmd14
  gRNA
attagacccataacttccat

SEQ ID NO: 110852 - DNA, 20 bp, Artificial Sequence
  MKO10110852_B_Psmd14
  gRNA
ccttacctttagcaaggcca

SEQ ID NO: 110853 - DNA, 20 bp, Artificial Sequence
  MKO10110853_B_Psmd14
  gRNA
agtgttccaagccaaaatgt

SEQ ID NO: 110854 - DNA, 20 bp, Artificial Sequence
  MKO10110854_B_Psmd1
  gRNA
aagtcggcagtttgcagccc

SEQ ID NO: 110855 - DNA, 20 bp, Artificial Sequence
  MKO10110855_B_Psmd1
  gRNA
ccaattcataccttaagctg

SEQ ID NO: 110856 - DNA, 20 bp, Artificial Sequence
  MKO10110856_B_Psmd1
  gRNA
atgcagtcgtgaatgacttc

SEQ ID NO: 110857 - DNA, 20 bp, Artificial Sequence
  MKO10110857_B_Psmd2
  gRNA
tctatccatagacatctggc

SEQ ID NO: 110858 - DNA, 20 bp, Artificial Sequence
  MKO10110858_B_Psmd2
  gRNA
tgatgagaacgcctacgcca

SEQ ID NO: 110859 - DNA, 20 bp, Artificial Sequence
  MKO10110859_B_Psmd2
  gRNA
cccatgacgccagttcttcc

SEQ ID NO: 110860 - DNA, 20 bp, Artificial Sequence
  MKO10110860_B_Psmd3
  gRNA
accctgcggcacgatgctga

SEQ ID NO: 110861 - DNA, 20 bp, Artificial Sequence
  MKO10110861_B_Psmd3
  gRNA
agtgttactattatcacgcc

SEQ ID NO: 110862 - DNA, 20 bp, Artificial Sequence
  MKO10110862_B_Psmd3
  gRNA
ctgcagtttcgtcctcgcac

SEQ ID NO: 110863 - DNA, 20 bp, Artificial Sequence
  MKO10110863_B_Psmd4
  gRNA
caggactcacgtgggccacg

SEQ ID NO: 110864 - DNA, 20 bp, Artificial Sequence
  MKO10110864_B_Psmd4
  gRNA
ccctgtggaggacaacgaga

SEQ ID NO: 110865 - DNA, 20 bp, Artificial Sequence
  MKO10110865_B_Psmd4
  gRNA
tgagtgacatacaatgttga

SEQ ID NO: 110866 - DNA, 20 bp, Artificial Sequence
  MKO10110866_B_Psmd5
  gRNA
ttaaactactgtaccacaag

SEQ ID NO: 110867 - DNA, 20 bp, Artificial Sequence
  MKO10110867_B_Psmd5
  gRNA
ttgagtcaccagtccacttg

SEQ ID NO: 110868 - DNA, 20 bp, Artificial Sequence
  MKO10110868_B_Psmd5
  gRNA
tccatacctgcgacagagtg

SEQ ID NO: 110869 - DNA, 20 bp, Artificial Sequence
  MKO10110869_B_Psmd6
  gRNA
ccttgtgtaaatccctcgac

SEQ ID NO: 110870 - DNA, 20 bp, Artificial Sequence
  MKO10110870_B_Psmd6
  gRNA
tcagtatgatcgccttagaa

SEQ ID NO: 110871 - DNA, 20 bp, Artificial Sequence
  MKO10110871_B_Psmd6
  gRNA
tataaaagagtccgatcctt

SEQ ID NO: 110872 - DNA, 20 bp, Artificial Sequence
  MKO10110872_B_Psmd7
  gRNA
caccgaagcctacatctcag

SEQ ID NO: 110873 - DNA, 20 bp, Artificial Sequence
  MKO10110873_B_Psmd7
  gRNA
gatatcattcttgtgcagtt

SEQ ID NO: 110874 - DNA, 20 bp, Artificial Sequence
  MKO10110874_B_Psmd7
  gRNA
atgacaaagatgattctgtc

SEQ ID NO: 110875 - DNA, 20 bp, Artificial Sequence
  MKO10110875_B_Psmd8
  gRNA
cagggatgttccccttagcc

SEQ ID NO: 110876 - DNA, 20 bp, Artificial Sequence
  MKO10110876_B_Psmd8
  gRNA
tgttgtagctaccctccatg

SEQ ID NO: 110877 - DNA, 20 bp, Artificial Sequence
  MKO10110877_B_Psmd8
  gRNA
gactaaacagcaactcattc

SEQ ID NO: 110878 - DNA, 20 bp, Artificial Sequence
  MKO10110878_B_Psmd9
  gRNA
cgaaccgctggtggactgtg

SEQ ID NO: 110879 - DNA, 20 bp, Artificial Sequence
  MKO10110879_B_Psmd9
  gRNA
ggtacaagtccacatccgcc

SEQ ID NO: 110880 - DNA, 20 bp, Artificial Sequence
  MKO10110880_B_Psmd9
  gRNA
caatttcgtcatccacttgc

SEQ ID NO: 110881 - DNA, 20 bp, Artificial Sequence
  MKO10110881_B_Psme1
  gRNA
tcccaagaaaatctcagagt

SEQ ID NO: 110882 - DNA, 20 bp, Artificial Sequence
  MKO10110882_B_Psme1
  gRNA
tcgggtactgggatgtccaa

SEQ ID NO: 110883 - DNA, 20 bp, Artificial Sequence
  MKO10110883_B_Psme1
  gRNA
ggagcggaagaagcaacagg

SEQ ID NO: 110884 - DNA, 20 bp, Artificial Sequence
  MKO10110884_B_Psme2b
  gRNA
atccattacatgggtatcct

SEQ ID NO: 110885 - DNA, 20 bp, Artificial Sequence
  MKO10110885_B_Psme2b
  gRNA
atgataaagctcagcataga

SEQ ID NO: 110886 - DNA, 20 bp, Artificial Sequence
  MKO10110886_B_Psme2b
  gRNA
cctcctgcaagagctgactc

SEQ ID NO: 110887 - DNA, 20 bp, Artificial Sequence
  MKO10110887_B_Psme2
  gRNA
ttagatggaaacagacaagc

SEQ ID NO: 110888 - DNA, 20 bp, Artificial Sequence
  MKO10110888_B_Psme2
  gRNA
tcctctgcactttcttgcca

SEQ ID NO: 110889 - DNA, 20 bp, Artificial Sequence
  MKO10110889_B_Psme2
  gRNA
atccctgagtcagctcttgc

SEQ ID NO: 110890 - DNA, 20 bp, Artificial Sequence
  MKO10110890_B_Psme3
  gRNA
ctcctcaccaatagccacga

SEQ ID NO: 110891 - DNA, 20 bp, Artificial Sequence
  MKO10110891_B_Psme3
  gRNA
tcaagttctagtaacttctt

SEQ ID NO: 110892 - DNA, 20 bp, Artificial Sequence
  MKO10110892_B_Psme3
  gRNA
ctctgtctaggcagaagact

SEQ ID NO: 110893 - DNA, 20 bp, Artificial Sequence
  MKO10110893_B_Psme4
  gRNA
aaacctttatgatgcagttc

SEQ ID NO: 110894 - DNA, 20 bp, Artificial Sequence
  MKO10110894_B_Psme4
  gRNA
actagaaatcagcatgatgc

SEQ ID NO: 110895 - DNA, 20 bp, Artificial Sequence
  MKO10110895_B_Psme4
  gRNA
agaaaatgttctcaaaacac

SEQ ID NO: 110896 - DNA, 20 bp, Artificial Sequence
  MKO10110896_B_Psmf1
  gRNA
tcatctcccccgacagcaaa

SEQ ID NO: 110897 - DNA, 20 bp, Artificial Sequence
  MKO10110897_B_Psmf1
  gRNA
cagaactactgccagctaag

SEQ ID NO: 110898 - DNA, 20 bp, Artificial Sequence
  MKO10110898_B_Psmf1
  gRNA
atactcacccaaaagggtct

SEQ ID NO: 110899 - DNA, 20 bp, Artificial Sequence
  MKO10110899_B_Psmg1
  gRNA
gtgtagctgctacattgctg

SEQ ID NO: 110900 - DNA, 20 bp, Artificial Sequence
  MKO10110900_B_Psmg1
  gRNA
tcctactgcaattataaact

SEQ ID NO: 110901 - DNA, 20 bp, Artificial Sequence
  MKO10110901_B_Psmg1
  gRNA
tcttgtagtctgtgatgtgc

SEQ ID NO: 110902 - DNA, 20 bp, Artificial Sequence
  MKO10110902_B_Psmg2
  gRNA
acatttccaacggatactgc

SEQ ID NO: 110903 - DNA, 20 bp, Artificial Sequence
  MKO10110903_B_Psmg2
  gRNA
tttcagccagcagtatccgt

SEQ ID NO: 110904 - DNA, 20 bp, Artificial Sequence
  MKO10110904_B_Psmg2
  gRNA
agcaccactagcttctttga

SEQ ID NO: 110905 - DNA, 20 bp, Artificial Sequence
  MKO10110905_B_Psmg3
  gRNA
cttgcgacacaaatgctacc

SEQ ID NO: 110906 - DNA, 20 bp, Artificial Sequence
  MKO10110906_B_Psmg3
  gRNA
gatgggtacgctagtgtcct

SEQ ID NO: 110907 - DNA, 20 bp, Artificial Sequence
  MKO10110907_B_Psmg3
  gRNA
ttctgtttagatactaccag

SEQ ID NO: 110908 - DNA, 20 bp, Artificial Sequence
  MKO10110908_B_Psmg4
  gRNA
acttctgatacaacttccac

SEQ ID NO: 110909 - DNA, 20 bp, Artificial Sequence
  MKO10110909_B_Psmg4
  gRNA
agcccggaagaccagcaaac

SEQ ID NO: 110910 - DNA, 20 bp, Artificial Sequence
  MKO10110910_B_Psmg4
  gRNA
gctgacaaacacctgtttgc

SEQ ID NO: 110911 - DNA, 20 bp, Artificial Sequence
  MKO10110911_B_Psors1c2
  gRNA
agacagccatgatgctcacc

SEQ ID NO: 110912 - DNA, 20 bp, Artificial Sequence
  MKO10110912_B_Psors1c2
  gRNA
tggggagtcctcctcttcgt

SEQ ID NO: 110913 - DNA, 20 bp, Artificial Sequence
  MKO10110913_B_Psors1c2
  gRNA
ggcggaggttcatcaaacaa

SEQ ID NO: 110914 - DNA, 20 bp, Artificial Sequence
  MKO10110914_B_Pspc1
  gRNA
tccagtcattgtagaaccca

SEQ ID NO: 110915 - DNA, 20 bp, Artificial Sequence
  MKO10110915_B_Pspc1
  gRNA
cttgcctcattagcattaac

SEQ ID NO: 110916 - DNA, 20 bp, Artificial Sequence
  MKO10110916_B_Pspc1
  gRNA
tcaagaagaactcagacgtt

SEQ ID NO: 110917 - DNA, 20 bp, Artificial Sequence
  MKO10110917_B_Psph
  gRNA
acacctggacattacgctcc

SEQ ID NO: 110918 - DNA, 20 bp, Artificial Sequence
  MKO10110918_B_Psph
  gRNA
gtggtacatcactgacttcg

SEQ ID NO: 110919 - DNA, 20 bp, Artificial Sequence
  MKO10110919_B_Psph
  gRNA
gatgcagccgacagccgagt

SEQ ID NO: 110920 - DNA, 20 bp, Artificial Sequence
  MKO10110920_B_Pspn
  gRNA
ccagccgaggctcgggtgca

SEQ ID NO: 110921 - DNA, 20 bp, Artificial Sequence
  MKO10110921_B_Pspn
  gRNA
gtcatcttccgatactgtgc

SEQ ID NO: 110922 - DNA, 20 bp, Artificial Sequence
  MKO10110922_B_Pspn
  gRNA
tctcctccgaggcatagccc

SEQ ID NO: 110923 - DNA, 20 bp, Artificial Sequence
  MKO10110923_B_Psrc1
  gRNA
ccaagcgccatagggcacag

SEQ ID NO: 110924 - DNA, 20 bp, Artificial Sequence
  MKO10110924_B_Psrc1
  gRNA
acgagaccttggacttcgga

SEQ ID NO: 110925 - DNA, 20 bp, Artificial Sequence
  MKO10110925_B_Psrc1
  gRNA
ggaaaactgggttcggtgcc

SEQ ID NO: 110926 - DNA, 20 bp, Artificial Sequence
  MKO10110926_B_Pstk
  gRNA
gcaacaaaccagtcacctcc

SEQ ID NO: 110927 - DNA, 20 bp, Artificial Sequence
  MKO10110927_B_Pstk
  gRNA
gaactgtctctcagacgatg

SEQ ID NO: 110928 - DNA, 20 bp, Artificial Sequence
  MKO10110928_B_Pstk
  gRNA
gtgtctcatcagctttatga

SEQ ID NO: 110929 - DNA, 20 bp, Artificial Sequence
  MKO10110929_B_Pstpip1
  gRNA
tcccgtacctctcctccgcc

SEQ ID NO: 110930 - DNA, 20 bp, Artificial Sequence
  MKO10110930_B_Pstpip1
  gRNA
ggctccgcagctcctcacgc

SEQ ID NO: 110931 - DNA, 20 bp, Artificial Sequence
  MKO10110931_B_Pstpip1
  gRNA
ggtatgaggtgctactgcag

SEQ ID NO: 110932 - DNA, 20 bp, Artificial Sequence
  MKO10110932_B_Pstpip2
  gRNA
gcagaagctgcagcggaaaa

SEQ ID NO: 110933 - DNA, 20 bp, Artificial Sequence
  MKO10110933_B_Pstpip2
  gRNA
aagacctgctgaacctctcc

SEQ ID NO: 110934 - DNA, 20 bp, Artificial Sequence
  MKO10110934_B_Pstpip2
  gRNA
tgcgcagactctaagagaag

SEQ ID NO: 110935 - DNA, 20 bp, Artificial Sequence
  MKO10110935_B_Ptafr
  gRNA
attgtctactactacaacga

SEQ ID NO: 110936 - DNA, 20 bp, Artificial Sequence
  MKO10110936_B_Ptafr
  gRNA
caccaacctagtgcccaata

SEQ ID NO: 110937 - DNA, 20 bp, Artificial Sequence
  MKO10110937_B_Ptafr
  gRNA
gataggctactgcctggtag

SEQ ID NO: 110938 - DNA, 20 bp, Artificial Sequence
  MKO10110938_B_Ptar1
  gRNA
tccaattaaggatctgcatc

SEQ ID NO: 110939 - DNA, 20 bp, Artificial Sequence
  MKO10110939_B_Ptar1
  gRNA
tctgtaaaacccagatgcga

SEQ ID NO: 110940 - DNA, 20 bp, Artificial Sequence
  MKO10110940_B_Ptar1
  gRNA
actcttaggaaacttagtta

SEQ ID NO: 110941 - DNA, 20 bp, Artificial Sequence
  MKO10110941_B_Ptbp1
  gRNA
tttgtaccgactgctatgtc

SEQ ID NO: 110942 - DNA, 20 bp, Artificial Sequence
  MKO10110942_B_Ptbp1
  gRNA
atcgtcccagacatagcagt

SEQ ID NO: 110943 - DNA, 20 bp, Artificial Sequence
  MKO10110943_B_Ptbp1
  gRNA
ggcagagctgctcatgatga

SEQ ID NO: 110944 - DNA, 20 bp, Artificial Sequence
  MKO10110944_B_Ptbp2
  gRNA
agtactggatgtaaattggt

SEQ ID NO: 110945 - DNA, 20 bp, Artificial Sequence
  MKO10110945_B_Ptbp2
  gRNA
agccccaactctaatatgag

SEQ ID NO: 110946 - DNA, 20 bp, Artificial Sequence
  MKO10110946_B_Ptbp2
  gRNA
cctttacagaattgtcactg

SEQ ID NO: 110947 - DNA, 20 bp, Artificial Sequence
  MKO10110947_B_Ptbp3
  gRNA
ttggaatactggatataaac

SEQ ID NO: 110948 - DNA, 20 bp, Artificial Sequence
  MKO10110948_B_Ptbp3
  gRNA
agaacacgggaaggcgaaca

SEQ ID NO: 110949 - DNA, 20 bp, Artificial Sequence
  MKO10110949_B_Ptbp3
  gRNA
tgcagaagtcgagctgttca

SEQ ID NO: 110950 - DNA, 20 bp, Artificial Sequence
  MKO10110950_B_Ptcd1
  gRNA
aacgtatcatgccctgctga

SEQ ID NO: 110951 - DNA, 20 bp, Artificial Sequence
  MKO10110951_B_Ptcd1
  gRNA
attgggggctgcgggcgcgt

SEQ ID NO: 110952 - DNA, 20 bp, Artificial Sequence
  MKO10110952_B_Ptcd1
  gRNA
ccgccaagtgtgcagacctc

SEQ ID NO: 110953 - DNA, 20 bp, Artificial Sequence
  MKO10110953_B_Ptcd2
  gRNA
agcgcctcacctataaatga

SEQ ID NO: 110954 - DNA, 20 bp, Artificial Sequence
  MKO10110954_B_Ptcd2
  gRNA
cagatattacctttggtgcc

SEQ ID NO: 110955 - DNA, 20 bp, Artificial Sequence
  MKO10110955_B_Ptcd2
  gRNA
tattgaatgacgttgaatct

SEQ ID NO: 110956 - DNA, 20 bp, Artificial Sequence
  MKO10110956_B_Ptcd3
  gRNA
cctacttaccctgtttactg

SEQ ID NO: 110957 - DNA, 20 bp, Artificial Sequence
  MKO10110957_B_Ptcd3
  gRNA
gaatccctcccaaaggttga

SEQ ID NO: 110958 - DNA, 20 bp, Artificial Sequence
  MKO10110958_B_Ptcd3
  gRNA
cctcataccaacctctgctc

SEQ ID NO: 110959 - DNA, 20 bp, Artificial Sequence
  MKO10110959_B_Ptch1
  gRNA
tcccaataggcaatggaagt

SEQ ID NO: 110960 - DNA, 20 bp, Artificial Sequence
  MKO10110960_B_Ptch1
  gRNA
cgtccccaggggaaggctac

SEQ ID NO: 110961 - DNA, 20 bp, Artificial Sequence
  MKO10110961_B_Ptch1
  gRNA
gaaggggcaaagctacagtc

SEQ ID NO: 110962 - DNA, 20 bp, Artificial Sequence
  MKO10110962_B_Ptch2
  gRNA
tggcttcgagcttacttcca

SEQ ID NO: 110963 - DNA, 20 bp, Artificial Sequence
  MKO10110963_B_Ptch2
  gRNA
ttgaaaatgggatgatcgag

SEQ ID NO: 110964 - DNA, 20 bp, Artificial Sequence
  MKO10110964_B_Ptch2
  gRNA
gcaagtaggcagagccccct

SEQ ID NO: 110965 - DNA, 20 bp, Artificial Sequence
  MKO10110965_B_Ptchd1
  gRNA
gatagcaaaattggtccgat

SEQ ID NO: 110966 - DNA, 20 bp, Artificial Sequence
  MKO10110966_B_Ptchd1
  gRNA
ccgtgtatcagaacgttacc

SEQ ID NO: 110967 - DNA, 20 bp, Artificial Sequence
  MKO10110967_B_Ptchd1
  gRNA
ctccaagcaccggctctact

SEQ ID NO: 110968 - DNA, 20 bp, Artificial Sequence
  MKO10110968_B_Ptchd2
  gRNA
gagcttcgtagtcacgtatg

SEQ ID NO: 110969 - DNA, 20 bp, Artificial Sequence
  MKO10110969_B_Ptchd2
  gRNA
attcatcaacacttaccgcc

SEQ ID NO: 110970 - DNA, 20 bp, Artificial Sequence
  MKO10110970_B_Ptchd2
  gRNA
gcttcccaactactactcag

SEQ ID NO: 110971 - DNA, 20 bp, Artificial Sequence
  MKO10110971_B_Ptchd3
  gRNA
ttgtctatcaatgaaccgaa

SEQ ID NO: 110972 - DNA, 20 bp, Artificial Sequence
  MKO10110972_B_Ptchd3
  gRNA
caccccctacttcaatgtag

SEQ ID NO: 110973 - DNA, 20 bp, Artificial Sequence
  MKO10110973_B_Ptchd3
  gRNA
cgtgatccccctgtttcact

SEQ ID NO: 110974 - DNA, 20 bp, Artificial Sequence
  MKO10110974_B_Ptchd4
  gRNA
cttatgcgtgagccggcacc

SEQ ID NO: 110975 - DNA, 20 bp, Artificial Sequence
  MKO10110975_B_Ptchd4
  gRNA
gtgtggcagaaccataggtc

SEQ ID NO: 110976 - DNA, 20 bp, Artificial Sequence
  MKO10110976_B_Ptchd4
  gRNA
cttgcgcagtaagcccttcc

SEQ ID NO: 110977 - DNA, 20 bp, Artificial Sequence
  MKO10110977_B_Ptcra
  gRNA
ctctggcaccggacggcacc

SEQ ID NO: 110978 - DNA, 20 bp, Artificial Sequence
  MKO10110978_B_Ptcra
  gRNA
caggggaatcttcgacagcc

SEQ ID NO: 110979 - DNA, 20 bp, Artificial Sequence
  MKO10110979_B_Ptcra
  gRNA
ggtgctggcccgccagcaca

SEQ ID NO: 110980 - DNA, 20 bp, Artificial Sequence
  MKO10110980_B_Ptdss1
  gRNA
ctcgacctcatccagcctta

SEQ ID NO: 110981 - DNA, 20 bp, Artificial Sequence
  MKO10110981_B_Ptdss1
  gRNA
gctggacaatcagtatcacc

SEQ ID NO: 110982 - DNA, 20 bp, Artificial Sequence
  MKO10110982_B_Ptdss1
  gRNA
gtgactaacgattctctccc

SEQ ID NO: 110983 - DNA, 20 bp, Artificial Sequence
  MKO10110983_B_Ptdss2
  gRNA
gttcatcctcacctgtgcgc

SEQ ID NO: 110984 - DNA, 20 bp, Artificial Sequence
  MKO10110984_B_Ptdss2
  gRNA
tgagttacctggatgaggtc

SEQ ID NO: 110985 - DNA, 20 bp, Artificial Sequence
  MKO10110985_B_Ptdss2
  gRNA
ctgaccctttccacaacatc

SEQ ID NO: 110986 - DNA, 20 bp, Artificial Sequence
  MKO10110986_B_Pten
  gRNA
acaatattgatgatgtagta

SEQ ID NO: 110987 - DNA, 20 bp, Artificial Sequence
  MKO10110987_B_Pten
  gRNA
catacctctgcagttaaatt

SEQ ID NO: 110988 - DNA, 20 bp, Artificial Sequence
  MKO10110988_B_Pten
  gRNA
aatcccatagcaataatatt

SEQ ID NO: 110989 - DNA, 20 bp, Artificial Sequence
  MKO10110989_B_Pter
  gRNA
tgctcaacttggctgctact

SEQ ID NO: 110990 - DNA, 20 bp, Artificial Sequence
  MKO10110990_B_Pter
  gRNA
cgtgcatacgctgaagtggc

SEQ ID NO: 110991 - DNA, 20 bp, Artificial Sequence
  MKO10110991_B_Pter
  gRNA
ttgatgaagtacggaggtca

SEQ ID NO: 110992 - DNA, 20 bp, Artificial Sequence
  MKO10110992_B_Ptf1a
  gRNA
tcatccgtacagctaaagtg

SEQ ID NO: 110993 - DNA, 20 bp, Artificial Sequence
  MKO10110993_B_Ptf1a
  gRNA
ggtagcagtattcgtgtagc

SEQ ID NO: 110994 - DNA, 20 bp, Artificial Sequence
  MKO10110994_B_Ptf1a
  gRNA
gtccatcaacgacgccttcg

SEQ ID NO: 110995 - DNA, 20 bp, Artificial Sequence
  MKO10110995_B_Ptgdr
  gRNA
ctccagtttctgtagatcag

SEQ ID NO: 110996 - DNA, 20 bp, Artificial Sequence
  MKO10110996_B_Ptgdr
  gRNA
tctgggcaatcttctggcgc

SEQ ID NO: 110997 - DNA, 20 bp, Artificial Sequence
  MKO10110997_B_Ptgdr
  gRNA
gccactacacccgccgccct

SEQ ID NO: 110998 - DNA, 20 bp, Artificial Sequence
  MKO10110998_B_Ptgds
  gRNA
ccgcgctgtaccagcgcccc

SEQ ID NO: 110999 - DNA, 20 bp, Artificial Sequence
  MKO10110999_B_Ptgds
  gRNA
ccccctcacccggttggggc

SEQ ID NO: 111000 - DNA, 20 bp, Artificial Sequence
  MKO10111000_B_Ptgds
  gRNA
tagtgtccaggagcccccgc

SEQ ID NO: 111001 - DNA, 20 bp, Artificial Sequence
  MKO10111001_B_Ptger1
  gRNA
gttagagttccagcccccga

SEQ ID NO: 111002 - DNA, 20 bp, Artificial Sequence
  MKO10111002_B_Ptger1
  gRNA
cgacgattccgaaagaccgc

SEQ ID NO: 111003 - DNA, 20 bp, Artificial Sequence
  MKO10111003_B_Ptger1
  gRNA
gatgtgccattatcgcctgt

SEQ ID NO: 111004 - DNA, 20 bp, Artificial Sequence
  MKO10111004_B_Ptger2
  gRNA
tcagtgaagtccgacaacag

SEQ ID NO: 111005 - DNA, 20 bp, Artificial Sequence
  MKO10111005_B_Ptger2
  gRNA
tccgacggtgcatgcgaatg

SEQ ID NO: 111006 - DNA, 20 bp, Artificial Sequence
  MKO10111006_B_Ptger2
  gRNA
acctcattcgcatgcaccgt

SEQ ID NO: 111007 - DNA, 20 bp, Artificial Sequence
  MKO10111007_B_Ptger3
  gRNA
agatctggttcagcgaagcc

SEQ ID NO: 111008 - DNA, 20 bp, Artificial Sequence
  MKO10111008_B_Ptger3
  gRNA
ctgcaatgaaagtccacttc

SEQ ID NO: 111009 - DNA, 20 bp, Artificial Sequence
  MKO10111009_B_Ptger3
  gRNA
agatgatgaacaacctgaag

SEQ ID NO: 111010 - DNA, 20 bp, Artificial Sequence
  MKO10111010_B_Ptger4
  gRNA
aattcgcaaagttctcagcg

SEQ ID NO: 111011 - DNA, 20 bp, Artificial Sequence
  MKO10111011_B_Ptger4
  gRNA
aagagactgatggctgaggt

SEQ ID NO: 111012 - DNA, 20 bp, Artificial Sequence
  MKO10111012_B_Ptger4
  gRNA
agtattgtgcaagtcgcgca

SEQ ID NO: 111013 - DNA, 20 bp, Artificial Sequence
  MKO10111013_B_Ptges2
  gRNA
tagtgccctcaagacctacc

SEQ ID NO: 111014 - DNA, 20 bp, Artificial Sequence
  MKO10111014_B_Ptges2
  gRNA
agaagggacatgtcttgtac

SEQ ID NO: 111015 - DNA, 20 bp, Artificial Sequence
  MKO10111015_B_Ptges2
  gRNA
ccagtacttgttgcaaaact

SEQ ID NO: 111016 - DNA, 20 bp, Artificial Sequence
  MKO10111016_B_Ptges3l
  gRNA
cgagattgaattctatgcca

SEQ ID NO: 111017 - DNA, 20 bp, Artificial Sequence
  MKO10111017_B_Ptges3l
  gRNA
tcaggtggaacattatgcag

SEQ ID NO: 111018 - DNA, 20 bp, Artificial Sequence
  MKO10111018_B_Ptges3l
  gRNA
gactcccaggataagcgttc

SEQ ID NO: 111019 - DNA, 20 bp, Artificial Sequence
  MKO10111019_B_Ptges3
  gRNA
aaaaacttacctcagagaaa

SEQ ID NO: 111020 - DNA, 20 bp, Artificial Sequence
  MKO10111020_B_Ptges3
  gRNA
gccctttcctttgttaacct

SEQ ID NO: 111021 - DNA, 20 bp, Artificial Sequence
  MKO10111021_B_Ptges3
  gRNA
aatccggccagtcatggcct

SEQ ID NO: 111022 - DNA, 20 bp, Artificial Sequence
  MKO10111022_B_Ptges
  gRNA
tacgcggtggctgtcatcac

SEQ ID NO: 111023 - DNA, 20 bp, Artificial Sequence
  MKO10111023_B_Ptges
  gRNA
tccacgtttcagcgcatcct

SEQ ID NO: 111024 - DNA, 20 bp, Artificial Sequence
  MKO10111024_B_Ptges
  gRNA
cagatgtggagcgctgcctc

SEQ ID NO: 111025 - DNA, 20 bp, Artificial Sequence
  MKO10111025_B_Ptgfrn
  gRNA
gtgtccgacttaccgtgtcg

SEQ ID NO: 111026 - DNA, 20 bp, Artificial Sequence
  MKO10111026_B_Ptgfrn
  gRNA
gacgtacgcctggacacagt

SEQ ID NO: 111027 - DNA, 20 bp, Artificial Sequence
  MKO10111027_B_Ptgfrn
  gRNA
cactgtccagggcaactacg

SEQ ID NO: 111028 - DNA, 20 bp, Artificial Sequence
  MKO10111028_B_Ptgfr
  gRNA
aaacttgccagtcgttgctg

SEQ ID NO: 111029 - DNA, 20 bp, Artificial Sequence
  MKO10111029_B_Ptgfr
  gRNA
cttctcgtgcaatgccgtca

SEQ ID NO: 111030 - DNA, 20 bp, Artificial Sequence
  MKO10111030_B_Ptgfr
  gRNA
acacagagcacatcgaagac

SEQ ID NO: 111031 - DNA, 20 bp, Artificial Sequence
  MKO10111031_B_Ptgir
  gRNA
ggggcgcctgcaaatcccca

SEQ ID NO: 111032 - DNA, 20 bp, Artificial Sequence
  MKO10111032_B_Ptgir
  gRNA
caccagcacgctgatgttcg

SEQ ID NO: 111033 - DNA, 20 bp, Artificial Sequence
  MKO10111033_B_Ptgir
  gRNA
cccctacctgtacgcccagc

SEQ ID NO: 111034 - DNA, 20 bp, Artificial Sequence
  MKO10111034_B_Ptgis
  gRNA
catgtataccaaccttcgca

SEQ ID NO: 111035 - DNA, 20 bp, Artificial Sequence
  MKO10111035_B_Ptgis
  gRNA
gagacctggtgagcctccgt

SEQ ID NO: 111036 - DNA, 20 bp, Artificial Sequence
  MKO10111036_B_Ptgis
  gRNA
gtgggagctgcgtacacggc

SEQ ID NO: 111037 - DNA, 20 bp, Artificial Sequence
  MKO10111037_B_Ptgr1
  gRNA
tgctgctgcgctgaccatca

SEQ ID NO: 111038 - DNA, 20 bp, Artificial Sequence
  MKO10111038_B_Ptgr1
  gRNA
caggatgatgggcgagcaag

SEQ ID NO: 111039 - DNA, 20 bp, Artificial Sequence
  MKO10111039_B_Ptgr1
  gRNA
tctctgtggatccttacatg

SEQ ID NO: 111040 - DNA, 20 bp, Artificial Sequence
  MKO10111040_B_Ptgr2
  gRNA
atccagtcgcagagaacttc

SEQ ID NO: 111041 - DNA, 20 bp, Artificial Sequence
  MKO10111041_B_Ptgr2
  gRNA
ccagcgctgtaagatgaacg

SEQ ID NO: 111042 - DNA, 20 bp, Artificial Sequence
  MKO10111042_B_Ptgr2
  gRNA
ttaccggatgctctcaatga

SEQ ID NO: 111043 - DNA, 20 bp, Artificial Sequence
  MKO10111043_B_Ptgs1
  gRNA
ccgcagagaattccgaagcc

SEQ ID NO: 111044 - DNA, 20 bp, Artificial Sequence
  MKO10111044_B_Ptgs1
  gRNA
gtagtcatgcgctgagttgt

SEQ ID NO: 111045 - DNA, 20 bp, Artificial Sequence
  MKO10111045_B_Ptgs1
  gRNA
ccgtgcgagtacaatcacac

SEQ ID NO: 111046 - DNA, 20 bp, Artificial Sequence
  MKO10111046_B_Ptgs2
  gRNA
atttcatgattaaacttcgc

SEQ ID NO: 111047 - DNA, 20 bp, Artificial Sequence
  MKO10111047_B_Ptgs2
  gRNA
cctacttacaatgtgcacta

SEQ ID NO: 111048 - DNA, 20 bp, Artificial Sequence
  MKO10111048_B_Ptgs2
  gRNA
tccaatccatgtcaaaaccg

SEQ ID NO: 111049 - DNA, 20 bp, Artificial Sequence
  MKO10111049_B_Pth1r
  gRNA
cccaccggcagcaggcgccg

SEQ ID NO: 111050 - DNA, 20 bp, Artificial Sequence
  MKO10111050_B_Pth1r
  gRNA
tttcctgctgcaccgtgccc

SEQ ID NO: 111051 - DNA, 20 bp, Artificial Sequence
  MKO10111051_B_Pth1r
  gRNA
tggacgccagcatctacgtc

SEQ ID NO: 111052 - DNA, 20 bp, Artificial Sequence
  MKO10111052_B_Pth2r
  gRNA
gtttacgacttcaatcataa

SEQ ID NO: 111053 - DNA, 20 bp, Artificial Sequence
  MKO10111053_B_Pth2r
  gRNA
ttctcattattggctacttc

SEQ ID NO: 111054 - DNA, 20 bp, Artificial Sequence
  MKO10111054_B_Pth2r
  gRNA
gcagattgttcttgttatga

SEQ ID NO: 111055 - DNA, 20 bp, Artificial Sequence
  MKO10111055_B_Pth2
  gRNA
ggtgttgccctgcccctcgc

SEQ ID NO: 111056 - DNA, 20 bp, Artificial Sequence
  MKO10111056_B_Pth2
  gRNA
ggggctacccaagcccgccc

SEQ ID NO: 111057 - DNA, 20 bp, Artificial Sequence
  MKO10111057_B_Pth2
  gRNA
ccgccctggagcgccgccgc

SEQ ID NO: 111058 - DNA, 20 bp, Artificial Sequence
  MKO10111058_B_Pthlh
  gRNA
atcgtctgacccaaaccgca

SEQ ID NO: 111059 - DNA, 20 bp, Artificial Sequence
  MKO10111059_B_Pthlh
  gRNA
agctactccgtgccctcccg

SEQ ID NO: 111060 - DNA, 20 bp, Artificial Sequence
  MKO10111060_B_Pthlh
  gRNA
tttgtacgtctccaccttgt

SEQ ID NO: 111061 - DNA, 20 bp, Artificial Sequence
  MKO10111061_B_Pth
  gRNA
gtccaaatggctgccagaga

SEQ ID NO: 111062 - DNA, 20 bp, Artificial Sequence
  MKO10111062_B_Pth
  gRNA
taaagtgatgatcatcatgc

SEQ ID NO: 111063 - DNA, 20 bp, Artificial Sequence
  MKO10111063_B_Pth
  gRNA
gatgatcatcactttagcca

SEQ ID NO: 111064 - DNA, 20 bp, Artificial Sequence
  MKO10111064_B_Ptk2b
  gRNA
ccttcaaatccgctacttgc

SEQ ID NO: 111065 - DNA, 20 bp, Artificial Sequence
  MKO10111065_B_Ptk2b
  gRNA
ctgcacccacagatgaccgt

SEQ ID NO: 111066 - DNA, 20 bp, Artificial Sequence
  MKO10111066_B_Ptk2b
  gRNA
agcgttgcatgtagtcattc

SEQ ID NO: 111067 - DNA, 20 bp, Artificial Sequence
  MKO10111067_B_Ptk2
  gRNA
actgaggcgaaatccatagc

SEQ ID NO: 111068 - DNA, 20 bp, Artificial Sequence
  MKO10111068_B_Ptk2
  gRNA
agaattcgttacttgccaaa

SEQ ID NO: 111069 - DNA, 20 bp, Artificial Sequence
  MKO10111069_B_Ptk2
  gRNA
attgaatttcttctatcaac

SEQ ID NO: 111070 - DNA, 20 bp, Artificial Sequence
  MKO10111070_B_Ptk6
  gRNA
aacctgctgcagctactgcg

SEQ ID NO: 111071 - DNA, 20 bp, Artificial Sequence
  MKO10111071_B_Ptk6
  gRNA
taccacgcagtagctgcagc

SEQ ID NO: 111072 - DNA, 20 bp, Artificial Sequence
  MKO10111072_B_Ptk6
  gRNA
gggaggtctttgaagcgctc

SEQ ID NO: 111073 - DNA, 20 bp, Artificial Sequence
  MKO10111073_B_Ptk7
  gRNA
cgttatcccgagccacacac

SEQ ID NO: 111074 - DNA, 20 bp, Artificial Sequence
  MKO10111074_B_Ptk7
  gRNA
ctcccatcactaaccgaagc

SEQ ID NO: 111075 - DNA, 20 bp, Artificial Sequence
  MKO10111075_B_Ptk7
  gRNA
acactgcgatgtcacattga

SEQ ID NO: 111076 - DNA, 20 bp, Artificial Sequence
  MKO10111076_B_Ptma
  gRNA
ttaaagcaaaatgaggaaaa

SEQ ID NO: 111077 - DNA, 20 bp, Artificial Sequence
  MKO10111077_B_Ptma
  gRNA
aaaggacttgaaggagaaga

SEQ ID NO: 111078 - DNA, 20 bp, Artificial Sequence
  MKO10111078_B_Ptma
  gRNA
ggagcaggaggctgacaatg

SEQ ID NO: 111079 - DNA, 20 bp, Artificial Sequence
  MKO10111079_B_Ptms
  gRNA
aggaggatgaaggccccgtg

SEQ ID NO: 111080 - DNA, 20 bp, Artificial Sequence
  MKO10111080_B_Ptms
  gRNA
aggtggaggagaaggccggc

SEQ ID NO: 111081 - DNA, 20 bp, Artificial Sequence
  MKO10111081_B_Ptms
  gRNA
tccccataggaggaggagaa

SEQ ID NO: 111082 - DNA, 20 bp, Artificial Sequence
  MKO10111082_B_Ptn
  gRNA
gccagttctggtcttcaagg

SEQ ID NO: 111083 - DNA, 20 bp, Artificial Sequence
  MKO10111083_B_Ptn
  gRNA
ccaagatgaaaatcaatgcc

SEQ ID NO: 111084 - DNA, 20 bp, Artificial Sequence
  MKO10111084_B_Ptn
  gRNA
tacgttgctgctgatattgc

SEQ ID NO: 111085 - DNA, 20 bp, Artificial Sequence
  MKO10111085_B_Ptov1
  gRNA
cttggctgtggagtccgaga

SEQ ID NO: 111086 - DNA, 20 bp, Artificial Sequence
  MKO10111086_B_Ptov1
  gRNA
cctgttccgaaactctcagc

SEQ ID NO: 111087 - DNA, 20 bp, Artificial Sequence
  MKO10111087_B_Ptov1
  gRNA
tgagctgcatgatcaacttc

SEQ ID NO: 111088 - DNA, 20 bp, Artificial Sequence
  MKO10111088_B_Ptp4a1
  gRNA
tgccaaggcctgcgacacaa

SEQ ID NO: 111089 - DNA, 20 bp, Artificial Sequence
  MKO10111089_B_Ptp4a1
  gRNA
ccaaccagattgtcgatgac

SEQ ID NO: 111090 - DNA, 20 bp, Artificial Sequence
  MKO10111090_B_Ptp4a1
  gRNA
gttgccctagcattaattga

SEQ ID NO: 111091 - DNA, 20 bp, Artificial Sequence
  MKO10111091_B_Ptp4a2
  gRNA
accaaatttcgtgaagagcc

SEQ ID NO: 111092 - DNA, 20 bp, Artificial Sequence
  MKO10111092_B_Ptp4a2
  gRNA
caggattggccgtttgatga

SEQ ID NO: 111093 - DNA, 20 bp, Artificial Sequence
  MKO10111093_B_Ptp4a2
  gRNA
gcgcttgcattgattgaatg

SEQ ID NO: 111094 - DNA, 20 bp, Artificial Sequence
  MKO10111094_B_Ptp4a3
  gRNA
agggggcgctccatcatcaa

SEQ ID NO: 111095 - DNA, 20 bp, Artificial Sequence
  MKO10111095_B_Ptp4a3
  gRNA
gagctacatgacgcagcatc

SEQ ID NO: 111096 - DNA, 20 bp, Artificial Sequence
  MKO10111096_B_Ptp4a3
  gRNA
cttgtctgcaggaagcgccg

SEQ ID NO: 111097 - DNA, 20 bp, Artificial Sequence
  MKO10111097_B_Ptpdc1
  gRNA
atggcatgttccatggcgtg

SEQ ID NO: 111098 - DNA, 20 bp, Artificial Sequence
  MKO10111098_B_Ptpdc1
  gRNA
tcgtccgtcctccgagctgc

SEQ ID NO: 111099 - DNA, 20 bp, Artificial Sequence
  MKO10111099_B_Ptpdc1
  gRNA
cacctttaccatgtccaaga

SEQ ID NO: 111100 - DNA, 20 bp, Artificial Sequence
  MKO10111100_B_Ptplad1
  gRNA
caatgtctatgaatttcacc

SEQ ID NO: 111101 - DNA, 20 bp, Artificial Sequence
  MKO10111101_B_Ptplad1
  gRNA
ttgtctgtgatgctgatagc

SEQ ID NO: 111102 - DNA, 20 bp, Artificial Sequence
  MKO10111102_B_Ptplad1
  gRNA
ttgtttgcagctcagggaca

SEQ ID NO: 111103 - DNA, 20 bp, Artificial Sequence
  MKO10111103_B_Ptplad2
  gRNA
tatttgccagtatccatgag

SEQ ID NO: 111104 - DNA, 20 bp, Artificial Sequence
  MKO10111104_B_Ptplad2
  gRNA
ccatatccagtagattccaa

SEQ ID NO: 111105 - DNA, 20 bp, Artificial Sequence
  MKO10111105_B_Ptplad2
  gRNA
tgtttgactgagccatgtca

SEQ ID NO: 111106 - DNA, 20 bp, Artificial Sequence
  MKO10111106_B_Ptpla
  gRNA
ggtcaccatggcgtccagtg

SEQ ID NO: 111107 - DNA, 20 bp, Artificial Sequence
  MKO10111107_B_Ptpla
  gRNA
gttggttcttgctattgcta

SEQ ID NO: 111108 - DNA, 20 bp, Artificial Sequence
  MKO10111108_B_Ptpla
  gRNA
cctcaagcaaagcaaatgtt

SEQ ID NO: 111109 - DNA, 20 bp, Artificial Sequence
  MKO10111109_B_Ptplb
  gRNA
cctccagtaaggctcctgtc

SEQ ID NO: 111110 - DNA, 20 bp, Artificial Sequence
  MKO10111110_B_Ptplb
  gRNA
tatgtgtcactgcccatatt

SEQ ID NO: 111111 - DNA, 20 bp, Artificial Sequence
  MKO10111111_B_Ptplb
  gRNA
tgttgtcctgacttctttcc

SEQ ID NO: 111112 - DNA, 20 bp, Artificial Sequence
  MKO10111112_B_Ptpmt1
  gRNA
gtactggacgagaacgtgcg

SEQ ID NO: 111113 - DNA, 20 bp, Artificial Sequence
  MKO10111113_B_Ptpmt1
  gRNA
attcctgtgcaacacctcga

SEQ ID NO: 111114 - DNA, 20 bp, Artificial Sequence
  MKO10111114_B_Ptpmt1
  gRNA
ctcagcacagtcgacatgac

SEQ ID NO: 111115 - DNA, 20 bp, Artificial Sequence
  MKO10111115_B_Ptpn11
  gRNA
gactactatgacctctatgg

SEQ ID NO: 111116 - DNA, 20 bp, Artificial Sequence
  MKO10111116_B_Ptpn11
  gRNA
ctgaaccagttcagccaaag

SEQ ID NO: 111117 - DNA, 20 bp, Artificial Sequence
  MKO10111117_B_Ptpn11
  gRNA
tggtttcaccccaacatcac

SEQ ID NO: 111118 - DNA, 20 bp, Artificial Sequence
  MKO10111118_B_Ptpn12
  gRNA
cgaatacagtcatagacttc

SEQ ID NO: 111119 - DNA, 20 bp, Artificial Sequence
  MKO10111119_B_Ptpn12
  gRNA
aagatttatcccacagccac

SEQ ID NO: 111120 - DNA, 20 bp, Artificial Sequence
  MKO10111120_B_Ptpn12
  gRNA
cattgatataatctgaatct

SEQ ID NO: 111121 - DNA, 20 bp, Artificial Sequence
  MKO10111121_B_Ptpn13
  gRNA
cgaatggcctggctccggtc

SEQ ID NO: 111122 - DNA, 20 bp, Artificial Sequence
  MKO10111122_B_Ptpn13
  gRNA
ccatcttaatagcatcctgc

SEQ ID NO: 111123 - DNA, 20 bp, Artificial Sequence
  MKO10111123_B_Ptpn13
  gRNA
aagatggtctcccagcttga

SEQ ID NO: 111124 - DNA, 20 bp, Artificial Sequence
  MKO10111124_B_Ptpn14
  gRNA
gtcaaaaaagacgtgcttga

SEQ ID NO: 111125 - DNA, 20 bp, Artificial Sequence
  MKO10111125_B_Ptpn14
  gRNA
gctccctggaacaagtgatc

SEQ ID NO: 111126 - DNA, 20 bp, Artificial Sequence
  MKO10111126_B_Ptpn14
  gRNA
agagtatgtgctctttccta

SEQ ID NO: 111127 - DNA, 20 bp, Artificial Sequence
  MKO10111127_B_Ptpn18
  gRNA
tagcctgacccggatgaagt

SEQ ID NO: 111128 - DNA, 20 bp, Artificial Sequence
  MKO10111128_B_Ptpn18
  gRNA
acccctgcctcacacactgt

SEQ ID NO: 111129 - DNA, 20 bp, Artificial Sequence
  MKO10111129_B_Ptpn18
  gRNA
acatcaatgccaacttcatc

SEQ ID NO: 111130 - DNA, 20 bp, Artificial Sequence
  MKO10111130_B_Ptpn1
  gRNA
ggccctttaccaaacacatg

SEQ ID NO: 111131 - DNA, 20 bp, Artificial Sequence
  MKO10111131_B_Ptpn1
  gRNA
tgatatagtcattatcttcc

SEQ ID NO: 111132 - DNA, 20 bp, Artificial Sequence
  MKO10111132_B_Ptpn1
  gRNA
gaggagctatattctcaccc

SEQ ID NO: 111133 - DNA, 20 bp, Artificial Sequence
  MKO10111133_B_Ptpn20
  gRNA
catacttatctgagaatgac

SEQ ID NO: 111134 - DNA, 20 bp, Artificial Sequence
  MKO10111134_B_Ptpn20
  gRNA
taatattcaacagttctgca

SEQ ID NO: 111135 - DNA, 20 bp, Artificial Sequence
  MKO10111135_B_Ptpn20
  gRNA
gcagaactgttgaatattaa

SEQ ID NO: 111136 - DNA, 20 bp, Artificial Sequence
  MKO10111136_B_Ptpn21
  gRNA
ccttactgcaccagaaatac

SEQ ID NO: 111137 - DNA, 20 bp, Artificial Sequence
  MKO10111137_B_Ptpn21
  gRNA
attagaacacgccattcagc

SEQ ID NO: 111138 - DNA, 20 bp, Artificial Sequence
  MKO10111138_B_Ptpn21
  gRNA
gaaatttgccttgctccccg

SEQ ID NO: 111139 - DNA, 20 bp, Artificial Sequence
  MKO10111139_B_Ptpn22
  gRNA
gagttgtagataaaggaccc

SEQ ID NO: 111140 - DNA, 20 bp, Artificial Sequence
  MKO10111140_B_Ptpn22
  gRNA
tatcaatgccagctttatta

SEQ ID NO: 111141 - DNA, 20 bp, Artificial Sequence
  MKO10111141_B_Ptpn22
  gRNA
ctgcctctaggtcattgtca

SEQ ID NO: 111142 - DNA, 20 bp, Artificial Sequence
  MKO10111142_B_Ptpn23
  gRNA
tgaagacatcaagtacgagc

SEQ ID NO: 111143 - DNA, 20 bp, Artificial Sequence
  MKO10111143_B_Ptpn23
  gRNA
cttctttagttcctcgttgt

SEQ ID NO: 111144 - DNA, 20 bp, Artificial Sequence
  MKO10111144_B_Ptpn23
  gRNA
aggtgcactgcactccatgc

SEQ ID NO: 111145 - DNA, 20 bp, Artificial Sequence
  MKO10111145_B_Ptpn2
  gRNA
ggaaacttggccactctatg

SEQ ID NO: 111146 - DNA, 20 bp, Artificial Sequence
  MKO10111146_B_Ptpn2
  gRNA
ctcttctatgtcaactaagc

SEQ ID NO: 111147 - DNA, 20 bp, Artificial Sequence
  MKO10111147_B_Ptpn2
  gRNA
cgaacacatgctgccatttc

SEQ ID NO: 111148 - DNA, 20 bp, Artificial Sequence
  MKO10111148_B_Ptpn3
  gRNA
cactccacagagatggcttg

SEQ ID NO: 111149 - DNA, 20 bp, Artificial Sequence
  MKO10111149_B_Ptpn3
  gRNA
tgatcccaacacactgcagc

SEQ ID NO: 111150 - DNA, 20 bp, Artificial Sequence
  MKO10111150_B_Ptpn3
  gRNA
cccctcaggaagcagctgaa

SEQ ID NO: 111151 - DNA, 20 bp, Artificial Sequence
  MKO10111151_B_Ptpn4
  gRNA
tggatccaaacaaaccaata

SEQ ID NO: 111152 - DNA, 20 bp, Artificial Sequence
  MKO10111152_B_Ptpn4
  gRNA
ctctttagctgcttccttat

SEQ ID NO: 111153 - DNA, 20 bp, Artificial Sequence
  MKO10111153_B_Ptpn4
  gRNA
agttacaagaagagtataca

SEQ ID NO: 111154 - DNA, 20 bp, Artificial Sequence
  MKO10111154_B_Ptpn5
  gRNA
gagtggctcccagcgccttg

SEQ ID NO: 111155 - DNA, 20 bp, Artificial Sequence
  MKO10111155_B_Ptpn5
  gRNA
cgggcaccgcgtccaggtcc

SEQ ID NO: 111156 - DNA, 20 bp, Artificial Sequence
  MKO10111156_B_Ptpn5
  gRNA
ccagggtggtgacgatgacc

SEQ ID NO: 111157 - DNA, 20 bp, Artificial Sequence
  MKO10111157_B_Ptpn6
  gRNA
tcggcccagccgcaagaacc

SEQ ID NO: 111158 - DNA, 20 bp, Artificial Sequence
  MKO10111158_B_Ptpn6
  gRNA
cgggtgcctttgtctacctg

SEQ ID NO: 111159 - DNA, 20 bp, Artificial Sequence
  MKO10111159_B_Ptpn6
  gRNA
ctggcccaggttccccgctc

SEQ ID NO: 111160 - DNA, 20 bp, Artificial Sequence
  MKO10111160_B_Ptpn7
  gRNA
tgtagcggtctttggaggcg

SEQ ID NO: 111161 - DNA, 20 bp, Artificial Sequence
  MKO10111161_B_Ptpn7
  gRNA
tgatgtagtcactgtcctcc

SEQ ID NO: 111162 - DNA, 20 bp, Artificial Sequence
  MKO10111162_B_Ptpn7
  gRNA
gtgctccttacttggcaaga

SEQ ID NO: 111163 - DNA, 20 bp, Artificial Sequence
  MKO10111163_B_Ptpn9
  gRNA
ccacaagtctgcccagcacg

SEQ ID NO: 111164 - DNA, 20 bp, Artificial Sequence
  MKO10111164_B_Ptpn9
  gRNA
gaacggagaggctcctcatg

SEQ ID NO: 111165 - DNA, 20 bp, Artificial Sequence
  MKO10111165_B_Ptpn9
  gRNA
gaaagtcctaaacctgctga

SEQ ID NO: 111166 - DNA, 20 bp, Artificial Sequence
  MKO10111166_B_Ptpra
  gRNA
aaacacgattactagcagag

SEQ ID NO: 111167 - DNA, 20 bp, Artificial Sequence
  MKO10111167_B_Ptpra
  gRNA
aactctttccgcctgtcaaa

SEQ ID NO: 111168 - DNA, 20 bp, Artificial Sequence
  MKO10111168_B_Ptpra
  gRNA
gtattagaccactgccaaac

SEQ ID NO: 111169 - DNA, 20 bp, Artificial Sequence
  MKO10111169_B_Ptprb
  gRNA
gtaaagttgtctatccgaat

SEQ ID NO: 111170 - DNA, 20 bp, Artificial Sequence
  MKO10111170_B_Ptprb
  gRNA
catcgttcaagacacaaacg

SEQ ID NO: 111171 - DNA, 20 bp, Artificial Sequence
  MKO10111171_B_Ptprb
  gRNA
tcacttggtaaagccgtcca

SEQ ID NO: 111172 - DNA, 20 bp, Artificial Sequence
  MKO10111172_B_Ptprcap
  gRNA
actcctatagtgcagtgacc

SEQ ID NO: 111173 - DNA, 20 bp, Artificial Sequence
  MKO10111173_B_Ptprcap
  gRNA
ccccgaggaagctgccgcca

SEQ ID NO: 111174 - DNA, 20 bp, Artificial Sequence
  MKO10111174_B_Ptprcap
  gRNA
gtactaccacccagctcgcc

SEQ ID NO: 111175 - DNA, 20 bp, Artificial Sequence
  MKO10111175_B_Ptprc
  gRNA
cacagtaatgttcccaaaca

SEQ ID NO: 111176 - DNA, 20 bp, Artificial Sequence
  MKO10111176_B_Ptprc
  gRNA
accacaacgaagcaaacatg

SEQ ID NO: 111177 - DNA, 20 bp, Artificial Sequence
  MKO10111177_B_Ptprc
  gRNA
cagatatgaccatgggtttg

SEQ ID NO: 111178 - DNA, 20 bp, Artificial Sequence
  MKO10111178_B_Ptprd
  gRNA
tcaatcgtagggaaccctct

SEQ ID NO: 111179 - DNA, 20 bp, Artificial Sequence
  MKO10111179_B_Ptprd
  gRNA
tcataaatggcctcatcccg

SEQ ID NO: 111180 - DNA, 20 bp, Artificial Sequence
  MKO10111180_B_Ptprd
  gRNA
gagacccctgtctgatcaac

SEQ ID NO: 111181 - DNA, 20 bp, Artificial Sequence
  MKO10111181_B_Ptpre
  gRNA
tgggatgcaccagggtccgg

SEQ ID NO: 111182 - DNA, 20 bp, Artificial Sequence
  MKO10111182_B_Ptpre
  gRNA
cccacaggccctccggaccc

SEQ ID NO: 111183 - DNA, 20 bp, Artificial Sequence
  MKO10111183_B_Ptpre
  gRNA
aacgacaagaaaatgcctaa

SEQ ID NO: 111184 - DNA, 20 bp, Artificial Sequence
  MKO10111184_B_Ptprf
  gRNA
tcgatagtcgggaacccaga

SEQ ID NO: 111185 - DNA, 20 bp, Artificial Sequence
  MKO10111185_B_Ptprf
  gRNA
tcgtctcgctgcactcgtaa

SEQ ID NO: 111186 - DNA, 20 bp, Artificial Sequence
  MKO10111186_B_Ptprf
  gRNA
cccgccaacctgtatgtgcg

SEQ ID NO: 111187 - DNA, 20 bp, Artificial Sequence
  MKO10111187_B_Ptprg
  gRNA
tcaccagaatacgcccagta

SEQ ID NO: 111188 - DNA, 20 bp, Artificial Sequence
  MKO10111188_B_Ptprg
  gRNA
tgaaagctgtcaaagtcgtc

SEQ ID NO: 111189 - DNA, 20 bp, Artificial Sequence
  MKO10111189_B_Ptprg
  gRNA
caaaataatcgtctttcagc

SEQ ID NO: 111190 - DNA, 20 bp, Artificial Sequence
  MKO10111190_B_Ptprh
  gRNA
tctactgcactgggtccagt

SEQ ID NO: 111191 - DNA, 20 bp, Artificial Sequence
  MKO10111191_B_Ptprh
  gRNA
tggacccagtgcagtagaca

SEQ ID NO: 111192 - DNA, 20 bp, Artificial Sequence
  MKO10111192_B_Ptprh
  gRNA
caaacccagtgagaaacctg

SEQ ID NO: 111193 - DNA, 20 bp, Artificial Sequence
  MKO10111193_B_Ptprj
  gRNA
caactagtgtgttattaaca

SEQ ID NO: 111194 - DNA, 20 bp, Artificial Sequence
  MKO10111194_B_Ptprj
  gRNA
tgtactgagtatcaggcttt

SEQ ID NO: 111195 - DNA, 20 bp, Artificial Sequence
  MKO10111195_B_Ptprj
  gRNA
agaatgtatacgaagtgcct

SEQ ID NO: 111196 - DNA, 20 bp, Artificial Sequence
  MKO10111196_B_Ptprk
  gRNA
atttatacgatgactttgag

SEQ ID NO: 111197 - DNA, 20 bp, Artificial Sequence
  MKO10111197_B_Ptprk
  gRNA
caaagtcatcgtataaatcc

SEQ ID NO: 111198 - DNA, 20 bp, Artificial Sequence
  MKO10111198_B_Ptprk
  gRNA
caagtcctgagttatccttg

SEQ ID NO: 111199 - DNA, 20 bp, Artificial Sequence
  MKO10111199_B_Ptprm
  gRNA
ggtcagaggtcggtttggtc

SEQ ID NO: 111200 - DNA, 20 bp, Artificial Sequence
  MKO10111200_B_Ptprm
  gRNA
cctccacgttctgaatccgc

SEQ ID NO: 111201 - DNA, 20 bp, Artificial Sequence
  MKO10111201_B_Ptprm
  gRNA
ccttgctatcgatgaagtta

SEQ ID NO: 111202 - DNA, 20 bp, Artificial Sequence
  MKO10111202_B_Ptprn2
  gRNA
taccgatatgaggtaccacc

SEQ ID NO: 111203 - DNA, 20 bp, Artificial Sequence
  MKO10111203_B_Ptprn2
  gRNA
tccgtactcaccgttcacac

SEQ ID NO: 111204 - DNA, 20 bp, Artificial Sequence
  MKO10111204_B_Ptprn2
  gRNA
cgcttccccatgccataggt

SEQ ID NO: 111205 - DNA, 20 bp, Artificial Sequence
  MKO10111205_B_Ptprn
  gRNA
ctaggtctggtttggtgccc

SEQ ID NO: 111206 - DNA, 20 bp, Artificial Sequence
  MKO10111206_B_Ptprn
  gRNA
caccttgggacatgagttgc

SEQ ID NO: 111207 - DNA, 20 bp, Artificial Sequence
  MKO10111207_B_Ptprn
  gRNA
ccagatgcgaacaaagtctg

SEQ ID NO: 111208 - DNA, 20 bp, Artificial Sequence
  MKO10111208_B_Ptpro
  gRNA
atcatactcaccaactgtag

SEQ ID NO: 111209 - DNA, 20 bp, Artificial Sequence
  MKO10111209_B_Ptpro
  gRNA
gcttctttcggagaatgaca

SEQ ID NO: 111210 - DNA, 20 bp, Artificial Sequence
  MKO10111210_B_Ptpro
  gRNA
ttaactttgcatccttagaa

SEQ ID NO: 111211 - DNA, 20 bp, Artificial Sequence
  MKO10111211_B_Ptprq
  gRNA
tatttacctcggcaaccaaa

SEQ ID NO: 111212 - DNA, 20 bp, Artificial Sequence
  MKO10111212_B_Ptprq
  gRNA
ctcacccgtgagtagaacac

SEQ ID NO: 111213 - DNA, 20 bp, Artificial Sequence
  MKO10111213_B_Ptprq
  gRNA
gttgctgccgaaaacagcgc

SEQ ID NO: 111214 - DNA, 20 bp, Artificial Sequence
  MKO10111214_B_Ptprr
  gRNA
ttccaatgtatctcttacgc

SEQ ID NO: 111215 - DNA, 20 bp, Artificial Sequence
  MKO10111215_B_Ptprr
  gRNA
gaaattgatattccacgtca

SEQ ID NO: 111216 - DNA, 20 bp, Artificial Sequence
  MKO10111216_B_Ptprr
  gRNA
ttgggatccacaaaattcat

SEQ ID NO: 111217 - DNA, 20 bp, Artificial Sequence
  MKO10111217_B_Ptprs
  gRNA
cggatcaagcagcttcgatc

SEQ ID NO: 111218 - DNA, 20 bp, Artificial Sequence
  MKO10111218_B_Ptprs
  gRNA
tcgtacacgttctcatcccg

SEQ ID NO: 111219 - DNA, 20 bp, Artificial Sequence
  MKO10111219_B_Ptprs
  gRNA
ggggctcttcctcgtactgc

SEQ ID NO: 111220 - DNA, 20 bp, Artificial Sequence
  MKO10111220_B_Ptprt
  gRNA
ccacattcacctcaacgttt

SEQ ID NO: 111221 - DNA, 20 bp, Artificial Sequence
  MKO10111221_B_Ptprt
  gRNA
tcgtccacagcgatgtaacc

SEQ ID NO: 111222 - DNA, 20 bp, Artificial Sequence
  MKO10111222_B_Ptprt
  gRNA
tcatcctggttacatcgctg

SEQ ID NO: 111223 - DNA, 20 bp, Artificial Sequence
  MKO10111223_B_Ptpru
  gRNA
tcacgcgcacgtagaccccc

SEQ ID NO: 111224 - DNA, 20 bp, Artificial Sequence
  MKO10111224_B_Ptpru
  gRNA
cgtgccctgcgagttcagcc

SEQ ID NO: 111225 - DNA, 20 bp, Artificial Sequence
  MKO10111225_B_Ptpru
  gRNA
ctaagcctatgtagcccttg

SEQ ID NO: 111226 - DNA, 20 bp, Artificial Sequence
  MKO10111226_B_Ptprv
  gRNA
ttcccttcccacggctgagt

SEQ ID NO: 111227 - DNA, 20 bp, Artificial Sequence
  MKO10111227_B_Ptprv
  gRNA
attctgaagtaagatgctcc

SEQ ID NO: 111228 - DNA, 20 bp, Artificial Sequence
  MKO10111228_B_Ptprv
  gRNA
ctcttgtagcagagtctgtg

SEQ ID NO: 111229 - DNA, 20 bp, Artificial Sequence
  MKO10111229_B_Ptprz1
  gRNA
actaatgactactatctcag

SEQ ID NO: 111230 - DNA, 20 bp, Artificial Sequence
  MKO10111230_B_Ptprz1
  gRNA
tttaactgcttcctcaaaac

SEQ ID NO: 111231 - DNA, 20 bp, Artificial Sequence
  MKO10111231_B_Ptprz1
  gRNA
actttcagaaaaggtcttca

SEQ ID NO: 111232 - DNA, 20 bp, Artificial Sequence
  MKO10111232_B_Ptrf
  gRNA
aatacggccgctcaacgata

SEQ ID NO: 111233 - DNA, 20 bp, Artificial Sequence
  MKO10111233_B_Ptrf
  gRNA
gatcgagctgtcgtccgacg

SEQ ID NO: 111234 - DNA, 20 bp, Artificial Sequence
  MKO10111234_B_Ptrf
  gRNA
gccgagcgcatcaagcgcag

SEQ ID NO: 111235 - DNA, 20 bp, Artificial Sequence
  MKO10111235_B_Ptrh1
  gRNA
ccacatccgtgctcgaagcc

SEQ ID NO: 111236 - DNA, 20 bp, Artificial Sequence
  MKO10111236_B_Ptrh1
  gRNA
cctggcttcgagcacggatg

SEQ ID NO: 111237 - DNA, 20 bp, Artificial Sequence
  MKO10111237_B_Ptrh1
  gRNA
tgatgaactggacaagccgt

SEQ ID NO: 111238 - DNA, 20 bp, Artificial Sequence
  MKO10111238_B_Ptrh2
  gRNA
gccctcaagtgctcaaagag

SEQ ID NO: 111239 - DNA, 20 bp, Artificial Sequence
  MKO10111239_B_Ptrh2
  gRNA
actcacccatgcaaaaacct

SEQ ID NO: 111240 - DNA, 20 bp, Artificial Sequence
  MKO10111240_B_Ptrh2
  gRNA
acttcatcaattagttctac

SEQ ID NO: 111241 - DNA, 20 bp, Artificial Sequence
  MKO10111241_B_Ptrhd1
  gRNA
tggcctcagggctatgcatg

SEQ ID NO: 111242 - DNA, 20 bp, Artificial Sequence
  MKO10111242_B_Ptrhd1
  gRNA
catgcgcaaggtggttctcg

SEQ ID NO: 111243 - DNA, 20 bp, Artificial Sequence
  MKO10111243_B_Ptrhd1
  gRNA
gataagctgccgtgtgcgga

SEQ ID NO: 111244 - DNA, 20 bp, Artificial Sequence
  MKO10111244_B_Pts
  gRNA
gaccgacctcaaagaataca

SEQ ID NO: 111245 - DNA, 20 bp, Artificial Sequence
  MKO10111245_B_Pts
  gRNA
gcctcttgatcacaagaacc

SEQ ID NO: 111246 - DNA, 20 bp, Artificial Sequence
  MKO10111246_B_Pts
  gRNA
ccttagattgatcctgttac

SEQ ID NO: 111247 - DNA, 20 bp, Artificial Sequence
  MKO10111247_B_Pttg1ip
  gRNA
aacttacggagacattcctg

SEQ ID NO: 111248 - DNA, 20 bp, Artificial Sequence
  MKO10111248_B_Pttg1ip
  gRNA
tgggcttgcagtgaacttcg

SEQ ID NO: 111249 - DNA, 20 bp, Artificial Sequence
  MKO10111249_B_Pttg1ip
  gRNA
agtcaagacatgatgaaatc

SEQ ID NO: 111250 - DNA, 20 bp, Artificial Sequence
  MKO10111250_B_Pttg1
  gRNA
caggtttcaacgcctcgagt

SEQ ID NO: 111251 - DNA, 20 bp, Artificial Sequence
  MKO10111251_B_Pttg1
  gRNA
acccatccttagatgccaaa

SEQ ID NO: 111252 - DNA, 20 bp, Artificial Sequence
  MKO10111252_B_Pttg1
  gRNA
accagattcccatgatagaa

SEQ ID NO: 111253 - DNA, 20 bp, Artificial Sequence
  MKO10111253_B_Ptx3
  gRNA
ccagcctgaggctcgcgtca

SEQ ID NO: 111254 - DNA, 20 bp, Artificial Sequence
  MKO10111254_B_Ptx3
  gRNA
aatgaacttacggtcctcgg

SEQ ID NO: 111255 - DNA, 20 bp, Artificial Sequence
  MKO10111255_B_Ptx3
  gRNA
catgagctcgtagtcatccg

SEQ ID NO: 111256 - DNA, 20 bp, Artificial Sequence
  MKO10111256_B_Ptx4
  gRNA
cctaagcgttcaggcactac

SEQ ID NO: 111257 - DNA, 20 bp, Artificial Sequence
  MKO10111257_B_Ptx4
  gRNA
gagggaggctattgcaagcc

SEQ ID NO: 111258 - DNA, 20 bp, Artificial Sequence
  MKO10111258_B_Ptx4
  gRNA
acggagtcctgtgtacattc

SEQ ID NO: 111259 - DNA, 20 bp, Artificial Sequence
  MKO10111259_B_Puf60
  gRNA
ctgctccattgcatatttct

SEQ ID NO: 111260 - DNA, 20 bp, Artificial Sequence
  MKO10111260_B_Puf60
  gRNA
gggcacagaatccatcaaga

SEQ ID NO: 111261 - DNA, 20 bp, Artificial Sequence
  MKO10111261_B_Puf60
  gRNA
agacaaatggaaacctccac

SEQ ID NO: 111262 - DNA, 20 bp, Artificial Sequence
  MKO10111262_B_Pum1
  gRNA
aggacttaccgatgtgaggc

SEQ ID NO: 111263 - DNA, 20 bp, Artificial Sequence
  MKO10111263_B_Pum1
  gRNA
ggagcagcgctgatgatgta

SEQ ID NO: 111264 - DNA, 20 bp, Artificial Sequence
  MKO10111264_B_Pum1
  gRNA
ggacccctacacagctggat

SEQ ID NO: 111265 - DNA, 20 bp, Artificial Sequence
  MKO10111265_B_Pum2
  gRNA
caaggcttctccatttgagg

SEQ ID NO: 111266 - DNA, 20 bp, Artificial Sequence
  MKO10111266_B_Pum2
  gRNA
aagctcttgcattagaatct

SEQ ID NO: 111267 - DNA, 20 bp, Artificial Sequence
  MKO10111267_B_Pum2
  gRNA
agatcttaaacaagatgatg

SEQ ID NO: 111268 - DNA, 20 bp, Artificial Sequence
  MKO10111268_B_Pura
  gRNA
gttctggatgtccacccgct

SEQ ID NO: 111269 - DNA, 20 bp, Artificial Sequence
  MKO10111269_B_Pura
  gRNA
atcatggcggaccgagacag

SEQ ID NO: 111270 - DNA, 20 bp, Artificial Sequence
  MKO10111270_B_Pura
  gRNA
caagcgcttcttcttcgatg

SEQ ID NO: 111271 - DNA, 20 bp, Artificial Sequence
  MKO10111271_B_Purb
  gRNA
gagccgcctcacgctgtcga

SEQ ID NO: 111272 - DNA, 20 bp, Artificial Sequence
  MKO10111272_B_Purb
  gRNA
gataagctttacgagcgacg

SEQ ID NO: 111273 - DNA, 20 bp, Artificial Sequence
  MKO10111273_B_Purb
  gRNA
cctccgggagctctccgtac

SEQ ID NO: 111274 - DNA, 20 bp, Artificial Sequence
  MKO10111274_B_Purg
  gRNA
tgatactccaaagacagttg

SEQ ID NO: 111275 - DNA, 20 bp, Artificial Sequence
  MKO10111275_B_Purg
  gRNA
ctgattgaagactacggcga

SEQ ID NO: 111276 - DNA, 20 bp, Artificial Sequence
  MKO10111276_B_Purg
  gRNA
ggtggctgacgcggagtagt

SEQ ID NO: 111277 - DNA, 20 bp, Artificial Sequence
  MKO10111277_B_Pus10
  gRNA
aaaattcgtctacatgaaga

SEQ ID NO: 111278 - DNA, 20 bp, Artificial Sequence
  MKO10111278_B_Pus10
  gRNA
agctgaaagaagcctacaag

SEQ ID NO: 111279 - DNA, 20 bp, Artificial Sequence
  MKO10111279_B_Pus10
  gRNA
cttgcctacagcatgctgca

SEQ ID NO: 111280 - DNA, 20 bp, Artificial Sequence
  MKO10111280_B_Pus1
  gRNA
gcttacccagaatccgaatg

SEQ ID NO: 111281 - DNA, 20 bp, Artificial Sequence
  MKO10111281_B_Pus1
  gRNA
cgataccaagtcatcttcga

SEQ ID NO: 111282 - DNA, 20 bp, Artificial Sequence
  MKO10111282_B_Pus1
  gRNA
tactcgggcaagggctacca

SEQ ID NO: 111283 - DNA, 20 bp, Artificial Sequence
  MKO10111283_B_Pus3
  gRNA
gacagacatccaactatcat

SEQ ID NO: 111284 - DNA, 20 bp, Artificial Sequence
  MKO10111284_B_Pus3
  gRNA
gcgcacatataagcccctca

SEQ ID NO: 111285 - DNA, 20 bp, Artificial Sequence
  MKO10111285_B_Pus3
  gRNA
gttatggtaacatgtgcagc

SEQ ID NO: 111286 - DNA, 20 bp, Artificial Sequence
  MKO10111286_B_Pus7l
  gRNA
atttcttacaccagaagacg

SEQ ID NO: 111287 - DNA, 20 bp, Artificial Sequence
  MKO10111287_B_Pus7l
  gRNA
gtaggcgattgtctcagact

SEQ ID NO: 111288 - DNA, 20 bp, Artificial Sequence
  MKO10111288_B_Pus7l
  gRNA
tcagtagagccaacccaatt

SEQ ID NO: 111289 - DNA, 20 bp, Artificial Sequence
  MKO10111289_B_Pus7
  gRNA
agatggacggatcagccatt

SEQ ID NO: 111290 - DNA, 20 bp, Artificial Sequence
  MKO10111290_B_Pus7
  gRNA
atctgttccggtggatgaag

SEQ ID NO: 111291 - DNA, 20 bp, Artificial Sequence
  MKO10111291_B_Pus7
  gRNA
tagaacattgatggcatcca

SEQ ID NO: 111292 - DNA, 20 bp, Artificial Sequence
  MKO10111292_B_Pusl1
  gRNA
ttcagcaccccaacagcgcg

SEQ ID NO: 111293 - DNA, 20 bp, Artificial Sequence
  MKO10111293_B_Pusl1
  gRNA
taccaatatcgtctggccac

SEQ ID NO: 111294 - DNA, 20 bp, Artificial Sequence
  MKO10111294_B_Pusl1
  gRNA
aggtggctgcgtgtcgagcg

SEQ ID NO: 111295 - DNA, 20 bp, Artificial Sequence
  MKO10111295_B_Pvalb
  gRNA
ctcccccaggtccattctga

SEQ ID NO: 111296 - DNA, 20 bp, Artificial Sequence
  MKO10111296_B_Pvalb
  gRNA
taaagaaacaaagacgcttc

SEQ ID NO: 111297 - DNA, 20 bp, Artificial Sequence
  MKO10111297_B_Pvalb
  gRNA
ttagctttcagccaccagag

SEQ ID NO: 111298 - DNA, 20 bp, Artificial Sequence
  MKO10111298_B_Pvrl1
  gRNA
cgatcgggtgccaatagggt

SEQ ID NO: 111299 - DNA, 20 bp, Artificial Sequence
  MKO10111299_B_Pvrl1
  gRNA
cccgggcggtgcttcgagcc

SEQ ID NO: 111300 - DNA, 20 bp, Artificial Sequence
  MKO10111300_B_Pvrl1
  gRNA
cacccgatcgggccaggtgg

SEQ ID NO: 111301 - DNA, 20 bp, Artificial Sequence
  MKO10111301_B_Pvrl2
  gRNA
ccacgggcaccaaggagtat

SEQ ID NO: 111302 - DNA, 20 bp, Artificial Sequence
  MKO10111302_B_Pvrl2
  gRNA
agcgtcggtgacaatctgga

SEQ ID NO: 111303 - DNA, 20 bp, Artificial Sequence
  MKO10111303_B_Pvrl2
  gRNA
gttgtcatcatagccggaga

SEQ ID NO: 111304 - DNA, 20 bp, Artificial Sequence
  MKO10111304_B_Pvrl3
  gRNA
ccggattctttaattgatgg

SEQ ID NO: 111305 - DNA, 20 bp, Artificial Sequence
  MKO10111305_B_Pvrl3
  gRNA
aaagccgttacattcccact

SEQ ID NO: 111306 - DNA, 20 bp, Artificial Sequence
  MKO10111306_B_Pvrl3
  gRNA
ttccctataggtgccttagc

SEQ ID NO: 111307 - DNA, 20 bp, Artificial Sequence
  MKO10111307_B_Pvrl4
  gRNA
tcctacctgtaaacgatgcc

SEQ ID NO: 111308 - DNA, 20 bp, Artificial Sequence
  MKO10111308_B_Pvrl4
  gRNA
ttgttcctggcatcgtttac

SEQ ID NO: 111309 - DNA, 20 bp, Artificial Sequence
  MKO10111309_B_Pvrl4
  gRNA
gcggctgcccattcatactt

SEQ ID NO: 111310 - DNA, 20 bp, Artificial Sequence
  MKO10111310_B_Pvr
  gRNA
taactgtggtggtgcccggc

SEQ ID NO: 111311 - DNA, 20 bp, Artificial Sequence
  MKO10111311_B_Pvr
  gRNA
gcttctaatctccaccgtag

SEQ ID NO: 111312 - DNA, 20 bp, Artificial Sequence
  MKO10111312_B_Pvr
  gRNA
tatgacggcaactggtatgt

SEQ ID NO: 111313 - DNA, 20 bp, Artificial Sequence
  MKO10111313_B_Pwp1
  gRNA
caaacgatgaggttgtcagt

SEQ ID NO: 111314 - DNA, 20 bp, Artificial Sequence
  MKO10111314_B_Pwp1
  gRNA
cgtctcatcgctgaagcaaa

SEQ ID NO: 111315 - DNA, 20 bp, Artificial Sequence
  MKO10111315_B_Pwp1
  gRNA
acccaacagagactcgccaa

SEQ ID NO: 111316 - DNA, 20 bp, Artificial Sequence
  MKO10111316_B_Pwp2
  gRNA
cttcatcaacgatgattgcg

SEQ ID NO: 111317 - DNA, 20 bp, Artificial Sequence
  MKO10111317_B_Pwp2
  gRNA
aaattctgttatcagccccg

SEQ ID NO: 111318 - DNA, 20 bp, Artificial Sequence
  MKO10111318_B_Pwp2
  gRNA
tttgcagttctcgaatttgt

SEQ ID NO: 111319 - DNA, 20 bp, Artificial Sequence
  MKO10111319_B_Pwwp2a
  gRNA
caatacctcagccgccgcct

SEQ ID NO: 111320 - DNA, 20 bp, Artificial Sequence
  MKO10111320_B_Pwwp2a
  gRNA
ctaccataggtctcaacaaa

SEQ ID NO: 111321 - DNA, 20 bp, Artificial Sequence
  MKO10111321_B_Pwwp2a
  gRNA
cattgaagttaacagtgaag

SEQ ID NO: 111322 - DNA, 20 bp, Artificial Sequence
  MKO10111322_B_Pwwp2b
  gRNA
gtcggcgactctccagaaac

SEQ ID NO: 111323 - DNA, 20 bp, Artificial Sequence
  MKO10111323_B_Pwwp2b
  gRNA
tcccaaggtcaccgacaatg

SEQ ID NO: 111324 - DNA, 20 bp, Artificial Sequence
  MKO10111324_B_Pwwp2b
  gRNA
ttcttagcacaatccgcctg

SEQ ID NO: 111325 - DNA, 20 bp, Artificial Sequence
  MKO10111325_B_Pxdc1
  gRNA
caacttgtcctattaccatt

SEQ ID NO: 111326 - DNA, 20 bp, Artificial Sequence
  MKO10111326_B_Pxdc1
  gRNA
cttctttgaaagatcgcctt

SEQ ID NO: 111327 - DNA, 20 bp, Artificial Sequence
  MKO10111327_B_Pxdc1
  gRNA
ggtgagaacaacctcagacc

SEQ ID NO: 111328 - DNA, 20 bp, Artificial Sequence
  MKO10111328_B_Pxdn
  gRNA
ttctaacttacagtgtgttc

SEQ ID NO: 111329 - DNA, 20 bp, Artificial Sequence
  MKO10111329_B_Pxdn
  gRNA
tttctatctgattaaagtgc

SEQ ID NO: 111330 - DNA, 20 bp, Artificial Sequence
  MKO10111330_B_Pxdn
  gRNA
atgcttgcctgtcaattgat

SEQ ID NO: 111331 - DNA, 20 bp, Artificial Sequence
  MKO10111331_B_Pxk
  gRNA
gcctcgacggccgctgtcag

SEQ ID NO: 111332 - DNA, 20 bp, Artificial Sequence
  MKO10111332_B_Pxk
  gRNA
cagaaattcctctttgcacc

SEQ ID NO: 111333 - DNA, 20 bp, Artificial Sequence
  MKO10111333_B_Pxk
  gRNA
gaatttctgcagaaaacagc

SEQ ID NO: 111334 - DNA, 20 bp, Artificial Sequence
  MKO10111334_B_Pxmp2
  gRNA
ccgggtgctctttgccaaca

SEQ ID NO: 111335 - DNA, 20 bp, Artificial Sequence
  MKO10111335_B_Pxmp2
  gRNA
ggcccgcactgcaaatgaac

SEQ ID NO: 111336 - DNA, 20 bp, Artificial Sequence
  MKO10111336_B_Pxmp2
  gRNA
tctgttctggtatgcctacc

SEQ ID NO: 111337 - DNA, 20 bp, Artificial Sequence
  MKO10111337_B_Pxmp4
  gRNA
cctgtacgccttgtgccgcc

SEQ ID NO: 111338 - DNA, 20 bp, Artificial Sequence
  MKO10111338_B_Pxmp4
  gRNA
atcggggggctcctgctgtt

SEQ ID NO: 111339 - DNA, 20 bp, Artificial Sequence
  MKO10111339_B_Pxmp4
  gRNA
aagccacgtacatccactct

SEQ ID NO: 111340 - DNA, 20 bp, Artificial Sequence
  MKO10111340_B_Pxn
  gRNA
ggagctcatgacggtaggtg

SEQ ID NO: 111341 - DNA, 20 bp, Artificial Sequence
  MKO10111341_B_Pxn
  gRNA
tacctgctggtgagcgtatc

SEQ ID NO: 111342 - DNA, 20 bp, Artificial Sequence
  MKO10111342_B_Pxn
  gRNA
ggctccctttgttcccgagc

SEQ ID NO: 111343 - DNA, 20 bp, Artificial Sequence
  MKO10111343_B_Pxt1
  gRNA
ttccacacagcatcttgcac

SEQ ID NO: 111344 - DNA, 20 bp, Artificial Sequence
  MKO10111344_B_Pxt1
  gRNA
tgtcaatcacagggtgattc

SEQ ID NO: 111345 - DNA, 20 bp, Artificial Sequence
  MKO10111345_B_Pxt1
  gRNA
tgtccttcctttacagcaaa

SEQ ID NO: 111346 - DNA, 20 bp, Artificial Sequence
  MKO10111346_B_Pycard
  gRNA
gaaggaaatacatccctact

SEQ ID NO: 111347 - DNA, 20 bp, Artificial Sequence
  MKO10111347_B_Pycard
  gRNA
gttctggctgtactctgagc

SEQ ID NO: 111348 - DNA, 20 bp, Artificial Sequence
  MKO10111348_B_Pycard
  gRNA
gctcagagtacagccagaac

SEQ ID NO: 111349 - DNA, 20 bp, Artificial Sequence
  MKO10111349_B_Pycr1
  gRNA
ggagggccgagaccgtagct

SEQ ID NO: 111350 - DNA, 20 bp, Artificial Sequence
  MKO10111350_B_Pycr1
  gRNA
tgaaattggggcgaacattg

SEQ ID NO: 111351 - DNA, 20 bp, Artificial Sequence
  MKO10111351_B_Pycr1
  gRNA
caccatcaactccatcgaaa

SEQ ID NO: 111352 - DNA, 20 bp, Artificial Sequence
  MKO10111352_B_Pycr2
  gRNA
ctattatcttgtgagccgac

SEQ ID NO: 111353 - DNA, 20 bp, Artificial Sequence
  MKO10111353_B_Pycr2
  gRNA
ctgcatgaccaacacgcccg

SEQ ID NO: 111354 - DNA, 20 bp, Artificial Sequence
  MKO10111354_B_Pycr2
  gRNA
gatgtgcctctcctgcacgt

SEQ ID NO: 111355 - DNA, 20 bp, Artificial Sequence
  MKO10111355_B_Pycrl
  gRNA
tgagcacatcatcgtatctg

SEQ ID NO: 111356 - DNA, 20 bp, Artificial Sequence
  MKO10111356_B_Pycrl
  gRNA
agtagaagctaaacaagtgc

SEQ ID NO: 111357 - DNA, 20 bp, Artificial Sequence
  MKO10111357_B_Pycrl
  gRNA
ggctgaaggtgccatcaaaa

SEQ ID NO: 111358 - DNA, 20 bp, Artificial Sequence
  MKO10111358_B_Pydc3
  gRNA
gagtcaacccgatgccaacc

SEQ ID NO: 111359 - DNA, 20 bp, Artificial Sequence
  MKO10111359_B_Pydc3
  gRNA
ggcaaagataggatctcatc

SEQ ID NO: 111360 - DNA, 20 bp, Artificial Sequence
  MKO10111360_B_Pydc3
  gRNA
cccacttacctccagcctga

SEQ ID NO: 111361 - DNA, 20 bp, Artificial Sequence
  MKO10111361_B_Pydc4
  gRNA
ttgggaagtagaaccagcta

SEQ ID NO: 111362 - DNA, 20 bp, Artificial Sequence
  MKO10111362_B_Pydc4
  gRNA
cttatccatgactggagaga

SEQ ID NO: 111363 - DNA, 20 bp, Artificial Sequence
  MKO10111363_B_Pydc4
  gRNA
tcaacacgagctgcaagttc

SEQ ID NO: 111364 - DNA, 20 bp, Artificial Sequence
  MKO10111364_B_Pygb
  gRNA
tatggaatccgatatgaatt

SEQ ID NO: 111365 - DNA, 20 bp, Artificial Sequence
  MKO10111365_B_Pygb
  gRNA
accctcccgtagaaatgcac

SEQ ID NO: 111366 - DNA, 20 bp, Artificial Sequence
  MKO10111366_B_Pygb
  gRNA
tggtcttgggaatggcggcc

SEQ ID NO: 111367 - DNA, 20 bp, Artificial Sequence
  MKO10111367_B_Pygl
  gRNA
gacaaagtgggtcgacaccc

SEQ ID NO: 111368 - DNA, 20 bp, Artificial Sequence
  MKO10111368_B_Pygl
  gRNA
ttggcaatggcggtcttggg

SEQ ID NO: 111369 - DNA, 20 bp, Artificial Sequence
  MKO10111369_B_Pygl
  gRNA
ctggtaaatggcctcatcgc

SEQ ID NO: 111370 - DNA, 20 bp, Artificial Sequence
  MKO10111370_B_Pygm
  gRNA
acgctgcctgtgcacttcta

SEQ ID NO: 111371 - DNA, 20 bp, Artificial Sequence
  MKO10111371_B_Pygm
  gRNA
cttggagaacgcctgtgatg

SEQ ID NO: 111372 - DNA, 20 bp, Artificial Sequence
  MKO10111372_B_Pygm
  gRNA
cccttagctgggcttggaca

SEQ ID NO: 111373 - DNA, 20 bp, Artificial Sequence
  MKO10111373_B_Pygo1
  gRNA
ggagggcccaatatacaact

SEQ ID NO: 111374 - DNA, 20 bp, Artificial Sequence
  MKO10111374_B_Pygo1
  gRNA
tctaactctcttcagcgcga

SEQ ID NO: 111375 - DNA, 20 bp, Artificial Sequence
  MKO10111375_B_Pygo1
  gRNA
cccagataagaaaaaacgca

SEQ ID NO: 111376 - DNA, 20 bp, Artificial Sequence
  MKO10111376_B_Pygo2
  gRNA
ctttggaggctttcgtgtac

SEQ ID NO: 111377 - DNA, 20 bp, Artificial Sequence
  MKO10111377_B_Pygo2
  gRNA
ggcgcaggccctccgttcct

SEQ ID NO: 111378 - DNA, 20 bp, Artificial Sequence
  MKO10111378_B_Pygo2
  gRNA
atcatttacctcactacggc

SEQ ID NO: 111379 - DNA, 20 bp, Artificial Sequence
  MKO10111379_B_Pyhin1
  gRNA
tatctttgctcgaagaaaag

SEQ ID NO: 111380 - DNA, 20 bp, Artificial Sequence
  MKO10111380_B_Pyhin1
  gRNA
tacaacacacagtaacatgc

SEQ ID NO: 111381 - DNA, 20 bp, Artificial Sequence
  MKO10111381_B_Pyhin1
  gRNA
ttgcatcagctaaaaggaca

SEQ ID NO: 111382 - DNA, 20 bp, Artificial Sequence
  MKO10111382_B_Pyroxd1
  gRNA
agccgttacaaacttcagac

SEQ ID NO: 111383 - DNA, 20 bp, Artificial Sequence
  MKO10111383_B_Pyroxd1
  gRNA
cccgacaatcattatcctcc

SEQ ID NO: 111384 - DNA, 20 bp, Artificial Sequence
  MKO10111384_B_Pyroxd1
  gRNA
aggataatgattgtcgggaa

SEQ ID NO: 111385 - DNA, 20 bp, Artificial Sequence
  MKO10111385_B_Pyroxd2
  gRNA
ggcgatctaccttcagctcc

SEQ ID NO: 111386 - DNA, 20 bp, Artificial Sequence
  MKO10111386_B_Pyroxd2
  gRNA
cctatctcctgagcctactg

SEQ ID NO: 111387 - DNA, 20 bp, Artificial Sequence
  MKO10111387_B_Pyroxd2
  gRNA
ctactccttcacccccatgc

SEQ ID NO: 111388 - DNA, 20 bp, Artificial Sequence
  MKO10111388_B_Pyurf
  gRNA
gctgcctgtggtatcatatt

SEQ ID NO: 111389 - DNA, 20 bp, Artificial Sequence
  MKO10111389_B_Pyurf
  gRNA
tgctgagcgccacgtgccgc

SEQ ID NO: 111390 - DNA, 20 bp, Artificial Sequence
  MKO10111390_B_Pyurf
  gRNA
gcagcgccggggcgagcctg

SEQ ID NO: 111391 - DNA, 20 bp, Artificial Sequence
  MKO10111391_B_Pyy
  gRNA
caccactggtccaaaccttc

SEQ ID NO: 111392 - DNA, 20 bp, Artificial Sequence
  MKO10111392_B_Pyy
  gRNA
tctaccgagacctgaagggg

SEQ ID NO: 111393 - DNA, 20 bp, Artificial Sequence
  MKO10111393_B_Pyy
  gRNA
ctcctgcaggccagaaggtt

SEQ ID NO: 111394 - DNA, 20 bp, Artificial Sequence
  MKO10111394_B_Pzp
  gRNA
aacgaagctcctcacagacc

SEQ ID NO: 111395 - DNA, 20 bp, Artificial Sequence
  MKO10111395_B_Pzp
  gRNA
agactcaccgtttcattcaa

SEQ ID NO: 111396 - DNA, 20 bp, Artificial Sequence
  MKO10111396_B_Pzp
  gRNA
gaaattccgagttgtttctg

SEQ ID NO: 111397 - DNA, 20 bp, Artificial Sequence
  MKO10111397_B_Qars
  gRNA
gctccatcagagacagggtc

SEQ ID NO: 111398 - DNA, 20 bp, Artificial Sequence
  MKO10111398_B_Qars
  gRNA
gcacttaagtttcataagcc

SEQ ID NO: 111399 - DNA, 20 bp, Artificial Sequence
  MKO10111399_B_Qars
  gRNA
gcccaagatggaagctgatc

SEQ ID NO: 111400 - DNA, 20 bp, Artificial Sequence
  MKO10111400_B_Qdpr
  gRNA
aaagctcctaggtgaccaga

SEQ ID NO: 111401 - DNA, 20 bp, Artificial Sequence
  MKO10111401_B_Qdpr
  gRNA
tgtcatcttaacaaccacgc

SEQ ID NO: 111402 - DNA, 20 bp, Artificial Sequence
  MKO10111402_B_Qdpr
  gRNA
agagaattgcatccaccttc

SEQ ID NO: 111403 - DNA, 20 bp, Artificial Sequence
  MKO10111403_B_Qk
  gRNA
aaaataatggtccgaggcaa

SEQ ID NO: 111404 - DNA, 20 bp, Artificial Sequence
  MKO10111404_B_Qk
  gRNA
aagtgcagaattgcctgacg

SEQ ID NO: 111405 - DNA, 20 bp, Artificial Sequence
  MKO10111405_B_Qk
  gRNA
ttcatttagatgctcccaat

SEQ ID NO: 111406 - DNA, 20 bp, Artificial Sequence
  MKO10111406_B_Qpctl
  gRNA
acttccctcgcacagcccgc

SEQ ID NO: 111407 - DNA, 20 bp, Artificial Sequence
  MKO10111407_B_Qpctl
  gRNA
aagggggttgaggccgtgaa

SEQ ID NO: 111408 - DNA, 20 bp, Artificial Sequence
  MKO10111408_B_Qpctl
  gRNA
accacgttcccgaagtccag

SEQ ID NO: 111409 - DNA, 20 bp, Artificial Sequence
  MKO10111409_B_Qpct
  gRNA
cgcccggaagctattctgct

SEQ ID NO: 111410 - DNA, 20 bp, Artificial Sequence
  MKO10111410_B_Qpct
  gRNA
tcccctcaagattctctgta

SEQ ID NO: 111411 - DNA, 20 bp, Artificial Sequence
  MKO10111411_B_Qpct
  gRNA
ttggtgcctcttgatccagg

SEQ ID NO: 111412 - DNA, 20 bp, Artificial Sequence
  MKO10111412_B_Qprt
  gRNA
cctcccggagggatcgaagc

SEQ ID NO: 111413 - DNA, 20 bp, Artificial Sequence
  MKO10111413_B_Qprt
  gRNA
cccagcctctgctgcccgaa

SEQ ID NO: 111414 - DNA, 20 bp, Artificial Sequence
  MKO10111414_B_Qprt
  gRNA
agaggtggaatgtagcagcc

SEQ ID NO: 111415 - DNA, 20 bp, Artificial Sequence
  MKO10111415_B_Qrfpr
  gRNA
caagcatcaccacaagcggc

SEQ ID NO: 111416 - DNA, 20 bp, Artificial Sequence
  MKO10111416_B_Qrfpr
  gRNA
tggctctcttcgctgcgtgc

SEQ ID NO: 111417 - DNA, 20 bp, Artificial Sequence
  MKO10111417_B_Qrfpr
  gRNA
catagccaatcttgctgtag

SEQ ID NO: 111418 - DNA, 20 bp, Artificial Sequence
  MKO10111418_B_Qrfp
  gRNA
gagcacaccggcttccgtct

SEQ ID NO: 111419 - DNA, 20 bp, Artificial Sequence
  MKO10111419_B_Qrfp
  gRNA
agggttcctgcccgccgact

SEQ ID NO: 111420 - DNA, 20 bp, Artificial Sequence
  MKO10111420_B_Qrfp
  gRNA
taccgtcttgcctccctaga

SEQ ID NO: 111421 - DNA, 20 bp, Artificial Sequence
  MKO10111421_B_Qrich1
  gRNA
actatgttcgtttcaccgaa

SEQ ID NO: 111422 - DNA, 20 bp, Artificial Sequence
  MKO10111422_B_Qrich1
  gRNA
gtttaatgacacgagaagct

SEQ ID NO: 111423 - DNA, 20 bp, Artificial Sequence
  MKO10111423_B_Qrich1
  gRNA
cagaacttcatgtagccatt

SEQ ID NO: 111424 - DNA, 20 bp, Artificial Sequence
  MKO10111424_B_Qrich2
  gRNA
gctctgtagtggcatcaaac

SEQ ID NO: 111425 - DNA, 20 bp, Artificial Sequence
  MKO10111425_B_Qrich2
  gRNA
gtaggatggcgctctgcacg

SEQ ID NO: 111426 - DNA, 20 bp, Artificial Sequence
  MKO10111426_B_Qrich2
  gRNA
taccacgagcaacctcattg

SEQ ID NO: 111427 - DNA, 20 bp, Artificial Sequence
  MKO10111427_B_Qrsl1
  gRNA
aaagacaactttagcacaac

SEQ ID NO: 111428 - DNA, 20 bp, Artificial Sequence
  MKO10111428_B_Qrsl1
  gRNA
ggtttctgcggcactgaagc

SEQ ID NO: 111429 - DNA, 20 bp, Artificial Sequence
  MKO10111429_B_Qrsl1
  gRNA
ttacattactgtatcagaag

SEQ ID NO: 111430 - DNA, 20 bp, Artificial Sequence
  MKO10111430_B_Qser1
  gRNA
catcctcactactgctagaa

SEQ ID NO: 111431 - DNA, 20 bp, Artificial Sequence
  MKO10111431_B_Qser1
  gRNA
cagggaacgtgatgaatttg

SEQ ID NO: 111432 - DNA, 20 bp, Artificial Sequence
  MKO10111432_B_Qser1
  gRNA
ataagccttcacaaactatc

SEQ ID NO: 111433 - DNA, 20 bp, Artificial Sequence
  MKO10111433_B_Qsox1
  gRNA
tgcaggctgaatgatatcga

SEQ ID NO: 111434 - DNA, 20 bp, Artificial Sequence
  MKO10111434_B_Qsox1
  gRNA
ccttcgcataccctcacagt

SEQ ID NO: 111435 - DNA, 20 bp, Artificial Sequence
  MKO10111435_B_Qsox1
  gRNA
aaatacttggcaggttccag

SEQ ID NO: 111436 - DNA, 20 bp, Artificial Sequence
  MKO10111436_B_Qsox2
  gRNA
tgccatccgtgttgctgctc

SEQ ID NO: 111437 - DNA, 20 bp, Artificial Sequence
  MKO10111437_B_Qsox2
  gRNA
agaagtggatgtcatatgtg

SEQ ID NO: 111438 - DNA, 20 bp, Artificial Sequence
  MKO10111438_B_Qsox2
  gRNA
gctattgtgtttgaaagcaa

SEQ ID NO: 111439 - DNA, 20 bp, Artificial Sequence
  MKO10111439_B_Qtrt1
  gRNA
cctcctgcaggtcagtccgc

SEQ ID NO: 111440 - DNA, 20 bp, Artificial Sequence
  MKO10111440_B_Qtrt1
  gRNA
tgcatggcctcctccactag

SEQ ID NO: 111441 - DNA, 20 bp, Artificial Sequence
  MKO10111441_B_Qtrt1
  gRNA
cacagggaccggagctgatc

SEQ ID NO: 111442 - DNA, 20 bp, Artificial Sequence
  MKO10111442_B_Qtrtd1
  gRNA
ccccttgaaagccgtccagc

SEQ ID NO: 111443 - DNA, 20 bp, Artificial Sequence
  MKO10111443_B_Qtrtd1
  gRNA
ttacttgttacataaccagc

SEQ ID NO: 111444 - DNA, 20 bp, Artificial Sequence
  MKO10111444_B_Qtrtd1
  gRNA
cgggggtgactggatcgtgc

SEQ ID NO: 111445 - DNA, 20 bp, Artificial Sequence
  MKO10111445_B_R3hcc1l
  gRNA
tctgtttgcttcgaacccca

SEQ ID NO: 111446 - DNA, 20 bp, Artificial Sequence
  MKO10111446_B_R3hcc1l
  gRNA
gacaatacctgtgattgggc

SEQ ID NO: 111447 - DNA, 20 bp, Artificial Sequence
  MKO10111447_B_R3hcc1l
  gRNA
cattcactgaggtcaatatc

SEQ ID NO: 111448 - DNA, 20 bp, Artificial Sequence
  MKO10111448_B_R3hcc1
  gRNA
cttgagcacggagaaatcct

SEQ ID NO: 111449 - DNA, 20 bp, Artificial Sequence
  MKO10111449_B_R3hcc1
  gRNA
ctgtgaaggcggatgtgtcc

SEQ ID NO: 111450 - DNA, 20 bp, Artificial Sequence
  MKO10111450_B_R3hcc1
  gRNA
gtggatgacactcatgctat

SEQ ID NO: 111451 - DNA, 20 bp, Artificial Sequence
  MKO10111451_B_R3hdm1
  gRNA
caagaatacactgattcaac

SEQ ID NO: 111452 - DNA, 20 bp, Artificial Sequence
  MKO10111452_B_R3hdm1
  gRNA
cagttgaatcagtgtattct

SEQ ID NO: 111453 - DNA, 20 bp, Artificial Sequence
  MKO10111453_B_R3hdm1
  gRNA
cctgtctgtccaaatgactg

SEQ ID NO: 111454 - DNA, 20 bp, Artificial Sequence
  MKO10111454_B_R3hdm2
  gRNA
ttctcgacgtcttccttact

SEQ ID NO: 111455 - DNA, 20 bp, Artificial Sequence
  MKO10111455_B_R3hdm2
  gRNA
catcagctgcccctctgaca

SEQ ID NO: 111456 - DNA, 20 bp, Artificial Sequence
  MKO10111456_B_R3hdm2
  gRNA
tatatccaaaactccaagta

SEQ ID NO: 111457 - DNA, 20 bp, Artificial Sequence
  MKO10111457_B_R3hdm4
  gRNA
gataaaatgctgcttgcgtc

SEQ ID NO: 111458 - DNA, 20 bp, Artificial Sequence
  MKO10111458_B_R3hdm4
  gRNA
gctcttgctcctctcccgag

SEQ ID NO: 111459 - DNA, 20 bp, Artificial Sequence
  MKO10111459_B_R3hdm4
  gRNA
cggtctccagcagtgttagc

SEQ ID NO: 111460 - DNA, 20 bp, Artificial Sequence
  MKO10111460_B_R3hdml
  gRNA
cctccccaggttccgttctg

SEQ ID NO: 111461 - DNA, 20 bp, Artificial Sequence
  MKO10111461_B_R3hdml
  gRNA
ctcacagctgatgaagtacg

SEQ ID NO: 111462 - DNA, 20 bp, Artificial Sequence
  MKO10111462_B_R3hdml
  gRNA
aatggcacagcccagccgac

SEQ ID NO: 111463 - DNA, 20 bp, Artificial Sequence
  MKO10111463_B_Rab10
  gRNA
gcccattgctcctctgtagt

SEQ ID NO: 111464 - DNA, 20 bp, Artificial Sequence
  MKO10111464_B_Rab10
  gRNA
ggatgtcttcagctaatgtg

SEQ ID NO: 111465 - DNA, 20 bp, Artificial Sequence
  MKO10111465_B_Rab10
  gRNA
actagggaacaagtgtgaca

SEQ ID NO: 111466 - DNA, 20 bp, Artificial Sequence
  MKO10111466_B_Rab11a
  gRNA
gtggtgggcggaacatgaat

SEQ ID NO: 111467 - DNA, 20 bp, Artificial Sequence
  MKO10111467_B_Rab11a
  gRNA
agagtgatttacgtcatctc

SEQ ID NO: 111468 - DNA, 20 bp, Artificial Sequence
  MKO10111468_B_Rab11a
  gRNA
ttctgacagcactgcacctt

SEQ ID NO: 111469 - DNA, 20 bp, Artificial Sequence
  MKO10111469_B_Rab11b
  gRNA
ctaaactcacgcagaggtaa

SEQ ID NO: 111470 - DNA, 20 bp, Artificial Sequence
  MKO10111470_B_Rab11b
  gRNA
gcattcaagaacatcctcac

SEQ ID NO: 111471 - DNA, 20 bp, Artificial Sequence
  MKO10111471_B_Rab11b
  gRNA
cttcattgagacctcagcct

SEQ ID NO: 111472 - DNA, 20 bp, Artificial Sequence
  MKO10111472_B_Rab11fip1
  gRNA
gggcacgagcgacgcgtacg

SEQ ID NO: 111473 - DNA, 20 bp, Artificial Sequence
  MKO10111473_B_Rab11fip1
  gRNA
catgggcgtcatcgtcccac

SEQ ID NO: 111474 - DNA, 20 bp, Artificial Sequence
  MKO10111474_B_Rab11fip1
  gRNA
ctcatcgtcactgtcgactg

SEQ ID NO: 111475 - DNA, 20 bp, Artificial Sequence
  MKO10111475_B_Rab11fip2
  gRNA
caacaagcagtgaagacctc

SEQ ID NO: 111476 - DNA, 20 bp, Artificial Sequence
  MKO10111476_B_Rab11fip2
  gRNA
agtcgccagatagattcctt

SEQ ID NO: 111477 - DNA, 20 bp, Artificial Sequence
  MKO10111477_B_Rab11fip2
  gRNA
cattcgatgtctgatttaac

SEQ ID NO: 111478 - DNA, 20 bp, Artificial Sequence
  MKO10111478_B_Rab11fip3
  gRNA
cctccagggcctccatagtc

SEQ ID NO: 111479 - DNA, 20 bp, Artificial Sequence
  MKO10111479_B_Rab11fip3
  gRNA
gcactgtccacgtccccttc

SEQ ID NO: 111480 - DNA, 20 bp, Artificial Sequence
  MKO10111480_B_Rab11fip3
  gRNA
ctgcagctcggggtgcacca

SEQ ID NO: 111481 - DNA, 20 bp, Artificial Sequence
  MKO10111481_B_Rab11fip4
  gRNA
cgcctctcttatcagcaacg

SEQ ID NO: 111482 - DNA, 20 bp, Artificial Sequence
  MKO10111482_B_Rab11fip4
  gRNA
gtgctgtcggtggagagcgc

SEQ ID NO: 111483 - DNA, 20 bp, Artificial Sequence
  MKO10111483_B_Rab11fip4
  gRNA
aggcccggagggctctgtca

SEQ ID NO: 111484 - DNA, 20 bp, Artificial Sequence
  MKO10111484_B_Rab11fip5
  gRNA
ctgtcggggctagcctccac

SEQ ID NO: 111485 - DNA, 20 bp, Artificial Sequence
  MKO10111485_B_Rab11fip5
  gRNA
tctgccccaagaatcatccg

SEQ ID NO: 111486 - DNA, 20 bp, Artificial Sequence
  MKO10111486_B_Rab11fip5
  gRNA
gcctctccagtccgctactc

SEQ ID NO: 111487 - DNA, 20 bp, Artificial Sequence
  MKO10111487_B_Rab12
  gRNA
agtccagcttatttccaacc

SEQ ID NO: 111488 - DNA, 20 bp, Artificial Sequence
  MKO10111488_B_Rab12
  gRNA
agaagacgccgagctcctcc

SEQ ID NO: 111489 - DNA, 20 bp, Artificial Sequence
  MKO10111489_B_Rab12
  gRNA
atcaagactgtagaactaag

SEQ ID NO: 111490 - DNA, 20 bp, Artificial Sequence
  MKO10111490_B_Rab13
  gRNA
ccagttctgaatattctcga

SEQ ID NO: 111491 - DNA, 20 bp, Artificial Sequence
  MKO10111491_B_Rab13
  gRNA
ccttcgagaatattcagaac

SEQ ID NO: 111492 - DNA, 20 bp, Artificial Sequence
  MKO10111492_B_Rab13
  gRNA
agaggatcaaactgcaagtg

SEQ ID NO: 111493 - DNA, 20 bp, Artificial Sequence
  MKO10111493_B_Rab14
  gRNA
aattcaacaccaattgtgtg

SEQ ID NO: 111494 - DNA, 20 bp, Artificial Sequence
  MKO10111494_B_Rab14
  gRNA
aattaggtaataattctcat

SEQ ID NO: 111495 - DNA, 20 bp, Artificial Sequence
  MKO10111495_B_Rab14
  gRNA
taaacaggggatatgggagt

SEQ ID NO: 111496 - DNA, 20 bp, Artificial Sequence
  MKO10111496_B_Rab15
  gRNA
catcagccttattcccaatt

SEQ ID NO: 111497 - DNA, 20 bp, Artificial Sequence
  MKO10111497_B_Rab15
  gRNA
atgaagactatcgaagtaga

SEQ ID NO: 111498 - DNA, 20 bp, Artificial Sequence
  MKO10111498_B_Rab15
  gRNA
cctatcagcatatcatgaag

SEQ ID NO: 111499 - DNA, 20 bp, Artificial Sequence
  MKO10111499_B_Rab17
  gRNA
cacggggagcagccgcccac

SEQ ID NO: 111500 - DNA, 20 bp, Artificial Sequence
  MKO10111500_B_Rab17
  gRNA
ggagcgggaagtgaccttcc

SEQ ID NO: 111501 - DNA, 20 bp, Artificial Sequence
  MKO10111501_B_Rab17
  gRNA
ctccgccaagctgaactacc

SEQ ID NO: 111502 - DNA, 20 bp, Artificial Sequence
  MKO10111502_B_Rab18
  gRNA
ttaactcccagctattatag

SEQ ID NO: 111503 - DNA, 20 bp, Artificial Sequence
  MKO10111503_B_Rab18
  gRNA
aagagacacctttgttaaac

SEQ ID NO: 111504 - DNA, 20 bp, Artificial Sequence
  MKO10111504_B_Rab18
  gRNA
gacatagtaaacatgctagt

SEQ ID NO: 111505 - DNA, 20 bp, Artificial Sequence
  MKO10111505_B_Rab19
  gRNA
gtgagggacagattcgaatg

SEQ ID NO: 111506 - DNA, 20 bp, Artificial Sequence
  MKO10111506_B_Rab19
  gRNA
tgtcttggagacatccgcca

SEQ ID NO: 111507 - DNA, 20 bp, Artificial Sequence
  MKO10111507_B_Rab19
  gRNA
gaagcggcatgtcctgtttg

SEQ ID NO: 111508 - DNA, 20 bp, Artificial Sequence
  MKO10111508_B_Rab1b
  gRNA
caagattcgaaccattgagc

SEQ ID NO: 111509 - DNA, 20 bp, Artificial Sequence
  MKO10111509_B_Rab1b
  gRNA
gactcgtagtgggacacagc

SEQ ID NO: 111510 - DNA, 20 bp, Artificial Sequence
  MKO10111510_B_Rab1b
  gRNA
caggcacgacttgcccacgc

SEQ ID NO: 111511 - DNA, 20 bp, Artificial Sequence
  MKO10111511_B_Rab1
  gRNA
tttctatagtgggacacagc

SEQ ID NO: 111512 - DNA, 20 bp, Artificial Sequence
  MKO10111512_B_Rab1
  gRNA
atacgaactatagagttaga

SEQ ID NO: 111513 - DNA, 20 bp, Artificial Sequence
  MKO10111513_B_Rab1
  gRNA
tgtgtatgatgtgacagatc

SEQ ID NO: 111514 - DNA, 20 bp, Artificial Sequence
  MKO10111514_B_Rab20
  gRNA
ggtggttcacatcgtatgta

SEQ ID NO: 111515 - DNA, 20 bp, Artificial Sequence
  MKO10111515_B_Rab20
  gRNA
cggccgctccgcggcagtac

SEQ ID NO: 111516 - DNA, 20 bp, Artificial Sequence
  MKO10111516_B_Rab20
  gRNA
ctgccattaggcacaacacc

SEQ ID NO: 111517 - DNA, 20 bp, Artificial Sequence
  MKO10111517_B_Rab21
  gRNA
tgtgtacacaggtaaaaaac

SEQ ID NO: 111518 - DNA, 20 bp, Artificial Sequence
  MKO10111518_B_Rab21
  gRNA
caaagaattacgaaaaatgt

SEQ ID NO: 111519 - DNA, 20 bp, Artificial Sequence
  MKO10111519_B_Rab21
  gRNA
attaggtaataaaatagact

SEQ ID NO: 111520 - DNA, 20 bp, Artificial Sequence
  MKO10111520_B_Rab22a
  gRNA
gtaaatcgagcatcgtgtgg

SEQ ID NO: 111521 - DNA, 20 bp, Artificial Sequence
  MKO10111521_B_Rab22a
  gRNA
gctgaccctcgatagtacat

SEQ ID NO: 111522 - DNA, 20 bp, Artificial Sequence
  MKO10111522_B_Rab22a
  gRNA
caatgctgggggggccgtgc

SEQ ID NO: 111523 - DNA, 20 bp, Artificial Sequence
  MKO10111523_B_Rab23
  gRNA
gaaaaagtagtagcggaggt

SEQ ID NO: 111524 - DNA, 20 bp, Artificial Sequence
  MKO10111524_B_Rab23
  gRNA
gcaaaacaagatcgatctgc

SEQ ID NO: 111525 - DNA, 20 bp, Artificial Sequence
  MKO10111525_B_Rab23
  gRNA
gaacctcagctttagccttt

SEQ ID NO: 111526 - DNA, 20 bp, Artificial Sequence
  MKO10111526_B_Rab24
  gRNA
ggagctgcgcagtttagaag

SEQ ID NO: 111527 - DNA, 20 bp, Artificial Sequence
  MKO10111527_B_Rab24
  gRNA
ggctgtcaaatctacctgtg

SEQ ID NO: 111528 - DNA, 20 bp, Artificial Sequence
  MKO10111528_B_Rab24
  gRNA
caattgcagctttagcaccc

SEQ ID NO: 111529 - DNA, 20 bp, Artificial Sequence
  MKO10111529_B_Rab25
  gRNA
cacgacagtcgcaccaccat

SEQ ID NO: 111530 - DNA, 20 bp, Artificial Sequence
  MKO10111530_B_Rab25
  gRNA
gctcaacattggtggagtcg

SEQ ID NO: 111531 - DNA, 20 bp, Artificial Sequence
  MKO10111531_B_Rab25
  gRNA
accctgggcaatgcccaagc

SEQ ID NO: 111532 - DNA, 20 bp, Artificial Sequence
  MKO10111532_B_Rab26
  gRNA
gcctactaccgagatgctca

SEQ ID NO: 111533 - DNA, 20 bp, Artificial Sequence
  MKO10111533_B_Rab26
  gRNA
tgggcttaccgtgagcatct

SEQ ID NO: 111534 - DNA, 20 bp, Artificial Sequence
  MKO10111534_B_Rab26
  gRNA
agattccttcgacaacattc

SEQ ID NO: 111535 - DNA, 20 bp, Artificial Sequence
  MKO10111535_B_Rab27a
  gRNA
gtttcctcaatgtccgaaac

SEQ ID NO: 111536 - DNA, 20 bp, Artificial Sequence
  MKO10111536_B_Rab27a
  gRNA
ccgccgtgtcccataactgc

SEQ ID NO: 111537 - DNA, 20 bp, Artificial Sequence
  MKO10111537_B_Rab27a
  gRNA
cacacgtacttatccagttt

SEQ ID NO: 111538 - DNA, 20 bp, Artificial Sequence
  MKO10111538_B_Rab27b
  gRNA
aagtcaatgaacggcaagca

SEQ ID NO: 111539 - DNA, 20 bp, Artificial Sequence
  MKO10111539_B_Rab27b
  gRNA
ttgccaattaatactatgtc

SEQ ID NO: 111540 - DNA, 20 bp, Artificial Sequence
  MKO10111540_B_Rab27b
  gRNA
attcaagaagctctgttgac

SEQ ID NO: 111541 - DNA, 20 bp, Artificial Sequence
  MKO10111541_B_Rab28
  gRNA
cactttgtttcagccaagac

SEQ ID NO: 111542 - DNA, 20 bp, Artificial Sequence
  MKO10111542_B_Rab28
  gRNA
ttgtaatatcatataccaag

SEQ ID NO: 111543 - DNA, 20 bp, Artificial Sequence
  MKO10111543_B_Rab28
  gRNA
atgttggataaatacatcta

SEQ ID NO: 111544 - DNA, 20 bp, Artificial Sequence
  MKO10111544_B_Rab2a
  gRNA
cgttcaaccacttgacaacc

SEQ ID NO: 111545 - DNA, 20 bp, Artificial Sequence
  MKO10111545_B_Rab2a
  gRNA
tcatgcttattggaaataaa

SEQ ID NO: 111546 - DNA, 20 bp, Artificial Sequence
  MKO10111546_B_Rab2a
  gRNA
agtcctttcgttctatcaca

SEQ ID NO: 111547 - DNA, 20 bp, Artificial Sequence
  MKO10111547_B_Rab2b
  gRNA
gcacgtatggtcaacatcga

SEQ ID NO: 111548 - DNA, 20 bp, Artificial Sequence
  MKO10111548_B_Rab2b
  gRNA
acctattgtgaggtcgtgca

SEQ ID NO: 111549 - DNA, 20 bp, Artificial Sequence
  MKO10111549_B_Rab2b
  gRNA
ctatcacccgttcctactac

SEQ ID NO: 111550 - DNA, 20 bp, Artificial Sequence
  MKO10111550_B_Rab30
  gRNA
aatgtatcgtcacccttacc

SEQ ID NO: 111551 - DNA, 20 bp, Artificial Sequence
  MKO10111551_B_Rab30
  gRNA
agacctctcgcctttcagcc

SEQ ID NO: 111552 - DNA, 20 bp, Artificial Sequence
  MKO10111552_B_Rab30
  gRNA
cccttacctgagtgaatctt

SEQ ID NO: 111553 - DNA, 20 bp, Artificial Sequence
  MKO10111553_B_Rab31
  gRNA
ctcttctaggacacgggggt

SEQ ID NO: 111554 - DNA, 20 bp, Artificial Sequence
  MKO10111554_B_Rab31
  gRNA
agtgatgtcatagacgatga

SEQ ID NO: 111555 - DNA, 20 bp, Artificial Sequence
  MKO10111555_B_Rab31
  gRNA
atgaccaaaaccgtgccttg

SEQ ID NO: 111556 - DNA, 20 bp, Artificial Sequence
  MKO10111556_B_Rab32
  gRNA
tcctagtgaagaaatcgacc

SEQ ID NO: 111557 - DNA, 20 bp, Artificial Sequence
  MKO10111557_B_Rab32
  gRNA
catgactcgagtatactata

SEQ ID NO: 111558 - DNA, 20 bp, Artificial Sequence
  MKO10111558_B_Rab32
  gRNA
tctctaggacaggaacggtt

SEQ ID NO: 111559 - DNA, 20 bp, Artificial Sequence
  MKO10111559_B_Rab33a
  gRNA
cttggagctcgactcatcga

SEQ ID NO: 111560 - DNA, 20 bp, Artificial Sequence
  MKO10111560_B_Rab33a
  gRNA
gagaagaccgtggaaatcga

SEQ ID NO: 111561 - DNA, 20 bp, Artificial Sequence
  MKO10111561_B_Rab33a
  gRNA
tcttgtaccgtgatgccgag

SEQ ID NO: 111562 - DNA, 20 bp, Artificial Sequence
  MKO10111562_B_Rab33b
  gRNA
gcatggtccagcactactac

SEQ ID NO: 111563 - DNA, 20 bp, Artificial Sequence
  MKO10111563_B_Rab33b
  gRNA
tattgatggagagcgcatca

SEQ ID NO: 111564 - DNA, 20 bp, Artificial Sequence
  MKO10111564_B_Rab33b
  gRNA
gaacgacatacctcgaattc

SEQ ID NO: 111565 - DNA, 20 bp, Artificial Sequence
  MKO10111565_B_Rab34
  gRNA
agccttgtaattcttatcga

SEQ ID NO: 111566 - DNA, 20 bp, Artificial Sequence
  MKO10111566_B_Rab34
  gRNA
tcttccagttgggacacggc

SEQ ID NO: 111567 - DNA, 20 bp, Artificial Sequence
  MKO10111567_B_Rab34
  gRNA
catctcaaaatccactccga

SEQ ID NO: 111568 - DNA, 20 bp, Artificial Sequence
  MKO10111568_B_Rab35
  gRNA
gtctctaccaccttccgctc

SEQ ID NO: 111569 - DNA, 20 bp, Artificial Sequence
  MKO10111569_B_Rab35
  gRNA
ggcagctacatcaccacaat

SEQ ID NO: 111570 - DNA, 20 bp, Artificial Sequence
  MKO10111570_B_Rab35
  gRNA
ttccacattgacgttctcct

SEQ ID NO: 111571 - DNA, 20 bp, Artificial Sequence
  MKO10111571_B_Rab36
  gRNA
atcgagcgctttgagatcgc

SEQ ID NO: 111572 - DNA, 20 bp, Artificial Sequence
  MKO10111572_B_Rab36
  gRNA
cttcctgtagtggtacacgc

SEQ ID NO: 111573 - DNA, 20 bp, Artificial Sequence
  MKO10111573_B_Rab36
  gRNA
attgcgtctgcctactaccg

SEQ ID NO: 111574 - DNA, 20 bp, Artificial Sequence
  MKO10111574_B_Rab37
  gRNA
taccctgatgttgtcaaaag

SEQ ID NO: 111575 - DNA, 20 bp, Artificial Sequence
  MKO10111575_B_Rab37
  gRNA
tggtgccagggtgaagcttc

SEQ ID NO: 111576 - DNA, 20 bp, Artificial Sequence
  MKO10111576_B_Rab37
  gRNA
tcagaataaagtggtgacag

SEQ ID NO: 111577 - DNA, 20 bp, Artificial Sequence
  MKO10111577_B_Rab38
  gRNA
tcaaagttaacgctccctaa

SEQ ID NO: 111578 - DNA, 20 bp, Artificial Sequence
  MKO10111578_B_Rab38
  gRNA
tgcaaggagcatggcttcgt

SEQ ID NO: 111579 - DNA, 20 bp, Artificial Sequence
  MKO10111579_B_Rab38
  gRNA
cctcctagagtctatagaac

SEQ ID NO: 111580 - DNA, 20 bp, Artificial Sequence
  MKO10111580_B_Rab39b
  gRNA
agcccgagatgccattaatg

SEQ ID NO: 111581 - DNA, 20 bp, Artificial Sequence
  MKO10111581_B_Rab39b
  gRNA
cctgatccgccgcttcaccg

SEQ ID NO: 111582 - DNA, 20 bp, Artificial Sequence
  MKO10111582_B_Rab39b
  gRNA
aatcgccgatgacaatgagc

SEQ ID NO: 111583 - DNA, 20 bp, Artificial Sequence
  MKO10111583_B_Rab39
  gRNA
tgacctggcttcgcaacgcc

SEQ ID NO: 111584 - DNA, 20 bp, Artificial Sequence
  MKO10111584_B_Rab39
  gRNA
cagttccgccttattgtgat

SEQ ID NO: 111585 - DNA, 20 bp, Artificial Sequence
  MKO10111585_B_Rab39
  gRNA
cccgcctgcgaccccacagt

SEQ ID NO: 111586 - DNA, 20 bp, Artificial Sequence
  MKO10111586_B_Rab3a
  gRNA
agtcatctgcgtagcggaag

SEQ ID NO: 111587 - DNA, 20 bp, Artificial Sequence
  MKO10111587_B_Rab3a
  gRNA
ctcagagcgtggccggcagc

SEQ ID NO: 111588 - DNA, 20 bp, Artificial Sequence
  MKO10111588_B_Rab3a
  gRNA
ctcagatcaaaacttactcg

SEQ ID NO: 111589 - DNA, 20 bp, Artificial Sequence
  MKO10111589_B_Rab3b
  gRNA
aatgacctgtgcgttgtccc

SEQ ID NO: 111590 - DNA, 20 bp, Artificial Sequence
  MKO10111590_B_Rab3b
  gRNA
ctcagattaagacctactcc

SEQ ID NO: 111591 - DNA, 20 bp, Artificial Sequence
  MKO10111591_B_Rab3b
  gRNA
tgaaggtgtcatcagcatag

SEQ ID NO: 111592 - DNA, 20 bp, Artificial Sequence
  MKO10111592_B_Rab3c
  gRNA
ccttcaacgctgtacaagat

SEQ ID NO: 111593 - DNA, 20 bp, Artificial Sequence
  MKO10111593_B_Rab3c
  gRNA
accgagagaggccagcgctt

SEQ ID NO: 111594 - DNA, 20 bp, Artificial Sequence
  MKO10111594_B_Rab3c
  gRNA
gaccgacccagccatcacag

SEQ ID NO: 111595 - DNA, 20 bp, Artificial Sequence
  MKO10111595_B_Rab3d
  gRNA
tgaaggagtcatcggcatag

SEQ ID NO: 111596 - DNA, 20 bp, Artificial Sequence
  MKO10111596_B_Rab3d
  gRNA
ggtcacacttgttccccacg

SEQ ID NO: 111597 - DNA, 20 bp, Artificial Sequence
  MKO10111597_B_Rab3d
  gRNA
tgtcacagatgatgtccacc

SEQ ID NO: 111598 - DNA, 20 bp, Artificial Sequence
  MKO10111598_B_Rab3gap1
  gRNA
attcaagacttcttcaactt

SEQ ID NO: 111599 - DNA, 20 bp, Artificial Sequence
  MKO10111599_B_Rab3gap1
  gRNA
aaatttcctttgctgacttc

SEQ ID NO: 111600 - DNA, 20 bp, Artificial Sequence
  MKO10111600_B_Rab3gap1
  gRNA
atgcagggtatatttacttc

SEQ ID NO: 111601 - DNA, 20 bp, Artificial Sequence
  MKO10111601_B_Rab3gap2
  gRNA
gagcggctccgtaagtgcag

SEQ ID NO: 111602 - DNA, 20 bp, Artificial Sequence
  MKO10111602_B_Rab3gap2
  gRNA
gtacttacgcactaggaatg

SEQ ID NO: 111603 - DNA, 20 bp, Artificial Sequence
  MKO10111603_B_Rab3gap2
  gRNA
ctctaggtaaaacatcaagc

SEQ ID NO: 111604 - DNA, 20 bp, Artificial Sequence
  MKO10111604_B_Rab3il1
  gRNA
cagccaaccccaacaagacg

SEQ ID NO: 111605 - DNA, 20 bp, Artificial Sequence
  MKO10111605_B_Rab3il1
  gRNA
ttgcaaagtacgtgcacagc

SEQ ID NO: 111606 - DNA, 20 bp, Artificial Sequence
  MKO10111606_B_Rab3il1
  gRNA
cgatgtcgcctgcttcatgt

SEQ ID NO: 111607 - DNA, 20 bp, Artificial Sequence
  MKO10111607_B_Rab3ip
  gRNA
gccgccagaggctcctgcgt

SEQ ID NO: 111608 - DNA, 20 bp, Artificial Sequence
  MKO10111608_B_Rab3ip
  gRNA
aggacacgttctgtccatcg

SEQ ID NO: 111609 - DNA, 20 bp, Artificial Sequence
  MKO10111609_B_Rab3ip
  gRNA
tgtataatgagttcagatct

SEQ ID NO: 111610 - DNA, 20 bp, Artificial Sequence
  MKO10111610_B_Rab40b
  gRNA
cctttgatggcattaatcga

SEQ ID NO: 111611 - DNA, 20 bp, Artificial Sequence
  MKO10111611_B_Rab40b
  gRNA
acaaaatctcccctgccccg

SEQ ID NO: 111612 - DNA, 20 bp, Artificial Sequence
  MKO10111612_B_Rab40b
  gRNA
acgaccaccatcctgctaga

SEQ ID NO: 111613 - DNA, 20 bp, Artificial Sequence
  MKO10111613_B_Rab40c
  gRNA
tgtacgacatcaccaaccgt

SEQ ID NO: 111614 - DNA, 20 bp, Artificial Sequence
  MKO10111614_B_Rab40c
  gRNA
cctttgatggcattgaccgg

SEQ ID NO: 111615 - DNA, 20 bp, Artificial Sequence
  MKO10111615_B_Rab40c
  gRNA
tacctgtgcaccccttgagt

SEQ ID NO: 111616 - DNA, 20 bp, Artificial Sequence
  MKO10111616_B_Rab42
  gRNA
tgtcaccagcgccatcgaac

SEQ ID NO: 111617 - DNA, 20 bp, Artificial Sequence
  MKO10111617_B_Rab42
  gRNA
cgcgcgctgcaactacccgc

SEQ ID NO: 111618 - DNA, 20 bp, Artificial Sequence
  MKO10111618_B_Rab42
  gRNA
ccggatcccgaacccactgt

SEQ ID NO: 111619 - DNA, 20 bp, Artificial Sequence
  MKO10111619_B_Rab43
  gRNA
tgccatcgagacctccgcaa

SEQ ID NO: 111620 - DNA, 20 bp, Artificial Sequence
  MKO10111620_B_Rab43
  gRNA
agtcagaccttgccgatttc

SEQ ID NO: 111621 - DNA, 20 bp, Artificial Sequence
  MKO10111621_B_Rab43
  gRNA
ctcacatcctcgatccagtg

SEQ ID NO: 111622 - DNA, 20 bp, Artificial Sequence
  MKO10111622_B_Rab44
  gRNA
aaaccttcgccctgcaactg

SEQ ID NO: 111623 - DNA, 20 bp, Artificial Sequence
  MKO10111623_B_Rab44
  gRNA
caaaagcgtcatgatgtagc

SEQ ID NO: 111624 - DNA, 20 bp, Artificial Sequence
  MKO10111624_B_Rab44
  gRNA
gaggctgagcgggacctagc

SEQ ID NO: 111625 - DNA, 20 bp, Artificial Sequence
  MKO10111625_B_Rab4a
  gRNA
gatgactcaaatcataccat

SEQ ID NO: 111626 - DNA, 20 bp, Artificial Sequence
  MKO10111626_B_Rab4a
  gRNA
gtgacgagaagctactacag

SEQ ID NO: 111627 - DNA, 20 bp, Artificial Sequence
  MKO10111627_B_Rab4a
  gRNA
tccttgtctatgacatcacc

SEQ ID NO: 111628 - DNA, 20 bp, Artificial Sequence
  MKO10111628_B_Rab4b
  gRNA
agttattaccgaggggcagc

SEQ ID NO: 111629 - DNA, 20 bp, Artificial Sequence
  MKO10111629_B_Rab4b
  gRNA
tgacctcacgctcgggatcc

SEQ ID NO: 111630 - DNA, 20 bp, Artificial Sequence
  MKO10111630_B_Rab4b
  gRNA
acagaggatgaccacgatgt

SEQ ID NO: 111631 - DNA, 20 bp, Artificial Sequence
  MKO10111631_B_Rab5a
  gRNA
gacaaagctatcacaatatt

SEQ ID NO: 111632 - DNA, 20 bp, Artificial Sequence
  MKO10111632_B_Rab5a
  gRNA
gcaaactcagccagaggacg

SEQ ID NO: 111633 - DNA, 20 bp, Artificial Sequence
  MKO10111633_B_Rab5a
  gRNA
aagaatgaaccacagaatcc

SEQ ID NO: 111634 - DNA, 20 bp, Artificial Sequence
  MKO10111634_B_Rab5b
  gRNA
ccctagcattgttattgcct

SEQ ID NO: 111635 - DNA, 20 bp, Artificial Sequence
  MKO10111635_B_Rab5b
  gRNA
tgttgtgtcatctaaacaca

SEQ ID NO: 111636 - DNA, 20 bp, Artificial Sequence
  MKO10111636_B_Rab5b
  gRNA
caacagtcaagtttgagatc

SEQ ID NO: 111637 - DNA, 20 bp, Artificial Sequence
  MKO10111637_B_Rab5c
  gRNA
ggggctccgggccgaaccag

SEQ ID NO: 111638 - DNA, 20 bp, Artificial Sequence
  MKO10111638_B_Rab5c
  gRNA
tgtctgcttagacgatacaa

SEQ ID NO: 111639 - DNA, 20 bp, Artificial Sequence
  MKO10111639_B_Rab5c
  gRNA
ccggagccccagccgcattc

SEQ ID NO: 111640 - DNA, 20 bp, Artificial Sequence
  MKO10111640_B_Rab6a
  gRNA
gatgtcatcatcatgctagt

SEQ ID NO: 111641 - DNA, 20 bp, Artificial Sequence
  MKO10111641_B_Rab6a
  gRNA
cttatcaaaaacaatgtact

SEQ ID NO: 111642 - DNA, 20 bp, Artificial Sequence
  MKO10111642_B_Rab6a
  gRNA
aaacagatcttgctgataag

SEQ ID NO: 111643 - DNA, 20 bp, Artificial Sequence
  MKO10111643_B_Rab6b
  gRNA
ttgatgacgtcaggacggag

SEQ ID NO: 111644 - DNA, 20 bp, Artificial Sequence
  MKO10111644_B_Rab6b
  gRNA
cgtacggtcttccaagtaca

SEQ ID NO: 111645 - DNA, 20 bp, Artificial Sequence
  MKO10111645_B_Rab6b
  gRNA
tgacgtgatcatcatgcttg

SEQ ID NO: 111646 - DNA, 20 bp, Artificial Sequence
  MKO10111646_B_Rab7l1
  gRNA
ggagattgatgtagttccct

SEQ ID NO: 111647 - DNA, 20 bp, Artificial Sequence
  MKO10111647_B_Rab7l1
  gRNA
gtcagagtgatctgtcccct

SEQ ID NO: 111648 - DNA, 20 bp, Artificial Sequence
  MKO10111648_B_Rab7l1
  gRNA
ccatctctgagtcagaccac

SEQ ID NO: 111649 - DNA, 20 bp, Artificial Sequence
  MKO10111649_B_Rab7
  gRNA
tgaacttcttgttcacatac

SEQ ID NO: 111650 - DNA, 20 bp, Artificial Sequence
  MKO10111650_B_Rab7
  gRNA
tcctatccaggaaacagaag

SEQ ID NO: 111651 - DNA, 20 bp, Artificial Sequence
  MKO10111651_B_Rab7
  gRNA
caagaacggttccagtctct

SEQ ID NO: 111652 - DNA, 20 bp, Artificial Sequence
  MKO10111652_B_Rab8a
  gRNA
cctcttgccatcgagctcta

SEQ ID NO: 111653 - DNA, 20 bp, Artificial Sequence
  MKO10111653_B_Rab8a
  gRNA
ccatagagctcgatggcaag

SEQ ID NO: 111654 - DNA, 20 bp, Artificial Sequence
  MKO10111654_B_Rab8a
  gRNA
caatgttccgaatccaattc

SEQ ID NO: 111655 - DNA, 20 bp, Artificial Sequence
  MKO10111655_B_Rab8b
  gRNA
agaaaattaaacttcagata

SEQ ID NO: 111656 - DNA, 20 bp, Artificial Sequence
  MKO10111656_B_Rab8b
  gRNA
agtatgctgtcgtaattgtt

SEQ ID NO: 111657 - DNA, 20 bp, Artificial Sequence
  MKO10111657_B_Rab8b
  gRNA
attacgacagcatactatag

SEQ ID NO: 111658 - DNA, 20 bp, Artificial Sequence
  MKO10111658_B_Rab9b
  gRNA
cgaacttgttggttacataa

SEQ ID NO: 111659 - DNA, 20 bp, Artificial Sequence
  MKO10111659_B_Rab9b
  gRNA
gccttagaacaccattctac

SEQ ID NO: 111660 - DNA, 20 bp, Artificial Sequence
  MKO10111660_B_Rab9b
  gRNA
cccagatcatttcccctttg

SEQ ID NO: 111661 - DNA, 20 bp, Artificial Sequence
  MKO10111661_B_Rab9
  gRNA
tcttcgaactgcctcctcaa

SEQ ID NO: 111662 - DNA, 20 bp, Artificial Sequence
  MKO10111662_B_Rab9
  gRNA
cttgttgcccaaaatcacaa

SEQ ID NO: 111663 - DNA, 20 bp, Artificial Sequence
  MKO10111663_B_Rab9
  gRNA
cagtcagaaccccggtaaaa

SEQ ID NO: 111664 - DNA, 20 bp, Artificial Sequence
  MKO10111664_B_Rabac1
  gRNA
tgcagctcctcgccatctgc

SEQ ID NO: 111665 - DNA, 20 bp, Artificial Sequence
  MKO10111665_B_Rabac1
  gRNA
cagtctaagcttgtactctt

SEQ ID NO: 111666 - DNA, 20 bp, Artificial Sequence
  MKO10111666_B_Rabac1
  gRNA
cccagcacatcagtatgccc

SEQ ID NO: 111667 - DNA, 20 bp, Artificial Sequence
  MKO10111667_B_Rabep1
  gRNA
atgagcatcagtttcacctg

SEQ ID NO: 111668 - DNA, 20 bp, Artificial Sequence
  MKO10111668_B_Rabep1
  gRNA
gaaactgatgctcatagtca

SEQ ID NO: 111669 - DNA, 20 bp, Artificial Sequence
  MKO10111669_B_Rabep1
  gRNA
agctgcaatttccttctcca

SEQ ID NO: 111670 - DNA, 20 bp, Artificial Sequence
  MKO10111670_B_Rabep2
  gRNA
gccggcagtgcctccctacg

SEQ ID NO: 111671 - DNA, 20 bp, Artificial Sequence
  MKO10111671_B_Rabep2
  gRNA
gcaggagattaccgagctga

SEQ ID NO: 111672 - DNA, 20 bp, Artificial Sequence
  MKO10111672_B_Rabep2
  gRNA
ccagatcgcagccctgaaac

SEQ ID NO: 111673 - DNA, 20 bp, Artificial Sequence
  MKO10111673_B_Rabepk
  gRNA
catgctcgtaccgaggcaag

SEQ ID NO: 111674 - DNA, 20 bp, Artificial Sequence
  MKO10111674_B_Rabepk
  gRNA
gacaggccctgccctcgagt

SEQ ID NO: 111675 - DNA, 20 bp, Artificial Sequence
  MKO10111675_B_Rabepk
  gRNA
gacagtttcgatttcctgac

SEQ ID NO: 111676 - DNA, 20 bp, Artificial Sequence
  MKO10111676_B_Rabgap1l
  gRNA
ggtctacctgttgattgcca

SEQ ID NO: 111677 - DNA, 20 bp, Artificial Sequence
  MKO10111677_B_Rabgap1l
  gRNA
cataccttgtatctatccat

SEQ ID NO: 111678 - DNA, 20 bp, Artificial Sequence
  MKO10111678_B_Rabgap1l
  gRNA
ggacccaatggatagataca

SEQ ID NO: 111679 - DNA, 20 bp, Artificial Sequence
  MKO10111679_B_Rabgap1
  gRNA
tgatgagaagacgggactca

SEQ ID NO: 111680 - DNA, 20 bp, Artificial Sequence
  MKO10111680_B_Rabgap1
  gRNA
acactatcctcatcagccac

SEQ ID NO: 111681 - DNA, 20 bp, Artificial Sequence
  MKO10111681_B_Rabgap1
  gRNA
tcactcccattatttgtaga

SEQ ID NO: 111682 - DNA, 20 bp, Artificial Sequence
  MKO10111682_B_Rabgef1
  gRNA
acccttcttggatccagctc

SEQ ID NO: 111683 - DNA, 20 bp, Artificial Sequence
  MKO10111683_B_Rabgef1
  gRNA
gaatttcagacttcagcggg

SEQ ID NO: 111684 - DNA, 20 bp, Artificial Sequence
  MKO10111684_B_Rabgef1
  gRNA
caacatattacctttcccac

SEQ ID NO: 111685 - DNA, 20 bp, Artificial Sequence
  MKO10111685_B_Rabggta
  gRNA
ctggtagcatgggcgcctga

SEQ ID NO: 111686 - DNA, 20 bp, Artificial Sequence
  MKO10111686_B_Rabggta
  gRNA
ctgttcccgctctagccttt

SEQ ID NO: 111687 - DNA, 20 bp, Artificial Sequence
  MKO10111687_B_Rabggta
  gRNA
ataatgccaggaagaatagt

SEQ ID NO: 111688 - DNA, 20 bp, Artificial Sequence
  MKO10111688_B_Rabggtb
  gRNA
tgcgcctgacaccctgttgc

SEQ ID NO: 111689 - DNA, 20 bp, Artificial Sequence
  MKO10111689_B_Rabggtb
  gRNA
gccgattatattgcttccta

SEQ ID NO: 111690 - DNA, 20 bp, Artificial Sequence
  MKO10111690_B_Rabggtb
  gRNA
accccaaatgtctccagcaa

SEQ ID NO: 111691 - DNA, 20 bp, Artificial Sequence
  MKO10111691_B_Rabif
  gRNA
accatcaggattgctgccgt

SEQ ID NO: 111692 - DNA, 20 bp, Artificial Sequence
  MKO10111692_B_Rabif
  gRNA
acagcaccgccttccggttc

SEQ ID NO: 111693 - DNA, 20 bp, Artificial Sequence
  MKO10111693_B_Rabif
  gRNA
gagctcgttctgcagctcgc

SEQ ID NO: 111694 - DNA, 20 bp, Artificial Sequence
  MKO10111694_B_Rabl2
  gRNA
tgatgcaggcgtgagccttg

SEQ ID NO: 111695 - DNA, 20 bp, Artificial Sequence
  MKO10111695_B_Rabl2
  gRNA
agtaggaagcatgcatgctc

SEQ ID NO: 111696 - DNA, 20 bp, Artificial Sequence
  MKO10111696_B_Rabl2
  gRNA
atacagagtcagagcatatg

SEQ ID NO: 111697 - DNA, 20 bp, Artificial Sequence
  MKO10111697_B_Rabl3
  gRNA
aatcgggatgcagttccaac

SEQ ID NO: 111698 - DNA, 20 bp, Artificial Sequence
  MKO10111698_B_Rabl3
  gRNA
cagcattgaagtcctcagcc

SEQ ID NO: 111699 - DNA, 20 bp, Artificial Sequence
  MKO10111699_B_Rabl3
  gRNA
gagcagcccacagtccatga

SEQ ID NO: 111700 - DNA, 20 bp, Artificial Sequence
  MKO10111700_B_Rabl5
  gRNA
tgatgatgagcatctcctcg

SEQ ID NO: 111701 - DNA, 20 bp, Artificial Sequence
  MKO10111701_B_Rabl5
  gRNA
acgtcaggtttgagtcctgt

SEQ ID NO: 111702 - DNA, 20 bp, Artificial Sequence
  MKO10111702_B_Rabl5
  gRNA
gctcacctcacaccttgtgt

SEQ ID NO: 111703 - DNA, 20 bp, Artificial Sequence
  MKO10111703_B_Rabl6
  gRNA
taaggaaagtgtaaaaaacg

SEQ ID NO: 111704 - DNA, 20 bp, Artificial Sequence
  MKO10111704_B_Rabl6
  gRNA
ggtgacctggatctcctgtg

SEQ ID NO: 111705 - DNA, 20 bp, Artificial Sequence
  MKO10111705_B_Rabl6
  gRNA
gaagacggaaaatgaccccc

SEQ ID NO: 111706 - DNA, 20 bp, Artificial Sequence
  MKO10111706_B_Rac1
  gRNA
atttgaaaatgtccgtgcaa

SEQ ID NO: 111707 - DNA, 20 bp, Artificial Sequence
  MKO10111707_B_Rac1
  gRNA
acggtggggatgtactctcc

SEQ ID NO: 111708 - DNA, 20 bp, Artificial Sequence
  MKO10111708_B_Rac1
  gRNA
tggtcgtgtaactgatgagc

SEQ ID NO: 111709 - DNA, 20 bp, Artificial Sequence
  MKO10111709_B_Rac2
  gRNA
gctgtgggataccgcaggtc

SEQ ID NO: 111710 - DNA, 20 bp, Artificial Sequence
  MKO10111710_B_Rac2
  gRNA
gagaagacacgtcttgccca

SEQ ID NO: 111711 - DNA, 20 bp, Artificial Sequence
  MKO10111711_B_Rac2
  gRNA
cttggcacggacattctcat

SEQ ID NO: 111712 - DNA, 20 bp, Artificial Sequence
  MKO10111712_B_Rac3
  gRNA
gctggacctccgtgatgaca

SEQ ID NO: 111713 - DNA, 20 bp, Artificial Sequence
  MKO10111713_B_Rac3
  gRNA
tggtcgtgtagctgatcagc

SEQ ID NO: 111714 - DNA, 20 bp, Artificial Sequence
  MKO10111714_B_Rac3
  gRNA
actgtggggatatattctcc

SEQ ID NO: 111715 - DNA, 20 bp, Artificial Sequence
  MKO10111715_B_Racgap1
  gRNA
agtcccccacctattgttgc

SEQ ID NO: 111716 - DNA, 20 bp, Artificial Sequence
  MKO10111716_B_Racgap1
  gRNA
ctgtcaacgattgatgaatc

SEQ ID NO: 111717 - DNA, 20 bp, Artificial Sequence
  MKO10111717_B_Racgap1
  gRNA
acaggactgggattcttctt

SEQ ID NO: 111718 - DNA, 20 bp, Artificial Sequence
  MKO10111718_B_Rad17
  gRNA
ttgggatccaagtacaagaa

SEQ ID NO: 111719 - DNA, 20 bp, Artificial Sequence
  MKO10111719_B_Rad17
  gRNA
tgaagactgctatctgagat

SEQ ID NO: 111720 - DNA, 20 bp, Artificial Sequence
  MKO10111720_B_Rad17
  gRNA
aactgataagaagatcattc

SEQ ID NO: 111721 - DNA, 20 bp, Artificial Sequence
  MKO10111721_B_Rad18
  gRNA
tcagtgcccaacttgttgcg

SEQ ID NO: 111722 - DNA, 20 bp, Artificial Sequence
  MKO10111722_B_Rad18
  gRNA
atagatgacttgctgcgctg

SEQ ID NO: 111723 - DNA, 20 bp, Artificial Sequence
  MKO10111723_B_Rad18
  gRNA
accttcatcaccgccaaccc

SEQ ID NO: 111724 - DNA, 20 bp, Artificial Sequence
  MKO10111724_B_Rad1
  gRNA
ggtctgcaaaattaccactc

SEQ ID NO: 111725 - DNA, 20 bp, Artificial Sequence
  MKO10111725_B_Rad1
  gRNA
taaagctagtgcctttgtag

SEQ ID NO: 111726 - DNA, 20 bp, Artificial Sequence
  MKO10111726_B_Rad1
  gRNA
aactataggttgtctacttt

SEQ ID NO: 111727 - DNA, 20 bp, Artificial Sequence
  MKO10111727_B_Rad21l
  gRNA
atgaagatgacatttcgccc

SEQ ID NO: 111728 - DNA, 20 bp, Artificial Sequence
  MKO10111728_B_Rad21l
  gRNA
tcagaaccaaagtagaccag

SEQ ID NO: 111729 - DNA, 20 bp, Artificial Sequence
  MKO10111729_B_Rad21l
  gRNA
tctcaccaaagctcccagct

SEQ ID NO: 111730 - DNA, 20 bp, Artificial Sequence
  MKO10111730_B_Rad21
  gRNA
atgtttaggtgacttcggaa

SEQ ID NO: 111731 - DNA, 20 bp, Artificial Sequence
  MKO10111731_B_Rad21
  gRNA
tcaaaatcgtggaattcctc

SEQ ID NO: 111732 - DNA, 20 bp, Artificial Sequence
  MKO10111732_B_Rad21
  gRNA
ctcaggtgaagatggcgctg

SEQ ID NO: 111733 - DNA, 20 bp, Artificial Sequence
  MKO10111733_B_Rad23a
  gRNA
gagtgacgatgttcccatca

SEQ ID NO: 111734 - DNA, 20 bp, Artificial Sequence
  MKO10111734_B_Rad23a
  gRNA
tcgcccgctgctacctgaag

SEQ ID NO: 111735 - DNA, 20 bp, Artificial Sequence
  MKO10111735_B_Rad23a
  gRNA
gaagacgcagcttccacatt

SEQ ID NO: 111736 - DNA, 20 bp, Artificial Sequence
  MKO10111736_B_Rad23b
  gRNA
tcttctgaacccgcacctgc

SEQ ID NO: 111737 - DNA, 20 bp, Artificial Sequence
  MKO10111737_B_Rad23b
  gRNA
gtacaccaggagattcttcc

SEQ ID NO: 111738 - DNA, 20 bp, Artificial Sequence
  MKO10111738_B_Rad23b
  gRNA
gaagatgcaacaagtgccct

SEQ ID NO: 111739 - DNA, 20 bp, Artificial Sequence
  MKO10111739_B_Rad50
  gRNA
gtcaccaagaagactccaac

SEQ ID NO: 111740 - DNA, 20 bp, Artificial Sequence
  MKO10111740_B_Rad50
  gRNA
tctgtcgatttctgcacatt

SEQ ID NO: 111741 - DNA, 20 bp, Artificial Sequence
  MKO10111741_B_Rad50
  gRNA
tctagtaatgactccttcca

SEQ ID NO: 111742 - DNA, 20 bp, Artificial Sequence
  MKO10111742_B_Rad51ap1
  gRNA
aaacttacctacatcatcac

SEQ ID NO: 111743 - DNA, 20 bp, Artificial Sequence
  MKO10111743_B_Rad51ap1
  gRNA
tattcacagtttgaagattc

SEQ ID NO: 111744 - DNA, 20 bp, Artificial Sequence
  MKO10111744_B_Rad51ap1
  gRNA
caacagaaccccctaaaaaa

SEQ ID NO: 111745 - DNA, 20 bp, Artificial Sequence
  MKO10111745_B_Rad51ap2
  gRNA
cttgacaagccaaccctaat

SEQ ID NO: 111746 - DNA, 20 bp, Artificial Sequence
  MKO10111746_B_Rad51ap2
  gRNA
taaaaatgaaactttattga

SEQ ID NO: 111747 - DNA, 20 bp, Artificial Sequence
  MKO10111747_B_Rad51ap2
  gRNA
ggcgggatggccgctgcttg

SEQ ID NO: 111748 - DNA, 20 bp, Artificial Sequence
  MKO10111748_B_Rad51b
  gRNA
gcaaagatgaactctactgc

SEQ ID NO: 111749 - DNA, 20 bp, Artificial Sequence
  MKO10111749_B_Rad51b
  gRNA
ttactgtatgaagaagctcg

SEQ ID NO: 111750 - DNA, 20 bp, Artificial Sequence
  MKO10111750_B_Rad51b
  gRNA
ttgccgagagctcacctgtg

SEQ ID NO: 111751 - DNA, 20 bp, Artificial Sequence
  MKO10111751_B_Rad51c
  gRNA
aaacttctgtcgtcttcatt

SEQ ID NO: 111752 - DNA, 20 bp, Artificial Sequence
  MKO10111752_B_Rad51c
  gRNA
cagcaccttcatctcatagc

SEQ ID NO: 111753 - DNA, 20 bp, Artificial Sequence
  MKO10111753_B_Rad51c
  gRNA
agcagtatttattgatacag

SEQ ID NO: 111754 - DNA, 20 bp, Artificial Sequence
  MKO10111754_B_Rad51d
  gRNA
ggacgccgtcattcctccat

SEQ ID NO: 111755 - DNA, 20 bp, Artificial Sequence
  MKO10111755_B_Rad51d
  gRNA
gcagcagaatgtactgtatg

SEQ ID NO: 111756 - DNA, 20 bp, Artificial Sequence
  MKO10111756_B_Rad51d
  gRNA
ctggacaaactacttgatgc

SEQ ID NO: 111757 - DNA, 20 bp, Artificial Sequence
  MKO10111757_B_Rad51
  gRNA
atgtttggagaattccgaac

SEQ ID NO: 111758 - DNA, 20 bp, Artificial Sequence
  MKO10111758_B_Rad51
  gRNA
caactgagtttcaccagcgc

SEQ ID NO: 111759 - DNA, 20 bp, Artificial Sequence
  MKO10111759_B_Rad51
  gRNA
tgttgcttatgcaccgaaga

SEQ ID NO: 111760 - DNA, 20 bp, Artificial Sequence
  MKO10111760_B_Rad52
  gRNA
gatggttgtcacaccctctg

SEQ ID NO: 111761 - DNA, 20 bp, Artificial Sequence
  MKO10111761_B_Rad52
  gRNA
attgtaaccaaacatctcat

SEQ ID NO: 111762 - DNA, 20 bp, Artificial Sequence
  MKO10111762_B_Rad52
  gRNA
aaccagttacctgtccaaag

SEQ ID NO: 111763 - DNA, 20 bp, Artificial Sequence
  MKO10111763_B_Rad54b
  gRNA
gaacagtcacaaaatgatcc

SEQ ID NO: 111764 - DNA, 20 bp, Artificial Sequence
  MKO10111764_B_Rad54b
  gRNA
ttggatgagactgcccaagc

SEQ ID NO: 111765 - DNA, 20 bp, Artificial Sequence
  MKO10111765_B_Rad54b
  gRNA
tccagatccaaaactgtttc

SEQ ID NO: 111766 - DNA, 20 bp, Artificial Sequence
  MKO10111766_B_Rad54l2
  gRNA
aagatgggcagcggccgccg

SEQ ID NO: 111767 - DNA, 20 bp, Artificial Sequence
  MKO10111767_B_Rad54l2
  gRNA
ggaggatacgctgcacatcg

SEQ ID NO: 111768 - DNA, 20 bp, Artificial Sequence
  MKO10111768_B_Rad54l2
  gRNA
atttgtttggacagtagcag

SEQ ID NO: 111769 - DNA, 20 bp, Artificial Sequence
  MKO10111769_B_Rad54l
  gRNA
ctgctggacttgcgtttctt

SEQ ID NO: 111770 - DNA, 20 bp, Artificial Sequence
  MKO10111770_B_Rad54l
  gRNA
tgttgactgctatccagaca

SEQ ID NO: 111771 - DNA, 20 bp, Artificial Sequence
  MKO10111771_B_Rad54l
  gRNA
tttcctcctagccaactggc

SEQ ID NO: 111772 - DNA, 20 bp, Artificial Sequence
  MKO10111772_B_Rad9a
  gRNA
acttattgcgcaccccagca

SEQ ID NO: 111773 - DNA, 20 bp, Artificial Sequence
  MKO10111773_B_Rad9a
  gRNA
cctgtccgtcttccgctctc

SEQ ID NO: 111774 - DNA, 20 bp, Artificial Sequence
  MKO10111774_B_Rad9a
  gRNA
gggacgagttcacagtccgt

SEQ ID NO: 111775 - DNA, 20 bp, Artificial Sequence
  MKO10111775_B_Rad9b
  gRNA
taagtcagtatcactcatcg

SEQ ID NO: 111776 - DNA, 20 bp, Artificial Sequence
  MKO10111776_B_Rad9b
  gRNA
cacgagtgagcgatgagctg

SEQ ID NO: 111777 - DNA, 20 bp, Artificial Sequence
  MKO10111777_B_Rad9b
  gRNA
taacttacacctttctcgga

SEQ ID NO: 111778 - DNA, 20 bp, Artificial Sequence
  MKO10111778_B_Radil
  gRNA
gctacagcgtatccgtgcca

SEQ ID NO: 111779 - DNA, 20 bp, Artificial Sequence
  MKO10111779_B_Radil
  gRNA
tccatgctctgcacgtacag

SEQ ID NO: 111780 - DNA, 20 bp, Artificial Sequence
  MKO10111780_B_Radil
  gRNA
acctgcagcacatcctgttt

SEQ ID NO: 111781 - DNA, 20 bp, Artificial Sequence
  MKO10111781_B_Rae1
  gRNA
ttcagcccgccaactttacc

SEQ ID NO: 111782 - DNA, 20 bp, Artificial Sequence
  MKO10111782_B_Rae1
  gRNA
gagctgggataagactctga

SEQ ID NO: 111783 - DNA, 20 bp, Artificial Sequence
  MKO10111783_B_Rae1
  gRNA
aagttgcctggtaaagttgg

SEQ ID NO: 111784 - DNA, 20 bp, Artificial Sequence
  MKO10111784_B_Raet1a
  gRNA
ccttctgtgactgctgctcc

SEQ ID NO: 111785 - DNA, 20 bp, Artificial Sequence
  MKO10111785_B_Raet1a
  gRNA
tgtgtatgcagtgtgtgcag

SEQ ID NO: 111786 - DNA, 20 bp, Artificial Sequence
  MKO10111786_B_Raet1a
  gRNA
tcaccaacagctgcgccctc

SEQ ID NO: 111787 - DNA, 20 bp, Artificial Sequence
  MKO10111787_B_Raet1b
  gRNA
acttcacgtcacaccaggga

SEQ ID NO: 111788 - DNA, 20 bp, Artificial Sequence
  MKO10111788_B_Raet1b
  gRNA
tctacacagagattatgagc

SEQ ID NO: 111789 - DNA, 20 bp, Artificial Sequence
  MKO10111789_B_Raet1b
  gRNA
tgctgaggtaggatccttga

SEQ ID NO: 111790 - DNA, 20 bp, Artificial Sequence
  MKO10111790_B_Raet1c
  gRNA
tttgcatttgcgatgtgaag

SEQ ID NO: 111791 - DNA, 20 bp, Artificial Sequence
  MKO10111791_B_Raet1c
  gRNA
tctacacagagaatatgagc

SEQ ID NO: 111792 - DNA, 20 bp, Artificial Sequence
  MKO10111792_B_Raet1c
  gRNA
agtatttcaattgttgcaca

SEQ ID NO: 111793 - DNA, 20 bp, Artificial Sequence
  MKO10111793_B_Raet1d
  gRNA
tctacacagagattatgagc

SEQ ID NO: 111794 - DNA, 20 bp, Artificial Sequence
  MKO10111794_B_Raet1d
  gRNA
caattgaaattcttgataca

SEQ ID NO: 111795 - DNA, 20 bp, Artificial Sequence
  MKO10111795_B_Raet1d
  gRNA
ctgttaattctactgagcta

SEQ ID NO: 111796 - DNA, 20 bp, Artificial Sequence
  MKO10111796_B_Raet1e
  gRNA
tctacacagagaatatgagc

SEQ ID NO: 111797 - DNA, 20 bp, Artificial Sequence
  MKO10111797_B_Raet1e
  gRNA
agtatttcaattgttgcaca

SEQ ID NO: 111798 - DNA, 20 bp, Artificial Sequence
  MKO10111798_B_Raet1e
  gRNA
ctgttaattctactgagcta

SEQ ID NO: 111799 - DNA, 20 bp, Artificial Sequence
  MKO10111799_B_Raf1
  gRNA
gtaagaaagcacgcttagat

SEQ ID NO: 111800 - DNA, 20 bp, Artificial Sequence
  MKO10111800_B_Raf1
  gRNA
ctgtttcccggatgcctgct

SEQ ID NO: 111801 - DNA, 20 bp, Artificial Sequence
  MKO10111801_B_Raf1
  gRNA
ctccagtccacacacatagt

SEQ ID NO: 111802 - DNA, 20 bp, Artificial Sequence
  MKO10111802_B_Rag1
  gRNA
tttcaactcacagcgtttcg

SEQ ID NO: 111803 - DNA, 20 bp, Artificial Sequence
  MKO10111803_B_Rag1
  gRNA
tcccgcgcaagattgcaatg

SEQ ID NO: 111804 - DNA, 20 bp, Artificial Sequence
  MKO10111804_B_Rag1
  gRNA
ctgtgctcaaccacgcgaga

SEQ ID NO: 111805 - DNA, 20 bp, Artificial Sequence
  MKO10111805_B_Rag2
  gRNA
gtgatgttgacatcaatacc

SEQ ID NO: 111806 - DNA, 20 bp, Artificial Sequence
  MKO10111806_B_Rag2
  gRNA
aacatagccttaattcaacc

SEQ ID NO: 111807 - DNA, 20 bp, Artificial Sequence
  MKO10111807_B_Rag2
  gRNA
gcaacatgttatccagtagc

SEQ ID NO: 111808 - DNA, 20 bp, Artificial Sequence
  MKO10111808_B_Rai14
  gRNA
cgccacgaagcatgacagcg

SEQ ID NO: 111809 - DNA, 20 bp, Artificial Sequence
  MKO10111809_B_Rai14
  gRNA
cgtgtgtcaccatgaccttg

SEQ ID NO: 111810 - DNA, 20 bp, Artificial Sequence
  MKO10111810_B_Rai14
  gRNA
aaaacagctttgcattatgc

SEQ ID NO: 111811 - DNA, 20 bp, Artificial Sequence
  MKO10111811_B_Rai1
  gRNA
cacaggttgcacgttcattg

SEQ ID NO: 111812 - DNA, 20 bp, Artificial Sequence
  MKO10111812_B_Rai1
  gRNA
cgccccgggctcgtgacagc

SEQ ID NO: 111813 - DNA, 20 bp, Artificial Sequence
  MKO10111813_B_Rai1
  gRNA
tgctcacctaccttatgttt

SEQ ID NO: 111814 - DNA, 20 bp, Artificial Sequence
  MKO10111814_B_Rai2
  gRNA
agctgataactaccgaggcc

SEQ ID NO: 111815 - DNA, 20 bp, Artificial Sequence
  MKO10111815_B_Rai2
  gRNA
gcgccagagctcaaccccaa

SEQ ID NO: 111816 - DNA, 20 bp, Artificial Sequence
  MKO10111816_B_Rai2
  gRNA
taacagactggagaaccgca

SEQ ID NO: 111817 - DNA, 20 bp, Artificial Sequence
  MKO10111817_B_Rala
  gRNA
ccacatagttaacgttccac

SEQ ID NO: 111818 - DNA, 20 bp, Artificial Sequence
  MKO10111818_B_Rala
  gRNA
gatcgacatcttagatacag

SEQ ID NO: 111819 - DNA, 20 bp, Artificial Sequence
  MKO10111819_B_Rala
  gRNA
cgtacatgaactgcagagtc

SEQ ID NO: 111820 - DNA, 20 bp, Artificial Sequence
  MKO10111820_B_Ralbp1
  gRNA
catgtgtgaaaagcacgtac

SEQ ID NO: 111821 - DNA, 20 bp, Artificial Sequence
  MKO10111821_B_Ralbp1
  gRNA
aaaagcagcctatgaccgag

SEQ ID NO: 111822 - DNA, 20 bp, Artificial Sequence
  MKO10111822_B_Ralbp1
  gRNA
ttgtttacatcgagatctgc

SEQ ID NO: 111823 - DNA, 20 bp, Artificial Sequence
  MKO10111823_B_Ralb
  gRNA
agcacacctgaactcggctg

SEQ ID NO: 111824 - DNA, 20 bp, Artificial Sequence
  MKO10111824_B_Ralb
  gRNA
gcttcagttcatgtatgatg

SEQ ID NO: 111825 - DNA, 20 bp, Artificial Sequence
  MKO10111825_B_Ralb
  gRNA
gggctccctggtacttcaca

SEQ ID NO: 111826 - DNA, 20 bp, Artificial Sequence
  MKO10111826_B_Ralgapa1
  gRNA
ttaaagaaactactgcacac

SEQ ID NO: 111827 - DNA, 20 bp, Artificial Sequence
  MKO10111827_B_Ralgapa1
  gRNA
gaagctagtcttaaacagaa

SEQ ID NO: 111828 - DNA, 20 bp, Artificial Sequence
  MKO10111828_B_Ralgapa1
  gRNA
agtatatatgtgaaaaatgt

SEQ ID NO: 111829 - DNA, 20 bp, Artificial Sequence
  MKO10111829_B_Ralgapa2
  gRNA
gaaatatatctgagaatagt

SEQ ID NO: 111830 - DNA, 20 bp, Artificial Sequence
  MKO10111830_B_Ralgapa2
  gRNA
aacttacttcaaatagaaag

SEQ ID NO: 111831 - DNA, 20 bp, Artificial Sequence
  MKO10111831_B_Ralgapb
  gRNA
gcaaattaatgacatacttc

SEQ ID NO: 111832 - DNA, 20 bp, Artificial Sequence
  MKO10111832_B_Ralgapb
  gRNA
ccaaggagatggtggctaac

SEQ ID NO: 111833 - DNA, 20 bp, Artificial Sequence
  MKO10111833_B_Ralgapb
  gRNA
tgcctaggtaaaatggacca

SEQ ID NO: 111834 - DNA, 20 bp, Artificial Sequence
  MKO10111834_B_Ralgds
  gRNA
tatgtacagctcaacatgcc

SEQ ID NO: 111835 - DNA, 20 bp, Artificial Sequence
  MKO10111835_B_Ralgds
  gRNA
gcgccgcgctcaccttctcc

SEQ ID NO: 111836 - DNA, 20 bp, Artificial Sequence
  MKO10111836_B_Ralgds
  gRNA
tagtggctccttggtgtagc

SEQ ID NO: 111837 - DNA, 20 bp, Artificial Sequence
  MKO10111837_B_Ralgps1
  gRNA
cgttctgaaagtgactcccg

SEQ ID NO: 111838 - DNA, 20 bp, Artificial Sequence
  MKO10111838_B_Ralgps1
  gRNA
gtagagtcagatcacattga

SEQ ID NO: 111839 - DNA, 20 bp, Artificial Sequence
  MKO10111839_B_Ralgps1
  gRNA
ggtacagacctctggctgga

SEQ ID NO: 111840 - DNA, 20 bp, Artificial Sequence
  MKO10111840_B_Ralgps2
  gRNA
ccactatattaagactgcta

SEQ ID NO: 111841 - DNA, 20 bp, Artificial Sequence
  MKO10111841_B_Ralgps2
  gRNA
cttgtgaaagcaactgcatt

SEQ ID NO: 111842 - DNA, 20 bp, Artificial Sequence
  MKO10111842_B_Ralgps2
  gRNA
ggctgaatagctttaaacac

SEQ ID NO: 111843 - DNA, 20 bp, Artificial Sequence
  MKO10111843_B_Ralyl
  gRNA
cttacctgtacagggctgac

SEQ ID NO: 111844 - DNA, 20 bp, Artificial Sequence
  MKO10111844_B_Ralyl
  gRNA
acagagatgatttctacaat

SEQ ID NO: 111845 - DNA, 20 bp, Artificial Sequence
  MKO10111845_B_Ralyl
  gRNA
ggtctcttacttccaggctt

SEQ ID NO: 111846 - DNA, 20 bp, Artificial Sequence
  MKO10111846_B_Raly
  gRNA
cacaggctgtttgattatcg

SEQ ID NO: 111847 - DNA, 20 bp, Artificial Sequence
  MKO10111847_B_Raly
  gRNA
catggcgctcattggcatac

SEQ ID NO: 111848 - DNA, 20 bp, Artificial Sequence
  MKO10111848_B_Raly
  gRNA
gcccaagcctaatagaccca

SEQ ID NO: 111849 - DNA, 20 bp, Artificial Sequence
  MKO10111849_B_Ramp1
  gRNA
gctgtgcctcagccgcttca

SEQ ID NO: 111850 - DNA, 20 bp, Artificial Sequence
  MKO10111850_B_Ramp1
  gRNA
agactattgggaagacgcta

SEQ ID NO: 111851 - DNA, 20 bp, Artificial Sequence
  MKO10111851_B_Ramp1
  gRNA
gctgcaatggcatttcagtt

SEQ ID NO: 111852 - DNA, 20 bp, Artificial Sequence
  MKO10111852_B_Ramp2
  gRNA
cccgttccttgttactcttg

SEQ ID NO: 111853 - DNA, 20 bp, Artificial Sequence
  MKO10111853_B_Ramp2
  gRNA
actccggaagagattggttc

SEQ ID NO: 111854 - DNA, 20 bp, Artificial Sequence
  MKO10111854_B_Ramp2
  gRNA
cagtgggatgagattgattc

SEQ ID NO: 111855 - DNA, 20 bp, Artificial Sequence
  MKO10111855_B_Ramp3
  gRNA
atagccacagtcagcacgac

SEQ ID NO: 111856 - DNA, 20 bp, Artificial Sequence
  MKO10111856_B_Ramp3
  gRNA
agaaggtgcagccgctgtgc

SEQ ID NO: 111857 - DNA, 20 bp, Artificial Sequence
  MKO10111857_B_Ramp3
  gRNA
ccactgttgttgctgctttg

SEQ ID NO: 111858 - DNA, 20 bp, Artificial Sequence
  MKO10111858_B_Ranbp10
  gRNA
ggttgggacaagcattccta

SEQ ID NO: 111859 - DNA, 20 bp, Artificial Sequence
  MKO10111859_B_Ranbp10
  gRNA
gttaacatgaacagactgcc

SEQ ID NO: 111860 - DNA, 20 bp, Artificial Sequence
  MKO10111860_B_Ranbp10
  gRNA
actcaccgggagatctgtga

SEQ ID NO: 111861 - DNA, 20 bp, Artificial Sequence
  MKO10111861_B_Ranbp17
  gRNA
atcctttacctattgaacag

SEQ ID NO: 111862 - DNA, 20 bp, Artificial Sequence
  MKO10111862_B_Ranbp17
  gRNA
atgtctatcctctgttcaat

SEQ ID NO: 111863 - DNA, 20 bp, Artificial Sequence
  MKO10111863_B_Ranbp17
  gRNA
cgatctcactgaaagaatag

SEQ ID NO: 111864 - DNA, 20 bp, Artificial Sequence
  MKO10111864_B_Ranbp1
  gRNA
ctctacacaggacagtcacg

SEQ ID NO: 111865 - DNA, 20 bp, Artificial Sequence
  MKO10111865_B_Ranbp1
  gRNA
ggggcactcgtcagcaaagt

SEQ ID NO: 111866 - DNA, 20 bp, Artificial Sequence
  MKO10111866_B_Ranbp1
  gRNA
ggactcatctgcattctctg

SEQ ID NO: 111867 - DNA, 20 bp, Artificial Sequence
  MKO10111867_B_Ranbp2
  gRNA
caaagctgtagaatgttata

SEQ ID NO: 111868 - DNA, 20 bp, Artificial Sequence
  MKO10111868_B_Ranbp2
  gRNA
tgtaaaaatgatgtgactga

SEQ ID NO: 111869 - DNA, 20 bp, Artificial Sequence
  MKO10111869_B_Ranbp2
  gRNA
aaagaagacccaaaaatctg

SEQ ID NO: 111870 - DNA, 20 bp, Artificial Sequence
  MKO10111870_B_Ranbp3l
  gRNA
tacctacctccttgagactg

SEQ ID NO: 111871 - DNA, 20 bp, Artificial Sequence
  MKO10111871_B_Ranbp3l
  gRNA
caggctctgccgtttcttcc

SEQ ID NO: 111872 - DNA, 20 bp, Artificial Sequence
  MKO10111872_B_Ranbp3l
  gRNA
gagacctgcagaagacagcc

SEQ ID NO: 111873 - DNA, 20 bp, Artificial Sequence
  MKO10111873_B_Ranbp3
  gRNA
ggcagctccagtcccgaagc

SEQ ID NO: 111874 - DNA, 20 bp, Artificial Sequence
  MKO10111874_B_Ranbp3
  gRNA
ctgcactgggtgcctgaccg

SEQ ID NO: 111875 - DNA, 20 bp, Artificial Sequence
  MKO10111875_B_Ranbp3
  gRNA
aagcccccaacactcatcca

SEQ ID NO: 111876 - DNA, 20 bp, Artificial Sequence
  MKO10111876_B_Ranbp6
  gRNA
gcgtgtcgacatttccagtc

SEQ ID NO: 111877 - DNA, 20 bp, Artificial Sequence
  MKO10111877_B_Ranbp6
  gRNA
acgatttggatatcatcaag

SEQ ID NO: 111878 - DNA, 20 bp, Artificial Sequence
  MKO10111878_B_Ranbp6
  gRNA
tagtaacctgcaacgccagc

SEQ ID NO: 111879 - DNA, 20 bp, Artificial Sequence
  MKO10111879_B_Ranbp9
  gRNA
tccattcttcgtgtaaaagc

SEQ ID NO: 111880 - DNA, 20 bp, Artificial Sequence
  MKO10111880_B_Ranbp9
  gRNA
acatcaccagttgtaaaagt

SEQ ID NO: 111881 - DNA, 20 bp, Artificial Sequence
  MKO10111881_B_Ranbp9
  gRNA
tcgaacagatgctgcatctt

SEQ ID NO: 111882 - DNA, 20 bp, Artificial Sequence
  MKO10111882_B_Rangap1
  gRNA
ttcctgcacagcgatgccac

SEQ ID NO: 111883 - DNA, 20 bp, Artificial Sequence
  MKO10111883_B_Rangap1
  gRNA
caccgcaagtccagtgccca

SEQ ID NO: 111884 - DNA, 20 bp, Artificial Sequence
  MKO10111884_B_Rangap1
  gRNA
ttggtccttaccagagctgg

SEQ ID NO: 111885 - DNA, 20 bp, Artificial Sequence
  MKO10111885_B_Rangrf
  gRNA
cagccgcttcgccctgcacg

SEQ ID NO: 111886 - DNA, 20 bp, Artificial Sequence
  MKO10111886_B_Rangrf
  gRNA
ctacctgctgcttgccagaa

SEQ ID NO: 111887 - DNA, 20 bp, Artificial Sequence
  MKO10111887_B_Rangrf
  gRNA
ttggccgggtgcagggggct

SEQ ID NO: 111888 - DNA, 20 bp, Artificial Sequence
  MKO10111888_B_Ran
  gRNA
gtacctgaagattcttcttc

SEQ ID NO: 111889 - DNA, 20 bp, Artificial Sequence
  MKO10111889_B_Ran
  gRNA
gagtttgagaagaagtatgt

SEQ ID NO: 111890 - DNA, 20 bp, Artificial Sequence
  MKO10111890_B_Ran
  gRNA
cttacaagaatgtacctaac

SEQ ID NO: 111891 - DNA, 20 bp, Artificial Sequence
  MKO10111891_B_Rap1a
  gRNA
ctgtaggaatcttctatcgt

SEQ ID NO: 111892 - DNA, 20 bp, Artificial Sequence
  MKO10111892_B_Rap1a
  gRNA
gatagaagattcctacagaa

SEQ ID NO: 111893 - DNA, 20 bp, Artificial Sequence
  MKO10111893_B_Rap1a
  gRNA
aggagcaatttacagcaatg

SEQ ID NO: 111894 - DNA, 20 bp, Artificial Sequence
  MKO10111894_B_Rap1b
  gRNA
ctgtacatgaagaacggaca

SEQ ID NO: 111895 - DNA, 20 bp, Artificial Sequence
  MKO10111895_B_Rap1b
  gRNA
gtcagaacctagcaagacag

SEQ ID NO: 111896 - DNA, 20 bp, Artificial Sequence
  MKO10111896_B_Rap1b
  gRNA
cagactgtacagtttgttca

SEQ ID NO: 111897 - DNA, 20 bp, Artificial Sequence
  MKO10111897_B_Rap1gap2
  gRNA
cactgctcccccgaccatga

SEQ ID NO: 111898 - DNA, 20 bp, Artificial Sequence
  MKO10111898_B_Rap1gap2
  gRNA
gaatcaagcttgaagagcag

SEQ ID NO: 111899 - DNA, 20 bp, Artificial Sequence
  MKO10111899_B_Rap1gap2
  gRNA
cctatcccaccttgttcttc

SEQ ID NO: 111900 - DNA, 20 bp, Artificial Sequence
  MKO10111900_B_Rap1gap
  gRNA
gaactgagtccaccagtaac

SEQ ID NO: 111901 - DNA, 20 bp, Artificial Sequence
  MKO10111901_B_Rap1gap
  gRNA
tctcccttcgacagagtgtg

SEQ ID NO: 111902 - DNA, 20 bp, Artificial Sequence
  MKO10111902_B_Rap1gap
  gRNA
gggtcacttaccttagggta

SEQ ID NO: 111903 - DNA, 20 bp, Artificial Sequence
  MKO10111903_B_Rap1gds1
  gRNA
tgaagataacagctgctgac

SEQ ID NO: 111904 - DNA, 20 bp, Artificial Sequence
  MKO10111904_B_Rap1gds1
  gRNA
ggctacttctgctatgatgt

SEQ ID NO: 111905 - DNA, 20 bp, Artificial Sequence
  MKO10111905_B_Rap1gds1
  gRNA
aaacttactattctgagcca

SEQ ID NO: 111906 - DNA, 20 bp, Artificial Sequence
  MKO10111906_B_Rap2a
  gRNA
agagaagtgtcctccaacga

SEQ ID NO: 111907 - DNA, 20 bp, Artificial Sequence
  MKO10111907_B_Rap2a
  gRNA
cggtcacgaactgcacggtc

SEQ ID NO: 111908 - DNA, 20 bp, Artificial Sequence
  MKO10111908_B_Rap2a
  gRNA
gacgatgcgcgagtacaaag

SEQ ID NO: 111909 - DNA, 20 bp, Artificial Sequence
  MKO10111909_B_Rap2b
  gRNA
aactacgcggcacagcccaa

SEQ ID NO: 111910 - DNA, 20 bp, Artificial Sequence
  MKO10111910_B_Rap2b
  gRNA
acgtgaggtctcctatggcg

SEQ ID NO: 111911 - DNA, 20 bp, Artificial Sequence
  MKO10111911_B_Rap2b
  gRNA
cgcgctcgtaccgcttcacg

SEQ ID NO: 111912 - DNA, 20 bp, Artificial Sequence
  MKO10111912_B_Rap2c
  gRNA
tttgctgacgtttccatgaa

SEQ ID NO: 111913 - DNA, 20 bp, Artificial Sequence
  MKO10111913_B_Rap2c
  gRNA
ctaccgcaaagagatcgaag

SEQ ID NO: 111914 - DNA, 20 bp, Artificial Sequence
  MKO10111914_B_Rap2c
  gRNA
ctcaccgtgcagtttgtcac

SEQ ID NO: 111915 - DNA, 20 bp, Artificial Sequence
  MKO10111915_B_Rapgef1
  gRNA
acctgctttctcgatcttgc

SEQ ID NO: 111916 - DNA, 20 bp, Artificial Sequence
  MKO10111916_B_Rapgef1
  gRNA
aatggtcttaaagtagcgca

SEQ ID NO: 111917 - DNA, 20 bp, Artificial Sequence
  MKO10111917_B_Rapgef1
  gRNA
actcacctgtgctggatccg

SEQ ID NO: 111918 - DNA, 20 bp, Artificial Sequence
  MKO10111918_B_Rapgef2
  gRNA
atttaaggccacggagagcg

SEQ ID NO: 111919 - DNA, 20 bp, Artificial Sequence
  MKO10111919_B_Rapgef2
  gRNA
agtgattctcaatggttccg

SEQ ID NO: 111920 - DNA, 20 bp, Artificial Sequence
  MKO10111920_B_Rapgef2
  gRNA
ctttggtgtttcgcccacca

SEQ ID NO: 111921 - DNA, 20 bp, Artificial Sequence
  MKO10111921_B_Rapgef3
  gRNA
aataccatctgcgactatat

SEQ ID NO: 111922 - DNA, 20 bp, Artificial Sequence
  MKO10111922_B_Rapgef3
  gRNA
gagtcctcgctgttggtaag

SEQ ID NO: 111923 - DNA, 20 bp, Artificial Sequence
  MKO10111923_B_Rapgef3
  gRNA
gacaccacttaccaacagcg

SEQ ID NO: 111924 - DNA, 20 bp, Artificial Sequence
  MKO10111924_B_Rapgef4
  gRNA
agacatcctgtgttcactcg

SEQ ID NO: 111925 - DNA, 20 bp, Artificial Sequence
  MKO10111925_B_Rapgef4
  gRNA
agtaccacctaaagacatac

SEQ ID NO: 111926 - DNA, 20 bp, Artificial Sequence
  MKO10111926_B_Rapgef4
  gRNA
ccctctagggattcctgaca

SEQ ID NO: 111927 - DNA, 20 bp, Artificial Sequence
  MKO10111927_B_Rapgef5
  gRNA
agagctggtcgactggctcc

SEQ ID NO: 111928 - DNA, 20 bp, Artificial Sequence
  MKO10111928_B_Rapgef5
  gRNA
ccttaatgctcttcctgcac

SEQ ID NO: 111929 - DNA, 20 bp, Artificial Sequence
  MKO10111929_B_Rapgef5
  gRNA
cctgagaaggactatgttca

SEQ ID NO: 111930 - DNA, 20 bp, Artificial Sequence
  MKO10111930_B_Rapgef6
  gRNA
tgtacttgtaaaagattcta

SEQ ID NO: 111931 - DNA, 20 bp, Artificial Sequence
  MKO10111931_B_Rapgef6
  gRNA
acctaagctgatgctccctg

SEQ ID NO: 111932 - DNA, 20 bp, Artificial Sequence
  MKO10111932_B_Rapgef6
  gRNA
agaaccttcagaaatgattg

SEQ ID NO: 111933 - DNA, 20 bp, Artificial Sequence
  MKO10111933_B_Rapgefl1
  gRNA
cggagcccctgaatgccact

SEQ ID NO: 111934 - DNA, 20 bp, Artificial Sequence
  MKO10111934_B_Rapgefl1
  gRNA
tctttaccaggacctccgag

SEQ ID NO: 111935 - DNA, 20 bp, Artificial Sequence
  MKO10111935_B_Rapgefl1
  gRNA
actgtatctactaattatga

SEQ ID NO: 111936 - DNA, 20 bp, Artificial Sequence
  MKO10111936_B_Raph1
  gRNA
cttaccattcaagttgtata

SEQ ID NO: 111937 - DNA, 20 bp, Artificial Sequence
  MKO10111937_B_Raph1
  gRNA
tgagaagatccgagttgctc

SEQ ID NO: 111938 - DNA, 20 bp, Artificial Sequence
  MKO10111938_B_Raph1
  gRNA
tccgatgaagagattgacca

SEQ ID NO: 111939 - DNA, 20 bp, Artificial Sequence
  MKO10111939_B_Rapsn
  gRNA
gcagcacgtgcacctgcccg

SEQ ID NO: 111940 - DNA, 20 bp, Artificial Sequence
  MKO10111940_B_Rapsn
  gRNA
tctgctttgccgatatccat

SEQ ID NO: 111941 - DNA, 20 bp, Artificial Sequence
  MKO10111941_B_Rapsn
  gRNA
aaggctggagcctcaaatat

SEQ ID NO: 111942 - DNA, 20 bp, Artificial Sequence
  MKO10111942_B_Rara
  gRNA
cgtcgaaacatttctgcagc

SEQ ID NO: 111943 - DNA, 20 bp, Artificial Sequence
  MKO10111943_B_Rara
  gRNA
ctcagaacaacgagtctccc

SEQ ID NO: 111944 - DNA, 20 bp, Artificial Sequence
  MKO10111944_B_Rara
  gRNA
actgctgctctgggtctcga

SEQ ID NO: 111945 - DNA, 20 bp, Artificial Sequence
  MKO10111945_B_Rarb
  gRNA
aagcagggcttgtacacccg

SEQ ID NO: 111946 - DNA, 20 bp, Artificial Sequence
  MKO10111946_B_Rarb
  gRNA
agaattccagcgctgaccac

SEQ ID NO: 111947 - DNA, 20 bp, Artificial Sequence
  MKO10111947_B_Rarb
  gRNA
ccgtggtgtatttacccagc

SEQ ID NO: 111948 - DNA, 20 bp, Artificial Sequence
  MKO10111948_B_Rarg
  gRNA
cagccttgagcagcgtgatc

SEQ ID NO: 111949 - DNA, 20 bp, Artificial Sequence
  MKO10111949_B_Rarg
  gRNA
gtgatgagttcctctaactg

SEQ ID NO: 111950 - DNA, 20 bp, Artificial Sequence
  MKO10111950_B_Rarg
  gRNA
gaaatcgatgccagtactgc

SEQ ID NO: 111951 - DNA, 20 bp, Artificial Sequence
  MKO10111951_B_Rarres1
  gRNA
acatcacgtatgagctgccg

SEQ ID NO: 111952 - DNA, 20 bp, Artificial Sequence
  MKO10111952_B_Rarres1
  gRNA
agagcaatacaaccccgagc

SEQ ID NO: 111953 - DNA, 20 bp, Artificial Sequence
  MKO10111953_B_Rarres1
  gRNA
tttcaggtcaaccctcaaga

SEQ ID NO: 111954 - DNA, 20 bp, Artificial Sequence
  MKO10111954_B_Rarres2
  gRNA
tttggtttgattgtgcactc

SEQ ID NO: 111955 - DNA, 20 bp, Artificial Sequence
  MKO10111955_B_Rarres2
  gRNA
gcagaccaactgccccaaga

SEQ ID NO: 111956 - DNA, 20 bp, Artificial Sequence
  MKO10111956_B_Rarres2
  gRNA
ccagagaaggcggaaatgcc

SEQ ID NO: 111957 - DNA, 20 bp, Artificial Sequence
  MKO10111957_B_Rars2
  gRNA
attgacttgatcaagctttc

SEQ ID NO: 111958 - DNA, 20 bp, Artificial Sequence
  MKO10111958_B_Rars2
  gRNA
ttgcaacaagttactgaaga

SEQ ID NO: 111959 - DNA, 20 bp, Artificial Sequence
  MKO10111959_B_Rars2
  gRNA
tagacactcaagaccaagcc

SEQ ID NO: 111960 - DNA, 20 bp, Artificial Sequence
  MKO10111960_B_Rars
  gRNA
tctcgtaactgttccaaact

SEQ ID NO: 111961 - DNA, 20 bp, Artificial Sequence
  MKO10111961_B_Rars
  gRNA
gactccattcactaggagac

SEQ ID NO: 111962 - DNA, 20 bp, Artificial Sequence
  MKO10111962_B_Rars
  gRNA
ctaaccagtctcctagtgaa

SEQ ID NO: 111963 - DNA, 20 bp, Artificial Sequence
  MKO10111963_B_Rasa1
  gRNA
tataggattattgctatgtg

SEQ ID NO: 111964 - DNA, 20 bp, Artificial Sequence
  MKO10111964_B_Rasa1
  gRNA
ccttattgttgaagacctag

SEQ ID NO: 111965 - DNA, 20 bp, Artificial Sequence
  MKO10111965_B_Rasa1
  gRNA
taccttatttcatcagtgtc

SEQ ID NO: 111966 - DNA, 20 bp, Artificial Sequence
  MKO10111966_B_Rasa2
  gRNA
acttctgaatttgagtcaat

SEQ ID NO: 111967 - DNA, 20 bp, Artificial Sequence
  MKO10111967_B_Rasa2
  gRNA
cttactgtacaacaagctgc

SEQ ID NO: 111968 - DNA, 20 bp, Artificial Sequence
  MKO10111968_B_Rasa2
  gRNA
gaagacttgtgcagtcatag

SEQ ID NO: 111969 - DNA, 20 bp, Artificial Sequence
  MKO10111969_B_Rasa3
  gRNA
gtaaaagtcctctccgtaaa

SEQ ID NO: 111970 - DNA, 20 bp, Artificial Sequence
  MKO10111970_B_Rasa3
  gRNA
tctgccacaaactcgctgca

SEQ ID NO: 111971 - DNA, 20 bp, Artificial Sequence
  MKO10111971_B_Rasa3
  gRNA
aaattgtcgagaagtcactc

SEQ ID NO: 111972 - DNA, 20 bp, Artificial Sequence
  MKO10111972_B_Rasa4
  gRNA
cgacccctactgcatcgtga

SEQ ID NO: 111973 - DNA, 20 bp, Artificial Sequence
  MKO10111973_B_Rasa4
  gRNA
acgtggggggcaagtgtact

SEQ ID NO: 111974 - DNA, 20 bp, Artificial Sequence
  MKO10111974_B_Rasa4
  gRNA
gtccaccttcacgatgcagt

SEQ ID NO: 111975 - DNA, 20 bp, Artificial Sequence
  MKO10111975_B_Rasal1
  gRNA
gccctgctcacctcgagggt

SEQ ID NO: 111976 - DNA, 20 bp, Artificial Sequence
  MKO10111976_B_Rasal1
  gRNA
ccacctggccttctacgtgc

SEQ ID NO: 111977 - DNA, 20 bp, Artificial Sequence
  MKO10111977_B_Rasal1
  gRNA
ggatccagacgctgaagtac

SEQ ID NO: 111978 - DNA, 20 bp, Artificial Sequence
  MKO10111978_B_Rasal2
  gRNA
cccttcgcaatgcagatgac

SEQ ID NO: 111979 - DNA, 20 bp, Artificial Sequence
  MKO10111979_B_Rasal2
  gRNA
ccatgatgtcgtctcagtat

SEQ ID NO: 111980 - DNA, 20 bp, Artificial Sequence
  MKO10111980_B_Rasal2
  gRNA
cctatactgagacgacatca

SEQ ID NO: 111981 - DNA, 20 bp, Artificial Sequence
  MKO10111981_B_Rasal3
  gRNA
atctgtgcaacgggtagatc

SEQ ID NO: 111982 - DNA, 20 bp, Artificial Sequence
  MKO10111982_B_Rasal3
  gRNA
tacccttctcgaaggaaagc

SEQ ID NO: 111983 - DNA, 20 bp, Artificial Sequence
  MKO10111983_B_Rasal3
  gRNA
gctgccatacccgaacattg

SEQ ID NO: 111984 - DNA, 20 bp, Artificial Sequence
  MKO10111984_B_Rasd1
  gRNA
atcatccgtttcccgccatg

SEQ ID NO: 111985 - DNA, 20 bp, Artificial Sequence
  MKO10111985_B_Rasd1
  gRNA
cgtgaggaagcgcgacacaa

SEQ ID NO: 111986 - DNA, 20 bp, Artificial Sequence
  MKO10111986_B_Rasd1
  gRNA
tgcccactttggatgagccg

SEQ ID NO: 111987 - DNA, 20 bp, Artificial Sequence
  MKO10111987_B_Rasd2
  gRNA
ccagtacacgcccactatcg

SEQ ID NO: 111988 - DNA, 20 bp, Artificial Sequence
  MKO10111988_B_Rasd2
  gRNA
cataagatctccgtgcagta

SEQ ID NO: 111989 - DNA, 20 bp, Artificial Sequence
  MKO10111989_B_Rasd2
  gRNA
cttctgcatgcgtcgcacta

SEQ ID NO: 111990 - DNA, 20 bp, Artificial Sequence
  MKO10111990_B_Rasef
  gRNA
gcaaatccatgatttaacaa

SEQ ID NO: 111991 - DNA, 20 bp, Artificial Sequence
  MKO10111991_B_Rasef
  gRNA
ttccagctcacttagctgaa

SEQ ID NO: 111992 - DNA, 20 bp, Artificial Sequence
  MKO10111992_B_Rasef
  gRNA
ggccattcagctaagtgagc

SEQ ID NO: 111993 - DNA, 20 bp, Artificial Sequence
  MKO10111993_B_Rasgef1a
  gRNA
tcgagtagggcagatctgcc

SEQ ID NO: 111994 - DNA, 20 bp, Artificial Sequence
  MKO10111994_B_Rasgef1a
  gRNA
gcagctgactcacattgaac

SEQ ID NO: 111995 - DNA, 20 bp, Artificial Sequence
  MKO10111995_B_Rasgef1a
  gRNA
ccgccatgaccttctcgtcc

SEQ ID NO: 111996 - DNA, 20 bp, Artificial Sequence
  MKO10111996_B_Rasgef1b
  gRNA
accttagccatgagctcgta

SEQ ID NO: 111997 - DNA, 20 bp, Artificial Sequence
  MKO10111997_B_Rasgef1b
  gRNA
gtgaccaacctcctcgccac

SEQ ID NO: 111998 - DNA, 20 bp, Artificial Sequence
  MKO10111998_B_Rasgef1b
  gRNA
aaacctctaccagtccgcag

SEQ ID NO: 111999 - DNA, 20 bp, Artificial Sequence
  MKO10111999_B_Rasgef1c
  gRNA
ggccaagtgacgccaatttc

SEQ ID NO: 112000 - DNA, 20 bp, Artificial Sequence
  MKO10112000_B_Rasgef1c
  gRNA
ctggtgtaccctgctcccgt

SEQ ID NO: 112001 - DNA, 20 bp, Artificial Sequence
  MKO10112001_B_Rasgef1c
  gRNA
tgggcccgaggagtttgtcc

SEQ ID NO: 112002 - DNA, 20 bp, Artificial Sequence
  MKO10112002_B_Rasgrf1
  gRNA
cgatggccacgtcgtgaccc

SEQ ID NO: 112003 - DNA, 20 bp, Artificial Sequence
  MKO10112003_B_Rasgrf1
  gRNA
cgcagcgttgtcaagtcttc

SEQ ID NO: 112004 - DNA, 20 bp, Artificial Sequence
  MKO10112004_B_Rasgrf1
  gRNA
atcctcggtcctcaactcca

SEQ ID NO: 112005 - DNA, 20 bp, Artificial Sequence
  MKO10112005_B_Rasgrf2
  gRNA
cacctccgctatcggcagcc

SEQ ID NO: 112006 - DNA, 20 bp, Artificial Sequence
  MKO10112006_B_Rasgrf2
  gRNA
ggtactttaccagtgtgcgg

SEQ ID NO: 112007 - DNA, 20 bp, Artificial Sequence
  MKO10112007_B_Rasgrf2
  gRNA
gagaacttgcgacagagacg

SEQ ID NO: 112008 - DNA, 20 bp, Artificial Sequence
  MKO10112008_B_Rasgrp1
  gRNA
gatcacccagttccgaatga

SEQ ID NO: 112009 - DNA, 20 bp, Artificial Sequence
  MKO10112009_B_Rasgrp1
  gRNA
acatttgggtcgtgtcgatg

SEQ ID NO: 112010 - DNA, 20 bp, Artificial Sequence
  MKO10112010_B_Rasgrp1
  gRNA
ccctacatataaggatgccc

SEQ ID NO: 112011 - DNA, 20 bp, Artificial Sequence
  MKO10112011_B_Rasgrp2
  gRNA
ggcagaacatcttacctacc

SEQ ID NO: 112012 - DNA, 20 bp, Artificial Sequence
  MKO10112012_B_Rasgrp2
  gRNA
cctttacctatcagcaatcc

SEQ ID NO: 112013 - DNA, 20 bp, Artificial Sequence
  MKO10112013_B_Rasgrp2
  gRNA
cagtttcgaagccagctgag

SEQ ID NO: 112014 - DNA, 20 bp, Artificial Sequence
  MKO10112014_B_Rasgrp3
  gRNA
cctacgtatcggaatgccag

SEQ ID NO: 112015 - DNA, 20 bp, Artificial Sequence
  MKO10112015_B_Rasgrp3
  gRNA
acacgctagatatgtccatg

SEQ ID NO: 112016 - DNA, 20 bp, Artificial Sequence
  MKO10112016_B_Rasgrp3
  gRNA
ctgcctcttatttgaccatc

SEQ ID NO: 112017 - DNA, 20 bp, Artificial Sequence
  MKO10112017_B_Rasgrp4
  gRNA
ctccccggagcctgacaatc

SEQ ID NO: 112018 - DNA, 20 bp, Artificial Sequence
  MKO10112018_B_Rasgrp4
  gRNA
ggtcatggcgtccatgaatc

SEQ ID NO: 112019 - DNA, 20 bp, Artificial Sequence
  MKO10112019_B_Rasgrp4
  gRNA
acagctacagatctgttact

SEQ ID NO: 112020 - DNA, 20 bp, Artificial Sequence
  MKO10112020_B_Rasip1
  gRNA
gctgcggttcagaccacgag

SEQ ID NO: 112021 - DNA, 20 bp, Artificial Sequence
  MKO10112021_B_Rasip1
  gRNA
gtcaactgatcgaagtctcc

SEQ ID NO: 112022 - DNA, 20 bp, Artificial Sequence
  MKO10112022_B_Rasip1
  gRNA
ccccactgggtccgggggca

SEQ ID NO: 112023 - DNA, 20 bp, Artificial Sequence
  MKO10112023_B_Rasl10a
  gRNA
ccagcccctacgaactagag

SEQ ID NO: 112024 - DNA, 20 bp, Artificial Sequence
  MKO10112024_B_Rasl10a
  gRNA
gtccgaagcgcagccgctga

SEQ ID NO: 112025 - DNA, 20 bp, Artificial Sequence
  MKO10112025_B_Rasl10a
  gRNA
gatgtcgtagaccagcacaa

SEQ ID NO: 112026 - DNA, 20 bp, Artificial Sequence
  MKO10112026_B_Rasl10b
  gRNA
tgaactcgttgtataagaat

SEQ ID NO: 112027 - DNA, 20 bp, Artificial Sequence
  MKO10112027_B_Rasl10b
  gRNA
gaagtcctcacctcgtctcc

SEQ ID NO: 112028 - DNA, 20 bp, Artificial Sequence
  MKO10112028_B_Rasl10b
  gRNA
gactatccgtcagcagatcc

SEQ ID NO: 112029 - DNA, 20 bp, Artificial Sequence
  MKO10112029_B_Rasl11a
  gRNA
atgagagctaccaatccatc

SEQ ID NO: 112030 - DNA, 20 bp, Artificial Sequence
  MKO10112030_B_Rasl11a
  gRNA
atgcggccgctcaccatgtc

SEQ ID NO: 112031 - DNA, 20 bp, Artificial Sequence
  MKO10112031_B_Rasl11a
  gRNA
ttcttgaccaagagattcat

SEQ ID NO: 112032 - DNA, 20 bp, Artificial Sequence
  MKO10112032_B_Rasl11b
  gRNA
ggtccacctgcttgacgtgt

SEQ ID NO: 112033 - DNA, 20 bp, Artificial Sequence
  MKO10112033_B_Rasl11b
  gRNA
ccacggcgatcttaacgagc

SEQ ID NO: 112034 - DNA, 20 bp, Artificial Sequence
  MKO10112034_B_Rasl11b
  gRNA
ttcctcactaaacgattcat

SEQ ID NO: 112035 - DNA, 20 bp, Artificial Sequence
  MKO10112035_B_Rasl12
  gRNA
actgcgagcgctacctgaac

SEQ ID NO: 112036 - DNA, 20 bp, Artificial Sequence
  MKO10112036_B_Rasl12
  gRNA
cggtgaagttcctcaccaag

SEQ ID NO: 112037 - DNA, 20 bp, Artificial Sequence
  MKO10112037_B_Rasl12
  gRNA
atattcgctgataaacctct

SEQ ID NO: 112038 - DNA, 20 bp, Artificial Sequence
  MKO10112038_B_Rasl2-9
  gRNA
acctatcaagttcaatgtgt

SEQ ID NO: 112039 - DNA, 20 bp, Artificial Sequence
  MKO10112039_B_Rasl2-9
  gRNA
cttacaagaatgtgcctagc

SEQ ID NO: 112040 - DNA, 20 bp, Artificial Sequence
  MKO10112040_B_Rasl2-9
  gRNA
ccccccgaacttctcctgac

SEQ ID NO: 112041 - DNA, 20 bp, Artificial Sequence
  MKO10112041_B_Rassf10
  gRNA
gcccccggacgaaaacgacg

SEQ ID NO: 112042 - DNA, 20 bp, Artificial Sequence
  MKO10112042_B_Rassf10
  gRNA
tgacgacgacgcgatgcccc

SEQ ID NO: 112043 - DNA, 20 bp, Artificial Sequence
  MKO10112043_B_Rassf10
  gRNA
cacccgcaccacgtccgagc

SEQ ID NO: 112044 - DNA, 20 bp, Artificial Sequence
  MKO10112044_B_Rassf1
  gRNA
tcgttgtcgccagaagatcc

SEQ ID NO: 112045 - DNA, 20 bp, Artificial Sequence
  MKO10112045_B_Rassf1
  gRNA
gacaacgagaatacttctgc

SEQ ID NO: 112046 - DNA, 20 bp, Artificial Sequence
  MKO10112046_B_Rassf1
  gRNA
agtatacctccggaagctgt

SEQ ID NO: 112047 - DNA, 20 bp, Artificial Sequence
  MKO10112047_B_Rassf2
  gRNA
cggctgtaacctgggcgcac

SEQ ID NO: 112048 - DNA, 20 bp, Artificial Sequence
  MKO10112048_B_Rassf2
  gRNA
acctacaacttgtactatga

SEQ ID NO: 112049 - DNA, 20 bp, Artificial Sequence
  MKO10112049_B_Rassf2
  gRNA
ctcgagacacacagcccaac

SEQ ID NO: 112050 - DNA, 20 bp, Artificial Sequence
  MKO10112050_B_Rassf3
  gRNA
gcagaacttcctgcgcatct

SEQ ID NO: 112051 - DNA, 20 bp, Artificial Sequence
  MKO10112051_B_Rassf3
  gRNA
ctcccggtcggagagcttgc

SEQ ID NO: 112052 - DNA, 20 bp, Artificial Sequence
  MKO10112052_B_Rassf3
  gRNA
cttccttgtccaagatgcgc

SEQ ID NO: 112053 - DNA, 20 bp, Artificial Sequence
  MKO10112053_B_Rassf4
  gRNA
ggggactcagacgacccatc

SEQ ID NO: 112054 - DNA, 20 bp, Artificial Sequence
  MKO10112054_B_Rassf4
  gRNA
acctacaactgctaccatga

SEQ ID NO: 112055 - DNA, 20 bp, Artificial Sequence
  MKO10112055_B_Rassf4
  gRNA
ctttcagctaagacaccgag

SEQ ID NO: 112056 - DNA, 20 bp, Artificial Sequence
  MKO10112056_B_Rassf5
  gRNA
ctctaccttcgtctgctcgc

SEQ ID NO: 112057 - DNA, 20 bp, Artificial Sequence
  MKO10112057_B_Rassf5
  gRNA
tcaggctgcggcactccgag

SEQ ID NO: 112058 - DNA, 20 bp, Artificial Sequence
  MKO10112058_B_Rassf5
  gRNA
atcccagcgggcaccgtcac

SEQ ID NO: 112059 - DNA, 20 bp, Artificial Sequence
  MKO10112059_B_Rassf6
  gRNA
aacaatcagctgtccgtctt

SEQ ID NO: 112060 - DNA, 20 bp, Artificial Sequence
  MKO10112060_B_Rassf6
  gRNA
ttcgcaggaggatgactcgc

SEQ ID NO: 112061 - DNA, 20 bp, Artificial Sequence
  MKO10112061_B_Rassf6
  gRNA
accatacgcagacgaagagc

SEQ ID NO: 112062 - DNA, 20 bp, Artificial Sequence
  MKO10112062_B_Rassf7
  gRNA
gaccttctgtctccaaatag

SEQ ID NO: 112063 - DNA, 20 bp, Artificial Sequence
  MKO10112063_B_Rassf7
  gRNA
actgttgcaggttgcactga

SEQ ID NO: 112064 - DNA, 20 bp, Artificial Sequence
  MKO10112064_B_Rassf7
  gRNA
ttctcacagttccccccatg

SEQ ID NO: 112065 - DNA, 20 bp, Artificial Sequence
  MKO10112065_B_Rassf8
  gRNA
gagaaacgacgtggagatcg

SEQ ID NO: 112066 - DNA, 20 bp, Artificial Sequence
  MKO10112066_B_Rassf8
  gRNA
gaccaaagtcaccgtgctgc

SEQ ID NO: 112067 - DNA, 20 bp, Artificial Sequence
  MKO10112067_B_Rassf8
  gRNA
gggatgaaccaggtcgcttc

SEQ ID NO: 112068 - DNA, 20 bp, Artificial Sequence
  MKO10112068_B_Rassf9
  gRNA
ggacagaccatggctccctt

SEQ ID NO: 112069 - DNA, 20 bp, Artificial Sequence
  MKO10112069_B_Rassf9
  gRNA
cacctccatcgatgttatcc

SEQ ID NO: 112070 - DNA, 20 bp, Artificial Sequence
  MKO10112070_B_Rassf9
  gRNA
ggaaagcgttaagtgcgatt

SEQ ID NO: 112071 - DNA, 20 bp, Artificial Sequence
  MKO10112071_B_Raver1
  gRNA
cgaactcaagtactgtttcg

SEQ ID NO: 112072 - DNA, 20 bp, Artificial Sequence
  MKO10112072_B_Raver1
  gRNA
cttcctcaggctcttaatcg

SEQ ID NO: 112073 - DNA, 20 bp, Artificial Sequence
  MKO10112073_B_Raver1
  gRNA
tatcttaccctgcttgccac

SEQ ID NO: 112074 - DNA, 20 bp, Artificial Sequence
  MKO10112074_B_Raver2
  gRNA
aggcgcagagcgcgattcag

SEQ ID NO: 112075 - DNA, 20 bp, Artificial Sequence
  MKO10112075_B_Raver2
  gRNA
ggaggttcatgagttattac

SEQ ID NO: 112076 - DNA, 20 bp, Artificial Sequence
  MKO10112076_B_Raver2
  gRNA
attactgccagaacccaatc

SEQ ID NO: 112077 - DNA, 20 bp, Artificial Sequence
  MKO10112077_B_Rax
  gRNA
gttgcgtcgatgcttcttct

SEQ ID NO: 112078 - DNA, 20 bp, Artificial Sequence
  MKO10112078_B_Rax
  gRNA
cggcaaggttaacctacccg

SEQ ID NO: 112079 - DNA, 20 bp, Artificial Sequence
  MKO10112079_B_Rax
  gRNA
gcgcctctagagggcttgcc

SEQ ID NO: 112080 - DNA, 20 bp, Artificial Sequence
  MKO10112080_B_Rb1cc1
  gRNA
ctccattgaccaccagaacc

SEQ ID NO: 112081 - DNA, 20 bp, Artificial Sequence
  MKO10112081_B_Rb1cc1
  gRNA
atttgaacagtcctccagat

SEQ ID NO: 112082 - DNA, 20 bp, Artificial Sequence
  MKO10112082_B_Rb1cc1
  gRNA
ctttaggaatagcaggtgca

SEQ ID NO: 112083 - DNA, 20 bp, Artificial Sequence
  MKO10112083_B_Rb1
  gRNA
tcttaccaggattccatcca

SEQ ID NO: 112084 - DNA, 20 bp, Artificial Sequence
  MKO10112084_B_Rb1
  gRNA
tgtagctcagtaaaagtgaa

SEQ ID NO: 112085 - DNA, 20 bp, Artificial Sequence
  MKO10112085_B_Rb1
  gRNA
tacagaaaagcatagaaacc

SEQ ID NO: 112086 - DNA, 20 bp, Artificial Sequence
  MKO10112086_B_Rbak
  gRNA
cggtcaccttccactgtcca

SEQ ID NO: 112087 - DNA, 20 bp, Artificial Sequence
  MKO10112087_B_Rbak
  gRNA
cagcatcacatccctgtatg

SEQ ID NO: 112088 - DNA, 20 bp, Artificial Sequence
  MKO10112088_B_Rbak
  gRNA
gcagaacatgagcagatcaa

SEQ ID NO: 112089 - DNA, 20 bp, Artificial Sequence
  MKO10112089_B_Rbbp4
  gRNA
acaaagcacccttctaaacc

SEQ ID NO: 112090 - DNA, 20 bp, Artificial Sequence
  MKO10112090_B_Rbbp4
  gRNA
tcggggttgcattctccaga

SEQ ID NO: 112091 - DNA, 20 bp, Artificial Sequence
  MKO10112091_B_Rbbp4
  gRNA
gctggacactggcaatcacc

SEQ ID NO: 112092 - DNA, 20 bp, Artificial Sequence
  MKO10112092_B_Rbbp5
  gRNA
cgatgactcggatttgaacg

SEQ ID NO: 112093 - DNA, 20 bp, Artificial Sequence
  MKO10112093_B_Rbbp5
  gRNA
ccctgacctgcacctttaac

SEQ ID NO: 112094 - DNA, 20 bp, Artificial Sequence
  MKO10112094_B_Rbbp5
  gRNA
aaatccgagtcatcgtctac

SEQ ID NO: 112095 - DNA, 20 bp, Artificial Sequence
  MKO10112095_B_Rbbp6
  gRNA
gtagacttgacacctccaat

SEQ ID NO: 112096 - DNA, 20 bp, Artificial Sequence
  MKO10112096_B_Rbbp6
  gRNA
agaactcatctgtgattgtc

SEQ ID NO: 112097 - DNA, 20 bp, Artificial Sequence
  MKO10112097_B_Rbbp6
  gRNA
atatatatacctttgtaagc

SEQ ID NO: 112098 - DNA, 20 bp, Artificial Sequence
  MKO10112098_B_Rbbp7
  gRNA
aacccttacttagtcacttc

SEQ ID NO: 112099 - DNA, 20 bp, Artificial Sequence
  MKO10112099_B_Rbbp7
  gRNA
cccactcagattagaattcc

SEQ ID NO: 112100 - DNA, 20 bp, Artificial Sequence
  MKO10112100_B_Rbbp7
  gRNA
catggtcatcagatgcactc

SEQ ID NO: 112101 - DNA, 20 bp, Artificial Sequence
  MKO10112101_B_Rbbp8nl
  gRNA
cttgtccctaggctgcgggc

SEQ ID NO: 112102 - DNA, 20 bp, Artificial Sequence
  MKO10112102_B_Rbbp8nl
  gRNA
acctgttctccagcactcgc

SEQ ID NO: 112103 - DNA, 20 bp, Artificial Sequence
  MKO10112103_B_Rbbp8nl
  gRNA
tctcagcccattcatctcat

SEQ ID NO: 112104 - DNA, 20 bp, Artificial Sequence
  MKO10112104_B_Rbbp8
  gRNA
tttcctgaaggactttctgc

SEQ ID NO: 112105 - DNA, 20 bp, Artificial Sequence
  MKO10112105_B_Rbbp8
  gRNA
tgaacaactgcagcagaaaa

SEQ ID NO: 112106 - DNA, 20 bp, Artificial Sequence
  MKO10112106_B_Rbbp8
  gRNA
caaagtaaccaaactgaaaa

SEQ ID NO: 112107 - DNA, 20 bp, Artificial Sequence
  MKO10112107_B_Rbbp9
  gRNA
gatgaaaatgagcgtgcaag

SEQ ID NO: 112108 - DNA, 20 bp, Artificial Sequence
  MKO10112108_B_Rbbp9
  gRNA
cagggtacttcagccgcccc

SEQ ID NO: 112109 - DNA, 20 bp, Artificial Sequence
  MKO10112109_B_Rbbp9
  gRNA
gattcctggtttccagtgtt

SEQ ID NO: 112110 - DNA, 20 bp, Artificial Sequence
  MKO10112110_B_Rbck1
  gRNA
aacctgtccttccgaagccc

SEQ ID NO: 112111 - DNA, 20 bp, Artificial Sequence
  MKO10112111_B_Rbck1
  gRNA
cgggcgtactgtgagccaaa

SEQ ID NO: 112112 - DNA, 20 bp, Artificial Sequence
  MKO10112112_B_Rbck1
  gRNA
ctgctatcaagtatgccacc

SEQ ID NO: 112113 - DNA, 20 bp, Artificial Sequence
  MKO10112113_B_Rbfa
  gRNA
ccgtcaatgatttgtagaga

SEQ ID NO: 112114 - DNA, 20 bp, Artificial Sequence
  MKO10112114_B_Rbfa
  gRNA
cttcgtgaggaactcatgct

SEQ ID NO: 112115 - DNA, 20 bp, Artificial Sequence
  MKO10112115_B_Rbfa
  gRNA
cccccgtcttccagtacact

SEQ ID NO: 112116 - DNA, 20 bp, Artificial Sequence
  MKO10112116_B_Rbfox1
  gRNA
tctggatcccggaaccggaa

SEQ ID NO: 112117 - DNA, 20 bp, Artificial Sequence
  MKO10112117_B_Rbfox1
  gRNA
cgtaactttcgaaaatagtg

SEQ ID NO: 112118 - DNA, 20 bp, Artificial Sequence
  MKO10112118_B_Rbfox1
  gRNA
agggcgagggagaaattgca

SEQ ID NO: 112119 - DNA, 20 bp, Artificial Sequence
  MKO10112119_B_Rbfox2
  gRNA
attagagacatgtagtcgct

SEQ ID NO: 112120 - DNA, 20 bp, Artificial Sequence
  MKO10112120_B_Rbfox2
  gRNA
gtcagggtctcggaagcgga

SEQ ID NO: 112121 - DNA, 20 bp, Artificial Sequence
  MKO10112121_B_Rbfox2
  gRNA
ggagaaattgcacggcaccg

SEQ ID NO: 112122 - DNA, 20 bp, Artificial Sequence
  MKO10112122_B_Rbfox3
  gRNA
gctgaatgggacgatcgtag

SEQ ID NO: 112123 - DNA, 20 bp, Artificial Sequence
  MKO10112123_B_Rbfox3
  gRNA
tcggggtccctgaaccggaa

SEQ ID NO: 112124 - DNA, 20 bp, Artificial Sequence
  MKO10112124_B_Rbfox3
  gRNA
gctcagatgctgaccgagcc

SEQ ID NO: 112125 - DNA, 20 bp, Artificial Sequence
  MKO10112125_B_Rbks
  gRNA
caggttggcaacgattcttt

SEQ ID NO: 112126 - DNA, 20 bp, Artificial Sequence
  MKO10112126_B_Rbks
  gRNA
ccactatgacgatgatattc

SEQ ID NO: 112127 - DNA, 20 bp, Artificial Sequence
  MKO10112127_B_Rbks
  gRNA
accttcattattgacaatta

SEQ ID NO: 112128 - DNA, 20 bp, Artificial Sequence
  MKO10112128_B_Rbl1
  gRNA
taccacaagagtttcgtgag

SEQ ID NO: 112129 - DNA, 20 bp, Artificial Sequence
  MKO10112129_B_Rbl1
  gRNA
tactgcgctcagctaagtta

SEQ ID NO: 112130 - DNA, 20 bp, Artificial Sequence
  MKO10112130_B_Rbl1
  gRNA
gaagggaatttccgtatgat

SEQ ID NO: 112131 - DNA, 20 bp, Artificial Sequence
  MKO10112131_B_Rbl2
  gRNA
gaccagatcatcgctaatca

SEQ ID NO: 112132 - DNA, 20 bp, Artificial Sequence
  MKO10112132_B_Rbl2
  gRNA
gaacagcctcgccagcaaag

SEQ ID NO: 112133 - DNA, 20 bp, Artificial Sequence
  MKO10112133_B_Rbl2
  gRNA
aaccagaatccttcgctgtt

SEQ ID NO: 112134 - DNA, 20 bp, Artificial Sequence
  MKO10112134_B_Rbm10
  gRNA
cgtggacagctgcagtccca

SEQ ID NO: 112135 - DNA, 20 bp, Artificial Sequence
  MKO10112135_B_Rbm10
  gRNA
atctgaagagcaaagtgcag

SEQ ID NO: 112136 - DNA, 20 bp, Artificial Sequence
  MKO10112136_B_Rbm10
  gRNA
aggacatggagtatgaaaga

SEQ ID NO: 112137 - DNA, 20 bp, Artificial Sequence
  MKO10112137_B_Rbm11
  gRNA
aaccgatactgcacattaat

SEQ ID NO: 112138 - DNA, 20 bp, Artificial Sequence
  MKO10112138_B_Rbm11
  gRNA
gcactcgtaattgggaaaaa

SEQ ID NO: 112139 - DNA, 20 bp, Artificial Sequence
  MKO10112139_B_Rbm11
  gRNA
tctgcaaaggaacgatgaaa

SEQ ID NO: 112140 - DNA, 20 bp, Artificial Sequence
  MKO10112140_B_Rbm12b1
  gRNA
atatctcaaatcttcttggg

SEQ ID NO: 112141 - DNA, 20 bp, Artificial Sequence
  MKO10112141_B_Rbm12b1
  gRNA
gtcatctccatcgtgtgacc

SEQ ID NO: 112142 - DNA, 20 bp, Artificial Sequence
  MKO10112142_B_Rbm12b1
  gRNA
acaatttaaatttagatcag

SEQ ID NO: 112143 - DNA, 20 bp, Artificial Sequence
  MKO10112143_B_Rbm12b2
  gRNA
ggccaccccaagaacatttc

SEQ ID NO: 112144 - DNA, 20 bp, Artificial Sequence
  MKO10112144_B_Rbm12b2
  gRNA
ctgaaccacaattaaacttt

SEQ ID NO: 112145 - DNA, 20 bp, Artificial Sequence
  MKO10112145_B_Rbm12b2
  gRNA
agaggacacaagcctgttcc

SEQ ID NO: 112146 - DNA, 20 bp, Artificial Sequence
  MKO10112146_B_Rbm12
  gRNA
tacaatatgcacgcccccat

SEQ ID NO: 112147 - DNA, 20 bp, Artificial Sequence
  MKO10112147_B_Rbm12
  gRNA
ataggtggcaccgaagggac

SEQ ID NO: 112148 - DNA, 20 bp, Artificial Sequence
  MKO10112148_B_Rbm12
  gRNA
tattcccgcaccgggtattc

SEQ ID NO: 112149 - DNA, 20 bp, Artificial Sequence
  MKO10112149_B_Rbm14
  gRNA
cggcggggtgctgttggcgt

SEQ ID NO: 112150 - DNA, 20 bp, Artificial Sequence
  MKO10112150_B_Rbm14
  gRNA
cgactaggtatggttccgac

SEQ ID NO: 112151 - DNA, 20 bp, Artificial Sequence
  MKO10112151_B_Rbm14
  gRNA
ttccgattacgcacgctatt

SEQ ID NO: 112152 - DNA, 20 bp, Artificial Sequence
  MKO10112152_B_Rbm15b
  gRNA
atatacccggcatcggaact

SEQ ID NO: 112153 - DNA, 20 bp, Artificial Sequence
  MKO10112153_B_Rbm15b
  gRNA
ccgccgccgcgcaggtacac

SEQ ID NO: 112154 - DNA, 20 bp, Artificial Sequence
  MKO10112154_B_Rbm15b
  gRNA
gattgcccagcgccttcgac

SEQ ID NO: 112155 - DNA, 20 bp, Artificial Sequence
  MKO10112155_B_Rbm15
  gRNA
cccgcgctcgtttcacacag

SEQ ID NO: 112156 - DNA, 20 bp, Artificial Sequence
  MKO10112156_B_Rbm15
  gRNA
ccccgccggtctcgtactcg

SEQ ID NO: 112157 - DNA, 20 bp, Artificial Sequence
  MKO10112157_B_Rbm15
  gRNA
aggacgatcagcgtgccaac

SEQ ID NO: 112158 - DNA, 20 bp, Artificial Sequence
  MKO10112158_B_Rbm17
  gRNA
ttcagcccagctgccacgtg

SEQ ID NO: 112159 - DNA, 20 bp, Artificial Sequence
  MKO10112159_B_Rbm17
  gRNA
gcctctgccgctcttctctc

SEQ ID NO: 112160 - DNA, 20 bp, Artificial Sequence
  MKO10112160_B_Rbm17
  gRNA
ccccaatgactatgagaaag

SEQ ID NO: 112161 - DNA, 20 bp, Artificial Sequence
  MKO10112161_B_Rbm18
  gRNA
atgggcccacgctcaagtca

SEQ ID NO: 112162 - DNA, 20 bp, Artificial Sequence
  MKO10112162_B_Rbm18
  gRNA
ctccttactctagaacagcc

SEQ ID NO: 112163 - DNA, 20 bp, Artificial Sequence
  MKO10112163_B_Rbm18
  gRNA
agcctgctcagtctaacctc

SEQ ID NO: 112164 - DNA, 20 bp, Artificial Sequence
  MKO10112164_B_Rbm19
  gRNA
ttccgaaagttcggcttcat

SEQ ID NO: 112165 - DNA, 20 bp, Artificial Sequence
  MKO10112165_B_Rbm19
  gRNA
gggtcgtgtcaataaagctc

SEQ ID NO: 112166 - DNA, 20 bp, Artificial Sequence
  MKO10112166_B_Rbm19
  gRNA
caaagcgtcgtttgcccacg

SEQ ID NO: 112167 - DNA, 20 bp, Artificial Sequence
  MKO10112167_B_Rbm20
  gRNA
catatgcagccattccaacg

SEQ ID NO: 112168 - DNA, 20 bp, Artificial Sequence
  MKO10112168_B_Rbm20
  gRNA
cgtactcacacttgtcccag

SEQ ID NO: 112169 - DNA, 20 bp, Artificial Sequence
  MKO10112169_B_Rbm20
  gRNA
ccactcaccctcgtttccag

SEQ ID NO: 112170 - DNA, 20 bp, Artificial Sequence
  MKO10112170_B_Rbm22
  gRNA
tgtaccaggcctacccatcc

SEQ ID NO: 112171 - DNA, 20 bp, Artificial Sequence
  MKO10112171_B_Rbm22
  gRNA
taccatattcaaggtctaac

SEQ ID NO: 112172 - DNA, 20 bp, Artificial Sequence
  MKO10112172_B_Rbm22
  gRNA
cagtcttcttgaagcgcatg

SEQ ID NO: 112173 - DNA, 20 bp, Artificial Sequence
  MKO10112173_B_Rbm24
  gRNA
gtgaagctgttgaacgccaa

SEQ ID NO: 112174 - DNA, 20 bp, Artificial Sequence
  MKO10112174_B_Rbm24
  gRNA
agacctcaaagtacttgcgc

SEQ ID NO: 112175 - DNA, 20 bp, Artificial Sequence
  MKO10112175_B_Rbm24
  gRNA
gcccttatccagagaccttt

SEQ ID NO: 112176 - DNA, 20 bp, Artificial Sequence
  MKO10112176_B_Rbm25
  gRNA
cctagtacctaccgtgtcca

SEQ ID NO: 112177 - DNA, 20 bp, Artificial Sequence
  MKO10112177_B_Rbm25
  gRNA
ccaacaaaaactgtagtagt

SEQ ID NO: 112178 - DNA, 20 bp, Artificial Sequence
  MKO10112178_B_Rbm25
  gRNA
ttattgcatgaccttcagat

SEQ ID NO: 112179 - DNA, 20 bp, Artificial Sequence
  MKO10112179_B_Rbm26
  gRNA
atcacctattatctctgtat

SEQ ID NO: 112180 - DNA, 20 bp, Artificial Sequence
  MKO10112180_B_Rbm26
  gRNA
gctcccgatacagagataat

SEQ ID NO: 112181 - DNA, 20 bp, Artificial Sequence
  MKO10112181_B_Rbm26
  gRNA
gctgaagaaagtctaccttc

SEQ ID NO: 112182 - DNA, 20 bp, Artificial Sequence
  MKO10112182_B_Rbm27
  gRNA
gttcagaatctagtgaacga

SEQ ID NO: 112183 - DNA, 20 bp, Artificial Sequence
  MKO10112183_B_Rbm27
  gRNA
taagaactaccttccaccat

SEQ ID NO: 112184 - DNA, 20 bp, Artificial Sequence
  MKO10112184_B_Rbm27
  gRNA
gattctgaacgactcttctg

SEQ ID NO: 112185 - DNA, 20 bp, Artificial Sequence
  MKO10112185_B_Rbm28
  gRNA
catcactcaccttaaagctg

SEQ ID NO: 112186 - DNA, 20 bp, Artificial Sequence
  MKO10112186_B_Rbm28
  gRNA
agaaagccagattaattatc

SEQ ID NO: 112187 - DNA, 20 bp, Artificial Sequence
  MKO10112187_B_Rbm28
  gRNA
gtgaatatcccaaagaagcc

SEQ ID NO: 112188 - DNA, 20 bp, Artificial Sequence
  MKO10112188_B_Rbm31y
  gRNA
caagaaaatagaatttaaaa

SEQ ID NO: 112189 - DNA, 20 bp, Artificial Sequence
  MKO10112189_B_Rbm31y
  gRNA
cgtttgtacccaaactatac

SEQ ID NO: 112190 - DNA, 20 bp, Artificial Sequence
  MKO10112190_B_Rbm31y
  gRNA
gacttgtcccagaagcatat

SEQ ID NO: 112191 - DNA, 20 bp, Artificial Sequence
  MKO10112191_B_Rbm33
  gRNA
aaatgatgtaactatgccag

SEQ ID NO: 112192 - DNA, 20 bp, Artificial Sequence
  MKO10112192_B_Rbm33
  gRNA
tttgaccagtttgacaagcc

SEQ ID NO: 112193 - DNA, 20 bp, Artificial Sequence
  MKO10112193_B_Rbm33
  gRNA
gaactggaagatgacttgct

SEQ ID NO: 112194 - DNA, 20 bp, Artificial Sequence
  MKO10112194_B_Rbm34
  gRNA
taccacagaacgaaatcgta

SEQ ID NO: 112195 - DNA, 20 bp, Artificial Sequence
  MKO10112195_B_Rbm34
  gRNA
tctcggggtaaagtggcaga

SEQ ID NO: 112196 - DNA, 20 bp, Artificial Sequence
  MKO10112196_B_Rbm34
  gRNA
gcctgtcacatgtaataaaa

SEQ ID NO: 112197 - DNA, 20 bp, Artificial Sequence
  MKO10112197_B_Rbm38
  gRNA
ccttgcgaccatcgatgata

SEQ ID NO: 112198 - DNA, 20 bp, Artificial Sequence
  MKO10112198_B_Rbm38
  gRNA
ccactcacccgtaggtgcgc

SEQ ID NO: 112199 - DNA, 20 bp, Artificial Sequence
  MKO10112199_B_Rbm38
  gRNA
accttgatccagcgcaccta

SEQ ID NO: 112200 - DNA, 20 bp, Artificial Sequence
  MKO10112200_B_Rbm39
  gRNA
caatccaatctttcctcgga

SEQ ID NO: 112201 - DNA, 20 bp, Artificial Sequence
  MKO10112201_B_Rbm39
  gRNA
tgcctcatagcatcaaatta

SEQ ID NO: 112202 - DNA, 20 bp, Artificial Sequence
  MKO10112202_B_Rbm39
  gRNA
gggctcttgtctttcctaaa

SEQ ID NO: 112203 - DNA, 20 bp, Artificial Sequence
  MKO10112203_B_Rbm3
  gRNA
ttctgtaggtggtggagacc

SEQ ID NO: 112204 - DNA, 20 bp, Artificial Sequence
  MKO10112204_B_Rbm3
  gRNA
gatgcgatgagagctatgaa

SEQ ID NO: 112205 - DNA, 20 bp, Artificial Sequence
  MKO10112205_B_Rbm3
  gRNA
tctgccatgtcgtctgaaga

SEQ ID NO: 112206 - DNA, 20 bp, Artificial Sequence
  MKO10112206_B_Rbm41
  gRNA
ccagtccaatattgctcagt

SEQ ID NO: 112207 - DNA, 20 bp, Artificial Sequence
  MKO10112207_B_Rbm41
  gRNA
aagaaaaagagctttgcgcc

SEQ ID NO: 112208 - DNA, 20 bp, Artificial Sequence
  MKO10112208_B_Rbm41
  gRNA
aagccgtttctgtattgctt

SEQ ID NO: 112209 - DNA, 20 bp, Artificial Sequence
  MKO10112209_B_Rbm42
  gRNA
actgtccaggtgaccacgat

SEQ ID NO: 112210 - DNA, 20 bp, Artificial Sequence
  MKO10112210_B_Rbm42
  gRNA
acgaaggcaggacgcaggat

SEQ ID NO: 112211 - DNA, 20 bp, Artificial Sequence
  MKO10112211_B_Rbm42
  gRNA
ccccacgtgctacagagagc

SEQ ID NO: 112212 - DNA, 20 bp, Artificial Sequence
  MKO10112212_B_Rbm43
  gRNA
catttgtctacaagacgccc

SEQ ID NO: 112213 - DNA, 20 bp, Artificial Sequence
  MKO10112213_B_Rbm43
  gRNA
aagtgagagactgtgagccg

SEQ ID NO: 112214 - DNA, 20 bp, Artificial Sequence
  MKO10112214_B_Rbm43
  gRNA
agtctctcacttcagtgaaa

SEQ ID NO: 112215 - DNA, 20 bp, Artificial Sequence
  MKO10112215_B_Rbm44
  gRNA
aaagtagagcgggactcaat

SEQ ID NO: 112216 - DNA, 20 bp, Artificial Sequence
  MKO10112216_B_Rbm44
  gRNA
cttccagaggtatgccctta

SEQ ID NO: 112217 - DNA, 20 bp, Artificial Sequence
  MKO10112217_B_Rbm44
  gRNA
gacagtgtcgatggcacatc

SEQ ID NO: 112218 - DNA, 20 bp, Artificial Sequence
  MKO10112218_B_Rbm45
  gRNA
agctgtctccaaacgcctgt

SEQ ID NO: 112219 - DNA, 20 bp, Artificial Sequence
  MKO10112219_B_Rbm45
  gRNA
ctgctgtaatcatcttgttc

SEQ ID NO: 112220 - DNA, 20 bp, Artificial Sequence
  MKO10112220_B_Rbm45
  gRNA
gaacaagatgattacagcag

SEQ ID NO: 112221 - DNA, 20 bp, Artificial Sequence
  MKO10112221_B_Rbm46
  gRNA
ggatgcagtaaagtgcgcac

SEQ ID NO: 112222 - DNA, 20 bp, Artificial Sequence
  MKO10112222_B_Rbm46
  gRNA
tcatcttcatacatatcacg

SEQ ID NO: 112223 - DNA, 20 bp, Artificial Sequence
  MKO10112223_B_Rbm46
  gRNA
aacaattatgaaattcgacc

SEQ ID NO: 112224 - DNA, 20 bp, Artificial Sequence
  MKO10112224_B_Rbm47
  gRNA
gccggcgtagcccccataca

SEQ ID NO: 112225 - DNA, 20 bp, Artificial Sequence
  MKO10112225_B_Rbm47
  gRNA
ggccagcggaatatcctccg

SEQ ID NO: 112226 - DNA, 20 bp, Artificial Sequence
  MKO10112226_B_Rbm47
  gRNA
atatatagccgatatcacga

SEQ ID NO: 112227 - DNA, 20 bp, Artificial Sequence
  MKO10112227_B_Rbm48
  gRNA
acgctcaactaattccttca

SEQ ID NO: 112228 - DNA, 20 bp, Artificial Sequence
  MKO10112228_B_Rbm48
  gRNA
gacgtgtgtacaagtcaccc

SEQ ID NO: 112229 - DNA, 20 bp, Artificial Sequence
  MKO10112229_B_Rbm48
  gRNA
tcttcaactgtctcaaattc

SEQ ID NO: 112230 - DNA, 20 bp, Artificial Sequence
  MKO10112230_B_Rbm4b
  gRNA
cttgaaactctgtgttgtcg

SEQ ID NO: 112231 - DNA, 20 bp, Artificial Sequence
  MKO10112231_B_Rbm4b
  gRNA
agtctgccacacgccctgta

SEQ ID NO: 112232 - DNA, 20 bp, Artificial Sequence
  MKO10112232_B_Rbm4b
  gRNA
agtgcgcacaccttatacta

SEQ ID NO: 112233 - DNA, 20 bp, Artificial Sequence
  MKO10112233_B_Rbm4
  gRNA
cttgaaactctgtgttgtcg

SEQ ID NO: 112234 - DNA, 20 bp, Artificial Sequence
  MKO10112234_B_Rbm4
  gRNA
cttaggaccgcgcccgggat

SEQ ID NO: 112235 - DNA, 20 bp, Artificial Sequence
  MKO10112235_B_Rbm4
  gRNA
cgcaccgatagcagccgctc

SEQ ID NO: 112236 - DNA, 20 bp, Artificial Sequence
  MKO10112236_B_Rbm5
  gRNA
acaaaagatcaagcgatgat

SEQ ID NO: 112237 - DNA, 20 bp, Artificial Sequence
  MKO10112237_B_Rbm5
  gRNA
gtgagtagaacagaacgtag

SEQ ID NO: 112238 - DNA, 20 bp, Artificial Sequence
  MKO10112238_B_Rbm5
  gRNA
caagtgataaaactccacga

SEQ ID NO: 112239 - DNA, 20 bp, Artificial Sequence
  MKO10112239_B_Rbm6
  gRNA
aattcaaggatcaagattat

SEQ ID NO: 112240 - DNA, 20 bp, Artificial Sequence
  MKO10112240_B_Rbm6
  gRNA
cttaatcgaataagcctgtt

SEQ ID NO: 112241 - DNA, 20 bp, Artificial Sequence
  MKO10112241_B_Rbm6
  gRNA
ttcaactgcaagtcctttac

SEQ ID NO: 112242 - DNA, 20 bp, Artificial Sequence
  MKO10112242_B_Rbm7
  gRNA
acagtacctgttaggagatg

SEQ ID NO: 112243 - DNA, 20 bp, Artificial Sequence
  MKO10112243_B_Rbm7
  gRNA
tcattacagaggcagccgag

SEQ ID NO: 112244 - DNA, 20 bp, Artificial Sequence
  MKO10112244_B_Rbm7
  gRNA
cgtgtctccgacagctcaga

SEQ ID NO: 112245 - DNA, 20 bp, Artificial Sequence
  MKO10112245_B_Rbm8a
  gRNA
actcaccggagccaaagccg

SEQ ID NO: 112246 - DNA, 20 bp, Artificial Sequence
  MKO10112246_B_Rbm8a
  gRNA
gatggggcagccaatcagtg

SEQ ID NO: 112247 - DNA, 20 bp, Artificial Sequence
  MKO10112247_B_Rbm8a
  gRNA
acccaacagctgttgaaggt

SEQ ID NO: 112248 - DNA, 20 bp, Artificial Sequence
  MKO10112248_B_Rbms1
  gRNA
aaccgtacctttgcacttgt

SEQ ID NO: 112249 - DNA, 20 bp, Artificial Sequence
  MKO10112249_B_Rbms1
  gRNA
gaaagctgtctccgccctga

SEQ ID NO: 112250 - DNA, 20 bp, Artificial Sequence
  MKO10112250_B_Rbms1
  gRNA
acggttggcagagcttcacc

SEQ ID NO: 112251 - DNA, 20 bp, Artificial Sequence
  MKO10112251_B_Rbms2
  gRNA
tggcaagattgtctccacta

SEQ ID NO: 112252 - DNA, 20 bp, Artificial Sequence
  MKO10112252_B_Rbms2
  gRNA
gtgctattccttggacttgg

SEQ ID NO: 112253 - DNA, 20 bp, Artificial Sequence
  MKO10112253_B_Rbms2
  gRNA
ggatccgagtagagatgacc

SEQ ID NO: 112254 - DNA, 20 bp, Artificial Sequence
  MKO10112254_B_Rbms3
  gRNA
cagctacatgggcaaacgcc

SEQ ID NO: 112255 - DNA, 20 bp, Artificial Sequence
  MKO10112255_B_Rbms3
  gRNA
tggaaaaatcgtatccacaa

SEQ ID NO: 112256 - DNA, 20 bp, Artificial Sequence
  MKO10112256_B_Rbms3
  gRNA
cttgtcaagaattgcctttg

SEQ ID NO: 112257 - DNA, 20 bp, Artificial Sequence
  MKO10112257_B_Rbmx2
  gRNA
tcgccttctgtcaattcata

SEQ ID NO: 112258 - DNA, 20 bp, Artificial Sequence
  MKO10112258_B_Rbmx2
  gRNA
cttccttatgaattgacaga

SEQ ID NO: 112259 - DNA, 20 bp, Artificial Sequence
  MKO10112259_B_Rbmx2
  gRNA
cttgtgagagacaagaagac

SEQ ID NO: 112260 - DNA, 20 bp, Artificial Sequence
  MKO10112260_B_Rbmxl1
  gRNA
taagtataatctcttggtgg

SEQ ID NO: 112261 - DNA, 20 bp, Artificial Sequence
  MKO10112261_B_Rbmxl1
  gRNA
ggaccacttccagtaaagag

SEQ ID NO: 112262 - DNA, 20 bp, Artificial Sequence
  MKO10112262_B_Rbmxl1
  gRNA
tgcataatctctggtgtctc

SEQ ID NO: 112263 - DNA, 20 bp, Artificial Sequence
  MKO10112263_B_Rbmxl2
  gRNA
cccgggcgctcgggtagtcg

SEQ ID NO: 112264 - DNA, 20 bp, Artificial Sequence
  MKO10112264_B_Rbmxl2
  gRNA
cgccggccgctctcgaacac

SEQ ID NO: 112265 - DNA, 20 bp, Artificial Sequence
  MKO10112265_B_Rbmxl2
  gRNA
ggcgagtagccctcgtcgcg

SEQ ID NO: 112266 - DNA, 20 bp, Artificial Sequence
  MKO10112266_B_Rbmx
  gRNA
cccctcccggggaggacaca

SEQ ID NO: 112267 - DNA, 20 bp, Artificial Sequence
  MKO10112267_B_Rbmx
  gRNA
ctttacccatgtgtcctccc

SEQ ID NO: 112268 - DNA, 20 bp, Artificial Sequence
  MKO10112268_B_Rbmx
  gRNA
gttacggaggcccgccacga

SEQ ID NO: 112269 - DNA, 20 bp, Artificial Sequence
  MKO10112269_B_Rbmy
  gRNA
gaattaaagtaaaacaagcc

SEQ ID NO: 112270 - DNA, 20 bp, Artificial Sequence
  MKO10112270_B_Rbmy
  gRNA
aatttcaatgtgagttcttc

SEQ ID NO: 112271 - DNA, 20 bp, Artificial Sequence
  MKO10112271_B_Rbmy
  gRNA
aaagaaatccatcttcaaaa

SEQ ID NO: 112272 - DNA, 20 bp, Artificial Sequence
  MKO10112272_B_Rbp1
  gRNA
cagtacccgttgaagtccac

SEQ ID NO: 112273 - DNA, 20 bp, Artificial Sequence
  MKO10112273_B_Rbp1
  gRNA
cgagggtgatgaacttcacc

SEQ ID NO: 112274 - DNA, 20 bp, Artificial Sequence
  MKO10112274_B_Rbp1
  gRNA
tttggcagaccactgtgagc

SEQ ID NO: 112275 - DNA, 20 bp, Artificial Sequence
  MKO10112275_B_Rbp2
  gRNA
ggagggagacaagctgtacc

SEQ ID NO: 112276 - DNA, 20 bp, Artificial Sequence
  MKO10112276_B_Rbp2
  gRNA
accctcgtgtgtgtgcagaa

SEQ ID NO: 112277 - DNA, 20 bp, Artificial Sequence
  MKO10112277_B_Rbp2
  gRNA
gacttgcaggagctgacctg

SEQ ID NO: 112278 - DNA, 20 bp, Artificial Sequence
  MKO10112278_B_Rbp3
  gRNA
aagttcgctgaccgagtcat

SEQ ID NO: 112279 - DNA, 20 bp, Artificial Sequence
  MKO10112279_B_Rbp3
  gRNA
tgtcctccaggtgaacgata

SEQ ID NO: 112280 - DNA, 20 bp, Artificial Sequence
  MKO10112280_B_Rbp3
  gRNA
ctgacctcatgtcgatgatc

SEQ ID NO: 112281 - DNA, 20 bp, Artificial Sequence
  MKO10112281_B_Rbp4
  gRNA
catcgccaaaaaggaccccg

SEQ ID NO: 112282 - DNA, 20 bp, Artificial Sequence
  MKO10112282_B_Rbp4
  gRNA
gacttacagacgatgaccac

SEQ ID NO: 112283 - DNA, 20 bp, Artificial Sequence
  MKO10112283_B_Rbp4
  gRNA
gtcttgcaaaaagagaccct

SEQ ID NO: 112284 - DNA, 20 bp, Artificial Sequence
  MKO10112284_B_Rbp7
  gRNA
tcccaggaaatgttctgcga

SEQ ID NO: 112285 - DNA, 20 bp, Artificial Sequence
  MKO10112285_B_Rbp7
  gRNA
tggagatgtatcaggctctc

SEQ ID NO: 112286 - DNA, 20 bp, Artificial Sequence
  MKO10112286_B_Rbp7
  gRNA
gtcgctgctgagaagattcc

SEQ ID NO: 112287 - DNA, 20 bp, Artificial Sequence
  MKO10112287_B_Rbpjl
  gRNA
gaggtgcggctacagagcga

SEQ ID NO: 112288 - DNA, 20 bp, Artificial Sequence
  MKO10112288_B_Rbpjl
  gRNA
tgcagacccctcgttgcccc

SEQ ID NO: 112289 - DNA, 20 bp, Artificial Sequence
  MKO10112289_B_Rbpjl
  gRNA
tccaccctgtgtctacctcg

SEQ ID NO: 112290 - DNA, 20 bp, Artificial Sequence
  MKO10112290_B_Rbpj
  gRNA
aaagttgcacagaagtctta

SEQ ID NO: 112291 - DNA, 20 bp, Artificial Sequence
  MKO10112291_B_Rbpj
  gRNA
agttcagctgctgcatttct

SEQ ID NO: 112292 - DNA, 20 bp, Artificial Sequence
  MKO10112292_B_Rbpj
  gRNA
tcctccttgtgtgtatctta

SEQ ID NO: 112293 - DNA, 20 bp, Artificial Sequence
  MKO10112293_B_Rbpms2
  gRNA
ctagggtattcgctttgatc

SEQ ID NO: 112294 - DNA, 20 bp, Artificial Sequence
  MKO10112294_B_Rbpms2
  gRNA
cctgctcttccgtccattca

SEQ ID NO: 112295 - DNA, 20 bp, Artificial Sequence
  MKO10112295_B_Rbpms2
  gRNA
gccccactcacaagggtccc

SEQ ID NO: 112296 - DNA, 20 bp, Artificial Sequence
  MKO10112296_B_Rbpms
  gRNA
tacgttcaaagcgttctttg

SEQ ID NO: 112297 - DNA, 20 bp, Artificial Sequence
  MKO10112297_B_Rbpms
  gRNA
tctcggggcttgatgtccag

SEQ ID NO: 112298 - DNA, 20 bp, Artificial Sequence
  MKO10112298_B_Rbpms
  gRNA
cataaagctcacatctaaac

SEQ ID NO: 112299 - DNA, 20 bp, Artificial Sequence
  MKO10112299_B_Rbx1
  gRNA
gttatcaaccacaatgtccc

SEQ ID NO: 112300 - DNA, 20 bp, Artificial Sequence
  MKO10112300_B_Rbx1
  gRNA
aacgaggcaggtgtgtccgt

SEQ ID NO: 112301 - DNA, 20 bp, Artificial Sequence
  MKO10112301_B_Rbx1
  gRNA
ccatgcaaccgtacactctt

SEQ ID NO: 112302 - DNA, 20 bp, Artificial Sequence
  MKO10112302_B_Rc3h1
  gRNA
aagccactcagcagtgcgag

SEQ ID NO: 112303 - DNA, 20 bp, Artificial Sequence
  MKO10112303_B_Rc3h1
  gRNA
cagcccattactttgtgtag

SEQ ID NO: 112304 - DNA, 20 bp, Artificial Sequence
  MKO10112304_B_Rc3h1
  gRNA
agctctgaagctggtcttgc

SEQ ID NO: 112305 - DNA, 20 bp, Artificial Sequence
  MKO10112305_B_Rc3h2
  gRNA
ccagattgttcatattgcca

SEQ ID NO: 112306 - DNA, 20 bp, Artificial Sequence
  MKO10112306_B_Rc3h2
  gRNA
aactttattgactgatgatc

SEQ ID NO: 112307 - DNA, 20 bp, Artificial Sequence
  MKO10112307_B_Rc3h2
  gRNA
ctctacttaaaaccactaag

SEQ ID NO: 112308 - DNA, 20 bp, Artificial Sequence
  MKO10112308_B_Rcan1
  gRNA
tttatatgccatctccaagc

SEQ ID NO: 112309 - DNA, 20 bp, Artificial Sequence
  MKO10112309_B_Rcan1
  gRNA
tgtactccggtctccgtgtc

SEQ ID NO: 112310 - DNA, 20 bp, Artificial Sequence
  MKO10112310_B_Rcan1
  gRNA
aactgtttgtcgggattggg

SEQ ID NO: 112311 - DNA, 20 bp, Artificial Sequence
  MKO10112311_B_Rcan2
  gRNA
gctaaaactctacttcgccc

SEQ ID NO: 112312 - DNA, 20 bp, Artificial Sequence
  MKO10112312_B_Rcan2
  gRNA
ttccactctggtcgcctgtg

SEQ ID NO: 112313 - DNA, 20 bp, Artificial Sequence
  MKO10112313_B_Rcan2
  gRNA
actggtgtggcatcgctgat

SEQ ID NO: 112314 - DNA, 20 bp, Artificial Sequence
  MKO10112314_B_Rcan3
  gRNA
aacagaaaatcacgcagacg

SEQ ID NO: 112315 - DNA, 20 bp, Artificial Sequence
  MKO10112315_B_Rcan3
  gRNA
tccgagacagcctgaaatct

SEQ ID NO: 112316 - DNA, 20 bp, Artificial Sequence
  MKO10112316_B_Rcan3
  gRNA
agacctctgtagcagcgacc

SEQ ID NO: 112317 - DNA, 20 bp, Artificial Sequence
  MKO10112317_B_Rcbtb1
  gRNA
tgcagagccgccactctcac

SEQ ID NO: 112318 - DNA, 20 bp, Artificial Sequence
  MKO10112318_B_Rcbtb1
  gRNA
aaacagtttgtaactttccg

SEQ ID NO: 112319 - DNA, 20 bp, Artificial Sequence
  MKO10112319_B_Rcbtb1
  gRNA
gcacggcatgtgtgtgaacc

SEQ ID NO: 112320 - DNA, 20 bp, Artificial Sequence
  MKO10112320_B_Rcbtb2
  gRNA
ttgacaaattcgtagagata

SEQ ID NO: 112321 - DNA, 20 bp, Artificial Sequence
  MKO10112321_B_Rcbtb2
  gRNA
tcgttgtcccattgcccagc

SEQ ID NO: 112322 - DNA, 20 bp, Artificial Sequence
  MKO10112322_B_Rcbtb2
  gRNA
cccattccccgaagagtcac

SEQ ID NO: 112323 - DNA, 20 bp, Artificial Sequence
  MKO10112323_B_Rcc1
  gRNA
accctcgtcattgcagccaa

SEQ ID NO: 112324 - DNA, 20 bp, Artificial Sequence
  MKO10112324_B_Rcc1
  gRNA
acccgaggccacctttacca

SEQ ID NO: 112325 - DNA, 20 bp, Artificial Sequence
  MKO10112325_B_Rcc1
  gRNA
ccaagcgcatagctaagaga

SEQ ID NO: 112326 - DNA, 20 bp, Artificial Sequence
  MKO10112326_B_Rcc2
  gRNA
ttcgcacccggactcctgac

SEQ ID NO: 112327 - DNA, 20 bp, Artificial Sequence
  MKO10112327_B_Rcc2
  gRNA
ccttgcaggtcggaatgaga

SEQ ID NO: 112328 - DNA, 20 bp, Artificial Sequence
  MKO10112328_B_Rcc2
  gRNA
gcaaccaactgggacttgat

SEQ ID NO: 112329 - DNA, 20 bp, Artificial Sequence
  MKO10112329_B_Rccd1
  gRNA
tttgatcaggcatggacagc

SEQ ID NO: 112330 - DNA, 20 bp, Artificial Sequence
  MKO10112330_B_Rccd1
  gRNA
cagccaccttagccatccgc

SEQ ID NO: 112331 - DNA, 20 bp, Artificial Sequence
  MKO10112331_B_Rccd1
  gRNA
aaacgggggatatttatatc

SEQ ID NO: 112332 - DNA, 20 bp, Artificial Sequence
  MKO10112332_B_Rce1
  gRNA
agttattgcaccgctgacag

SEQ ID NO: 112333 - DNA, 20 bp, Artificial Sequence
  MKO10112333_B_Rce1
  gRNA
gctgcccctgctgctaacta

SEQ ID NO: 112334 - DNA, 20 bp, Artificial Sequence
  MKO10112334_B_Rce1
  gRNA
caaccttcagcccatctgtc

SEQ ID NO: 112335 - DNA, 20 bp, Artificial Sequence
  MKO10112335_B_Rchy1
  gRNA
gaattgtccaatatgcttgg

SEQ ID NO: 112336 - DNA, 20 bp, Artificial Sequence
  MKO10112336_B_Rchy1
  gRNA
tacagtcttcacaagtctgc

SEQ ID NO: 112337 - DNA, 20 bp, Artificial Sequence
  MKO10112337_B_Rchy1
  gRNA
gaagactgtagcacattgtt

SEQ ID NO: 112338 - DNA, 20 bp, Artificial Sequence
  MKO10112338_B_Rcl1
  gRNA
gatttcaattcgagaaccat

SEQ ID NO: 112339 - DNA, 20 bp, Artificial Sequence
  MKO10112339_B_Rcl1
  gRNA
ctccctctactgaaacagtt

SEQ ID NO: 112340 - DNA, 20 bp, Artificial Sequence
  MKO10112340_B_Rcl1
  gRNA
aatcaagcggatcagaggaa

SEQ ID NO: 112341 - DNA, 20 bp, Artificial Sequence
  MKO10112341_B_Rcn1
  gRNA
actcctcccgagtagctgtc

SEQ ID NO: 112342 - DNA, 20 bp, Artificial Sequence
  MKO10112342_B_Rcn1
  gRNA
ttaaacctcctctcatctcg

SEQ ID NO: 112343 - DNA, 20 bp, Artificial Sequence
  MKO10112343_B_Rcn1
  gRNA
atgataatgtcgctaaagtc

SEQ ID NO: 112344 - DNA, 20 bp, Artificial Sequence
  MKO10112344_B_Rcn2
  gRNA
atcgtctttgctgctcttcg

SEQ ID NO: 112345 - DNA, 20 bp, Artificial Sequence
  MKO10112345_B_Rcn2
  gRNA
ataggagttcgtcatccaag

SEQ ID NO: 112346 - DNA, 20 bp, Artificial Sequence
  MKO10112346_B_Rcn2
  gRNA
gtcatatagtcaacttcttc

SEQ ID NO: 112347 - DNA, 20 bp, Artificial Sequence
  MKO10112347_B_Rcn3
  gRNA
cccaacccacgcgcccgtcg

SEQ ID NO: 112348 - DNA, 20 bp, Artificial Sequence
  MKO10112348_B_Rcn3
  gRNA
ttcagcggacctgtactccg

SEQ ID NO: 112349 - DNA, 20 bp, Artificial Sequence
  MKO10112349_B_Rcn3
  gRNA
atggcagtgaagtcggttac

SEQ ID NO: 112350 - DNA, 20 bp, Artificial Sequence
  MKO10112350_B_Rcor1
  gRNA
tcttctacagtccactcatc

SEQ ID NO: 112351 - DNA, 20 bp, Artificial Sequence
  MKO10112351_B_Rcor1
  gRNA
gttgtacccgtgcttctctt

SEQ ID NO: 112352 - DNA, 20 bp, Artificial Sequence
  MKO10112352_B_Rcor1
  gRNA
tgataaatccatagcaagtt

SEQ ID NO: 112353 - DNA, 20 bp, Artificial Sequence
  MKO10112353_B_Rcor2
  gRNA
ccctgcacgctatagcaaca

SEQ ID NO: 112354 - DNA, 20 bp, Artificial Sequence
  MKO10112354_B_Rcor2
  gRNA
tccttgttgctatagcgtgc

SEQ ID NO: 112355 - DNA, 20 bp, Artificial Sequence
  MKO10112355_B_Rcor2
  gRNA
gcatggctataacattgagc

SEQ ID NO: 112356 - DNA, 20 bp, Artificial Sequence
  MKO10112356_B_Rcor3
  gRNA
ccctaacttcacgccctttc

SEQ ID NO: 112357 - DNA, 20 bp, Artificial Sequence
  MKO10112357_B_Rcor3
  gRNA
aaaaacttacatttggcatc

SEQ ID NO: 112358 - DNA, 20 bp, Artificial Sequence
  MKO10112358_B_Rcor3
  gRNA
gccattgcaaaagagaaaca

SEQ ID NO: 112359 - DNA, 20 bp, Artificial Sequence
  MKO10112359_B_Rcsd1
  gRNA
acccctgatcgagaagcttc

SEQ ID NO: 112360 - DNA, 20 bp, Artificial Sequence
  MKO10112360_B_Rcsd1
  gRNA
cccgaaagcgcccagccagc

SEQ ID NO: 112361 - DNA, 20 bp, Artificial Sequence
  MKO10112361_B_Rcsd1
  gRNA
cccagctggctgggcgcttt

SEQ ID NO: 112362 - DNA, 20 bp, Artificial Sequence
  MKO10112362_B_Rcvrn
  gRNA
cagtcgcagaatttccttat

SEQ ID NO: 112363 - DNA, 20 bp, Artificial Sequence
  MKO10112363_B_Rcvrn
  gRNA
gggaggagtttcacatcctc

SEQ ID NO: 112364 - DNA, 20 bp, Artificial Sequence
  MKO10112364_B_Rcvrn
  gRNA
gagaagatctgggcattctt

SEQ ID NO: 112365 - DNA, 20 bp, Artificial Sequence
  MKO10112365_B_Rd3
  gRNA
tccactgacgtgtcagctta

SEQ ID NO: 112366 - DNA, 20 bp, Artificial Sequence
  MKO10112366_B_Rd3
  gRNA
tagaaagttgagcggcaaac

SEQ ID NO: 112367 - DNA, 20 bp, Artificial Sequence
  MKO10112367_B_Rd3
  gRNA
accttaggtccacctccttc

SEQ ID NO: 112368 - DNA, 20 bp, Artificial Sequence
  MKO10112368_B_Rdh10
  gRNA
tgttcagaggctgccgaatc

SEQ ID NO: 112369 - DNA, 20 bp, Artificial Sequence
  MKO10112369_B_Rdh10
  gRNA
ccacaccagcattattgacc

SEQ ID NO: 112370 - DNA, 20 bp, Artificial Sequence
  MKO10112370_B_Rdh10
  gRNA
tgaacatgcccgtgtctaca

SEQ ID NO: 112371 - DNA, 20 bp, Artificial Sequence
  MKO10112371_B_Rdh11
  gRNA
ccctactcgaagactgcaga

SEQ ID NO: 112372 - DNA, 20 bp, Artificial Sequence
  MKO10112372_B_Rdh11
  gRNA
gacaagttgactatccttga

SEQ ID NO: 112373 - DNA, 20 bp, Artificial Sequence
  MKO10112373_B_Rdh11
  gRNA
attagatgtgcacaccccac

SEQ ID NO: 112374 - DNA, 20 bp, Artificial Sequence
  MKO10112374_B_Rdh12
  gRNA
tgctaggaagcgttcagcaa

SEQ ID NO: 112375 - DNA, 20 bp, Artificial Sequence
  MKO10112375_B_Rdh12
  gRNA
gtcatcacaggtgccaacac

SEQ ID NO: 112376 - DNA, 20 bp, Artificial Sequence
  MKO10112376_B_Rdh12
  gRNA
ccactttggagtcaaccacc

SEQ ID NO: 112377 - DNA, 20 bp, Artificial Sequence
  MKO10112377_B_Rdh13
  gRNA
catcatcaatctctcgtccc

SEQ ID NO: 112378 - DNA, 20 bp, Artificial Sequence
  MKO10112378_B_Rdh13
  gRNA
tctacacaccttgcagccgg

SEQ ID NO: 112379 - DNA, 20 bp, Artificial Sequence
  MKO10112379_B_Rdh13
  gRNA
tcaacaacgcagccgtgatg

SEQ ID NO: 112380 - DNA, 20 bp, Artificial Sequence
  MKO10112380_B_Rdh14
  gRNA
ccatgatgacccgcgccccc

SEQ ID NO: 112381 - DNA, 20 bp, Artificial Sequence
  MKO10112381_B_Rdh14
  gRNA
aaacccccgcattattgatc

SEQ ID NO: 112382 - DNA, 20 bp, Artificial Sequence
  MKO10112382_B_Rdh14
  gRNA
ctgttatagtcgaagcaaac

SEQ ID NO: 112383 - DNA, 20 bp, Artificial Sequence
  MKO10112383_B_Rdh16
  gRNA
tgcagtcagtcaccccagac

SEQ ID NO: 112384 - DNA, 20 bp, Artificial Sequence
  MKO10112384_B_Rdh16
  gRNA
agaagcgcagaagcgtccac

SEQ ID NO: 112385 - DNA, 20 bp, Artificial Sequence
  MKO10112385_B_Rdh16
  gRNA
ggacgcttctgcgcttcttc

SEQ ID NO: 112386 - DNA, 20 bp, Artificial Sequence
  MKO10112386_B_Rdh19
  gRNA
acagtcccaccagtgatact

SEQ ID NO: 112387 - DNA, 20 bp, Artificial Sequence
  MKO10112387_B_Rdh19
  gRNA
ccacagcatctgggtatttg

SEQ ID NO: 112388 - DNA, 20 bp, Artificial Sequence
  MKO10112388_B_Rdh19
  gRNA
aggagggaactctcctactt

SEQ ID NO: 112389 - DNA, 20 bp, Artificial Sequence
  MKO10112389_B_Rdh1
  gRNA
ggtcaacgtctccagcgtca

SEQ ID NO: 112390 - DNA, 20 bp, Artificial Sequence
  MKO10112390_B_Rdh1
  gRNA
acctcttgtccaattcgttt

SEQ ID NO: 112391 - DNA, 20 bp, Artificial Sequence
  MKO10112391_B_Rdh1
  gRNA
gtaaaccatgtggctctacc

SEQ ID NO: 112392 - DNA, 20 bp, Artificial Sequence
  MKO10112392_B_Rdh5
  gRNA
ccccgaacacgctacagccc

SEQ ID NO: 112393 - DNA, 20 bp, Artificial Sequence
  MKO10112393_B_Rdh5
  gRNA
ctctggctttgggcgccttc

SEQ ID NO: 112394 - DNA, 20 bp, Artificial Sequence
  MKO10112394_B_Rdh5
  gRNA
ctgtgacccagaactaacga

SEQ ID NO: 112395 - DNA, 20 bp, Artificial Sequence
  MKO10112395_B_Rdh7
  gRNA
ccagctgagtatcttgtgcg

SEQ ID NO: 112396 - DNA, 20 bp, Artificial Sequence
  MKO10112396_B_Rdh7
  gRNA
gtgtctttgctatcaatgag

SEQ ID NO: 112397 - DNA, 20 bp, Artificial Sequence
  MKO10112397_B_Rdh7
  gRNA
atgctcagatgacctgtctg

SEQ ID NO: 112398 - DNA, 20 bp, Artificial Sequence
  MKO10112398_B_Rdh8
  gRNA
agggtgtcagggtccgtgtc

SEQ ID NO: 112399 - DNA, 20 bp, Artificial Sequence
  MKO10112399_B_Rdh8
  gRNA
gcctccaagtttgccctaga

SEQ ID NO: 112400 - DNA, 20 bp, Artificial Sequence
  MKO10112400_B_Rdh8
  gRNA
tatcccttagtgaacaatgc

SEQ ID NO: 112401 - DNA, 20 bp, Artificial Sequence
  MKO10112401_B_Rdh9
  gRNA
caacgagtggatgaagaaac

SEQ ID NO: 112402 - DNA, 20 bp, Artificial Sequence
  MKO10112402_B_Rdh9
  gRNA
tcagggaagtccaatagaga

SEQ ID NO: 112403 - DNA, 20 bp, Artificial Sequence
  MKO10112403_B_Rdh9
  gRNA
acgctccttcacccactgag

SEQ ID NO: 112404 - DNA, 20 bp, Artificial Sequence
  MKO10112404_B_Rdm1
  gRNA
aggcatctgatacagccgcc

SEQ ID NO: 112405 - DNA, 20 bp, Artificial Sequence
  MKO10112405_B_Rdm1
  gRNA
gtttcccatcgcaagccttc

SEQ ID NO: 112406 - DNA, 20 bp, Artificial Sequence
  MKO10112406_B_Rdm1
  gRNA
agtcctcgtttcttatgaag

SEQ ID NO: 112407 - DNA, 20 bp, Artificial Sequence
  MKO10112407_B_Rdx
  gRNA
ttacaggttgtaaaaacagt

SEQ ID NO: 112408 - DNA, 20 bp, Artificial Sequence
  MKO10112408_B_Rdx
  gRNA
caatgtaagagtaactacaa

SEQ ID NO: 112409 - DNA, 20 bp, Artificial Sequence
  MKO10112409_B_Rdx
  gRNA
ctgcaatatgtagacagcaa

SEQ ID NO: 112410 - DNA, 20 bp, Artificial Sequence
  MKO10112410_B_Rec8
  gRNA
gtaggtgctccaggatatgc

SEQ ID NO: 112411 - DNA, 20 bp, Artificial Sequence
  MKO10112411_B_Rec8
  gRNA
tccaggctggcagcaacccg

SEQ ID NO: 112412 - DNA, 20 bp, Artificial Sequence
  MKO10112412_B_Rec8
  gRNA
gcttcaccaaacggctgcct

SEQ ID NO: 112413 - DNA, 20 bp, Artificial Sequence
  MKO10112413_B_Reck
  gRNA
gtaagactcaccattgtttc

SEQ ID NO: 112414 - DNA, 20 bp, Artificial Sequence
  MKO10112414_B_Reck
  gRNA
gtgccgtgatgtatgtgagc

SEQ ID NO: 112415 - DNA, 20 bp, Artificial Sequence
  MKO10112415_B_Reck
  gRNA
tctgcaacagatgtttcagt

SEQ ID NO: 112416 - DNA, 20 bp, Artificial Sequence
  MKO10112416_B_Recql4
  gRNA
tgctcaccgcgggtctcttc

SEQ ID NO: 112417 - DNA, 20 bp, Artificial Sequence
  MKO10112417_B_Recql4
  gRNA
cctgacgcaccgcctgcttt

SEQ ID NO: 112418 - DNA, 20 bp, Artificial Sequence
  MKO10112418_B_Recql4
  gRNA
tgagtaccgtaacctaaagc

SEQ ID NO: 112419 - DNA, 20 bp, Artificial Sequence
  MKO10112419_B_Recql5
  gRNA
gactacaatggtgatcccac

SEQ ID NO: 112420 - DNA, 20 bp, Artificial Sequence
  MKO10112420_B_Recql5
  gRNA
attgttgcgaccatcagttt

SEQ ID NO: 112421 - DNA, 20 bp, Artificial Sequence
  MKO10112421_B_Recql5
  gRNA
cagcaggggtgtgaacgcca

SEQ ID NO: 112422 - DNA, 20 bp, Artificial Sequence
  MKO10112422_B_Recql
  gRNA
tgccattgacatccagattc

SEQ ID NO: 112423 - DNA, 20 bp, Artificial Sequence
  MKO10112423_B_Recql
  gRNA
atctttcttgtcatgcccac

SEQ ID NO: 112424 - DNA, 20 bp, Artificial Sequence
  MKO10112424_B_Recql
  gRNA
gttgaatgcttccagctcta

SEQ ID NO: 112425 - DNA, 20 bp, Artificial Sequence
  MKO10112425_B_Reep1
  gRNA
cccgcttcccaaagtgcaca

SEQ ID NO: 112426 - DNA, 20 bp, Artificial Sequence
  MKO10112426_B_Reep1
  gRNA
tatatttgccctcttcacca

SEQ ID NO: 112427 - DNA, 20 bp, Artificial Sequence
  MKO10112427_B_Reep1
  gRNA
gatgaacaaacttcctgtac

SEQ ID NO: 112428 - DNA, 20 bp, Artificial Sequence
  MKO10112428_B_Reep2
  gRNA
cacggccttgtaggaagaat

SEQ ID NO: 112429 - DNA, 20 bp, Artificial Sequence
  MKO10112429_B_Reep2
  gRNA
gggcaagaggggcctgaacc

SEQ ID NO: 112430 - DNA, 20 bp, Artificial Sequence
  MKO10112430_B_Reep2
  gRNA
acactggagcccttggtgta

SEQ ID NO: 112431 - DNA, 20 bp, Artificial Sequence
  MKO10112431_B_Reep3
  gRNA
tggccgatcagacacttgca

SEQ ID NO: 112432 - DNA, 20 bp, Artificial Sequence
  MKO10112432_B_Reep3
  gRNA
cgtgaagacgaaaaacgtca

SEQ ID NO: 112433 - DNA, 20 bp, Artificial Sequence
  MKO10112433_B_Reep3
  gRNA
tatgagacaatggtgaattt

SEQ ID NO: 112434 - DNA, 20 bp, Artificial Sequence
  MKO10112434_B_Reep4
  gRNA
ccgcttcccaaaactgagca

SEQ ID NO: 112435 - DNA, 20 bp, Artificial Sequence
  MKO10112435_B_Reep4
  gRNA
tgctgttccaggctcatatt

SEQ ID NO: 112436 - DNA, 20 bp, Artificial Sequence
  MKO10112436_B_Reep4
  gRNA
tcctgcgtatgcttcctaca

SEQ ID NO: 112437 - DNA, 20 bp, Artificial Sequence
  MKO10112437_B_Reep5
  gRNA
atggcccccagcccggctaa

SEQ ID NO: 112438 - DNA, 20 bp, Artificial Sequence
  MKO10112438_B_Reep5
  gRNA
cgaaacctatcaggttgcag

SEQ ID NO: 112439 - DNA, 20 bp, Artificial Sequence
  MKO10112439_B_Reep5
  gRNA
taccttcagcatgtagtaga

SEQ ID NO: 112440 - DNA, 20 bp, Artificial Sequence
  MKO10112440_B_Reep6
  gRNA
agagtggtcttatgacgcga

SEQ ID NO: 112441 - DNA, 20 bp, Artificial Sequence
  MKO10112441_B_Reep6
  gRNA
ggtgtacgccctgttcggtc

SEQ ID NO: 112442 - DNA, 20 bp, Artificial Sequence
  MKO10112442_B_Reep6
  gRNA
cgtaaccgaacagaagatac

SEQ ID NO: 112443 - DNA, 20 bp, Artificial Sequence
  MKO10112443_B_Reg1
  gRNA
tcactgaagaccgtttaact

SEQ ID NO: 112444 - DNA, 20 bp, Artificial Sequence
  MKO10112444_B_Reg1
  gRNA
gccactctccttaatcagag

SEQ ID NO: 112445 - DNA, 20 bp, Artificial Sequence
  MKO10112445_B_Reg1
  gRNA
ctgtaggcattggaaccttc

SEQ ID NO: 112446 - DNA, 20 bp, Artificial Sequence
  MKO10112446_B_Reg2
  gRNA
accactctccttaaccagcg

SEQ ID NO: 112447 - DNA, 20 bp, Artificial Sequence
  MKO10112447_B_Reg2
  gRNA
taattgaagaccgtttgacc

SEQ ID NO: 112448 - DNA, 20 bp, Artificial Sequence
  MKO10112448_B_Reg2
  gRNA
ccataggcgttggcaccctc

SEQ ID NO: 112449 - DNA, 20 bp, Artificial Sequence
  MKO10112449_B_Reg3a
  gRNA
tgggctccatgatccaacaa

SEQ ID NO: 112450 - DNA, 20 bp, Artificial Sequence
  MKO10112450_B_Reg3a
  gRNA
atctcaccattgttggatca

SEQ ID NO: 112451 - DNA, 20 bp, Artificial Sequence
  MKO10112451_B_Reg3a
  gRNA
gtgtagggtcaacaacccaa

SEQ ID NO: 112452 - DNA, 20 bp, Artificial Sequence
  MKO10112452_B_Reg3b
  gRNA
cactagggtgcagaacccaa

SEQ ID NO: 112453 - DNA, 20 bp, Artificial Sequence
  MKO10112453_B_Reg3b
  gRNA
gccttagaccgtgctttctg

SEQ ID NO: 112454 - DNA, 20 bp, Artificial Sequence
  MKO10112454_B_Reg3b
  gRNA
ccctatgtctgcaaatttac

SEQ ID NO: 112455 - DNA, 20 bp, Artificial Sequence
  MKO10112455_B_Reg3d
  gRNA
tctctgcaggttatcagaag

SEQ ID NO: 112456 - DNA, 20 bp, Artificial Sequence
  MKO10112456_B_Reg3d
  gRNA
ctattgctatttactgattc

SEQ ID NO: 112457 - DNA, 20 bp, Artificial Sequence
  MKO10112457_B_Reg3d
  gRNA
agccataagcttgggcttct

SEQ ID NO: 112458 - DNA, 20 bp, Artificial Sequence
  MKO10112458_B_Reg3g
  gRNA
tagggctatgaacccaacag

SEQ ID NO: 112459 - DNA, 20 bp, Artificial Sequence
  MKO10112459_B_Reg3g
  gRNA
ttcacgtagcagctgcccca

SEQ ID NO: 112460 - DNA, 20 bp, Artificial Sequence
  MKO10112460_B_Reg3g
  gRNA
tgtttagtgtatctaaaaac

SEQ ID NO: 112461 - DNA, 20 bp, Artificial Sequence
  MKO10112461_B_Reg4
  gRNA
ctacaaacctgtacagacgc

SEQ ID NO: 112462 - DNA, 20 bp, Artificial Sequence
  MKO10112462_B_Reg4
  gRNA
acttccggaagctaagaaac

SEQ ID NO: 112463 - DNA, 20 bp, Artificial Sequence
  MKO10112463_B_Reg4
  gRNA
gtcatatcaaagtacataac

SEQ ID NO: 112464 - DNA, 20 bp, Artificial Sequence
  MKO10112464_B_Rela
  gRNA
ctgccgggatggctactatg

SEQ ID NO: 112465 - DNA, 20 bp, Artificial Sequence
  MKO10112465_B_Rela
  gRNA
accgtgaaaggggttattgt

SEQ ID NO: 112466 - DNA, 20 bp, Artificial Sequence
  MKO10112466_B_Rela
  gRNA
acttacctgagggaaagatg

SEQ ID NO: 112467 - DNA, 20 bp, Artificial Sequence
  MKO10112467_B_Relb
  gRNA
ggtacacccacatagcctcg

SEQ ID NO: 112468 - DNA, 20 bp, Artificial Sequence
  MKO10112468_B_Relb
  gRNA
cctctcttccctgtcactaa

SEQ ID NO: 112469 - DNA, 20 bp, Artificial Sequence
  MKO10112469_B_Relb
  gRNA
ccgttagtgacagggaagag

SEQ ID NO: 112470 - DNA, 20 bp, Artificial Sequence
  MKO10112470_B_Rell1
  gRNA
atcgcttgtgcctgcatcgc

SEQ ID NO: 112471 - DNA, 20 bp, Artificial Sequence
  MKO10112471_B_Rell1
  gRNA
ctaccggtgtacaacagagg

SEQ ID NO: 112472 - DNA, 20 bp, Artificial Sequence
  MKO10112472_B_Rell1
  gRNA
tgcagatatcttgaaagcta

SEQ ID NO: 112473 - DNA, 20 bp, Artificial Sequence
  MKO10112473_B_Rell2
  gRNA
tgaagacgatgacgtgaatg

SEQ ID NO: 112474 - DNA, 20 bp, Artificial Sequence
  MKO10112474_B_Rell2
  gRNA
cttccttagagcgaccctga

SEQ ID NO: 112475 - DNA, 20 bp, Artificial Sequence
  MKO10112475_B_Rell2
  gRNA
cgctgcatcatccaaaatga

SEQ ID NO: 112476 - DNA, 20 bp, Artificial Sequence
  MKO10112476_B_Reln
  gRNA
ggctccagcgcctttggatt

SEQ ID NO: 112477 - DNA, 20 bp, Artificial Sequence
  MKO10112477_B_Reln
  gRNA
gtgcgtctttgaaaatcacc

SEQ ID NO: 112478 - DNA, 20 bp, Artificial Sequence
  MKO10112478_B_Reln
  gRNA
taaccagtttatgtgcagtg

SEQ ID NO: 112479 - DNA, 20 bp, Artificial Sequence
  MKO10112479_B_Relt
  gRNA
tccgtgtcagccatgttcca

SEQ ID NO: 112480 - DNA, 20 bp, Artificial Sequence
  MKO10112480_B_Relt
  gRNA
ccaagtactggtggctgtga

SEQ ID NO: 112481 - DNA, 20 bp, Artificial Sequence
  MKO10112481_B_Relt
  gRNA
tctcccacaggatccaggac

SEQ ID NO: 112482 - DNA, 20 bp, Artificial Sequence
  MKO10112482_B_Rel
  gRNA
cctcatcctcatgatttagt

SEQ ID NO: 112483 - DNA, 20 bp, Artificial Sequence
  MKO10112483_B_Rel
  gRNA
tgttcaattatttctacgta

SEQ ID NO: 112484 - DNA, 20 bp, Artificial Sequence
  MKO10112484_B_Rel
  gRNA
tacaacaaaggtctgcgttc

SEQ ID NO: 112485 - DNA, 20 bp, Artificial Sequence
  MKO10112485_B_Rem1
  gRNA
ctgcattgtcctggcggcgc

SEQ ID NO: 112486 - DNA, 20 bp, Artificial Sequence
  MKO10112486_B_Rem1
  gRNA
aaagctgctgcgatccgcta

SEQ ID NO: 112487 - DNA, 20 bp, Artificial Sequence
  MKO10112487_B_Rem1
  gRNA
gtacgagagaacgctgtcag

SEQ ID NO: 112488 - DNA, 20 bp, Artificial Sequence
  MKO10112488_B_Rem2
  gRNA
cgtgggcaagagcactctag

SEQ ID NO: 112489 - DNA, 20 bp, Artificial Sequence
  MKO10112489_B_Rem2
  gRNA
agttctccatctcgtgagca

SEQ ID NO: 112490 - DNA, 20 bp, Artificial Sequence
  MKO10112490_B_Rem2
  gRNA
agagtgacctggcccgctcc

SEQ ID NO: 112491 - DNA, 20 bp, Artificial Sequence
  MKO10112491_B_Ren1
  gRNA
tgactctccctgatccgtag

SEQ ID NO: 112492 - DNA, 20 bp, Artificial Sequence
  MKO10112492_B_Ren1
  gRNA
agccgcctctaccttgcttg

SEQ ID NO: 112493 - DNA, 20 bp, Artificial Sequence
  MKO10112493_B_Ren1
  gRNA
gaccaatcttacctcccccg

SEQ ID NO: 112494 - DNA, 20 bp, Artificial Sequence
  MKO10112494_B_Ren2
  gRNA
tgactctccctgatccgtag

SEQ ID NO: 112495 - DNA, 20 bp, Artificial Sequence
  MKO10112495_B_Ren2
  gRNA
agccgcctctaccttgcttg

SEQ ID NO: 112496 - DNA, 20 bp, Artificial Sequence
  MKO10112496_B_Ren2
  gRNA
gaccaatcttacctcccccg

SEQ ID NO: 112497 - DNA, 20 bp, Artificial Sequence
  MKO10112497_B_Renbp
  gRNA
ctgcatccagaagctcaaca

SEQ ID NO: 112498 - DNA, 20 bp, Artificial Sequence
  MKO10112498_B_Renbp
  gRNA
aggggcttcttcacatgtct

SEQ ID NO: 112499 - DNA, 20 bp, Artificial Sequence
  MKO10112499_B_Renbp
  gRNA
gatcatataccttcccatca

SEQ ID NO: 112500 - DNA, 20 bp, Artificial Sequence
  MKO10112500_B_Rep15
  gRNA
agaaggtaacgaagtggacg

SEQ ID NO: 112501 - DNA, 20 bp, Artificial Sequence
  MKO10112501_B_Rep15
  gRNA
ttcacagcaggtagctccga

SEQ ID NO: 112502 - DNA, 20 bp, Artificial Sequence
  MKO10112502_B_Rep15
  gRNA
tgcagcgagttcactgactg

SEQ ID NO: 112503 - DNA, 20 bp, Artificial Sequence
  MKO10112503_B_Repin1
  gRNA
cgaacgtcccttcgcctgcg

SEQ ID NO: 112504 - DNA, 20 bp, Artificial Sequence
  MKO10112504_B_Repin1
  gRNA
gcacgcgtgagtgcgccacc

SEQ ID NO: 112505 - DNA, 20 bp, Artificial Sequence
  MKO10112505_B_Repin1
  gRNA
agcttcgagctcatctgcga

SEQ ID NO: 112506 - DNA, 20 bp, Artificial Sequence
  MKO10112506_B_Reps1
  gRNA
tcacacccgagtaagagccc

SEQ ID NO: 112507 - DNA, 20 bp, Artificial Sequence
  MKO10112507_B_Reps1
  gRNA
aatggccccggtcctgtaag

SEQ ID NO: 112508 - DNA, 20 bp, Artificial Sequence
  MKO10112508_B_Reps1
  gRNA
aatagtgagagacctcttac

SEQ ID NO: 112509 - DNA, 20 bp, Artificial Sequence
  MKO10112509_B_Reps2
  gRNA
tttgtgatgtcgaagaatga

SEQ ID NO: 112510 - DNA, 20 bp, Artificial Sequence
  MKO10112510_B_Reps2
  gRNA
aaggacaccctctggtaatg

SEQ ID NO: 112511 - DNA, 20 bp, Artificial Sequence
  MKO10112511_B_Reps2
  gRNA
ttcttcgacatcacaaagcg

SEQ ID NO: 112512 - DNA, 20 bp, Artificial Sequence
  MKO10112512_B_Rer1
  gRNA
ttaaggcacgcagctacaaa

SEQ ID NO: 112513 - DNA, 20 bp, Artificial Sequence
  MKO10112513_B_Rer1
  gRNA
ccttacagatttatcagtcc

SEQ ID NO: 112514 - DNA, 20 bp, Artificial Sequence
  MKO10112514_B_Rer1
  gRNA
ctaccccctacacagccgtc

SEQ ID NO: 112515 - DNA, 20 bp, Artificial Sequence
  MKO10112515_B_Rere
  gRNA
atttgacgttcatgagtaga

SEQ ID NO: 112516 - DNA, 20 bp, Artificial Sequence
  MKO10112516_B_Rere
  gRNA
cagatccagtcatcaagaat

SEQ ID NO: 112517 - DNA, 20 bp, Artificial Sequence
  MKO10112517_B_Rere
  gRNA
tgcttaccagtttgaagtct

SEQ ID NO: 112518 - DNA, 20 bp, Artificial Sequence
  MKO10112518_B_Rergl
  gRNA
atattccccaatgaatcgct

SEQ ID NO: 112519 - DNA, 20 bp, Artificial Sequence
  MKO10112519_B_Rergl
  gRNA
cccagccaacctctcgcatg

SEQ ID NO: 112520 - DNA, 20 bp, Artificial Sequence
  MKO10112520_B_Rergl
  gRNA
aaacatcacctcgacctcca

SEQ ID NO: 112521 - DNA, 20 bp, Artificial Sequence
  MKO10112521_B_Rerg
  gRNA
agaatcaacctaccgacacc

SEQ ID NO: 112522 - DNA, 20 bp, Artificial Sequence
  MKO10112522_B_Rerg
  gRNA
tgggagtacgatccaaccct

SEQ ID NO: 112523 - DNA, 20 bp, Artificial Sequence
  MKO10112523_B_Rerg
  gRNA
agccatggctaagagcgcag

SEQ ID NO: 112524 - DNA, 20 bp, Artificial Sequence
  MKO10112524_B_Resp18
  gRNA
taccaccaaagtaatcccaa

SEQ ID NO: 112525 - DNA, 20 bp, Artificial Sequence
  MKO10112525_B_Resp18
  gRNA
ccattagagtccaacagtca

SEQ ID NO: 112526 - DNA, 20 bp, Artificial Sequence
  MKO10112526_B_Resp18
  gRNA
tcaccctacaggcatgttct

SEQ ID NO: 112527 - DNA, 20 bp, Artificial Sequence
  MKO10112527_B_Rest
  gRNA
ggggtcgtctccggccgaag

SEQ ID NO: 112528 - DNA, 20 bp, Artificial Sequence
  MKO10112528_B_Rest
  gRNA
ctcatctaacgcgacacatg

SEQ ID NO: 112529 - DNA, 20 bp, Artificial Sequence
  MKO10112529_B_Rest
  gRNA
gtcttctgagagcttgagta

SEQ ID NO: 112530 - DNA, 20 bp, Artificial Sequence
  MKO10112530_B_Retnla
  gRNA
ccaggatgccaactttgaat

SEQ ID NO: 112531 - DNA, 20 bp, Artificial Sequence
  MKO10112531_B_Retnla
  gRNA
agagagagtcttcgttacag

SEQ ID NO: 112532 - DNA, 20 bp, Artificial Sequence
  MKO10112532_B_Retnla
  gRNA
gcgtataaaagcatctcatc

SEQ ID NO: 112533 - DNA, 20 bp, Artificial Sequence
  MKO10112533_B_Retnlb
  gRNA
aaggaagctctcagtcgtca

SEQ ID NO: 112534 - DNA, 20 bp, Artificial Sequence
  MKO10112534_B_Retnlb
  gRNA
cttgcagggatggttgtcac

SEQ ID NO: 112535 - DNA, 20 bp, Artificial Sequence
  MKO10112535_B_Retnlb
  gRNA
ctcctcattcttaagccatt

SEQ ID NO: 112536 - DNA, 20 bp, Artificial Sequence
  MKO10112536_B_Retnlg
  gRNA
ccattgttgagcactgacag

SEQ ID NO: 112537 - DNA, 20 bp, Artificial Sequence
  MKO10112537_B_Retnlg
  gRNA
aaggaacttcttgccaatcg

SEQ ID NO: 112538 - DNA, 20 bp, Artificial Sequence
  MKO10112538_B_Retnlg
  gRNA
tttctcctgtactagtatca

SEQ ID NO: 112539 - DNA, 20 bp, Artificial Sequence
  MKO10112539_B_Retn
  gRNA
ttgtttgatcttcttgtcga

SEQ ID NO: 112540 - DNA, 20 bp, Artificial Sequence
  MKO10112540_B_Retn
  gRNA
tgctggacagtctcctccag

SEQ ID NO: 112541 - DNA, 20 bp, Artificial Sequence
  MKO10112541_B_Retn
  gRNA
gatgggacacagtggcatgc

SEQ ID NO: 112542 - DNA, 20 bp, Artificial Sequence
  MKO10112542_B_Retsat
  gRNA
caaggggcatattaccctcg

SEQ ID NO: 112543 - DNA, 20 bp, Artificial Sequence
  MKO10112543_B_Retsat
  gRNA
cgaatgcgggagggcaacat

SEQ ID NO: 112544 - DNA, 20 bp, Artificial Sequence
  MKO10112544_B_Retsat
  gRNA
ttatcccaggtggtggcccg

SEQ ID NO: 112545 - DNA, 20 bp, Artificial Sequence
  MKO10112545_B_Ret
  gRNA
gactcggcgcccaccttctc

SEQ ID NO: 112546 - DNA, 20 bp, Artificial Sequence
  MKO10112546_B_Ret
  gRNA
ggaactgcacgggtaacatg

SEQ ID NO: 112547 - DNA, 20 bp, Artificial Sequence
  MKO10112547_B_Ret
  gRNA
ccgttgtgacccagactgcc

SEQ ID NO: 112548 - DNA, 20 bp, Artificial Sequence
  MKO10112548_B_Rev1
  gRNA
tcagctctacaccaagccgt

SEQ ID NO: 112549 - DNA, 20 bp, Artificial Sequence
  MKO10112549_B_Rev1
  gRNA
tttctcaattcctccgcaga

SEQ ID NO: 112550 - DNA, 20 bp, Artificial Sequence
  MKO10112550_B_Rev1
  gRNA
caccctgttgttgagctgtt

SEQ ID NO: 112551 - DNA, 20 bp, Artificial Sequence
  MKO10112551_B_Rev3l
  gRNA
ttattcaagcatcaattgtc

SEQ ID NO: 112552 - DNA, 20 bp, Artificial Sequence
  MKO10112552_B_Rev3l
  gRNA
cacctaaataaagtgccagc

SEQ ID NO: 112553 - DNA, 20 bp, Artificial Sequence
  MKO10112553_B_Rev3l
  gRNA
ctatctttacaatcctgcaa

SEQ ID NO: 112554 - DNA, 20 bp, Artificial Sequence
  MKO10112554_B_Rex2
  gRNA
acagtgtctattaaccttca

SEQ ID NO: 112555 - DNA, 20 bp, Artificial Sequence
  MKO10112555_B_Rex2
  gRNA
tcgcattcattgcatttgta

SEQ ID NO: 112556 - DNA, 20 bp, Artificial Sequence
  MKO10112556_B_Rex2
  gRNA
tcagaaaatcactgcatatg

SEQ ID NO: 112557 - DNA, 20 bp, Artificial Sequence
  MKO10112557_B_Rexo1
  gRNA
gctgtgggcgatgcgcttgg

SEQ ID NO: 112558 - DNA, 20 bp, Artificial Sequence
  MKO10112558_B_Rexo1
  gRNA
ggctgccaggttcggggccg

SEQ ID NO: 112559 - DNA, 20 bp, Artificial Sequence
  MKO10112559_B_Rexo1
  gRNA
aggacttaccggcagccagt

SEQ ID NO: 112560 - DNA, 20 bp, Artificial Sequence
  MKO10112560_B_Rexo2
  gRNA
cttgcagtctggtcttacca

SEQ ID NO: 112561 - DNA, 20 bp, Artificial Sequence
  MKO10112561_B_Rexo2
  gRNA
tgctggacagcatgtcagac

SEQ ID NO: 112562 - DNA, 20 bp, Artificial Sequence
  MKO10112562_B_Rexo2
  gRNA
gaaggatcagattattgaga

SEQ ID NO: 112563 - DNA, 20 bp, Artificial Sequence
  MKO10112563_B_Rexo4
  gRNA
actagtatcttcctgtccgt

SEQ ID NO: 112564 - DNA, 20 bp, Artificial Sequence
  MKO10112564_B_Rexo4
  gRNA
tgtctcatagggaagacatc

SEQ ID NO: 112565 - DNA, 20 bp, Artificial Sequence
  MKO10112565_B_Rexo4
  gRNA
aatgttgaagggcagaatcc

SEQ ID NO: 112566 - DNA, 20 bp, Artificial Sequence
  MKO10112566_B_Rfc1
  gRNA
aaatagtcgagcactgacgt

SEQ ID NO: 112567 - DNA, 20 bp, Artificial Sequence
  MKO10112567_B_Rfc1
  gRNA
tgtctccaggtcaataactc

SEQ ID NO: 112568 - DNA, 20 bp, Artificial Sequence
  MKO10112568_B_Rfc1
  gRNA
gtcacctacgtctctgagac

SEQ ID NO: 112569 - DNA, 20 bp, Artificial Sequence
  MKO10112569_B_Rfc2
  gRNA
ctgtgtcaggggcatcgatg

SEQ ID NO: 112570 - DNA, 20 bp, Artificial Sequence
  MKO10112570_B_Rfc2
  gRNA
ctagaatgatgatcttgtgc

SEQ ID NO: 112571 - DNA, 20 bp, Artificial Sequence
  MKO10112571_B_Rfc2
  gRNA
actcacagcaatgatgatat

SEQ ID NO: 112572 - DNA, 20 bp, Artificial Sequence
  MKO10112572_B_Rfc3
  gRNA
tgtattctacgtgaacttta

SEQ ID NO: 112573 - DNA, 20 bp, Artificial Sequence
  MKO10112573_B_Rfc3
  gRNA
gcatctcctgaattacaact

SEQ ID NO: 112574 - DNA, 20 bp, Artificial Sequence
  MKO10112574_B_Rfc3
  gRNA
tttacctgggattaacttca

SEQ ID NO: 112575 - DNA, 20 bp, Artificial Sequence
  MKO10112575_B_Rfc4
  gRNA
gcactgcaaccacttcgtcc

SEQ ID NO: 112576 - DNA, 20 bp, Artificial Sequence
  MKO10112576_B_Rfc4
  gRNA
ttcgatgacttcagctgctc

SEQ ID NO: 112577 - DNA, 20 bp, Artificial Sequence
  MKO10112577_B_Rfc4
  gRNA
cagcagctagagagctcttt

SEQ ID NO: 112578 - DNA, 20 bp, Artificial Sequence
  MKO10112578_B_Rfc5
  gRNA
atttcagggttgagaagtac

SEQ ID NO: 112579 - DNA, 20 bp, Artificial Sequence
  MKO10112579_B_Rfc5
  gRNA
atgagatcggccagggtctg

SEQ ID NO: 112580 - DNA, 20 bp, Artificial Sequence
  MKO10112580_B_Rfc5
  gRNA
ctccttcacctccaagacca

SEQ ID NO: 112581 - DNA, 20 bp, Artificial Sequence
  MKO10112581_B_Rfesd
  gRNA
aaatatacttccgtctgtgt

SEQ ID NO: 112582 - DNA, 20 bp, Artificial Sequence
  MKO10112582_B_Rfesd
  gRNA
caaaggggaatatcatgcta

SEQ ID NO: 112583 - DNA, 20 bp, Artificial Sequence
  MKO10112583_B_Rfesd
  gRNA
ctcaatttctcccaagtgta

SEQ ID NO: 112584 - DNA, 20 bp, Artificial Sequence
  MKO10112584_B_Rffl
  gRNA
ggcgtggcccattcccctct

SEQ ID NO: 112585 - DNA, 20 bp, Artificial Sequence
  MKO10112585_B_Rffl
  gRNA
aggccgtggctcggaaccgt

SEQ ID NO: 112586 - DNA, 20 bp, Artificial Sequence
  MKO10112586_B_Rffl
  gRNA
acacaagcctattccaaccc

SEQ ID NO: 112587 - DNA, 20 bp, Artificial Sequence
  MKO10112587_B_Rfk
  gRNA
gagcggcgatgtccataaaa

SEQ ID NO: 112588 - DNA, 20 bp, Artificial Sequence
  MKO10112588_B_Rfk
  gRNA
ctatggggaaattctcaatg

SEQ ID NO: 112589 - DNA, 20 bp, Artificial Sequence
  MKO10112589_B_Rfk
  gRNA
tcacttatttctgcaattca

SEQ ID NO: 112590 - DNA, 20 bp, Artificial Sequence
  MKO10112590_B_Rfng
  gRNA
cactcacggtgccaccgcct

SEQ ID NO: 112591 - DNA, 20 bp, Artificial Sequence
  MKO10112591_B_Rfng
  gRNA
tatgataagttcctagaatc

SEQ ID NO: 112592 - DNA, 20 bp, Artificial Sequence
  MKO10112592_B_Rfng
  gRNA
agtcaaacacagtgaaattc

SEQ ID NO: 112593 - DNA, 20 bp, Artificial Sequence
  MKO10112593_B_Rfpl3s
  gRNA
gcccaggatcatgaatacag

SEQ ID NO: 112594 - DNA, 20 bp, Artificial Sequence
  MKO10112594_B_Rfpl3s
  gRNA
agaaagcactgatgatgatt

SEQ ID NO: 112595 - DNA, 20 bp, Artificial Sequence
  MKO10112595_B_Rfpl3s
  gRNA
ctgtgagcagaacaaaatga

SEQ ID NO: 112596 - DNA, 20 bp, Artificial Sequence
  MKO10112596_B_Rfpl4b
  gRNA
cgcaatcaaagcaaagtatg

SEQ ID NO: 112597 - DNA, 20 bp, Artificial Sequence
  MKO10112597_B_Rfpl4b
  gRNA
cccaccctttaaatcattag

SEQ ID NO: 112598 - DNA, 20 bp, Artificial Sequence
  MKO10112598_B_Rfpl4b
  gRNA
tcgtcttctcaccaagcaac

SEQ ID NO: 112599 - DNA, 20 bp, Artificial Sequence
  MKO10112599_B_Rfpl4
  gRNA
tatccacagttcaagtacac

SEQ ID NO: 112600 - DNA, 20 bp, Artificial Sequence
  MKO10112600_B_Rfpl4
  gRNA
agatatgggagccatcgcta

SEQ ID NO: 112601 - DNA, 20 bp, Artificial Sequence
  MKO10112601_B_Rfpl4
  gRNA
agagtccattaatcgaaaaa

SEQ ID NO: 112602 - DNA, 20 bp, Artificial Sequence
  MKO10112602_B_Rft1
  gRNA
cagcacaccagttccatagt

SEQ ID NO: 112603 - DNA, 20 bp, Artificial Sequence
  MKO10112603_B_Rft1
  gRNA
ggttcttgctgagagcatgt

SEQ ID NO: 112604 - DNA, 20 bp, Artificial Sequence
  MKO10112604_B_Rft1
  gRNA
tgcccacaatctcctttgac

SEQ ID NO: 112605 - DNA, 20 bp, Artificial Sequence
  MKO10112605_B_Rftn1
  gRNA
ctggtcggccaggtgttcta

SEQ ID NO: 112606 - DNA, 20 bp, Artificial Sequence
  MKO10112606_B_Rftn1
  gRNA
gtgaacgccgtcttccagct

SEQ ID NO: 112607 - DNA, 20 bp, Artificial Sequence
  MKO10112607_B_Rftn1
  gRNA
tgagcagtctagacgccagc

SEQ ID NO: 112608 - DNA, 20 bp, Artificial Sequence
  MKO10112608_B_Rftn2
  gRNA
cagttaccttctccccgctt

SEQ ID NO: 112609 - DNA, 20 bp, Artificial Sequence
  MKO10112609_B_Rftn2
  gRNA
ccagctacgctaacccaaag

SEQ ID NO: 112610 - DNA, 20 bp, Artificial Sequence
  MKO10112610_B_Rftn2
  gRNA
ggagtgtccactaacttgtg

SEQ ID NO: 112611 - DNA, 20 bp, Artificial Sequence
  MKO10112611_B_Rfwd2
  gRNA
caaaatgtggccacagcttt

SEQ ID NO: 112612 - DNA, 20 bp, Artificial Sequence
  MKO10112612_B_Rfwd2
  gRNA
caagtgtattcatcagagtt

SEQ ID NO: 112613 - DNA, 20 bp, Artificial Sequence
  MKO10112613_B_Rfwd2
  gRNA
caaacagaagcaaagatttg

SEQ ID NO: 112614 - DNA, 20 bp, Artificial Sequence
  MKO10112614_B_Rfwd3
  gRNA
ttccatagcagatagcatgt

SEQ ID NO: 112615 - DNA, 20 bp, Artificial Sequence
  MKO10112615_B_Rfwd3
  gRNA
acaaacacgaaaatgtcctc

SEQ ID NO: 112616 - DNA, 20 bp, Artificial Sequence
  MKO10112616_B_Rfwd3
  gRNA
gaacctgaagccaacattcc

SEQ ID NO: 112617 - DNA, 20 bp, Artificial Sequence
  MKO10112617_B_Rfx1
  gRNA
cacagtctcactagcccgca

SEQ ID NO: 112618 - DNA, 20 bp, Artificial Sequence
  MKO10112618_B_Rfx1
  gRNA
ccagcaccgggcactaagag

SEQ ID NO: 112619 - DNA, 20 bp, Artificial Sequence
  MKO10112619_B_Rfx1
  gRNA
tcaggcacctcttgggtgac

SEQ ID NO: 112620 - DNA, 20 bp, Artificial Sequence
  MKO10112620_B_Rfx2
  gRNA
gggcatcaccatggacgtct

SEQ ID NO: 112621 - DNA, 20 bp, Artificial Sequence
  MKO10112621_B_Rfx2
  gRNA
ttgtgccgtccatgccccca

SEQ ID NO: 112622 - DNA, 20 bp, Artificial Sequence
  MKO10112622_B_Rfx2
  gRNA
ggacgcagagccactgacgc

SEQ ID NO: 112623 - DNA, 20 bp, Artificial Sequence
  MKO10112623_B_Rfx3
  gRNA
tggttgtacagcgtgctcct

SEQ ID NO: 112624 - DNA, 20 bp, Artificial Sequence
  MKO10112624_B_Rfx3
  gRNA
agtgatactgtctataccaa

SEQ ID NO: 112625 - DNA, 20 bp, Artificial Sequence
  MKO10112625_B_Rfx3
  gRNA
tccacatactgcacctgagc

SEQ ID NO: 112626 - DNA, 20 bp, Artificial Sequence
  MKO10112626_B_Rfx4
  gRNA
tcaccgctatgccatagtaa

SEQ ID NO: 112627 - DNA, 20 bp, Artificial Sequence
  MKO10112627_B_Rfx4
  gRNA
ccgaaagtttgccaagcagc

SEQ ID NO: 112628 - DNA, 20 bp, Artificial Sequence
  MKO10112628_B_Rfx4
  gRNA
aataagagccaactttgatg

SEQ ID NO: 112629 - DNA, 20 bp, Artificial Sequence
  MKO10112629_B_Rfx5
  gRNA
ggcccagcgttggcgagaag

SEQ ID NO: 112630 - DNA, 20 bp, Artificial Sequence
  MKO10112630_B_Rfx5
  gRNA
gcatcatagacgctctgctt

SEQ ID NO: 112631 - DNA, 20 bp, Artificial Sequence
  MKO10112631_B_Rfx5
  gRNA
agagcgtctatgatgcctat

SEQ ID NO: 112632 - DNA, 20 bp, Artificial Sequence
  MKO10112632_B_Rfx6
  gRNA
ggcatttcttgcattgttgc

SEQ ID NO: 112633 - DNA, 20 bp, Artificial Sequence
  MKO10112633_B_Rfx6
  gRNA
ctgtgactcaattctttata

SEQ ID NO: 112634 - DNA, 20 bp, Artificial Sequence
  MKO10112634_B_Rfx6
  gRNA
ctcttcaaagttcccattga

SEQ ID NO: 112635 - DNA, 20 bp, Artificial Sequence
  MKO10112635_B_Rfx7
  gRNA
ccattaagtgctgctgactt

SEQ ID NO: 112636 - DNA, 20 bp, Artificial Sequence
  MKO10112636_B_Rfx7
  gRNA
tctgcactgctaagaccaga

SEQ ID NO: 112637 - DNA, 20 bp, Artificial Sequence
  MKO10112637_B_Rfx7
  gRNA
caaaactgtacaatctaaag

SEQ ID NO: 112638 - DNA, 20 bp, Artificial Sequence
  MKO10112638_B_Rfx8
  gRNA
gcagtaatgagcgtagaaga

SEQ ID NO: 112639 - DNA, 20 bp, Artificial Sequence
  MKO10112639_B_Rfx8
  gRNA
attcccacagcttgtgcgct

SEQ ID NO: 112640 - DNA, 20 bp, Artificial Sequence
  MKO10112640_B_Rfx8
  gRNA
agtggcaatcttattgcctt

SEQ ID NO: 112641 - DNA, 20 bp, Artificial Sequence
  MKO10112641_B_Rfxank
  gRNA
gtccgtgtagccacccatac

SEQ ID NO: 112642 - DNA, 20 bp, Artificial Sequence
  MKO10112642_B_Rfxank
  gRNA
tccgcagatgatccttcagt

SEQ ID NO: 112643 - DNA, 20 bp, Artificial Sequence
  MKO10112643_B_Rfxank
  gRNA
agacctcattcccacgttgc

SEQ ID NO: 112644 - DNA, 20 bp, Artificial Sequence
  MKO10112644_B_Rfxap
  gRNA
aagcctcacactggcgctcc

SEQ ID NO: 112645 - DNA, 20 bp, Artificial Sequence
  MKO10112645_B_Rfxap
  gRNA
gctactaaatcagcaagttt

SEQ ID NO: 112646 - DNA, 20 bp, Artificial Sequence
  MKO10112646_B_Rfxap
  gRNA
aacacttgctctagaagagt

SEQ ID NO: 112647 - DNA, 20 bp, Artificial Sequence
  MKO10112647_B_Rgag1
  gRNA
ggcctgcactctgtcgaagg

SEQ ID NO: 112648 - DNA, 20 bp, Artificial Sequence
  MKO10112648_B_Rgag1
  gRNA
ttgaagcgtagtgaatgtaa

SEQ ID NO: 112649 - DNA, 20 bp, Artificial Sequence
  MKO10112649_B_Rgag1
  gRNA
aatgagcacttcatcctccg

SEQ ID NO: 112650 - DNA, 20 bp, Artificial Sequence
  MKO10112650_B_Rgag4
  gRNA
gctcgagacattgccccgca

SEQ ID NO: 112651 - DNA, 20 bp, Artificial Sequence
  MKO10112651_B_Rgag4
  gRNA
cagaccattagctccgccat

SEQ ID NO: 112652 - DNA, 20 bp, Artificial Sequence
  MKO10112652_B_Rgag4
  gRNA
gttgccccaagcgacctgca

SEQ ID NO: 112653 - DNA, 20 bp, Artificial Sequence
  MKO10112653_B_Rgcc
  gRNA
acctttccgaggagtgacag

SEQ ID NO: 112654 - DNA, 20 bp, Artificial Sequence
  MKO10112654_B_Rgcc
  gRNA
ctctttagtgtcacctaatt

SEQ ID NO: 112655 - DNA, 20 bp, Artificial Sequence
  MKO10112655_B_Rgcc
  gRNA
aaggtgcagactcagtgtac

SEQ ID NO: 112656 - DNA, 20 bp, Artificial Sequence
  MKO10112656_B_Rgl1
  gRNA
ccttggactcgggtgaactt

SEQ ID NO: 112657 - DNA, 20 bp, Artificial Sequence
  MKO10112657_B_Rgl1
  gRNA
cggccaataaaggagcgaga

SEQ ID NO: 112658 - DNA, 20 bp, Artificial Sequence
  MKO10112658_B_Rgl1
  gRNA
acacactcacttccggatca

SEQ ID NO: 112659 - DNA, 20 bp, Artificial Sequence
  MKO10112659_B_Rgl2
  gRNA
ctggcggcttgtgacagtaa

SEQ ID NO: 112660 - DNA, 20 bp, Artificial Sequence
  MKO10112660_B_Rgl2
  gRNA
gagtgccagcgcggagccgt

SEQ ID NO: 112661 - DNA, 20 bp, Artificial Sequence
  MKO10112661_B_Rgl2
  gRNA
ggctgacatgatgttcactc

SEQ ID NO: 112662 - DNA, 20 bp, Artificial Sequence
  MKO10112662_B_Rgl3
  gRNA
gaaaagcgactggcttggtc

SEQ ID NO: 112663 - DNA, 20 bp, Artificial Sequence
  MKO10112663_B_Rgl3
  gRNA
gccagcgctcgaccccagag

SEQ ID NO: 112664 - DNA, 20 bp, Artificial Sequence
  MKO10112664_B_Rgl3
  gRNA
ctgcccagcccaaaaagatt

SEQ ID NO: 112665 - DNA, 20 bp, Artificial Sequence
  MKO10112665_B_Rgma
  gRNA
gtgcgcacgctcccgccagc

SEQ ID NO: 112666 - DNA, 20 bp, Artificial Sequence
  MKO10112666_B_Rgma
  gRNA
gtcttcgacctcctcacgac

SEQ ID NO: 112667 - DNA, 20 bp, Artificial Sequence
  MKO10112667_B_Rgma
  gRNA
aggggcaggacgttcagccc

SEQ ID NO: 112668 - DNA, 20 bp, Artificial Sequence
  MKO10112668_B_Rgmb
  gRNA
cgttcgtcacttgaaccgaa

SEQ ID NO: 112669 - DNA, 20 bp, Artificial Sequence
  MKO10112669_B_Rgmb
  gRNA
gctgagcagtcccgccgccc

SEQ ID NO: 112670 - DNA, 20 bp, Artificial Sequence
  MKO10112670_B_Rgmb
  gRNA
gcggcgggactgctcagccc

SEQ ID NO: 112671 - DNA, 20 bp, Artificial Sequence
  MKO10112671_B_Rgn
  gRNA
atcagtatttgtcctagcca

SEQ ID NO: 112672 - DNA, 20 bp, Artificial Sequence
  MKO10112672_B_Rgn
  gRNA
cgaagtgccactgaactgac

SEQ ID NO: 112673 - DNA, 20 bp, Artificial Sequence
  MKO10112673_B_Rgn
  gRNA
cggccccagctgttcttgag

SEQ ID NO: 112674 - DNA, 20 bp, Artificial Sequence
  MKO10112674_B_Rgp1
  gRNA
ctgagagttctcgtgctgac

SEQ ID NO: 112675 - DNA, 20 bp, Artificial Sequence
  MKO10112675_B_Rgp1
  gRNA
gctagctggggagcgtctca

SEQ ID NO: 112676 - DNA, 20 bp, Artificial Sequence
  MKO10112676_B_Rgp1
  gRNA
tcacatgatttggactctcc

SEQ ID NO: 112677 - DNA, 20 bp, Artificial Sequence
  MKO10112677_B_Rgr
  gRNA
catagtggccccagcccatc

SEQ ID NO: 112678 - DNA, 20 bp, Artificial Sequence
  MKO10112678_B_Rgr
  gRNA
cctgaatgcccttgttgcag

SEQ ID NO: 112679 - DNA, 20 bp, Artificial Sequence
  MKO10112679_B_Rgr
  gRNA
taccgggagatggccactcc

SEQ ID NO: 112680 - DNA, 20 bp, Artificial Sequence
  MKO10112680_B_Rgs10
  gRNA
tcggctcactgaaaagattc

SEQ ID NO: 112681 - DNA, 20 bp, Artificial Sequence
  MKO10112681_B_Rgs10
  gRNA
gcgaagagaatgtcttgttt

SEQ ID NO: 112682 - DNA, 20 bp, Artificial Sequence
  MKO10112682_B_Rgs10
  gRNA
atcctccctggagaatcttc

SEQ ID NO: 112683 - DNA, 20 bp, Artificial Sequence
  MKO10112683_B_Rgs11
  gRNA
tctgaaccagccattccacg

SEQ ID NO: 112684 - DNA, 20 bp, Artificial Sequence
  MKO10112684_B_Rgs11
  gRNA
tctcgtccggcctgagtgtc

SEQ ID NO: 112685 - DNA, 20 bp, Artificial Sequence
  MKO10112685_B_Rgs11
  gRNA
aacacaagacaccctacttt

SEQ ID NO: 112686 - DNA, 20 bp, Artificial Sequence
  MKO10112686_B_Rgs12
  gRNA
tcctgtcaacattgacagcc

SEQ ID NO: 112687 - DNA, 20 bp, Artificial Sequence
  MKO10112687_B_Rgs12
  gRNA
aacatgactgaagcactcac

SEQ ID NO: 112688 - DNA, 20 bp, Artificial Sequence
  MKO10112688_B_Rgs12
  gRNA
tcctgcacatgacaaaaaag

SEQ ID NO: 112689 - DNA, 20 bp, Artificial Sequence
  MKO10112689_B_Rgs13
  gRNA
ccatcagactttccaaagat

SEQ ID NO: 112690 - DNA, 20 bp, Artificial Sequence
  MKO10112690_B_Rgs13
  gRNA
gttacctctctaggagactg

SEQ ID NO: 112691 - DNA, 20 bp, Artificial Sequence
  MKO10112691_B_Rgs13
  gRNA
ccaatctttggaaagtctga

SEQ ID NO: 112692 - DNA, 20 bp, Artificial Sequence
  MKO10112692_B_Rgs14
  gRNA
cctgtcggtcgatgttcact

SEQ ID NO: 112693 - DNA, 20 bp, Artificial Sequence
  MKO10112693_B_Rgs14
  gRNA
gctgcaagacccacggggtc

SEQ ID NO: 112694 - DNA, 20 bp, Artificial Sequence
  MKO10112694_B_Rgs14
  gRNA
gtcttgcagcagccgctcaa

SEQ ID NO: 112695 - DNA, 20 bp, Artificial Sequence
  MKO10112695_B_Rgs16
  gRNA
tttgctaatacccccagtat

SEQ ID NO: 112696 - DNA, 20 bp, Artificial Sequence
  MKO10112696_B_Rgs16
  gRNA
cctcactgaattccgtcttt

SEQ ID NO: 112697 - DNA, 20 bp, Artificial Sequence
  MKO10112697_B_Rgs16
  gRNA
cctctttaggggcttcgctg

SEQ ID NO: 112698 - DNA, 20 bp, Artificial Sequence
  MKO10112698_B_Rgs17
  gRNA
cctctctaactcgagaatcc

SEQ ID NO: 112699 - DNA, 20 bp, Artificial Sequence
  MKO10112699_B_Rgs17
  gRNA
gcatccaggtcctagaggaa

SEQ ID NO: 112700 - DNA, 20 bp, Artificial Sequence
  MKO10112700_B_Rgs17
  gRNA
atccccacataccaccaaaa

SEQ ID NO: 112701 - DNA, 20 bp, Artificial Sequence
  MKO10112701_B_Rgs18
  gRNA
tcagaatgatgcccccaaag

SEQ ID NO: 112702 - DNA, 20 bp, Artificial Sequence
  MKO10112702_B_Rgs18
  gRNA
gcccatttcactgcttcttc

SEQ ID NO: 112703 - DNA, 20 bp, Artificial Sequence
  MKO10112703_B_Rgs18
  gRNA
gactaagtcttctcctacag

SEQ ID NO: 112704 - DNA, 20 bp, Artificial Sequence
  MKO10112704_B_Rgs19
  gRNA
gtacgagtcccggtgcatga

SEQ ID NO: 112705 - DNA, 20 bp, Artificial Sequence
  MKO10112705_B_Rgs19
  gRNA
tattgatgccttctcgcaca

SEQ ID NO: 112706 - DNA, 20 bp, Artificial Sequence
  MKO10112706_B_Rgs19
  gRNA
ccaacatgtggtggacgaga

SEQ ID NO: 112707 - DNA, 20 bp, Artificial Sequence
  MKO10112707_B_Rgs1
  gRNA
aatacttactctggttggca

SEQ ID NO: 112708 - DNA, 20 bp, Artificial Sequence
  MKO10112708_B_Rgs1
  gRNA
ttgtgcttcatcaaaagatg

SEQ ID NO: 112709 - DNA, 20 bp, Artificial Sequence
  MKO10112709_B_Rgs1
  gRNA
actttaaagtatttgcctga

SEQ ID NO: 112710 - DNA, 20 bp, Artificial Sequence
  MKO10112710_B_Rgs20
  gRNA
tccgtccgctcagatccctc

SEQ ID NO: 112711 - DNA, 20 bp, Artificial Sequence
  MKO10112711_B_Rgs20
  gRNA
atgcggatgcggcagatgtg

SEQ ID NO: 112712 - DNA, 20 bp, Artificial Sequence
  MKO10112712_B_Rgs20
  gRNA
gctcagccccacgcctactc

SEQ ID NO: 112713 - DNA, 20 bp, Artificial Sequence
  MKO10112713_B_Rgs22
  gRNA
gcgattgctactttgaatac

SEQ ID NO: 112714 - DNA, 20 bp, Artificial Sequence
  MKO10112714_B_Rgs22
  gRNA
aactcttcttctgtaacttc

SEQ ID NO: 112715 - DNA, 20 bp, Artificial Sequence
  MKO10112715_B_Rgs22
  gRNA
actcattaaagtaatccaca

SEQ ID NO: 112716 - DNA, 20 bp, Artificial Sequence
  MKO10112716_B_Rgs2
  gRNA
cagatgggctggctgcattc

SEQ ID NO: 112717 - DNA, 20 bp, Artificial Sequence
  MKO10112717_B_Rgs2
  gRNA
agaagcatttgatgaactgc

SEQ ID NO: 112718 - DNA, 20 bp, Artificial Sequence
  MKO10112718_B_Rgs2
  gRNA
ctcttgcaggccttctcctg

SEQ ID NO: 112719 - DNA, 20 bp, Artificial Sequence
  MKO10112719_B_Rgs3
  gRNA
cttcagggattgtatcctcc

SEQ ID NO: 112720 - DNA, 20 bp, Artificial Sequence
  MKO10112720_B_Rgs3
  gRNA
acaactgaatgagagacccg

SEQ ID NO: 112721 - DNA, 20 bp, Artificial Sequence
  MKO10112721_B_Rgs3
  gRNA
ttgcagggggcccggcagag

SEQ ID NO: 112722 - DNA, 20 bp, Artificial Sequence
  MKO10112722_B_Rgs4
  gRNA
acaaagtagtaacttgccag

SEQ ID NO: 112723 - DNA, 20 bp, Artificial Sequence
  MKO10112723_B_Rgs4
  gRNA
ttgtgggctgtaacatgttc

SEQ ID NO: 112724 - DNA, 20 bp, Artificial Sequence
  MKO10112724_B_Rgs4
  gRNA
gaactcgttgtagatcttct

SEQ ID NO: 112725 - DNA, 20 bp, Artificial Sequence
  MKO10112725_B_Rgs5
  gRNA
aaaattcagagcgcacaaag

SEQ ID NO: 112726 - DNA, 20 bp, Artificial Sequence
  MKO10112726_B_Rgs5
  gRNA
gtctcctcgcagctttgact

SEQ ID NO: 112727 - DNA, 20 bp, Artificial Sequence
  MKO10112727_B_Rgs5
  gRNA
ttggtttaggccctcactgg

SEQ ID NO: 112728 - DNA, 20 bp, Artificial Sequence
  MKO10112728_B_Rgs6
  gRNA
aaaatccccagtgtcgtcac

SEQ ID NO: 112729 - DNA, 20 bp, Artificial Sequence
  MKO10112729_B_Rgs6
  gRNA
tgcagttgaagcaatacacc

SEQ ID NO: 112730 - DNA, 20 bp, Artificial Sequence
  MKO10112730_B_Rgs6
  gRNA
caggtactgacattgtacag

SEQ ID NO: 112731 - DNA, 20 bp, Artificial Sequence
  MKO10112731_B_Rgs7bp
  gRNA
cgagagttggtcatttctat

SEQ ID NO: 112732 - DNA, 20 bp, Artificial Sequence
  MKO10112732_B_Rgs7bp
  gRNA
gggatgacaaggagtcctcc

SEQ ID NO: 112733 - DNA, 20 bp, Artificial Sequence
  MKO10112733_B_Rgs7bp
  gRNA
aaaaccttcttagcaaactc

SEQ ID NO: 112734 - DNA, 20 bp, Artificial Sequence
  MKO10112734_B_Rgs7
  gRNA
ccacttaccggagaacacac

SEQ ID NO: 112735 - DNA, 20 bp, Artificial Sequence
  MKO10112735_B_Rgs7
  gRNA
cgtatgcaagacgagaaaaa

SEQ ID NO: 112736 - DNA, 20 bp, Artificial Sequence
  MKO10112736_B_Rgs7
  gRNA
aacttaactatagaagatcc

SEQ ID NO: 112737 - DNA, 20 bp, Artificial Sequence
  MKO10112737_B_Rgs8
  gRNA
cagcagatctaagtacattt

SEQ ID NO: 112738 - DNA, 20 bp, Artificial Sequence
  MKO10112738_B_Rgs8
  gRNA
ccacctcgttgcttcttccg

SEQ ID NO: 112739 - DNA, 20 bp, Artificial Sequence
  MKO10112739_B_Rgs8
  gRNA
ctgctactcacttgagagca

SEQ ID NO: 112740 - DNA, 20 bp, Artificial Sequence
  MKO10112740_B_Rgs9bp
  gRNA
cttagctaccgaggagcgcg

SEQ ID NO: 112741 - DNA, 20 bp, Artificial Sequence
  MKO10112741_B_Rgs9bp
  gRNA
cgctagtgcgcgctgcatgt

SEQ ID NO: 112742 - DNA, 20 bp, Artificial Sequence
  MKO10112742_B_Rgs9bp
  gRNA
cgctctccgcttcgtgccgc

SEQ ID NO: 112743 - DNA, 20 bp, Artificial Sequence
  MKO10112743_B_Rgs9
  gRNA
acgtcacctgtcatggcgtg

SEQ ID NO: 112744 - DNA, 20 bp, Artificial Sequence
  MKO10112744_B_Rgs9
  gRNA
cagcagtctctaccgatttc

SEQ ID NO: 112745 - DNA, 20 bp, Artificial Sequence
  MKO10112745_B_Rgs9
  gRNA
ccagcagtacaggccgagga

SEQ ID NO: 112746 - DNA, 20 bp, Artificial Sequence
  MKO10112746_B_Rgsl1
  gRNA
gggtggccttgagcacgagc

SEQ ID NO: 112747 - DNA, 20 bp, Artificial Sequence
  MKO10112747_B_Rgsl1
  gRNA
gttgcagagagtcaccactc

SEQ ID NO: 112748 - DNA, 20 bp, Artificial Sequence
  MKO10112748_B_Rgsl1
  gRNA
catcctccaaaagaatgata

SEQ ID NO: 112749 - DNA, 20 bp, Artificial Sequence
  MKO10112749_B_Rhag
  gRNA
aattcagccattgctgatcc

SEQ ID NO: 112750 - DNA, 20 bp, Artificial Sequence
  MKO10112750_B_Rhag
  gRNA
tttccccaggacagcgccaa

SEQ ID NO: 112751 - DNA, 20 bp, Artificial Sequence
  MKO10112751_B_Rhag
  gRNA
tcaatgacaatccatgcctt

SEQ ID NO: 112752 - DNA, 20 bp, Artificial Sequence
  MKO10112752_B_Rhbdd1
  gRNA
cagaaccactttaacaatgc

SEQ ID NO: 112753 - DNA, 20 bp, Artificial Sequence
  MKO10112753_B_Rhbdd1
  gRNA
cttagcaaccattactgccc

SEQ ID NO: 112754 - DNA, 20 bp, Artificial Sequence
  MKO10112754_B_Rhbdd1
  gRNA
tccctaatagatttgcttgt

SEQ ID NO: 112755 - DNA, 20 bp, Artificial Sequence
  MKO10112755_B_Rhbdd2
  gRNA
acatagcacaggccggacgc

SEQ ID NO: 112756 - DNA, 20 bp, Artificial Sequence
  MKO10112756_B_Rhbdd2
  gRNA
ttatcacttacctacggctc

SEQ ID NO: 112757 - DNA, 20 bp, Artificial Sequence
  MKO10112757_B_Rhbdd2
  gRNA
tctcaccttgccagttgcgc

SEQ ID NO: 112758 - DNA, 20 bp, Artificial Sequence
  MKO10112758_B_Rhbdd3
  gRNA
gcctgtccatctagctatgc

SEQ ID NO: 112759 - DNA, 20 bp, Artificial Sequence
  MKO10112759_B_Rhbdd3
  gRNA
ctggtggcaggagtgccatc

SEQ ID NO: 112760 - DNA, 20 bp, Artificial Sequence
  MKO10112760_B_Rhbdd3
  gRNA
tacacgccctgtagctgcca

SEQ ID NO: 112761 - DNA, 20 bp, Artificial Sequence
  MKO10112761_B_Rhbdf1
  gRNA
gtcctcagggtcggtctatt

SEQ ID NO: 112762 - DNA, 20 bp, Artificial Sequence
  MKO10112762_B_Rhbdf1
  gRNA
gagtcggttgaaacctgagc

SEQ ID NO: 112763 - DNA, 20 bp, Artificial Sequence
  MKO10112763_B_Rhbdf1
  gRNA
ccatcacacagaccatccgc

SEQ ID NO: 112764 - DNA, 20 bp, Artificial Sequence
  MKO10112764_B_Rhbdf2
  gRNA
cgccgctgaccccaaaccac

SEQ ID NO: 112765 - DNA, 20 bp, Artificial Sequence
  MKO10112765_B_Rhbdf2
  gRNA
tggggtcagcggcgactggg

SEQ ID NO: 112766 - DNA, 20 bp, Artificial Sequence
  MKO10112766_B_Rhbdf2
  gRNA
gtgctcacttgcggatgctc

SEQ ID NO: 112767 - DNA, 20 bp, Artificial Sequence
  MKO10112767_B_Rhbdl1
  gRNA
ctcgcagggcaggatctcgt

SEQ ID NO: 112768 - DNA, 20 bp, Artificial Sequence
  MKO10112768_B_Rhbdl1
  gRNA
gcacaccgatcatcagctgc

SEQ ID NO: 112769 - DNA, 20 bp, Artificial Sequence
  MKO10112769_B_Rhbdl1
  gRNA
ccccaccaagttggacatgt

SEQ ID NO: 112770 - DNA, 20 bp, Artificial Sequence
  MKO10112770_B_Rhbdl2
  gRNA
gagtagtctgacgattccaa

SEQ ID NO: 112771 - DNA, 20 bp, Artificial Sequence
  MKO10112771_B_Rhbdl2
  gRNA
cttctcagggcagtacgtca

SEQ ID NO: 112772 - DNA, 20 bp, Artificial Sequence
  MKO10112772_B_Rhbdl2
  gRNA
tgacgtactgccctgagaag

SEQ ID NO: 112773 - DNA, 20 bp, Artificial Sequence
  MKO10112773_B_Rhbdl3
  gRNA
ccacccgcagctccgtgcgc

SEQ ID NO: 112774 - DNA, 20 bp, Artificial Sequence
  MKO10112774_B_Rhbdl3
  gRNA
ctaccaggactttgtcaacc

SEQ ID NO: 112775 - DNA, 20 bp, Artificial Sequence
  MKO10112775_B_Rhbdl3
  gRNA
acacaaaaaggaggtgctcc

SEQ ID NO: 112776 - DNA, 20 bp, Artificial Sequence
  MKO10112776_B_Rhbg
  gRNA
gcggtacggcttcagcagtg

SEQ ID NO: 112777 - DNA, 20 bp, Artificial Sequence
  MKO10112777_B_Rhbg
  gRNA
agaccatgacgtgcacatcc

SEQ ID NO: 112778 - DNA, 20 bp, Artificial Sequence
  MKO10112778_B_Rhbg
  gRNA
acttcgggctgttcctctca

SEQ ID NO: 112779 - DNA, 20 bp, Artificial Sequence
  MKO10112779_B_Rhcg
  gRNA
gcccttcttgtgtacaatac

SEQ ID NO: 112780 - DNA, 20 bp, Artificial Sequence
  MKO10112780_B_Rhcg
  gRNA
ggttagcacactcgctgcca

SEQ ID NO: 112781 - DNA, 20 bp, Artificial Sequence
  MKO10112781_B_Rhcg
  gRNA
gtcataatgagcagctgcat

SEQ ID NO: 112782 - DNA, 20 bp, Artificial Sequence
  MKO10112782_B_Rhd
  gRNA
acaagatcaacaatctgtcc

SEQ ID NO: 112783 - DNA, 20 bp, Artificial Sequence
  MKO10112783_B_Rhd
  gRNA
agattgttccctgcaccccg

SEQ ID NO: 112784 - DNA, 20 bp, Artificial Sequence
  MKO10112784_B_Rhd
  gRNA
cacgtgtttggggcctattt

SEQ ID NO: 112785 - DNA, 20 bp, Artificial Sequence
  MKO10112785_B_Rhebl1
  gRNA
tggttacgttcttgtatact

SEQ ID NO: 112786 - DNA, 20 bp, Artificial Sequence
  MKO10112786_B_Rhebl1
  gRNA
tacttactattctccactgt

SEQ ID NO: 112787 - DNA, 20 bp, Artificial Sequence
  MKO10112787_B_Rhebl1
  gRNA
agatgagtttcacctacatc

SEQ ID NO: 112788 - DNA, 20 bp, Artificial Sequence
  MKO10112788_B_Rheb
  gRNA
tcttcagcttgtagacacag

SEQ ID NO: 112789 - DNA, 20 bp, Artificial Sequence
  MKO10112789_B_Rheb
  gRNA
acatactccatagatattaa

SEQ ID NO: 112790 - DNA, 20 bp, Artificial Sequence
  MKO10112790_B_Rheb
  gRNA
gaagtaattaaagttatcca

SEQ ID NO: 112791 - DNA, 20 bp, Artificial Sequence
  MKO10112791_B_Rhoa
  gRNA
attgacagccctgatagttt

SEQ ID NO: 112792 - DNA, 20 bp, Artificial Sequence
  MKO10112792_B_Rhoa
  gRNA
tttaagtgatggctgccatc

SEQ ID NO: 112793 - DNA, 20 bp, Artificial Sequence
  MKO10112793_B_Rhoa
  gRNA
gcacatagacctctgggaac

SEQ ID NO: 112794 - DNA, 20 bp, Artificial Sequence
  MKO10112794_B_Rhobtb1
  gRNA
cacttcatcgacgacatccc

SEQ ID NO: 112795 - DNA, 20 bp, Artificial Sequence
  MKO10112795_B_Rhobtb1
  gRNA
gagacattctttgatccgat

SEQ ID NO: 112796 - DNA, 20 bp, Artificial Sequence
  MKO10112796_B_Rhobtb1
  gRNA
acggttggcgctttccacaa

SEQ ID NO: 112797 - DNA, 20 bp, Artificial Sequence
  MKO10112797_B_Rhobtb2
  gRNA
gctagaacgctcccgagatg

SEQ ID NO: 112798 - DNA, 20 bp, Artificial Sequence
  MKO10112798_B_Rhobtb2
  gRNA
cttccaggtcagcatagcgc

SEQ ID NO: 112799 - DNA, 20 bp, Artificial Sequence
  MKO10112799_B_Rhobtb2
  gRNA
catgtttggggggccatttg

SEQ ID NO: 112800 - DNA, 20 bp, Artificial Sequence
  MKO10112800_B_Rhobtb3
  gRNA
tacacctcccgaaacctaat

SEQ ID NO: 112801 - DNA, 20 bp, Artificial Sequence
  MKO10112801_B_Rhobtb3
  gRNA
tccctcggtctgaagtacac

SEQ ID NO: 112802 - DNA, 20 bp, Artificial Sequence
  MKO10112802_B_Rhobtb3
  gRNA
cccctgtgtacttcagaccg

SEQ ID NO: 112803 - DNA, 20 bp, Artificial Sequence
  MKO10112803_B_Rhob
  gRNA
tccgtagcgcttctgcagcg

SEQ ID NO: 112804 - DNA, 20 bp, Artificial Sequence
  MKO10112804_B_Rhob
  gRNA
gtaaacgatcgtagtcctcc

SEQ ID NO: 112805 - DNA, 20 bp, Artificial Sequence
  MKO10112805_B_Rhob
  gRNA
ctttactgaacacgatcagc

SEQ ID NO: 112806 - DNA, 20 bp, Artificial Sequence
  MKO10112806_B_Rhoc
  gRNA
ggctgcgatccgaaagaagc

SEQ ID NO: 112807 - DNA, 20 bp, Artificial Sequence
  MKO10112807_B_Rhoc
  gRNA
aagaagactacgatcgcctg

SEQ ID NO: 112808 - DNA, 20 bp, Artificial Sequence
  MKO10112808_B_Rhoc
  gRNA
tggtatgctcatcttgcctc

SEQ ID NO: 112809 - DNA, 20 bp, Artificial Sequence
  MKO10112809_B_Rhod
  gRNA
agacggcttccacgttgtca

SEQ ID NO: 112810 - DNA, 20 bp, Artificial Sequence
  MKO10112810_B_Rhod
  gRNA
gcagtcgcagacataacttt

SEQ ID NO: 112811 - DNA, 20 bp, Artificial Sequence
  MKO10112811_B_Rhod
  gRNA
gagacgttgtcaaagctgtt

SEQ ID NO: 112812 - DNA, 20 bp, Artificial Sequence
  MKO10112812_B_Rhof
  gRNA
actcaccagccgtgtcgtag

SEQ ID NO: 112813 - DNA, 20 bp, Artificial Sequence
  MKO10112813_B_Rhof
  gRNA
cttgcagccgatgagcaccg

SEQ ID NO: 112814 - DNA, 20 bp, Artificial Sequence
  MKO10112814_B_Rhof
  gRNA
gaagtcacacatttctgccg

SEQ ID NO: 112815 - DNA, 20 bp, Artificial Sequence
  MKO10112815_B_Rhog
  gRNA
cgtcaaggaggtgtttgcgg

SEQ ID NO: 112816 - DNA, 20 bp, Artificial Sequence
  MKO10112816_B_Rhog
  gRNA
caattacagcgcccagagtg

SEQ ID NO: 112817 - DNA, 20 bp, Artificial Sequence
  MKO10112817_B_Rhog
  gRNA
ccctgacgtgcctatcctcc

SEQ ID NO: 112818 - DNA, 20 bp, Artificial Sequence
  MKO10112818_B_Rhoh
  gRNA
acgacgccttcagaagtatc

SEQ ID NO: 112819 - DNA, 20 bp, Artificial Sequence
  MKO10112819_B_Rhoh
  gRNA
gagcaacctaccctgtaccc

SEQ ID NO: 112820 - DNA, 20 bp, Artificial Sequence
  MKO10112820_B_Rhoh
  gRNA
caggggccggatacttctga

SEQ ID NO: 112821 - DNA, 20 bp, Artificial Sequence
  MKO10112821_B_Rhoj
  gRNA
tgggttccgatgagcacata

SEQ ID NO: 112822 - DNA, 20 bp, Artificial Sequence
  MKO10112822_B_Rhoj
  gRNA
gattggagcgcagtgctact

SEQ ID NO: 112823 - DNA, 20 bp, Artificial Sequence
  MKO10112823_B_Rhoj
  gRNA
cagcttcacgccgtgctcat

SEQ ID NO: 112824 - DNA, 20 bp, Artificial Sequence
  MKO10112824_B_Rhoq
  gRNA
ttgggactctatgacacagc

SEQ ID NO: 112825 - DNA, 20 bp, Artificial Sequence
  MKO10112825_B_Rhoq
  gRNA
gtgttcagctttaacccaga

SEQ ID NO: 112826 - DNA, 20 bp, Artificial Sequence
  MKO10112826_B_Rhoq
  gRNA
acacagtcttcaaacccttc

SEQ ID NO: 112827 - DNA, 20 bp, Artificial Sequence
  MKO10112827_B_Rhot1
  gRNA
aggctcgcaggggccgcact

SEQ ID NO: 112828 - DNA, 20 bp, Artificial Sequence
  MKO10112828_B_Rhot1
  gRNA
cagtgaagaatttccggaag

SEQ ID NO: 112829 - DNA, 20 bp, Artificial Sequence
  MKO10112829_B_Rhot1
  gRNA
ctttcaggggtgacgtcagc

SEQ ID NO: 112830 - DNA, 20 bp, Artificial Sequence
  MKO10112830_B_Rhot2
  gRNA
ggatggttatctcctccgcg

SEQ ID NO: 112831 - DNA, 20 bp, Artificial Sequence
  MKO10112831_B_Rhot2
  gRNA
tgaggagaccaccattgaga

SEQ ID NO: 112832 - DNA, 20 bp, Artificial Sequence
  MKO10112832_B_Rhot2
  gRNA
acttcaggaggagatccaca

SEQ ID NO: 112833 - DNA, 20 bp, Artificial Sequence
  MKO10112833_B_Rhou
  gRNA
gattcgacgtcactgcccaa

SEQ ID NO: 112834 - DNA, 20 bp, Artificial Sequence
  MKO10112834_B_Rhou
  gRNA
caagccgtggtgtctgtaga

SEQ ID NO: 112835 - DNA, 20 bp, Artificial Sequence
  MKO10112835_B_Rhou
  gRNA
ccgcccatctacagacacca

SEQ ID NO: 112836 - DNA, 20 bp, Artificial Sequence
  MKO10112836_B_Rhov
  gRNA
cccggacaccgatgtctttc

SEQ ID NO: 112837 - DNA, 20 bp, Artificial Sequence
  MKO10112837_B_Rhov
  gRNA
gcacgctgtctcgctgtcgc

SEQ ID NO: 112838 - DNA, 20 bp, Artificial Sequence
  MKO10112838_B_Rhov
  gRNA
aggagcggaccatgccgccg

SEQ ID NO: 112839 - DNA, 20 bp, Artificial Sequence
  MKO10112839_B_Rhox10
  gRNA
ctgagccgaaaagttgttcg

SEQ ID NO: 112840 - DNA, 20 bp, Artificial Sequence
  MKO10112840_B_Rhox10
  gRNA
acttgcaaaacttattgatg

SEQ ID NO: 112841 - DNA, 20 bp, Artificial Sequence
  MKO10112841_B_Rhox10
  gRNA
agcttaccccataataatcg

SEQ ID NO: 112842 - DNA, 20 bp, Artificial Sequence
  MKO10112842_B_Rhox11
  gRNA
caagaacatcactcctaccc

SEQ ID NO: 112843 - DNA, 20 bp, Artificial Sequence
  MKO10112843_B_Rhox11
  gRNA
ctccatagaaaagagctggc

SEQ ID NO: 112844 - DNA, 20 bp, Artificial Sequence
  MKO10112844_B_Rhox11
  gRNA
tgtggatgaacagaaaataa

SEQ ID NO: 112845 - DNA, 20 bp, Artificial Sequence
  MKO10112845_B_Rhox12
  gRNA
cctagcagaatccaaagttc

SEQ ID NO: 112846 - DNA, 20 bp, Artificial Sequence
  MKO10112846_B_Rhox12
  gRNA
actgctgttctttcctataa

SEQ ID NO: 112847 - DNA, 20 bp, Artificial Sequence
  MKO10112847_B_Rhox12
  gRNA
cctgaactttggattctgct

SEQ ID NO: 112848 - DNA, 20 bp, Artificial Sequence
  MKO10112848_B_Rhox13
  gRNA
cctctgcttcgctctccgat

SEQ ID NO: 112849 - DNA, 20 bp, Artificial Sequence
  MKO10112849_B_Rhox13
  gRNA
aagaactttgaatgtgcctg

SEQ ID NO: 112850 - DNA, 20 bp, Artificial Sequence
  MKO10112850_B_Rhox13
  gRNA
ctgaccttcactttgacctc

SEQ ID NO: 112851 - DNA, 20 bp, Artificial Sequence
  MKO10112851_B_Rhox1
  gRNA
cactgatgtactgagtgcgc

SEQ ID NO: 112852 - DNA, 20 bp, Artificial Sequence
  MKO10112852_B_Rhox1
  gRNA
tgttgtagaattggtttcaa

SEQ ID NO: 112853 - DNA, 20 bp, Artificial Sequence
  MKO10112853_B_Rhox1
  gRNA
tgtgtgtgaagccaaagtgc

SEQ ID NO: 112854 - DNA, 20 bp, Artificial Sequence
  MKO10112854_B_Rhox2a
  gRNA
ttaaggtgtaaagactctga

SEQ ID NO: 112855 - DNA, 20 bp, Artificial Sequence
  MKO10112855_B_Rhox2a
  gRNA
tgtggcttcactcactccca

SEQ ID NO: 112856 - DNA, 20 bp, Artificial Sequence
  MKO10112856_B_Rhox2a
  gRNA
aaatcgcctggcaagatcca

SEQ ID NO: 112857 - DNA, 20 bp, Artificial Sequence
  MKO10112857_B_Rhox2b
  gRNA
tgctgatgtagtgattgcac

SEQ ID NO: 112858 - DNA, 20 bp, Artificial Sequence
  MKO10112858_B_Rhox2b
  gRNA
tgtggcttcactcactccca

SEQ ID NO: 112859 - DNA, 20 bp, Artificial Sequence
  MKO10112859_B_Rhox2b
  gRNA
aaatcgcctggcaagatcca

SEQ ID NO: 112860 - DNA, 20 bp, Artificial Sequence
  MKO10112860_B_Rhox2c
  gRNA
ttaaggtataaagactctga

SEQ ID NO: 112861 - DNA, 20 bp, Artificial Sequence
  MKO10112861_B_Rhox2c
  gRNA
tgtggcttcactcactccca

SEQ ID NO: 112862 - DNA, 20 bp, Artificial Sequence
  MKO10112862_B_Rhox2c
  gRNA
aaatcgcctggcaagatcca

SEQ ID NO: 112863 - DNA, 20 bp, Artificial Sequence
  MKO10112863_B_Rhox2d
  gRNA
catcaattacaagcttgatg

SEQ ID NO: 112864 - DNA, 20 bp, Artificial Sequence
  MKO10112864_B_Rhox2d
  gRNA
gaggatgaggaaaatgcgaa

SEQ ID NO: 112865 - DNA, 20 bp, Artificial Sequence
  MKO10112865_B_Rhox2d
  gRNA
tgtggcttcactcacaccca

SEQ ID NO: 112866 - DNA, 20 bp, Artificial Sequence
  MKO10112866_B_Rhox2e
  gRNA
ttaaggtgtaaagactctga

SEQ ID NO: 112867 - DNA, 20 bp, Artificial Sequence
  MKO10112867_B_Rhox2e
  gRNA
tgtggcttcactcactccca

SEQ ID NO: 112868 - DNA, 20 bp, Artificial Sequence
  MKO10112868_B_Rhox2e
  gRNA
aaatcgcctggcaagatcca

SEQ ID NO: 112869 - DNA, 20 bp, Artificial Sequence
  MKO10112869_B_Rhox2f
  gRNA
gaggatgaggaaaatgcgaa

SEQ ID NO: 112870 - DNA, 20 bp, Artificial Sequence
  MKO10112870_B_Rhox2f
  gRNA
tgtggcttcactcacaccca

SEQ ID NO: 112871 - DNA, 20 bp, Artificial Sequence
  MKO10112871_B_Rhox2f
  gRNA
aaatcgcctggcaagatcca

SEQ ID NO: 112872 - DNA, 20 bp, Artificial Sequence
  MKO10112872_B_Rhox2g
  gRNA
tgtggctttactcacaccca

SEQ ID NO: 112873 - DNA, 20 bp, Artificial Sequence
  MKO10112873_B_Rhox2g
  gRNA
catcaattacaagcttgatg

SEQ ID NO: 112874 - DNA, 20 bp, Artificial Sequence
  MKO10112874_B_Rhox2g
  gRNA
gaggatgaggaaaatgcgaa

SEQ ID NO: 112875 - DNA, 20 bp, Artificial Sequence
  MKO10112875_B_Rhox2h
  gRNA
gaggatgaggaaaatgcgaa

SEQ ID NO: 112876 - DNA, 20 bp, Artificial Sequence
  MKO10112876_B_Rhox2h
  gRNA
aaatcgcctggcaagatcca

SEQ ID NO: 112877 - DNA, 20 bp, Artificial Sequence
  MKO10112877_B_Rhox2h
  gRNA
tgtggcttcactcacaccca

SEQ ID NO: 112878 - DNA, 20 bp, Artificial Sequence
  MKO10112878_B_Rhox3a
  gRNA
gtgaccaggctgaagcgcca

SEQ ID NO: 112879 - DNA, 20 bp, Artificial Sequence
  MKO10112879_B_Rhox3a
  gRNA
cttcattcacacccatccat

SEQ ID NO: 112880 - DNA, 20 bp, Artificial Sequence
  MKO10112880_B_Rhox3a
  gRNA
tcagaaaacaactggcccga

SEQ ID NO: 112881 - DNA, 20 bp, Artificial Sequence
  MKO10112881_B_Rhox3c
  gRNA
agactgatcttgaagctctg

SEQ ID NO: 112882 - DNA, 20 bp, Artificial Sequence
  MKO10112882_B_Rhox3c
  gRNA
cctgccttggtgcttcagcc

SEQ ID NO: 112883 - DNA, 20 bp, Artificial Sequence
  MKO10112883_B_Rhox3c
  gRNA
cttcattcacacccatccat

SEQ ID NO: 112884 - DNA, 20 bp, Artificial Sequence
  MKO10112884_B_Rhox3e
  gRNA
gtgaccaggctgaagcgcca

SEQ ID NO: 112885 - DNA, 20 bp, Artificial Sequence
  MKO10112885_B_Rhox3e
  gRNA
cttcattcacacccatccat

SEQ ID NO: 112886 - DNA, 20 bp, Artificial Sequence
  MKO10112886_B_Rhox3e
  gRNA
tcagaaaacaactggcccga

SEQ ID NO: 112887 - DNA, 20 bp, Artificial Sequence
  MKO10112887_B_Rhox3f
  gRNA
cctgccttagcgcttcagcc

SEQ ID NO: 112888 - DNA, 20 bp, Artificial Sequence
  MKO10112888_B_Rhox3f
  gRNA
aaaaatacaggtggtataag

SEQ ID NO: 112889 - DNA, 20 bp, Artificial Sequence
  MKO10112889_B_Rhox3f
  gRNA
cttcattcacacccatccat

SEQ ID NO: 112890 - DNA, 20 bp, Artificial Sequence
  MKO10112890_B_Rhox3g
  gRNA
caacggatgtgagactaaaa

SEQ ID NO: 112891 - DNA, 20 bp, Artificial Sequence
  MKO10112891_B_Rhox3g
  gRNA
gactgagaaaataattcatc

SEQ ID NO: 112892 - DNA, 20 bp, Artificial Sequence
  MKO10112892_B_Rhox3g
  gRNA
cttcattcacacccatccat

SEQ ID NO: 112893 - DNA, 20 bp, Artificial Sequence
  MKO10112893_B_Rhox3h
  gRNA
tgactgaccttgaagctctg

SEQ ID NO: 112894 - DNA, 20 bp, Artificial Sequence
  MKO10112894_B_Rhox3h
  gRNA
tcagaaaacaactggcccga

SEQ ID NO: 112895 - DNA, 20 bp, Artificial Sequence
  MKO10112895_B_Rhox3h
  gRNA
cttcattcacacccatccat

SEQ ID NO: 112896 - DNA, 20 bp, Artificial Sequence
  MKO10112896_B_Rhox4a
  gRNA
acatacaggtgggaagacac

SEQ ID NO: 112897 - DNA, 20 bp, Artificial Sequence
  MKO10112897_B_Rhox4a
  gRNA
ccagaagacatctggcaaga

SEQ ID NO: 112898 - DNA, 20 bp, Artificial Sequence
  MKO10112898_B_Rhox4a
  gRNA
tgtgagtgaagccagagtta

SEQ ID NO: 112899 - DNA, 20 bp, Artificial Sequence
  MKO10112899_B_Rhox4b
  gRNA
gacacagacagtcttaccac

SEQ ID NO: 112900 - DNA, 20 bp, Artificial Sequence
  MKO10112900_B_Rhox4b
  gRNA
ccagaagacatctggcaaga

SEQ ID NO: 112901 - DNA, 20 bp, Artificial Sequence
  MKO10112901_B_Rhox4b
  gRNA
tgtgagtgaagccagagtta

SEQ ID NO: 112902 - DNA, 20 bp, Artificial Sequence
  MKO10112902_B_Rhox4c
  gRNA
ctgcttacctttcctctgca

SEQ ID NO: 112903 - DNA, 20 bp, Artificial Sequence
  MKO10112903_B_Rhox4c
  gRNA
acatacaggtgggaagacac

SEQ ID NO: 112904 - DNA, 20 bp, Artificial Sequence
  MKO10112904_B_Rhox4c
  gRNA
ccagaagacatctggcaaga

SEQ ID NO: 112905 - DNA, 20 bp, Artificial Sequence
  MKO10112905_B_Rhox4d
  gRNA
gacacagacagtcttaccac

SEQ ID NO: 112906 - DNA, 20 bp, Artificial Sequence
  MKO10112906_B_Rhox4d
  gRNA
ccagaagacatctggcaaga

SEQ ID NO: 112907 - DNA, 20 bp, Artificial Sequence
  MKO10112907_B_Rhox4d
  gRNA
tgtgagtgaagccagagtta

SEQ ID NO: 112908 - DNA, 20 bp, Artificial Sequence
  MKO10112908_B_Rhox4e
  gRNA
acatacaggtgggaagacac

SEQ ID NO: 112909 - DNA, 20 bp, Artificial Sequence
  MKO10112909_B_Rhox4e
  gRNA
ccagaagacatctggcaaga

SEQ ID NO: 112910 - DNA, 20 bp, Artificial Sequence
  MKO10112910_B_Rhox4e
  gRNA
tgtgagtgaaaccagagtta

SEQ ID NO: 112911 - DNA, 20 bp, Artificial Sequence
  MKO10112911_B_Rhox4f
  gRNA
gacacagacagtcttaccac

SEQ ID NO: 112912 - DNA, 20 bp, Artificial Sequence
  MKO10112912_B_Rhox4f
  gRNA
ccagaagacatctggcaaga

SEQ ID NO: 112913 - DNA, 20 bp, Artificial Sequence
  MKO10112913_B_Rhox4f
  gRNA
tgtgagtgaagccagagtta

SEQ ID NO: 112914 - DNA, 20 bp, Artificial Sequence
  MKO10112914_B_Rhox4g
  gRNA
ctgcttacctttcctctgca

SEQ ID NO: 112915 - DNA, 20 bp, Artificial Sequence
  MKO10112915_B_Rhox4g
  gRNA
ccagaagacatctggcaaga

SEQ ID NO: 112916 - DNA, 20 bp, Artificial Sequence
  MKO10112916_B_Rhox4g
  gRNA
tgtgagtgaagccagagtta

SEQ ID NO: 112917 - DNA, 20 bp, Artificial Sequence
  MKO10112917_B_Rhox5
  gRNA
catctcactccacgacaagc

SEQ ID NO: 112918 - DNA, 20 bp, Artificial Sequence
  MKO10112918_B_Rhox5
  gRNA
gttccagccgcaaggtcacc

SEQ ID NO: 112919 - DNA, 20 bp, Artificial Sequence
  MKO10112919_B_Rhox5
  gRNA
ggaggatcttgatagactga

SEQ ID NO: 112920 - DNA, 20 bp, Artificial Sequence
  MKO10112920_B_Rhox6
  gRNA
cctgcttatagaattggttt

SEQ ID NO: 112921 - DNA, 20 bp, Artificial Sequence
  MKO10112921_B_Rhox6
  gRNA
ctgccggactcggaggcttt

SEQ ID NO: 112922 - DNA, 20 bp, Artificial Sequence
  MKO10112922_B_Rhox6
  gRNA
tgtggatgaatgtgatgtgc

SEQ ID NO: 112923 - DNA, 20 bp, Artificial Sequence
  MKO10112923_B_Rhox7
  gRNA
ctctgtaaatccgtcccgga

SEQ ID NO: 112924 - DNA, 20 bp, Artificial Sequence
  MKO10112924_B_Rhox7
  gRNA
ttcagacccatccatgcttc

SEQ ID NO: 112925 - DNA, 20 bp, Artificial Sequence
  MKO10112925_B_Rhox7
  gRNA
agaggtgcttgccagaagca

SEQ ID NO: 112926 - DNA, 20 bp, Artificial Sequence
  MKO10112926_B_Rhox8
  gRNA
cttcttgaggttccatagca

SEQ ID NO: 112927 - DNA, 20 bp, Artificial Sequence
  MKO10112927_B_Rhox8
  gRNA
gcagaagggagctcgcgaga

SEQ ID NO: 112928 - DNA, 20 bp, Artificial Sequence
  MKO10112928_B_Rhox8
  gRNA
tgtagaactggtttaagagt

SEQ ID NO: 112929 - DNA, 20 bp, Artificial Sequence
  MKO10112929_B_Rhox9
  gRNA
ggagagttgttctctgtaat

SEQ ID NO: 112930 - DNA, 20 bp, Artificial Sequence
  MKO10112930_B_Rhox9
  gRNA
tgtggatgaatctgatgtgc

SEQ ID NO: 112931 - DNA, 20 bp, Artificial Sequence
  MKO10112931_B_Rhox9
  gRNA
ctcccggactcggaggcttt

SEQ ID NO: 112932 - DNA, 20 bp, Artificial Sequence
  MKO10112932_B_Rho
  gRNA
ggtctccgtcttggaagcgg

SEQ ID NO: 112933 - DNA, 20 bp, Artificial Sequence
  MKO10112933_B_Rho
  gRNA
cacccgcatggttatcatca

SEQ ID NO: 112934 - DNA, 20 bp, Artificial Sequence
  MKO10112934_B_Rho
  gRNA
catgaagatggggccgaagt

SEQ ID NO: 112935 - DNA, 20 bp, Artificial Sequence
  MKO10112935_B_Rhpn1
  gRNA
ggcacttaccttcagcggtg

SEQ ID NO: 112936 - DNA, 20 bp, Artificial Sequence
  MKO10112936_B_Rhpn1
  gRNA
gctccagtgcgactgtttct

SEQ ID NO: 112937 - DNA, 20 bp, Artificial Sequence
  MKO10112937_B_Rhpn1
  gRNA
gctgagcaccagcgtagatg

SEQ ID NO: 112938 - DNA, 20 bp, Artificial Sequence
  MKO10112938_B_Rhpn2
  gRNA
cgcttactcactcggtgccc

SEQ ID NO: 112939 - DNA, 20 bp, Artificial Sequence
  MKO10112939_B_Rhpn2
  gRNA
gagatttaccttgaagacga

SEQ ID NO: 112940 - DNA, 20 bp, Artificial Sequence
  MKO10112940_B_Rhpn2
  gRNA
tccgcatccgcacagccttc

SEQ ID NO: 112941 - DNA, 20 bp, Artificial Sequence
  MKO10112941_B_Ribc1
  gRNA
tgcgcctagctgctgacacg

SEQ ID NO: 112942 - DNA, 20 bp, Artificial Sequence
  MKO10112942_B_Ribc1
  gRNA
ggaggaacgaaagtttcggg

SEQ ID NO: 112943 - DNA, 20 bp, Artificial Sequence
  MKO10112943_B_Ribc1
  gRNA
cagcccgcgtgtcagcagct

SEQ ID NO: 112944 - DNA, 20 bp, Artificial Sequence
  MKO10112944_B_Ribc2
  gRNA
agcccgggctgaccacctac

SEQ ID NO: 112945 - DNA, 20 bp, Artificial Sequence
  MKO10112945_B_Ribc2
  gRNA
acttgagtctcgtctgagtg

SEQ ID NO: 112946 - DNA, 20 bp, Artificial Sequence
  MKO10112946_B_Ribc2
  gRNA
gaaagcgttcaacaagaatc

SEQ ID NO: 112947 - DNA, 20 bp, Artificial Sequence
  MKO10112947_B_Ric3
  gRNA
ggccagatcattccaatcta

SEQ ID NO: 112948 - DNA, 20 bp, Artificial Sequence
  MKO10112948_B_Ric3
  gRNA
atcaacagagttggacctaa

SEQ ID NO: 112949 - DNA, 20 bp, Artificial Sequence
  MKO10112949_B_Ric3
  gRNA
tagttgaacaagctcaaagt

SEQ ID NO: 112950 - DNA, 20 bp, Artificial Sequence
  MKO10112950_B_Ric8b
  gRNA
gacctacaattagtaaacaa

SEQ ID NO: 112951 - DNA, 20 bp, Artificial Sequence
  MKO10112951_B_Ric8b
  gRNA
aggaggtccattatggtcta

SEQ ID NO: 112952 - DNA, 20 bp, Artificial Sequence
  MKO10112952_B_Ric8b
  gRNA
cgccattgtttactaattgt

SEQ ID NO: 112953 - DNA, 20 bp, Artificial Sequence
  MKO10112953_B_Ric8
  gRNA
tccccaggagattcaccgtg

SEQ ID NO: 112954 - DNA, 20 bp, Artificial Sequence
  MKO10112954_B_Ric8
  gRNA
caccttcgatgatgcccagc

SEQ ID NO: 112955 - DNA, 20 bp, Artificial Sequence
  MKO10112955_B_Ric8
  gRNA
tcttctgcggcactgcgtga

SEQ ID NO: 112956 - DNA, 20 bp, Artificial Sequence
  MKO10112956_B_Rictor
  gRNA
taacagcttctttgcgatat

SEQ ID NO: 112957 - DNA, 20 bp, Artificial Sequence
  MKO10112957_B_Rictor
  gRNA
gcgcttagctttattaaatg

SEQ ID NO: 112958 - DNA, 20 bp, Artificial Sequence
  MKO10112958_B_Rictor
  gRNA
ccttagtgaagttattcaga

SEQ ID NO: 112959 - DNA, 20 bp, Artificial Sequence
  MKO10112959_B_Rif1
  gRNA
ttccctacctgacaatcctg

SEQ ID NO: 112960 - DNA, 20 bp, Artificial Sequence
  MKO10112960_B_Rif1
  gRNA
tataatcccagaattacctc

SEQ ID NO: 112961 - DNA, 20 bp, Artificial Sequence
  MKO10112961_B_Rif1
  gRNA
cagacaaaaatgtgtgtacc

SEQ ID NO: 112962 - DNA, 20 bp, Artificial Sequence
  MKO10112962_B_Riiad1
  gRNA
ttgctccccagatccagact

SEQ ID NO: 112963 - DNA, 20 bp, Artificial Sequence
  MKO10112963_B_Riiad1
  gRNA
gcaaattcaagaatgttgtc

SEQ ID NO: 112964 - DNA, 20 bp, Artificial Sequence
  MKO10112964_B_Riiad1
  gRNA
tttcgtcccagactatttca

SEQ ID NO: 112965 - DNA, 20 bp, Artificial Sequence
  MKO10112965_B_Rilpl1
  gRNA
cgtgtggcggggtgaagcac

SEQ ID NO: 112966 - DNA, 20 bp, Artificial Sequence
  MKO10112966_B_Rilpl1
  gRNA
tgacccggtgccgaaggtca

SEQ ID NO: 112967 - DNA, 20 bp, Artificial Sequence
  MKO10112967_B_Rilpl1
  gRNA
cggagaagcccacgtccttg

SEQ ID NO: 112968 - DNA, 20 bp, Artificial Sequence
  MKO10112968_B_Rilpl2
  gRNA
ctccttctcgccgttgccca

SEQ ID NO: 112969 - DNA, 20 bp, Artificial Sequence
  MKO10112969_B_Rilpl2
  gRNA
agatccactaccatcttgtc

SEQ ID NO: 112970 - DNA, 20 bp, Artificial Sequence
  MKO10112970_B_Rilpl2
  gRNA
tctaggtatgcttccctgac

SEQ ID NO: 112971 - DNA, 20 bp, Artificial Sequence
  MKO10112971_B_Rilp
  gRNA
ctccttgagcaagaacacgt

SEQ ID NO: 112972 - DNA, 20 bp, Artificial Sequence
  MKO10112972_B_Rilp
  gRNA
ccctcaccgcttcggtctct

SEQ ID NO: 112973 - DNA, 20 bp, Artificial Sequence
  MKO10112973_B_Rilp
  gRNA
aggagttggcgtacttccag

SEQ ID NO: 112974 - DNA, 20 bp, Artificial Sequence
  MKO10112974_B_Rimbp2
  gRNA
gaaaagttccggcaacacac

SEQ ID NO: 112975 - DNA, 20 bp, Artificial Sequence
  MKO10112975_B_Rimbp2
  gRNA
gaacaccctggactgcatgc

SEQ ID NO: 112976 - DNA, 20 bp, Artificial Sequence
  MKO10112976_B_Rimbp2
  gRNA
tgaatacctgcatgcagtcc

SEQ ID NO: 112977 - DNA, 20 bp, Artificial Sequence
  MKO10112977_B_Rimbp3
  gRNA
cgcgcgcatccgccacctgc

SEQ ID NO: 112978 - DNA, 20 bp, Artificial Sequence
  MKO10112978_B_Rimbp3
  gRNA
cgcagctgagcggcgctacg

SEQ ID NO: 112979 - DNA, 20 bp, Artificial Sequence
  MKO10112979_B_Rimbp3
  gRNA
gctggttcctcaacgataac

SEQ ID NO: 112980 - DNA, 20 bp, Artificial Sequence
  MKO10112980_B_Rimkla
  gRNA
gttggcctcacacaccgtga

SEQ ID NO: 112981 - DNA, 20 bp, Artificial Sequence
  MKO10112981_B_Rimkla
  gRNA
gtctgtggagcagcgcagca

SEQ ID NO: 112982 - DNA, 20 bp, Artificial Sequence
  MKO10112982_B_Rimkla
  gRNA
acaggtagggcacatcatgg

SEQ ID NO: 112983 - DNA, 20 bp, Artificial Sequence
  MKO10112983_B_Rimklb
  gRNA
ggatgtacgagtcattgttg

SEQ ID NO: 112984 - DNA, 20 bp, Artificial Sequence
  MKO10112984_B_Rimklb
  gRNA
tcaccgtaagaaaaagtatc

SEQ ID NO: 112985 - DNA, 20 bp, Artificial Sequence
  MKO10112985_B_Rimklb
  gRNA
gagcttcatgccgaataaga

SEQ ID NO: 112986 - DNA, 20 bp, Artificial Sequence
  MKO10112986_B_Rims1
  gRNA
gtacttacagtggtggttga

SEQ ID NO: 112987 - DNA, 20 bp, Artificial Sequence
  MKO10112987_B_Rims1
  gRNA
ctcttcgctgcttggctttc

SEQ ID NO: 112988 - DNA, 20 bp, Artificial Sequence
  MKO10112988_B_Rims1
  gRNA
cagaaagccaagcagcgaag

SEQ ID NO: 112989 - DNA, 20 bp, Artificial Sequence
  MKO10112989_B_Rims2
  gRNA
tcctcatttcgaagccctcg

SEQ ID NO: 112990 - DNA, 20 bp, Artificial Sequence
  MKO10112990_B_Rims2
  gRNA
ccaaacatgtcggctccgct

SEQ ID NO: 112991 - DNA, 20 bp, Artificial Sequence
  MKO10112991_B_Rims2
  gRNA
agtgtctttacgctcaaaca

SEQ ID NO: 112992 - DNA, 20 bp, Artificial Sequence
  MKO10112992_B_Rims3
  gRNA
gcgtctgtcgccccacaatc

SEQ ID NO: 112993 - DNA, 20 bp, Artificial Sequence
  MKO10112993_B_Rims3
  gRNA
cggggcctgacccccaaacc

SEQ ID NO: 112994 - DNA, 20 bp, Artificial Sequence
  MKO10112994_B_Rims3
  gRNA
cacatgccccgttctccagc

SEQ ID NO: 112995 - DNA, 20 bp, Artificial Sequence
  MKO10112995_B_Rims4
  gRNA
ggctggcttggcggagcgtc

SEQ ID NO: 112996 - DNA, 20 bp, Artificial Sequence
  MKO10112996_B_Rims4
  gRNA
cctggcagtgtcttcgagcc

SEQ ID NO: 112997 - DNA, 20 bp, Artificial Sequence
  MKO10112997_B_Rims4
  gRNA
gctgttcatgctgtcctcga

SEQ ID NO: 112998 - DNA, 20 bp, Artificial Sequence
  MKO10112998_B_Rin1
  gRNA
tatcaggtgtgtcatacagt

SEQ ID NO: 112999 - DNA, 20 bp, Artificial Sequence
  MKO10112999_B_Rin1
  gRNA
tctgtggatactgccgtacc

SEQ ID NO: 113000 - DNA, 20 bp, Artificial Sequence
  MKO10113000_B_Rin1
  gRNA
actccccagagccattcatc

SEQ ID NO: 113001 - DNA, 20 bp, Artificial Sequence
  MKO10113001_B_Rin2
  gRNA
tcctgcatacccatcccata

SEQ ID NO: 113002 - DNA, 20 bp, Artificial Sequence
  MKO10113002_B_Rin2
  gRNA
aagacatgtccccgagactc

SEQ ID NO: 113003 - DNA, 20 bp, Artificial Sequence
  MKO10113003_B_Rin2
  gRNA
caaattcacagggcaggcga

SEQ ID NO: 113004 - DNA, 20 bp, Artificial Sequence
  MKO10113004_B_Rin3
  gRNA
cacacagcaccaattgcttc

SEQ ID NO: 113005 - DNA, 20 bp, Artificial Sequence
  MKO10113005_B_Rin3
  gRNA
ttcagatgttcctggtgtgc

SEQ ID NO: 113006 - DNA, 20 bp, Artificial Sequence
  MKO10113006_B_Rin3
  gRNA
aggctcagttcttgtgtttg

SEQ ID NO: 113007 - DNA, 20 bp, Artificial Sequence
  MKO10113007_B_Ring1
  gRNA
cctcctgttacccgctccgc

SEQ ID NO: 113008 - DNA, 20 bp, Artificial Sequence
  MKO10113008_B_Ring1
  gRNA
actgcatcgtcaccgccctg

SEQ ID NO: 113009 - DNA, 20 bp, Artificial Sequence
  MKO10113009_B_Ring1
  gRNA
cctgctcccaagcgaccccg

SEQ ID NO: 113010 - DNA, 20 bp, Artificial Sequence
  MKO10113010_B_Rinl
  gRNA
gctcttgcccacgcctactg

SEQ ID NO: 113011 - DNA, 20 bp, Artificial Sequence
  MKO10113011_B_Rinl
  gRNA
ggggacagtcgggcatgcag

SEQ ID NO: 113012 - DNA, 20 bp, Artificial Sequence
  MKO10113012_B_Rinl
  gRNA
gtacctgctggctgacagaa

SEQ ID NO: 113013 - DNA, 20 bp, Artificial Sequence
  MKO10113013_B_Rint1
  gRNA
tttatgccagaatttaactg

SEQ ID NO: 113014 - DNA, 20 bp, Artificial Sequence
  MKO10113014_B_Rint1
  gRNA
cttcgtttcgtcaccactct

SEQ ID NO: 113015 - DNA, 20 bp, Artificial Sequence
  MKO10113015_B_Rint1
  gRNA
ttctcaaggacaagcttacc

SEQ ID NO: 113016 - DNA, 20 bp, Artificial Sequence
  MKO10113016_B_Riok1
  gRNA
caggtatcgaattaaagata

SEQ ID NO: 113017 - DNA, 20 bp, Artificial Sequence
  MKO10113017_B_Riok1
  gRNA
caccgtaaaattgagacaaa

SEQ ID NO: 113018 - DNA, 20 bp, Artificial Sequence
  MKO10113018_B_Riok1
  gRNA
gtcaattggagtagacattt

SEQ ID NO: 113019 - DNA, 20 bp, Artificial Sequence
  MKO10113019_B_Riok2
  gRNA
cgattataatcaattggctt

SEQ ID NO: 113020 - DNA, 20 bp, Artificial Sequence
  MKO10113020_B_Riok2
  gRNA
gtctagctgtgcagggctat

SEQ ID NO: 113021 - DNA, 20 bp, Artificial Sequence
  MKO10113021_B_Riok2
  gRNA
tacattgttgccaatgaagc

SEQ ID NO: 113022 - DNA, 20 bp, Artificial Sequence
  MKO10113022_B_Riok3
  gRNA
agtatcctgttcactgaccg

SEQ ID NO: 113023 - DNA, 20 bp, Artificial Sequence
  MKO10113023_B_Riok3
  gRNA
gccaattcctactcccaaaa

SEQ ID NO: 113024 - DNA, 20 bp, Artificial Sequence
  MKO10113024_B_Riok3
  gRNA
gagaatatgatgcacagctt

SEQ ID NO: 113025 - DNA, 20 bp, Artificial Sequence
  MKO10113025_B_Ripk1
  gRNA
aagtcggacgtgtacagctt

SEQ ID NO: 113026 - DNA, 20 bp, Artificial Sequence
  MKO10113026_B_Ripk1
  gRNA
tctcccttggacagtactca

SEQ ID NO: 113027 - DNA, 20 bp, Artificial Sequence
  MKO10113027_B_Ripk1
  gRNA
aaatccttgagtactgtcca

SEQ ID NO: 113028 - DNA, 20 bp, Artificial Sequence
  MKO10113028_B_Ripk2
  gRNA
caccaagagcaatttcatgc

SEQ ID NO: 113029 - DNA, 20 bp, Artificial Sequence
  MKO10113029_B_Ripk2
  gRNA
agctcatttaatgatccatt

SEQ ID NO: 113030 - DNA, 20 bp, Artificial Sequence
  MKO10113030_B_Ripk2
  gRNA
gtaactatgcccaaaaattc

SEQ ID NO: 113031 - DNA, 20 bp, Artificial Sequence
  MKO10113031_B_Ripk3
  gRNA
aggagttaatgattcattgc

SEQ ID NO: 113032 - DNA, 20 bp, Artificial Sequence
  MKO10113032_B_Ripk3
  gRNA
acagctttgggatcctcgtg

SEQ ID NO: 113033 - DNA, 20 bp, Artificial Sequence
  MKO10113033_B_Ripk3
  gRNA
atggagaatggctccctcgc

SEQ ID NO: 113034 - DNA, 20 bp, Artificial Sequence
  MKO10113034_B_Ripk4
  gRNA
catcgtgcacgagacagccg

SEQ ID NO: 113035 - DNA, 20 bp, Artificial Sequence
  MKO10113035_B_Ripk4
  gRNA
ctcttctcacgaattcgctc

SEQ ID NO: 113036 - DNA, 20 bp, Artificial Sequence
  MKO10113036_B_Ripk4
  gRNA
ctggcacaggcacgcggccg

SEQ ID NO: 113037 - DNA, 20 bp, Artificial Sequence
  MKO10113037_B_Ripply1
  gRNA
gatacccccatacacacttc

SEQ ID NO: 113038 - DNA, 20 bp, Artificial Sequence
  MKO10113038_B_Ripply1
  gRNA
gtcgtttatagaggacagcc

SEQ ID NO: 113039 - DNA, 20 bp, Artificial Sequence
  MKO10113039_B_Ripply1
  gRNA
cctgccctagcacaaatcaa

SEQ ID NO: 113040 - DNA, 20 bp, Artificial Sequence
  MKO10113040_B_Ripply2
  gRNA
atataagtagtcgtaacact

SEQ ID NO: 113041 - DNA, 20 bp, Artificial Sequence
  MKO10113041_B_Ripply2
  gRNA
cctgcaggtccgagggcttc

SEQ ID NO: 113042 - DNA, 20 bp, Artificial Sequence
  MKO10113042_B_Ripply2
  gRNA
tgcaataccaacaccctgtc

SEQ ID NO: 113043 - DNA, 20 bp, Artificial Sequence
  MKO10113043_B_Ripply3
  gRNA
ccgtggatgtcgcctccccc

SEQ ID NO: 113044 - DNA, 20 bp, Artificial Sequence
  MKO10113044_B_Ripply3
  gRNA
tacaacgatgactctgagtc

SEQ ID NO: 113045 - DNA, 20 bp, Artificial Sequence
  MKO10113045_B_Ripply3
  gRNA
ccaacacacatcgggatcaa

SEQ ID NO: 113046 - DNA, 20 bp, Artificial Sequence
  MKO10113046_B_Rit1
  gRNA
tggcaggttcatcatcaatg

SEQ ID NO: 113047 - DNA, 20 bp, Artificial Sequence
  MKO10113047_B_Rit1
  gRNA
tgatgatgaacctgccaatc

SEQ ID NO: 113048 - DNA, 20 bp, Artificial Sequence
  MKO10113048_B_Rit1
  gRNA
gaagaccatgaccccaccat

SEQ ID NO: 113049 - DNA, 20 bp, Artificial Sequence
  MKO10113049_B_Rit2
  gRNA
gcttagtgagagaaattcgc

SEQ ID NO: 113050 - DNA, 20 bp, Artificial Sequence
  MKO10113050_B_Rit2
  gRNA
attgtggggtcgtgatagtc

SEQ ID NO: 113051 - DNA, 20 bp, Artificial Sequence
  MKO10113051_B_Rit2
  gRNA
gtttataagccaccagttcc

SEQ ID NO: 113052 - DNA, 20 bp, Artificial Sequence
  MKO10113052_B_Rlbp1
  gRNA
ccaggtgggcactttccgca

SEQ ID NO: 113053 - DNA, 20 bp, Artificial Sequence
  MKO10113053_B_Rlbp1
  gRNA
ggctctccgctgcactatcg

SEQ ID NO: 113054 - DNA, 20 bp, Artificial Sequence
  MKO10113054_B_Rlbp1
  gRNA
caatacagaagccgttgatt

SEQ ID NO: 113055 - DNA, 20 bp, Artificial Sequence
  MKO10113055_B_Rlf
  gRNA
cagtctgtatgactctaatc

SEQ ID NO: 113056 - DNA, 20 bp, Artificial Sequence
  MKO10113056_B_Rlf
  gRNA
gttagacatcatatgtaatc

SEQ ID NO: 113057 - DNA, 20 bp, Artificial Sequence
  MKO10113057_B_Rlf
  gRNA
tctttgatagattgcaaagg

SEQ ID NO: 113058 - DNA, 20 bp, Artificial Sequence
  MKO10113058_B_Rlim
  gRNA
ttctgcgctgagctgcagac

SEQ ID NO: 113059 - DNA, 20 bp, Artificial Sequence
  MKO10113059_B_Rlim
  gRNA
cagagccccgatgaaaatag

SEQ ID NO: 113060 - DNA, 20 bp, Artificial Sequence
  MKO10113060_B_Rlim
  gRNA
actttcaggtgaaagtactg

SEQ ID NO: 113061 - DNA, 20 bp, Artificial Sequence
  MKO10113061_B_Rln1
  gRNA
cgtgaattgatcaaaatctg

SEQ ID NO: 113062 - DNA, 20 bp, Artificial Sequence
  MKO10113062_B_Rln1
  gRNA
acaacagaatcgctcaacac

SEQ ID NO: 113063 - DNA, 20 bp, Artificial Sequence
  MKO10113063_B_Rln1
  gRNA
gattgcaagtatttaagccc

SEQ ID NO: 113064 - DNA, 20 bp, Artificial Sequence
  MKO10113064_B_Rln3
  gRNA
accgcagagcttcaccccgt

SEQ ID NO: 113065 - DNA, 20 bp, Artificial Sequence
  MKO10113065_B_Rln3
  gRNA
cgcaagtgaagatgaccgcg

SEQ ID NO: 113066 - DNA, 20 bp, Artificial Sequence
  MKO10113066_B_Rln3
  gRNA
agcactcacccagagattcg

SEQ ID NO: 113067 - DNA, 20 bp, Artificial Sequence
  MKO10113067_B_Rltpr
  gRNA
agatctcgcccacctgaccc

SEQ ID NO: 113068 - DNA, 20 bp, Artificial Sequence
  MKO10113068_B_Rltpr
  gRNA
caaccaagtagactctactt

SEQ ID NO: 113069 - DNA, 20 bp, Artificial Sequence
  MKO10113069_B_Rltpr
  gRNA
tctggatggcgtcctcagcc

SEQ ID NO: 113070 - DNA, 20 bp, Artificial Sequence
  MKO10113070_B_Rmdn1
  gRNA
gcagactacctctatgaaag

SEQ ID NO: 113071 - DNA, 20 bp, Artificial Sequence
  MKO10113071_B_Rmdn1
  gRNA
cttatgcttacctttggctg

SEQ ID NO: 113072 - DNA, 20 bp, Artificial Sequence
  MKO10113072_B_Rmdn1
  gRNA
gtggttcatgccacagccaa

SEQ ID NO: 113073 - DNA, 20 bp, Artificial Sequence
  MKO10113073_B_Rmdn2
  gRNA
tagatcatacatgtctccat

SEQ ID NO: 113074 - DNA, 20 bp, Artificial Sequence
  MKO10113074_B_Rmdn2
  gRNA
aagaagcattatgctaatat

SEQ ID NO: 113075 - DNA, 20 bp, Artificial Sequence
  MKO10113075_B_Rmdn2
  gRNA
cagatggcagtgtccattca

SEQ ID NO: 113076 - DNA, 20 bp, Artificial Sequence
  MKO10113076_B_Rmdn3
  gRNA
gcgccgcagcgccataagac

SEQ ID NO: 113077 - DNA, 20 bp, Artificial Sequence
  MKO10113077_B_Rmdn3
  gRNA
tactcaccctccctcgctct

SEQ ID NO: 113078 - DNA, 20 bp, Artificial Sequence
  MKO10113078_B_Rmdn3
  gRNA
gcacttaccatttagggcat

SEQ ID NO: 113079 - DNA, 20 bp, Artificial Sequence
  MKO10113079_B_Rmi1
  gRNA
aatgtacatttgaactgctg

SEQ ID NO: 113080 - DNA, 20 bp, Artificial Sequence
  MKO10113080_B_Rmi1
  gRNA
cgcagagtactccaaaacca

SEQ ID NO: 113081 - DNA, 20 bp, Artificial Sequence
  MKO10113081_B_Rmi1
  gRNA
gagctgagaatctcttatga

SEQ ID NO: 113082 - DNA, 20 bp, Artificial Sequence
  MKO10113082_B_Rmi2
  gRNA
agaaagatccgtcatcttca

SEQ ID NO: 113083 - DNA, 20 bp, Artificial Sequence
  MKO10113083_B_Rmi2
  gRNA
gccaccggaggacagcgact

SEQ ID NO: 113084 - DNA, 20 bp, Artificial Sequence
  MKO10113084_B_Rmi2
  gRNA
ggccgcgtggtacgcgctcc

SEQ ID NO: 113085 - DNA, 20 bp, Artificial Sequence
  MKO10113085_B_Rmnd1
  gRNA
cctgaacaagaatattgttc

SEQ ID NO: 113086 - DNA, 20 bp, Artificial Sequence
  MKO10113086_B_Rmnd1
  gRNA
gggaaggagctgctgtgttc

SEQ ID NO: 113087 - DNA, 20 bp, Artificial Sequence
  MKO10113087_B_Rmnd1
  gRNA
cgaaacccagccctatgaag

SEQ ID NO: 113088 - DNA, 20 bp, Artificial Sequence
  MKO10113088_B_Rmnd5a
  gRNA
tgacctcattgagaagccgt

SEQ ID NO: 113089 - DNA, 20 bp, Artificial Sequence
  MKO10113089_B_Rmnd5a
  gRNA
caactcgagaaacactgcta

SEQ ID NO: 113090 - DNA, 20 bp, Artificial Sequence
  MKO10113090_B_Rmnd5a
  gRNA
tttgccctaaatcatcaaaa

SEQ ID NO: 113091 - DNA, 20 bp, Artificial Sequence
  MKO10113091_B_Rmnd5b
  gRNA
ccaggaatcgacattgaatg

SEQ ID NO: 113092 - DNA, 20 bp, Artificial Sequence
  MKO10113092_B_Rmnd5b
  gRNA
cactttatccgcctcctagc

SEQ ID NO: 113093 - DNA, 20 bp, Artificial Sequence
  MKO10113093_B_Rmnd5b
  gRNA
ctctggtgtagcctagcaaa

SEQ ID NO: 113094 - DNA, 20 bp, Artificial Sequence
  MKO10113094_B_Rnase10
  gRNA
ctcacagagaaggacgctct

SEQ ID NO: 113095 - DNA, 20 bp, Artificial Sequence
  MKO10113095_B_Rnase10
  gRNA
tctgacttacataaccgaaa

SEQ ID NO: 113096 - DNA, 20 bp, Artificial Sequence
  MKO10113096_B_Rnase10
  gRNA
tgatctgacattgtgcaaat

SEQ ID NO: 113097 - DNA, 20 bp, Artificial Sequence
  MKO10113097_B_Rnase11
  gRNA
gcctgcaaggaccttgcacg

SEQ ID NO: 113098 - DNA, 20 bp, Artificial Sequence
  MKO10113098_B_Rnase11
  gRNA
ctttgcaagaagcagtccaa

SEQ ID NO: 113099 - DNA, 20 bp, Artificial Sequence
  MKO10113099_B_Rnase11
  gRNA
cgggaatgcatcctgtcagt

SEQ ID NO: 113100 - DNA, 20 bp, Artificial Sequence
  MKO10113100_B_Rnase12
  gRNA
gaaatttggtacctgcaggc

SEQ ID NO: 113101 - DNA, 20 bp, Artificial Sequence
  MKO10113101_B_Rnase12
  gRNA
cacaagaacaaaccccttta

SEQ ID NO: 113102 - DNA, 20 bp, Artificial Sequence
  MKO10113102_B_Rnase12
  gRNA
cttgcccctgatggtcctaa

SEQ ID NO: 113103 - DNA, 20 bp, Artificial Sequence
  MKO10113103_B_Rnase13
  gRNA
ggtagtcaacatgtaaggtt

SEQ ID NO: 113104 - DNA, 20 bp, Artificial Sequence
  MKO10113104_B_Rnase13
  gRNA
tccctttgggtagttaacca

SEQ ID NO: 113105 - DNA, 20 bp, Artificial Sequence
  MKO10113105_B_Rnase13
  gRNA
ctgcagtttgcctctcacgt

SEQ ID NO: 113106 - DNA, 20 bp, Artificial Sequence
  MKO10113106_B_Rnase1
  gRNA
gatgtgcttctggtattgag

SEQ ID NO: 113107 - DNA, 20 bp, Artificial Sequence
  MKO10113107_B_Rnase1
  gRNA
gtagtcacagttgggatact

SEQ ID NO: 113108 - DNA, 20 bp, Artificial Sequence
  MKO10113108_B_Rnase1
  gRNA
atgacccatttgtcatatcc

SEQ ID NO: 113109 - DNA, 20 bp, Artificial Sequence
  MKO10113109_B_Rnase4
  gRNA
ctgtcacgaaggtgtagtga

SEQ ID NO: 113110 - DNA, 20 bp, Artificial Sequence
  MKO10113110_B_Rnase4
  gRNA
cattcgatcctggccatagg

SEQ ID NO: 113111 - DNA, 20 bp, Artificial Sequence
  MKO10113111_B_Rnase4
  gRNA
catgctgtcgaaggaaccgt

SEQ ID NO: 113112 - DNA, 20 bp, Artificial Sequence
  MKO10113112_B_Rnase6
  gRNA
ccatgcaacacagccatgcg

SEQ ID NO: 113113 - DNA, 20 bp, Artificial Sequence
  MKO10113113_B_Rnase6
  gRNA
tgagagcaaagtagatacat

SEQ ID NO: 113114 - DNA, 20 bp, Artificial Sequence
  MKO10113114_B_Rnase6
  gRNA
cccacagctcaagcagcaat

SEQ ID NO: 113115 - DNA, 20 bp, Artificial Sequence
  MKO10113115_B_Rnase9
  gRNA
cagtaatcgtagtcattgaa

SEQ ID NO: 113116 - DNA, 20 bp, Artificial Sequence
  MKO10113116_B_Rnase9
  gRNA
aagaagcatgaatctaatcg

SEQ ID NO: 113117 - DNA, 20 bp, Artificial Sequence
  MKO10113117_B_Rnase9
  gRNA
cagaagtacgtgactttatt

SEQ ID NO: 113118 - DNA, 20 bp, Artificial Sequence
  MKO10113118_B_Rnaseh1
  gRNA
ttacatggatctcggccctc

SEQ ID NO: 113119 - DNA, 20 bp, Artificial Sequence
  MKO10113119_B_Rnaseh1
  gRNA
tgtggcaaatttcttaaacc

SEQ ID NO: 113120 - DNA, 20 bp, Artificial Sequence
  MKO10113120_B_Rnaseh1
  gRNA
ctgggcgacagacaaaccag

SEQ ID NO: 113121 - DNA, 20 bp, Artificial Sequence
  MKO10113121_B_Rnaseh2a
  gRNA
cgattacaacagcactttcc

SEQ ID NO: 113122 - DNA, 20 bp, Artificial Sequence
  MKO10113122_B_Rnaseh2a
  gRNA
gtaacagatggcgtagacca

SEQ ID NO: 113123 - DNA, 20 bp, Artificial Sequence
  MKO10113123_B_Rnaseh2a
  gRNA
gaggctctttgcgaaaatgg

SEQ ID NO: 113124 - DNA, 20 bp, Artificial Sequence
  MKO10113124_B_Rnaseh2b
  gRNA
gctccttcactatctcctaa

SEQ ID NO: 113125 - DNA, 20 bp, Artificial Sequence
  MKO10113125_B_Rnaseh2b
  gRNA
ataaatcaatcagttcaatc

SEQ ID NO: 113126 - DNA, 20 bp, Artificial Sequence
  MKO10113126_B_Rnaseh2b
  gRNA
ctcagcagcaaggtgcaatc

SEQ ID NO: 113127 - DNA, 20 bp, Artificial Sequence
  MKO10113127_B_Rnaseh2c
  gRNA
cgctttgtcctccgcgtccc

SEQ ID NO: 113128 - DNA, 20 bp, Artificial Sequence
  MKO10113128_B_Rnaseh2c
  gRNA
gtatacgtaccgctgctgcg

SEQ ID NO: 113129 - DNA, 20 bp, Artificial Sequence
  MKO10113129_B_Rnaseh2c
  gRNA
cctgttgcagattcacgccc

SEQ ID NO: 113130 - DNA, 20 bp, Artificial Sequence
  MKO10113130_B_Rnasek
  gRNA
caccaacatgatcactcccc

SEQ ID NO: 113131 - DNA, 20 bp, Artificial Sequence
  MKO10113131_B_Rnasek
  gRNA
tactcttccagataatgctc

SEQ ID NO: 113132 - DNA, 20 bp, Artificial Sequence
  MKO10113132_B_Rnasek
  gRNA
ccattctgctgtgttaattg

SEQ ID NO: 113133 - DNA, 20 bp, Artificial Sequence
  MKO10113133_B_Rnasel
  gRNA
tcacctacagtatcctgata

SEQ ID NO: 113134 - DNA, 20 bp, Artificial Sequence
  MKO10113134_B_Rnasel
  gRNA
tctgatcaaaatctgccagc

SEQ ID NO: 113135 - DNA, 20 bp, Artificial Sequence
  MKO10113135_B_Rnasel
  gRNA
tagattccaagaaagctgtc

SEQ ID NO: 113136 - DNA, 20 bp, Artificial Sequence
  MKO10113136_B_Rnaset2a
  gRNA
tccagtaatccagagagtct

SEQ ID NO: 113137 - DNA, 20 bp, Artificial Sequence
  MKO10113137_B_Rnaset2a
  gRNA
cagaagattgtaaccagtcc

SEQ ID NO: 113138 - DNA, 20 bp, Artificial Sequence
  MKO10113138_B_Rnaset2a
  gRNA
ctcatctaagttaaagtgcc

SEQ ID NO: 113139 - DNA, 20 bp, Artificial Sequence
  MKO10113139_B_Rnaset2b
  gRNA
taacagctgccaagactctc

SEQ ID NO: 113140 - DNA, 20 bp, Artificial Sequence
  MKO10113140_B_Rnaset2b
  gRNA
ctcatctaagttaaagtgcc

SEQ ID NO: 113141 - DNA, 20 bp, Artificial Sequence
  MKO10113141_B_Rnaset2b
  gRNA
cagaagattgtaaccagtcc

SEQ ID NO: 113142 - DNA, 20 bp, Artificial Sequence
  MKO10113142_B_Rnd1
  gRNA
acagttccattagagtgctc

SEQ ID NO: 113143 - DNA, 20 bp, Artificial Sequence
  MKO10113143_B_Rnd1
  gRNA
gtgtaattctcaaacacggt

SEQ ID NO: 113144 - DNA, 20 bp, Artificial Sequence
  MKO10113144_B_Rnd1
  gRNA
tgagaattacacagcctgtt

SEQ ID NO: 113145 - DNA, 20 bp, Artificial Sequence
  MKO10113145_B_Rnd2
  gRNA
ctcacctgctcatgtgtgac

SEQ ID NO: 113146 - DNA, 20 bp, Artificial Sequence
  MKO10113146_B_Rnd2
  gRNA
tctgcagagttatgtcccca

SEQ ID NO: 113147 - DNA, 20 bp, Artificial Sequence
  MKO10113147_B_Rnd2
  gRNA
actggacagtgtcctcaaga

SEQ ID NO: 113148 - DNA, 20 bp, Artificial Sequence
  MKO10113148_B_Rnd3
  gRNA
tgggctgcaagtctgatctg

SEQ ID NO: 113149 - DNA, 20 bp, Artificial Sequence
  MKO10113149_B_Rnd3
  gRNA
cttacctggtcatatgacac

SEQ ID NO: 113150 - DNA, 20 bp, Artificial Sequence
  MKO10113150_B_Rnd3
  gRNA
tacttcacagggggcaaata

SEQ ID NO: 113151 - DNA, 20 bp, Artificial Sequence
  MKO10113151_B_Rnf103
  gRNA
ttcttgaagctcaatgccac

SEQ ID NO: 113152 - DNA, 20 bp, Artificial Sequence
  MKO10113152_B_Rnf103
  gRNA
tcaactgttccagtgatccc

SEQ ID NO: 113153 - DNA, 20 bp, Artificial Sequence
  MKO10113153_B_Rnf103
  gRNA
tgaactctattctgctctta

SEQ ID NO: 113154 - DNA, 20 bp, Artificial Sequence
  MKO10113154_B_Rnf10
  gRNA
ctgctgccaccgcccctttg

SEQ ID NO: 113155 - DNA, 20 bp, Artificial Sequence
  MKO10113155_B_Rnf10
  gRNA
caacaaggagctctttctac

SEQ ID NO: 113156 - DNA, 20 bp, Artificial Sequence
  MKO10113156_B_Rnf10
  gRNA
atgcctctatccacctactg

SEQ ID NO: 113157 - DNA, 20 bp, Artificial Sequence
  MKO10113157_B_Rnf111
  gRNA
taacagtagagatcctactg

SEQ ID NO: 113158 - DNA, 20 bp, Artificial Sequence
  MKO10113158_B_Rnf111
  gRNA
ttaaggtctcgttcaaccct

SEQ ID NO: 113159 - DNA, 20 bp, Artificial Sequence
  MKO10113159_B_Rnf111
  gRNA
tttcttcattggcagtgacc

SEQ ID NO: 113160 - DNA, 20 bp, Artificial Sequence
  MKO10113160_B_Rnf112
  gRNA
ttggtacgaatcaatgcctc

SEQ ID NO: 113161 - DNA, 20 bp, Artificial Sequence
  MKO10113161_B_Rnf112
  gRNA
cgcttcacagggttctcccc

SEQ ID NO: 113162 - DNA, 20 bp, Artificial Sequence
  MKO10113162_B_Rnf112
  gRNA
ggagagcaaacgaagcttca

SEQ ID NO: 113163 - DNA, 20 bp, Artificial Sequence
  MKO10113163_B_Rnf113a1
  gRNA
tagacgacgccgagaccctc

SEQ ID NO: 113164 - DNA, 20 bp, Artificial Sequence
  MKO10113164_B_Rnf113a1
  gRNA
ctcgctactcaagccgccat

SEQ ID NO: 113165 - DNA, 20 bp, Artificial Sequence
  MKO10113165_B_Rnf113a1
  gRNA
atctacgtgccaccgtgcgc

SEQ ID NO: 113166 - DNA, 20 bp, Artificial Sequence
  MKO10113166_B_Rnf113a2
  gRNA
ggccacagcagtttacgagt

SEQ ID NO: 113167 - DNA, 20 bp, Artificial Sequence
  MKO10113167_B_Rnf113a2
  gRNA
atctacgcgctactgtgcgc

SEQ ID NO: 113168 - DNA, 20 bp, Artificial Sequence
  MKO10113168_B_Rnf113a2
  gRNA
atccgtgcttgtaatctgaa

SEQ ID NO: 113169 - DNA, 20 bp, Artificial Sequence
  MKO10113169_B_Rnf114
  gRNA
actcaccacaaaagtgtcgt

SEQ ID NO: 113170 - DNA, 20 bp, Artificial Sequence
  MKO10113170_B_Rnf114
  gRNA
atttggaacatgacgtcaca

SEQ ID NO: 113171 - DNA, 20 bp, Artificial Sequence
  MKO10113171_B_Rnf114
  gRNA
tgtcgcagcgctctggcacc

SEQ ID NO: 113172 - DNA, 20 bp, Artificial Sequence
  MKO10113172_B_Rnf115
  gRNA
aataaagcctgagtcacatc

SEQ ID NO: 113173 - DNA, 20 bp, Artificial Sequence
  MKO10113173_B_Rnf115
  gRNA
tttgcaaattctgccattcc

SEQ ID NO: 113174 - DNA, 20 bp, Artificial Sequence
  MKO10113174_B_Rnf115
  gRNA
atatgtcccagatgtgactc

SEQ ID NO: 113175 - DNA, 20 bp, Artificial Sequence
  MKO10113175_B_Rnf11
  gRNA
atccgacacctagccagact

SEQ ID NO: 113176 - DNA, 20 bp, Artificial Sequence
  MKO10113176_B_Rnf11
  gRNA
cttatacagcatctgcctaa

SEQ ID NO: 113177 - DNA, 20 bp, Artificial Sequence
  MKO10113177_B_Rnf11
  gRNA
accagtcatctatacagtcc

SEQ ID NO: 113178 - DNA, 20 bp, Artificial Sequence
  MKO10113178_B_Rnf121
  gRNA
cttggggttgtctgtactag

SEQ ID NO: 113179 - DNA, 20 bp, Artificial Sequence
  MKO10113179_B_Rnf121
  gRNA
gctgtcatgtttaccctctt

SEQ ID NO: 113180 - DNA, 20 bp, Artificial Sequence
  MKO10113180_B_Rnf121
  gRNA
catgtagccaacaatgccag

SEQ ID NO: 113181 - DNA, 20 bp, Artificial Sequence
  MKO10113181_B_Rnf122
  gRNA
cgtatcgctcgctctgagcc

SEQ ID NO: 113182 - DNA, 20 bp, Artificial Sequence
  MKO10113182_B_Rnf122
  gRNA
gcagacctgtgcagtttgcc

SEQ ID NO: 113183 - DNA, 20 bp, Artificial Sequence
  MKO10113183_B_Rnf122
  gRNA
ccttcccctcaatatctaca

SEQ ID NO: 113184 - DNA, 20 bp, Artificial Sequence
  MKO10113184_B_Rnf123
  gRNA
gtgattggacacagcaactt

SEQ ID NO: 113185 - DNA, 20 bp, Artificial Sequence
  MKO10113185_B_Rnf123
  gRNA
cccttcccaggacaagttga

SEQ ID NO: 113186 - DNA, 20 bp, Artificial Sequence
  MKO10113186_B_Rnf123
  gRNA
tctaccacatgtgtgtacaa

SEQ ID NO: 113187 - DNA, 20 bp, Artificial Sequence
  MKO10113187_B_Rnf125
  gRNA
gaaagcccaagtaccttcaa

SEQ ID NO: 113188 - DNA, 20 bp, Artificial Sequence
  MKO10113188_B_Rnf125
  gRNA
cgggcctcctttctgatctg

SEQ ID NO: 113189 - DNA, 20 bp, Artificial Sequence
  MKO10113189_B_Rnf125
  gRNA
tccagttcccgctgacaaaa

SEQ ID NO: 113190 - DNA, 20 bp, Artificial Sequence
  MKO10113190_B_Rnf126
  gRNA
atcatccagcagctcgtgaa

SEQ ID NO: 113191 - DNA, 20 bp, Artificial Sequence
  MKO10113191_B_Rnf126
  gRNA
cagcccccaccgaccagaac

SEQ ID NO: 113192 - DNA, 20 bp, Artificial Sequence
  MKO10113192_B_Rnf126
  gRNA
tgatgccattcacgagctgc

SEQ ID NO: 113193 - DNA, 20 bp, Artificial Sequence
  MKO10113193_B_Rnf128
  gRNA
atgaaacttacttgcaggtt

SEQ ID NO: 113194 - DNA, 20 bp, Artificial Sequence
  MKO10113194_B_Rnf128
  gRNA
acagcacagctatctccatc

SEQ ID NO: 113195 - DNA, 20 bp, Artificial Sequence
  MKO10113195_B_Rnf128
  gRNA
tttattacagaggcagttaa

SEQ ID NO: 113196 - DNA, 20 bp, Artificial Sequence
  MKO10113196_B_Rnf130
  gRNA
tccctcctaatatcaaacag

SEQ ID NO: 113197 - DNA, 20 bp, Artificial Sequence
  MKO10113197_B_Rnf130
  gRNA
tgatgattatttcttcagcg

SEQ ID NO: 113198 - DNA, 20 bp, Artificial Sequence
  MKO10113198_B_Rnf130
  gRNA
tctagttgtcaatttactga

SEQ ID NO: 113199 - DNA, 20 bp, Artificial Sequence
  MKO10113199_B_Rnf133
  gRNA
gtacgcagtccaaactgcac

SEQ ID NO: 113200 - DNA, 20 bp, Artificial Sequence
  MKO10113200_B_Rnf133
  gRNA
gacatcgttgtagttatgat

SEQ ID NO: 113201 - DNA, 20 bp, Artificial Sequence
  MKO10113201_B_Rnf133
  gRNA
atcctcttcagaccagtact

SEQ ID NO: 113202 - DNA, 20 bp, Artificial Sequence
  MKO10113202_B_Rnf135
  gRNA
aagtaccacaaacgttatcc

SEQ ID NO: 113203 - DNA, 20 bp, Artificial Sequence
  MKO10113203_B_Rnf135
  gRNA
gccccctagagagcgagttc

SEQ ID NO: 113204 - DNA, 20 bp, Artificial Sequence
  MKO10113204_B_Rnf135
  gRNA
aaactgcaagggagtgtccc

SEQ ID NO: 113205 - DNA, 20 bp, Artificial Sequence
  MKO10113205_B_Rnf138rt1
  gRNA
gagcatcacccgtcattcgc

SEQ ID NO: 113206 - DNA, 20 bp, Artificial Sequence
  MKO10113206_B_Rnf138rt1
  gRNA
tacgatagagttcaacgcgc

SEQ ID NO: 113207 - DNA, 20 bp, Artificial Sequence
  MKO10113207_B_Rnf138rt1
  gRNA
gcttgacccaaagcgctgct

SEQ ID NO: 113208 - DNA, 20 bp, Artificial Sequence
  MKO10113208_B_Rnf138
  gRNA
aggtgctcaagacgccggtg

SEQ ID NO: 113209 - DNA, 20 bp, Artificial Sequence
  MKO10113209_B_Rnf138
  gRNA
caaatcttgtaagaagtatc

SEQ ID NO: 113210 - DNA, 20 bp, Artificial Sequence
  MKO10113210_B_Rnf138
  gRNA
agatttctcaagattcagta

SEQ ID NO: 113211 - DNA, 20 bp, Artificial Sequence
  MKO10113211_B_Rnf139
  gRNA
actacgattccagccaaagc

SEQ ID NO: 113212 - DNA, 20 bp, Artificial Sequence
  MKO10113212_B_Rnf139
  gRNA
gcactgagcgacattaatac

SEQ ID NO: 113213 - DNA, 20 bp, Artificial Sequence
  MKO10113213_B_Rnf139
  gRNA
atcgagttgcttcctcggaa

SEQ ID NO: 113214 - DNA, 20 bp, Artificial Sequence
  MKO10113214_B_Rnf13
  gRNA
ctctgatgacctgattagca

SEQ ID NO: 113215 - DNA, 20 bp, Artificial Sequence
  MKO10113215_B_Rnf13
  gRNA
ctcacctttaagccttcagc

SEQ ID NO: 113216 - DNA, 20 bp, Artificial Sequence
  MKO10113216_B_Rnf13
  gRNA
gacattccgtctgtctttat

SEQ ID NO: 113217 - DNA, 20 bp, Artificial Sequence
  MKO10113217_B_Rnf141
  gRNA
gcctgatgagaacccatcct

SEQ ID NO: 113218 - DNA, 20 bp, Artificial Sequence
  MKO10113218_B_Rnf141
  gRNA
ctctttcagaactgctaagg

SEQ ID NO: 113219 - DNA, 20 bp, Artificial Sequence
  MKO10113219_B_Rnf141
  gRNA
ggtgaagcagctgactgatg

SEQ ID NO: 113220 - DNA, 20 bp, Artificial Sequence
  MKO10113220_B_Rnf144a
  gRNA
gttgagctcttgatcaaaga

SEQ ID NO: 113221 - DNA, 20 bp, Artificial Sequence
  MKO10113221_B_Rnf144a
  gRNA
agagctcaacatactgtttc

SEQ ID NO: 113222 - DNA, 20 bp, Artificial Sequence
  MKO10113222_B_Rnf144a
  gRNA
aatgtgatgggcatggtctc

SEQ ID NO: 113223 - DNA, 20 bp, Artificial Sequence
  MKO10113223_B_Rnf144b
  gRNA
catgctctggcatcgccgac

SEQ ID NO: 113224 - DNA, 20 bp, Artificial Sequence
  MKO10113224_B_Rnf144b
  gRNA
tggtttaggcacaccatgtc

SEQ ID NO: 113225 - DNA, 20 bp, Artificial Sequence
  MKO10113225_B_Rnf144b
  gRNA
atgagtttcagctgtatcag

SEQ ID NO: 113226 - DNA, 20 bp, Artificial Sequence
  MKO10113226_B_Rnf145
  gRNA
actggaggcagtgctgaacg

SEQ ID NO: 113227 - DNA, 20 bp, Artificial Sequence
  MKO10113227_B_Rnf145
  gRNA
taagagccaagtatttgtac

SEQ ID NO: 113228 - DNA, 20 bp, Artificial Sequence
  MKO10113228_B_Rnf145
  gRNA
cgctttaccacagccttaat

SEQ ID NO: 113229 - DNA, 20 bp, Artificial Sequence
  MKO10113229_B_Rnf146
  gRNA
cagttcctgatcggtctgac

SEQ ID NO: 113230 - DNA, 20 bp, Artificial Sequence
  MKO10113230_B_Rnf146
  gRNA
aactgaccgatcagttgcag

SEQ ID NO: 113231 - DNA, 20 bp, Artificial Sequence
  MKO10113231_B_Rnf146
  gRNA
atagctgaacggagtcacag

SEQ ID NO: 113232 - DNA, 20 bp, Artificial Sequence
  MKO10113232_B_Rnf148
  gRNA
gtgatcatctataactatcc

SEQ ID NO: 113233 - DNA, 20 bp, Artificial Sequence
  MKO10113233_B_Rnf148
  gRNA
tgcagcctcccctttcgatg

SEQ ID NO: 113234 - DNA, 20 bp, Artificial Sequence
  MKO10113234_B_Rnf148
  gRNA
ggtgccgtggtacttcctga

SEQ ID NO: 113235 - DNA, 20 bp, Artificial Sequence
  MKO10113235_B_Rnf149
  gRNA
cctccccaagaatcatagga

SEQ ID NO: 113236 - DNA, 20 bp, Artificial Sequence
  MKO10113236_B_Rnf149
  gRNA
gtaaaaatgcggatagagat

SEQ ID NO: 113237 - DNA, 20 bp, Artificial Sequence
  MKO10113237_B_Rnf149
  gRNA
cctctacacactgtgaagca

SEQ ID NO: 113238 - DNA, 20 bp, Artificial Sequence
  MKO10113238_B_Rnf14
  gRNA
cagatagccatggtaccacc

SEQ ID NO: 113239 - DNA, 20 bp, Artificial Sequence
  MKO10113239_B_Rnf14
  gRNA
tgcaacaagatgacttgcac

SEQ ID NO: 113240 - DNA, 20 bp, Artificial Sequence
  MKO10113240_B_Rnf14
  gRNA
ctgagtctccatgctttaac

SEQ ID NO: 113241 - DNA, 20 bp, Artificial Sequence
  MKO10113241_B_Rnf150
  gRNA
gcactactcaccggcagggc

SEQ ID NO: 113242 - DNA, 20 bp, Artificial Sequence
  MKO10113242_B_Rnf150
  gRNA
ggtgcgatggtctagaagcc

SEQ ID NO: 113243 - DNA, 20 bp, Artificial Sequence
  MKO10113243_B_Rnf150
  gRNA
ctgtgcttaccgggatccct

SEQ ID NO: 113244 - DNA, 20 bp, Artificial Sequence
  MKO10113244_B_Rnf151
  gRNA
ttggcctcttgagaacccca

SEQ ID NO: 113245 - DNA, 20 bp, Artificial Sequence
  MKO10113245_B_Rnf151
  gRNA
tctgtaaaaagtgcatcttc

SEQ ID NO: 113246 - DNA, 20 bp, Artificial Sequence
  MKO10113246_B_Rnf151
  gRNA
aataaactccgaaaaaccat

SEQ ID NO: 113247 - DNA, 20 bp, Artificial Sequence
  MKO10113247_B_Rnf152
  gRNA
gagtgtacgctccttagaga

SEQ ID NO: 113248 - DNA, 20 bp, Artificial Sequence
  MKO10113248_B_Rnf152
  gRNA
aggcggcagcccatgtctcc

SEQ ID NO: 113249 - DNA, 20 bp, Artificial Sequence
  MKO10113249_B_Rnf152
  gRNA
agcatgtagcacccattgct

SEQ ID NO: 113250 - DNA, 20 bp, Artificial Sequence
  MKO10113250_B_Rnf157
  gRNA
gagaccgtgcactacaagcg

SEQ ID NO: 113251 - DNA, 20 bp, Artificial Sequence
  MKO10113251_B_Rnf157
  gRNA
ctcagtggcctggtagtaga

SEQ ID NO: 113252 - DNA, 20 bp, Artificial Sequence
  MKO10113252_B_Rnf157
  gRNA
tacccgggcatctgtgtcaa

SEQ ID NO: 113253 - DNA, 20 bp, Artificial Sequence
  MKO10113253_B_Rnf165
  gRNA
atagctctcccgaacagcag

SEQ ID NO: 113254 - DNA, 20 bp, Artificial Sequence
  MKO10113254_B_Rnf165
  gRNA
ctcgggaagtggtgcattcg

SEQ ID NO: 113255 - DNA, 20 bp, Artificial Sequence
  MKO10113255_B_Rnf165
  gRNA
aagggtagtttcgaatttca

SEQ ID NO: 113256 - DNA, 20 bp, Artificial Sequence
  MKO10113256_B_Rnf166
  gRNA
ctgtcggggttgcaacaaga

SEQ ID NO: 113257 - DNA, 20 bp, Artificial Sequence
  MKO10113257_B_Rnf166
  gRNA
ccgctgctcaccacacggtt

SEQ ID NO: 113258 - DNA, 20 bp, Artificial Sequence
  MKO10113258_B_Rnf166
  gRNA
gcaccacagggacgaatttg

SEQ ID NO: 113259 - DNA, 20 bp, Artificial Sequence
  MKO10113259_B_Rnf167
  gRNA
ttaggtcctaaatgctcaga

SEQ ID NO: 113260 - DNA, 20 bp, Artificial Sequence
  MKO10113260_B_Rnf167
  gRNA
accccttctcgtagacaaaa

SEQ ID NO: 113261 - DNA, 20 bp, Artificial Sequence
  MKO10113261_B_Rnf167
  gRNA
ataaagactgacccattgac

SEQ ID NO: 113262 - DNA, 20 bp, Artificial Sequence
  MKO10113262_B_Rnf168
  gRNA
ttgtcacctaagttgaagcc

SEQ ID NO: 113263 - DNA, 20 bp, Artificial Sequence
  MKO10113263_B_Rnf168
  gRNA
aagctcagccttacatgcca

SEQ ID NO: 113264 - DNA, 20 bp, Artificial Sequence
  MKO10113264_B_Rnf168
  gRNA
gctgagaggcgatgaagaac

SEQ ID NO: 113265 - DNA, 20 bp, Artificial Sequence
  MKO10113265_B_Rnf169
  gRNA
tcagatacacaagctactgc

SEQ ID NO: 113266 - DNA, 20 bp, Artificial Sequence
  MKO10113266_B_Rnf169
  gRNA
agctccgcccaacagagcca

SEQ ID NO: 113267 - DNA, 20 bp, Artificial Sequence
  MKO10113267_B_Rnf169
  gRNA
gccaatcaagttaagcaagc

SEQ ID NO: 113268 - DNA, 20 bp, Artificial Sequence
  MKO10113268_B_Rnf170
  gRNA
ctctcctgtatgcacttctc

SEQ ID NO: 113269 - DNA, 20 bp, Artificial Sequence
  MKO10113269_B_Rnf170
  gRNA
gaacatccatccagaaaacc

SEQ ID NO: 113270 - DNA, 20 bp, Artificial Sequence
  MKO10113270_B_Rnf170
  gRNA
tgtccacagtttgtttcaac

SEQ ID NO: 113271 - DNA, 20 bp, Artificial Sequence
  MKO10113271_B_Rnf17
  gRNA
tatattcttgaggtgctaac

SEQ ID NO: 113272 - DNA, 20 bp, Artificial Sequence
  MKO10113272_B_Rnf17
  gRNA
aacattcatcctccatacat

SEQ ID NO: 113273 - DNA, 20 bp, Artificial Sequence
  MKO10113273_B_Rnf17
  gRNA
gatgaagcactgaagatagc

SEQ ID NO: 113274 - DNA, 20 bp, Artificial Sequence
  MKO10113274_B_Rnf180
  gRNA
catgaatgtagacgcccttc

SEQ ID NO: 113275 - DNA, 20 bp, Artificial Sequence
  MKO10113275_B_Rnf180
  gRNA
cgtctacattcatgtgccac

SEQ ID NO: 113276 - DNA, 20 bp, Artificial Sequence
  MKO10113276_B_Rnf180
  gRNA
tgtctttggccagagttcgt

SEQ ID NO: 113277 - DNA, 20 bp, Artificial Sequence
  MKO10113277_B_Rnf181
  gRNA
gcagctcatggcggcacaga

SEQ ID NO: 113278 - DNA, 20 bp, Artificial Sequence
  MKO10113278_B_Rnf181
  gRNA
accgagtaccttacttagcc

SEQ ID NO: 113279 - DNA, 20 bp, Artificial Sequence
  MKO10113279_B_Rnf181
  gRNA
caagtgccccgtgtgccttt

SEQ ID NO: 113280 - DNA, 20 bp, Artificial Sequence
  MKO10113280_B_Rnf182
  gRNA
ggtggtgacagagtcgaaac

SEQ ID NO: 113281 - DNA, 20 bp, Artificial Sequence
  MKO10113281_B_Rnf182
  gRNA
cttacactcgagctcatccg

SEQ ID NO: 113282 - DNA, 20 bp, Artificial Sequence
  MKO10113282_B_Rnf182
  gRNA
gaaattcatgacaaacgcat

SEQ ID NO: 113283 - DNA, 20 bp, Artificial Sequence
  MKO10113283_B_Rnf183
  gRNA
gtgtccgcaaccctcacttc

SEQ ID NO: 113284 - DNA, 20 bp, Artificial Sequence
  MKO10113284_B_Rnf183
  gRNA
atgggcaccggcctggtgtc

SEQ ID NO: 113285 - DNA, 20 bp, Artificial Sequence
  MKO10113285_B_Rnf183
  gRNA
ctgtcgtcagcccaccgtgc

SEQ ID NO: 113286 - DNA, 20 bp, Artificial Sequence
  MKO10113286_B_Rnf185
  gRNA
ggcctctggccttgaggacg

SEQ ID NO: 113287 - DNA, 20 bp, Artificial Sequence
  MKO10113287_B_Rnf185
  gRNA
aagactcctcctcgtcctca

SEQ ID NO: 113288 - DNA, 20 bp, Artificial Sequence
  MKO10113288_B_Rnf185
  gRNA
cagtgctgcctctgccatag

SEQ ID NO: 113289 - DNA, 20 bp, Artificial Sequence
  MKO10113289_B_Rnf186
  gRNA
cccctgtccgctgtgccgaa

SEQ ID NO: 113290 - DNA, 20 bp, Artificial Sequence
  MKO10113290_B_Rnf186
  gRNA
gtgtcaaccgtgtagctgcc

SEQ ID NO: 113291 - DNA, 20 bp, Artificial Sequence
  MKO10113291_B_Rnf186
  gRNA
catccgcatgcgacatccac

SEQ ID NO: 113292 - DNA, 20 bp, Artificial Sequence
  MKO10113292_B_Rnf187
  gRNA
ccggaagcgatctgccgggt

SEQ ID NO: 113293 - DNA, 20 bp, Artificial Sequence
  MKO10113293_B_Rnf187
  gRNA
cctcaacttgactcgcaggt

SEQ ID NO: 113294 - DNA, 20 bp, Artificial Sequence
  MKO10113294_B_Rnf187
  gRNA
cccacctgcgagtcaagttg

SEQ ID NO: 113295 - DNA, 20 bp, Artificial Sequence
  MKO10113295_B_Rnf19a
  gRNA
aagattcataatcgctatga

SEQ ID NO: 113296 - DNA, 20 bp, Artificial Sequence
  MKO10113296_B_Rnf19a
  gRNA
ttcctgtcgagcagcatcac

SEQ ID NO: 113297 - DNA, 20 bp, Artificial Sequence
  MKO10113297_B_Rnf19a
  gRNA
tctccgatttacattatcta

SEQ ID NO: 113298 - DNA, 20 bp, Artificial Sequence
  MKO10113298_B_Rnf19b
  gRNA
gtaatcgctgctgttagcgt

SEQ ID NO: 113299 - DNA, 20 bp, Artificial Sequence
  MKO10113299_B_Rnf19b
  gRNA
gccatatcgcaggtctggtt

SEQ ID NO: 113300 - DNA, 20 bp, Artificial Sequence
  MKO10113300_B_Rnf19b
  gRNA
acgctaacagcagcgattac

SEQ ID NO: 113301 - DNA, 20 bp, Artificial Sequence
  MKO10113301_B_Rnf207
  gRNA
tcccagtggcctcccgccag

SEQ ID NO: 113302 - DNA, 20 bp, Artificial Sequence
  MKO10113302_B_Rnf207
  gRNA
gcacagcagcgacttcttgt

SEQ ID NO: 113303 - DNA, 20 bp, Artificial Sequence
  MKO10113303_B_Rnf207
  gRNA
tgctgtgcatccgctgcttt

SEQ ID NO: 113304 - DNA, 20 bp, Artificial Sequence
  MKO10113304_B_Rnf208
  gRNA
gcctctgcaccttcatcgtc

SEQ ID NO: 113305 - DNA, 20 bp, Artificial Sequence
  MKO10113305_B_Rnf208
  gRNA
cagatagtgggttccgcaca

SEQ ID NO: 113306 - DNA, 20 bp, Artificial Sequence
  MKO10113306_B_Rnf208
  gRNA
cagaccttccggcagtactg

SEQ ID NO: 113307 - DNA, 20 bp, Artificial Sequence
  MKO10113307_B_Rnf20
  gRNA
ttatcccggaaactgaacag

SEQ ID NO: 113308 - DNA, 20 bp, Artificial Sequence
  MKO10113308_B_Rnf20
  gRNA
tagctacctggctccagtac

SEQ ID NO: 113309 - DNA, 20 bp, Artificial Sequence
  MKO10113309_B_Rnf20
  gRNA
aactgctagccaaagtagca

SEQ ID NO: 113310 - DNA, 20 bp, Artificial Sequence
  MKO10113310_B_Rnf214
  gRNA
gcttctcgatttcagctttc

SEQ ID NO: 113311 - DNA, 20 bp, Artificial Sequence
  MKO10113311_B_Rnf214
  gRNA
ctttatggtcacatcctgaa

SEQ ID NO: 113312 - DNA, 20 bp, Artificial Sequence
  MKO10113312_B_Rnf214
  gRNA
aagaagtcctggacaagcag

SEQ ID NO: 113313 - DNA, 20 bp, Artificial Sequence
  MKO10113313_B_Rnf215
  gRNA
cgttacacagatggatgtcg

SEQ ID NO: 113314 - DNA, 20 bp, Artificial Sequence
  MKO10113314_B_Rnf215
  gRNA
cctcatcttaaaccacagtg

SEQ ID NO: 113315 - DNA, 20 bp, Artificial Sequence
  MKO10113315_B_Rnf215
  gRNA
ctccaatgtcaccaagctgt

SEQ ID NO: 113316 - DNA, 20 bp, Artificial Sequence
  MKO10113316_B_Rnf216
  gRNA
ataagccggtcttctctctt

SEQ ID NO: 113317 - DNA, 20 bp, Artificial Sequence
  MKO10113317_B_Rnf216
  gRNA
acatatccacttgctacatc

SEQ ID NO: 113318 - DNA, 20 bp, Artificial Sequence
  MKO10113318_B_Rnf216
  gRNA
catatctgactcctctgatg

SEQ ID NO: 113319 - DNA, 20 bp, Artificial Sequence
  MKO10113319_B_Rnf217
  gRNA
cacagagtgtttcgaattcc

SEQ ID NO: 113320 - DNA, 20 bp, Artificial Sequence
  MKO10113320_B_Rnf217
  gRNA
catttaagaagattagttcg

SEQ ID NO: 113321 - DNA, 20 bp, Artificial Sequence
  MKO10113321_B_Rnf217
  gRNA
atgtgtggtctccgaaaaac

SEQ ID NO: 113322 - DNA, 20 bp, Artificial Sequence
  MKO10113322_B_Rnf219
  gRNA
tggttgttggtgcatacgac

SEQ ID NO: 113323 - DNA, 20 bp, Artificial Sequence
  MKO10113323_B_Rnf219
  gRNA
gcaggtgcttcctgaccgta

SEQ ID NO: 113324 - DNA, 20 bp, Artificial Sequence
  MKO10113324_B_Rnf219
  gRNA
ttccactctactactgagtc

SEQ ID NO: 113325 - DNA, 20 bp, Artificial Sequence
  MKO10113325_B_Rnf220
  gRNA
cagcgagttgcaggaacata

SEQ ID NO: 113326 - DNA, 20 bp, Artificial Sequence
  MKO10113326_B_Rnf220
  gRNA
ccacctaccttgggggtgcc

SEQ ID NO: 113327 - DNA, 20 bp, Artificial Sequence
  MKO10113327_B_Rnf220
  gRNA
tcctccgtggcagaagagtg

SEQ ID NO: 113328 - DNA, 20 bp, Artificial Sequence
  MKO10113328_B_Rnf222
  gRNA
tccacgccctcaccagaccg

SEQ ID NO: 113329 - DNA, 20 bp, Artificial Sequence
  MKO10113329_B_Rnf222
  gRNA
gtacctgctctctacccgag

SEQ ID NO: 113330 - DNA, 20 bp, Artificial Sequence
  MKO10113330_B_Rnf222
  gRNA
tccgcggtctggtgagggcg

SEQ ID NO: 113331 - DNA, 20 bp, Artificial Sequence
  MKO10113331_B_Rnf223
  gRNA
ctcgctgctgggcgcgcttt

SEQ ID NO: 113332 - DNA, 20 bp, Artificial Sequence
  MKO10113332_B_Rnf223
  gRNA
agggacgctggtcgggtgcc

SEQ ID NO: 113333 - DNA, 20 bp, Artificial Sequence
  MKO10113333_B_Rnf223
  gRNA
cccacaaccgtgcctgtcgc

SEQ ID NO: 113334 - DNA, 20 bp, Artificial Sequence
  MKO10113334_B_Rnf24
  gRNA
caaatacccagttcatctct

SEQ ID NO: 113335 - DNA, 20 bp, Artificial Sequence
  MKO10113335_B_Rnf24
  gRNA
aaaagaacttaatctacatg

SEQ ID NO: 113336 - DNA, 20 bp, Artificial Sequence
  MKO10113336_B_Rnf24
  gRNA
tctgcaggtgccttgttaag

SEQ ID NO: 113337 - DNA, 20 bp, Artificial Sequence
  MKO10113337_B_Rnf25
  gRNA
agtattagagtctatctatc

SEQ ID NO: 113338 - DNA, 20 bp, Artificial Sequence
  MKO10113338_B_Rnf25
  gRNA
catgctctatgaactcattg

SEQ ID NO: 113339 - DNA, 20 bp, Artificial Sequence
  MKO10113339_B_Rnf25
  gRNA
tctgcaccctgccaccgcag

SEQ ID NO: 113340 - DNA, 20 bp, Artificial Sequence
  MKO10113340_B_Rnf26
  gRNA
ggccctgtgggatgctgtaa

SEQ ID NO: 113341 - DNA, 20 bp, Artificial Sequence
  MKO10113341_B_Rnf26
  gRNA
agttgcgatggtaaacaggg

SEQ ID NO: 113342 - DNA, 20 bp, Artificial Sequence
  MKO10113342_B_Rnf26
  gRNA
agaagttctgagtgctgatg

SEQ ID NO: 113343 - DNA, 20 bp, Artificial Sequence
  MKO10113343_B_Rnf2
  gRNA
tgatcacttatccaagtatc

SEQ ID NO: 113344 - DNA, 20 bp, Artificial Sequence
  MKO10113344_B_Rnf2
  gRNA
tctcagccacagcatcgagg

SEQ ID NO: 113345 - DNA, 20 bp, Artificial Sequence
  MKO10113345_B_Rnf2
  gRNA
actcacggtgaactggccac

SEQ ID NO: 113346 - DNA, 20 bp, Artificial Sequence
  MKO10113346_B_Rnf31
  gRNA
atccaccgtgctgcgaaaga

SEQ ID NO: 113347 - DNA, 20 bp, Artificial Sequence
  MKO10113347_B_Rnf31
  gRNA
caacgctctctcttagcagc

SEQ ID NO: 113348 - DNA, 20 bp, Artificial Sequence
  MKO10113348_B_Rnf31
  gRNA
ctaagagagagcgttgaaga

SEQ ID NO: 113349 - DNA, 20 bp, Artificial Sequence
  MKO10113349_B_Rnf32
  gRNA
gtatcactcttgtttgatat

SEQ ID NO: 113350 - DNA, 20 bp, Artificial Sequence
  MKO10113350_B_Rnf32
  gRNA
tcagagtaaagtgtgccacc

SEQ ID NO: 113351 - DNA, 20 bp, Artificial Sequence
  MKO10113351_B_Rnf32
  gRNA
gtggcaagaggcctagtttc

SEQ ID NO: 113352 - DNA, 20 bp, Artificial Sequence
  MKO10113352_B_Rnf34
  gRNA
aggcgggtgctacttctatg

SEQ ID NO: 113353 - DNA, 20 bp, Artificial Sequence
  MKO10113353_B_Rnf34
  gRNA
gatgagtgtgcgccagctga

SEQ ID NO: 113354 - DNA, 20 bp, Artificial Sequence
  MKO10113354_B_Rnf34
  gRNA
tggagctgtccgaggccagc

SEQ ID NO: 113355 - DNA, 20 bp, Artificial Sequence
  MKO10113355_B_Rnf38
  gRNA
aggggcgggaacgcagcata

SEQ ID NO: 113356 - DNA, 20 bp, Artificial Sequence
  MKO10113356_B_Rnf38
  gRNA
cctcaccaccaatgcgacca

SEQ ID NO: 113357 - DNA, 20 bp, Artificial Sequence
  MKO10113357_B_Rnf38
  gRNA
ccgatcgtgactgctgtgtt

SEQ ID NO: 113358 - DNA, 20 bp, Artificial Sequence
  MKO10113358_B_Rnf39
  gRNA
aggcgccttacctctccgtg

SEQ ID NO: 113359 - DNA, 20 bp, Artificial Sequence
  MKO10113359_B_Rnf39
  gRNA
tctccctgaagattaccccg

SEQ ID NO: 113360 - DNA, 20 bp, Artificial Sequence
  MKO10113360_B_Rnf39
  gRNA
acccaagccatctaactcag

SEQ ID NO: 113361 - DNA, 20 bp, Artificial Sequence
  MKO10113361_B_Rnf40
  gRNA
gttcttccacctgccgttgc

SEQ ID NO: 113362 - DNA, 20 bp, Artificial Sequence
  MKO10113362_B_Rnf40
  gRNA
tcctcatcgtcaaccgctac

SEQ ID NO: 113363 - DNA, 20 bp, Artificial Sequence
  MKO10113363_B_Rnf40
  gRNA
gtgatccctcgaccagaccc

SEQ ID NO: 113364 - DNA, 20 bp, Artificial Sequence
  MKO10113364_B_Rnf41
  gRNA
cattaagcacctgcgctccg

SEQ ID NO: 113365 - DNA, 20 bp, Artificial Sequence
  MKO10113365_B_Rnf41
  gRNA
ctctcagcagcagacgtgtc

SEQ ID NO: 113366 - DNA, 20 bp, Artificial Sequence
  MKO10113366_B_Rnf41
  gRNA
actgtgagcacaacccgaag

SEQ ID NO: 113367 - DNA, 20 bp, Artificial Sequence
  MKO10113367_B_Rnf43
  gRNA
tccaggcaaactatgacgtg

SEQ ID NO: 113368 - DNA, 20 bp, Artificial Sequence
  MKO10113368_B_Rnf43
  gRNA
gatgtcaaagagtactgcgt

SEQ ID NO: 113369 - DNA, 20 bp, Artificial Sequence
  MKO10113369_B_Rnf43
  gRNA
gtttgtgtacaagaatcgga

SEQ ID NO: 113370 - DNA, 20 bp, Artificial Sequence
  MKO10113370_B_Rnf44
  gRNA
cacccagcagagcccgttca

SEQ ID NO: 113371 - DNA, 20 bp, Artificial Sequence
  MKO10113371_B_Rnf44
  gRNA
gctgctgcatggtgcacgcc

SEQ ID NO: 113372 - DNA, 20 bp, Artificial Sequence
  MKO10113372_B_Rnf44
  gRNA
tcgtggagatcaaccatgaa

SEQ ID NO: 113373 - DNA, 20 bp, Artificial Sequence
  MKO10113373_B_Rnf4
  gRNA
ttcgacccctgaggtttcct

SEQ ID NO: 113374 - DNA, 20 bp, Artificial Sequence
  MKO10113374_B_Rnf4
  gRNA
tctgtttccaaggaaacctc

SEQ ID NO: 113375 - DNA, 20 bp, Artificial Sequence
  MKO10113375_B_Rnf4
  gRNA
atgatggagctactggaccc

SEQ ID NO: 113376 - DNA, 20 bp, Artificial Sequence
  MKO10113376_B_Rnf5
  gRNA
aatcccccggcatcaccaaa

SEQ ID NO: 113377 - DNA, 20 bp, Artificial Sequence
  MKO10113377_B_Rnf5
  gRNA
cagttggccctgtcttcacc

SEQ ID NO: 113378 - DNA, 20 bp, Artificial Sequence
  MKO10113378_B_Rnf5
  gRNA
aacacatacctggtgaagac

SEQ ID NO: 113379 - DNA, 20 bp, Artificial Sequence
  MKO10113379_B_Rnf6
  gRNA
cttgccgcgctgtcagagcc

SEQ ID NO: 113380 - DNA, 20 bp, Artificial Sequence
  MKO10113380_B_Rnf6
  gRNA
ccacctgatctagatctaga

SEQ ID NO: 113381 - DNA, 20 bp, Artificial Sequence
  MKO10113381_B_Rnf6
  gRNA
tcagcctggctctgacagcg

SEQ ID NO: 113382 - DNA, 20 bp, Artificial Sequence
  MKO10113382_B_Rnf7
  gRNA
acaactgctgcatgtccctg

SEQ ID NO: 113383 - DNA, 20 bp, Artificial Sequence
  MKO10113383_B_Rnf7
  gRNA
cctctcatttgccgattctt

SEQ ID NO: 113384 - DNA, 20 bp, Artificial Sequence
  MKO10113384_B_Rnf7
  gRNA
catcacctggaccctgcaga

SEQ ID NO: 113385 - DNA, 20 bp, Artificial Sequence
  MKO10113385_B_Rnf8
  gRNA
gacactaagtccccgtccta

SEQ ID NO: 113386 - DNA, 20 bp, Artificial Sequence
  MKO10113386_B_Rnf8
  gRNA
gtgcgacctgaagcaacagc

SEQ ID NO: 113387 - DNA, 20 bp, Artificial Sequence
  MKO10113387_B_Rnf8
  gRNA
tctgtagcatcaggctctaa

SEQ ID NO: 113388 - DNA, 20 bp, Artificial Sequence
  MKO10113388_B_Rnft1
  gRNA
cactcgaacagttgagcttc

SEQ ID NO: 113389 - DNA, 20 bp, Artificial Sequence
  MKO10113389_B_Rnft1
  gRNA
catcaaagctccgctgtgct

SEQ ID NO: 113390 - DNA, 20 bp, Artificial Sequence
  MKO10113390_B_Rnft1
  gRNA
attctcagtcacttcattac

SEQ ID NO: 113391 - DNA, 20 bp, Artificial Sequence
  MKO10113391_B_Rnft2
  gRNA
gtggctccttgctgcgcacc

SEQ ID NO: 113392 - DNA, 20 bp, Artificial Sequence
  MKO10113392_B_Rnft2
  gRNA
gagacgccacagtagcaaca

SEQ ID NO: 113393 - DNA, 20 bp, Artificial Sequence
  MKO10113393_B_Rnft2
  gRNA
cctatgccaactccaccctc

SEQ ID NO: 113394 - DNA, 20 bp, Artificial Sequence
  MKO10113394_B_Rngtt
  gRNA
ctaggtgttcactgcaccca

SEQ ID NO: 113395 - DNA, 20 bp, Artificial Sequence
  MKO10113395_B_Rngtt
  gRNA
gaatgtctcagtattctcag

SEQ ID NO: 113396 - DNA, 20 bp, Artificial Sequence
  MKO10113396_B_Rngtt
  gRNA
cacatataaggaaaccagta

SEQ ID NO: 113397 - DNA, 20 bp, Artificial Sequence
  MKO10113397_B_Rnh1
  gRNA
accgccatcacccagttcat

SEQ ID NO: 113398 - DNA, 20 bp, Artificial Sequence
  MKO10113398_B_Rnh1
  gRNA
ccgtcaagccgcagttctga

SEQ ID NO: 113399 - DNA, 20 bp, Artificial Sequence
  MKO10113399_B_Rnh1
  gRNA
aacaacgacctccatgaacc

SEQ ID NO: 113400 - DNA, 20 bp, Artificial Sequence
  MKO10113400_B_Rnls
  gRNA
gaagttaatgatccagcaat

SEQ ID NO: 113401 - DNA, 20 bp, Artificial Sequence
  MKO10113401_B_Rnls
  gRNA
agctcagtttccgacagacc

SEQ ID NO: 113402 - DNA, 20 bp, Artificial Sequence
  MKO10113402_B_Rnls
  gRNA
atccatcccctccgcacacc

SEQ ID NO: 113403 - DNA, 20 bp, Artificial Sequence
  MKO10113403_B_Rnmtl1
  gRNA
actccttgacgtactccaga

SEQ ID NO: 113404 - DNA, 20 bp, Artificial Sequence
  MKO10113404_B_Rnmtl1
  gRNA
ctgcaactggccgagagtac

SEQ ID NO: 113405 - DNA, 20 bp, Artificial Sequence
  MKO10113405_B_Rnmtl1
  gRNA
tcagacctagtaacgccaca

SEQ ID NO: 113406 - DNA, 20 bp, Artificial Sequence
  MKO10113406_B_Rnmt
  gRNA
aacccgtgacatcactgttt

SEQ ID NO: 113407 - DNA, 20 bp, Artificial Sequence
  MKO10113407_B_Rnmt
  gRNA
tgcccactataatgagcttc

SEQ ID NO: 113408 - DNA, 20 bp, Artificial Sequence
  MKO10113408_B_Rnmt
  gRNA
aaggtggagatttgctcaag

SEQ ID NO: 113409 - DNA, 20 bp, Artificial Sequence
  MKO10113409_B_Rnpc3
  gRNA
ctccatcagctgaaacttct

SEQ ID NO: 113410 - DNA, 20 bp, Artificial Sequence
  MKO10113410_B_Rnpc3
  gRNA
ctctaggttggatgacactg

SEQ ID NO: 113411 - DNA, 20 bp, Artificial Sequence
  MKO10113411_B_Rnpc3
  gRNA
taatgaaaaagcagcaataa

SEQ ID NO: 113412 - DNA, 20 bp, Artificial Sequence
  MKO10113412_B_Rnpepl1
  gRNA
gatgcggcgctgtgcatagg

SEQ ID NO: 113413 - DNA, 20 bp, Artificial Sequence
  MKO10113413_B_Rnpepl1
  gRNA
agtgcagcagagcgattata

SEQ ID NO: 113414 - DNA, 20 bp, Artificial Sequence
  MKO10113414_B_Rnpepl1
  gRNA
tgcacagcgccgcatcacca

SEQ ID NO: 113415 - DNA, 20 bp, Artificial Sequence
  MKO10113415_B_Rnpep
  gRNA
gatctcatggatgataacgt

SEQ ID NO: 113416 - DNA, 20 bp, Artificial Sequence
  MKO10113416_B_Rnpep
  gRNA
gagccagaactccccccagt

SEQ ID NO: 113417 - DNA, 20 bp, Artificial Sequence
  MKO10113417_B_Rnpep
  gRNA
agcagtgaaatgcacgtatt

SEQ ID NO: 113418 - DNA, 20 bp, Artificial Sequence
  MKO10113418_B_Rnps1
  gRNA
acgtgctggagcttcctgag

SEQ ID NO: 113419 - DNA, 20 bp, Artificial Sequence
  MKO10113419_B_Rnps1
  gRNA
gtccagctccacctccagct

SEQ ID NO: 113420 - DNA, 20 bp, Artificial Sequence
  MKO10113420_B_Rnps1
  gRNA
cttctcacttgactctttag

SEQ ID NO: 113421 - DNA, 20 bp, Artificial Sequence
  MKO10113421_B_Robo1
  gRNA
tctttcctccatcgaactgt

SEQ ID NO: 113422 - DNA, 20 bp, Artificial Sequence
  MKO10113422_B_Robo1
  gRNA
cacagtcactgccaaattac

SEQ ID NO: 113423 - DNA, 20 bp, Artificial Sequence
  MKO10113423_B_Robo1
  gRNA
agtaggcgaacctgcagtca

SEQ ID NO: 113424 - DNA, 20 bp, Artificial Sequence
  MKO10113424_B_Robo2
  gRNA
agctgtagaattccgttgtc

SEQ ID NO: 113425 - DNA, 20 bp, Artificial Sequence
  MKO10113425_B_Robo2
  gRNA
agctgatgatctctaatact

SEQ ID NO: 113426 - DNA, 20 bp, Artificial Sequence
  MKO10113426_B_Robo2
  gRNA
agctgcgactaccacatctg

SEQ ID NO: 113427 - DNA, 20 bp, Artificial Sequence
  MKO10113427_B_Robo3
  gRNA
tattggtctacgcagaaatg

SEQ ID NO: 113428 - DNA, 20 bp, Artificial Sequence
  MKO10113428_B_Robo3
  gRNA
aatggaatgtgtgcccccta

SEQ ID NO: 113429 - DNA, 20 bp, Artificial Sequence
  MKO10113429_B_Robo3
  gRNA
tatgtgcgtagcctccaaca

SEQ ID NO: 113430 - DNA, 20 bp, Artificial Sequence
  MKO10113430_B_Robo4
  gRNA
gtctttccaccatgagaccg

SEQ ID NO: 113431 - DNA, 20 bp, Artificial Sequence
  MKO10113431_B_Robo4
  gRNA
ctgtgtcccgaggttggatc

SEQ ID NO: 113432 - DNA, 20 bp, Artificial Sequence
  MKO10113432_B_Robo4
  gRNA
ccaagcctgggccatccgtg

SEQ ID NO: 113433 - DNA, 20 bp, Artificial Sequence
  MKO10113433_B_Rock1
  gRNA
ttaggatggattggatgccc

SEQ ID NO: 113434 - DNA, 20 bp, Artificial Sequence
  MKO10113434_B_Rock1
  gRNA
actatgacgtgcctgaaaaa

SEQ ID NO: 113435 - DNA, 20 bp, Artificial Sequence
  MKO10113435_B_Rock1
  gRNA
ccatcaccatgtagagatac

SEQ ID NO: 113436 - DNA, 20 bp, Artificial Sequence
  MKO10113436_B_Rock2
  gRNA
tgtactccatcaccatgtac

SEQ ID NO: 113437 - DNA, 20 bp, Artificial Sequence
  MKO10113437_B_Rock2
  gRNA
acaggatggcttaaattcct

SEQ ID NO: 113438 - DNA, 20 bp, Artificial Sequence
  MKO10113438_B_Rock2
  gRNA
aaaatccaaatcaaggacca

SEQ ID NO: 113439 - DNA, 20 bp, Artificial Sequence
  MKO10113439_B_Rogdi
  gRNA
cgcaggaggaggagtttcgc

SEQ ID NO: 113440 - DNA, 20 bp, Artificial Sequence
  MKO10113440_B_Rogdi
  gRNA
agttgttgcacttggccttc

SEQ ID NO: 113441 - DNA, 20 bp, Artificial Sequence
  MKO10113441_B_Rogdi
  gRNA
gagtcagagtccctttcacc

SEQ ID NO: 113442 - DNA, 20 bp, Artificial Sequence
  MKO10113442_B_Rom1
  gRNA
aacctaaacctctgggccca

SEQ ID NO: 113443 - DNA, 20 bp, Artificial Sequence
  MKO10113443_B_Rom1
  gRNA
tctgcaaataccgcaaacca

SEQ ID NO: 113444 - DNA, 20 bp, Artificial Sequence
  MKO10113444_B_Rom1
  gRNA
gcggtatttgcagacagcgc

SEQ ID NO: 113445 - DNA, 20 bp, Artificial Sequence
  MKO10113445_B_Romo1
  gRNA
cttcgtcatgggttgcgcag

SEQ ID NO: 113446 - DNA, 20 bp, Artificial Sequence
  MKO10113446_B_Romo1
  gRNA
atggcggccggggcgctgtt

SEQ ID NO: 113447 - DNA, 20 bp, Artificial Sequence
  MKO10113447_B_Romo1
  gRNA
gctgggctgggactgcccgt

SEQ ID NO: 113448 - DNA, 20 bp, Artificial Sequence
  MKO10113448_B_Ropn1l
  gRNA
agcgctcggatgcagctccc

SEQ ID NO: 113449 - DNA, 20 bp, Artificial Sequence
  MKO10113449_B_Ropn1l
  gRNA
agaaaagctcagaacgatcc

SEQ ID NO: 113450 - DNA, 20 bp, Artificial Sequence
  MKO10113450_B_Ropn1l
  gRNA
cctgaaagtcctgcacaagc

SEQ ID NO: 113451 - DNA, 20 bp, Artificial Sequence
  MKO10113451_B_Ropn1
  gRNA
agctccttacccgagaatgc

SEQ ID NO: 113452 - DNA, 20 bp, Artificial Sequence
  MKO10113452_B_Ropn1
  gRNA
ttcaccttgattaagccatc

SEQ ID NO: 113453 - DNA, 20 bp, Artificial Sequence
  MKO10113453_B_Ropn1
  gRNA
cgttcatcacactgttaaac

SEQ ID NO: 113454 - DNA, 20 bp, Artificial Sequence
  MKO10113454_B_Ror1
  gRNA
acttcaagtgaaatcgacaa

SEQ ID NO: 113455 - DNA, 20 bp, Artificial Sequence
  MKO10113455_B_Ror1
  gRNA
gaataacatcacaacgtccc

SEQ ID NO: 113456 - DNA, 20 bp, Artificial Sequence
  MKO10113456_B_Ror1
  gRNA
gatttcacttgaagtgttcc

SEQ ID NO: 113457 - DNA, 20 bp, Artificial Sequence
  MKO10113457_B_Ror2
  gRNA
cggttgtgcaagagccacga

SEQ ID NO: 113458 - DNA, 20 bp, Artificial Sequence
  MKO10113458_B_Ror2
  gRNA
cgcgaacttactgaaaattg

SEQ ID NO: 113459 - DNA, 20 bp, Artificial Sequence
  MKO10113459_B_Ror2
  gRNA
agtgggctgtccggtccatc

SEQ ID NO: 113460 - DNA, 20 bp, Artificial Sequence
  MKO10113460_B_Rora
  gRNA
aaatcgtcaggaatccatta

SEQ ID NO: 113461 - DNA, 20 bp, Artificial Sequence
  MKO10113461_B_Rora
  gRNA
gaaaccgctgccagcattgt

SEQ ID NO: 113462 - DNA, 20 bp, Artificial Sequence
  MKO10113462_B_Rora
  gRNA
atcaaacagttcttctgacg

SEQ ID NO: 113463 - DNA, 20 bp, Artificial Sequence
  MKO10113463_B_Rorb
  gRNA
aaatcctccgggatccacta

SEQ ID NO: 113464 - DNA, 20 bp, Artificial Sequence
  MKO10113464_B_Rorb
  gRNA
aatcaaggcgtatcaaagca

SEQ ID NO: 113465 - DNA, 20 bp, Artificial Sequence
  MKO10113465_B_Rorb
  gRNA
atggcagacccacacctacg

SEQ ID NO: 113466 - DNA, 20 bp, Artificial Sequence
  MKO10113466_B_Rorc
  gRNA
gtgatcccttgcaagatctg

SEQ ID NO: 113467 - DNA, 20 bp, Artificial Sequence
  MKO10113467_B_Rorc
  gRNA
atgtaagtgtgtctgctccg

SEQ ID NO: 113468 - DNA, 20 bp, Artificial Sequence
  MKO10113468_B_Rorc
  gRNA
tatcacctgtgaggggtgca

SEQ ID NO: 113469 - DNA, 20 bp, Artificial Sequence
  MKO10113469_B_Ros1
  gRNA
attgctgcagccgacctcac

SEQ ID NO: 113470 - DNA, 20 bp, Artificial Sequence
  MKO10113470_B_Ros1
  gRNA
tgaactcacctcacaaatgg

SEQ ID NO: 113471 - DNA, 20 bp, Artificial Sequence
  MKO10113471_B_Ros1
  gRNA
gcatccatggatgtcagttt

SEQ ID NO: 113472 - DNA, 20 bp, Artificial Sequence
  MKO10113472_B_Rp1l1
  gRNA
cagccgaactccgagcccga

SEQ ID NO: 113473 - DNA, 20 bp, Artificial Sequence
  MKO10113473_B_Rp1l1
  gRNA
agttatctagtgtgactgcg

SEQ ID NO: 113474 - DNA, 20 bp, Artificial Sequence
  MKO10113474_B_Rp1l1
  gRNA
gaacgaggccttcagatgtc

SEQ ID NO: 113475 - DNA, 20 bp, Artificial Sequence
  MKO10113475_B_Rp1
  gRNA
aggaacatcagcacgccccg

SEQ ID NO: 113476 - DNA, 20 bp, Artificial Sequence
  MKO10113476_B_Rp1
  gRNA
tgcacacgatgagagattcc

SEQ ID NO: 113477 - DNA, 20 bp, Artificial Sequence
  MKO10113477_B_Rp1
  gRNA
ctctcatcgtgtgcaccaga

SEQ ID NO: 113478 - DNA, 20 bp, Artificial Sequence
  MKO10113478_B_Rp2h
  gRNA
tgaaaactgaagacgcccaa

SEQ ID NO: 113479 - DNA, 20 bp, Artificial Sequence
  MKO10113479_B_Rp2h
  gRNA
gctatcaacatctccagatg

SEQ ID NO: 113480 - DNA, 20 bp, Artificial Sequence
  MKO10113480_B_Rp2h
  gRNA
tctccacagatggttggtaa

SEQ ID NO: 113481 - DNA, 20 bp, Artificial Sequence
  MKO10113481_B_Rp9
  gRNA
ggcatccacagtcctttagt

SEQ ID NO: 113482 - DNA, 20 bp, Artificial Sequence
  MKO10113482_B_Rp9
  gRNA
tcactcacctttataaaccc

SEQ ID NO: 113483 - DNA, 20 bp, Artificial Sequence
  MKO10113483_B_Rp9
  gRNA
ctcggaactgttctaacttc

SEQ ID NO: 113484 - DNA, 20 bp, Artificial Sequence
  MKO10113484_B_Rpa1
  gRNA
ttctcaggtcatgatacagc

SEQ ID NO: 113485 - DNA, 20 bp, Artificial Sequence
  MKO10113485_B_Rpa1
  gRNA
gcgcatacctgccgtctttc

SEQ ID NO: 113486 - DNA, 20 bp, Artificial Sequence
  MKO10113486_B_Rpa1
  gRNA
cggtacttacaatgacctgc

SEQ ID NO: 113487 - DNA, 20 bp, Artificial Sequence
  MKO10113487_B_Rpa2
  gRNA
gaaacatacgtgaaagtcgc

SEQ ID NO: 113488 - DNA, 20 bp, Artificial Sequence
  MKO10113488_B_Rpa2
  gRNA
tgccagtggtgagaacgccg

SEQ ID NO: 113489 - DNA, 20 bp, Artificial Sequence
  MKO10113489_B_Rpa2
  gRNA
tgttcgtcagtgggttgaca

SEQ ID NO: 113490 - DNA, 20 bp, Artificial Sequence
  MKO10113490_B_Rpa3
  gRNA
agccctacagggaaaaactg

SEQ ID NO: 113491 - DNA, 20 bp, Artificial Sequence
  MKO10113491_B_Rpa3
  gRNA
cagcttccccacgaagcaca

SEQ ID NO: 113492 - DNA, 20 bp, Artificial Sequence
  MKO10113492_B_Rpa3
  gRNA
tgttaccacagtatatcgac

SEQ ID NO: 113493 - DNA, 20 bp, Artificial Sequence
  MKO10113493_B_Rpain
  gRNA
tgtgctgcaggacatcgagc

SEQ ID NO: 113494 - DNA, 20 bp, Artificial Sequence
  MKO10113494_B_Rpain
  gRNA
gcaccgcttgttgtacaagc

SEQ ID NO: 113495 - DNA, 20 bp, Artificial Sequence
  MKO10113495_B_Rpain
  gRNA
ccggcgtgctacctgcagcc

SEQ ID NO: 113496 - DNA, 20 bp, Artificial Sequence
  MKO10113496_B_Rpap1
  gRNA
cacagaccaaatctagtcac

SEQ ID NO: 113497 - DNA, 20 bp, Artificial Sequence
  MKO10113497_B_Rpap1
  gRNA
taggtgaaaccagcagcatc

SEQ ID NO: 113498 - DNA, 20 bp, Artificial Sequence
  MKO10113498_B_Rpap1
  gRNA
ccctttcctgtgactagatt

SEQ ID NO: 113499 - DNA, 20 bp, Artificial Sequence
  MKO10113499_B_Rpap2
  gRNA
cggtccatcatcaaactctg

SEQ ID NO: 113500 - DNA, 20 bp, Artificial Sequence
  MKO10113500_B_Rpap2
  gRNA
gaaattcgatatttctgttt

SEQ ID NO: 113501 - DNA, 20 bp, Artificial Sequence
  MKO10113501_B_Rpap2
  gRNA
agattcccaaaactccagta

SEQ ID NO: 113502 - DNA, 20 bp, Artificial Sequence
  MKO10113502_B_Rpap3
  gRNA
acgccaggcgaggtgcagct

SEQ ID NO: 113503 - DNA, 20 bp, Artificial Sequence
  MKO10113503_B_Rpap3
  gRNA
ggatgaagatggcattcgtg

SEQ ID NO: 113504 - DNA, 20 bp, Artificial Sequence
  MKO10113504_B_Rpap3
  gRNA
cacccacgattctctgtccc

SEQ ID NO: 113505 - DNA, 20 bp, Artificial Sequence
  MKO10113505_B_Rpe65
  gRNA
ctcgaacataagcatcagtg

SEQ ID NO: 113506 - DNA, 20 bp, Artificial Sequence
  MKO10113506_B_Rpe65
  gRNA
agtttcttgtagccaccagc

SEQ ID NO: 113507 - DNA, 20 bp, Artificial Sequence
  MKO10113507_B_Rpe65
  gRNA
tgaagtcaaacttgtgcaaa

SEQ ID NO: 113508 - DNA, 20 bp, Artificial Sequence
  MKO10113508_B_Rpe
  gRNA
tcgacctctatatccaaagt

SEQ ID NO: 113509 - DNA, 20 bp, Artificial Sequence
  MKO10113509_B_Rpe
  gRNA
gaaagcctccgaaagcagct

SEQ ID NO: 113510 - DNA, 20 bp, Artificial Sequence
  MKO10113510_B_Rpe
  gRNA
tcaatatacctttcatcttg

SEQ ID NO: 113511 - DNA, 20 bp, Artificial Sequence
  MKO10113511_B_Rpf1
  gRNA
aaatctcttgcaatgcactg

SEQ ID NO: 113512 - DNA, 20 bp, Artificial Sequence
  MKO10113512_B_Rpf1
  gRNA
gatcttcattaataacgatc

SEQ ID NO: 113513 - DNA, 20 bp, Artificial Sequence
  MKO10113513_B_Rpf1
  gRNA
gacgttgtgataagaatctt

SEQ ID NO: 113514 - DNA, 20 bp, Artificial Sequence
  MKO10113514_B_Rpf2
  gRNA
aagaatgccatgctgattaa

SEQ ID NO: 113515 - DNA, 20 bp, Artificial Sequence
  MKO10113515_B_Rpf2
  gRNA
gacacaagtactcagagaca

SEQ ID NO: 113516 - DNA, 20 bp, Artificial Sequence
  MKO10113516_B_Rpf2
  gRNA
aaatattacaagaccatttg

SEQ ID NO: 113517 - DNA, 20 bp, Artificial Sequence
  MKO10113517_B_Rpgrip1l
  gRNA
acgcacagtgaagactcgcc

SEQ ID NO: 113518 - DNA, 20 bp, Artificial Sequence
  MKO10113518_B_Rpgrip1l
  gRNA
gatagaagagttagagcact

SEQ ID NO: 113519 - DNA, 20 bp, Artificial Sequence
  MKO10113519_B_Rpgrip1l
  gRNA
tcttcagcttcgagaacagc

SEQ ID NO: 113520 - DNA, 20 bp, Artificial Sequence
  MKO10113520_B_Rpgrip1
  gRNA
cctccatgaagagcccacgt

SEQ ID NO: 113521 - DNA, 20 bp, Artificial Sequence
  MKO10113521_B_Rpgrip1
  gRNA
cgccacatagtctttaaatg

SEQ ID NO: 113522 - DNA, 20 bp, Artificial Sequence
  MKO10113522_B_Rpgrip1
  gRNA
gtatggctgcgcctgtcatt

SEQ ID NO: 113523 - DNA, 20 bp, Artificial Sequence
  MKO10113523_B_Rpgr
  gRNA
atcaagccaacatgtatcaa

SEQ ID NO: 113524 - DNA, 20 bp, Artificial Sequence
  MKO10113524_B_Rpgr
  gRNA
actggtggcgtatatgcagc

SEQ ID NO: 113525 - DNA, 20 bp, Artificial Sequence
  MKO10113525_B_Rpgr
  gRNA
tctagctcttaagcctgaga

SEQ ID NO: 113526 - DNA, 20 bp, Artificial Sequence
  MKO10113526_B_Rph3al
  gRNA
aggcttcccccggccagaag

SEQ ID NO: 113527 - DNA, 20 bp, Artificial Sequence
  MKO10113527_B_Rph3al
  gRNA
cctccccgcagagcagacac

SEQ ID NO: 113528 - DNA, 20 bp, Artificial Sequence
  MKO10113528_B_Rph3al
  gRNA
gtctgtgcacacgtaccaga

SEQ ID NO: 113529 - DNA, 20 bp, Artificial Sequence
  MKO10113529_B_Rph3a
  gRNA
atcctggagcacagaccgac

SEQ ID NO: 113530 - DNA, 20 bp, Artificial Sequence
  MKO10113530_B_Rph3a
  gRNA
cccaatgcgttcctgttcca

SEQ ID NO: 113531 - DNA, 20 bp, Artificial Sequence
  MKO10113531_B_Rph3a
  gRNA
cagatcttgcagagccatac

SEQ ID NO: 113532 - DNA, 20 bp, Artificial Sequence
  MKO10113532_B_Rpia
  gRNA
cacttcgtcagcaccatcga

SEQ ID NO: 113533 - DNA, 20 bp, Artificial Sequence
  MKO10113533_B_Rpia
  gRNA
aggcagcttatcttgcagta

SEQ ID NO: 113534 - DNA, 20 bp, Artificial Sequence
  MKO10113534_B_Rpia
  gRNA
tgacctggatcaacacccag

SEQ ID NO: 113535 - DNA, 20 bp, Artificial Sequence
  MKO10113535_B_Rpl10a
  gRNA
ctcacgcgacaccctgtacg

SEQ ID NO: 113536 - DNA, 20 bp, Artificial Sequence
  MKO10113536_B_Rpl10a
  gRNA
gagaaacgtttgtccttctg

SEQ ID NO: 113537 - DNA, 20 bp, Artificial Sequence
  MKO10113537_B_Rpl10a
  gRNA
tgagcgcctcgatgtccatg

SEQ ID NO: 113538 - DNA, 20 bp, Artificial Sequence
  MKO10113538_B_Rpl10l
  gRNA
ttgtccagaggacctcgttc

SEQ ID NO: 113539 - DNA, 20 bp, Artificial Sequence
  MKO10113539_B_Rpl10l
  gRNA
cgcagatgcgtgcggcctcc

SEQ ID NO: 113540 - DNA, 20 bp, Artificial Sequence
  MKO10113540_B_Rpl10l
  gRNA
cgagtatgagcagctctcct

SEQ ID NO: 113541 - DNA, 20 bp, Artificial Sequence
  MKO10113541_B_Rpl10
  gRNA
ttacctgtcagccccagcac

SEQ ID NO: 113542 - DNA, 20 bp, Artificial Sequence
  MKO10113542_B_Rpl10
  gRNA
ccaaagtctcgtttctgccg

SEQ ID NO: 113543 - DNA, 20 bp, Artificial Sequence
  MKO10113543_B_Rpl10
  gRNA
catattcatctgacaccata

SEQ ID NO: 113544 - DNA, 20 bp, Artificial Sequence
  MKO10113544_B_Rpl11
  gRNA
cacataccacatagaagtcc

SEQ ID NO: 113545 - DNA, 20 bp, Artificial Sequence
  MKO10113545_B_Rpl11
  gRNA
ttctggcacaggtgctgggt

SEQ ID NO: 113546 - DNA, 20 bp, Artificial Sequence
  MKO10113546_B_Rpl11
  gRNA
ctgcagctagatacactgtc

SEQ ID NO: 113547 - DNA, 20 bp, Artificial Sequence
  MKO10113547_B_Rpl12
  gRNA
atacctgggcctgtctgttc

SEQ ID NO: 113548 - DNA, 20 bp, Artificial Sequence
  MKO10113548_B_Rpl12
  gRNA
ttctgcttcttcctgtctct

SEQ ID NO: 113549 - DNA, 20 bp, Artificial Sequence
  MKO10113549_B_Rpl12
  gRNA
cctgatcatcaaagccctca

SEQ ID NO: 113550 - DNA, 20 bp, Artificial Sequence
  MKO10113550_B_Rpl13a
  gRNA
gcaaggctcaccttgtcata

SEQ ID NO: 113551 - DNA, 20 bp, Artificial Sequence
  MKO10113551_B_Rpl13a
  gRNA
tgtcctgacagtaaagtatc

SEQ ID NO: 113552 - DNA, 20 bp, Artificial Sequence
  MKO10113552_B_Rpl13a
  gRNA
agcgtacgaccaccaccttc

SEQ ID NO: 113553 - DNA, 20 bp, Artificial Sequence
  MKO10113553_B_Rpl13
  gRNA
tgtccacttacattccggat

SEQ ID NO: 113554 - DNA, 20 bp, Artificial Sequence
  MKO10113554_B_Rpl13
  gRNA
cactcaccctgagctcctcc

SEQ ID NO: 113555 - DNA, 20 bp, Artificial Sequence
  MKO10113555_B_Rpl13
  gRNA
acagaactgtctcccttctt

SEQ ID NO: 113556 - DNA, 20 bp, Artificial Sequence
  MKO10113556_B_Rpl14
  gRNA
ttgcgaccagctttccagca

SEQ ID NO: 113557 - DNA, 20 bp, Artificial Sequence
  MKO10113557_B_Rpl14
  gRNA
agaagtatgtccgaaaagct

SEQ ID NO: 113558 - DNA, 20 bp, Artificial Sequence
  MKO10113558_B_Rpl14
  gRNA
aggcggatatcaatacgaaa

SEQ ID NO: 113559 - DNA, 20 bp, Artificial Sequence
  MKO10113559_B_Rpl15
  gRNA
cccagtcttcgagctttatc

SEQ ID NO: 113560 - DNA, 20 bp, Artificial Sequence
  MKO10113560_B_Rpl15
  gRNA
atcacgtgtattagcggtaa

SEQ ID NO: 113561 - DNA, 20 bp, Artificial Sequence
  MKO10113561_B_Rpl15
  gRNA
tgagagtcctgaattcctac

SEQ ID NO: 113562 - DNA, 20 bp, Artificial Sequence
  MKO10113562_B_Rpl17
  gRNA
caactccaccattataccgc

SEQ ID NO: 113563 - DNA, 20 bp, Artificial Sequence
  MKO10113563_B_Rpl17
  gRNA
gaacacccgggaaactgccc

SEQ ID NO: 113564 - DNA, 20 bp, Artificial Sequence
  MKO10113564_B_Rpl17
  gRNA
ctgtgtccagccccactgtt

SEQ ID NO: 113565 - DNA, 20 bp, Artificial Sequence
  MKO10113565_B_Rpl18a
  gRNA
acgtggaactgcttgacagc

SEQ ID NO: 113566 - DNA, 20 bp, Artificial Sequence
  MKO10113566_B_Rpl18a
  gRNA
cccctgcgtgtgaagaactt

SEQ ID NO: 113567 - DNA, 20 bp, Artificial Sequence
  MKO10113567_B_Rpl18a
  gRNA
ctgtgtgactgcaccagcag

SEQ ID NO: 113568 - DNA, 20 bp, Artificial Sequence
  MKO10113568_B_Rpl18
  gRNA
actcacttggtatggctgtg

SEQ ID NO: 113569 - DNA, 20 bp, Artificial Sequence
  MKO10113569_B_Rpl18
  gRNA
ctacctgcggctgcttgtca

SEQ ID NO: 113570 - DNA, 20 bp, Artificial Sequence
  MKO10113570_B_Rpl18
  gRNA
ttaccttgacaagcagccgc

SEQ ID NO: 113571 - DNA, 20 bp, Artificial Sequence
  MKO10113571_B_Rpl19
  gRNA
ttcttgctcagggaagagga

SEQ ID NO: 113572 - DNA, 20 bp, Artificial Sequence
  MKO10113572_B_Rpl19
  gRNA
gtatgctcaggctacagaag

SEQ ID NO: 113573 - DNA, 20 bp, Artificial Sequence
  MKO10113573_B_Rpl19
  gRNA
ccatatgcctgcccttccgt

SEQ ID NO: 113574 - DNA, 20 bp, Artificial Sequence
  MKO10113574_B_Rpl21
  gRNA
cttgttgacaatgatgccca

SEQ ID NO: 113575 - DNA, 20 bp, Artificial Sequence
  MKO10113575_B_Rpl21
  gRNA
ggaatgggcactgttcaaaa

SEQ ID NO: 113576 - DNA, 20 bp, Artificial Sequence
  MKO10113576_B_Rpl21
  gRNA
ctggcgcttcagctgcaccc

SEQ ID NO: 113577 - DNA, 20 bp, Artificial Sequence
  MKO10113577_B_Rpl22l1
  gRNA
gttaaagtcaatggaaaaac

SEQ ID NO: 113578 - DNA, 20 bp, Artificial Sequence
  MKO10113578_B_Rpl22l1
  gRNA
catcttcatcttgactaatc

SEQ ID NO: 113579 - DNA, 20 bp, Artificial Sequence
  MKO10113579_B_Rpl22l1
  gRNA
agaagaataatctccgtgat

SEQ ID NO: 113580 - DNA, 20 bp, Artificial Sequence
  MKO10113580_B_Rpl22
  gRNA
atactcctagaaaaagcttg

SEQ ID NO: 113581 - DNA, 20 bp, Artificial Sequence
  MKO10113581_B_Rpl22
  gRNA
tctgcaggagcagttcctcc

SEQ ID NO: 113582 - DNA, 20 bp, Artificial Sequence
  MKO10113582_B_Rpl22
  gRNA
ggggggcaaaaaaaagaagc

SEQ ID NO: 113583 - DNA, 20 bp, Artificial Sequence
  MKO10113583_B_Rpl23a
  gRNA
caaagccgaagccaaagcga

SEQ ID NO: 113584 - DNA, 20 bp, Artificial Sequence
  MKO10113584_B_Rpl23a
  gRNA
catcaaattcccactgacca

SEQ ID NO: 113585 - DNA, 20 bp, Artificial Sequence
  MKO10113585_B_Rpl23a
  gRNA
ccttatcagggtattgactt

SEQ ID NO: 113586 - DNA, 20 bp, Artificial Sequence
  MKO10113586_B_Rpl23
  gRNA
cgttgtcgaattaccactgc

SEQ ID NO: 113587 - DNA, 20 bp, Artificial Sequence
  MKO10113587_B_Rpl23
  gRNA
cagttgatcacagctccgac

SEQ ID NO: 113588 - DNA, 20 bp, Artificial Sequence
  MKO10113588_B_Rpl23
  gRNA
cttgtatatcatctctgtga

SEQ ID NO: 113589 - DNA, 20 bp, Artificial Sequence
  MKO10113589_B_Rpl24
  gRNA
tcttgtgtttccttctgtag

SEQ ID NO: 113590 - DNA, 20 bp, Artificial Sequence
  MKO10113590_B_Rpl24
  gRNA
agtcagcattcctttccaaa

SEQ ID NO: 113591 - DNA, 20 bp, Artificial Sequence
  MKO10113591_B_Rpl24
  gRNA
aaattccaacgagccatcac

SEQ ID NO: 113592 - DNA, 20 bp, Artificial Sequence
  MKO10113592_B_Rpl26
  gRNA
accgaagcaagaaccgcaaa

SEQ ID NO: 113593 - DNA, 20 bp, Artificial Sequence
  MKO10113593_B_Rpl26
  gRNA
gttgttcgcggacactacaa

SEQ ID NO: 113594 - DNA, 20 bp, Artificial Sequence
  MKO10113594_B_Rpl26
  gRNA
ccttctcctttcctacttgt

SEQ ID NO: 113595 - DNA, 20 bp, Artificial Sequence
  MKO10113595_B_Rpl27a
  gRNA
atagggctactacaaagttc

SEQ ID NO: 113596 - DNA, 20 bp, Artificial Sequence
  MKO10113596_B_Rpl27a
  gRNA
atttgtcaaagttgatcctg

SEQ ID NO: 113597 - DNA, 20 bp, Artificial Sequence
  MKO10113597_B_Rpl27a
  gRNA
ggtaagcaccgcaagcaccc

SEQ ID NO: 113598 - DNA, 20 bp, Artificial Sequence
  MKO10113598_B_Rpl27
  gRNA
ttcctttctagatacaagac

SEQ ID NO: 113599 - DNA, 20 bp, Artificial Sequence
  MKO10113599_B_Rpl27
  gRNA
aggctcaccttgtgggcatg

SEQ ID NO: 113600 - DNA, 20 bp, Artificial Sequence
  MKO10113600_B_Rpl27
  gRNA
ccgctcctcaaacttgacct

SEQ ID NO: 113601 - DNA, 20 bp, Artificial Sequence
  MKO10113601_B_Rpl28
  gRNA
ccatgtccgcgcatctgcag

SEQ ID NO: 113602 - DNA, 20 bp, Artificial Sequence
  MKO10113602_B_Rpl28
  gRNA
taccacgacccctttgccat

SEQ ID NO: 113603 - DNA, 20 bp, Artificial Sequence
  MKO10113603_B_Rpl28
  gRNA
cgaaactccttccgctacaa

SEQ ID NO: 113604 - DNA, 20 bp, Artificial Sequence
  MKO10113604_B_Rpl29
  gRNA
aggttgaccccaagttcctg

SEQ ID NO: 113605 - DNA, 20 bp, Artificial Sequence
  MKO10113605_B_Rpl29
  gRNA
actcactgcctttgcattgt

SEQ ID NO: 113606 - DNA, 20 bp, Artificial Sequence
  MKO10113606_B_Rpl29
  gRNA
tgccatttctgtgccatttg

SEQ ID NO: 113607 - DNA, 20 bp, Artificial Sequence
  MKO10113607_B_Rpl30
  gRNA
cctcaaagctggacagttgt

SEQ ID NO: 113608 - DNA, 20 bp, Artificial Sequence
  MKO10113608_B_Rpl30
  gRNA
aatagagtactatgccatgt

SEQ ID NO: 113609 - DNA, 20 bp, Artificial Sequence
  MKO10113609_B_Rpl30
  gRNA
tattattgccactgtagtga

SEQ ID NO: 113610 - DNA, 20 bp, Artificial Sequence
  MKO10113610_B_Rpl31-ps12
  gRNA
gaatgttgatggtgtattct

SEQ ID NO: 113611 - DNA, 20 bp, Artificial Sequence
  MKO10113611_B_Rpl31-ps12
  gRNA
cccaaacaagctctacacgc

SEQ ID NO: 113612 - DNA, 20 bp, Artificial Sequence
  MKO10113612_B_Rpl31-ps12
  gRNA
ccaccttgttgatggcagaa

SEQ ID NO: 113613 - DNA, 20 bp, Artificial Sequence
  MKO10113613_B_Rpl31
  gRNA
gatgcgcttgtgaatgttga

SEQ ID NO: 113614 - DNA, 20 bp, Artificial Sequence
  MKO10113614_B_Rpl31
  gRNA
gcttcaagaagcgtgctcct

SEQ ID NO: 113615 - DNA, 20 bp, Artificial Sequence
  MKO10113615_B_Rpl31
  gRNA
cttgtccagaaaacgtaatg

SEQ ID NO: 113616 - DNA, 20 bp, Artificial Sequence
  MKO10113616_B_Rpl32
  gRNA
cctccagctccttgacattg

SEQ ID NO: 113617 - DNA, 20 bp, Artificial Sequence
  MKO10113617_B_Rpl32
  gRNA
tgtagaaagagcagcacagc

SEQ ID NO: 113618 - DNA, 20 bp, Artificial Sequence
  MKO10113618_B_Rpl32
  gRNA
gagtcaccaatcccaacgcc

SEQ ID NO: 113619 - DNA, 20 bp, Artificial Sequence
  MKO10113619_B_Rpl34-ps1
  gRNA
tcacctgtcacggacacact

SEQ ID NO: 113620 - DNA, 20 bp, Artificial Sequence
  MKO10113620_B_Rpl34-ps1
  gRNA
ctcacccctcgaagtctgcc

SEQ ID NO: 113621 - DNA, 20 bp, Artificial Sequence
  MKO10113621_B_Rpl34-ps1
  gRNA
aatcgttgtgaaagtcttga

SEQ ID NO: 113622 - DNA, 20 bp, Artificial Sequence
  MKO10113622_B_Rpl34
  gRNA
ctcacccctcgaagtctgcc

SEQ ID NO: 113623 - DNA, 20 bp, Artificial Sequence
  MKO10113623_B_Rpl34
  gRNA
aatcgttgtgaaagtcttga

SEQ ID NO: 113624 - DNA, 20 bp, Artificial Sequence
  MKO10113624_B_Rpl34
  gRNA
agcgtttgacataccgccgt

SEQ ID NO: 113625 - DNA, 20 bp, Artificial Sequence
  MKO10113625_B_Rpl35a
  gRNA
accagcaatacagtgactcc

SEQ ID NO: 113626 - DNA, 20 bp, Artificial Sequence
  MKO10113626_B_Rpl35a
  gRNA
taacagcaagtatgtctgga

SEQ ID NO: 113627 - DNA, 20 bp, Artificial Sequence
  MKO10113627_B_Rpl35a
  gRNA
agtagaactccgtttcatct

SEQ ID NO: 113628 - DNA, 20 bp, Artificial Sequence
  MKO10113628_B_Rpl35
  gRNA
agactcaaaaagaaaacctc

SEQ ID NO: 113629 - DNA, 20 bp, Artificial Sequence
  MKO10113629_B_Rpl35
  gRNA
agactagagccatgcgccgc

SEQ ID NO: 113630 - DNA, 20 bp, Artificial Sequence
  MKO10113630_B_Rpl35
  gRNA
ttgactgcatacttgcgcag

SEQ ID NO: 113631 - DNA, 20 bp, Artificial Sequence
  MKO10113631_B_Rpl36al
  gRNA
caaagtgacccagtataaga

SEQ ID NO: 113632 - DNA, 20 bp, Artificial Sequence
  MKO10113632_B_Rpl36al
  gRNA
aaaatgcttgcatctcttaa

SEQ ID NO: 113633 - DNA, 20 bp, Artificial Sequence
  MKO10113633_B_Rpl36al
  gRNA
aaggattccctgtatgccca

SEQ ID NO: 113634 - DNA, 20 bp, Artificial Sequence
  MKO10113634_B_Rpl36a
  gRNA
catcctcttagatctgcagt

SEQ ID NO: 113635 - DNA, 20 bp, Artificial Sequence
  MKO10113635_B_Rpl36a
  gRNA
aaagaagattgtgctgagac

SEQ ID NO: 113636 - DNA, 20 bp, Artificial Sequence
  MKO10113636_B_Rpl36a
  gRNA
ctgcttagaactggatcact

SEQ ID NO: 113637 - DNA, 20 bp, Artificial Sequence
  MKO10113637_B_Rpl36
  gRNA
ccaaacacaccaagttcgtg

SEQ ID NO: 113638 - DNA, 20 bp, Artificial Sequence
  MKO10113638_B_Rpl36
  gRNA
gagggttcatcaatccttct

SEQ ID NO: 113639 - DNA, 20 bp, Artificial Sequence
  MKO10113639_B_Rpl36
  gRNA
acatccgcgccaagagaaag

SEQ ID NO: 113640 - DNA, 20 bp, Artificial Sequence
  MKO10113640_B_Rpl37a
  gRNA
aagatgaagagacgagccgt

SEQ ID NO: 113641 - DNA, 20 bp, Artificial Sequence
  MKO10113641_B_Rpl37a
  gRNA
cagttccttcagtcttctga

SEQ ID NO: 113642 - DNA, 20 bp, Artificial Sequence
  MKO10113642_B_Rpl37a
  gRNA
gtctgccatcagaagactga

SEQ ID NO: 113643 - DNA, 20 bp, Artificial Sequence
  MKO10113643_B_Rpl37
  gRNA
cttacacttcctcttgcgct

SEQ ID NO: 113644 - DNA, 20 bp, Artificial Sequence
  MKO10113644_B_Rpl37
  gRNA
gtttcggcgttgttccctca

SEQ ID NO: 113645 - DNA, 20 bp, Artificial Sequence
  MKO10113645_B_Rpl37
  gRNA
acgaagggaacgtcatcctt

SEQ ID NO: 113646 - DNA, 20 bp, Artificial Sequence
  MKO10113646_B_Rpl38
  gRNA
ttccccaggtttggcagtga

SEQ ID NO: 113647 - DNA, 20 bp, Artificial Sequence
  MKO10113647_B_Rpl38
  gRNA
tgtcaagatcaagaagaaca

SEQ ID NO: 113648 - DNA, 20 bp, Artificial Sequence
  MKO10113648_B_Rpl38
  gRNA
aggactttctgctgacagcc

SEQ ID NO: 113649 - DNA, 20 bp, Artificial Sequence
  MKO10113649_B_Rpl39l
  gRNA
aaaatcgtcccattccacaa

SEQ ID NO: 113650 - DNA, 20 bp, Artificial Sequence
  MKO10113650_B_Rpl39l
  gRNA
aaatcatgtacaactccaag

SEQ ID NO: 113651 - DNA, 20 bp, Artificial Sequence
  MKO10113651_B_Rpl39l
  gRNA
tggcttctcacaagaccttc

SEQ ID NO: 113652 - DNA, 20 bp, Artificial Sequence
  MKO10113652_B_Rpl39
  gRNA
agaacgaagctgggtctgta

SEQ ID NO: 113653 - DNA, 20 bp, Artificial Sequence
  MKO10113653_B_Rpl39
  gRNA
tgaaaactggtaacaaaatc

SEQ ID NO: 113654 - DNA, 20 bp, Artificial Sequence
  MKO10113654_B_Rpl3l
  gRNA
ttacaggggtgaccagtcgc

SEQ ID NO: 113655 - DNA, 20 bp, Artificial Sequence
  MKO10113655_B_Rpl3l
  gRNA
cagcgtgttcagccagagtg

SEQ ID NO: 113656 - DNA, 20 bp, Artificial Sequence
  MKO10113656_B_Rpl3l
  gRNA
tgacatcaataacctcactc

SEQ ID NO: 113657 - DNA, 20 bp, Artificial Sequence
  MKO10113657_B_Rpl3
  gRNA
atcctggcctgtcaacttcc

SEQ ID NO: 113658 - DNA, 20 bp, Artificial Sequence
  MKO10113658_B_Rpl3
  gRNA
ggtgaacaagaaagaagtcg

SEQ ID NO: 113659 - DNA, 20 bp, Artificial Sequence
  MKO10113659_B_Rpl3
  gRNA
ctcagcaaatacagtcttga

SEQ ID NO: 113660 - DNA, 20 bp, Artificial Sequence
  MKO10113660_B_Rpl41
  gRNA
ggcggaagaagagaatgcgc

SEQ ID NO: 113661 - DNA, 20 bp, Artificial Sequence
  MKO10113661_B_Rpl41
  gRNA
agcgcaagagaagaaagatg

SEQ ID NO: 113662 - DNA, 20 bp, Artificial Sequence
  MKO10113662_B_Rpl4
  gRNA
gccctatgccgtcagtgaat

SEQ ID NO: 113663 - DNA, 20 bp, Artificial Sequence
  MKO10113663_B_Rpl4
  gRNA
aaagaaaacagatgtgtcgt

SEQ ID NO: 113664 - DNA, 20 bp, Artificial Sequence
  MKO10113664_B_Rpl4
  gRNA
atacatttccaaaggcaccc

SEQ ID NO: 113665 - DNA, 20 bp, Artificial Sequence
  MKO10113665_B_Rpl5
  gRNA
gccgccttcgaaatctcact

SEQ ID NO: 113666 - DNA, 20 bp, Artificial Sequence
  MKO10113666_B_Rpl5
  gRNA
tgtgaaagttgtcaagaata

SEQ ID NO: 113667 - DNA, 20 bp, Artificial Sequence
  MKO10113667_B_Rpl5
  gRNA
acgaactatcatcctatatt

SEQ ID NO: 113668 - DNA, 20 bp, Artificial Sequence
  MKO10113668_B_Rpl6
  gRNA
cttgtccccaccaactgttt

SEQ ID NO: 113669 - DNA, 20 bp, Artificial Sequence
  MKO10113669_B_Rpl6
  gRNA
agccactgtccagctgcttc

SEQ ID NO: 113670 - DNA, 20 bp, Artificial Sequence
  MKO10113670_B_Rpl6
  gRNA
agtggcttgctgcttgtgac

SEQ ID NO: 113671 - DNA, 20 bp, Artificial Sequence
  MKO10113671_B_Rpl7a
  gRNA
cctcacctgtctgcctgtcc

SEQ ID NO: 113672 - DNA, 20 bp, Artificial Sequence
  MKO10113672_B_Rpl7a
  gRNA
cccgctacatcagactgcag

SEQ ID NO: 113673 - DNA, 20 bp, Artificial Sequence
  MKO10113673_B_Rpl7a
  gRNA
cttaccaatgccgaagttct

SEQ ID NO: 113674 - DNA, 20 bp, Artificial Sequence
  MKO10113674_B_Rpl7l1
  gRNA
tcaggcacctccaaagcacg

SEQ ID NO: 113675 - DNA, 20 bp, Artificial Sequence
  MKO10113675_B_Rpl7l1
  gRNA
cacgtttcaagatgagctcc

SEQ ID NO: 113676 - DNA, 20 bp, Artificial Sequence
  MKO10113676_B_Rpl7l1
  gRNA
tcttattgttaatctttgct

SEQ ID NO: 113677 - DNA, 20 bp, Artificial Sequence
  MKO10113677_B_Rpl7
  gRNA
caacagagagaagaaaaaga

SEQ ID NO: 113678 - DNA, 20 bp, Artificial Sequence
  MKO10113678_B_Rpl7
  gRNA
tcagggcaaacttcttcctc

SEQ ID NO: 113679 - DNA, 20 bp, Artificial Sequence
  MKO10113679_B_Rpl7
  gRNA
tatcaatggagtaagcccaa

SEQ ID NO: 113680 - DNA, 20 bp, Artificial Sequence
  MKO10113680_B_Rpl8
  gRNA
gggatcccgaaagacgactt

SEQ ID NO: 113681 - DNA, 20 bp, Artificial Sequence
  MKO10113681_B_Rpl8
  gRNA
gcacggccagcctttaagat

SEQ ID NO: 113682 - DNA, 20 bp, Artificial Sequence
  MKO10113682_B_Rpl8
  gRNA
gcgtggaaccaaaactgtac

SEQ ID NO: 113683 - DNA, 20 bp, Artificial Sequence
  MKO10113683_B_Rpl9
  gRNA
agggcttccgatacaagatg

SEQ ID NO: 113684 - DNA, 20 bp, Artificial Sequence
  MKO10113684_B_Rpl9
  gRNA
gtccctccgcagagtccccc

SEQ ID NO: 113685 - DNA, 20 bp, Artificial Sequence
  MKO10113685_B_Rpl9
  gRNA
gttctgaacatgactgcaga

SEQ ID NO: 113686 - DNA, 20 bp, Artificial Sequence
  MKO10113686_B_Rplp0
  gRNA
cagatccgcatgtcgctccg

SEQ ID NO: 113687 - DNA, 20 bp, Artificial Sequence
  MKO10113687_B_Rplp0
  gRNA
caccttcccacttactgaaa

SEQ ID NO: 113688 - DNA, 20 bp, Artificial Sequence
  MKO10113688_B_Rplp0
  gRNA
tttaggtgccagctgctgct

SEQ ID NO: 113689 - DNA, 20 bp, Artificial Sequence
  MKO10113689_B_Rplp1
  gRNA
gatggagcagcaccaccagc

SEQ ID NO: 113690 - DNA, 20 bp, Artificial Sequence
  MKO10113690_B_Rplp1
  gRNA
aatgccctcattaaagcagc

SEQ ID NO: 113691 - DNA, 20 bp, Artificial Sequence
  MKO10113691_B_Rplp1
  gRNA
gctctggccaatgtcaacat

SEQ ID NO: 113692 - DNA, 20 bp, Artificial Sequence
  MKO10113692_B_Rplp2
  gRNA
cattgaggatgtcatcgctc

SEQ ID NO: 113693 - DNA, 20 bp, Artificial Sequence
  MKO10113693_B_Rplp2
  gRNA
caggtcatcagtgagctgaa

SEQ ID NO: 113694 - DNA, 20 bp, Artificial Sequence
  MKO10113694_B_Rplp2
  gRNA
ctacgtcgcctcttacctgc

SEQ ID NO: 113695 - DNA, 20 bp, Artificial Sequence
  MKO10113695_B_Rpn1
  gRNA
gtctattaccgggatgagat

SEQ ID NO: 113696 - DNA, 20 bp, Artificial Sequence
  MKO10113696_B_Rpn1
  gRNA
tggaagacacactacatcgt

SEQ ID NO: 113697 - DNA, 20 bp, Artificial Sequence
  MKO10113697_B_Rpn1
  gRNA
agtgagatacctcgatgacc

SEQ ID NO: 113698 - DNA, 20 bp, Artificial Sequence
  MKO10113698_B_Rpn2
  gRNA
cgctgagtgctgcaactgca

SEQ ID NO: 113699 - DNA, 20 bp, Artificial Sequence
  MKO10113699_B_Rpn2
  gRNA
gacaatcactgccagcgtcc

SEQ ID NO: 113700 - DNA, 20 bp, Artificial Sequence
  MKO10113700_B_Rpn2
  gRNA
atcaaggttggacttgatga

SEQ ID NO: 113701 - DNA, 20 bp, Artificial Sequence
  MKO10113701_B_Rpp14
  gRNA
tgctattgccagataatgca

SEQ ID NO: 113702 - DNA, 20 bp, Artificial Sequence
  MKO10113702_B_Rpp14
  gRNA
caatagcagggaacaagtat

SEQ ID NO: 113703 - DNA, 20 bp, Artificial Sequence
  MKO10113703_B_Rpp14
  gRNA
acagtggtctggtcaaatta

SEQ ID NO: 113704 - DNA, 20 bp, Artificial Sequence
  MKO10113704_B_Rpp21
  gRNA
caggccgaaagggacagcgc

SEQ ID NO: 113705 - DNA, 20 bp, Artificial Sequence
  MKO10113705_B_Rpp21
  gRNA
ctgtccagcgctgtcccttt

SEQ ID NO: 113706 - DNA, 20 bp, Artificial Sequence
  MKO10113706_B_Rpp21
  gRNA
acagagcgtcctcttcacag

SEQ ID NO: 113707 - DNA, 20 bp, Artificial Sequence
  MKO10113707_B_Rpp25l
  gRNA
ctggcgctgggtcgtttgga

SEQ ID NO: 113708 - DNA, 20 bp, Artificial Sequence
  MKO10113708_B_Rpp25l
  gRNA
gctctacagagccggccctc

SEQ ID NO: 113709 - DNA, 20 bp, Artificial Sequence
  MKO10113709_B_Rpp25l
  gRNA
gggttggtagccacattcac

SEQ ID NO: 113710 - DNA, 20 bp, Artificial Sequence
  MKO10113710_B_Rpp25
  gRNA
cctcctccgagcgcacctta

SEQ ID NO: 113711 - DNA, 20 bp, Artificial Sequence
  MKO10113711_B_Rpp25
  gRNA
ctcaggctgagaccgcttag

SEQ ID NO: 113712 - DNA, 20 bp, Artificial Sequence
  MKO10113712_B_Rpp25
  gRNA
tgacctggtgtaagcccgcc

SEQ ID NO: 113713 - DNA, 20 bp, Artificial Sequence
  MKO10113713_B_Rpp30
  gRNA
ctgcaacaatatcatacagc

SEQ ID NO: 113714 - DNA, 20 bp, Artificial Sequence
  MKO10113714_B_Rpp30
  gRNA
caatcacattgttgacttta

SEQ ID NO: 113715 - DNA, 20 bp, Artificial Sequence
  MKO10113715_B_Rpp30
  gRNA
tccagctcactgtaatgttt

SEQ ID NO: 113716 - DNA, 20 bp, Artificial Sequence
  MKO10113716_B_Rpp38
  gRNA
tcctcgctaatctcaatatc

SEQ ID NO: 113717 - DNA, 20 bp, Artificial Sequence
  MKO10113717_B_Rpp38
  gRNA
ggtggacacctgtacacgtc

SEQ ID NO: 113718 - DNA, 20 bp, Artificial Sequence
  MKO10113718_B_Rpp38
  gRNA
agctgtttcctgacgtgtac

SEQ ID NO: 113719 - DNA, 20 bp, Artificial Sequence
  MKO10113719_B_Rpp40
  gRNA
tttgatagaagcccacattc

SEQ ID NO: 113720 - DNA, 20 bp, Artificial Sequence
  MKO10113720_B_Rpp40
  gRNA
actgttgctctcctaccaaa

SEQ ID NO: 113721 - DNA, 20 bp, Artificial Sequence
  MKO10113721_B_Rpp40
  gRNA
agtcatttccattgacctaa

SEQ ID NO: 113722 - DNA, 20 bp, Artificial Sequence
  MKO10113722_B_Rprd1a
  gRNA
aatcttgtaatgctctaaca

SEQ ID NO: 113723 - DNA, 20 bp, Artificial Sequence
  MKO10113723_B_Rprd1a
  gRNA
aggcattcaagcatgtttca

SEQ ID NO: 113724 - DNA, 20 bp, Artificial Sequence
  MKO10113724_B_Rprd1a
  gRNA
gtccccaagtgagccaccac

SEQ ID NO: 113725 - DNA, 20 bp, Artificial Sequence
  MKO10113725_B_Rprd1b
  gRNA
tcttggggagagtagcttcc

SEQ ID NO: 113726 - DNA, 20 bp, Artificial Sequence
  MKO10113726_B_Rprd1b
  gRNA
atgttcagcaatctttctaa

SEQ ID NO: 113727 - DNA, 20 bp, Artificial Sequence
  MKO10113727_B_Rprd1b
  gRNA
tctccccaagacccttctgc

SEQ ID NO: 113728 - DNA, 20 bp, Artificial Sequence
  MKO10113728_B_Rprd2
  gRNA
gatttcttccactgcttatt

SEQ ID NO: 113729 - DNA, 20 bp, Artificial Sequence
  MKO10113729_B_Rprd2
  gRNA
atgtcatacagaattgtaaa

SEQ ID NO: 113730 - DNA, 20 bp, Artificial Sequence
  MKO10113730_B_Rprd2
  gRNA
acaaacaaccgaataagcag

SEQ ID NO: 113731 - DNA, 20 bp, Artificial Sequence
  MKO10113731_B_Rprml
  gRNA
gcgccacgcgcgacacccac

SEQ ID NO: 113732 - DNA, 20 bp, Artificial Sequence
  MKO10113732_B_Rprml
  gRNA
ttcgtccggcgccagtcctg

SEQ ID NO: 113733 - DNA, 20 bp, Artificial Sequence
  MKO10113733_B_Rprml
  gRNA
ggcggcgcccacgtccttgg

SEQ ID NO: 113734 - DNA, 20 bp, Artificial Sequence
  MKO10113734_B_Rprm
  gRNA
cgtcggtcaccaccgacgcc

SEQ ID NO: 113735 - DNA, 20 bp, Artificial Sequence
  MKO10113735_B_Rprm
  gRNA
acaggccagccacgtcggtc

SEQ ID NO: 113736 - DNA, 20 bp, Artificial Sequence
  MKO10113736_B_Rprm
  gRNA
cagcctgtacatcatgcgtg

SEQ ID NO: 113737 - DNA, 20 bp, Artificial Sequence
  MKO10113737_B_Rps10
  gRNA
ctgcagtctctcaagtctcg

SEQ ID NO: 113738 - DNA, 20 bp, Artificial Sequence
  MKO10113738_B_Rps10
  gRNA
cgacctgcaagattcacaag

SEQ ID NO: 113739 - DNA, 20 bp, Artificial Sequence
  MKO10113739_B_Rps10
  gRNA
gggcacagcgctccttctgt

SEQ ID NO: 113740 - DNA, 20 bp, Artificial Sequence
  MKO10113740_B_Rps11
  gRNA
accagagtcacctgaaacag

SEQ ID NO: 113741 - DNA, 20 bp, Artificial Sequence
  MKO10113741_B_Rps11
  gRNA
gacaagaaatgccccttcac

SEQ ID NO: 113742 - DNA, 20 bp, Artificial Sequence
  MKO10113742_B_Rps11
  gRNA
caccagacaggatccgacct

SEQ ID NO: 113743 - DNA, 20 bp, Artificial Sequence
  MKO10113743_B_Rps12
  gRNA
tgagcccatgtatgtcaagc

SEQ ID NO: 113744 - DNA, 20 bp, Artificial Sequence
  MKO10113744_B_Rps12
  gRNA
gttgatgacaacaagaaact

SEQ ID NO: 113745 - DNA, 20 bp, Artificial Sequence
  MKO10113745_B_Rps12
  gRNA
ctgcaaccaaccaccttccg

SEQ ID NO: 113746 - DNA, 20 bp, Artificial Sequence
  MKO10113746_B_Rps13
  gRNA
tatacttactatttccaatt

SEQ ID NO: 113747 - DNA, 20 bp, Artificial Sequence
  MKO10113747_B_Rps13
  gRNA
ttacctttctgttcctctca

SEQ ID NO: 113748 - DNA, 20 bp, Artificial Sequence
  MKO10113748_B_Rps13
  gRNA
gttgacgtctgacgacgtga

SEQ ID NO: 113749 - DNA, 20 bp, Artificial Sequence
  MKO10113749_B_Rps14
  gRNA
catatggagaggactcatct

SEQ ID NO: 113750 - DNA, 20 bp, Artificial Sequence
  MKO10113750_B_Rps14
  gRNA
ctctccatatgcagccatgt

SEQ ID NO: 113751 - DNA, 20 bp, Artificial Sequence
  MKO10113751_B_Rps14
  gRNA
cagagcgagcaagagctctg

SEQ ID NO: 113752 - DNA, 20 bp, Artificial Sequence
  MKO10113752_B_Rps15a
  gRNA
catggtgcgaatgaatgttc

SEQ ID NO: 113753 - DNA, 20 bp, Artificial Sequence
  MKO10113753_B_Rps15a
  gRNA
atcattgatgatcacagagc

SEQ ID NO: 113754 - DNA, 20 bp, Artificial Sequence
  MKO10113754_B_Rps15a
  gRNA
ccttgttcaaccttcctgtg

SEQ ID NO: 113755 - DNA, 20 bp, Artificial Sequence
  MKO10113755_B_Rps15
  gRNA
gttgcttccgccgaagacca

SEQ ID NO: 113756 - DNA, 20 bp, Artificial Sequence
  MKO10113756_B_Rps15
  gRNA
ttccgcaagttcacctaccg

SEQ ID NO: 113757 - DNA, 20 bp, Artificial Sequence
  MKO10113757_B_Rps15
  gRNA
attggcctcggctacttgag

SEQ ID NO: 113758 - DNA, 20 bp, Artificial Sequence
  MKO10113758_B_Rps16
  gRNA
ggacatgtggcccaaattta

SEQ ID NO: 113759 - DNA, 20 bp, Artificial Sequence
  MKO10113759_B_Rps16
  gRNA
catccgacagtccatctcaa

SEQ ID NO: 113760 - DNA, 20 bp, Artificial Sequence
  MKO10113760_B_Rps16
  gRNA
ctttgagatggactgtcgga

SEQ ID NO: 113761 - DNA, 20 bp, Artificial Sequence
  MKO10113761_B_Rps17
  gRNA
ttgatagagatgcctctcac

SEQ ID NO: 113762 - DNA, 20 bp, Artificial Sequence
  MKO10113762_B_Rps17
  gRNA
tcaggtctcagccctagatc

SEQ ID NO: 113763 - DNA, 20 bp, Artificial Sequence
  MKO10113763_B_Rps17
  gRNA
caggagcttcagcatctcct

SEQ ID NO: 113764 - DNA, 20 bp, Artificial Sequence
  MKO10113764_B_Rps18
  gRNA
tttgacctcagggcgtgggg

SEQ ID NO: 113765 - DNA, 20 bp, Artificial Sequence
  MKO10113765_B_Rps18
  gRNA
gtactcaacaccaacatcga

SEQ ID NO: 113766 - DNA, 20 bp, Artificial Sequence
  MKO10113766_B_Rps18
  gRNA
cttcgccatcactgccatta

SEQ ID NO: 113767 - DNA, 20 bp, Artificial Sequence
  MKO10113767_B_Rps19bp1
  gRNA
acatgtcggcggcgttagtg

SEQ ID NO: 113768 - DNA, 20 bp, Artificial Sequence
  MKO10113768_B_Rps19bp1
  gRNA
ggagcttctggcggcgtccg

SEQ ID NO: 113769 - DNA, 20 bp, Artificial Sequence
  MKO10113769_B_Rps19bp1
  gRNA
aaaagcctgtgatcggctag

SEQ ID NO: 113770 - DNA, 20 bp, Artificial Sequence
  MKO10113770_B_Rps19
  gRNA
tagaaccagttctcatcata

SEQ ID NO: 113771 - DNA, 20 bp, Artificial Sequence
  MKO10113771_B_Rps19
  gRNA
ggaagctgaaagtccccgaa

SEQ ID NO: 113772 - DNA, 20 bp, Artificial Sequence
  MKO10113772_B_Rps19
  gRNA
tcttagagcctctgctgaaa

SEQ ID NO: 113773 - DNA, 20 bp, Artificial Sequence
  MKO10113773_B_Rps20
  gRNA
aactcccggctcaatactga

SEQ ID NO: 113774 - DNA, 20 bp, Artificial Sequence
  MKO10113774_B_Rps20
  gRNA
tctccagcgacttcacgttg

SEQ ID NO: 113775 - DNA, 20 bp, Artificial Sequence
  MKO10113775_B_Rps20
  gRNA
actaccagaaaaacaccttg

SEQ ID NO: 113776 - DNA, 20 bp, Artificial Sequence
  MKO10113776_B_Rps21
  gRNA
caaccgcatcattgctgcca

SEQ ID NO: 113777 - DNA, 20 bp, Artificial Sequence
  MKO10113777_B_Rps21
  gRNA
ttccatcagccttagccaat

SEQ ID NO: 113778 - DNA, 20 bp, Artificial Sequence
  MKO10113778_B_Rps21
  gRNA
agatgattctattctccgat

SEQ ID NO: 113779 - DNA, 20 bp, Artificial Sequence
  MKO10113779_B_Rps23
  gRNA
ccccaaacggattggccttc

SEQ ID NO: 113780 - DNA, 20 bp, Artificial Sequence
  MKO10113780_B_Rps23
  gRNA
aacagccaaattctgccatc

SEQ ID NO: 113781 - DNA, 20 bp, Artificial Sequence
  MKO10113781_B_Rps23
  gRNA
tagagccaacagagaaacat

SEQ ID NO: 113782 - DNA, 20 bp, Artificial Sequence
  MKO10113782_B_Rps24
  gRNA
tctgtttcctctgaagcaga

SEQ ID NO: 113783 - DNA, 20 bp, Artificial Sequence
  MKO10113783_B_Rps24
  gRNA
gacctcccgaaaacagcgaa

SEQ ID NO: 113784 - DNA, 20 bp, Artificial Sequence
  MKO10113784_B_Rps24
  gRNA
acgcaagaacagaatgaaga

SEQ ID NO: 113785 - DNA, 20 bp, Artificial Sequence
  MKO10113785_B_Rps25
  gRNA
gacaagaagaagaaagatgc

SEQ ID NO: 113786 - DNA, 20 bp, Artificial Sequence
  MKO10113786_B_Rps25
  gRNA
ctttactaaggagctcctga

SEQ ID NO: 113787 - DNA, 20 bp, Artificial Sequence
  MKO10113787_B_Rps25
  gRNA
catgcatcttcgccagcagc

SEQ ID NO: 113788 - DNA, 20 bp, Artificial Sequence
  MKO10113788_B_Rps26
  gRNA
gagctgtgccatccatagca

SEQ ID NO: 113789 - DNA, 20 bp, Artificial Sequence
  MKO10113789_B_Rps26
  gRNA
cggcctctttacatgggctt

SEQ ID NO: 113790 - DNA, 20 bp, Artificial Sequence
  MKO10113790_B_Rps26
  gRNA
agatatgtccctgacagcag

SEQ ID NO: 113791 - DNA, 20 bp, Artificial Sequence
  MKO10113791_B_Rps27a
  gRNA
gaattcctcctgatcagcag

SEQ ID NO: 113792 - DNA, 20 bp, Artificial Sequence
  MKO10113792_B_Rps27a
  gRNA
tgttgtagtcagacaaagtc

SEQ ID NO: 113793 - DNA, 20 bp, Artificial Sequence
  MKO10113793_B_Rps27a
  gRNA
cctcttatgcttgttcttct

SEQ ID NO: 113794 - DNA, 20 bp, Artificial Sequence
  MKO10113794_B_Rps27l
  gRNA
agaaaaaacataagaagaaa

SEQ ID NO: 113795 - DNA, 20 bp, Artificial Sequence
  MKO10113795_B_Rps27l
  gRNA
aaagaaccacagtctgtgca

SEQ ID NO: 113796 - DNA, 20 bp, Artificial Sequence
  MKO10113796_B_Rps27l
  gRNA
acatccatgaagtaagaatt

SEQ ID NO: 113797 - DNA, 20 bp, Artificial Sequence
  MKO10113797_B_Rps27rt
  gRNA
gaaacacaagaaaaagcgcc

SEQ ID NO: 113798 - DNA, 20 bp, Artificial Sequence
  MKO10113798_B_Rps27rt
  gRNA
acaagactaccgtttgtgca

SEQ ID NO: 113799 - DNA, 20 bp, Artificial Sequence
  MKO10113799_B_Rps27rt
  gRNA
gagccccaattcctacttta

SEQ ID NO: 113800 - DNA, 20 bp, Artificial Sequence
  MKO10113800_B_Rps27
  gRNA
aggatgctataaaatcacca

SEQ ID NO: 113801 - DNA, 20 bp, Artificial Sequence
  MKO10113801_B_Rps27
  gRNA
caaacggtagtcttgtgtgt

SEQ ID NO: 113802 - DNA, 20 bp, Artificial Sequence
  MKO10113802_B_Rps27
  gRNA
tcagtgctgcttcctcctga

SEQ ID NO: 113803 - DNA, 20 bp, Artificial Sequence
  MKO10113803_B_Rps28
  gRNA
tcgcgtgcagcccatcaagc

SEQ ID NO: 113804 - DNA, 20 bp, Artificial Sequence
  MKO10113804_B_Rps28
  gRNA
cgtgcactgtccctgcgaac

SEQ ID NO: 113805 - DNA, 20 bp, Artificial Sequence
  MKO10113805_B_Rps28
  gRNA
cttctctttctgactccaat

SEQ ID NO: 113806 - DNA, 20 bp, Artificial Sequence
  MKO10113806_B_Rps29
  gRNA
cgcgtctgctccaaccgcca

SEQ ID NO: 113807 - DNA, 20 bp, Artificial Sequence
  MKO10113807_B_Rps29
  gRNA
tcacccacggaagttcggcc

SEQ ID NO: 113808 - DNA, 20 bp, Artificial Sequence
  MKO10113808_B_Rps29
  gRNA
ggtgactccagtagagctgc

SEQ ID NO: 113809 - DNA, 20 bp, Artificial Sequence
  MKO10113809_B_Rps2
  gRNA
gctacctgactcccgacctc

SEQ ID NO: 113810 - DNA, 20 bp, Artificial Sequence
  MKO10113810_B_Rps2
  gRNA
gaatacctgataaggagact

SEQ ID NO: 113811 - DNA, 20 bp, Artificial Sequence
  MKO10113811_B_Rps2
  gRNA
gtggatccccgtcaccaagc

SEQ ID NO: 113812 - DNA, 20 bp, Artificial Sequence
  MKO10113812_B_Rps3a1
  gRNA
agtcattagtctgcacctct

SEQ ID NO: 113813 - DNA, 20 bp, Artificial Sequence
  MKO10113813_B_Rps3a1
  gRNA
gatgttcctaatattgaaca

SEQ ID NO: 113814 - DNA, 20 bp, Artificial Sequence
  MKO10113814_B_Rps3a1
  gRNA
ctccagccatgttcaatatt

SEQ ID NO: 113815 - DNA, 20 bp, Artificial Sequence
  MKO10113815_B_Rps3
  gRNA
cttccctgaaggcagcgtag

SEQ ID NO: 113816 - DNA, 20 bp, Artificial Sequence
  MKO10113816_B_Rps3
  gRNA
gtcttccaaagggcctgcta

SEQ ID NO: 113817 - DNA, 20 bp, Artificial Sequence
  MKO10113817_B_Rps3
  gRNA
ctggctgaagatggctactc

SEQ ID NO: 113818 - DNA, 20 bp, Artificial Sequence
  MKO10113818_B_Rps4x
  gRNA
gtgtagctgctccaaaacat

SEQ ID NO: 113819 - DNA, 20 bp, Artificial Sequence
  MKO10113819_B_Rps4x
  gRNA
ttatccagcatccaatgttt

SEQ ID NO: 113820 - DNA, 20 bp, Artificial Sequence
  MKO10113820_B_Rps4x
  gRNA
gtcatcagcattgacaagac

SEQ ID NO: 113821 - DNA, 20 bp, Artificial Sequence
  MKO10113821_B_Rps5
  gRNA
ttgtgctttgcggaagcgct

SEQ ID NO: 113822 - DNA, 20 bp, Artificial Sequence
  MKO10113822_B_Rps5
  gRNA
cggcgatggtcttgatgttc

SEQ ID NO: 113823 - DNA, 20 bp, Artificial Sequence
  MKO10113823_B_Rps5
  gRNA
gggaaatcagcggttagact

SEQ ID NO: 113824 - DNA, 20 bp, Artificial Sequence
  MKO10113824_B_Rps6ka1
  gRNA
tcaggtcttcctggtacgca

SEQ ID NO: 113825 - DNA, 20 bp, Artificial Sequence
  MKO10113825_B_Rps6ka1
  gRNA
ctctaactcacctttcagcg

SEQ ID NO: 113826 - DNA, 20 bp, Artificial Sequence
  MKO10113826_B_Rps6ka1
  gRNA
atcccagtttgagctcctca

SEQ ID NO: 113827 - DNA, 20 bp, Artificial Sequence
  MKO10113827_B_Rps6ka2
  gRNA
tgaagaggtcacctccccgc

SEQ ID NO: 113828 - DNA, 20 bp, Artificial Sequence
  MKO10113828_B_Rps6ka2
  gRNA
tccacagcctttcagaccga

SEQ ID NO: 113829 - DNA, 20 bp, Artificial Sequence
  MKO10113829_B_Rps6ka2
  gRNA
gggacccttacctttcaagg

SEQ ID NO: 113830 - DNA, 20 bp, Artificial Sequence
  MKO10113830_B_Rps6ka3
  gRNA
tgcaatcacacatcatgtga

SEQ ID NO: 113831 - DNA, 20 bp, Artificial Sequence
  MKO10113831_B_Rps6ka3
  gRNA
acagaatggacagcaaatta

SEQ ID NO: 113832 - DNA, 20 bp, Artificial Sequence
  MKO10113832_B_Rps6ka3
  gRNA
ttaatctcctcctctcccat

SEQ ID NO: 113833 - DNA, 20 bp, Artificial Sequence
  MKO10113833_B_Rps6ka4
  gRNA
tcactcccagactacgtgag

SEQ ID NO: 113834 - DNA, 20 bp, Artificial Sequence
  MKO10113834_B_Rps6ka4
  gRNA
cacatcgtccttacagactt

SEQ ID NO: 113835 - DNA, 20 bp, Artificial Sequence
  MKO10113835_B_Rps6ka4
  gRNA
aggctgaggttcgagtgtat

SEQ ID NO: 113836 - DNA, 20 bp, Artificial Sequence
  MKO10113836_B_Rps6ka5
  gRNA
ttctctttagccaacttaac

SEQ ID NO: 113837 - DNA, 20 bp, Artificial Sequence
  MKO10113837_B_Rps6ka5
  gRNA
acctaagatgagatgaagct

SEQ ID NO: 113838 - DNA, 20 bp, Artificial Sequence
  MKO10113838_B_Rps6ka5
  gRNA
cgaaatctgtcagcaccaca

SEQ ID NO: 113839 - DNA, 20 bp, Artificial Sequence
  MKO10113839_B_Rps6ka6
  gRNA
gcgggagcatgaacgcaaag

SEQ ID NO: 113840 - DNA, 20 bp, Artificial Sequence
  MKO10113840_B_Rps6ka6
  gRNA
cttgagcaagtcaaactgtg

SEQ ID NO: 113841 - DNA, 20 bp, Artificial Sequence
  MKO10113841_B_Rps6ka6
  gRNA
aaccgttgctgcgttcttca

SEQ ID NO: 113842 - DNA, 20 bp, Artificial Sequence
  MKO10113842_B_Rps6kb1
  gRNA
catatggtccaactccccca

SEQ ID NO: 113843 - DNA, 20 bp, Artificial Sequence
  MKO10113843_B_Rps6kb1
  gRNA
tttcaagtacgaaaagtaac

SEQ ID NO: 113844 - DNA, 20 bp, Artificial Sequence
  MKO10113844_B_Rps6kb1
  gRNA
cgaagtagctcaaaacattc

SEQ ID NO: 113845 - DNA, 20 bp, Artificial Sequence
  MKO10113845_B_Rps6kb2
  gRNA
cagcagcccttaattcgcca

SEQ ID NO: 113846 - DNA, 20 bp, Artificial Sequence
  MKO10113846_B_Rps6kb2
  gRNA
gacagagagcagcgtgaacc

SEQ ID NO: 113847 - DNA, 20 bp, Artificial Sequence
  MKO10113847_B_Rps6kb2
  gRNA
caagattgtatgcagtgcca

SEQ ID NO: 113848 - DNA, 20 bp, Artificial Sequence
  MKO10113848_B_Rps6kc1
  gRNA
ctatttcccccgtttgctaa

SEQ ID NO: 113849 - DNA, 20 bp, Artificial Sequence
  MKO10113849_B_Rps6kc1
  gRNA
aaggcgttggccggggagtc

SEQ ID NO: 113850 - DNA, 20 bp, Artificial Sequence
  MKO10113850_B_Rps6kc1
  gRNA
ggagcgacggcagtgtgctg

SEQ ID NO: 113851 - DNA, 20 bp, Artificial Sequence
  MKO10113851_B_Rps6kl1
  gRNA
ctgaagggatgcagggtcgt

SEQ ID NO: 113852 - DNA, 20 bp, Artificial Sequence
  MKO10113852_B_Rps6kl1
  gRNA
ccccacagttgaccccaaca

SEQ ID NO: 113853 - DNA, 20 bp, Artificial Sequence
  MKO10113853_B_Rps6kl1
  gRNA
tggaggaaccttcatcgtga

SEQ ID NO: 113854 - DNA, 20 bp, Artificial Sequence
  MKO10113854_B_Rps6
  gRNA
aacatctccttccccgccac

SEQ ID NO: 113855 - DNA, 20 bp, Artificial Sequence
  MKO10113855_B_Rps6
  gRNA
ctcttcaccaagagcatcag

SEQ ID NO: 113856 - DNA, 20 bp, Artificial Sequence
  MKO10113856_B_Rps6
  gRNA
ttcctctctccagttctcct

SEQ ID NO: 113857 - DNA, 20 bp, Artificial Sequence
  MKO10113857_B_Rps7
  gRNA
tccccaggcgctgctcgagc

SEQ ID NO: 113858 - DNA, 20 bp, Artificial Sequence
  MKO10113858_B_Rps7
  gRNA
ccgcagctgcgccttgagat

SEQ ID NO: 113859 - DNA, 20 bp, Artificial Sequence
  MKO10113859_B_Rps7
  gRNA
ggattctgcccaagccaacc

SEQ ID NO: 113860 - DNA, 20 bp, Artificial Sequence
  MKO10113860_B_Rps8
  gRNA
tttcattcagactcctgagg

SEQ ID NO: 113861 - DNA, 20 bp, Artificial Sequence
  MKO10113861_B_Rps8
  gRNA
ctacttacactcagagcccc

SEQ ID NO: 113862 - DNA, 20 bp, Artificial Sequence
  MKO10113862_B_Rps8
  gRNA
ttccagcagggcaagcttct

SEQ ID NO: 113863 - DNA, 20 bp, Artificial Sequence
  MKO10113863_B_Rps9
  gRNA
acacaccttcaaacagacgc

SEQ ID NO: 113864 - DNA, 20 bp, Artificial Sequence
  MKO10113864_B_Rps9
  gRNA
tcgagacgcgacttctcgaa

SEQ ID NO: 113865 - DNA, 20 bp, Artificial Sequence
  MKO10113865_B_Rps9
  gRNA
gctgttgacgctagacgaga

SEQ ID NO: 113866 - DNA, 20 bp, Artificial Sequence
  MKO10113866_B_Rpsa
  gRNA
acaaacctggccagtgttcc

SEQ ID NO: 113867 - DNA, 20 bp, Artificial Sequence
  MKO10113867_B_Rpsa
  gRNA
aaaaaactagattgagaagg

SEQ ID NO: 113868 - DNA, 20 bp, Artificial Sequence
  MKO10113868_B_Rpsa
  gRNA
tctacatcataaacctgaag

SEQ ID NO: 113869 - DNA, 20 bp, Artificial Sequence
  MKO10113869_B_Rptn
  gRNA
tagcattctcaacgtaagca

SEQ ID NO: 113870 - DNA, 20 bp, Artificial Sequence
  MKO10113870_B_Rptn
  gRNA
gactcatatgttgaacaatc

SEQ ID NO: 113871 - DNA, 20 bp, Artificial Sequence
  MKO10113871_B_Rptn
  gRNA
catgatattcagcatagtcc

SEQ ID NO: 113872 - DNA, 20 bp, Artificial Sequence
  MKO10113872_B_Rptor
  gRNA
gcaccccgtggccattgtag

SEQ ID NO: 113873 - DNA, 20 bp, Artificial Sequence
  MKO10113873_B_Rptor
  gRNA
gtggtcttcaccacatccgg

SEQ ID NO: 113874 - DNA, 20 bp, Artificial Sequence
  MKO10113874_B_Rptor
  gRNA
ccagcattccagccgagcac

SEQ ID NO: 113875 - DNA, 20 bp, Artificial Sequence
  MKO10113875_B_Rpusd1
  gRNA
ctggaacacggcctatatgc

SEQ ID NO: 113876 - DNA, 20 bp, Artificial Sequence
  MKO10113876_B_Rpusd1
  gRNA
taagtcaggtcacccacgat

SEQ ID NO: 113877 - DNA, 20 bp, Artificial Sequence
  MKO10113877_B_Rpusd1
  gRNA
cactgcagtgcacacgaagc

SEQ ID NO: 113878 - DNA, 20 bp, Artificial Sequence
  MKO10113878_B_Rpusd2
  gRNA
cgagtgccgagtgttgcgac

SEQ ID NO: 113879 - DNA, 20 bp, Artificial Sequence
  MKO10113879_B_Rpusd2
  gRNA
ctgcatgccctccgctataa

SEQ ID NO: 113880 - DNA, 20 bp, Artificial Sequence
  MKO10113880_B_Rpusd2
  gRNA
gctagctgagaacaacgatg

SEQ ID NO: 113881 - DNA, 20 bp, Artificial Sequence
  MKO10113881_B_Rpusd3
  gRNA
gctcctggtgttcgagcccc

SEQ ID NO: 113882 - DNA, 20 bp, Artificial Sequence
  MKO10113882_B_Rpusd3
  gRNA
tcaccgctccagcaagcaca

SEQ ID NO: 113883 - DNA, 20 bp, Artificial Sequence
  MKO10113883_B_Rpusd3
  gRNA
gctggagaggagcacaagtc

SEQ ID NO: 113884 - DNA, 20 bp, Artificial Sequence
  MKO10113884_B_Rpusd4
  gRNA
agtcgtggatatccccatca

SEQ ID NO: 113885 - DNA, 20 bp, Artificial Sequence
  MKO10113885_B_Rpusd4
  gRNA
tgcctacaaaccccgttcag

SEQ ID NO: 113886 - DNA, 20 bp, Artificial Sequence
  MKO10113886_B_Rpusd4
  gRNA
gctgtccccaagttaccgtc

SEQ ID NO: 113887 - DNA, 20 bp, Artificial Sequence
  MKO10113887_B_Rqcd1
  gRNA
gcctactgcactagcccaag

SEQ ID NO: 113888 - DNA, 20 bp, Artificial Sequence
  MKO10113888_B_Rqcd1
  gRNA
cattgcaaactctgttagac

SEQ ID NO: 113889 - DNA, 20 bp, Artificial Sequence
  MKO10113889_B_Rqcd1
  gRNA
ccctctgtgtctgcgcatca

SEQ ID NO: 113890 - DNA, 20 bp, Artificial Sequence
  MKO10113890_B_Rrad
  gRNA
caagaaggccaaacgctttc

SEQ ID NO: 113891 - DNA, 20 bp, Artificial Sequence
  MKO10113891_B_Rrad
  gRNA
gatgacgtatgcatccccca

SEQ ID NO: 113892 - DNA, 20 bp, Artificial Sequence
  MKO10113892_B_Rrad
  gRNA
ggcaagctggcactcggcga

SEQ ID NO: 113893 - DNA, 20 bp, Artificial Sequence
  MKO10113893_B_Rraga
  gRNA
gcactcccacgtccgattct

SEQ ID NO: 113894 - DNA, 20 bp, Artificial Sequence
  MKO10113894_B_Rraga
  gRNA
tacatcaaacacgtacgtga

SEQ ID NO: 113895 - DNA, 20 bp, Artificial Sequence
  MKO10113895_B_Rraga
  gRNA
gcattattaccaatcgtgtc

SEQ ID NO: 113896 - DNA, 20 bp, Artificial Sequence
  MKO10113896_B_Rragb
  gRNA
aacagagtctacgagagagt

SEQ ID NO: 113897 - DNA, 20 bp, Artificial Sequence
  MKO10113897_B_Rragb
  gRNA
cttacccaccacaatcccac

SEQ ID NO: 113898 - DNA, 20 bp, Artificial Sequence
  MKO10113898_B_Rragb
  gRNA
taatttgaagactatgtata

SEQ ID NO: 113899 - DNA, 20 bp, Artificial Sequence
  MKO10113899_B_Rragc
  gRNA
tcataagactgcatatccac

SEQ ID NO: 113900 - DNA, 20 bp, Artificial Sequence
  MKO10113900_B_Rragc
  gRNA
gaagatcatttcgtagtcaa

SEQ ID NO: 113901 - DNA, 20 bp, Artificial Sequence
  MKO10113901_B_Rragc
  gRNA
cattccacaactgcccactt

SEQ ID NO: 113902 - DNA, 20 bp, Artificial Sequence
  MKO10113902_B_Rragd
  gRNA
gatcccacagctcccgacgc

SEQ ID NO: 113903 - DNA, 20 bp, Artificial Sequence
  MKO10113903_B_Rragd
  gRNA
aacgatgacctcgctgatgc

SEQ ID NO: 113904 - DNA, 20 bp, Artificial Sequence
  MKO10113904_B_Rragd
  gRNA
atcgacatctcttgtattta

SEQ ID NO: 113905 - DNA, 20 bp, Artificial Sequence
  MKO10113905_B_Rras2
  gRNA
tgatcgatgaccgagctgcc

SEQ ID NO: 113906 - DNA, 20 bp, Artificial Sequence
  MKO10113906_B_Rras2
  gRNA
ccgtgactgagaagaccaac

SEQ ID NO: 113907 - DNA, 20 bp, Artificial Sequence
  MKO10113907_B_Rras2
  gRNA
ccatgagagagcaatacatg

SEQ ID NO: 113908 - DNA, 20 bp, Artificial Sequence
  MKO10113908_B_Rras
  gRNA
tcacctctgcctgtcgttaa

SEQ ID NO: 113909 - DNA, 20 bp, Artificial Sequence
  MKO10113909_B_Rras
  gRNA
actgcgtctgaatgtcgatg

SEQ ID NO: 113910 - DNA, 20 bp, Artificial Sequence
  MKO10113910_B_Rras
  gRNA
agatctggagaaccagcgcc

SEQ ID NO: 113911 - DNA, 20 bp, Artificial Sequence
  MKO10113911_B_Rrbp1
  gRNA
tgtggtctttggcgggttta

SEQ ID NO: 113912 - DNA, 20 bp, Artificial Sequence
  MKO10113912_B_Rrbp1
  gRNA
ccgtcgccaagagcaagcta

SEQ ID NO: 113913 - DNA, 20 bp, Artificial Sequence
  MKO10113913_B_Rrbp1
  gRNA
gagttcccttagcttgctct

SEQ ID NO: 113914 - DNA, 20 bp, Artificial Sequence
  MKO10113914_B_Rreb1
  gRNA
gacaaccgcctgcgcttcag

SEQ ID NO: 113915 - DNA, 20 bp, Artificial Sequence
  MKO10113915_B_Rreb1
  gRNA
ttccttctgccaatccgatt

SEQ ID NO: 113916 - DNA, 20 bp, Artificial Sequence
  MKO10113916_B_Rreb1
  gRNA
tcccacagatactgcatgcg

SEQ ID NO: 113917 - DNA, 20 bp, Artificial Sequence
  MKO10113917_B_Rrh
  gRNA
gtctcagggaccgactgacg

SEQ ID NO: 113918 - DNA, 20 bp, Artificial Sequence
  MKO10113918_B_Rrh
  gRNA
acctacatcagggcaactga

SEQ ID NO: 113919 - DNA, 20 bp, Artificial Sequence
  MKO10113919_B_Rrh
  gRNA
cccctatatccgtgaaagcc

SEQ ID NO: 113920 - DNA, 20 bp, Artificial Sequence
  MKO10113920_B_Rrm1
  gRNA
tgaccccactatataggcct

SEQ ID NO: 113921 - DNA, 20 bp, Artificial Sequence
  MKO10113921_B_Rrm1
  gRNA
cgaatccagaaactctgtta

SEQ ID NO: 113922 - DNA, 20 bp, Artificial Sequence
  MKO10113922_B_Rrm1
  gRNA
ctcaacactcgacattgtta

SEQ ID NO: 113923 - DNA, 20 bp, Artificial Sequence
  MKO10113923_B_Rrm2b
  gRNA
ttgtacattctccagatatc

SEQ ID NO: 113924 - DNA, 20 bp, Artificial Sequence
  MKO10113924_B_Rrm2b
  gRNA
ttggaaagatgacgaaccgt

SEQ ID NO: 113925 - DNA, 20 bp, Artificial Sequence
  MKO10113925_B_Rrm2b
  gRNA
ttcatttacaattccatcac

SEQ ID NO: 113926 - DNA, 20 bp, Artificial Sequence
  MKO10113926_B_Rrm2
  gRNA
cgatgggaaagacaacgaag

SEQ ID NO: 113927 - DNA, 20 bp, Artificial Sequence
  MKO10113927_B_Rrm2
  gRNA
ttcccagtgctgaatatcct

SEQ ID NO: 113928 - DNA, 20 bp, Artificial Sequence
  MKO10113928_B_Rrm2
  gRNA
gcctactaaccccagcgttg

SEQ ID NO: 113929 - DNA, 20 bp, Artificial Sequence
  MKO10113929_B_Rrn3
  gRNA
aggatgaccagatcattaac

SEQ ID NO: 113930 - DNA, 20 bp, Artificial Sequence
  MKO10113930_B_Rrn3
  gRNA
gctgtctgatcctgatataa

SEQ ID NO: 113931 - DNA, 20 bp, Artificial Sequence
  MKO10113931_B_Rrn3
  gRNA
ttcatctctagagattgccc

SEQ ID NO: 113932 - DNA, 20 bp, Artificial Sequence
  MKO10113932_B_Rrnad1
  gRNA
tggactgaacccaccacagc

SEQ ID NO: 113933 - DNA, 20 bp, Artificial Sequence
  MKO10113933_B_Rrnad1
  gRNA
ctgagcccacatccacaact

SEQ ID NO: 113934 - DNA, 20 bp, Artificial Sequence
  MKO10113934_B_Rrnad1
  gRNA
ccagtgcttcttgccatgag

SEQ ID NO: 113935 - DNA, 20 bp, Artificial Sequence
  MKO10113935_B_Rrp12
  gRNA
atgtctgcgcaggcgagcag

SEQ ID NO: 113936 - DNA, 20 bp, Artificial Sequence
  MKO10113936_B_Rrp12
  gRNA
acactcaccgcttcaggaca

SEQ ID NO: 113937 - DNA, 20 bp, Artificial Sequence
  MKO10113937_B_Rrp12
  gRNA
actgacccatcggagagcag

SEQ ID NO: 113938 - DNA, 20 bp, Artificial Sequence
  MKO10113938_B_Rrp15
  gRNA
tctcgcagaatcttccaccc

SEQ ID NO: 113939 - DNA, 20 bp, Artificial Sequence
  MKO10113939_B_Rrp15
  gRNA
ggtcccagcactcgactctg

SEQ ID NO: 113940 - DNA, 20 bp, Artificial Sequence
  MKO10113940_B_Rrp15
  gRNA
acaagtaggaacagtcctgc

SEQ ID NO: 113941 - DNA, 20 bp, Artificial Sequence
  MKO10113941_B_Rrp1b
  gRNA
gcagctggacaagtactaca

SEQ ID NO: 113942 - DNA, 20 bp, Artificial Sequence
  MKO10113942_B_Rrp1b
  gRNA
catccacgttgtaaacagct

SEQ ID NO: 113943 - DNA, 20 bp, Artificial Sequence
  MKO10113943_B_Rrp1b
  gRNA
gcaggacgagccccttctgc

SEQ ID NO: 113944 - DNA, 20 bp, Artificial Sequence
  MKO10113944_B_Rrp1
  gRNA
gcaggacaagcccctccagc

SEQ ID NO: 113945 - DNA, 20 bp, Artificial Sequence
  MKO10113945_B_Rrp1
  gRNA
cagccttcagtgactcactt

SEQ ID NO: 113946 - DNA, 20 bp, Artificial Sequence
  MKO10113946_B_Rrp1
  gRNA
tgtgtcctagctcatgagga

SEQ ID NO: 113947 - DNA, 20 bp, Artificial Sequence
  MKO10113947_B_Rrp36
  gRNA
tggtcctcaccggtgcttat

SEQ ID NO: 113948 - DNA, 20 bp, Artificial Sequence
  MKO10113948_B_Rrp36
  gRNA
ctcggatatcattcaggaac

SEQ ID NO: 113949 - DNA, 20 bp, Artificial Sequence
  MKO10113949_B_Rrp36
  gRNA
tatccgagccaaagagaagc

SEQ ID NO: 113950 - DNA, 20 bp, Artificial Sequence
  MKO10113950_B_Rrp7a
  gRNA
actcttacctgtgtgcagta

SEQ ID NO: 113951 - DNA, 20 bp, Artificial Sequence
  MKO10113951_B_Rrp7a
  gRNA
gaacctgaagggcccattgc

SEQ ID NO: 113952 - DNA, 20 bp, Artificial Sequence
  MKO10113952_B_Rrp7a
  gRNA
gggctttcaggtagcttatg

SEQ ID NO: 113953 - DNA, 20 bp, Artificial Sequence
  MKO10113953_B_Rrp8
  gRNA
tgcttccagagcccgtaatg

SEQ ID NO: 113954 - DNA, 20 bp, Artificial Sequence
  MKO10113954_B_Rrp8
  gRNA
gcaaatcgagtgctaaaaac

SEQ ID NO: 113955 - DNA, 20 bp, Artificial Sequence
  MKO10113955_B_Rrp8
  gRNA
tccggacacttgaagctagg

SEQ ID NO: 113956 - DNA, 20 bp, Artificial Sequence
  MKO10113956_B_Rrp9
  gRNA
ccagcgattctgagagcgag

SEQ ID NO: 113957 - DNA, 20 bp, Artificial Sequence
  MKO10113957_B_Rrp9
  gRNA
gttgcagaagtcggtggcca

SEQ ID NO: 113958 - DNA, 20 bp, Artificial Sequence
  MKO10113958_B_Rrp9
  gRNA
aactctaccttgaacaactc

SEQ ID NO: 113959 - DNA, 20 bp, Artificial Sequence
  MKO10113959_B_Rrs1
  gRNA
cactcgcctcgtcccacacg

SEQ ID NO: 113960 - DNA, 20 bp, Artificial Sequence
  MKO10113960_B_Rrs1
  gRNA
cgtcgccggaggccgagctg

SEQ ID NO: 113961 - DNA, 20 bp, Artificial Sequence
  MKO10113961_B_Rrs1
  gRNA
gcctgggagcgccgacccca

SEQ ID NO: 113962 - DNA, 20 bp, Artificial Sequence
  MKO10113962_B_Rs1
  gRNA
taccagcccacatactgctc

SEQ ID NO: 113963 - DNA, 20 bp, Artificial Sequence
  MKO10113963_B_Rs1
  gRNA
cgactcaacagtcaaggttt

SEQ ID NO: 113964 - DNA, 20 bp, Artificial Sequence
  MKO10113964_B_Rs1
  gRNA
acctccttagactgtattcc

SEQ ID NO: 113965 - DNA, 20 bp, Artificial Sequence
  MKO10113965_B_Rsad1
  gRNA
actcagccagcgacgcttta

SEQ ID NO: 113966 - DNA, 20 bp, Artificial Sequence
  MKO10113966_B_Rsad1
  gRNA
gggcgctcagtacccataac

SEQ ID NO: 113967 - DNA, 20 bp, Artificial Sequence
  MKO10113967_B_Rsad1
  gRNA
ggggaccgtgcggaattgcc

SEQ ID NO: 113968 - DNA, 20 bp, Artificial Sequence
  MKO10113968_B_Rsad2
  gRNA
ccaaccttctggttagattc

SEQ ID NO: 113969 - DNA, 20 bp, Artificial Sequence
  MKO10113969_B_Rsad2
  gRNA
agtattcacccctgtcctga

SEQ ID NO: 113970 - DNA, 20 bp, Artificial Sequence
  MKO10113970_B_Rsad2
  gRNA
tctgtgagcatagtgagcaa

SEQ ID NO: 113971 - DNA, 20 bp, Artificial Sequence
  MKO10113971_B_Rsbn1l
  gRNA
gcgataagaataaccttaga

SEQ ID NO: 113972 - DNA, 20 bp, Artificial Sequence
  MKO10113972_B_Rsbn1l
  gRNA
tcctggacgtacccacatga

SEQ ID NO: 113973 - DNA, 20 bp, Artificial Sequence
  MKO10113973_B_Rsbn1l
  gRNA
gactttggcatatcagccac

SEQ ID NO: 113974 - DNA, 20 bp, Artificial Sequence
  MKO10113974_B_Rsbn1
  gRNA
gactttggcatatctgctgt

SEQ ID NO: 113975 - DNA, 20 bp, Artificial Sequence
  MKO10113975_B_Rsbn1
  gRNA
tatgcgttagcaatagtgca

SEQ ID NO: 113976 - DNA, 20 bp, Artificial Sequence
  MKO10113976_B_Rsbn1
  gRNA
gcaagaatatcgggtgcccc

SEQ ID NO: 113977 - DNA, 20 bp, Artificial Sequence
  MKO10113977_B_Rsc1a1
  gRNA
acagagcgagcgagactcgt

SEQ ID NO: 113978 - DNA, 20 bp, Artificial Sequence
  MKO10113978_B_Rsc1a1
  gRNA
tggtgccggcttcactctgc

SEQ ID NO: 113979 - DNA, 20 bp, Artificial Sequence
  MKO10113979_B_Rsc1a1
  gRNA
tgggttgccccgtagtggat

SEQ ID NO: 113980 - DNA, 20 bp, Artificial Sequence
  MKO10113980_B_Rsf1
  gRNA
gtcaagagtttaacagtacc

SEQ ID NO: 113981 - DNA, 20 bp, Artificial Sequence
  MKO10113981_B_Rsf1
  gRNA
atgcaaactagcactcttaa

SEQ ID NO: 113982 - DNA, 20 bp, Artificial Sequence
  MKO10113982_B_Rsf1
  gRNA
tcgggaaagccccaccctag

SEQ ID NO: 113983 - DNA, 20 bp, Artificial Sequence
  MKO10113983_B_Rsg1
  gRNA
gttcagccgggagcactctc

SEQ ID NO: 113984 - DNA, 20 bp, Artificial Sequence
  MKO10113984_B_Rsg1
  gRNA
acagtcgctggccttcagct

SEQ ID NO: 113985 - DNA, 20 bp, Artificial Sequence
  MKO10113985_B_Rsg1
  gRNA
tactataggcacttccaggc

SEQ ID NO: 113986 - DNA, 20 bp, Artificial Sequence
  MKO10113986_B_Rsl1d1
  gRNA
gatacatcggttaatctctt

SEQ ID NO: 113987 - DNA, 20 bp, Artificial Sequence
  MKO10113987_B_Rsl1d1
  gRNA
aaaatgcctccctatgtgtg

SEQ ID NO: 113988 - DNA, 20 bp, Artificial Sequence
  MKO10113988_B_Rsl1d1
  gRNA
tagaaaccttctgtctgttc

SEQ ID NO: 113989 - DNA, 20 bp, Artificial Sequence
  MKO10113989_B_Rsl1
  gRNA
ccttgtctcttcatgtccca

SEQ ID NO: 113990 - DNA, 20 bp, Artificial Sequence
  MKO10113990_B_Rsl1
  gRNA
accttcttgtcagagacaac

SEQ ID NO: 113991 - DNA, 20 bp, Artificial Sequence
  MKO10113991_B_Rsl1
  gRNA
tccagttgtctctgacaaga

SEQ ID NO: 113992 - DNA, 20 bp, Artificial Sequence
  MKO10113992_B_Rsl24d1
  gRNA
gaagaagagaaacccacgca

SEQ ID NO: 113993 - DNA, 20 bp, Artificial Sequence
  MKO10113993_B_Rsl24d1
  gRNA
tgaaataccagcgtgagctg

SEQ ID NO: 113994 - DNA, 20 bp, Artificial Sequence
  MKO10113994_B_Rsl24d1
  gRNA
agagatcaaacagaagcgcc

SEQ ID NO: 113995 - DNA, 20 bp, Artificial Sequence
  MKO10113995_B_Rslcan18
  gRNA
gtacctgctcacagttgagc

SEQ ID NO: 113996 - DNA, 20 bp, Artificial Sequence
  MKO10113996_B_Rslcan18
  gRNA
gctcctgctcaactgtgagc

SEQ ID NO: 113997 - DNA, 20 bp, Artificial Sequence
  MKO10113997_B_Rslcan18
  gRNA
agactcctatcagcatcagt

SEQ ID NO: 113998 - DNA, 20 bp, Artificial Sequence
  MKO10113998_B_Rsph1
  gRNA
tccttcatatgtgtccccgt

SEQ ID NO: 113999 - DNA, 20 bp, Artificial Sequence
  MKO10113999_B_Rsph1
  gRNA
gtcaacaatgacacctacac

SEQ ID NO: 114000 - DNA, 20 bp, Artificial Sequence
  MKO10114000_B_Rsph1
  gRNA
ctggatagataaaggtgcct

SEQ ID NO: 114001 - DNA, 20 bp, Artificial Sequence
  MKO10114001_B_Rsph3a
  gRNA
agagcttcagcgacagcagc

SEQ ID NO: 114002 - DNA, 20 bp, Artificial Sequence
  MKO10114002_B_Rsph3a
  gRNA
tgcactgtacctctcctccc

SEQ ID NO: 114003 - DNA, 20 bp, Artificial Sequence
  MKO10114003_B_Rsph3a
  gRNA
tcgcatagttgaagtcgaca

SEQ ID NO: 114004 - DNA, 20 bp, Artificial Sequence
  MKO10114004_B_Rsph3b
  gRNA
cacatgctttctgccctcca

SEQ ID NO: 114005 - DNA, 20 bp, Artificial Sequence
  MKO10114005_B_Rsph3b
  gRNA
tcgcatagttgaagtcgaca

SEQ ID NO: 114006 - DNA, 20 bp, Artificial Sequence
  MKO10114006_B_Rsph3b
  gRNA
tgcactgtacctctcctccc

SEQ ID NO: 114007 - DNA, 20 bp, Artificial Sequence
  MKO10114007_B_Rsph4a
  gRNA
acttcctgctctatgtagtc

SEQ ID NO: 114008 - DNA, 20 bp, Artificial Sequence
  MKO10114008_B_Rsph4a
  gRNA
ctgtccttcgctccaatctt

SEQ ID NO: 114009 - DNA, 20 bp, Artificial Sequence
  MKO10114009_B_Rsph4a
  gRNA
ggattcagaatataccctct

SEQ ID NO: 114010 - DNA, 20 bp, Artificial Sequence
  MKO10114010_B_Rsph6a
  gRNA
gttctcgcaacagggttacc

SEQ ID NO: 114011 - DNA, 20 bp, Artificial Sequence
  MKO10114011_B_Rsph6a
  gRNA
ggggcctatgcctacgccac

SEQ ID NO: 114012 - DNA, 20 bp, Artificial Sequence
  MKO10114012_B_Rsph6a
  gRNA
ggcgtacttgccagtggcgt

SEQ ID NO: 114013 - DNA, 20 bp, Artificial Sequence
  MKO10114013_B_Rsph9
  gRNA
tagctacagccttgtcaatc

SEQ ID NO: 114014 - DNA, 20 bp, Artificial Sequence
  MKO10114014_B_Rsph9
  gRNA
ttagctcgtacttccacttc

SEQ ID NO: 114015 - DNA, 20 bp, Artificial Sequence
  MKO10114015_B_Rsph9
  gRNA
cttcaaaggtccgattgaca

SEQ ID NO: 114016 - DNA, 20 bp, Artificial Sequence
  MKO10114016_B_Rspo1
  gRNA
atgcaagatcgagcactgtg

SEQ ID NO: 114017 - DNA, 20 bp, Artificial Sequence
  MKO10114017_B_Rspo1
  gRNA
ttgcgggcatcaaagtatcc

SEQ ID NO: 114018 - DNA, 20 bp, Artificial Sequence
  MKO10114018_B_Rspo1
  gRNA
ttagcggctgtagagccctc

SEQ ID NO: 114019 - DNA, 20 bp, Artificial Sequence
  MKO10114019_B_Rspo2
  gRNA
gacgcattccttctcttcga

SEQ ID NO: 114020 - DNA, 20 bp, Artificial Sequence
  MKO10114020_B_Rspo2
  gRNA
cggtgtccataataccctga

SEQ ID NO: 114021 - DNA, 20 bp, Artificial Sequence
  MKO10114021_B_Rspo2
  gRNA
ggttcactctgtctgtagcg

SEQ ID NO: 114022 - DNA, 20 bp, Artificial Sequence
  MKO10114022_B_Rspo3
  gRNA
actccatggactccattcac

SEQ ID NO: 114023 - DNA, 20 bp, Artificial Sequence
  MKO10114023_B_Rspo3
  gRNA
acccttctgggcaactgtca

SEQ ID NO: 114024 - DNA, 20 bp, Artificial Sequence
  MKO10114024_B_Rspo3
  gRNA
cattgagaccccagaccagc

SEQ ID NO: 114025 - DNA, 20 bp, Artificial Sequence
  MKO10114025_B_Rspo4
  gRNA
ccaacttcctgtccttacgc

SEQ ID NO: 114026 - DNA, 20 bp, Artificial Sequence
  MKO10114026_B_Rspo4
  gRNA
gtgcgagagctgtttcagcc

SEQ ID NO: 114027 - DNA, 20 bp, Artificial Sequence
  MKO10114027_B_Rspo4
  gRNA
tgccttcacggcggatgaag

SEQ ID NO: 114028 - DNA, 20 bp, Artificial Sequence
  MKO10114028_B_Rspry1
  gRNA
tttacttagcccaggaatac

SEQ ID NO: 114029 - DNA, 20 bp, Artificial Sequence
  MKO10114029_B_Rspry1
  gRNA
gaataactctaattaaagac

SEQ ID NO: 114030 - DNA, 20 bp, Artificial Sequence
  MKO10114030_B_Rspry1
  gRNA
tgtttggctgagaaactagc

SEQ ID NO: 114031 - DNA, 20 bp, Artificial Sequence
  MKO10114031_B_Rsrc1
  gRNA
caattggtccttgaagctgc

SEQ ID NO: 114032 - DNA, 20 bp, Artificial Sequence
  MKO10114032_B_Rsrc1
  gRNA
gattctggaaacatcaaagc

SEQ ID NO: 114033 - DNA, 20 bp, Artificial Sequence
  MKO10114033_B_Rsrc1
  gRNA
aaaacttaccagcagcttca

SEQ ID NO: 114034 - DNA, 20 bp, Artificial Sequence
  MKO10114034_B_Rsrc2
  gRNA
agccctagaaaagacatcac

SEQ ID NO: 114035 - DNA, 20 bp, Artificial Sequence
  MKO10114035_B_Rsrc2
  gRNA
cacggggcagaagtcactca

SEQ ID NO: 114036 - DNA, 20 bp, Artificial Sequence
  MKO10114036_B_Rsrc2
  gRNA
ctcagacttgtgtctcttag

SEQ ID NO: 114037 - DNA, 20 bp, Artificial Sequence
  MKO10114037_B_Rsu1
  gRNA
ttcttcagttccgctacatt

SEQ ID NO: 114038 - DNA, 20 bp, Artificial Sequence
  MKO10114038_B_Rsu1
  gRNA
tctagcccacatcacacaac

SEQ ID NO: 114039 - DNA, 20 bp, Artificial Sequence
  MKO10114039_B_Rsu1
  gRNA
ccaatactcacccaaggttc

SEQ ID NO: 114040 - DNA, 20 bp, Artificial Sequence
  MKO10114040_B_Rtbdn
  gRNA
gggctccttgaagttgtccc

SEQ ID NO: 114041 - DNA, 20 bp, Artificial Sequence
  MKO10114041_B_Rtbdn
  gRNA
ggccacaaataaaatctgct

SEQ ID NO: 114042 - DNA, 20 bp, Artificial Sequence
  MKO10114042_B_Rtbdn
  gRNA
gtgccccgcagctctctaga

SEQ ID NO: 114043 - DNA, 20 bp, Artificial Sequence
  MKO10114043_B_Rtca
  gRNA
gcgcgtgcagaagatccgcg

SEQ ID NO: 114044 - DNA, 20 bp, Artificial Sequence
  MKO10114044_B_Rtca
  gRNA
ttaattgtgacattaaaacg

SEQ ID NO: 114045 - DNA, 20 bp, Artificial Sequence
  MKO10114045_B_Rtca
  gRNA
gaaatggttcgtgatttgtg

SEQ ID NO: 114046 - DNA, 20 bp, Artificial Sequence
  MKO10114046_B_Rtcb
  gRNA
tgactcacatgaactattcc

SEQ ID NO: 114047 - DNA, 20 bp, Artificial Sequence
  MKO10114047_B_Rtcb
  gRNA
tacatcgctctcatctaaat

SEQ ID NO: 114048 - DNA, 20 bp, Artificial Sequence
  MKO10114048_B_Rtcb
  gRNA
ctcagggtcattcatatcaa

SEQ ID NO: 114049 - DNA, 20 bp, Artificial Sequence
  MKO10114049_B_Rtdr1
  gRNA
ggccactctggacgataccc

SEQ ID NO: 114050 - DNA, 20 bp, Artificial Sequence
  MKO10114050_B_Rtdr1
  gRNA
ggccttgagcaagcttaatg

SEQ ID NO: 114051 - DNA, 20 bp, Artificial Sequence
  MKO10114051_B_Rtdr1
  gRNA
gattctcccggcagagggtc

SEQ ID NO: 114052 - DNA, 20 bp, Artificial Sequence
  MKO10114052_B_Rtel1
  gRNA
atctcggagatgttgttgcc

SEQ ID NO: 114053 - DNA, 20 bp, Artificial Sequence
  MKO10114053_B_Rtel1
  gRNA
aatccactgtcacaccattc

SEQ ID NO: 114054 - DNA, 20 bp, Artificial Sequence
  MKO10114054_B_Rtel1
  gRNA
ccagccctacccatgccaac

SEQ ID NO: 114055 - DNA, 20 bp, Artificial Sequence
  MKO10114055_B_Rtf1
  gRNA
cctccttatagtggacattt

SEQ ID NO: 114056 - DNA, 20 bp, Artificial Sequence
  MKO10114056_B_Rtf1
  gRNA
gaagaagctgacacagattc

SEQ ID NO: 114057 - DNA, 20 bp, Artificial Sequence
  MKO10114057_B_Rtf1
  gRNA
ggcccgactggagcagatga

SEQ ID NO: 114058 - DNA, 20 bp, Artificial Sequence
  MKO10114058_B_Rtfdc1
  gRNA
tgtgccggccattcatctcc

SEQ ID NO: 114059 - DNA, 20 bp, Artificial Sequence
  MKO10114059_B_Rtfdc1
  gRNA
tccatacctgccaagctcac

SEQ ID NO: 114060 - DNA, 20 bp, Artificial Sequence
  MKO10114060_B_Rtfdc1
  gRNA
atcgcacatcagaagcatca

SEQ ID NO: 114061 - DNA, 20 bp, Artificial Sequence
  MKO10114061_B_Rtkn2
  gRNA
agaggaaagatcgccctgtc

SEQ ID NO: 114062 - DNA, 20 bp, Artificial Sequence
  MKO10114062_B_Rtkn2
  gRNA
gggagctcaggtgtttgaca

SEQ ID NO: 114063 - DNA, 20 bp, Artificial Sequence
  MKO10114063_B_Rtkn2
  gRNA
cagggcgatctttcctctgc

SEQ ID NO: 114064 - DNA, 20 bp, Artificial Sequence
  MKO10114064_B_Rtkn
  gRNA
tcctcccagacctgcaccgc

SEQ ID NO: 114065 - DNA, 20 bp, Artificial Sequence
  MKO10114065_B_Rtkn
  gRNA
gttccccaatctgcagcagc

SEQ ID NO: 114066 - DNA, 20 bp, Artificial Sequence
  MKO10114066_B_Rtkn
  gRNA
gctcagcactccccttgccg

SEQ ID NO: 114067 - DNA, 20 bp, Artificial Sequence
  MKO10114067_B_Rtl1
  gRNA
caattggcaatgaacccgtc

SEQ ID NO: 114068 - DNA, 20 bp, Artificial Sequence
  MKO10114068_B_Rtl1
  gRNA
cgcgcccaagaagcgtagcc

SEQ ID NO: 114069 - DNA, 20 bp, Artificial Sequence
  MKO10114069_B_Rtl1
  gRNA
accccacgatgaggttcata

SEQ ID NO: 114070 - DNA, 20 bp, Artificial Sequence
  MKO10114070_B_Rtn1
  gRNA
tgtgagcgtcgttgcctacc

SEQ ID NO: 114071 - DNA, 20 bp, Artificial Sequence
  MKO10114071_B_Rtn1
  gRNA
tacgttggcgcgctcttcaa

SEQ ID NO: 114072 - DNA, 20 bp, Artificial Sequence
  MKO10114072_B_Rtn1
  gRNA
tgttgtgtacgttaagcacc

SEQ ID NO: 114073 - DNA, 20 bp, Artificial Sequence
  MKO10114073_B_Rtn2
  gRNA
gaagaaatgccgtagctgtg

SEQ ID NO: 114074 - DNA, 20 bp, Artificial Sequence
  MKO10114074_B_Rtn2
  gRNA
aagagtcaagccgttgaaga

SEQ ID NO: 114075 - DNA, 20 bp, Artificial Sequence
  MKO10114075_B_Rtn2
  gRNA
ccttctgtacagacaacatc

SEQ ID NO: 114076 - DNA, 20 bp, Artificial Sequence
  MKO10114076_B_Rtn3
  gRNA
cggaagggcctacttggatg

SEQ ID NO: 114077 - DNA, 20 bp, Artificial Sequence
  MKO10114077_B_Rtn3
  gRNA
caactacatgaatgctgcga

SEQ ID NO: 114078 - DNA, 20 bp, Artificial Sequence
  MKO10114078_B_Rtn3
  gRNA
actgatcatgctgctctctc

SEQ ID NO: 114079 - DNA, 20 bp, Artificial Sequence
  MKO10114079_B_Rtn4ip1
  gRNA
acgcttcatatttagggctg

SEQ ID NO: 114080 - DNA, 20 bp, Artificial Sequence
  MKO10114080_B_Rtn4ip1
  gRNA
acatcccgacccagagtcag

SEQ ID NO: 114081 - DNA, 20 bp, Artificial Sequence
  MKO10114081_B_Rtn4ip1
  gRNA
cactctctcagaatttgttg

SEQ ID NO: 114082 - DNA, 20 bp, Artificial Sequence
  MKO10114082_B_Rtn4rl1
  gRNA
cctgcgcgacccccgagctg

SEQ ID NO: 114083 - DNA, 20 bp, Artificial Sequence
  MKO10114083_B_Rtn4rl1
  gRNA
ccgcagctcgggggtcgcgc

SEQ ID NO: 114084 - DNA, 20 bp, Artificial Sequence
  MKO10114084_B_Rtn4rl1
  gRNA
tgcccaccgcacgacccaag

SEQ ID NO: 114085 - DNA, 20 bp, Artificial Sequence
  MKO10114085_B_Rtn4rl2
  gRNA
gcccgacaccttccagggtc

SEQ ID NO: 114086 - DNA, 20 bp, Artificial Sequence
  MKO10114086_B_Rtn4rl2
  gRNA
gtcgagacaagatgctgccc

SEQ ID NO: 114087 - DNA, 20 bp, Artificial Sequence
  MKO10114087_B_Rtn4rl2
  gRNA
ccctaccttgcagcaggcgc

SEQ ID NO: 114088 - DNA, 20 bp, Artificial Sequence
  MKO10114088_B_Rtn4r
  gRNA
ctgggtcccggcctattccg

SEQ ID NO: 114089 - DNA, 20 bp, Artificial Sequence
  MKO10114089_B_Rtn4r
  gRNA
acgtcccttgagggcgtttc

SEQ ID NO: 114090 - DNA, 20 bp, Artificial Sequence
  MKO10114090_B_Rtn4r
  gRNA
cccaggccgtggaacgtggt

SEQ ID NO: 114091 - DNA, 20 bp, Artificial Sequence
  MKO10114091_B_Rtn4
  gRNA
tagttgttgacctcctgtac

SEQ ID NO: 114092 - DNA, 20 bp, Artificial Sequence
  MKO10114092_B_Rtn4
  gRNA
tgatttagttgattccctga

SEQ ID NO: 114093 - DNA, 20 bp, Artificial Sequence
  MKO10114093_B_Rtn4
  gRNA
atctgaagttgccatatcag

SEQ ID NO: 114094 - DNA, 20 bp, Artificial Sequence
  MKO10114094_B_Rtp1
  gRNA
gggccaacacattgtgcttg

SEQ ID NO: 114095 - DNA, 20 bp, Artificial Sequence
  MKO10114095_B_Rtp1
  gRNA
caaggctcagcgcgctggtt

SEQ ID NO: 114096 - DNA, 20 bp, Artificial Sequence
  MKO10114096_B_Rtp1
  gRNA
aggcctcgcagaactctccg

SEQ ID NO: 114097 - DNA, 20 bp, Artificial Sequence
  MKO10114097_B_Rtp2
  gRNA
atgagctcccagctgtccgc

SEQ ID NO: 114098 - DNA, 20 bp, Artificial Sequence
  MKO10114098_B_Rtp2
  gRNA
accgcatccacgtagccagc

SEQ ID NO: 114099 - DNA, 20 bp, Artificial Sequence
  MKO10114099_B_Rtp2
  gRNA
gtaacactgctcgcgcagac

SEQ ID NO: 114100 - DNA, 20 bp, Artificial Sequence
  MKO10114100_B_Rtp3
  gRNA
tcttctcacaccaccgcatg

SEQ ID NO: 114101 - DNA, 20 bp, Artificial Sequence
  MKO10114101_B_Rtp3
  gRNA
agatgcccaacttcgagagc

SEQ ID NO: 114102 - DNA, 20 bp, Artificial Sequence
  MKO10114102_B_Rtp3
  gRNA
gaaggttcttgtctggtatg

SEQ ID NO: 114103 - DNA, 20 bp, Artificial Sequence
  MKO10114103_B_Rtp4
  gRNA
gataagaacattgtaccaga

SEQ ID NO: 114104 - DNA, 20 bp, Artificial Sequence
  MKO10114104_B_Rtp4
  gRNA
tattcccaaaatccgtattc

SEQ ID NO: 114105 - DNA, 20 bp, Artificial Sequence
  MKO10114105_B_Rtp4
  gRNA
ctcacccaaagatgcattcg

SEQ ID NO: 114106 - DNA, 20 bp, Artificial Sequence
  MKO10114106_B_Rttn
  gRNA
ccctgatctccgccagctga

SEQ ID NO: 114107 - DNA, 20 bp, Artificial Sequence
  MKO10114107_B_Rttn
  gRNA
gtatacacacccgctggccc

SEQ ID NO: 114108 - DNA, 20 bp, Artificial Sequence
  MKO10114108_B_Rttn
  gRNA
caacaacctgaagtcttaac

SEQ ID NO: 114109 - DNA, 20 bp, Artificial Sequence
  MKO10114109_B_Rufy1
  gRNA
cagatatagctaccagtgtc

SEQ ID NO: 114110 - DNA, 20 bp, Artificial Sequence
  MKO10114110_B_Rufy1
  gRNA
ggagctgcttgttgtctatg

SEQ ID NO: 114111 - DNA, 20 bp, Artificial Sequence
  MKO10114111_B_Rufy1
  gRNA
actccagtctgcccttagcc

SEQ ID NO: 114112 - DNA, 20 bp, Artificial Sequence
  MKO10114112_B_Rufy2
  gRNA
cacgctctagcacggccaag

SEQ ID NO: 114113 - DNA, 20 bp, Artificial Sequence
  MKO10114113_B_Rufy2
  gRNA
tgcgttgcttaattatccag

SEQ ID NO: 114114 - DNA, 20 bp, Artificial Sequence
  MKO10114114_B_Rufy2
  gRNA
gaggagggagccgtgattgt

SEQ ID NO: 114115 - DNA, 20 bp, Artificial Sequence
  MKO10114115_B_Rufy3
  gRNA
tctgaatctggggcggaccc

SEQ ID NO: 114116 - DNA, 20 bp, Artificial Sequence
  MKO10114116_B_Rufy3
  gRNA
gcgagtgtaaaagacctccc

SEQ ID NO: 114117 - DNA, 20 bp, Artificial Sequence
  MKO10114117_B_Rufy3
  gRNA
cacctttcaagccgtgtttc

SEQ ID NO: 114118 - DNA, 20 bp, Artificial Sequence
  MKO10114118_B_Rufy4
  gRNA
agttgaaggcaactccattg

SEQ ID NO: 114119 - DNA, 20 bp, Artificial Sequence
  MKO10114119_B_Rufy4
  gRNA
tacctcctctggaaaacctt

SEQ ID NO: 114120 - DNA, 20 bp, Artificial Sequence
  MKO10114120_B_Rufy4
  gRNA
cccgctgttccagtcccagc

SEQ ID NO: 114121 - DNA, 20 bp, Artificial Sequence
  MKO10114121_B_Rundc1
  gRNA
acgttgacgaagctcctcag

SEQ ID NO: 114122 - DNA, 20 bp, Artificial Sequence
  MKO10114122_B_Rundc1
  gRNA
tgactccctgccgcagtccg

SEQ ID NO: 114123 - DNA, 20 bp, Artificial Sequence
  MKO10114123_B_Rundc1
  gRNA
aggtgggaatcggctccacc

SEQ ID NO: 114124 - DNA, 20 bp, Artificial Sequence
  MKO10114124_B_Rundc3a
  gRNA
atcctcagccaccgatttaa

SEQ ID NO: 114125 - DNA, 20 bp, Artificial Sequence
  MKO10114125_B_Rundc3a
  gRNA
ccgacatacgcttctccatc

SEQ ID NO: 114126 - DNA, 20 bp, Artificial Sequence
  MKO10114126_B_Rundc3a
  gRNA
cctgatggagaagcgtatgt

SEQ ID NO: 114127 - DNA, 20 bp, Artificial Sequence
  MKO10114127_B_Rundc3b
  gRNA
gactcaatgctattgacttc

SEQ ID NO: 114128 - DNA, 20 bp, Artificial Sequence
  MKO10114128_B_Rundc3b
  gRNA
ctgtgaagaccctgattgat

SEQ ID NO: 114129 - DNA, 20 bp, Artificial Sequence
  MKO10114129_B_Rundc3b
  gRNA
atatagtcccagaagctacg

SEQ ID NO: 114130 - DNA, 20 bp, Artificial Sequence
  MKO10114130_B_Runx1t1
  gRNA
ggcgctccctcaccgcctaa

SEQ ID NO: 114131 - DNA, 20 bp, Artificial Sequence
  MKO10114131_B_Runx1t1
  gRNA
gtttggctagccttgcgcag

SEQ ID NO: 114132 - DNA, 20 bp, Artificial Sequence
  MKO10114132_B_Runx1t1
  gRNA
gactgcgtcttcacatccac

SEQ ID NO: 114133 - DNA, 20 bp, Artificial Sequence
  MKO10114133_B_Runx1
  gRNA
tcggtgcgcactagctcgcc

SEQ ID NO: 114134 - DNA, 20 bp, Artificial Sequence
  MKO10114134_B_Runx1
  gRNA
cggatttgtaaagacggtga

SEQ ID NO: 114135 - DNA, 20 bp, Artificial Sequence
  MKO10114135_B_Runx1
  gRNA
gggcttacttgagagtcgac

SEQ ID NO: 114136 - DNA, 20 bp, Artificial Sequence
  MKO10114136_B_Runx2
  gRNA
aaatctcagatcgttgaacc

SEQ ID NO: 114137 - DNA, 20 bp, Artificial Sequence
  MKO10114137_B_Runx2
  gRNA
cctcatcccagtatgagagt

SEQ ID NO: 114138 - DNA, 20 bp, Artificial Sequence
  MKO10114138_B_Runx2
  gRNA
tctgatcgcctcagtgattt

SEQ ID NO: 114139 - DNA, 20 bp, Artificial Sequence
  MKO10114139_B_Runx3
  gRNA
gaatcgaaggtcgttgaacc

SEQ ID NO: 114140 - DNA, 20 bp, Artificial Sequence
  MKO10114140_B_Runx3
  gRNA
agcacttacgtcggggttcc

SEQ ID NO: 114141 - DNA, 20 bp, Artificial Sequence
  MKO10114141_B_Runx3
  gRNA
tacctaccaccgagccatca

SEQ ID NO: 114142 - DNA, 20 bp, Artificial Sequence
  MKO10114142_B_Rusc1
  gRNA
gatagctgtcagcgcttcag

SEQ ID NO: 114143 - DNA, 20 bp, Artificial Sequence
  MKO10114143_B_Rusc1
  gRNA
ttccggaaggacctcatcac

SEQ ID NO: 114144 - DNA, 20 bp, Artificial Sequence
  MKO10114144_B_Rusc1
  gRNA
ggtattgaccaccctctgcc

SEQ ID NO: 114145 - DNA, 20 bp, Artificial Sequence
  MKO10114145_B_Rusc2
  gRNA
cattcagccggcaattcaga

SEQ ID NO: 114146 - DNA, 20 bp, Artificial Sequence
  MKO10114146_B_Rusc2
  gRNA
gacctcgcggccatcgcccc

SEQ ID NO: 114147 - DNA, 20 bp, Artificial Sequence
  MKO10114147_B_Rusc2
  gRNA
tgtcagcataccttcacgcc

SEQ ID NO: 114148 - DNA, 20 bp, Artificial Sequence
  MKO10114148_B_Ruvbl1
  gRNA
cacactcaccttcagctgtt

SEQ ID NO: 114149 - DNA, 20 bp, Artificial Sequence
  MKO10114149_B_Ruvbl1
  gRNA
attaatcaaaagcaagaaaa

SEQ ID NO: 114150 - DNA, 20 bp, Artificial Sequence
  MKO10114150_B_Ruvbl1
  gRNA
cttggcccttgctattgctc

SEQ ID NO: 114151 - DNA, 20 bp, Artificial Sequence
  MKO10114151_B_Ruvbl2
  gRNA
gcaccacgccagctgcacgc

SEQ ID NO: 114152 - DNA, 20 bp, Artificial Sequence
  MKO10114152_B_Ruvbl2
  gRNA
gctcgattcttgtcacatct

SEQ ID NO: 114153 - DNA, 20 bp, Artificial Sequence
  MKO10114153_B_Ruvbl2
  gRNA
tcacttgatccggacaccaa

SEQ ID NO: 114154 - DNA, 20 bp, Artificial Sequence
  MKO10114154_B_Rwdd1
  gRNA
cttcaccattactgtgacat

SEQ ID NO: 114155 - DNA, 20 bp, Artificial Sequence
  MKO10114155_B_Rwdd1
  gRNA
tcataaagtggagtctcatc

SEQ ID NO: 114156 - DNA, 20 bp, Artificial Sequence
  MKO10114156_B_Rwdd1
  gRNA
tttcttgaacagctgtcacg

SEQ ID NO: 114157 - DNA, 20 bp, Artificial Sequence
  MKO10114157_B_Rwdd2a
  gRNA
tgtcatcacgctccaaattg

SEQ ID NO: 114158 - DNA, 20 bp, Artificial Sequence
  MKO10114158_B_Rwdd2a
  gRNA
ggagtaattcctcaaacgaa

SEQ ID NO: 114159 - DNA, 20 bp, Artificial Sequence
  MKO10114159_B_Rwdd2a
  gRNA
agaacacattcctccgcatg

SEQ ID NO: 114160 - DNA, 20 bp, Artificial Sequence
  MKO10114160_B_Rwdd2b
  gRNA
cagaggatctcgctttcacg

SEQ ID NO: 114161 - DNA, 20 bp, Artificial Sequence
  MKO10114161_B_Rwdd2b
  gRNA
ccgctgtccttccattccgc

SEQ ID NO: 114162 - DNA, 20 bp, Artificial Sequence
  MKO10114162_B_Rwdd2b
  gRNA
tcctgcccgaaattacagtg

SEQ ID NO: 114163 - DNA, 20 bp, Artificial Sequence
  MKO10114163_B_Rwdd3
  gRNA
gctcaacatctcccactcgt

SEQ ID NO: 114164 - DNA, 20 bp, Artificial Sequence
  MKO10114164_B_Rwdd3
  gRNA
caaaaggaattcggagctgc

SEQ ID NO: 114165 - DNA, 20 bp, Artificial Sequence
  MKO10114165_B_Rwdd3
  gRNA
gctcttctcagagtgtgtac

SEQ ID NO: 114166 - DNA, 20 bp, Artificial Sequence
  MKO10114166_B_Rwdd4a
  gRNA
gatatgaccggagctgtctg

SEQ ID NO: 114167 - DNA, 20 bp, Artificial Sequence
  MKO10114167_B_Rwdd4a
  gRNA
gacatacccgcagacagctc

SEQ ID NO: 114168 - DNA, 20 bp, Artificial Sequence
  MKO10114168_B_Rwdd4a
  gRNA
gcctgtagccaatatcatct

SEQ ID NO: 114169 - DNA, 20 bp, Artificial Sequence
  MKO10114169_B_Rxfp1
  gRNA
ctgcgggaaccgagctgatg

SEQ ID NO: 114170 - DNA, 20 bp, Artificial Sequence
  MKO10114170_B_Rxfp1
  gRNA
tacttacattacagtcacat

SEQ ID NO: 114171 - DNA, 20 bp, Artificial Sequence
  MKO10114171_B_Rxfp1
  gRNA
ttcggaagtttctgcctcaa

SEQ ID NO: 114172 - DNA, 20 bp, Artificial Sequence
  MKO10114172_B_Rxfp2
  gRNA
accatatttggcacagtcca

SEQ ID NO: 114173 - DNA, 20 bp, Artificial Sequence
  MKO10114173_B_Rxfp2
  gRNA
catcccacaggtgacactag

SEQ ID NO: 114174 - DNA, 20 bp, Artificial Sequence
  MKO10114174_B_Rxfp2
  gRNA
tatctgctgaagaccttgac

SEQ ID NO: 114175 - DNA, 20 bp, Artificial Sequence
  MKO10114175_B_Rxfp3
  gRNA
tgactgggaacgcgtacact

SEQ ID NO: 114176 - DNA, 20 bp, Artificial Sequence
  MKO10114176_B_Rxfp3
  gRNA
cccagtaaaccgcgctgatg

SEQ ID NO: 114177 - DNA, 20 bp, Artificial Sequence
  MKO10114177_B_Rxfp3
  gRNA
ctgcagcgacgcattgccgc

SEQ ID NO: 114178 - DNA, 20 bp, Artificial Sequence
  MKO10114178_B_Rxfp4
  gRNA
cgatactcagtgctgtgatt

SEQ ID NO: 114179 - DNA, 20 bp, Artificial Sequence
  MKO10114179_B_Rxfp4
  gRNA
gactcccaagggcacgatga

SEQ ID NO: 114180 - DNA, 20 bp, Artificial Sequence
  MKO10114180_B_Rxfp4
  gRNA
aatgatacctacaagtccat

SEQ ID NO: 114181 - DNA, 20 bp, Artificial Sequence
  MKO10114181_B_Rxra
  gRNA
aagccgccactaggcctcaa

SEQ ID NO: 114182 - DNA, 20 bp, Artificial Sequence
  MKO10114182_B_Rxra
  gRNA
ggtagcggcagtactgacac

SEQ ID NO: 114183 - DNA, 20 bp, Artificial Sequence
  MKO10114183_B_Rxra
  gRNA
gaaccttgaggacgccattg

SEQ ID NO: 114184 - DNA, 20 bp, Artificial Sequence
  MKO10114184_B_Rxrb
  gRNA
ccccggacccctaagaccgg

SEQ ID NO: 114185 - DNA, 20 bp, Artificial Sequence
  MKO10114185_B_Rxrb
  gRNA
ccaccccacagcggttcagg

SEQ ID NO: 114186 - DNA, 20 bp, Artificial Sequence
  MKO10114186_B_Rxrb
  gRNA
tccaatgccacccccgccac

SEQ ID NO: 114187 - DNA, 20 bp, Artificial Sequence
  MKO10114187_B_Rxrg
  gRNA
tgcgtttggcccactcaacg

SEQ ID NO: 114188 - DNA, 20 bp, Artificial Sequence
  MKO10114188_B_Rxrg
  gRNA
acttctggtagcgacagtac

SEQ ID NO: 114189 - DNA, 20 bp, Artificial Sequence
  MKO10114189_B_Rxrg
  gRNA
aggaccaggtcattctactc

SEQ ID NO: 114190 - DNA, 20 bp, Artificial Sequence
  MKO10114190_B_Rybp
  gRNA
accagctgagaattgatgcg

SEQ ID NO: 114191 - DNA, 20 bp, Artificial Sequence
  MKO10114191_B_Rybp
  gRNA
caggccccggctgaagaatg

SEQ ID NO: 114192 - DNA, 20 bp, Artificial Sequence
  MKO10114192_B_Rybp
  gRNA
gcgaaacaaaccacacctca

SEQ ID NO: 114193 - DNA, 20 bp, Artificial Sequence
  MKO10114193_B_Ryk
  gRNA
cgtgagcctctacctgagcg

SEQ ID NO: 114194 - DNA, 20 bp, Artificial Sequence
  MKO10114194_B_Ryk
  gRNA
tagccacaaagttgtctact

SEQ ID NO: 114195 - DNA, 20 bp, Artificial Sequence
  MKO10114195_B_Ryk
  gRNA
ggcgcacctcgtcctcgctc

SEQ ID NO: 114196 - DNA, 20 bp, Artificial Sequence
  MKO10114196_B_Ryr1
  gRNA
gtgcagcgccacggtgctca

SEQ ID NO: 114197 - DNA, 20 bp, Artificial Sequence
  MKO10114197_B_Ryr1
  gRNA
ctgacagacctgcgcgttgc

SEQ ID NO: 114198 - DNA, 20 bp, Artificial Sequence
  MKO10114198_B_Ryr1
  gRNA
ccatacgactgtgtgcgtgc

SEQ ID NO: 114199 - DNA, 20 bp, Artificial Sequence
  MKO10114199_B_Ryr2
  gRNA
agaacagcagaagctgtgct

SEQ ID NO: 114200 - DNA, 20 bp, Artificial Sequence
  MKO10114200_B_Ryr2
  gRNA
ctttctgcaggatgatgagg

SEQ ID NO: 114201 - DNA, 20 bp, Artificial Sequence
  MKO10114201_B_Ryr2
  gRNA
gtctatctgcacctttgtgc

SEQ ID NO: 114202 - DNA, 20 bp, Artificial Sequence
  MKO10114202_B_Ryr3
  gRNA
ttcccgcagacctacatcaa

SEQ ID NO: 114203 - DNA, 20 bp, Artificial Sequence
  MKO10114203_B_Ryr3
  gRNA
atctgtctgggatcttgacg

SEQ ID NO: 114204 - DNA, 20 bp, Artificial Sequence
  MKO10114204_B_Ryr3
  gRNA
caggcgattcccaagtccct

SEQ ID NO: 114205 - DNA, 20 bp, Artificial Sequence
  MKO10114205_B_S100a10
  gRNA
ttagaatcaaaaggaccctc

SEQ ID NO: 114206 - DNA, 20 bp, Artificial Sequence
  MKO10114206_B_S100a10
  gRNA
cgacaaagaccacttgacaa

SEQ ID NO: 114207 - DNA, 20 bp, Artificial Sequence
  MKO10114207_B_S100a10
  gRNA
ccagagctttctatcactag

SEQ ID NO: 114208 - DNA, 20 bp, Artificial Sequence
  MKO10114208_B_S100a11
  gRNA
catccttcccgctgtacttt

SEQ ID NO: 114209 - DNA, 20 bp, Artificial Sequence
  MKO10114209_B_S100a11
  gRNA
aagaggattagattcgcttc

SEQ ID NO: 114210 - DNA, 20 bp, Artificial Sequence
  MKO10114210_B_S100a11
  gRNA
ttccttcatgaacacagagc

SEQ ID NO: 114211 - DNA, 20 bp, Artificial Sequence
  MKO10114211_B_S100a13
  gRNA
ctaccaaccttgagcaaatg

SEQ ID NO: 114212 - DNA, 20 bp, Artificial Sequence
  MKO10114212_B_S100a13
  gRNA
agtgaatactggagactgat

SEQ ID NO: 114213 - DNA, 20 bp, Artificial Sequence
  MKO10114213_B_S100a13
  gRNA
acagcaagctttacttcttc

SEQ ID NO: 114214 - DNA, 20 bp, Artificial Sequence
  MKO10114214_B_S100a14
  gRNA
tacccgccacagagtattta

SEQ ID NO: 114215 - DNA, 20 bp, Artificial Sequence
  MKO10114215_B_S100a14
  gRNA
caggaacgatgggacagtgt

SEQ ID NO: 114216 - DNA, 20 bp, Artificial Sequence
  MKO10114216_B_S100a14
  gRNA
ccctgctgagcttcgagacc

SEQ ID NO: 114217 - DNA, 20 bp, Artificial Sequence
  MKO10114217_B_S100a16
  gRNA
atatgtatccaagcacagcc

SEQ ID NO: 114218 - DNA, 20 bp, Artificial Sequence
  MKO10114218_B_S100a16
  gRNA
gatgaggttggccatggggc

SEQ ID NO: 114219 - DNA, 20 bp, Artificial Sequence
  MKO10114219_B_S100a16
  gRNA
tgacaagctcatccagaacc

SEQ ID NO: 114220 - DNA, 20 bp, Artificial Sequence
  MKO10114220_B_S100a1
  gRNA
ccacagcatctgcatccttc

SEQ ID NO: 114221 - DNA, 20 bp, Artificial Sequence
  MKO10114221_B_S100a1
  gRNA
caatgtgttccatgcccatt

SEQ ID NO: 114222 - DNA, 20 bp, Artificial Sequence
  MKO10114222_B_S100a1
  gRNA
cagaaagttcagtttgtagc

SEQ ID NO: 114223 - DNA, 20 bp, Artificial Sequence
  MKO10114223_B_S100a2
  gRNA
gagcctctcgtcctcttgac

SEQ ID NO: 114224 - DNA, 20 bp, Artificial Sequence
  MKO10114224_B_S100a2
  gRNA
cagcgctccactacctgccg

SEQ ID NO: 114225 - DNA, 20 bp, Artificial Sequence
  MKO10114225_B_S100a2
  gRNA
ggagcgctggggacccctca

SEQ ID NO: 114226 - DNA, 20 bp, Artificial Sequence
  MKO10114226_B_S100a3
  gRNA
acaactccttgagctccgac

SEQ ID NO: 114227 - DNA, 20 bp, Artificial Sequence
  MKO10114227_B_S100a3
  gRNA
atttattgtagtcacactcc

SEQ ID NO: 114228 - DNA, 20 bp, Artificial Sequence
  MKO10114228_B_S100a3
  gRNA
cacagcgccctgcatactcc

SEQ ID NO: 114229 - DNA, 20 bp, Artificial Sequence
  MKO10114229_B_S100a4
  gRNA
tgaggagtcttcacttcttc

SEQ ID NO: 114230 - DNA, 20 bp, Artificial Sequence
  MKO10114230_B_S100a4
  gRNA
cctctttgcctgagtatttg

SEQ ID NO: 114231 - DNA, 20 bp, Artificial Sequence
  MKO10114231_B_S100a4
  gRNA
tccaccttccacaaatactc

SEQ ID NO: 114232 - DNA, 20 bp, Artificial Sequence
  MKO10114232_B_S100a5
  gRNA
gtagcaagctgaccctgagt

SEQ ID NO: 114233 - DNA, 20 bp, Artificial Sequence
  MKO10114233_B_S100a5
  gRNA
cgaccaggagattgacttca

SEQ ID NO: 114234 - DNA, 20 bp, Artificial Sequence
  MKO10114234_B_S100a5
  gRNA
actccttgaagtcaatctcc

SEQ ID NO: 114235 - DNA, 20 bp, Artificial Sequence
  MKO10114235_B_S100a6
  gRNA
gatggccacgagaaggccaa

SEQ ID NO: 114236 - DNA, 20 bp, Artificial Sequence
  MKO10114236_B_S100a6
  gRNA
tcaggccattggccttctcg

SEQ ID NO: 114237 - DNA, 20 bp, Artificial Sequence
  MKO10114237_B_S100a6
  gRNA
tgcaggatgctgaaattgca

SEQ ID NO: 114238 - DNA, 20 bp, Artificial Sequence
  MKO10114238_B_S100a7a
  gRNA
gatggaagcagtgtatgatt

SEQ ID NO: 114239 - DNA, 20 bp, Artificial Sequence
  MKO10114239_B_S100a7a
  gRNA
agtagtgtgcacacaactgc

SEQ ID NO: 114240 - DNA, 20 bp, Artificial Sequence
  MKO10114240_B_S100a7a
  gRNA
ccagcttgcccaagatgtac

SEQ ID NO: 114241 - DNA, 20 bp, Artificial Sequence
  MKO10114241_B_S100a8
  gRNA
aattgtggtagacatcaatg

SEQ ID NO: 114242 - DNA, 20 bp, Artificial Sequence
  MKO10114242_B_S100a8
  gRNA
ccttgcgatggtgataaaag

SEQ ID NO: 114243 - DNA, 20 bp, Artificial Sequence
  MKO10114243_B_S100a8
  gRNA
cgaaaacttgttcagagaat

SEQ ID NO: 114244 - DNA, 20 bp, Artificial Sequence
  MKO10114244_B_S100a9
  gRNA
acaccttccatcaatactct

SEQ ID NO: 114245 - DNA, 20 bp, Artificial Sequence
  MKO10114245_B_S100a9
  gRNA
caaagctcagctgattgtcc

SEQ ID NO: 114246 - DNA, 20 bp, Artificial Sequence
  MKO10114246_B_S100a9
  gRNA
cttccttcctagagtattga

SEQ ID NO: 114247 - DNA, 20 bp, Artificial Sequence
  MKO10114247_B_S100b
  gRNA
gtgcttgtcaccctctcgcc

SEQ ID NO: 114248 - DNA, 20 bp, Artificial Sequence
  MKO10114248_B_S100b
  gRNA
ggacaaagtgatggagacgc

SEQ ID NO: 114249 - DNA, 20 bp, Artificial Sequence
  MKO10114249_B_S100b
  gRNA
caacgagctctctcacttcc

SEQ ID NO: 114250 - DNA, 20 bp, Artificial Sequence
  MKO10114250_B_S100g
  gRNA
tttaaggagctggataagaa

SEQ ID NO: 114251 - DNA, 20 bp, Artificial Sequence
  MKO10114251_B_S100g
  gRNA
tgcactcaccttcaggaggc

SEQ ID NO: 114252 - DNA, 20 bp, Artificial Sequence
  MKO10114252_B_S100g
  gRNA
agagttccccagcctcctga

SEQ ID NO: 114253 - DNA, 20 bp, Artificial Sequence
  MKO10114253_B_S100pbp
  gRNA
ttaccttggttagagtcccc

SEQ ID NO: 114254 - DNA, 20 bp, Artificial Sequence
  MKO10114254_B_S100pbp
  gRNA
tatggactgtaggagaagtc

SEQ ID NO: 114255 - DNA, 20 bp, Artificial Sequence
  MKO10114255_B_S100pbp
  gRNA
ctgttctacaaactagaacc

SEQ ID NO: 114256 - DNA, 20 bp, Artificial Sequence
  MKO10114256_B_S100z
  gRNA
cgccaataaagacaacgaag

SEQ ID NO: 114257 - DNA, 20 bp, Artificial Sequence
  MKO10114257_B_S100z
  gRNA
cgccctccttgcaagagtac

SEQ ID NO: 114258 - DNA, 20 bp, Artificial Sequence
  MKO10114258_B_S100z
  gRNA
ccatgattcgcatcttccac

SEQ ID NO: 114259 - DNA, 20 bp, Artificial Sequence
  MKO10114259_B_S1pr1
  gRNA
gacgtttccagacgacataa

SEQ ID NO: 114260 - DNA, 20 bp, Artificial Sequence
  MKO10114260_B_S1pr1
  gRNA
atttgcaacaagatacgatc

SEQ ID NO: 114261 - DNA, 20 bp, Artificial Sequence
  MKO10114261_B_S1pr1
  gRNA
gttgaacatcggggcggaga

SEQ ID NO: 114262 - DNA, 20 bp, Artificial Sequence
  MKO10114262_B_S1pr2
  gRNA
ctctgagtataagccgccca

SEQ ID NO: 114263 - DNA, 20 bp, Artificial Sequence
  MKO10114263_B_S1pr2
  gRNA
gacgctagccctgctcaaga

SEQ ID NO: 114264 - DNA, 20 bp, Artificial Sequence
  MKO10114264_B_S1pr2
  gRNA
ctacgccacgtatagatgac

SEQ ID NO: 114265 - DNA, 20 bp, Artificial Sequence
  MKO10114265_B_S1pr3
  gRNA
ttacgattacgtggggaaac

SEQ ID NO: 114266 - DNA, 20 bp, Artificial Sequence
  MKO10114266_B_S1pr3
  gRNA
tatcctcttcctcatcgacg

SEQ ID NO: 114267 - DNA, 20 bp, Artificial Sequence
  MKO10114267_B_S1pr3
  gRNA
ctagacagccgcacaccaac

SEQ ID NO: 114268 - DNA, 20 bp, Artificial Sequence
  MKO10114268_B_S1pr4
  gRNA
cggagtgggcctcggtgatc

SEQ ID NO: 114269 - DNA, 20 bp, Artificial Sequence
  MKO10114269_B_S1pr4
  gRNA
ctgcctgacccggatcaccg

SEQ ID NO: 114270 - DNA, 20 bp, Artificial Sequence
  MKO10114270_B_S1pr4
  gRNA
ggctcggaccactctaaaga

SEQ ID NO: 114271 - DNA, 20 bp, Artificial Sequence
  MKO10114271_B_S1pr5
  gRNA
tcacgcgcaaaccaaagcgc

SEQ ID NO: 114272 - DNA, 20 bp, Artificial Sequence
  MKO10114272_B_S1pr5
  gRNA
cgccagcgtgcgagcgcgac

SEQ ID NO: 114273 - DNA, 20 bp, Artificial Sequence
  MKO10114273_B_S1pr5
  gRNA
cctgcttcgtacccttagcg

SEQ ID NO: 114274 - DNA, 20 bp, Artificial Sequence
  MKO10114274_B_Saa1
  gRNA
ctgacatgaaggaagctaac

SEQ ID NO: 114275 - DNA, 20 bp, Artificial Sequence
  MKO10114275_B_Saa1
  gRNA
caaatgaaaaaaaccctcca

SEQ ID NO: 114276 - DNA, 20 bp, Artificial Sequence
  MKO10114276_B_Saa1
  gRNA
gatgaagctactcaccagcc

SEQ ID NO: 114277 - DNA, 20 bp, Artificial Sequence
  MKO10114277_B_Saa2
  gRNA
atgcaggggctggagacatg

SEQ ID NO: 114278 - DNA, 20 bp, Artificial Sequence
  MKO10114278_B_Saa2
  gRNA
taaatgaaaaaaaccctcca

SEQ ID NO: 114279 - DNA, 20 bp, Artificial Sequence
  MKO10114279_B_Saa2
  gRNA
gatgaagctactcaccagcc

SEQ ID NO: 114280 - DNA, 20 bp, Artificial Sequence
  MKO10114280_B_Saa3
  gRNA
gaccagcttctttcatgaac

SEQ ID NO: 114281 - DNA, 20 bp, Artificial Sequence
  MKO10114281_B_Saa3
  gRNA
atctttggctgtcaactccc

SEQ ID NO: 114282 - DNA, 20 bp, Artificial Sequence
  MKO10114282_B_Saa3
  gRNA
cctgatgactttagcagccc

SEQ ID NO: 114283 - DNA, 20 bp, Artificial Sequence
  MKO10114283_B_Saa4
  gRNA
gaactacgaggcccaacaga

SEQ ID NO: 114284 - DNA, 20 bp, Artificial Sequence
  MKO10114284_B_Saa4
  gRNA
atggctggtattcattcttc

SEQ ID NO: 114285 - DNA, 20 bp, Artificial Sequence
  MKO10114285_B_Saa4
  gRNA
agccatcaccactgactccc

SEQ ID NO: 114286 - DNA, 20 bp, Artificial Sequence
  MKO10114286_B_Saal1
  gRNA
agcactcccatgaatatgtc

SEQ ID NO: 114287 - DNA, 20 bp, Artificial Sequence
  MKO10114287_B_Saal1
  gRNA
cttacctgcaagtttccagc

SEQ ID NO: 114288 - DNA, 20 bp, Artificial Sequence
  MKO10114288_B_Saal1
  gRNA
aagattgtcacacctgaaag

SEQ ID NO: 114289 - DNA, 20 bp, Artificial Sequence
  MKO10114289_B_Sac3d1
  gRNA
caacagccaacgccgcctga

SEQ ID NO: 114290 - DNA, 20 bp, Artificial Sequence
  MKO10114290_B_Sac3d1
  gRNA
cgcggacgcagcgacagtgc

SEQ ID NO: 114291 - DNA, 20 bp, Artificial Sequence
  MKO10114291_B_Sac3d1
  gRNA
cgagcgccgcctgcaccgac

SEQ ID NO: 114292 - DNA, 20 bp, Artificial Sequence
  MKO10114292_B_Sacm1l
  gRNA
gttgcacttgactgatattc

SEQ ID NO: 114293 - DNA, 20 bp, Artificial Sequence
  MKO10114293_B_Sacm1l
  gRNA
cattgaccgagtgtccacag

SEQ ID NO: 114294 - DNA, 20 bp, Artificial Sequence
  MKO10114294_B_Sacm1l
  gRNA
acctgcaagggtgacctctg

SEQ ID NO: 114295 - DNA, 20 bp, Artificial Sequence
  MKO10114295_B_Sacs
  gRNA
tttgtaaaccttcaatcaaa

SEQ ID NO: 114296 - DNA, 20 bp, Artificial Sequence
  MKO10114296_B_Sacs
  gRNA
tctccaatcttgatccaatc

SEQ ID NO: 114297 - DNA, 20 bp, Artificial Sequence
  MKO10114297_B_Sacs
  gRNA
atataaaaatttaacctctg

SEQ ID NO: 114298 - DNA, 20 bp, Artificial Sequence
  MKO10114298_B_Sae1
  gRNA
aattgccaagaatcttatcc

SEQ ID NO: 114299 - DNA, 20 bp, Artificial Sequence
  MKO10114299_B_Sae1
  gRNA
tacctgttcgtggtccagca

SEQ ID NO: 114300 - DNA, 20 bp, Artificial Sequence
  MKO10114300_B_Sae1
  gRNA
atgctctccaagattcgcaa

SEQ ID NO: 114301 - DNA, 20 bp, Artificial Sequence
  MKO10114301_B_Safb2
  gRNA
cactcaccagagttacttta

SEQ ID NO: 114302 - DNA, 20 bp, Artificial Sequence
  MKO10114302_B_Safb2
  gRNA
ttcccatcaggcatttaagg

SEQ ID NO: 114303 - DNA, 20 bp, Artificial Sequence
  MKO10114303_B_Safb2
  gRNA
ccaacacacctgcccatatc

SEQ ID NO: 114304 - DNA, 20 bp, Artificial Sequence
  MKO10114304_B_Safb
  gRNA
atctgacttcaccatgctgc

SEQ ID NO: 114305 - DNA, 20 bp, Artificial Sequence
  MKO10114305_B_Safb
  gRNA
ccatcatatccatgtcttgc

SEQ ID NO: 114306 - DNA, 20 bp, Artificial Sequence
  MKO10114306_B_Safb
  gRNA
gcaacaagaagatgcctaag

SEQ ID NO: 114307 - DNA, 20 bp, Artificial Sequence
  MKO10114307_B_Sag
  gRNA
tctgcaggtgaccatctacc

SEQ ID NO: 114308 - DNA, 20 bp, Artificial Sequence
  MKO10114308_B_Sag
  gRNA
aacttaccttgcctacatcc

SEQ ID NO: 114309 - DNA, 20 bp, Artificial Sequence
  MKO10114309_B_Sag
  gRNA
acttacctacaggctctact

SEQ ID NO: 114310 - DNA, 20 bp, Artificial Sequence
  MKO10114310_B_Sall1
  gRNA
tttgagccagcatgtcgcgg

SEQ ID NO: 114311 - DNA, 20 bp, Artificial Sequence
  MKO10114311_B_Sall1
  gRNA
cttccgtttcacccgcttcg

SEQ ID NO: 114312 - DNA, 20 bp, Artificial Sequence
  MKO10114312_B_Sall1
  gRNA
aacagcacccctgcacgccg

SEQ ID NO: 114313 - DNA, 20 bp, Artificial Sequence
  MKO10114313_B_Sall2
  gRNA
cacagtccgagattaactgt

SEQ ID NO: 114314 - DNA, 20 bp, Artificial Sequence
  MKO10114314_B_Sall2
  gRNA
ctcctctgcgccccgaccag

SEQ ID NO: 114315 - DNA, 20 bp, Artificial Sequence
  MKO10114315_B_Sall2
  gRNA
cccatcaagccagcgcaaac

SEQ ID NO: 114316 - DNA, 20 bp, Artificial Sequence
  MKO10114316_B_Sall3
  gRNA
gatcgtgcacgacgatgagc

SEQ ID NO: 114317 - DNA, 20 bp, Artificial Sequence
  MKO10114317_B_Sall3
  gRNA
aacaatgcacccgcgaggcg

SEQ ID NO: 114318 - DNA, 20 bp, Artificial Sequence
  MKO10114318_B_Sall3
  gRNA
ccacagcaaggctatcgcac

SEQ ID NO: 114319 - DNA, 20 bp, Artificial Sequence
  MKO10114319_B_Sall4
  gRNA
ggctgtgctcggataaatgt

SEQ ID NO: 114320 - DNA, 20 bp, Artificial Sequence
  MKO10114320_B_Sall4
  gRNA
ctggtgtttggccatgccgt

SEQ ID NO: 114321 - DNA, 20 bp, Artificial Sequence
  MKO10114321_B_Sall4
  gRNA
ccaacaataactccgcccgc

SEQ ID NO: 114322 - DNA, 20 bp, Artificial Sequence
  MKO10114322_B_Samd10
  gRNA
cagctaggacatgtttccga

SEQ ID NO: 114323 - DNA, 20 bp, Artificial Sequence
  MKO10114323_B_Samd10
  gRNA
gcccctcctcacgaacctgc

SEQ ID NO: 114324 - DNA, 20 bp, Artificial Sequence
  MKO10114324_B_Samd10
  gRNA
caccaggcaccagcctcacg

SEQ ID NO: 114325 - DNA, 20 bp, Artificial Sequence
  MKO10114325_B_Samd11
  gRNA
tcccgagctagagtctacaa

SEQ ID NO: 114326 - DNA, 20 bp, Artificial Sequence
  MKO10114326_B_Samd11
  gRNA
ccactaccatcagcttatgt

SEQ ID NO: 114327 - DNA, 20 bp, Artificial Sequence
  MKO10114327_B_Samd11
  gRNA
atcctctacaggcgacctgt

SEQ ID NO: 114328 - DNA, 20 bp, Artificial Sequence
  MKO10114328_B_Samd12
  gRNA
gccacttgcagacatcctgc

SEQ ID NO: 114329 - DNA, 20 bp, Artificial Sequence
  MKO10114329_B_Samd12
  gRNA
ttatggagaacactccaccg

SEQ ID NO: 114330 - DNA, 20 bp, Artificial Sequence
  MKO10114330_B_Samd12
  gRNA
cttcttcccgcactttcagt

SEQ ID NO: 114331 - DNA, 20 bp, Artificial Sequence
  MKO10114331_B_Samd14
  gRNA
gctggcactgtctcgtagcc

SEQ ID NO: 114332 - DNA, 20 bp, Artificial Sequence
  MKO10114332_B_Samd14
  gRNA
agtcttcttgtccaagccga

SEQ ID NO: 114333 - DNA, 20 bp, Artificial Sequence
  MKO10114333_B_Samd14
  gRNA
aacgggaaggccggtgtctc

SEQ ID NO: 114334 - DNA, 20 bp, Artificial Sequence
  MKO10114334_B_Samd1
  gRNA
cactggcctatccattcgcc

SEQ ID NO: 114335 - DNA, 20 bp, Artificial Sequence
  MKO10114335_B_Samd1
  gRNA
tgtcggcttctccttgcgcc

SEQ ID NO: 114336 - DNA, 20 bp, Artificial Sequence
  MKO10114336_B_Samd1
  gRNA
tcaacttacggacagccaaa

SEQ ID NO: 114337 - DNA, 20 bp, Artificial Sequence
  MKO10114337_B_Samd3
  gRNA
ggtcagcgtggatgtatctg

SEQ ID NO: 114338 - DNA, 20 bp, Artificial Sequence
  MKO10114338_B_Samd3
  gRNA
cggctggatacaaagatgtc

SEQ ID NO: 114339 - DNA, 20 bp, Artificial Sequence
  MKO10114339_B_Samd3
  gRNA
acttaggtgagctagtcccc

SEQ ID NO: 114340 - DNA, 20 bp, Artificial Sequence
  MKO10114340_B_Samd4b
  gRNA
ccaggggcctgtgggctcgt

SEQ ID NO: 114341 - DNA, 20 bp, Artificial Sequence
  MKO10114341_B_Samd4b
  gRNA
tcagattcacctgcgactct

SEQ ID NO: 114342 - DNA, 20 bp, Artificial Sequence
  MKO10114342_B_Samd4b
  gRNA
ctccagccggaacactttcc

SEQ ID NO: 114343 - DNA, 20 bp, Artificial Sequence
  MKO10114343_B_Samd4
  gRNA
ctaacccaggacatcatcga

SEQ ID NO: 114344 - DNA, 20 bp, Artificial Sequence
  MKO10114344_B_Samd4
  gRNA
accgcagcgcactagccatg

SEQ ID NO: 114345 - DNA, 20 bp, Artificial Sequence
  MKO10114345_B_Samd4
  gRNA
ggccctcactgagtgtcaac

SEQ ID NO: 114346 - DNA, 20 bp, Artificial Sequence
  MKO10114346_B_Samd5
  gRNA
aatccacaggtcccaatggc

SEQ ID NO: 114347 - DNA, 20 bp, Artificial Sequence
  MKO10114347_B_Samd5
  gRNA
acagtacgctgagtccttcg

SEQ ID NO: 114348 - DNA, 20 bp, Artificial Sequence
  MKO10114348_B_Samd5
  gRNA
cgcgggagccagcaccccga

SEQ ID NO: 114349 - DNA, 20 bp, Artificial Sequence
  MKO10114349_B_Samd7
  gRNA
tggttgtctacctcaatgtc

SEQ ID NO: 114350 - DNA, 20 bp, Artificial Sequence
  MKO10114350_B_Samd7
  gRNA
tgggcatagtctgagcagcc

SEQ ID NO: 114351 - DNA, 20 bp, Artificial Sequence
  MKO10114351_B_Samd7
  gRNA
tttaccacctgaacccataa

SEQ ID NO: 114352 - DNA, 20 bp, Artificial Sequence
  MKO10114352_B_Samd8
  gRNA
acaggtcaatccttctgcga

SEQ ID NO: 114353 - DNA, 20 bp, Artificial Sequence
  MKO10114353_B_Samd8
  gRNA
gactacagagccttcgcaga

SEQ ID NO: 114354 - DNA, 20 bp, Artificial Sequence
  MKO10114354_B_Samd8
  gRNA
cattccaaagccgctccaga

SEQ ID NO: 114355 - DNA, 20 bp, Artificial Sequence
  MKO10114355_B_Samd9l
  gRNA
actgaaaaggtcttgatcgc

SEQ ID NO: 114356 - DNA, 20 bp, Artificial Sequence
  MKO10114356_B_Samd9l
  gRNA
tcttgaactctctatcccgt

SEQ ID NO: 114357 - DNA, 20 bp, Artificial Sequence
  MKO10114357_B_Samd9l
  gRNA
catccttgaatcgatccttc

SEQ ID NO: 114358 - DNA, 20 bp, Artificial Sequence
  MKO10114358_B_Samhd1
  gRNA
gactgtgttcgaagcgattg

SEQ ID NO: 114359 - DNA, 20 bp, Artificial Sequence
  MKO10114359_B_Samhd1
  gRNA
ttccaagacaataaaatcgc

SEQ ID NO: 114360 - DNA, 20 bp, Artificial Sequence
  MKO10114360_B_Samhd1
  gRNA
tccgagactgactcagctgc

SEQ ID NO: 114361 - DNA, 20 bp, Artificial Sequence
  MKO10114361_B_Samm50
  gRNA
gacgggcagttacaacacca

SEQ ID NO: 114362 - DNA, 20 bp, Artificial Sequence
  MKO10114362_B_Samm50
  gRNA
ggtgaagatgccctgcccaa

SEQ ID NO: 114363 - DNA, 20 bp, Artificial Sequence
  MKO10114363_B_Samm50
  gRNA
ccacttgtctaaaaattcct

SEQ ID NO: 114364 - DNA, 20 bp, Artificial Sequence
  MKO10114364_B_Samsn1
  gRNA
aagactgtccatagagtcgc

SEQ ID NO: 114365 - DNA, 20 bp, Artificial Sequence
  MKO10114365_B_Samsn1
  gRNA
ttacagcgcagcagcagttt

SEQ ID NO: 114366 - DNA, 20 bp, Artificial Sequence
  MKO10114366_B_Samsn1
  gRNA
aaaatctgatgactcaattg

SEQ ID NO: 114367 - DNA, 20 bp, Artificial Sequence
  MKO10114367_B_Samt1
  gRNA
acacagaaaaccagaaccac

SEQ ID NO: 114368 - DNA, 20 bp, Artificial Sequence
  MKO10114368_B_Samt1
  gRNA
aacaagcaaacatttaactg

SEQ ID NO: 114369 - DNA, 20 bp, Artificial Sequence
  MKO10114369_B_Samt1
  gRNA
tcaaaatggcccatactacc

SEQ ID NO: 114370 - DNA, 20 bp, Artificial Sequence
  MKO10114370_B_Samt2
  gRNA
catcttcagatttgcaggat

SEQ ID NO: 114371 - DNA, 20 bp, Artificial Sequence
  MKO10114371_B_Samt2
  gRNA
gtaccattatttctgtgacc

SEQ ID NO: 114372 - DNA, 20 bp, Artificial Sequence
  MKO10114372_B_Samt2
  gRNA
tagcacactatctgaatctc

SEQ ID NO: 114373 - DNA, 20 bp, Artificial Sequence
  MKO10114373_B_Samt3
  gRNA
gcacatttgtttccgtgagc

SEQ ID NO: 114374 - DNA, 20 bp, Artificial Sequence
  MKO10114374_B_Samt3
  gRNA
tagctgtcaggacccctatt

SEQ ID NO: 114375 - DNA, 20 bp, Artificial Sequence
  MKO10114375_B_Samt3
  gRNA
ggccgtaaaggtctacaaca

SEQ ID NO: 114376 - DNA, 20 bp, Artificial Sequence
  MKO10114376_B_Samt4
  gRNA
actgctaatacccaaaacta

SEQ ID NO: 114377 - DNA, 20 bp, Artificial Sequence
  MKO10114377_B_Samt4
  gRNA
ccattgccagcaatcaatgc

SEQ ID NO: 114378 - DNA, 20 bp, Artificial Sequence
  MKO10114378_B_Samt4
  gRNA
caagttctctaccttagttt

SEQ ID NO: 114379 - DNA, 20 bp, Artificial Sequence
  MKO10114379_B_Sap130
  gRNA
gtaacctgcccgggaacttt

SEQ ID NO: 114380 - DNA, 20 bp, Artificial Sequence
  MKO10114380_B_Sap130
  gRNA
gactgtagttactttagagc

SEQ ID NO: 114381 - DNA, 20 bp, Artificial Sequence
  MKO10114381_B_Sap130
  gRNA
gctagggcccacgtgctccc

SEQ ID NO: 114382 - DNA, 20 bp, Artificial Sequence
  MKO10114382_B_Sap18
  gRNA
ttctgcagagttaaggagat

SEQ ID NO: 114383 - DNA, 20 bp, Artificial Sequence
  MKO10114383_B_Sap18
  gRNA
tagatctgcagctcgctcga

SEQ ID NO: 114384 - DNA, 20 bp, Artificial Sequence
  MKO10114384_B_Sap18
  gRNA
agacctgcccgctcctgctg

SEQ ID NO: 114385 - DNA, 20 bp, Artificial Sequence
  MKO10114385_B_Sap25
  gRNA
atgcacagagggcgacatga

SEQ ID NO: 114386 - DNA, 20 bp, Artificial Sequence
  MKO10114386_B_Sap25
  gRNA
tcacagtacgtctttctccc

SEQ ID NO: 114387 - DNA, 20 bp, Artificial Sequence
  MKO10114387_B_Sap25
  gRNA
taatgcaggacctcggctgg

SEQ ID NO: 114388 - DNA, 20 bp, Artificial Sequence
  MKO10114388_B_Sap30bp
  gRNA
taaccatcctcatcaccccc

SEQ ID NO: 114389 - DNA, 20 bp, Artificial Sequence
  MKO10114389_B_Sap30bp
  gRNA
gttgcgaaccctttcagaaa

SEQ ID NO: 114390 - DNA, 20 bp, Artificial Sequence
  MKO10114390_B_Sap30bp
  gRNA
acctttgggtcatcagcctc

SEQ ID NO: 114391 - DNA, 20 bp, Artificial Sequence
  MKO10114391_B_Sap30l
  gRNA
cgagcgctgcgtccggcccg

SEQ ID NO: 114392 - DNA, 20 bp, Artificial Sequence
  MKO10114392_B_Sap30l
  gRNA
tccagagcgtccgaaataaa

SEQ ID NO: 114393 - DNA, 20 bp, Artificial Sequence
  MKO10114393_B_Sap30l
  gRNA
agggatgtcagcatcgtgct

SEQ ID NO: 114394 - DNA, 20 bp, Artificial Sequence
  MKO10114394_B_Sap30
  gRNA
ctcctagtgaacaccactgt

SEQ ID NO: 114395 - DNA, 20 bp, Artificial Sequence
  MKO10114395_B_Sap30
  gRNA
tgagtagatgaaacatgtta

SEQ ID NO: 114396 - DNA, 20 bp, Artificial Sequence
  MKO10114396_B_Sap30
  gRNA
tcaggacatcgacactccag

SEQ ID NO: 114397 - DNA, 20 bp, Artificial Sequence
  MKO10114397_B_Sapcd1
  gRNA
cactgttctgctgctaccac

SEQ ID NO: 114398 - DNA, 20 bp, Artificial Sequence
  MKO10114398_B_Sapcd1
  gRNA
cctggttcgcagaccggctg

SEQ ID NO: 114399 - DNA, 20 bp, Artificial Sequence
  MKO10114399_B_Sapcd1
  gRNA
ctgatgcccctctgctaacc

SEQ ID NO: 114400 - DNA, 20 bp, Artificial Sequence
  MKO10114400_B_Sapcd2
  gRNA
ccgggccacctcctgtactt

SEQ ID NO: 114401 - DNA, 20 bp, Artificial Sequence
  MKO10114401_B_Sapcd2
  gRNA
gaggttgctgcccaaagtac

SEQ ID NO: 114402 - DNA, 20 bp, Artificial Sequence
  MKO10114402_B_Sapcd2
  gRNA
ggccccgtgccatcatctcc

SEQ ID NO: 114403 - DNA, 20 bp, Artificial Sequence
  MKO10114403_B_Sar1a
  gRNA
cgtacagcccaaatatttca

SEQ ID NO: 114404 - DNA, 20 bp, Artificial Sequence
  MKO10114404_B_Sar1a
  gRNA
tcagaagaactgacaattgc

SEQ ID NO: 114405 - DNA, 20 bp, Artificial Sequence
  MKO10114405_B_Sar1a
  gRNA
aacttactgggatggagtgt

SEQ ID NO: 114406 - DNA, 20 bp, Artificial Sequence
  MKO10114406_B_Sar1b
  gRNA
tcagaagagcttactattgc

SEQ ID NO: 114407 - DNA, 20 bp, Artificial Sequence
  MKO10114407_B_Sar1b
  gRNA
tcgtaacctctcttcactga

SEQ ID NO: 114408 - DNA, 20 bp, Artificial Sequence
  MKO10114408_B_Sar1b
  gRNA
taaactggtattccttggat

SEQ ID NO: 114409 - DNA, 20 bp, Artificial Sequence
  MKO10114409_B_Sardh
  gRNA
gcaagtggtgagccgtgatc

SEQ ID NO: 114410 - DNA, 20 bp, Artificial Sequence
  MKO10114410_B_Sardh
  gRNA
aggtcgtccacgttcatcag

SEQ ID NO: 114411 - DNA, 20 bp, Artificial Sequence
  MKO10114411_B_Sardh
  gRNA
cgactttggagtgcggcggg

SEQ ID NO: 114412 - DNA, 20 bp, Artificial Sequence
  MKO10114412_B_Sarm1
  gRNA
gggtctcgcgaagtgtcgcc

SEQ ID NO: 114413 - DNA, 20 bp, Artificial Sequence
  MKO10114413_B_Sarm1
  gRNA
tccgggcactgtcagccgat

SEQ ID NO: 114414 - DNA, 20 bp, Artificial Sequence
  MKO10114414_B_Sarm1
  gRNA
ctctacgaatggcaccacgt

SEQ ID NO: 114415 - DNA, 20 bp, Artificial Sequence
  MKO10114415_B_Sarnp
  gRNA
agaatacttacttcagtctg

SEQ ID NO: 114416 - DNA, 20 bp, Artificial Sequence
  MKO10114416_B_Sarnp
  gRNA
agcaaatgaagaagatgtac

SEQ ID NO: 114417 - DNA, 20 bp, Artificial Sequence
  MKO10114417_B_Sarnp
  gRNA
catagaactgcctgttaaag

SEQ ID NO: 114418 - DNA, 20 bp, Artificial Sequence
  MKO10114418_B_Sars2
  gRNA
agaggcagtgcgggccctgc

SEQ ID NO: 114419 - DNA, 20 bp, Artificial Sequence
  MKO10114419_B_Sars2
  gRNA
ccgtgtggtgggtgaaaagc

SEQ ID NO: 114420 - DNA, 20 bp, Artificial Sequence
  MKO10114420_B_Sars2
  gRNA
gcctggctctcgtcccccac

SEQ ID NO: 114421 - DNA, 20 bp, Artificial Sequence
  MKO10114421_B_Sars
  gRNA
gcagaaggttcccaatctcg

SEQ ID NO: 114422 - DNA, 20 bp, Artificial Sequence
  MKO10114422_B_Sars
  gRNA
tcgaaattcagcacgttctc

SEQ ID NO: 114423 - DNA, 20 bp, Artificial Sequence
  MKO10114423_B_Sars
  gRNA
cagctagcgcgtctgcagtg

SEQ ID NO: 114424 - DNA, 20 bp, Artificial Sequence
  MKO10114424_B_Sart1
  gRNA
cagtaaactccgagcaaagt

SEQ ID NO: 114425 - DNA, 20 bp, Artificial Sequence
  MKO10114425_B_Sart1
  gRNA
cttaacagcattgacctcca

SEQ ID NO: 114426 - DNA, 20 bp, Artificial Sequence
  MKO10114426_B_Sart1
  gRNA
tgcctcatccctcagcattg

SEQ ID NO: 114427 - DNA, 20 bp, Artificial Sequence
  MKO10114427_B_Sart3
  gRNA
gagctcttccccctgaccga

SEQ ID NO: 114428 - DNA, 20 bp, Artificial Sequence
  MKO10114428_B_Sart3
  gRNA
cctgcacatgacgaaaggcc

SEQ ID NO: 114429 - DNA, 20 bp, Artificial Sequence
  MKO10114429_B_Sart3
  gRNA
cagctggcgatcccactgta

SEQ ID NO: 114430 - DNA, 20 bp, Artificial Sequence
  MKO10114430_B_Sash1
  gRNA
cactcaccacatccaggtcc

SEQ ID NO: 114431 - DNA, 20 bp, Artificial Sequence
  MKO10114431_B_Sash1
  gRNA
gccccacgtcacttcagctg

SEQ ID NO: 114432 - DNA, 20 bp, Artificial Sequence
  MKO10114432_B_Sash1
  gRNA
cgtcttctgagtttgattta

SEQ ID NO: 114433 - DNA, 20 bp, Artificial Sequence
  MKO10114433_B_Sash3
  gRNA
acgctcctcctgctcagtaa

SEQ ID NO: 114434 - DNA, 20 bp, Artificial Sequence
  MKO10114434_B_Sash3
  gRNA
ctttctacagggagacacgc

SEQ ID NO: 114435 - DNA, 20 bp, Artificial Sequence
  MKO10114435_B_Sash3
  gRNA
tcatttcccgaaccatgaac

SEQ ID NO: 114436 - DNA, 20 bp, Artificial Sequence
  MKO10114436_B_Sass6
  gRNA
ttgtctccactacgtttaaa

SEQ ID NO: 114437 - DNA, 20 bp, Artificial Sequence
  MKO10114437_B_Sass6
  gRNA
gtataaccttgttatatctg

SEQ ID NO: 114438 - DNA, 20 bp, Artificial Sequence
  MKO10114438_B_Sass6
  gRNA
ggaaagctaagaagtccacc

SEQ ID NO: 114439 - DNA, 20 bp, Artificial Sequence
  MKO10114439_B_Sat1
  gRNA
tttcctttaggctttggtat

SEQ ID NO: 114440 - DNA, 20 bp, Artificial Sequence
  MKO10114440_B_Sat1
  gRNA
tcaggggtccagtgctcttt

SEQ ID NO: 114441 - DNA, 20 bp, Artificial Sequence
  MKO10114441_B_Sat1
  gRNA
actggctaaatatgaataca

SEQ ID NO: 114442 - DNA, 20 bp, Artificial Sequence
  MKO10114442_B_Sat2
  gRNA
tttatagctctgcgagcaga

SEQ ID NO: 114443 - DNA, 20 bp, Artificial Sequence
  MKO10114443_B_Sat2
  gRNA
gcagagattatcccagcacc

SEQ ID NO: 114444 - DNA, 20 bp, Artificial Sequence
  MKO10114444_B_Sat2
  gRNA
cttcactgatcttcacctga

SEQ ID NO: 114445 - DNA, 20 bp, Artificial Sequence
  MKO10114445_B_Satb1
  gRNA
agatatgaaccagagttcgt

SEQ ID NO: 114446 - DNA, 20 bp, Artificial Sequence
  MKO10114446_B_Satb1
  gRNA
gcaacgccatctctatcagc

SEQ ID NO: 114447 - DNA, 20 bp, Artificial Sequence
  MKO10114447_B_Satb1
  gRNA
atagtacgtgctgttcacaa

SEQ ID NO: 114448 - DNA, 20 bp, Artificial Sequence
  MKO10114448_B_Satb2
  gRNA
agacgcccctgatgcgactg

SEQ ID NO: 114449 - DNA, 20 bp, Artificial Sequence
  MKO10114449_B_Satb2
  gRNA
tgcgcaggaataatcaagct

SEQ ID NO: 114450 - DNA, 20 bp, Artificial Sequence
  MKO10114450_B_Satb2
  gRNA
cgaactcagcgtgctcttct

SEQ ID NO: 114451 - DNA, 20 bp, Artificial Sequence
  MKO10114451_B_Satl1
  gRNA
catgctgaagaagctaagtc

SEQ ID NO: 114452 - DNA, 20 bp, Artificial Sequence
  MKO10114452_B_Satl1
  gRNA
caggaactggcttcttatga

SEQ ID NO: 114453 - DNA, 20 bp, Artificial Sequence
  MKO10114453_B_Satl1
  gRNA
acctgattctgtctgttcac

SEQ ID NO: 114454 - DNA, 20 bp, Artificial Sequence
  MKO10114454_B_Sav1
  gRNA
gcagattgtgaagttgtacg

SEQ ID NO: 114455 - DNA, 20 bp, Artificial Sequence
  MKO10114455_B_Sav1
  gRNA
actcctttacctcggagcac

SEQ ID NO: 114456 - DNA, 20 bp, Artificial Sequence
  MKO10114456_B_Sav1
  gRNA
agaacgtcttgccatgctgc

SEQ ID NO: 114457 - DNA, 20 bp, Artificial Sequence
  MKO10114457_B_Saysd1
  gRNA
agtccacgttcaaggatagg

SEQ ID NO: 114458 - DNA, 20 bp, Artificial Sequence
  MKO10114458_B_Saysd1
  gRNA
agccaaccccgccatcgctc

SEQ ID NO: 114459 - DNA, 20 bp, Artificial Sequence
  MKO10114459_B_Saysd1
  gRNA
agttccgggaggcccgcaaa

SEQ ID NO: 114460 - DNA, 20 bp, Artificial Sequence
  MKO10114460_B_Sbds
  gRNA
cctgcttgcagatttcagtc

SEQ ID NO: 114461 - DNA, 20 bp, Artificial Sequence
  MKO10114461_B_Sbds
  gRNA
agtgctcagtctgaaggacg

SEQ ID NO: 114462 - DNA, 20 bp, Artificial Sequence
  MKO10114462_B_Sbds
  gRNA
gaagacctcatcagtgcatt

SEQ ID NO: 114463 - DNA, 20 bp, Artificial Sequence
  MKO10114463_B_Sbf1
  gRNA
ggaggacaaccctttccccc

SEQ ID NO: 114464 - DNA, 20 bp, Artificial Sequence
  MKO10114464_B_Sbf1
  gRNA
cctcctcaccctgaacactt

SEQ ID NO: 114465 - DNA, 20 bp, Artificial Sequence
  MKO10114465_B_Sbf1
  gRNA
tctcagagttgatgtcagta

SEQ ID NO: 114466 - DNA, 20 bp, Artificial Sequence
  MKO10114466_B_Sbf2
  gRNA
tgttggctgtttccgctctc

SEQ ID NO: 114467 - DNA, 20 bp, Artificial Sequence
  MKO10114467_B_Sbf2
  gRNA
ggatgacacgcctttcccac

SEQ ID NO: 114468 - DNA, 20 bp, Artificial Sequence
  MKO10114468_B_Sbf2
  gRNA
cttaccaattcaattccctg

SEQ ID NO: 114469 - DNA, 20 bp, Artificial Sequence
  MKO10114469_B_Sbk1
  gRNA
agcgctgaccctacgcacac

SEQ ID NO: 114470 - DNA, 20 bp, Artificial Sequence
  MKO10114470_B_Sbk1
  gRNA
cgctggcagccagtgtgcgt

SEQ ID NO: 114471 - DNA, 20 bp, Artificial Sequence
  MKO10114471_B_Sbk1
  gRNA
ccccagcaggtgcatactcc

SEQ ID NO: 114472 - DNA, 20 bp, Artificial Sequence
  MKO10114472_B_Sbk2
  gRNA
cgcgtcaagctgacagactt

SEQ ID NO: 114473 - DNA, 20 bp, Artificial Sequence
  MKO10114473_B_Sbk2
  gRNA
aagcaatccacttccctccg

SEQ ID NO: 114474 - DNA, 20 bp, Artificial Sequence
  MKO10114474_B_Sbk2
  gRNA
cttcctgtatgagttctgcg

SEQ ID NO: 114475 - DNA, 20 bp, Artificial Sequence
  MKO10114475_B_Sbk3
  gRNA
cgctgcgtctcttcacatcc

SEQ ID NO: 114476 - DNA, 20 bp, Artificial Sequence
  MKO10114476_B_Sbk3
  gRNA
agtcccttcggaggagctta

SEQ ID NO: 114477 - DNA, 20 bp, Artificial Sequence
  MKO10114477_B_Sbk3
  gRNA
gcaaactggtcccagggtgc

SEQ ID NO: 114478 - DNA, 20 bp, Artificial Sequence
  MKO10114478_B_Sbno1
  gRNA
attcagcacaaacgttgtag

SEQ ID NO: 114479 - DNA, 20 bp, Artificial Sequence
  MKO10114479_B_Sbno1
  gRNA
cctagttctaatgcactaag

SEQ ID NO: 114480 - DNA, 20 bp, Artificial Sequence
  MKO10114480_B_Sbno1
  gRNA
cctgcagctgatgtcagtaa

SEQ ID NO: 114481 - DNA, 20 bp, Artificial Sequence
  MKO10114481_B_Sbno2
  gRNA
attctcggctcctgaagacc

SEQ ID NO: 114482 - DNA, 20 bp, Artificial Sequence
  MKO10114482_B_Sbno2
  gRNA
accgactcctgcactgtcct

SEQ ID NO: 114483 - DNA, 20 bp, Artificial Sequence
  MKO10114483_B_Sbno2
  gRNA
caagagcagcgactttcctc

SEQ ID NO: 114484 - DNA, 20 bp, Artificial Sequence
  MKO10114484_B_Sbpl
  gRNA
cctgagggttcaggacccag

SEQ ID NO: 114485 - DNA, 20 bp, Artificial Sequence
  MKO10114485_B_Sbpl
  gRNA
gatgtcctggggaatgctgc

SEQ ID NO: 114486 - DNA, 20 bp, Artificial Sequence
  MKO10114486_B_Sbpl
  gRNA
acttgccagcagcattcccc

SEQ ID NO: 114487 - DNA, 20 bp, Artificial Sequence
  MKO10114487_B_Sbp
  gRNA
catgctgctgttgctgactt

SEQ ID NO: 114488 - DNA, 20 bp, Artificial Sequence
  MKO10114488_B_Sbp
  gRNA
acttgccagcagcattcccc

SEQ ID NO: 114489 - DNA, 20 bp, Artificial Sequence
  MKO10114489_B_Sbp
  gRNA
gatgtcctggggaatgctgc

SEQ ID NO: 114490 - DNA, 20 bp, Artificial Sequence
  MKO10114490_B_Sbsn
  gRNA
gtagcccacgacatcaacag

SEQ ID NO: 114491 - DNA, 20 bp, Artificial Sequence
  MKO10114491_B_Sbsn
  gRNA
ggcgggtacggaggccagca

SEQ ID NO: 114492 - DNA, 20 bp, Artificial Sequence
  MKO10114492_B_Sbsn
  gRNA
ggcatcagtttagggcatgg

SEQ ID NO: 114493 - DNA, 20 bp, Artificial Sequence
  MKO10114493_B_Sbspon
  gRNA
agcccaccacgcgtgtgcgc

SEQ ID NO: 114494 - DNA, 20 bp, Artificial Sequence
  MKO10114494_B_Sbspon
  gRNA
gatactgcatccatcgagtc

SEQ ID NO: 114495 - DNA, 20 bp, Artificial Sequence
  MKO10114495_B_Sbspon
  gRNA
tcagaaatcagactcttcgc

SEQ ID NO: 114496 - DNA, 20 bp, Artificial Sequence
  MKO10114496_B_Sc4mol
  gRNA
accaagttcagcgggttgag

SEQ ID NO: 114497 - DNA, 20 bp, Artificial Sequence
  MKO10114497_B_Sc4mol
  gRNA
gataaaccagaaaccttcga

SEQ ID NO: 114498 - DNA, 20 bp, Artificial Sequence
  MKO10114498_B_Sc4mol
  gRNA
taaagtccatcacgagtttc

SEQ ID NO: 114499 - DNA, 20 bp, Artificial Sequence
  MKO10114499_B_Sc5d
  gRNA
gatgttgtcctcgggccacg

SEQ ID NO: 114500 - DNA, 20 bp, Artificial Sequence
  MKO10114500_B_Sc5d
  gRNA
agcaaactctacgatgacat

SEQ ID NO: 114501 - DNA, 20 bp, Artificial Sequence
  MKO10114501_B_Sc5d
  gRNA
ttcgggttccccagatctta

SEQ ID NO: 114502 - DNA, 20 bp, Artificial Sequence
  MKO10114502_B_Scaf11
  gRNA
aaccaacttccttccctaac

SEQ ID NO: 114503 - DNA, 20 bp, Artificial Sequence
  MKO10114503_B_Scaf11
  gRNA
tggcttcttgtccaatcgat

SEQ ID NO: 114504 - DNA, 20 bp, Artificial Sequence
  MKO10114504_B_Scaf11
  gRNA
ctgttatgtgaaagatctga

SEQ ID NO: 114505 - DNA, 20 bp, Artificial Sequence
  MKO10114505_B_Scaf1
  gRNA
tggggtccctgtcaccgatg

SEQ ID NO: 114506 - DNA, 20 bp, Artificial Sequence
  MKO10114506_B_Scaf1
  gRNA
ggcctcatacctttatcatt

SEQ ID NO: 114507 - DNA, 20 bp, Artificial Sequence
  MKO10114507_B_Scaf1
  gRNA
ggcagcagcgcctccatcgt

SEQ ID NO: 114508 - DNA, 20 bp, Artificial Sequence
  MKO10114508_B_Scaf4
  gRNA
agctgctatcaaagctatta

SEQ ID NO: 114509 - DNA, 20 bp, Artificial Sequence
  MKO10114509_B_Scaf4
  gRNA
gcagtgtaagccagaatata

SEQ ID NO: 114510 - DNA, 20 bp, Artificial Sequence
  MKO10114510_B_Scaf4
  gRNA
tttagtaatgagaatcatct

SEQ ID NO: 114511 - DNA, 20 bp, Artificial Sequence
  MKO10114511_B_Scaf8
  gRNA
cccagttgtcacgcctgttt

SEQ ID NO: 114512 - DNA, 20 bp, Artificial Sequence
  MKO10114512_B_Scaf8
  gRNA
actcaccttaatagctttga

SEQ ID NO: 114513 - DNA, 20 bp, Artificial Sequence
  MKO10114513_B_Scaf8
  gRNA
aaaaatgacccaaattacaa

SEQ ID NO: 114514 - DNA, 20 bp, Artificial Sequence
  MKO10114514_B_Scai
  gRNA
ggcttgaagcggtggcaaat

SEQ ID NO: 114515 - DNA, 20 bp, Artificial Sequence
  MKO10114515_B_Scai
  gRNA
tgctgaagatgacatcccac

SEQ ID NO: 114516 - DNA, 20 bp, Artificial Sequence
  MKO10114516_B_Scai
  gRNA
aagcagtggcagtcctactt

SEQ ID NO: 114517 - DNA, 20 bp, Artificial Sequence
  MKO10114517_B_Scamp1
  gRNA
acataagcttcaccgtcttc

SEQ ID NO: 114518 - DNA, 20 bp, Artificial Sequence
  MKO10114518_B_Scamp1
  gRNA
gagcagttcagcttgagcca

SEQ ID NO: 114519 - DNA, 20 bp, Artificial Sequence
  MKO10114519_B_Scamp1
  gRNA
ggatactaccatgctggctc

SEQ ID NO: 114520 - DNA, 20 bp, Artificial Sequence
  MKO10114520_B_Scamp2
  gRNA
tcgctccttgcgttccagct

SEQ ID NO: 114521 - DNA, 20 bp, Artificial Sequence
  MKO10114521_B_Scamp2
  gRNA
accagcacagccaacgcccc

SEQ ID NO: 114522 - DNA, 20 bp, Artificial Sequence
  MKO10114522_B_Scamp2
  gRNA
ctgagcagtacctggggcgt

SEQ ID NO: 114523 - DNA, 20 bp, Artificial Sequence
  MKO10114523_B_Scamp3
  gRNA
agaactgcagcatgtcgccc

SEQ ID NO: 114524 - DNA, 20 bp, Artificial Sequence
  MKO10114524_B_Scamp3
  gRNA
ctacggctcctacagcaccc

SEQ ID NO: 114525 - DNA, 20 bp, Artificial Sequence
  MKO10114525_B_Scamp3
  gRNA
ttacagctcgacagaacaac

SEQ ID NO: 114526 - DNA, 20 bp, Artificial Sequence
  MKO10114526_B_Scamp4
  gRNA
cttctctgatgagatccccg

SEQ ID NO: 114527 - DNA, 20 bp, Artificial Sequence
  MKO10114527_B_Scamp4
  gRNA
gcttctcgggctggggcgca

SEQ ID NO: 114528 - DNA, 20 bp, Artificial Sequence
  MKO10114528_B_Scamp4
  gRNA
ttccttgtccgcccttgtga

SEQ ID NO: 114529 - DNA, 20 bp, Artificial Sequence
  MKO10114529_B_Scamp5
  gRNA
caccttgctcctacgtctgc

SEQ ID NO: 114530 - DNA, 20 bp, Artificial Sequence
  MKO10114530_B_Scamp5
  gRNA
ccaagcgcctctactacctc

SEQ ID NO: 114531 - DNA, 20 bp, Artificial Sequence
  MKO10114531_B_Scamp5
  gRNA
ggatgtctgcctcgaagtct

SEQ ID NO: 114532 - DNA, 20 bp, Artificial Sequence
  MKO10114532_B_Scand1
  gRNA
gttcaaagctgcgggcgcgc

SEQ ID NO: 114533 - DNA, 20 bp, Artificial Sequence
  MKO10114533_B_Scand1
  gRNA
cctacgctgacgccgccctg

SEQ ID NO: 114534 - DNA, 20 bp, Artificial Sequence
  MKO10114534_B_Scand1
  gRNA
cggtgatgcgcacgtccgcg

SEQ ID NO: 114535 - DNA, 20 bp, Artificial Sequence
  MKO10114535_B_Scaper
  gRNA
catagatttcatctactgcc

SEQ ID NO: 114536 - DNA, 20 bp, Artificial Sequence
  MKO10114536_B_Scaper
  gRNA
ggaaaaccgaaatgtcaaac

SEQ ID NO: 114537 - DNA, 20 bp, Artificial Sequence
  MKO10114537_B_Scaper
  gRNA
tttccaccagtttgacattt

SEQ ID NO: 114538 - DNA, 20 bp, Artificial Sequence
  MKO10114538_B_Scap
  gRNA
gcagtatgtgggtgcccccg

SEQ ID NO: 114539 - DNA, 20 bp, Artificial Sequence
  MKO10114539_B_Scap
  gRNA
gggggcgagtaacccttcac

SEQ ID NO: 114540 - DNA, 20 bp, Artificial Sequence
  MKO10114540_B_Scap
  gRNA
atgctcgggacagaggtgac

SEQ ID NO: 114541 - DNA, 20 bp, Artificial Sequence
  MKO10114541_B_Scara3
  gRNA
tcttctggcagcggttgcag

SEQ ID NO: 114542 - DNA, 20 bp, Artificial Sequence
  MKO10114542_B_Scara3
  gRNA
tgtcctcgtcttcaccagcc

SEQ ID NO: 114543 - DNA, 20 bp, Artificial Sequence
  MKO10114543_B_Scara3
  gRNA
cacaagcttcttattataga

SEQ ID NO: 114544 - DNA, 20 bp, Artificial Sequence
  MKO10114544_B_Scara5
  gRNA
caaagatggagccgttgtca

SEQ ID NO: 114545 - DNA, 20 bp, Artificial Sequence
  MKO10114545_B_Scara5
  gRNA
cccgcccgccgtttgtgaca

SEQ ID NO: 114546 - DNA, 20 bp, Artificial Sequence
  MKO10114546_B_Scara5
  gRNA
tcagggccaccgggacccaa

SEQ ID NO: 114547 - DNA, 20 bp, Artificial Sequence
  MKO10114547_B_Scarb1
  gRNA
ccaggggggctcgatattga

SEQ ID NO: 114548 - DNA, 20 bp, Artificial Sequence
  MKO10114548_B_Scarb1
  gRNA
caacgacaccgtgtccttcg

SEQ ID NO: 114549 - DNA, 20 bp, Artificial Sequence
  MKO10114549_B_Scarb1
  gRNA
ttccagcctgacaagtcgca

SEQ ID NO: 114550 - DNA, 20 bp, Artificial Sequence
  MKO10114550_B_Scarb2
  gRNA
gtttagggagctccggaaca

SEQ ID NO: 114551 - DNA, 20 bp, Artificial Sequence
  MKO10114551_B_Scarb2
  gRNA
gggactcacctgtaggtgta

SEQ ID NO: 114552 - DNA, 20 bp, Artificial Sequence
  MKO10114552_B_Scarb2
  gRNA
aggtagagggggcttctccc

SEQ ID NO: 114553 - DNA, 20 bp, Artificial Sequence
  MKO10114553_B_Scarf1
  gRNA
gctccccaagccggcagcgg

SEQ ID NO: 114554 - DNA, 20 bp, Artificial Sequence
  MKO10114554_B_Scarf1
  gRNA
atccaggtttacaccgacag

SEQ ID NO: 114555 - DNA, 20 bp, Artificial Sequence
  MKO10114555_B_Scarf1
  gRNA
gcgtgaagccgggcctctgt

SEQ ID NO: 114556 - DNA, 20 bp, Artificial Sequence
  MKO10114556_B_Scarf2
  gRNA
ggcgaatgccgctgccgaca

SEQ ID NO: 114557 - DNA, 20 bp, Artificial Sequence
  MKO10114557_B_Scarf2
  gRNA
cgctgcccaccctgccgcga

SEQ ID NO: 114558 - DNA, 20 bp, Artificial Sequence
  MKO10114558_B_Scarf2
  gRNA
tcctttacagcggtgtgcga

SEQ ID NO: 114559 - DNA, 20 bp, Artificial Sequence
  MKO10114559_B_Sccpdh
  gRNA
aagcttgtcctcaactgcgt

SEQ ID NO: 114560 - DNA, 20 bp, Artificial Sequence
  MKO10114560_B_Sccpdh
  gRNA
acaagttgtattgacatctg

SEQ ID NO: 114561 - DNA, 20 bp, Artificial Sequence
  MKO10114561_B_Sccpdh
  gRNA
agcttcctgacaataaatac

SEQ ID NO: 114562 - DNA, 20 bp, Artificial Sequence
  MKO10114562_B_Scd1
  gRNA
gcgctgctcaccgaagaggc

SEQ ID NO: 114563 - DNA, 20 bp, Artificial Sequence
  MKO10114563_B_Scd1
  gRNA
ctactacatgaccagcgctc

SEQ ID NO: 114564 - DNA, 20 bp, Artificial Sequence
  MKO10114564_B_Scd1
  gRNA
ggctgtgatgcccagagcgc

SEQ ID NO: 114565 - DNA, 20 bp, Artificial Sequence
  MKO10114565_B_Scd2
  gRNA
tctatatgaccccacctatc

SEQ ID NO: 114566 - DNA, 20 bp, Artificial Sequence
  MKO10114566_B_Scd2
  gRNA
gtgctgctcaccgaagagac

SEQ ID NO: 114567 - DNA, 20 bp, Artificial Sequence
  MKO10114567_B_Scd2
  gRNA
cagccggggctcatcgcctg

SEQ ID NO: 114568 - DNA, 20 bp, Artificial Sequence
  MKO10114568_B_Scd3
  gRNA
ggcgtgccttgtacgttctg

SEQ ID NO: 114569 - DNA, 20 bp, Artificial Sequence
  MKO10114569_B_Scd3
  gRNA
accatcacagcgcctccctc

SEQ ID NO: 114570 - DNA, 20 bp, Artificial Sequence
  MKO10114570_B_Scd3
  gRNA
caatgatgaggaagatccgc

SEQ ID NO: 114571 - DNA, 20 bp, Artificial Sequence
  MKO10114571_B_Scd4
  gRNA
ttagaagcacagcataccgc

SEQ ID NO: 114572 - DNA, 20 bp, Artificial Sequence
  MKO10114572_B_Scd4
  gRNA
gacaggagtattctacaacg

SEQ ID NO: 114573 - DNA, 20 bp, Artificial Sequence
  MKO10114573_B_Scd4
  gRNA
ccggatatcttctgcctgga

SEQ ID NO: 114574 - DNA, 20 bp, Artificial Sequence
  MKO10114574_B_Scel
  gRNA
tgacagatctgaagagcgcc

SEQ ID NO: 114575 - DNA, 20 bp, Artificial Sequence
  MKO10114575_B_Scel
  gRNA
gcatgtcctcagatctgtac

SEQ ID NO: 114576 - DNA, 20 bp, Artificial Sequence
  MKO10114576_B_Scel
  gRNA
ttcaggacgtgaacaaaaga

SEQ ID NO: 114577 - DNA, 20 bp, Artificial Sequence
  MKO10114577_B_Scfd1
  gRNA
tgcgatttcaagaagtaaac

SEQ ID NO: 114578 - DNA, 20 bp, Artificial Sequence
  MKO10114578_B_Scfd1
  gRNA
cctcatgttaaaaacagtac

SEQ ID NO: 114579 - DNA, 20 bp, Artificial Sequence
  MKO10114579_B_Scfd1
  gRNA
aaatattgacagactgtgcc

SEQ ID NO: 114580 - DNA, 20 bp, Artificial Sequence
  MKO10114580_B_Scfd2
  gRNA
acgagaggagtgtttcgccg

SEQ ID NO: 114581 - DNA, 20 bp, Artificial Sequence
  MKO10114581_B_Scfd2
  gRNA
cctgcccatcaagatgagta

SEQ ID NO: 114582 - DNA, 20 bp, Artificial Sequence
  MKO10114582_B_Scfd2
  gRNA
ggaagttcggagacatctag

SEQ ID NO: 114583 - DNA, 20 bp, Artificial Sequence
  MKO10114583_B_Scg2
  gRNA
gcctctaccataccacgacc

SEQ ID NO: 114584 - DNA, 20 bp, Artificial Sequence
  MKO10114584_B_Scg2
  gRNA
agaagaagagcagctcgagc

SEQ ID NO: 114585 - DNA, 20 bp, Artificial Sequence
  MKO10114585_B_Scg2
  gRNA
ccttggtagggattgtagtc

SEQ ID NO: 114586 - DNA, 20 bp, Artificial Sequence
  MKO10114586_B_Scg3
  gRNA
atcaaacggggggcttctta

SEQ ID NO: 114587 - DNA, 20 bp, Artificial Sequence
  MKO10114587_B_Scg3
  gRNA
cacttaattctctattatgc

SEQ ID NO: 114588 - DNA, 20 bp, Artificial Sequence
  MKO10114588_B_Scg3
  gRNA
attaaaaaggcattcccttc

SEQ ID NO: 114589 - DNA, 20 bp, Artificial Sequence
  MKO10114589_B_Scg5
  gRNA
agtcaactctgccactatgt

SEQ ID NO: 114590 - DNA, 20 bp, Artificial Sequence
  MKO10114590_B_Scg5
  gRNA
caacctctttccttgtagat

SEQ ID NO: 114591 - DNA, 20 bp, Artificial Sequence
  MKO10114591_B_Scg5
  gRNA
agtcatgttctggatcaaaa

SEQ ID NO: 114592 - DNA, 20 bp, Artificial Sequence
  MKO10114592_B_Scgb1a1
  gRNA
cttaaatcttgcttacacag

SEQ ID NO: 114593 - DNA, 20 bp, Artificial Sequence
  MKO10114593_B_Scgb1a1
  gRNA
ctgtccatctgctgcagctc

SEQ ID NO: 114594 - DNA, 20 bp, Artificial Sequence
  MKO10114594_B_Scgb1a1
  gRNA
ataccctcccacaagagacc

SEQ ID NO: 114595 - DNA, 20 bp, Artificial Sequence
  MKO10114595_B_Scgb1b19
  gRNA
accattatcatgaagcttgc

SEQ ID NO: 114596 - DNA, 20 bp, Artificial Sequence
  MKO10114596_B_Scgb1b19
  gRNA
agttgtagccatcaacatag

SEQ ID NO: 114597 - DNA, 20 bp, Artificial Sequence
  MKO10114597_B_Scgb1b19
  gRNA
gccctgctcctcctgacttc

SEQ ID NO: 114598 - DNA, 20 bp, Artificial Sequence
  MKO10114598_B_Scgb1b20
  gRNA
tatcttgtcttcctctgtca

SEQ ID NO: 114599 - DNA, 20 bp, Artificial Sequence
  MKO10114599_B_Scgb1b20
  gRNA
catttgcccagctataaaag

SEQ ID NO: 114600 - DNA, 20 bp, Artificial Sequence
  MKO10114600_B_Scgb1b20
  gRNA
accattatcatgaagcttgc

SEQ ID NO: 114601 - DNA, 20 bp, Artificial Sequence
  MKO10114601_B_Scgb1b24
  gRNA
gctgccctgctcctgcattc

SEQ ID NO: 114602 - DNA, 20 bp, Artificial Sequence
  MKO10114602_B_Scgb1b24
  gRNA
caaagacgatcctgaaatac

SEQ ID NO: 114603 - DNA, 20 bp, Artificial Sequence
  MKO10114603_B_Scgb1b24
  gRNA
catttgcccagctataaaac

SEQ ID NO: 114604 - DNA, 20 bp, Artificial Sequence
  MKO10114604_B_Scgb1b27
  gRNA
gagagcaccagtgagcttca

SEQ ID NO: 114605 - DNA, 20 bp, Artificial Sequence
  MKO10114605_B_Scgb1b27
  gRNA
tgcctgtgccttgtcttcct

SEQ ID NO: 114606 - DNA, 20 bp, Artificial Sequence
  MKO10114606_B_Scgb1b27
  gRNA
gatgtacccatcaacatgtc

SEQ ID NO: 114607 - DNA, 20 bp, Artificial Sequence
  MKO10114607_B_Scgb1b29
  gRNA
catttgcccagctataaaag

SEQ ID NO: 114608 - DNA, 20 bp, Artificial Sequence
  MKO10114608_B_Scgb1b29
  gRNA
agttgtagccatcaacatag

SEQ ID NO: 114609 - DNA, 20 bp, Artificial Sequence
  MKO10114609_B_Scgb1b29
  gRNA
gccctgctcctcctgacttc

SEQ ID NO: 114610 - DNA, 20 bp, Artificial Sequence
  MKO10114610_B_Scgb1b2
  gRNA
aaaattaccatgaagctcac

SEQ ID NO: 114611 - DNA, 20 bp, Artificial Sequence
  MKO10114611_B_Scgb1b2
  gRNA
agatgtagccatcaacataa

SEQ ID NO: 114612 - DNA, 20 bp, Artificial Sequence
  MKO10114612_B_Scgb1b2
  gRNA
acataattaacatactcttc

SEQ ID NO: 114613 - DNA, 20 bp, Artificial Sequence
  MKO10114613_B_Scgb1b30
  gRNA
tctttgcagaataaagtaac

SEQ ID NO: 114614 - DNA, 20 bp, Artificial Sequence
  MKO10114614_B_Scgb1b30
  gRNA
accattaccatgaagctaac

SEQ ID NO: 114615 - DNA, 20 bp, Artificial Sequence
  MKO10114615_B_Scgb1b30
  gRNA
gagagcaccagttagcttca

SEQ ID NO: 114616 - DNA, 20 bp, Artificial Sequence
  MKO10114616_B_Scgb1b3
  gRNA
gtactcaacatactcttctg

SEQ ID NO: 114617 - DNA, 20 bp, Artificial Sequence
  MKO10114617_B_Scgb1b3
  gRNA
agttgtagccatcaacatag

SEQ ID NO: 114618 - DNA, 20 bp, Artificial Sequence
  MKO10114618_B_Scgb1b3
  gRNA
acccacctccccctgaagtc

SEQ ID NO: 114619 - DNA, 20 bp, Artificial Sequence
  MKO10114619_B_Scgb1b7
  gRNA
catttgcccagctataaaag

SEQ ID NO: 114620 - DNA, 20 bp, Artificial Sequence
  MKO10114620_B_Scgb1b7
  gRNA
agttgtagccatcaacatag

SEQ ID NO: 114621 - DNA, 20 bp, Artificial Sequence
  MKO10114621_B_Scgb1b7
  gRNA
gccctgctcctcctgacttc

SEQ ID NO: 114622 - DNA, 20 bp, Artificial Sequence
  MKO10114622_B_Scgb1c1
  gRNA
acttaccacagacgcagagc

SEQ ID NO: 114623 - DNA, 20 bp, Artificial Sequence
  MKO10114623_B_Scgb1c1
  gRNA
gcaagtgctagatgctcaag

SEQ ID NO: 114624 - DNA, 20 bp, Artificial Sequence
  MKO10114624_B_Scgb1c1
  gRNA
accagttgctccttatgcac

SEQ ID NO: 114625 - DNA, 20 bp, Artificial Sequence
  MKO10114625_B_Scgb2b12
  gRNA
cagaagaagtatccccttca

SEQ ID NO: 114626 - DNA, 20 bp, Artificial Sequence
  MKO10114626_B_Scgb2b12
  gRNA
gaaggggatacttcttctgc

SEQ ID NO: 114627 - DNA, 20 bp, Artificial Sequence
  MKO10114627_B_Scgb2b12
  gRNA
tggtcgccagcccagaatgc

SEQ ID NO: 114628 - DNA, 20 bp, Artificial Sequence
  MKO10114628_B_Scgb2b15
  gRNA
ctgcagtagcattgaatgtc

SEQ ID NO: 114629 - DNA, 20 bp, Artificial Sequence
  MKO10114629_B_Scgb2b15
  gRNA
ccatattagactatatttcc

SEQ ID NO: 114630 - DNA, 20 bp, Artificial Sequence
  MKO10114630_B_Scgb2b15
  gRNA
catctactctcctaatagcc

SEQ ID NO: 114631 - DNA, 20 bp, Artificial Sequence
  MKO10114631_B_Scgb2b17
  gRNA
ctgcagtagcattgaatgtc

SEQ ID NO: 114632 - DNA, 20 bp, Artificial Sequence
  MKO10114632_B_Scgb2b17
  gRNA
ccatattagactatatttcc

SEQ ID NO: 114633 - DNA, 20 bp, Artificial Sequence
  MKO10114633_B_Scgb2b17
  gRNA
catctactctcctaatagcc

SEQ ID NO: 114634 - DNA, 20 bp, Artificial Sequence
  MKO10114634_B_Scgb2b19
  gRNA
cagaagaagtgtccccttca

SEQ ID NO: 114635 - DNA, 20 bp, Artificial Sequence
  MKO10114635_B_Scgb2b19
  gRNA
tggtcgccagcccagaatgc

SEQ ID NO: 114636 - DNA, 20 bp, Artificial Sequence
  MKO10114636_B_Scgb2b19
  gRNA
tctaagagactgaatgatga

SEQ ID NO: 114637 - DNA, 20 bp, Artificial Sequence
  MKO10114637_B_Scgb2b20
  gRNA
cagaagaagtgtccccttca

SEQ ID NO: 114638 - DNA, 20 bp, Artificial Sequence
  MKO10114638_B_Scgb2b20
  gRNA
cctgaatgcctgtcatacta

SEQ ID NO: 114639 - DNA, 20 bp, Artificial Sequence
  MKO10114639_B_Scgb2b20
  gRNA
catctattctcctaatagct

SEQ ID NO: 114640 - DNA, 20 bp, Artificial Sequence
  MKO10114640_B_Scgb2b24
  gRNA
gaggacattaccaaaatttg

SEQ ID NO: 114641 - DNA, 20 bp, Artificial Sequence
  MKO10114641_B_Scgb2b24
  gRNA
cagctctccaatcatcagca

SEQ ID NO: 114642 - DNA, 20 bp, Artificial Sequence
  MKO10114642_B_Scgb2b24
  gRNA
cttgctgatgattggagagc

SEQ ID NO: 114643 - DNA, 20 bp, Artificial Sequence
  MKO10114643_B_Scgb2b26
  gRNA
acttctaatggatatttgac

SEQ ID NO: 114644 - DNA, 20 bp, Artificial Sequence
  MKO10114644_B_Scgb2b26
  gRNA
cttgctggtgattggagagc

SEQ ID NO: 114645 - DNA, 20 bp, Artificial Sequence
  MKO10114645_B_Scgb2b26
  gRNA
cagctctccaatcaccagca

SEQ ID NO: 114646 - DNA, 20 bp, Artificial Sequence
  MKO10114646_B_Scgb2b27
  gRNA
cgaagattctgtaaacaaaa

SEQ ID NO: 114647 - DNA, 20 bp, Artificial Sequence
  MKO10114647_B_Scgb2b27
  gRNA
gaaggggacacttcttctgc

SEQ ID NO: 114648 - DNA, 20 bp, Artificial Sequence
  MKO10114648_B_Scgb2b27
  gRNA
cagctctccagtcaccagca

SEQ ID NO: 114649 - DNA, 20 bp, Artificial Sequence
  MKO10114649_B_Scgb2b2
  gRNA
tactcttcagctcagaatgc

SEQ ID NO: 114650 - DNA, 20 bp, Artificial Sequence
  MKO10114650_B_Scgb2b2
  gRNA
cagctctccagtcaccagca

SEQ ID NO: 114651 - DNA, 20 bp, Artificial Sequence
  MKO10114651_B_Scgb2b2
  gRNA
gaaggggacacttcttctgc

SEQ ID NO: 114652 - DNA, 20 bp, Artificial Sequence
  MKO10114652_B_Scgb2b3
  gRNA
taagtgtgattaccaagaaa

SEQ ID NO: 114653 - DNA, 20 bp, Artificial Sequence
  MKO10114653_B_Scgb2b3
  gRNA
taacttctacatccatttct

SEQ ID NO: 114654 - DNA, 20 bp, Artificial Sequence
  MKO10114654_B_Scgb2b3
  gRNA
ttcctggtgattggagagct

SEQ ID NO: 114655 - DNA, 20 bp, Artificial Sequence
  MKO10114655_B_Scgb2b7
  gRNA
cagaagaagtgtccccttca

SEQ ID NO: 114656 - DNA, 20 bp, Artificial Sequence
  MKO10114656_B_Scgb2b7
  gRNA
cctgaatgcctgtcatacta

SEQ ID NO: 114657 - DNA, 20 bp, Artificial Sequence
  MKO10114657_B_Scgb2b7
  gRNA
catctattctcctaatagct

SEQ ID NO: 114658 - DNA, 20 bp, Artificial Sequence
  MKO10114658_B_Scgb3a1
  gRNA
taatgtccccacaatcagca

SEQ ID NO: 114659 - DNA, 20 bp, Artificial Sequence
  MKO10114659_B_Scgb3a1
  gRNA
cagggggtcctgacaatgtt

SEQ ID NO: 114660 - DNA, 20 bp, Artificial Sequence
  MKO10114660_B_Scgb3a1
  gRNA
cacctttctagtgctctgtg

SEQ ID NO: 114661 - DNA, 20 bp, Artificial Sequence
  MKO10114661_B_Scgb3a2
  gRNA
atagataccagcttcatagc

SEQ ID NO: 114662 - DNA, 20 bp, Artificial Sequence
  MKO10114662_B_Scgb3a2
  gRNA
aaagaaggatttgctcactc

SEQ ID NO: 114663 - DNA, 20 bp, Artificial Sequence
  MKO10114663_B_Scgb3a2
  gRNA
atctttctgctggtgaccat

SEQ ID NO: 114664 - DNA, 20 bp, Artificial Sequence
  MKO10114664_B_Scgn
  gRNA
gagtttccaggcgaaagaac

SEQ ID NO: 114665 - DNA, 20 bp, Artificial Sequence
  MKO10114665_B_Scgn
  gRNA
atcttcagataagaacatac

SEQ ID NO: 114666 - DNA, 20 bp, Artificial Sequence
  MKO10114666_B_Scgn
  gRNA
tgccagcaaatgatcaaaga

SEQ ID NO: 114667 - DNA, 20 bp, Artificial Sequence
  MKO10114667_B_Schip1
  gRNA
gctgcttacaagatcagcga

SEQ ID NO: 114668 - DNA, 20 bp, Artificial Sequence
  MKO10114668_B_Schip1
  gRNA
ctcggaagcttctttgacga

SEQ ID NO: 114669 - DNA, 20 bp, Artificial Sequence
  MKO10114669_B_Schip1
  gRNA
cgatgcagatgacagtaaga

SEQ ID NO: 114670 - DNA, 20 bp, Artificial Sequence
  MKO10114670_B_Scimp
  gRNA
ctgtacttacctaggtctcc

SEQ ID NO: 114671 - DNA, 20 bp, Artificial Sequence
  MKO10114671_B_Scimp
  gRNA
ctcccacagcaatgagttgg

SEQ ID NO: 114672 - DNA, 20 bp, Artificial Sequence
  MKO10114672_B_Scimp
  gRNA
gccacctgcagacacagtac

SEQ ID NO: 114673 - DNA, 20 bp, Artificial Sequence
  MKO10114673_B_Scin
  gRNA
gaaaagacttctgcacgtga

SEQ ID NO: 114674 - DNA, 20 bp, Artificial Sequence
  MKO10114674_B_Scin
  gRNA
cagacgctcatatttgttgc

SEQ ID NO: 114675 - DNA, 20 bp, Artificial Sequence
  MKO10114675_B_Scin
  gRNA
ttggcatccgggacaatgag

SEQ ID NO: 114676 - DNA, 20 bp, Artificial Sequence
  MKO10114676_B_Sclt1
  gRNA
tttcagagacccaactatgc

SEQ ID NO: 114677 - DNA, 20 bp, Artificial Sequence
  MKO10114677_B_Sclt1
  gRNA
tagactcaataaatgagcaa

SEQ ID NO: 114678 - DNA, 20 bp, Artificial Sequence
  MKO10114678_B_Sclt1
  gRNA
ttatagaacagcatgtccaa

SEQ ID NO: 114679 - DNA, 20 bp, Artificial Sequence
  MKO10114679_B_Scly
  gRNA
gatgataggtggaaagcccc

SEQ ID NO: 114680 - DNA, 20 bp, Artificial Sequence
  MKO10114680_B_Scly
  gRNA
tctagagcccgaagtcatcc

SEQ ID NO: 114681 - DNA, 20 bp, Artificial Sequence
  MKO10114681_B_Scly
  gRNA
ctcttccaggaaggtctata

SEQ ID NO: 114682 - DNA, 20 bp, Artificial Sequence
  MKO10114682_B_Scmh1
  gRNA
gcctgtccattgcttcaagc

SEQ ID NO: 114683 - DNA, 20 bp, Artificial Sequence
  MKO10114683_B_Scmh1
  gRNA
ttcggctgaatgcctcctct

SEQ ID NO: 114684 - DNA, 20 bp, Artificial Sequence
  MKO10114684_B_Scmh1
  gRNA
gaccttccctgctccatcat

SEQ ID NO: 114685 - DNA, 20 bp, Artificial Sequence
  MKO10114685_B_Scml2
  gRNA
tagtacacgtagtaagaaca

SEQ ID NO: 114686 - DNA, 20 bp, Artificial Sequence
  MKO10114686_B_Scml2
  gRNA
ggagatgtattacagccacc

SEQ ID NO: 114687 - DNA, 20 bp, Artificial Sequence
  MKO10114687_B_Scml2
  gRNA
ggagtggagcatttgattat

SEQ ID NO: 114688 - DNA, 20 bp, Artificial Sequence
  MKO10114688_B_Scml4
  gRNA
agggttggtgcgggaaccac

SEQ ID NO: 114689 - DNA, 20 bp, Artificial Sequence
  MKO10114689_B_Scml4
  gRNA
cgatgctcccgggaaaaggc

SEQ ID NO: 114690 - DNA, 20 bp, Artificial Sequence
  MKO10114690_B_Scml4
  gRNA
aggtgacgacgaacctccag

SEQ ID NO: 114691 - DNA, 20 bp, Artificial Sequence
  MKO10114691_B_Scn10a
  gRNA
cactgttgtttacaccttcg

SEQ ID NO: 114692 - DNA, 20 bp, Artificial Sequence
  MKO10114692_B_Scn10a
  gRNA
gttactcactcgagtttctc

SEQ ID NO: 114693 - DNA, 20 bp, Artificial Sequence
  MKO10114693_B_Scn10a
  gRNA
gttctagacattcatagtgt

SEQ ID NO: 114694 - DNA, 20 bp, Artificial Sequence
  MKO10114694_B_Scn11a
  gRNA
cactcgggaatgttactgct

SEQ ID NO: 114695 - DNA, 20 bp, Artificial Sequence
  MKO10114695_B_Scn11a
  gRNA
gatcatcaactgtatgttca

SEQ ID NO: 114696 - DNA, 20 bp, Artificial Sequence
  MKO10114696_B_Scn11a
  gRNA
tttcctacctccgagatcct

SEQ ID NO: 114697 - DNA, 20 bp, Artificial Sequence
  MKO10114697_B_Scn1a
  gRNA
gtttctaggtacaccttcac

SEQ ID NO: 114698 - DNA, 20 bp, Artificial Sequence
  MKO10114698_B_Scn1a
  gRNA
aaaactatttcagtcattcc

SEQ ID NO: 114699 - DNA, 20 bp, Artificial Sequence
  MKO10114699_B_Scn1a
  gRNA
tgaagggtgttaaaatgtac

SEQ ID NO: 114700 - DNA, 20 bp, Artificial Sequence
  MKO10114700_B_Scn1b
  gRNA
gcacctcattctcatagcgt

SEQ ID NO: 114701 - DNA, 20 bp, Artificial Sequence
  MKO10114701_B_Scn1b
  gRNA
catgatgtacgtgctcattg

SEQ ID NO: 114702 - DNA, 20 bp, Artificial Sequence
  MKO10114702_B_Scn1b
  gRNA
accagcgctattcagccacc

SEQ ID NO: 114703 - DNA, 20 bp, Artificial Sequence
  MKO10114703_B_Scn2a1
  gRNA
tgtgaaatccagccagttcc

SEQ ID NO: 114704 - DNA, 20 bp, Artificial Sequence
  MKO10114704_B_Scn2a1
  gRNA
tgaagggagttaaaatgtac

SEQ ID NO: 114705 - DNA, 20 bp, Artificial Sequence
  MKO10114705_B_Scn2a1
  gRNA
aaaattagctattaagattt

SEQ ID NO: 114706 - DNA, 20 bp, Artificial Sequence
  MKO10114706_B_Scn2b
  gRNA
taatgatcttcattcggaac

SEQ ID NO: 114707 - DNA, 20 bp, Artificial Sequence
  MKO10114707_B_Scn2b
  gRNA
ctccacggtggcggtcatcg

SEQ ID NO: 114708 - DNA, 20 bp, Artificial Sequence
  MKO10114708_B_Scn2b
  gRNA
gtgacttccatgctccgccc

SEQ ID NO: 114709 - DNA, 20 bp, Artificial Sequence
  MKO10114709_B_Scn3a
  gRNA
tcacatttcttcgtgaccca

SEQ ID NO: 114710 - DNA, 20 bp, Artificial Sequence
  MKO10114710_B_Scn3a
  gRNA
tctacattcttcgtccagtc

SEQ ID NO: 114711 - DNA, 20 bp, Artificial Sequence
  MKO10114711_B_Scn3a
  gRNA
tagtggagttaaaatataca

SEQ ID NO: 114712 - DNA, 20 bp, Artificial Sequence
  MKO10114712_B_Scn3b
  gRNA
catcatgatttccgagacca

SEQ ID NO: 114713 - DNA, 20 bp, Artificial Sequence
  MKO10114713_B_Scn3b
  gRNA
taccctcttcagtgactcgc

SEQ ID NO: 114714 - DNA, 20 bp, Artificial Sequence
  MKO10114714_B_Scn3b
  gRNA
gggagaagacttcacctccg

SEQ ID NO: 114715 - DNA, 20 bp, Artificial Sequence
  MKO10114715_B_Scn4a
  gRNA
gcgggccctgaaaaccatca

SEQ ID NO: 114716 - DNA, 20 bp, Artificial Sequence
  MKO10114716_B_Scn4a
  gRNA
tcacattcctccgagacccc

SEQ ID NO: 114717 - DNA, 20 bp, Artificial Sequence
  MKO10114717_B_Scn4a
  gRNA
gcaccttgatagccacccgc

SEQ ID NO: 114718 - DNA, 20 bp, Artificial Sequence
  MKO10114718_B_Scn4b
  gRNA
cacggtgactctcatcatcc

SEQ ID NO: 114719 - DNA, 20 bp, Artificial Sequence
  MKO10114719_B_Scn4b
  gRNA
tgatgatcgaatcaccctag

SEQ ID NO: 114720 - DNA, 20 bp, Artificial Sequence
  MKO10114720_B_Scn4b
  gRNA
aacacagagaacgggttgcc

SEQ ID NO: 114721 - DNA, 20 bp, Artificial Sequence
  MKO10114721_B_Scn5a
  gRNA
gtgactcccgggtgaaccta

SEQ ID NO: 114722 - DNA, 20 bp, Artificial Sequence
  MKO10114722_B_Scn5a
  gRNA
ttcacagccgctctgcgcac

SEQ ID NO: 114723 - DNA, 20 bp, Artificial Sequence
  MKO10114723_B_Scn5a
  gRNA
ggaggaaggtgaacgcatgc

SEQ ID NO: 114724 - DNA, 20 bp, Artificial Sequence
  MKO10114724_B_Scn7a
  gRNA
ccctgcaggaatactttgct

SEQ ID NO: 114725 - DNA, 20 bp, Artificial Sequence
  MKO10114725_B_Scn7a
  gRNA
gccagttccaaagatcccca

SEQ ID NO: 114726 - DNA, 20 bp, Artificial Sequence
  MKO10114726_B_Scn7a
  gRNA
catttcttaccgtggttcaa

SEQ ID NO: 114727 - DNA, 20 bp, Artificial Sequence
  MKO10114727_B_Scn8a
  gRNA
gccgtctatgcagaaacctc

SEQ ID NO: 114728 - DNA, 20 bp, Artificial Sequence
  MKO10114728_B_Scn8a
  gRNA
taatagctattcttcttatc

SEQ ID NO: 114729 - DNA, 20 bp, Artificial Sequence
  MKO10114729_B_Scn8a
  gRNA
tgttacttactccacattct

SEQ ID NO: 114730 - DNA, 20 bp, Artificial Sequence
  MKO10114730_B_Scn9a
  gRNA
catgattagcatgctgaata

SEQ ID NO: 114731 - DNA, 20 bp, Artificial Sequence
  MKO10114731_B_Scn9a
  gRNA
ccatgagcaaccctccagat

SEQ ID NO: 114732 - DNA, 20 bp, Artificial Sequence
  MKO10114732_B_Scn9a
  gRNA
ttaatagatattcttctgag

SEQ ID NO: 114733 - DNA, 20 bp, Artificial Sequence
  MKO10114733_B_Scnm1
  gRNA
agcatcagtgcctcgtcctc

SEQ ID NO: 114734 - DNA, 20 bp, Artificial Sequence
  MKO10114734_B_Scnm1
  gRNA
ttcaattcgttctgctgtct

SEQ ID NO: 114735 - DNA, 20 bp, Artificial Sequence
  MKO10114735_B_Scnm1
  gRNA
gaagacagaaagcaaaactg

SEQ ID NO: 114736 - DNA, 20 bp, Artificial Sequence
  MKO10114736_B_Scnn1a
  gRNA
ccaccatcatccataaaagc

SEQ ID NO: 114737 - DNA, 20 bp, Artificial Sequence
  MKO10114737_B_Scnn1a
  gRNA
ttctaccagacatactcatc

SEQ ID NO: 114738 - DNA, 20 bp, Artificial Sequence
  MKO10114738_B_Scnn1a
  gRNA
cagggtgatggtgcacggtc

SEQ ID NO: 114739 - DNA, 20 bp, Artificial Sequence
  MKO10114739_B_Scnn1b
  gRNA
aactgagtggtacatcctgc

SEQ ID NO: 114740 - DNA, 20 bp, Artificial Sequence
  MKO10114740_B_Scnn1b
  gRNA
gcaggaactgagacgtctat

SEQ ID NO: 114741 - DNA, 20 bp, Artificial Sequence
  MKO10114741_B_Scnn1b
  gRNA
atgtagcagttgccataatc

SEQ ID NO: 114742 - DNA, 20 bp, Artificial Sequence
  MKO10114742_B_Scnn1g
  gRNA
tccccacgtcttcgatgaaa

SEQ ID NO: 114743 - DNA, 20 bp, Artificial Sequence
  MKO10114743_B_Scnn1g
  gRNA
ctattctgccgaagaactgc

SEQ ID NO: 114744 - DNA, 20 bp, Artificial Sequence
  MKO10114744_B_Scnn1g
  gRNA
atgggatgtcctgtgatgcc

SEQ ID NO: 114745 - DNA, 20 bp, Artificial Sequence
  MKO10114745_B_Sco1
  gRNA
caaaaccgacaaggactacc

SEQ ID NO: 114746 - DNA, 20 bp, Artificial Sequence
  MKO10114746_B_Sco1
  gRNA
gccagtcaaaccaaccaatt

SEQ ID NO: 114747 - DNA, 20 bp, Artificial Sequence
  MKO10114747_B_Sco1
  gRNA
agcattgggaagcctttact

SEQ ID NO: 114748 - DNA, 20 bp, Artificial Sequence
  MKO10114748_B_Sco2
  gRNA
agatcgtagagagtatacgt

SEQ ID NO: 114749 - DNA, 20 bp, Artificial Sequence
  MKO10114749_B_Sco2
  gRNA
tgcatagaaattcccgacac

SEQ ID NO: 114750 - DNA, 20 bp, Artificial Sequence
  MKO10114750_B_Sco2
  gRNA
cctgctgcgaccatagtaat

SEQ ID NO: 114751 - DNA, 20 bp, Artificial Sequence
  MKO10114751_B_Scoc
  gRNA
tctaaccttcaagtgtgtgt

SEQ ID NO: 114752 - DNA, 20 bp, Artificial Sequence
  MKO10114752_B_Scoc
  gRNA
caagatgatgaatgctgaca

SEQ ID NO: 114753 - DNA, 20 bp, Artificial Sequence
  MKO10114753_B_Scoc
  gRNA
tgcaagagtagatgcagtta

SEQ ID NO: 114754 - DNA, 20 bp, Artificial Sequence
  MKO10114754_B_Scp2d1
  gRNA
cgatcccaggtacatgtccc

SEQ ID NO: 114755 - DNA, 20 bp, Artificial Sequence
  MKO10114755_B_Scp2d1
  gRNA
tggaccattgacctcaagaa

SEQ ID NO: 114756 - DNA, 20 bp, Artificial Sequence
  MKO10114756_B_Scp2d1
  gRNA
ctcccacttctttgatgtgt

SEQ ID NO: 114757 - DNA, 20 bp, Artificial Sequence
  MKO10114757_B_Scp2
  gRNA
atagatagccctctgcccac

SEQ ID NO: 114758 - DNA, 20 bp, Artificial Sequence
  MKO10114758_B_Scp2
  gRNA
gtgttctagttcatgaagcc

SEQ ID NO: 114759 - DNA, 20 bp, Artificial Sequence
  MKO10114759_B_Scp2
  gRNA
ctcaagagactatcctgata

SEQ ID NO: 114760 - DNA, 20 bp, Artificial Sequence
  MKO10114760_B_Scpep1
  gRNA
cacaacagatgcctacgcaa

SEQ ID NO: 114761 - DNA, 20 bp, Artificial Sequence
  MKO10114761_B_Scpep1
  gRNA
tttcaggatctgccatcgac

SEQ ID NO: 114762 - DNA, 20 bp, Artificial Sequence
  MKO10114762_B_Scpep1
  gRNA
catcagtgtagaactttaca

SEQ ID NO: 114763 - DNA, 20 bp, Artificial Sequence
  MKO10114763_B_Scrg1
  gRNA
atcccctgcaacaaccactg

SEQ ID NO: 114764 - DNA, 20 bp, Artificial Sequence
  MKO10114764_B_Scrg1
  gRNA
ctttagcaactttctgtagc

SEQ ID NO: 114765 - DNA, 20 bp, Artificial Sequence
  MKO10114765_B_Scrg1
  gRNA
aagtaccacagatttcatca

SEQ ID NO: 114766 - DNA, 20 bp, Artificial Sequence
  MKO10114766_B_Scrib
  gRNA
ctaacacttacctagacagg

SEQ ID NO: 114767 - DNA, 20 bp, Artificial Sequence
  MKO10114767_B_Scrib
  gRNA
tcagtgacaacgagatccag

SEQ ID NO: 114768 - DNA, 20 bp, Artificial Sequence
  MKO10114768_B_Scrib
  gRNA
gagttccagggtcaccagat

SEQ ID NO: 114769 - DNA, 20 bp, Artificial Sequence
  MKO10114769_B_Scrn1
  gRNA
ccgtgtatccactacttcac

SEQ ID NO: 114770 - DNA, 20 bp, Artificial Sequence
  MKO10114770_B_Scrn1
  gRNA
ttcaggcttggcttagaacg

SEQ ID NO: 114771 - DNA, 20 bp, Artificial Sequence
  MKO10114771_B_Scrn1
  gRNA
tctcaatcgaccaagtcccc

SEQ ID NO: 114772 - DNA, 20 bp, Artificial Sequence
  MKO10114772_B_Scrn2
  gRNA
cctccagtgtacctatatcg

SEQ ID NO: 114773 - DNA, 20 bp, Artificial Sequence
  MKO10114773_B_Scrn2
  gRNA
ttggcagcctccatgcgcac

SEQ ID NO: 114774 - DNA, 20 bp, Artificial Sequence
  MKO10114774_B_Scrn2
  gRNA
aggctgccaaggcccgcttc

SEQ ID NO: 114775 - DNA, 20 bp, Artificial Sequence
  MKO10114775_B_Scrn3
  gRNA
ccaaggtggaaactgcgcag

SEQ ID NO: 114776 - DNA, 20 bp, Artificial Sequence
  MKO10114776_B_Scrn3
  gRNA
aggacaacagcatatgtttc

SEQ ID NO: 114777 - DNA, 20 bp, Artificial Sequence
  MKO10114777_B_Scrn3
  gRNA
ttgtccttagtcgcccagct

SEQ ID NO: 114778 - DNA, 20 bp, Artificial Sequence
  MKO10114778_B_Scrt1
  gRNA
ggagtgcgactgcaagataa

SEQ ID NO: 114779 - DNA, 20 bp, Artificial Sequence
  MKO10114779_B_Scrt1
  gRNA
gctagcgccgcccttgaagc

SEQ ID NO: 114780 - DNA, 20 bp, Artificial Sequence
  MKO10114780_B_Scrt1
  gRNA
gcgcgtgccgccccgactag

SEQ ID NO: 114781 - DNA, 20 bp, Artificial Sequence
  MKO10114781_B_Scrt2
  gRNA
gcgggtgccaggcagcacgt

SEQ ID NO: 114782 - DNA, 20 bp, Artificial Sequence
  MKO10114782_B_Scrt2
  gRNA
gcgcgaagctcttgtcgcac

SEQ ID NO: 114783 - DNA, 20 bp, Artificial Sequence
  MKO10114783_B_Scrt2
  gRNA
tcgggcacttgcgcgccagc

SEQ ID NO: 114784 - DNA, 20 bp, Artificial Sequence
  MKO10114784_B_Sctr
  gRNA
gccattcatgttgaccccac

SEQ ID NO: 114785 - DNA, 20 bp, Artificial Sequence
  MKO10114785_B_Sctr
  gRNA
gcctgtggggtcaacatgaa

SEQ ID NO: 114786 - DNA, 20 bp, Artificial Sequence
  MKO10114786_B_Sctr
  gRNA
ctccgaagagaagaaggcgc

SEQ ID NO: 114787 - DNA, 20 bp, Artificial Sequence
  MKO10114787_B_Sct
  gRNA
gaacgatcaacagcagacct

SEQ ID NO: 114788 - DNA, 20 bp, Artificial Sequence
  MKO10114788_B_Sct
  gRNA
ggaaaactcaccagtcctgt

SEQ ID NO: 114789 - DNA, 20 bp, Artificial Sequence
  MKO10114789_B_Sct
  gRNA
gcctggcactgtcctgcaag

SEQ ID NO: 114790 - DNA, 20 bp, Artificial Sequence
  MKO10114790_B_Scube1
  gRNA
acctacgtgtgcagtccttc

SEQ ID NO: 114791 - DNA, 20 bp, Artificial Sequence
  MKO10114791_B_Scube1
  gRNA
ccccacaggagccgtggacg

SEQ ID NO: 114792 - DNA, 20 bp, Artificial Sequence
  MKO10114792_B_Scube1
  gRNA
atctgccgggagacgcccaa

SEQ ID NO: 114793 - DNA, 20 bp, Artificial Sequence
  MKO10114793_B_Scube2
  gRNA
acttgcattcaccgctcaga

SEQ ID NO: 114794 - DNA, 20 bp, Artificial Sequence
  MKO10114794_B_Scube2
  gRNA
gcagcgttgcctgtgaatgc

SEQ ID NO: 114795 - DNA, 20 bp, Artificial Sequence
  MKO10114795_B_Scube2
  gRNA
tacaagtgctcttgcaagcc

SEQ ID NO: 114796 - DNA, 20 bp, Artificial Sequence
  MKO10114796_B_Scube3
  gRNA
attgcctgtgaatgccgccc

SEQ ID NO: 114797 - DNA, 20 bp, Artificial Sequence
  MKO10114797_B_Scube3
  gRNA
tacgagtgccattgcagaga

SEQ ID NO: 114798 - DNA, 20 bp, Artificial Sequence
  MKO10114798_B_Scube3
  gRNA
ccatctgccagaatacccca

SEQ ID NO: 114799 - DNA, 20 bp, Artificial Sequence
  MKO10114799_B_Scx
  gRNA
caaagaccgtgacagaaaga

SEQ ID NO: 114800 - DNA, 20 bp, Artificial Sequence
  MKO10114800_B_Scx
  gRNA
cattcgctgtgtgccgctgc

SEQ ID NO: 114801 - DNA, 20 bp, Artificial Sequence
  MKO10114801_B_Scx
  gRNA
cgctgaacgcagcatggcga

SEQ ID NO: 114802 - DNA, 20 bp, Artificial Sequence
  MKO10114802_B_Scyl1
  gRNA
cccaaaagtacgtcccaacc

SEQ ID NO: 114803 - DNA, 20 bp, Artificial Sequence
  MKO10114803_B_Scyl1
  gRNA
tcatgaagccaccgggtgcc

SEQ ID NO: 114804 - DNA, 20 bp, Artificial Sequence
  MKO10114804_B_Scyl1
  gRNA
ttaccttcccagggttgcgc

SEQ ID NO: 114805 - DNA, 20 bp, Artificial Sequence
  MKO10114805_B_Scyl2
  gRNA
gccagtttagccaatgttct

SEQ ID NO: 114806 - DNA, 20 bp, Artificial Sequence
  MKO10114806_B_Scyl2
  gRNA
atcaagcaacccttctgaac

SEQ ID NO: 114807 - DNA, 20 bp, Artificial Sequence
  MKO10114807_B_Scyl2
  gRNA
agtttataatccttgatgtc

SEQ ID NO: 114808 - DNA, 20 bp, Artificial Sequence
  MKO10114808_B_Scyl3
  gRNA
ctcacctctggcgtggcctg

SEQ ID NO: 114809 - DNA, 20 bp, Artificial Sequence
  MKO10114809_B_Scyl3
  gRNA
atgctgggtctcttactgac

SEQ ID NO: 114810 - DNA, 20 bp, Artificial Sequence
  MKO10114810_B_Scyl3
  gRNA
catcactcactctgtcatga

SEQ ID NO: 114811 - DNA, 20 bp, Artificial Sequence
  MKO10114811_B_Sdad1
  gRNA
ccttccgcaggagcttgtcg

SEQ ID NO: 114812 - DNA, 20 bp, Artificial Sequence
  MKO10114812_B_Sdad1
  gRNA
gctgccacgacaagctcctg

SEQ ID NO: 114813 - DNA, 20 bp, Artificial Sequence
  MKO10114813_B_Sdad1
  gRNA
taacttgaaaatctccatat

SEQ ID NO: 114814 - DNA, 20 bp, Artificial Sequence
  MKO10114814_B_Sdc1
  gRNA
gtgccgccaccctccacacg

SEQ ID NO: 114815 - DNA, 20 bp, Artificial Sequence
  MKO10114815_B_Sdc1
  gRNA
tttctggtaggcaccgccat

SEQ ID NO: 114816 - DNA, 20 bp, Artificial Sequence
  MKO10114816_B_Sdc1
  gRNA
cactccctaggtgtcattgc

SEQ ID NO: 114817 - DNA, 20 bp, Artificial Sequence
  MKO10114817_B_Sdc2
  gRNA
gctttgtgtcttcaacgtca

SEQ ID NO: 114818 - DNA, 20 bp, Artificial Sequence
  MKO10114818_B_Sdc2
  gRNA
ggggaagcagcactagtgag

SEQ ID NO: 114819 - DNA, 20 bp, Artificial Sequence
  MKO10114819_B_Sdc2
  gRNA
ccttgacaatagctccattg

SEQ ID NO: 114820 - DNA, 20 bp, Artificial Sequence
  MKO10114820_B_Sdc3
  gRNA
gtacgtgacgcttgcctgct

SEQ ID NO: 114821 - DNA, 20 bp, Artificial Sequence
  MKO10114821_B_Sdc3
  gRNA
ggccgagctgcccgaatcga

SEQ ID NO: 114822 - DNA, 20 bp, Artificial Sequence
  MKO10114822_B_Sdc3
  gRNA
tttctccacagccgtgatcg

SEQ ID NO: 114823 - DNA, 20 bp, Artificial Sequence
  MKO10114823_B_Sdc4
  gRNA
ctccccgacgacgaagatgc

SEQ ID NO: 114824 - DNA, 20 bp, Artificial Sequence
  MKO10114824_B_Sdc4
  gRNA
tcctactgcagctctgatcg

SEQ ID NO: 114825 - DNA, 20 bp, Artificial Sequence
  MKO10114825_B_Sdc4
  gRNA
ccctgaagtgattgagccct

SEQ ID NO: 114826 - DNA, 20 bp, Artificial Sequence
  MKO10114826_B_Sdcbp2
  gRNA
gaccagatcctgcaaattga

SEQ ID NO: 114827 - DNA, 20 bp, Artificial Sequence
  MKO10114827_B_Sdcbp2
  gRNA
atacctacattgtcactatc

SEQ ID NO: 114828 - DNA, 20 bp, Artificial Sequence
  MKO10114828_B_Sdcbp2
  gRNA
tcgtgggtgaggctctgccc

SEQ ID NO: 114829 - DNA, 20 bp, Artificial Sequence
  MKO10114829_B_Sdcbp
  gRNA
catccaccagaacaaatgct

SEQ ID NO: 114830 - DNA, 20 bp, Artificial Sequence
  MKO10114830_B_Sdcbp
  gRNA
tccagagctctctcaataca

SEQ ID NO: 114831 - DNA, 20 bp, Artificial Sequence
  MKO10114831_B_Sdcbp
  gRNA
cccatgtattgagagagctc

SEQ ID NO: 114832 - DNA, 20 bp, Artificial Sequence
  MKO10114832_B_Sdccag3
  gRNA
cgctgagtgacaccgactcc

SEQ ID NO: 114833 - DNA, 20 bp, Artificial Sequence
  MKO10114833_B_Sdccag3
  gRNA
caccagccgaatttacccaa

SEQ ID NO: 114834 - DNA, 20 bp, Artificial Sequence
  MKO10114834_B_Sdccag3
  gRNA
gatgtacctttgggtaaatt

SEQ ID NO: 114835 - DNA, 20 bp, Artificial Sequence
  MKO10114835_B_Sdccag8
  gRNA
gttgcgtcaacaaacaaata

SEQ ID NO: 114836 - DNA, 20 bp, Artificial Sequence
  MKO10114836_B_Sdccag8
  gRNA
caactggtgaatgcttctat

SEQ ID NO: 114837 - DNA, 20 bp, Artificial Sequence
  MKO10114837_B_Sdccag8
  gRNA
attgagggagcaaacattcc

SEQ ID NO: 114838 - DNA, 20 bp, Artificial Sequence
  MKO10114838_B_Sde2
  gRNA
ctgcctctggtagtcgggac

SEQ ID NO: 114839 - DNA, 20 bp, Artificial Sequence
  MKO10114839_B_Sde2
  gRNA
tcaccagtcccgactaccag

SEQ ID NO: 114840 - DNA, 20 bp, Artificial Sequence
  MKO10114840_B_Sde2
  gRNA
acggcctaacaagtcaaaaa

SEQ ID NO: 114841 - DNA, 20 bp, Artificial Sequence
  MKO10114841_B_Sdf2l1
  gRNA
gtgccaatgctcacaacacg

SEQ ID NO: 114842 - DNA, 20 bp, Artificial Sequence
  MKO10114842_B_Sdf2l1
  gRNA
ctgtggacagtccgatgttc

SEQ ID NO: 114843 - DNA, 20 bp, Artificial Sequence
  MKO10114843_B_Sdf2l1
  gRNA
gcgggatgtggggcgcgagc

SEQ ID NO: 114844 - DNA, 20 bp, Artificial Sequence
  MKO10114844_B_Sdf2
  gRNA
atgggctgcccgcatttgat

SEQ ID NO: 114845 - DNA, 20 bp, Artificial Sequence
  MKO10114845_B_Sdf2
  gRNA
gccttcaccttcttcgccaa

SEQ ID NO: 114846 - DNA, 20 bp, Artificial Sequence
  MKO10114846_B_Sdf2
  gRNA
cgtctgacacacatcaacac

SEQ ID NO: 114847 - DNA, 20 bp, Artificial Sequence
  MKO10114847_B_Sdf4
  gRNA
ctgattgactctaaccatga

SEQ ID NO: 114848 - DNA, 20 bp, Artificial Sequence
  MKO10114848_B_Sdf4
  gRNA
actcgtcctcagtcagcagc

SEQ ID NO: 114849 - DNA, 20 bp, Artificial Sequence
  MKO10114849_B_Sdf4
  gRNA
gccaagacattgatgacaac

SEQ ID NO: 114850 - DNA, 20 bp, Artificial Sequence
  MKO10114850_B_Sdhaf1
  gRNA
tgggtaccttcgtgcgcccg

SEQ ID NO: 114851 - DNA, 20 bp, Artificial Sequence
  MKO10114851_B_Sdhaf1
  gRNA
cgcgggtgcgggccgagttc

SEQ ID NO: 114852 - DNA, 20 bp, Artificial Sequence
  MKO10114852_B_Sdhaf1
  gRNA
atactcgatacgcagcacgt

SEQ ID NO: 114853 - DNA, 20 bp, Artificial Sequence
  MKO10114853_B_Sdhaf2
  gRNA
ttaacgagcctagcaatgac

SEQ ID NO: 114854 - DNA, 20 bp, Artificial Sequence
  MKO10114854_B_Sdhaf2
  gRNA
gagactgcgtgccccagatc

SEQ ID NO: 114855 - DNA, 20 bp, Artificial Sequence
  MKO10114855_B_Sdhaf2
  gRNA
ttgaaatccctttgcctccg

SEQ ID NO: 114856 - DNA, 20 bp, Artificial Sequence
  MKO10114856_B_Sdha
  gRNA
gatttctactcaatacccag

SEQ ID NO: 114857 - DNA, 20 bp, Artificial Sequence
  MKO10114857_B_Sdha
  gRNA
gggaggtatcaatgctgctc

SEQ ID NO: 114858 - DNA, 20 bp, Artificial Sequence
  MKO10114858_B_Sdha
  gRNA
gcaggcttgcgagctgcatt

SEQ ID NO: 114859 - DNA, 20 bp, Artificial Sequence
  MKO10114859_B_Sdhb
  gRNA
atactctggcgtgcacacgc

SEQ ID NO: 114860 - DNA, 20 bp, Artificial Sequence
  MKO10114860_B_Sdhb
  gRNA
tcttgcgccatgaacatcaa

SEQ ID NO: 114861 - DNA, 20 bp, Artificial Sequence
  MKO10114861_B_Sdhb
  gRNA
ttccgaagatcttgtagaga

SEQ ID NO: 114862 - DNA, 20 bp, Artificial Sequence
  MKO10114862_B_Sdhc
  gRNA
tccagagcctcggtggcaaa

SEQ ID NO: 114863 - DNA, 20 bp, Artificial Sequence
  MKO10114863_B_Sdhc
  gRNA
cttacttgtagatagtcaaa

SEQ ID NO: 114864 - DNA, 20 bp, Artificial Sequence
  MKO10114864_B_Sdhc
  gRNA
tgatacaaagctgagcattc

SEQ ID NO: 114865 - DNA, 20 bp, Artificial Sequence
  MKO10114865_B_Sdhd
  gRNA
cagctctcctactccgaagc

SEQ ID NO: 114866 - DNA, 20 bp, Artificial Sequence
  MKO10114866_B_Sdhd
  gRNA
aacactgacaaccctctcac

SEQ ID NO: 114867 - DNA, 20 bp, Artificial Sequence
  MKO10114867_B_Sdhd
  gRNA
catggcggttctcttaaagc

SEQ ID NO: 114868 - DNA, 20 bp, Artificial Sequence
  MKO10114868_B_Sdk1
  gRNA
cgttgcaccgtatttcaaaa

SEQ ID NO: 114869 - DNA, 20 bp, Artificial Sequence
  MKO10114869_B_Sdk1
  gRNA
tctctaaaccacgtcacttg

SEQ ID NO: 114870 - DNA, 20 bp, Artificial Sequence
  MKO10114870_B_Sdk1
  gRNA
gcccccaacctcaagtgacg

SEQ ID NO: 114871 - DNA, 20 bp, Artificial Sequence
  MKO10114871_B_Sdk2
  gRNA
taaccgcctgcacgtagtag

SEQ ID NO: 114872 - DNA, 20 bp, Artificial Sequence
  MKO10114872_B_Sdk2
  gRNA
acaacaatcgggagctgacc

SEQ ID NO: 114873 - DNA, 20 bp, Artificial Sequence
  MKO10114873_B_Sdk2
  gRNA
gtgggatcttgcgtccgtca

SEQ ID NO: 114874 - DNA, 20 bp, Artificial Sequence
  MKO10114874_B_Sdpr
  gRNA
ggccatccgagacaactcgc

SEQ ID NO: 114875 - DNA, 20 bp, Artificial Sequence
  MKO10114875_B_Sdpr
  gRNA
ctgtgaacgaaccctcctcg

SEQ ID NO: 114876 - DNA, 20 bp, Artificial Sequence
  MKO10114876_B_Sdpr
  gRNA
cactctcatagcgcacctgc

SEQ ID NO: 114877 - DNA, 20 bp, Artificial Sequence
  MKO10114877_B_Sdr16c5
  gRNA
gccatgattgctaacaacca

SEQ ID NO: 114878 - DNA, 20 bp, Artificial Sequence
  MKO10114878_B_Sdr16c5
  gRNA
tcctactctgttaccaattc

SEQ ID NO: 114879 - DNA, 20 bp, Artificial Sequence
  MKO10114879_B_Sdr16c5
  gRNA
tggttgttagcaatcatggc

SEQ ID NO: 114880 - DNA, 20 bp, Artificial Sequence
  MKO10114880_B_Sdr16c6
  gRNA
gagagactcggcaaagccaa

SEQ ID NO: 114881 - DNA, 20 bp, Artificial Sequence
  MKO10114881_B_Sdr16c6
  gRNA
gggtaggttaaagaagaagt

SEQ ID NO: 114882 - DNA, 20 bp, Artificial Sequence
  MKO10114882_B_Sdr16c6
  gRNA
caatgcaacatatgcaaact

SEQ ID NO: 114883 - DNA, 20 bp, Artificial Sequence
  MKO10114883_B_Sdr39u1
  gRNA
atatcctcaaccctctgcga

SEQ ID NO: 114884 - DNA, 20 bp, Artificial Sequence
  MKO10114884_B_Sdr39u1
  gRNA
cgaaactgcgcacccacctc

SEQ ID NO: 114885 - DNA, 20 bp, Artificial Sequence
  MKO10114885_B_Sdr39u1
  gRNA
gccctgttgaccttcgcaga

SEQ ID NO: 114886 - DNA, 20 bp, Artificial Sequence
  MKO10114886_B_Sdr42e1
  gRNA
gaggaaaccgtcctcatcac

SEQ ID NO: 114887 - DNA, 20 bp, Artificial Sequence
  MKO10114887_B_Sdr42e1
  gRNA
aagccgtctccacgtcagcg

SEQ ID NO: 114888 - DNA, 20 bp, Artificial Sequence
  MKO10114888_B_Sdr42e1
  gRNA
ccacgtggacaaactcaacc

SEQ ID NO: 114889 - DNA, 20 bp, Artificial Sequence
  MKO10114889_B_Sdr9c7
  gRNA
ccacgccagcgttgttcacc

SEQ ID NO: 114890 - DNA, 20 bp, Artificial Sequence
  MKO10114890_B_Sdr9c7
  gRNA
ggccgtgtggctatattcgg

SEQ ID NO: 114891 - DNA, 20 bp, Artificial Sequence
  MKO10114891_B_Sdr9c7
  gRNA
actcctctccgtagctatcc

SEQ ID NO: 114892 - DNA, 20 bp, Artificial Sequence
  MKO10114892_B_Sdsl
  gRNA
cggggcgcacagtttcaatt

SEQ ID NO: 114893 - DNA, 20 bp, Artificial Sequence
  MKO10114893_B_Sdsl
  gRNA
ggtgccctctgggagcacga

SEQ ID NO: 114894 - DNA, 20 bp, Artificial Sequence
  MKO10114894_B_Sdsl
  gRNA
agccttaccatataagggga

SEQ ID NO: 114895 - DNA, 20 bp, Artificial Sequence
  MKO10114895_B_Sds
  gRNA
ggggaaatgtacacccaacc

SEQ ID NO: 114896 - DNA, 20 bp, Artificial Sequence
  MKO10114896_B_Sds
  gRNA
cacagacagcacgatagccc

SEQ ID NO: 114897 - DNA, 20 bp, Artificial Sequence
  MKO10114897_B_Sds
  gRNA
cctttgatgaccctctcatc

SEQ ID NO: 114898 - DNA, 20 bp, Artificial Sequence
  MKO10114898_B_Sebox
  gRNA
cgatggctgaggtatagata

SEQ ID NO: 114899 - DNA, 20 bp, Artificial Sequence
  MKO10114899_B_Sebox
  gRNA
tcacctggagatgcctccac

SEQ ID NO: 114900 - DNA, 20 bp, Artificial Sequence
  MKO10114900_B_Sebox
  gRNA
cagctccatggccagtcctg

SEQ ID NO: 114901 - DNA, 20 bp, Artificial Sequence
  MKO10114901_B_Sec11a
  gRNA
tctcctcggcactaatgatc

SEQ ID NO: 114902 - DNA, 20 bp, Artificial Sequence
  MKO10114902_B_Sec11a
  gRNA
tacctgagcaccactacaat

SEQ ID NO: 114903 - DNA, 20 bp, Artificial Sequence
  MKO10114903_B_Sec11a
  gRNA
aataatgctgttgatgaccg

SEQ ID NO: 114904 - DNA, 20 bp, Artificial Sequence
  MKO10114904_B_Sec11c
  gRNA
aataatgaagtcgatgatag

SEQ ID NO: 114905 - DNA, 20 bp, Artificial Sequence
  MKO10114905_B_Sec11c
  gRNA
tgctgttcctcacgaatttc

SEQ ID NO: 114906 - DNA, 20 bp, Artificial Sequence
  MKO10114906_B_Sec11c
  gRNA
atggtgaccatgccaacata

SEQ ID NO: 114907 - DNA, 20 bp, Artificial Sequence
  MKO10114907_B_Sec13
  gRNA
tcatgactatggcctgatcc

SEQ ID NO: 114908 - DNA, 20 bp, Artificial Sequence
  MKO10114908_B_Sec13
  gRNA
ccacagtgaactctgtttgc

SEQ ID NO: 114909 - DNA, 20 bp, Artificial Sequence
  MKO10114909_B_Sec13
  gRNA
tacaatcatgtcctcatgag

SEQ ID NO: 114910 - DNA, 20 bp, Artificial Sequence
  MKO10114910_B_Sec14l1
  gRNA
ccgtgtaacagcagtgttcg

SEQ ID NO: 114911 - DNA, 20 bp, Artificial Sequence
  MKO10114911_B_Sec14l1
  gRNA
aagtgcgatctcgagaattc

SEQ ID NO: 114912 - DNA, 20 bp, Artificial Sequence
  MKO10114912_B_Sec14l1
  gRNA
gtgtcactgtccacgaacat

SEQ ID NO: 114913 - DNA, 20 bp, Artificial Sequence
  MKO10114913_B_Sec14l2
  gRNA
cctcacctcggagccatcga

SEQ ID NO: 114914 - DNA, 20 bp, Artificial Sequence
  MKO10114914_B_Sec14l2
  gRNA
atgactacttcctccttcga

SEQ ID NO: 114915 - DNA, 20 bp, Artificial Sequence
  MKO10114915_B_Sec14l2
  gRNA
acattgacaaaatcatcagc

SEQ ID NO: 114916 - DNA, 20 bp, Artificial Sequence
  MKO10114916_B_Sec14l3
  gRNA
acgttcacagtccctcatct

SEQ ID NO: 114917 - DNA, 20 bp, Artificial Sequence
  MKO10114917_B_Sec14l3
  gRNA
tcagttccgagaaaatgtcc

SEQ ID NO: 114918 - DNA, 20 bp, Artificial Sequence
  MKO10114918_B_Sec14l3
  gRNA
tttctgtaggtcaaagttcc

SEQ ID NO: 114919 - DNA, 20 bp, Artificial Sequence
  MKO10114919_B_Sec14l4
  gRNA
ctgtctggctatgactacga

SEQ ID NO: 114920 - DNA, 20 bp, Artificial Sequence
  MKO10114920_B_Sec14l4
  gRNA
cacagactttgatacgcttc

SEQ ID NO: 114921 - DNA, 20 bp, Artificial Sequence
  MKO10114921_B_Sec14l4
  gRNA
acctggaccagatcctgacg

SEQ ID NO: 114922 - DNA, 20 bp, Artificial Sequence
  MKO10114922_B_Sec14l5
  gRNA
ggtggggaagcgcttctcgt

SEQ ID NO: 114923 - DNA, 20 bp, Artificial Sequence
  MKO10114923_B_Sec14l5
  gRNA
tgccccgcggctgctgcgga

SEQ ID NO: 114924 - DNA, 20 bp, Artificial Sequence
  MKO10114924_B_Sec14l5
  gRNA
ctttggctttgaaagcacgt

SEQ ID NO: 114925 - DNA, 20 bp, Artificial Sequence
  MKO10114925_B_Sec16a
  gRNA
atagtgacttgcacgggagc

SEQ ID NO: 114926 - DNA, 20 bp, Artificial Sequence
  MKO10114926_B_Sec16a
  gRNA
gtctgtaacgaggctcatac

SEQ ID NO: 114927 - DNA, 20 bp, Artificial Sequence
  MKO10114927_B_Sec16a
  gRNA
atcctcgcacctgggaccgg

SEQ ID NO: 114928 - DNA, 20 bp, Artificial Sequence
  MKO10114928_B_Sec16b
  gRNA
cttctccagcagcacgagtc

SEQ ID NO: 114929 - DNA, 20 bp, Artificial Sequence
  MKO10114929_B_Sec16b
  gRNA
gtacatgacagctgcccccg

SEQ ID NO: 114930 - DNA, 20 bp, Artificial Sequence
  MKO10114930_B_Sec16b
  gRNA
gtctcggtatggattcttac

SEQ ID NO: 114931 - DNA, 20 bp, Artificial Sequence
  MKO10114931_B_Sec1
  gRNA
agtgatgctcttccggcacc

SEQ ID NO: 114932 - DNA, 20 bp, Artificial Sequence
  MKO10114932_B_Sec1
  gRNA
ccatgccacccgagactgcg

SEQ ID NO: 114933 - DNA, 20 bp, Artificial Sequence
  MKO10114933_B_Sec1
  gRNA
gctcctgtcccacgcagtct

SEQ ID NO: 114934 - DNA, 20 bp, Artificial Sequence
  MKO10114934_B_Sec22a
  gRNA
gagctccacataaaagacta

SEQ ID NO: 114935 - DNA, 20 bp, Artificial Sequence
  MKO10114935_B_Sec22a
  gRNA
gctgatcccagttcacacat

SEQ ID NO: 114936 - DNA, 20 bp, Artificial Sequence
  MKO10114936_B_Sec22a
  gRNA
ctgtagtttcattagctctc

SEQ ID NO: 114937 - DNA, 20 bp, Artificial Sequence
  MKO10114937_B_Sec22b
  gRNA
tctatctaagaaataccgcc

SEQ ID NO: 114938 - DNA, 20 bp, Artificial Sequence
  MKO10114938_B_Sec22b
  gRNA
gtcccctacccgatgtacct

SEQ ID NO: 114939 - DNA, 20 bp, Artificial Sequence
  MKO10114939_B_Sec22b
  gRNA
tctacattgatagccgtgct

SEQ ID NO: 114940 - DNA, 20 bp, Artificial Sequence
  MKO10114940_B_Sec22c
  gRNA
atgaagccggtgacagccct

SEQ ID NO: 114941 - DNA, 20 bp, Artificial Sequence
  MKO10114941_B_Sec22c
  gRNA
tgcacccacctggacgatgc

SEQ ID NO: 114942 - DNA, 20 bp, Artificial Sequence
  MKO10114942_B_Sec22c
  gRNA
tttctaagccactcttcatc

SEQ ID NO: 114943 - DNA, 20 bp, Artificial Sequence
  MKO10114943_B_Sec23a
  gRNA
cccccttacctgcagttgtt

SEQ ID NO: 114944 - DNA, 20 bp, Artificial Sequence
  MKO10114944_B_Sec23a
  gRNA
tcagatatcccagcatatgt

SEQ ID NO: 114945 - DNA, 20 bp, Artificial Sequence
  MKO10114945_B_Sec23a
  gRNA
tagtttccacctacatatgc

SEQ ID NO: 114946 - DNA, 20 bp, Artificial Sequence
  MKO10114946_B_Sec23b
  gRNA
aactggggcatcaattcagc

SEQ ID NO: 114947 - DNA, 20 bp, Artificial Sequence
  MKO10114947_B_Sec23b
  gRNA
ctcctgaggttgagcaggtc

SEQ ID NO: 114948 - DNA, 20 bp, Artificial Sequence
  MKO10114948_B_Sec23b
  gRNA
agccagacctgctcaacctc

SEQ ID NO: 114949 - DNA, 20 bp, Artificial Sequence
  MKO10114949_B_Sec23ip
  gRNA
tctgcaggccgagtataaaa

SEQ ID NO: 114950 - DNA, 20 bp, Artificial Sequence
  MKO10114950_B_Sec23ip
  gRNA
tgtacctttatgaccgcatg

SEQ ID NO: 114951 - DNA, 20 bp, Artificial Sequence
  MKO10114951_B_Sec23ip
  gRNA
gtacagcgtctcacttcagt

SEQ ID NO: 114952 - DNA, 20 bp, Artificial Sequence
  MKO10114952_B_Sec24a
  gRNA
attacgtcaaatgccaataa

SEQ ID NO: 114953 - DNA, 20 bp, Artificial Sequence
  MKO10114953_B_Sec24a
  gRNA
gcgctgttctggtagcctgg

SEQ ID NO: 114954 - DNA, 20 bp, Artificial Sequence
  MKO10114954_B_Sec24a
  gRNA
ccccaaaacaagccgaagtg

SEQ ID NO: 114955 - DNA, 20 bp, Artificial Sequence
  MKO10114955_B_Sec24b
  gRNA
ggatactacggagcttgact

SEQ ID NO: 114956 - DNA, 20 bp, Artificial Sequence
  MKO10114956_B_Sec24b
  gRNA
gtcatcagcttccgatgatg

SEQ ID NO: 114957 - DNA, 20 bp, Artificial Sequence
  MKO10114957_B_Sec24b
  gRNA
tgatgacaagggagtcgctg

SEQ ID NO: 114958 - DNA, 20 bp, Artificial Sequence
  MKO10114958_B_Sec24c
  gRNA
aattatgagagcccataccc

SEQ ID NO: 114959 - DNA, 20 bp, Artificial Sequence
  MKO10114959_B_Sec24c
  gRNA
gagccgtatggaccagaatt

SEQ ID NO: 114960 - DNA, 20 bp, Artificial Sequence
  MKO10114960_B_Sec24c
  gRNA
ttaccatagcccaacccaga

SEQ ID NO: 114961 - DNA, 20 bp, Artificial Sequence
  MKO10114961_B_Sec24d
  gRNA
gggcgcgactcctcagagcc

SEQ ID NO: 114962 - DNA, 20 bp, Artificial Sequence
  MKO10114962_B_Sec24d
  gRNA
ggtgcacagatgtcttaccc

SEQ ID NO: 114963 - DNA, 20 bp, Artificial Sequence
  MKO10114963_B_Sec24d
  gRNA
tgccacactattgacaggtg

SEQ ID NO: 114964 - DNA, 20 bp, Artificial Sequence
  MKO10114964_B_Sec31a
  gRNA
cctcataagatggattccaa

SEQ ID NO: 114965 - DNA, 20 bp, Artificial Sequence
  MKO10114965_B_Sec31a
  gRNA
gctatgcagctgatatcttc

SEQ ID NO: 114966 - DNA, 20 bp, Artificial Sequence
  MKO10114966_B_Sec31a
  gRNA
ctgcacttaccctgttactg

SEQ ID NO: 114967 - DNA, 20 bp, Artificial Sequence
  MKO10114967_B_Sec31b
  gRNA
tcctccaccagcaataaccc

SEQ ID NO: 114968 - DNA, 20 bp, Artificial Sequence
  MKO10114968_B_Sec31b
  gRNA
attcacacagggcaatctcc

SEQ ID NO: 114969 - DNA, 20 bp, Artificial Sequence
  MKO10114969_B_Sec31b
  gRNA
gagcccctcacctgtgactt

SEQ ID NO: 114970 - DNA, 20 bp, Artificial Sequence
  MKO10114970_B_Sec61a1
  gRNA
gtgattctggcctctaacag

SEQ ID NO: 114971 - DNA, 20 bp, Artificial Sequence
  MKO10114971_B_Sec61a1
  gRNA
gggctccattgaagagagct

SEQ ID NO: 114972 - DNA, 20 bp, Artificial Sequence
  MKO10114972_B_Sec61a1
  gRNA
tgccttccagattcagttta

SEQ ID NO: 114973 - DNA, 20 bp, Artificial Sequence
  MKO10114973_B_Sec61a2
  gRNA
gttattcttgcatccaacag

SEQ ID NO: 114974 - DNA, 20 bp, Artificial Sequence
  MKO10114974_B_Sec61a2
  gRNA
tctggtagaactgcacagaa

SEQ ID NO: 114975 - DNA, 20 bp, Artificial Sequence
  MKO10114975_B_Sec61a2
  gRNA
agtatacttactttcctttc

SEQ ID NO: 114976 - DNA, 20 bp, Artificial Sequence
  MKO10114976_B_Sec61b
  gRNA
tacagaaaaaatgccagctg

SEQ ID NO: 114977 - DNA, 20 bp, Artificial Sequence
  MKO10114977_B_Sec61b
  gRNA
cagccgggtccaacgcccag

SEQ ID NO: 114978 - DNA, 20 bp, Artificial Sequence
  MKO10114978_B_Sec61b
  gRNA
agaagactcatcaccagcac

SEQ ID NO: 114979 - DNA, 20 bp, Artificial Sequence
  MKO10114979_B_Sec61g
  gRNA
ttacacaataatgttattaa

SEQ ID NO: 114980 - DNA, 20 bp, Artificial Sequence
  MKO10114980_B_Sec61g
  gRNA
ggatcaggtaatgcagtttg

SEQ ID NO: 114981 - DNA, 20 bp, Artificial Sequence
  MKO10114981_B_Sec61g
  gRNA
agaattccagaagattgcca

SEQ ID NO: 114982 - DNA, 20 bp, Artificial Sequence
  MKO10114982_B_Sec62
  gRNA
acagttgaatcgaagatatt

SEQ ID NO: 114983 - DNA, 20 bp, Artificial Sequence
  MKO10114983_B_Sec62
  gRNA
tgtttgtaggaggaaactcc

SEQ ID NO: 114984 - DNA, 20 bp, Artificial Sequence
  MKO10114984_B_Sec62
  gRNA
agaaaaacttgatcatcatg

SEQ ID NO: 114985 - DNA, 20 bp, Artificial Sequence
  MKO10114985_B_Sec63
  gRNA
tccttatgaagtactaaatt

SEQ ID NO: 114986 - DNA, 20 bp, Artificial Sequence
  MKO10114986_B_Sec63
  gRNA
accacaccttgaggcccatc

SEQ ID NO: 114987 - DNA, 20 bp, Artificial Sequence
  MKO10114987_B_Sec63
  gRNA
cttaaatatcatccagataa

SEQ ID NO: 114988 - DNA, 20 bp, Artificial Sequence
  MKO10114988_B_Secisbp2l
  gRNA
caaacgggtagcaagtaatc

SEQ ID NO: 114989 - DNA, 20 bp, Artificial Sequence
  MKO10114989_B_Secisbp2l
  gRNA
caccgagcgtccaaatcagc

SEQ ID NO: 114990 - DNA, 20 bp, Artificial Sequence
  MKO10114990_B_Secisbp2l
  gRNA
gcgcacgttcatggtcccag

SEQ ID NO: 114991 - DNA, 20 bp, Artificial Sequence
  MKO10114991_B_Secisbp2
  gRNA
tgacaatgcggtgccctgtg

SEQ ID NO: 114992 - DNA, 20 bp, Artificial Sequence
  MKO10114992_B_Secisbp2
  gRNA
caaactgctctcagttcgag

SEQ ID NO: 114993 - DNA, 20 bp, Artificial Sequence
  MKO10114993_B_Secisbp2
  gRNA
cttggctgtagtcgtactgc

SEQ ID NO: 114994 - DNA, 20 bp, Artificial Sequence
  MKO10114994_B_Sectm1a
  gRNA
gtagataaacgtaatgaatc

SEQ ID NO: 114995 - DNA, 20 bp, Artificial Sequence
  MKO10114995_B_Sectm1a
  gRNA
gatgtaaagagcgtagtgtc

SEQ ID NO: 114996 - DNA, 20 bp, Artificial Sequence
  MKO10114996_B_Sectm1a
  gRNA
gtagggatagcaggcactga

SEQ ID NO: 114997 - DNA, 20 bp, Artificial Sequence
  MKO10114997_B_Sectm1b
  gRNA
atcttcaatcaaacgcctcc

SEQ ID NO: 114998 - DNA, 20 bp, Artificial Sequence
  MKO10114998_B_Sectm1b
  gRNA
accgattcctgtgatgatga

SEQ ID NO: 114999 - DNA, 20 bp, Artificial Sequence
  MKO10114999_B_Sectm1b
  gRNA
gcctactctgtaacatcctc

SEQ ID NO: 115000 - DNA, 20 bp, Artificial Sequence
  MKO10115000_B_Seh1l
  gRNA
caacatcagacccatatgtt

SEQ ID NO: 115001 - DNA, 20 bp, Artificial Sequence
  MKO10115001_B_Seh1l
  gRNA
tactataccatctgctgaac

SEQ ID NO: 115002 - DNA, 20 bp, Artificial Sequence
  MKO10115002_B_Seh1l
  gRNA
atcacttcccacagcgatca

SEQ ID NO: 115003 - DNA, 20 bp, Artificial Sequence
  MKO10115003_B_Sel1l2
  gRNA
agaagtgaatgtcaccacac

SEQ ID NO: 115004 - DNA, 20 bp, Artificial Sequence
  MKO10115004_B_Sel1l2
  gRNA
aagaaaagtatcacagatga

SEQ ID NO: 115005 - DNA, 20 bp, Artificial Sequence
  MKO10115005_B_Sel1l2
  gRNA
caacataagttaaaaataaa

SEQ ID NO: 115006 - DNA, 20 bp, Artificial Sequence
  MKO10115006_B_Sel1l3
  gRNA
attcaaatgcatctcgtcaa

SEQ ID NO: 115007 - DNA, 20 bp, Artificial Sequence
  MKO10115007_B_Sel1l3
  gRNA
cattgaacgagatatccagt

SEQ ID NO: 115008 - DNA, 20 bp, Artificial Sequence
  MKO10115008_B_Sel1l3
  gRNA
ttatttactccattattgcg

SEQ ID NO: 115009 - DNA, 20 bp, Artificial Sequence
  MKO10115009_B_Sel1l
  gRNA
agcaactactttgcccgtgg

SEQ ID NO: 115010 - DNA, 20 bp, Artificial Sequence
  MKO10115010_B_Sel1l
  gRNA
agtacttaccttggaatcta

SEQ ID NO: 115011 - DNA, 20 bp, Artificial Sequence
  MKO10115011_B_Sel1l
  gRNA
ccagtcttgactgccattga

SEQ ID NO: 115012 - DNA, 20 bp, Artificial Sequence
  MKO10115012_B_Selenbp1
  gRNA
ggacatgccttgtgcaactt

SEQ ID NO: 115013 - DNA, 20 bp, Artificial Sequence
  MKO10115013_B_Selenbp1
  gRNA
cactgaagccccggattatt

SEQ ID NO: 115014 - DNA, 20 bp, Artificial Sequence
  MKO10115014_B_Selenbp1
  gRNA
catctcctcccgcatctacg

SEQ ID NO: 115015 - DNA, 20 bp, Artificial Sequence
  MKO10115015_B_Selenbp2
  gRNA
caccgaagccccggattatt

SEQ ID NO: 115016 - DNA, 20 bp, Artificial Sequence
  MKO10115016_B_Selenbp2
  gRNA
ggatatgccttgtgcaactt

SEQ ID NO: 115017 - DNA, 20 bp, Artificial Sequence
  MKO10115017_B_Selenbp2
  gRNA
gggcttcggtgcctgtgttc

SEQ ID NO: 115018 - DNA, 20 bp, Artificial Sequence
  MKO10115018_B_Sele
  gRNA
aacattcaccgagttactac

SEQ ID NO: 115019 - DNA, 20 bp, Artificial Sequence
  MKO10115019_B_Sele
  gRNA
aacgtgcatgtcgtgttcca

SEQ ID NO: 115020 - DNA, 20 bp, Artificial Sequence
  MKO10115020_B_Sele
  gRNA
gtcccgctgacagtatgcac

SEQ ID NO: 115021 - DNA, 20 bp, Artificial Sequence
  MKO10115021_B_Selk
  gRNA
caagatgtgaagaaaagaag

SEQ ID NO: 115022 - DNA, 20 bp, Artificial Sequence
  MKO10115022_B_Selk
  gRNA
cttcctcatccaccagccat

SEQ ID NO: 115023 - DNA, 20 bp, Artificial Sequence
  MKO10115023_B_Selk
  gRNA
aggaaaccctccacgaagaa

SEQ ID NO: 115024 - DNA, 20 bp, Artificial Sequence
  MKO10115024_B_Sell
  gRNA
gtgtccagacccacagcttc

SEQ ID NO: 115025 - DNA, 20 bp, Artificial Sequence
  MKO10115025_B_Sell
  gRNA
agtcactcaccttggcagat

SEQ ID NO: 115026 - DNA, 20 bp, Artificial Sequence
  MKO10115026_B_Sell
  gRNA
agtggtccagtgtgagcctt

SEQ ID NO: 115027 - DNA, 20 bp, Artificial Sequence
  MKO10115027_B_Selm
  gRNA
gctcggcttctaccgcaagt

SEQ ID NO: 115028 - DNA, 20 bp, Artificial Sequence
  MKO10115028_B_Selm
  gRNA
tcggcttaacagcacgagtt

SEQ ID NO: 115029 - DNA, 20 bp, Artificial Sequence
  MKO10115029_B_Selm
  gRNA
atactacagttgaatgtcct

SEQ ID NO: 115030 - DNA, 20 bp, Artificial Sequence
  MKO10115030_B_Selo
  gRNA
actatcgactatggaccctt

SEQ ID NO: 115031 - DNA, 20 bp, Artificial Sequence
  MKO10115031_B_Selo
  gRNA
tgtcagtgttgagcacgcca

SEQ ID NO: 115032 - DNA, 20 bp, Artificial Sequence
  MKO10115032_B_Selo
  gRNA
gacacttgtggccaaacttc

SEQ ID NO: 115033 - DNA, 20 bp, Artificial Sequence
  MKO10115033_B_Selplg
  gRNA
tctgtgttatacgtatagtc

SEQ ID NO: 115034 - DNA, 20 bp, Artificial Sequence
  MKO10115034_B_Selplg
  gRNA
cgagatgcagatcatctccg

SEQ ID NO: 115035 - DNA, 20 bp, Artificial Sequence
  MKO10115035_B_Selplg
  gRNA
agttccgcactgggtacatg

SEQ ID NO: 115036 - DNA, 20 bp, Artificial Sequence
  MKO10115036_B_Selp
  gRNA
tggtctcgatgcactcccct

SEQ ID NO: 115037 - DNA, 20 bp, Artificial Sequence
  MKO10115037_B_Selp
  gRNA
aagactccggagtgtgatcc

SEQ ID NO: 115038 - DNA, 20 bp, Artificial Sequence
  MKO10115038_B_Selp
  gRNA
gcctcaccgtattcacactc

SEQ ID NO: 115039 - DNA, 20 bp, Artificial Sequence
  MKO10115039_B_Selrc1
  gRNA
ctaccaatgctaccgcgaga

SEQ ID NO: 115040 - DNA, 20 bp, Artificial Sequence
  MKO10115040_B_Selrc1
  gRNA
acgcactacccaaatgttag

SEQ ID NO: 115041 - DNA, 20 bp, Artificial Sequence
  MKO10115041_B_Selrc1
  gRNA
tggtgacagctgttacaagc

SEQ ID NO: 115042 - DNA, 20 bp, Artificial Sequence
  MKO10115042_B_Selt
  gRNA
gtcttcaaactagtattaat

SEQ ID NO: 115043 - DNA, 20 bp, Artificial Sequence
  MKO10115043_B_Selt
  gRNA
atactagtttgaagactgac

SEQ ID NO: 115044 - DNA, 20 bp, Artificial Sequence
  MKO10115044_B_Selt
  gRNA
ctaggtttatgcatgtatga

SEQ ID NO: 115045 - DNA, 20 bp, Artificial Sequence
  MKO10115045_B_Sema3a
  gRNA
tctctccttgtgtaagatac

SEQ ID NO: 115046 - DNA, 20 bp, Artificial Sequence
  MKO10115046_B_Sema3a
  gRNA
gaacggagtagactatatgt

SEQ ID NO: 115047 - DNA, 20 bp, Artificial Sequence
  MKO10115047_B_Sema3a
  gRNA
tactccgttcttcatccaga

SEQ ID NO: 115048 - DNA, 20 bp, Artificial Sequence
  MKO10115048_B_Sema3b
  gRNA
tcgggctgcctcggtgctgg

SEQ ID NO: 115049 - DNA, 20 bp, Artificial Sequence
  MKO10115049_B_Sema3b
  gRNA
gcaggtccgctccagcctga

SEQ ID NO: 115050 - DNA, 20 bp, Artificial Sequence
  MKO10115050_B_Sema3b
  gRNA
cttcacgaagttcatgcact

SEQ ID NO: 115051 - DNA, 20 bp, Artificial Sequence
  MKO10115051_B_Sema3c
  gRNA
atcgactctaagtgtgaatc

SEQ ID NO: 115052 - DNA, 20 bp, Artificial Sequence
  MKO10115052_B_Sema3c
  gRNA
cgtactcacctgtatgtctg

SEQ ID NO: 115053 - DNA, 20 bp, Artificial Sequence
  MKO10115053_B_Sema3c
  gRNA
atattctgtagtctaactgc

SEQ ID NO: 115054 - DNA, 20 bp, Artificial Sequence
  MKO10115054_B_Sema3d
  gRNA
gcctgctgcaaaagaacgag

SEQ ID NO: 115055 - DNA, 20 bp, Artificial Sequence
  MKO10115055_B_Sema3d
  gRNA
gagaggggcatactgctcct

SEQ ID NO: 115056 - DNA, 20 bp, Artificial Sequence
  MKO10115056_B_Sema3d
  gRNA
tccttctgatgaacccaaaa

SEQ ID NO: 115057 - DNA, 20 bp, Artificial Sequence
  MKO10115057_B_Sema3e
  gRNA
atggtgcccgactctgatga

SEQ ID NO: 115058 - DNA, 20 bp, Artificial Sequence
  MKO10115058_B_Sema3e
  gRNA
gtatcaagaacggctctttg

SEQ ID NO: 115059 - DNA, 20 bp, Artificial Sequence
  MKO10115059_B_Sema3e
  gRNA
tgttgtagtgatgcaaaacc

SEQ ID NO: 115060 - DNA, 20 bp, Artificial Sequence
  MKO10115060_B_Sema3f
  gRNA
ggaccatgaccgcatgtatg

SEQ ID NO: 115061 - DNA, 20 bp, Artificial Sequence
  MKO10115061_B_Sema3f
  gRNA
atgtgcacctatgtgaaccg

SEQ ID NO: 115062 - DNA, 20 bp, Artificial Sequence
  MKO10115062_B_Sema3f
  gRNA
gcaggattacatcttctacc

SEQ ID NO: 115063 - DNA, 20 bp, Artificial Sequence
  MKO10115063_B_Sema3g
  gRNA
aagggtcggctgggctcatg

SEQ ID NO: 115064 - DNA, 20 bp, Artificial Sequence
  MKO10115064_B_Sema3g
  gRNA
cgactcacctcccgggggtc

SEQ ID NO: 115065 - DNA, 20 bp, Artificial Sequence
  MKO10115065_B_Sema3g
  gRNA
gaaggtggaatgtgtccgca

SEQ ID NO: 115066 - DNA, 20 bp, Artificial Sequence
  MKO10115066_B_Sema4a
  gRNA
gttgcccatcttgatagaca

SEQ ID NO: 115067 - DNA, 20 bp, Artificial Sequence
  MKO10115067_B_Sema4a
  gRNA
gagtagcattgtaagagacc

SEQ ID NO: 115068 - DNA, 20 bp, Artificial Sequence
  MKO10115068_B_Sema4a
  gRNA
catgaccttgtctatcaaga

SEQ ID NO: 115069 - DNA, 20 bp, Artificial Sequence
  MKO10115069_B_Sema4b
  gRNA
gctgaaggcggccgtgccac

SEQ ID NO: 115070 - DNA, 20 bp, Artificial Sequence
  MKO10115070_B_Sema4b
  gRNA
ctttactttagcccaagatg

SEQ ID NO: 115071 - DNA, 20 bp, Artificial Sequence
  MKO10115071_B_Sema4b
  gRNA
aacttacaatgtaagcacac

SEQ ID NO: 115072 - DNA, 20 bp, Artificial Sequence
  MKO10115072_B_Sema4c
  gRNA
tttatatgtgggggcccgag

SEQ ID NO: 115073 - DNA, 20 bp, Artificial Sequence
  MKO10115073_B_Sema4c
  gRNA
ccactcacccacaaggagtc

SEQ ID NO: 115074 - DNA, 20 bp, Artificial Sequence
  MKO10115074_B_Sema4c
  gRNA
caatcctcagatctcttggg

SEQ ID NO: 115075 - DNA, 20 bp, Artificial Sequence
  MKO10115075_B_Sema4d
  gRNA
ccatgactgatgtgtagctg

SEQ ID NO: 115076 - DNA, 20 bp, Artificial Sequence
  MKO10115076_B_Sema4d
  gRNA
tttgtcctcactcatcagca

SEQ ID NO: 115077 - DNA, 20 bp, Artificial Sequence
  MKO10115077_B_Sema4d
  gRNA
cttgacatccttcaagtttc

SEQ ID NO: 115078 - DNA, 20 bp, Artificial Sequence
  MKO10115078_B_Sema4f
  gRNA
cattggcaatggcgagaatc

SEQ ID NO: 115079 - DNA, 20 bp, Artificial Sequence
  MKO10115079_B_Sema4f
  gRNA
tgggcaccgagcgggggacg

SEQ ID NO: 115080 - DNA, 20 bp, Artificial Sequence
  MKO10115080_B_Sema4f
  gRNA
cttaccggagatgggcagcg

SEQ ID NO: 115081 - DNA, 20 bp, Artificial Sequence
  MKO10115081_B_Sema4g
  gRNA
catcttgcctactagtttcg

SEQ ID NO: 115082 - DNA, 20 bp, Artificial Sequence
  MKO10115082_B_Sema4g
  gRNA
tttccctcctcgaaactagt

SEQ ID NO: 115083 - DNA, 20 bp, Artificial Sequence
  MKO10115083_B_Sema4g
  gRNA
gtgcccgtgacataagagat

SEQ ID NO: 115084 - DNA, 20 bp, Artificial Sequence
  MKO10115084_B_Sema5a
  gRNA
tacatacgagtgctcttagt

SEQ ID NO: 115085 - DNA, 20 bp, Artificial Sequence
  MKO10115085_B_Sema5a
  gRNA
ttacagcaagggcaaatcga

SEQ ID NO: 115086 - DNA, 20 bp, Artificial Sequence
  MKO10115086_B_Sema5a
  gRNA
gtgtgacgaagccaccaaga

SEQ ID NO: 115087 - DNA, 20 bp, Artificial Sequence
  MKO10115087_B_Sema5b
  gRNA
gtacgagtcctgattgtttc

SEQ ID NO: 115088 - DNA, 20 bp, Artificial Sequence
  MKO10115088_B_Sema5b
  gRNA
taccgcacatgaacaccttc

SEQ ID NO: 115089 - DNA, 20 bp, Artificial Sequence
  MKO10115089_B_Sema5b
  gRNA
cgccaatgtctccctccttc

SEQ ID NO: 115090 - DNA, 20 bp, Artificial Sequence
  MKO10115090_B_Sema6a
  gRNA
gaaccctctacgttgctgct

SEQ ID NO: 115091 - DNA, 20 bp, Artificial Sequence
  MKO10115091_B_Sema6a
  gRNA
ctatatcaacagtataaata

SEQ ID NO: 115092 - DNA, 20 bp, Artificial Sequence
  MKO10115092_B_Sema6a
  gRNA
aggctgacgtagacacatgc

SEQ ID NO: 115093 - DNA, 20 bp, Artificial Sequence
  MKO10115093_B_Sema6b
  gRNA
cacactgtaattggcgcaga

SEQ ID NO: 115094 - DNA, 20 bp, Artificial Sequence
  MKO10115094_B_Sema6b
  gRNA
ccacggagctgcgatatcag

SEQ ID NO: 115095 - DNA, 20 bp, Artificial Sequence
  MKO10115095_B_Sema6b
  gRNA
catcgatgtgtgtcgaatga

SEQ ID NO: 115096 - DNA, 20 bp, Artificial Sequence
  MKO10115096_B_Sema6c
  gRNA
agagattcctgaccttgaac

SEQ ID NO: 115097 - DNA, 20 bp, Artificial Sequence
  MKO10115097_B_Sema6c
  gRNA
atatggagaactgtgcagtc

SEQ ID NO: 115098 - DNA, 20 bp, Artificial Sequence
  MKO10115098_B_Sema6c
  gRNA
ggaggggctggtgcccaaca

SEQ ID NO: 115099 - DNA, 20 bp, Artificial Sequence
  MKO10115099_B_Sema6d
  gRNA
tgctgcgattcgttgcctga

SEQ ID NO: 115100 - DNA, 20 bp, Artificial Sequence
  MKO10115100_B_Sema6d
  gRNA
gcttaatctagaagctgacg

SEQ ID NO: 115101 - DNA, 20 bp, Artificial Sequence
  MKO10115101_B_Sema6d
  gRNA
cgagaaaattgtgctatgaa

SEQ ID NO: 115102 - DNA, 20 bp, Artificial Sequence
  MKO10115102_B_Sema7a
  gRNA
caagctcaccgtgcgcacag

SEQ ID NO: 115103 - DNA, 20 bp, Artificial Sequence
  MKO10115103_B_Sema7a
  gRNA
tcatggaaaagcacggtgtg

SEQ ID NO: 115104 - DNA, 20 bp, Artificial Sequence
  MKO10115104_B_Sema7a
  gRNA
ggtaatgggctgctggtctg

SEQ ID NO: 115105 - DNA, 20 bp, Artificial Sequence
  MKO10115105_B_Senp1
  gRNA
ccgacgacatgacccactcc

SEQ ID NO: 115106 - DNA, 20 bp, Artificial Sequence
  MKO10115106_B_Senp1
  gRNA
tatcgtccagattatcactc

SEQ ID NO: 115107 - DNA, 20 bp, Artificial Sequence
  MKO10115107_B_Senp1
  gRNA
acccaccgcccgccacagtc

SEQ ID NO: 115108 - DNA, 20 bp, Artificial Sequence
  MKO10115108_B_Senp2
  gRNA
tacaatgctgccagtttatt

SEQ ID NO: 115109 - DNA, 20 bp, Artificial Sequence
  MKO10115109_B_Senp2
  gRNA
agtacctaatcttggccttt

SEQ ID NO: 115110 - DNA, 20 bp, Artificial Sequence
  MKO10115110_B_Senp2
  gRNA
ctgatgagatcccagccaaa

SEQ ID NO: 115111 - DNA, 20 bp, Artificial Sequence
  MKO10115111_B_Senp3
  gRNA
agacagtcccccaaaaccat

SEQ ID NO: 115112 - DNA, 20 bp, Artificial Sequence
  MKO10115112_B_Senp3
  gRNA
tgaagactcactctgcacac

SEQ ID NO: 115113 - DNA, 20 bp, Artificial Sequence
  MKO10115113_B_Senp3
  gRNA
gatgaattccttcaaactta

SEQ ID NO: 115114 - DNA, 20 bp, Artificial Sequence
  MKO10115114_B_Senp5
  gRNA
gcagaactggttgaatgacc

SEQ ID NO: 115115 - DNA, 20 bp, Artificial Sequence
  MKO10115115_B_Senp5
  gRNA
tatgtaaggattcctagatg

SEQ ID NO: 115116 - DNA, 20 bp, Artificial Sequence
  MKO10115116_B_Senp5
  gRNA
tttaactccattatagcctt

SEQ ID NO: 115117 - DNA, 20 bp, Artificial Sequence
  MKO10115117_B_Senp6
  gRNA
catgctcactcacagacgcc

SEQ ID NO: 115118 - DNA, 20 bp, Artificial Sequence
  MKO10115118_B_Senp6
  gRNA
tctactcagtgtagaagatg

SEQ ID NO: 115119 - DNA, 20 bp, Artificial Sequence
  MKO10115119_B_Senp6
  gRNA
tggatagatcagaatctaag

SEQ ID NO: 115120 - DNA, 20 bp, Artificial Sequence
  MKO10115120_B_Senp7
  gRNA
cataccttctgtaaatcagc

SEQ ID NO: 115121 - DNA, 20 bp, Artificial Sequence
  MKO10115121_B_Senp7
  gRNA
atgctgtcaacagatgtcga

SEQ ID NO: 115122 - DNA, 20 bp, Artificial Sequence
  MKO10115122_B_Senp7
  gRNA
atcaccagctgatttacaga

SEQ ID NO: 115123 - DNA, 20 bp, Artificial Sequence
  MKO10115123_B_Senp8
  gRNA
atccaggggttcaaggaaca

SEQ ID NO: 115124 - DNA, 20 bp, Artificial Sequence
  MKO10115124_B_Senp8
  gRNA
tcatagctgttctcttgagc

SEQ ID NO: 115125 - DNA, 20 bp, Artificial Sequence
  MKO10115125_B_Senp8
  gRNA
agtagctgcagcggggactc

SEQ ID NO: 115126 - DNA, 20 bp, Artificial Sequence
  MKO10115126_B_Sephs1
  gRNA
gacaatatgctgatgctcct

SEQ ID NO: 115127 - DNA, 20 bp, Artificial Sequence
  MKO10115127_B_Sephs1
  gRNA
gataggataaatgtaatctg

SEQ ID NO: 115128 - DNA, 20 bp, Artificial Sequence
  MKO10115128_B_Sephs1
  gRNA
ccgtgacacccattgcataa

SEQ ID NO: 115129 - DNA, 20 bp, Artificial Sequence
  MKO10115129_B_Sephs2
  gRNA
aagctcgtcagccgccagct

SEQ ID NO: 115130 - DNA, 20 bp, Artificial Sequence
  MKO10115130_B_Sephs2
  gRNA
ggtagaacttcaataacgcg

SEQ ID NO: 115131 - DNA, 20 bp, Artificial Sequence
  MKO10115131_B_Sephs2
  gRNA
agaccagcccgccgggccca

SEQ ID NO: 115132 - DNA, 20 bp, Artificial Sequence
  MKO10115132_B_Sepn1
  gRNA
cagccctggtggattatccc

SEQ ID NO: 115133 - DNA, 20 bp, Artificial Sequence
  MKO10115133_B_Sepn1
  gRNA
ccagcaggaatcggcattaa

SEQ ID NO: 115134 - DNA, 20 bp, Artificial Sequence
  MKO10115134_B_Sepn1
  gRNA
ccggactgatgtacatatcc

SEQ ID NO: 115135 - DNA, 20 bp, Artificial Sequence
  MKO10115135_B_Sepp1
  gRNA
cattaagatcgcttactgtg

SEQ ID NO: 115136 - DNA, 20 bp, Artificial Sequence
  MKO10115136_B_Sepp1
  gRNA
tgatctcctatgtaccactc

SEQ ID NO: 115137 - DNA, 20 bp, Artificial Sequence
  MKO10115137_B_Sepp1
  gRNA
cagctcacctgtcatagatg

SEQ ID NO: 115138 - DNA, 20 bp, Artificial Sequence
  MKO10115138_B_Sepsecs
  gRNA
tcgtcgagcaaccaaagcag

SEQ ID NO: 115139 - DNA, 20 bp, Artificial Sequence
  MKO10115139_B_Sepsecs
  gRNA
caggacttctggtctatccg

SEQ ID NO: 115140 - DNA, 20 bp, Artificial Sequence
  MKO10115140_B_Sepsecs
  gRNA
ccaagtatatcatatggcca

SEQ ID NO: 115141 - DNA, 20 bp, Artificial Sequence
  MKO10115141_B_Sepw1
  gRNA
gaagttggtccactccaaga

SEQ ID NO: 115142 - DNA, 20 bp, Artificial Sequence
  MKO10115142_B_Sepw1
  gRNA
actcacaatgtccaggcatc

SEQ ID NO: 115143 - DNA, 20 bp, Artificial Sequence
  MKO10115143_B_Sepw1
  gRNA
aagctagaacatgagttccc

SEQ ID NO: 115144 - DNA, 20 bp, Artificial Sequence
  MKO10115144_B_Serac1
  gRNA
cggttgtctaacctgtctac

SEQ ID NO: 115145 - DNA, 20 bp, Artificial Sequence
  MKO10115145_B_Serac1
  gRNA
gtactcacggatatttctcc

SEQ ID NO: 115146 - DNA, 20 bp, Artificial Sequence
  MKO10115146_B_Serac1
  gRNA
tgcacaaagctcctgtagac

SEQ ID NO: 115147 - DNA, 20 bp, Artificial Sequence
  MKO10115147_B_Serbp1
  gRNA
ggcgatggatttgattctcg

SEQ ID NO: 115148 - DNA, 20 bp, Artificial Sequence
  MKO10115148_B_Serbp1
  gRNA
ctgaagcatgaggacaaacg

SEQ ID NO: 115149 - DNA, 20 bp, Artificial Sequence
  MKO10115149_B_Serbp1
  gRNA
aggtagcggctctcacaact

SEQ ID NO: 115150 - DNA, 20 bp, Artificial Sequence
  MKO10115150_B_Serf1
  gRNA
ctgcctctcagagaaagcag

SEQ ID NO: 115151 - DNA, 20 bp, Artificial Sequence
  MKO10115151_B_Serf1
  gRNA
tagcaaagggaaaagaaaag

SEQ ID NO: 115152 - DNA, 20 bp, Artificial Sequence
  MKO10115152_B_Serf2
  gRNA
cagcagaaagcccatcatct

SEQ ID NO: 115153 - DNA, 20 bp, Artificial Sequence
  MKO10115153_B_Serf2
  gRNA
aagggaaagcgccgagatga

SEQ ID NO: 115154 - DNA, 20 bp, Artificial Sequence
  MKO10115154_B_Serf2
  gRNA
tctgcttcttcatgttcttc

SEQ ID NO: 115155 - DNA, 20 bp, Artificial Sequence
  MKO10115155_B_Sergef
  gRNA
gtgattacctgtagtggcta

SEQ ID NO: 115156 - DNA, 20 bp, Artificial Sequence
  MKO10115156_B_Sergef
  gRNA
gcaacttggccttggccata

SEQ ID NO: 115157 - DNA, 20 bp, Artificial Sequence
  MKO10115157_B_Sergef
  gRNA
accatctgcaagcctctccg

SEQ ID NO: 115158 - DNA, 20 bp, Artificial Sequence
  MKO10115158_B_Serhl
  gRNA
actcaccaaaactgtggccc

SEQ ID NO: 115159 - DNA, 20 bp, Artificial Sequence
  MKO10115159_B_Serhl
  gRNA
aatgagcctgtcaaaggagt

SEQ ID NO: 115160 - DNA, 20 bp, Artificial Sequence
  MKO10115160_B_Serhl
  gRNA
gtggaatcagttcaccctcc

SEQ ID NO: 115161 - DNA, 20 bp, Artificial Sequence
  MKO10115161_B_Serinc1
  gRNA
acagcagttgcaattatcat

SEQ ID NO: 115162 - DNA, 20 bp, Artificial Sequence
  MKO10115162_B_Serinc1
  gRNA
tgaatcgtgggttgaaaaaa

SEQ ID NO: 115163 - DNA, 20 bp, Artificial Sequence
  MKO10115163_B_Serinc1
  gRNA
ccttgatcattagtaaagag

SEQ ID NO: 115164 - DNA, 20 bp, Artificial Sequence
  MKO10115164_B_Serinc2
  gRNA
ggcgccttctacatccctga

SEQ ID NO: 115165 - DNA, 20 bp, Artificial Sequence
  MKO10115165_B_Serinc2
  gRNA
agacagcgcggaaacccagc

SEQ ID NO: 115166 - DNA, 20 bp, Artificial Sequence
  MKO10115166_B_Serinc2
  gRNA
cgcccacagtgatacccaca

SEQ ID NO: 115167 - DNA, 20 bp, Artificial Sequence
  MKO10115167_B_Serinc3
  gRNA
aaggtcccgtgcctctgtag

SEQ ID NO: 115168 - DNA, 20 bp, Artificial Sequence
  MKO10115168_B_Serinc3
  gRNA
tgaattatgggtaaatcgaa

SEQ ID NO: 115169 - DNA, 20 bp, Artificial Sequence
  MKO10115169_B_Serinc3
  gRNA
cccgttgtgcactgctgctc

SEQ ID NO: 115170 - DNA, 20 bp, Artificial Sequence
  MKO10115170_B_Serinc4
  gRNA
gtgctatgtgcccacctgtt

SEQ ID NO: 115171 - DNA, 20 bp, Artificial Sequence
  MKO10115171_B_Serinc4
  gRNA
gctctacatcctcctccacg

SEQ ID NO: 115172 - DNA, 20 bp, Artificial Sequence
  MKO10115172_B_Serinc4
  gRNA
accttaccaattcttgttcc

SEQ ID NO: 115173 - DNA, 20 bp, Artificial Sequence
  MKO10115173_B_Serinc5
  gRNA
gcggtgtacagagtctgctt

SEQ ID NO: 115174 - DNA, 20 bp, Artificial Sequence
  MKO10115174_B_Serinc5
  gRNA
ctcaggagcgttcttcattc

SEQ ID NO: 115175 - DNA, 20 bp, Artificial Sequence
  MKO10115175_B_Serinc5
  gRNA
gaagaacgctcctgagcaca

SEQ ID NO: 115176 - DNA, 20 bp, Artificial Sequence
  MKO10115176_B_Serp1
  gRNA
tccagattattcaaagtatc

SEQ ID NO: 115177 - DNA, 20 bp, Artificial Sequence
  MKO10115177_B_Serp1
  gRNA
agcaagaacataactcagcg

SEQ ID NO: 115178 - DNA, 20 bp, Artificial Sequence
  MKO10115178_B_Serp1
  gRNA
tcctgatactttgaataatc

SEQ ID NO: 115179 - DNA, 20 bp, Artificial Sequence
  MKO10115179_B_Serp2
  gRNA
gccagcagccatggcccaac

SEQ ID NO: 115180 - DNA, 20 bp, Artificial Sequence
  MKO10115180_B_Serp2
  gRNA
caagaagagaaatatcctgt

SEQ ID NO: 115181 - DNA, 20 bp, Artificial Sequence
  MKO10115181_B_Serp2
  gRNA
tgtgcttctcgttagccatc

SEQ ID NO: 115182 - DNA, 20 bp, Artificial Sequence
  MKO10115182_B_Serpina10
  gRNA
gctcgtgcatctcatacctc

SEQ ID NO: 115183 - DNA, 20 bp, Artificial Sequence
  MKO10115183_B_Serpina10
  gRNA
gacttaccctggacacctga

SEQ ID NO: 115184 - DNA, 20 bp, Artificial Sequence
  MKO10115184_B_Serpina10
  gRNA
gtccaggatgctcctatttc

SEQ ID NO: 115185 - DNA, 20 bp, Artificial Sequence
  MKO10115185_B_Serpina11
  gRNA
gccagcacccgcctatcaca

SEQ ID NO: 115186 - DNA, 20 bp, Artificial Sequence
  MKO10115186_B_Serpina11
  gRNA
aatttccgcaacttacaacc

SEQ ID NO: 115187 - DNA, 20 bp, Artificial Sequence
  MKO10115187_B_Serpina11
  gRNA
cttctcgttcatgtccacga

SEQ ID NO: 115188 - DNA, 20 bp, Artificial Sequence
  MKO10115188_B_Serpina12
  gRNA
tgttgtaagtagacgagatg

SEQ ID NO: 115189 - DNA, 20 bp, Artificial Sequence
  MKO10115189_B_Serpina12
  gRNA
atgctcctttattacccact

SEQ ID NO: 115190 - DNA, 20 bp, Artificial Sequence
  MKO10115190_B_Serpina12
  gRNA
attcgacccaaaacagacca

SEQ ID NO: 115191 - DNA, 20 bp, Artificial Sequence
  MKO10115191_B_Serpina1a
  gRNA
taaagagaatgtaatttgcc

SEQ ID NO: 115192 - DNA, 20 bp, Artificial Sequence
  MKO10115192_B_Serpina1a
  gRNA
attcgatcctgagaacactg

SEQ ID NO: 115193 - DNA, 20 bp, Artificial Sequence
  MKO10115193_B_Serpina1a
  gRNA
ttccccagactgtccatctc

SEQ ID NO: 115194 - DNA, 20 bp, Artificial Sequence
  MKO10115194_B_Serpina1b
  gRNA
tctcctctgtgattccagag

SEQ ID NO: 115195 - DNA, 20 bp, Artificial Sequence
  MKO10115195_B_Serpina1b
  gRNA
caagttatagtctccagaga

SEQ ID NO: 115196 - DNA, 20 bp, Artificial Sequence
  MKO10115196_B_Serpina1b
  gRNA
gtagggtggtcatttatgtg

SEQ ID NO: 115197 - DNA, 20 bp, Artificial Sequence
  MKO10115197_B_Serpina1c
  gRNA
cactcagagccccctctttg

SEQ ID NO: 115198 - DNA, 20 bp, Artificial Sequence
  MKO10115198_B_Serpina1c
  gRNA
aaatgactccctccatctca

SEQ ID NO: 115199 - DNA, 20 bp, Artificial Sequence
  MKO10115199_B_Serpina1c
  gRNA
taaagagaatgtaatttgcc

SEQ ID NO: 115200 - DNA, 20 bp, Artificial Sequence
  MKO10115200_B_Serpina1d
  gRNA
gggtggtcgaagcgcacgat

SEQ ID NO: 115201 - DNA, 20 bp, Artificial Sequence
  MKO10115201_B_Serpina1d
  gRNA
gcacatcaagcatgcccgag

SEQ ID NO: 115202 - DNA, 20 bp, Artificial Sequence
  MKO10115202_B_Serpina1d
  gRNA
atccccagactgtccatctc

SEQ ID NO: 115203 - DNA, 20 bp, Artificial Sequence
  MKO10115203_B_Serpina1e
  gRNA
cagctcccggtatagactga

SEQ ID NO: 115204 - DNA, 20 bp, Artificial Sequence
  MKO10115204_B_Serpina1e
  gRNA
attgcagcacgctctccagc

SEQ ID NO: 115205 - DNA, 20 bp, Artificial Sequence
  MKO10115205_B_Serpina1e
  gRNA
taagcaagctgagttccacg

SEQ ID NO: 115206 - DNA, 20 bp, Artificial Sequence
  MKO10115206_B_Serpina1f
  gRNA
cggagatccacaagtgtttc

SEQ ID NO: 115207 - DNA, 20 bp, Artificial Sequence
  MKO10115207_B_Serpina1f
  gRNA
ttaccactctgcctaaaaag

SEQ ID NO: 115208 - DNA, 20 bp, Artificial Sequence
  MKO10115208_B_Serpina1f
  gRNA
cttcctacaggtggtaagta

SEQ ID NO: 115209 - DNA, 20 bp, Artificial Sequence
  MKO10115209_B_Serpina3a
  gRNA
caggacagattcccgccatc

SEQ ID NO: 115210 - DNA, 20 bp, Artificial Sequence
  MKO10115210_B_Serpina3a
  gRNA
taacatccagcgcagcctgg

SEQ ID NO: 115211 - DNA, 20 bp, Artificial Sequence
  MKO10115211_B_Serpina3a
  gRNA
ccatggatgtgttcctatgc

SEQ ID NO: 115212 - DNA, 20 bp, Artificial Sequence
  MKO10115212_B_Serpina3b
  gRNA
taactctgatgacacgttca

SEQ ID NO: 115213 - DNA, 20 bp, Artificial Sequence
  MKO10115213_B_Serpina3b
  gRNA
tgataaccttgcccattaca

SEQ ID NO: 115214 - DNA, 20 bp, Artificial Sequence
  MKO10115214_B_Serpina3b
  gRNA
ataaggagaacttgggtaag

SEQ ID NO: 115215 - DNA, 20 bp, Artificial Sequence
  MKO10115215_B_Serpina3c
  gRNA
caaggacctgatagtgtctc

SEQ ID NO: 115216 - DNA, 20 bp, Artificial Sequence
  MKO10115216_B_Serpina3c
  gRNA
gtcttacctgagacactatc

SEQ ID NO: 115217 - DNA, 20 bp, Artificial Sequence
  MKO10115217_B_Serpina3c
  gRNA
tgtcctgttgaaccacagac

SEQ ID NO: 115218 - DNA, 20 bp, Artificial Sequence
  MKO10115218_B_Serpina3f
  gRNA
cagtgccatgttcatcctcc

SEQ ID NO: 115219 - DNA, 20 bp, Artificial Sequence
  MKO10115219_B_Serpina3f
  gRNA
tgattgcagacaggtcagcc

SEQ ID NO: 115220 - DNA, 20 bp, Artificial Sequence
  MKO10115220_B_Serpina3f
  gRNA
gcccagatgtcaccctggga

SEQ ID NO: 115221 - DNA, 20 bp, Artificial Sequence
  MKO10115221_B_Serpina3g
  gRNA
aagatcaaggaactcatctc

SEQ ID NO: 115222 - DNA, 20 bp, Artificial Sequence
  MKO10115222_B_Serpina3g
  gRNA
gcccagatgtcaccctggga

SEQ ID NO: 115223 - DNA, 20 bp, Artificial Sequence
  MKO10115223_B_Serpina3g
  gRNA
acttccctgatgcccaactc

SEQ ID NO: 115224 - DNA, 20 bp, Artificial Sequence
  MKO10115224_B_Serpina3i
  gRNA
gactgccgtgttcctttcca

SEQ ID NO: 115225 - DNA, 20 bp, Artificial Sequence
  MKO10115225_B_Serpina3i
  gRNA
aactaactacaccctacttc

SEQ ID NO: 115226 - DNA, 20 bp, Artificial Sequence
  MKO10115226_B_Serpina3i
  gRNA
tactcacattgccctcttca

SEQ ID NO: 115227 - DNA, 20 bp, Artificial Sequence
  MKO10115227_B_Serpina3j
  gRNA
accactctcaccgttaaaga

SEQ ID NO: 115228 - DNA, 20 bp, Artificial Sequence
  MKO10115228_B_Serpina3j
  gRNA
gtgttaaggttaacaactgt

SEQ ID NO: 115229 - DNA, 20 bp, Artificial Sequence
  MKO10115229_B_Serpina3j
  gRNA
acttagcatcacaattgcct

SEQ ID NO: 115230 - DNA, 20 bp, Artificial Sequence
  MKO10115230_B_Serpina3k
  gRNA
ctacttggggttattgactt

SEQ ID NO: 115231 - DNA, 20 bp, Artificial Sequence
  MKO10115231_B_Serpina3k
  gRNA
tgcacgccacttccgtgatg

SEQ ID NO: 115232 - DNA, 20 bp, Artificial Sequence
  MKO10115232_B_Serpina3k
  gRNA
agcacgatagctcctcatca

SEQ ID NO: 115233 - DNA, 20 bp, Artificial Sequence
  MKO10115233_B_Serpina3m
  gRNA
cacacgccacttccgtgatg

SEQ ID NO: 115234 - DNA, 20 bp, Artificial Sequence
  MKO10115234_B_Serpina3m
  gRNA
tcacttggggttagtgactt

SEQ ID NO: 115235 - DNA, 20 bp, Artificial Sequence
  MKO10115235_B_Serpina3m
  gRNA
gccaatgtgagactgtcatc

SEQ ID NO: 115236 - DNA, 20 bp, Artificial Sequence
  MKO10115236_B_Serpina3n
  gRNA
gtccaagaagaccatgacaa

SEQ ID NO: 115237 - DNA, 20 bp, Artificial Sequence
  MKO10115237_B_Serpina3n
  gRNA
tgggacaaatttgactccag

SEQ ID NO: 115238 - DNA, 20 bp, Artificial Sequence
  MKO10115238_B_Serpina3n
  gRNA
ctgtgtcaaagatcattatc

SEQ ID NO: 115239 - DNA, 20 bp, Artificial Sequence
  MKO10115239_B_Serpina5
  gRNA
gcgatggcattgccttgata

SEQ ID NO: 115240 - DNA, 20 bp, Artificial Sequence
  MKO10115240_B_Serpina5
  gRNA
gatggtgcacaaatccatga

SEQ ID NO: 115241 - DNA, 20 bp, Artificial Sequence
  MKO10115241_B_Serpina5
  gRNA
cacctcagacaacttgatat

SEQ ID NO: 115242 - DNA, 20 bp, Artificial Sequence
  MKO10115242_B_Serpina6
  gRNA
agtaactaatgttgcctgac

SEQ ID NO: 115243 - DNA, 20 bp, Artificial Sequence
  MKO10115243_B_Serpina6
  gRNA
gacacttaccgttaatgtca

SEQ ID NO: 115244 - DNA, 20 bp, Artificial Sequence
  MKO10115244_B_Serpina6
  gRNA
gctccatgtgtacttgtcaa

SEQ ID NO: 115245 - DNA, 20 bp, Artificial Sequence
  MKO10115245_B_Serpina7
  gRNA
agaacaatactatcattacg

SEQ ID NO: 115246 - DNA, 20 bp, Artificial Sequence
  MKO10115246_B_Serpina7
  gRNA
tcccgtgacagaattacaac

SEQ ID NO: 115247 - DNA, 20 bp, Artificial Sequence
  MKO10115247_B_Serpina7
  gRNA
acacctccagaatctgtgtt

SEQ ID NO: 115248 - DNA, 20 bp, Artificial Sequence
  MKO10115248_B_Serpina9
  gRNA
cagaccgagtcgtttgcttt

SEQ ID NO: 115249 - DNA, 20 bp, Artificial Sequence
  MKO10115249_B_Serpina9
  gRNA
cgaggtactcgaagcccatg

SEQ ID NO: 115250 - DNA, 20 bp, Artificial Sequence
  MKO10115250_B_Serpina9
  gRNA
ccttgagcggactataagtt

SEQ ID NO: 115251 - DNA, 20 bp, Artificial Sequence
  MKO10115251_B_Serpinb10
  gRNA
acgttcttaaaacagctaac

SEQ ID NO: 115252 - DNA, 20 bp, Artificial Sequence
  MKO10115252_B_Serpinb10
  gRNA
tcaggaaggagatcaactcc

SEQ ID NO: 115253 - DNA, 20 bp, Artificial Sequence
  MKO10115253_B_Serpinb10
  gRNA
ttaagaacgtaagaatttcc

SEQ ID NO: 115254 - DNA, 20 bp, Artificial Sequence
  MKO10115254_B_Serpinb11
  gRNA
agcgttgctaacagaatcta

SEQ ID NO: 115255 - DNA, 20 bp, Artificial Sequence
  MKO10115255_B_Serpinb11
  gRNA
aaaatcaacagtttgcagct

SEQ ID NO: 115256 - DNA, 20 bp, Artificial Sequence
  MKO10115256_B_Serpinb11
  gRNA
aaagacgaaaaattcttctg

SEQ ID NO: 115257 - DNA, 20 bp, Artificial Sequence
  MKO10115257_B_Serpinb12
  gRNA
gttgaattctctctcccact

SEQ ID NO: 115258 - DNA, 20 bp, Artificial Sequence
  MKO10115258_B_Serpinb12
  gRNA
atcttattacactttaagta

SEQ ID NO: 115259 - DNA, 20 bp, Artificial Sequence
  MKO10115259_B_Serpinb12
  gRNA
agtggcagccaagcaattga

SEQ ID NO: 115260 - DNA, 20 bp, Artificial Sequence
  MKO10115260_B_Serpinb13
  gRNA
atgacctgatcataagcaac

SEQ ID NO: 115261 - DNA, 20 bp, Artificial Sequence
  MKO10115261_B_Serpinb13
  gRNA
taggtactttacactgaaca

SEQ ID NO: 115262 - DNA, 20 bp, Artificial Sequence
  MKO10115262_B_Serpinb13
  gRNA
gcagcatttacaaaatcaac

SEQ ID NO: 115263 - DNA, 20 bp, Artificial Sequence
  MKO10115263_B_Serpinb1a
  gRNA
ccacattcccttaaagtaga

SEQ ID NO: 115264 - DNA, 20 bp, Artificial Sequence
  MKO10115264_B_Serpinb1a
  gRNA
gtttgctcacttcagcattc

SEQ ID NO: 115265 - DNA, 20 bp, Artificial Sequence
  MKO10115265_B_Serpinb1a
  gRNA
cgagtccacgggtcttaaga

SEQ ID NO: 115266 - DNA, 20 bp, Artificial Sequence
  MKO10115266_B_Serpinb1b
  gRNA
acttacaggaaggaaattgt

SEQ ID NO: 115267 - DNA, 20 bp, Artificial Sequence
  MKO10115267_B_Serpinb1b
  gRNA
gactgctgaagtgagcaagc

SEQ ID NO: 115268 - DNA, 20 bp, Artificial Sequence
  MKO10115268_B_Serpinb1b
  gRNA
gaaaatgtacagtgctgact

SEQ ID NO: 115269 - DNA, 20 bp, Artificial Sequence
  MKO10115269_B_Serpinb1c
  gRNA
actgctgaagtgagcaagcg

SEQ ID NO: 115270 - DNA, 20 bp, Artificial Sequence
  MKO10115270_B_Serpinb1c
  gRNA
ctgccacattcccttgaaat

SEQ ID NO: 115271 - DNA, 20 bp, Artificial Sequence
  MKO10115271_B_Serpinb1c
  gRNA
acttacaggaaggaagttgt

SEQ ID NO: 115272 - DNA, 20 bp, Artificial Sequence
  MKO10115272_B_Serpinb2
  gRNA
tctaacaaataatccccctg

SEQ ID NO: 115273 - DNA, 20 bp, Artificial Sequence
  MKO10115273_B_Serpinb2
  gRNA
tagcttcttcagcacattca

SEQ ID NO: 115274 - DNA, 20 bp, Artificial Sequence
  MKO10115274_B_Serpinb2
  gRNA
gaaagtgcaaacaagctgtt

SEQ ID NO: 115275 - DNA, 20 bp, Artificial Sequence
  MKO10115275_B_Serpinb3a
  gRNA
gaaaaacttacctggacaaa

SEQ ID NO: 115276 - DNA, 20 bp, Artificial Sequence
  MKO10115276_B_Serpinb3a
  gRNA
atttgtttggctttctaccc

SEQ ID NO: 115277 - DNA, 20 bp, Artificial Sequence
  MKO10115277_B_Serpinb3a
  gRNA
tcaagctaacgtggaatcac

SEQ ID NO: 115278 - DNA, 20 bp, Artificial Sequence
  MKO10115278_B_Serpinb3b
  gRNA
gaaaaacttacctggagaaa

SEQ ID NO: 115279 - DNA, 20 bp, Artificial Sequence
  MKO10115279_B_Serpinb3b
  gRNA
gcgaaaagaagattaattcc

SEQ ID NO: 115280 - DNA, 20 bp, Artificial Sequence
  MKO10115280_B_Serpinb3b
  gRNA
caatgatgattatgacctga

SEQ ID NO: 115281 - DNA, 20 bp, Artificial Sequence
  MKO10115281_B_Serpinb3c
  gRNA
tcatgctaacgtggaatcac

SEQ ID NO: 115282 - DNA, 20 bp, Artificial Sequence
  MKO10115282_B_Serpinb3c
  gRNA
gtgaaaagaagattaatttc

SEQ ID NO: 115283 - DNA, 20 bp, Artificial Sequence
  MKO10115283_B_Serpinb3c
  gRNA
caatgatgattatgacctga

SEQ ID NO: 115284 - DNA, 20 bp, Artificial Sequence
  MKO10115284_B_Serpinb3d
  gRNA
gtacaacttacctggagaaa

SEQ ID NO: 115285 - DNA, 20 bp, Artificial Sequence
  MKO10115285_B_Serpinb3d
  gRNA
ataccagagaagaaaagttt

SEQ ID NO: 115286 - DNA, 20 bp, Artificial Sequence
  MKO10115286_B_Serpinb3d
  gRNA
ttaccttgcaggaaaaatca

SEQ ID NO: 115287 - DNA, 20 bp, Artificial Sequence
  MKO10115287_B_Serpinb5
  gRNA
tcaaattaacagctccatta

SEQ ID NO: 115288 - DNA, 20 bp, Artificial Sequence
  MKO10115288_B_Serpinb5
  gRNA
ctgcctactttgttggaaag

SEQ ID NO: 115289 - DNA, 20 bp, Artificial Sequence
  MKO10115289_B_Serpinb5
  gRNA
agtgactgtttgaaacccaa

SEQ ID NO: 115290 - DNA, 20 bp, Artificial Sequence
  MKO10115290_B_Serpinb6a
  gRNA
ttgatttcaggcacttgctt

SEQ ID NO: 115291 - DNA, 20 bp, Artificial Sequence
  MKO10115291_B_Serpinb6a
  gRNA
cactgctagccagatggctc

SEQ ID NO: 115292 - DNA, 20 bp, Artificial Sequence
  MKO10115292_B_Serpinb6a
  gRNA
cttatccccgaagagcctgt

SEQ ID NO: 115293 - DNA, 20 bp, Artificial Sequence
  MKO10115293_B_Serpinb6b
  gRNA
aatgcctttcaatgtcacca

SEQ ID NO: 115294 - DNA, 20 bp, Artificial Sequence
  MKO10115294_B_Serpinb6b
  gRNA
agtaaattcaaacactccac

SEQ ID NO: 115295 - DNA, 20 bp, Artificial Sequence
  MKO10115295_B_Serpinb6b
  gRNA
cccgacagcacatcaacgcc

SEQ ID NO: 115296 - DNA, 20 bp, Artificial Sequence
  MKO10115296_B_Serpinb6c
  gRNA
ctcagcgaagtgaacaagac

SEQ ID NO: 115297 - DNA, 20 bp, Artificial Sequence
  MKO10115297_B_Serpinb6c
  gRNA
caagttctatgaagcagaga

SEQ ID NO: 115298 - DNA, 20 bp, Artificial Sequence
  MKO10115298_B_Serpinb6c
  gRNA
cccgacagcacatcaacacc

SEQ ID NO: 115299 - DNA, 20 bp, Artificial Sequence
  MKO10115299_B_Serpinb6d
  gRNA
agtgaattcaaacactagac

SEQ ID NO: 115300 - DNA, 20 bp, Artificial Sequence
  MKO10115300_B_Serpinb6d
  gRNA
atcaaagacctgctatctcc

SEQ ID NO: 115301 - DNA, 20 bp, Artificial Sequence
  MKO10115301_B_Serpinb6d
  gRNA
gttcagcttattcccagcat

SEQ ID NO: 115302 - DNA, 20 bp, Artificial Sequence
  MKO10115302_B_Serpinb6e
  gRNA
gaagtgaacaagactgacac

SEQ ID NO: 115303 - DNA, 20 bp, Artificial Sequence
  MKO10115303_B_Serpinb6e
  gRNA
ctcagctctttgtcagtata

SEQ ID NO: 115304 - DNA, 20 bp, Artificial Sequence
  MKO10115304_B_Serpinb6e
  gRNA
atacagtgaattcaaacact

SEQ ID NO: 115305 - DNA, 20 bp, Artificial Sequence
  MKO10115305_B_Serpinb7
  gRNA
tgacataaactcatctcata

SEQ ID NO: 115306 - DNA, 20 bp, Artificial Sequence
  MKO10115306_B_Serpinb7
  gRNA
aaacttatacaatgctaaag

SEQ ID NO: 115307 - DNA, 20 bp, Artificial Sequence
  MKO10115307_B_Serpinb7
  gRNA
tttaacataccatcaagaca

SEQ ID NO: 115308 - DNA, 20 bp, Artificial Sequence
  MKO10115308_B_Serpinb8
  gRNA
gcatgcctctcgtgtacttt

SEQ ID NO: 115309 - DNA, 20 bp, Artificial Sequence
  MKO10115309_B_Serpinb8
  gRNA
gcgagatcagtgctttcatc

SEQ ID NO: 115310 - DNA, 20 bp, Artificial Sequence
  MKO10115310_B_Serpinb8
  gRNA
taatttcagcgagaagtgtc

SEQ ID NO: 115311 - DNA, 20 bp, Artificial Sequence
  MKO10115311_B_Serpinb9b
  gRNA
agctggcaactcatccacaa

SEQ ID NO: 115312 - DNA, 20 bp, Artificial Sequence
  MKO10115312_B_Serpinb9b
  gRNA
ttgctgataatgccctatga

SEQ ID NO: 115313 - DNA, 20 bp, Artificial Sequence
  MKO10115313_B_Serpinb9b
  gRNA
attctgaccttcagtctgtt

SEQ ID NO: 115314 - DNA, 20 bp, Artificial Sequence
  MKO10115314_B_Serpinb9c
  gRNA
gttctctgcaaagagcctat

SEQ ID NO: 115315 - DNA, 20 bp, Artificial Sequence
  MKO10115315_B_Serpinb9c
  gRNA
tcaggatattgagaatccac

SEQ ID NO: 115316 - DNA, 20 bp, Artificial Sequence
  MKO10115316_B_Serpinb9c
  gRNA
gagccacttgacaacaattc

SEQ ID NO: 115317 - DNA, 20 bp, Artificial Sequence
  MKO10115317_B_Serpinb9d
  gRNA
ctgatgtccacacccttatc

SEQ ID NO: 115318 - DNA, 20 bp, Artificial Sequence
  MKO10115318_B_Serpinb9d
  gRNA
taaattctatcactctgaga

SEQ ID NO: 115319 - DNA, 20 bp, Artificial Sequence
  MKO10115319_B_Serpinb9d
  gRNA
cccagatgaagatgtccatc

SEQ ID NO: 115320 - DNA, 20 bp, Artificial Sequence
  MKO10115320_B_Serpinb9e
  gRNA
cgtggtcctactcccagatc

SEQ ID NO: 115321 - DNA, 20 bp, Artificial Sequence
  MKO10115321_B_Serpinb9e
  gRNA
tttcttacctttagtctgtt

SEQ ID NO: 115322 - DNA, 20 bp, Artificial Sequence
  MKO10115322_B_Serpinb9e
  gRNA
cccagatgaagatgtccatc

SEQ ID NO: 115323 - DNA, 20 bp, Artificial Sequence
  MKO10115323_B_Serpinb9f
  gRNA
taaattctaccactctgaga

SEQ ID NO: 115324 - DNA, 20 bp, Artificial Sequence
  MKO10115324_B_Serpinb9f
  gRNA
ccttaccttgtttatcttaa

SEQ ID NO: 115325 - DNA, 20 bp, Artificial Sequence
  MKO10115325_B_Serpinb9f
  gRNA
actcagttaattcacagacc

SEQ ID NO: 115326 - DNA, 20 bp, Artificial Sequence
  MKO10115326_B_Serpinb9g
  gRNA
cttcttaccattagtctgtt

SEQ ID NO: 115327 - DNA, 20 bp, Artificial Sequence
  MKO10115327_B_Serpinb9g
  gRNA
taaattctaccactctgaga

SEQ ID NO: 115328 - DNA, 20 bp, Artificial Sequence
  MKO10115328_B_Serpinb9g
  gRNA
ccttaccttgtttatcttaa

SEQ ID NO: 115329 - DNA, 20 bp, Artificial Sequence
  MKO10115329_B_Serpinb9
  gRNA
cgcctgcacctccttcacat

SEQ ID NO: 115330 - DNA, 20 bp, Artificial Sequence
  MKO10115330_B_Serpinb9
  gRNA
cagaaagtactctcttagag

SEQ ID NO: 115331 - DNA, 20 bp, Artificial Sequence
  MKO10115331_B_Serpinb9
  gRNA
ctaagagagtactttctgtc

SEQ ID NO: 115332 - DNA, 20 bp, Artificial Sequence
  MKO10115332_B_Serpinc1
  gRNA
ttgtgcatttaccgctcccc

SEQ ID NO: 115333 - DNA, 20 bp, Artificial Sequence
  MKO10115333_B_Serpinc1
  gRNA
gctatgcagatgtcgtccac

SEQ ID NO: 115334 - DNA, 20 bp, Artificial Sequence
  MKO10115334_B_Serpinc1
  gRNA
cagggcagtgagctcgttaa

SEQ ID NO: 115335 - DNA, 20 bp, Artificial Sequence
  MKO10115335_B_Serpind1
  gRNA
tttccttgcggcaaatgacc

SEQ ID NO: 115336 - DNA, 20 bp, Artificial Sequence
  MKO10115336_B_Serpind1
  gRNA
agggacggtcgacagtgaat

SEQ ID NO: 115337 - DNA, 20 bp, Artificial Sequence
  MKO10115337_B_Serpind1
  gRNA
ttcattcccgatagcttccg

SEQ ID NO: 115338 - DNA, 20 bp, Artificial Sequence
  MKO10115338_B_Serpine1
  gRNA
gctgagttcaccacccccga

SEQ ID NO: 115339 - DNA, 20 bp, Artificial Sequence
  MKO10115339_B_Serpine1
  gRNA
tgacatgtttagtgcaaccc

SEQ ID NO: 115340 - DNA, 20 bp, Artificial Sequence
  MKO10115340_B_Serpine1
  gRNA
ccagatttatcatcaatgac

SEQ ID NO: 115341 - DNA, 20 bp, Artificial Sequence
  MKO10115341_B_Serpine2
  gRNA
ctaccaagaccattgatagc

SEQ ID NO: 115342 - DNA, 20 bp, Artificial Sequence
  MKO10115342_B_Serpine2
  gRNA
aaataaagacattgtgaccg

SEQ ID NO: 115343 - DNA, 20 bp, Artificial Sequence
  MKO10115343_B_Serpine2
  gRNA
agtgctgaagaagatcaaca

SEQ ID NO: 115344 - DNA, 20 bp, Artificial Sequence
  MKO10115344_B_Serpine3
  gRNA
atgttccggtttgcatgaac

SEQ ID NO: 115345 - DNA, 20 bp, Artificial Sequence
  MKO10115345_B_Serpine3
  gRNA
tgttctagagctgttgtacc

SEQ ID NO: 115346 - DNA, 20 bp, Artificial Sequence
  MKO10115346_B_Serpine3
  gRNA
ggggagaaacacatccattc

SEQ ID NO: 115347 - DNA, 20 bp, Artificial Sequence
  MKO10115347_B_Serpinf1
  gRNA
gacagcaggacgttgcccgt

SEQ ID NO: 115348 - DNA, 20 bp, Artificial Sequence
  MKO10115348_B_Serpinf1
  gRNA
ccttgaagtaagccacgcca

SEQ ID NO: 115349 - DNA, 20 bp, Artificial Sequence
  MKO10115349_B_Serpinf1
  gRNA
ctcgagaaagacgaccctcc

SEQ ID NO: 115350 - DNA, 20 bp, Artificial Sequence
  MKO10115350_B_Serpinf2
  gRNA
acctttctgcaggtatattc

SEQ ID NO: 115351 - DNA, 20 bp, Artificial Sequence
  MKO10115351_B_Serpinf2
  gRNA
tgtcctgtcaccccttagtg

SEQ ID NO: 115352 - DNA, 20 bp, Artificial Sequence
  MKO10115352_B_Serpinf2
  gRNA
gtgaccatgctaccctcaag

SEQ ID NO: 115353 - DNA, 20 bp, Artificial Sequence
  MKO10115353_B_Serping1
  gRNA
ctcgttggctactttaccca

SEQ ID NO: 115354 - DNA, 20 bp, Artificial Sequence
  MKO10115354_B_Serping1
  gRNA
gagtagcgtaaagtaccctg

SEQ ID NO: 115355 - DNA, 20 bp, Artificial Sequence
  MKO10115355_B_Serping1
  gRNA
ctacagtactgccctctacc

SEQ ID NO: 115356 - DNA, 20 bp, Artificial Sequence
  MKO10115356_B_Serpinh1
  gRNA
cgctgagaagctgcgcgatg

SEQ ID NO: 115357 - DNA, 20 bp, Artificial Sequence
  MKO10115357_B_Serpinh1
  gRNA
caactactatgacgacgaga

SEQ ID NO: 115358 - DNA, 20 bp, Artificial Sequence
  MKO10115358_B_Serpinh1
  gRNA
cgctctgattatctcgcacc

SEQ ID NO: 115359 - DNA, 20 bp, Artificial Sequence
  MKO10115359_B_Serpini1
  gRNA
gtagataccaccagcctcat

SEQ ID NO: 115360 - DNA, 20 bp, Artificial Sequence
  MKO10115360_B_Serpini1
  gRNA
tctccttgttgatacatcat

SEQ ID NO: 115361 - DNA, 20 bp, Artificial Sequence
  MKO10115361_B_Serpini1
  gRNA
gcaaatttgactgccatgtc

SEQ ID NO: 115362 - DNA, 20 bp, Artificial Sequence
  MKO10115362_B_Serpini2
  gRNA
agacacgagcatcgaagaag

SEQ ID NO: 115363 - DNA, 20 bp, Artificial Sequence
  MKO10115363_B_Serpini2
  gRNA
agtgccctctaccttcaaga

SEQ ID NO: 115364 - DNA, 20 bp, Artificial Sequence
  MKO10115364_B_Serpini2
  gRNA
tcacaatgaatccttcttga

SEQ ID NO: 115365 - DNA, 20 bp, Artificial Sequence
  MKO10115365_B_Sertad1
  gRNA
aactccgcctcatccaactc

SEQ ID NO: 115366 - DNA, 20 bp, Artificial Sequence
  MKO10115366_B_Sertad1
  gRNA
gtgagatccccccgatggag

SEQ ID NO: 115367 - DNA, 20 bp, Artificial Sequence
  MKO10115367_B_Sertad1
  gRNA
ggtccggctcgctctgccgc

SEQ ID NO: 115368 - DNA, 20 bp, Artificial Sequence
  MKO10115368_B_Sertad2
  gRNA
ctccgccttggatgagatcg

SEQ ID NO: 115369 - DNA, 20 bp, Artificial Sequence
  MKO10115369_B_Sertad2
  gRNA
agacaccctggatggaccgt

SEQ ID NO: 115370 - DNA, 20 bp, Artificial Sequence
  MKO10115370_B_Sertad2
  gRNA
tgtagtgcttccgaggtcac

SEQ ID NO: 115371 - DNA, 20 bp, Artificial Sequence
  MKO10115371_B_Sertad3
  gRNA
cctgggacacgatctcattc

SEQ ID NO: 115372 - DNA, 20 bp, Artificial Sequence
  MKO10115372_B_Sertad3
  gRNA
agccctgctccgaatctctc

SEQ ID NO: 115373 - DNA, 20 bp, Artificial Sequence
  MKO10115373_B_Sertad3
  gRNA
cagggagctagatacatcca

SEQ ID NO: 115374 - DNA, 20 bp, Artificial Sequence
  MKO10115374_B_Sertad4
  gRNA
ttgccgggtaccaaacacta

SEQ ID NO: 115375 - DNA, 20 bp, Artificial Sequence
  MKO10115375_B_Sertad4
  gRNA
ttaccacaggatcacattac

SEQ ID NO: 115376 - DNA, 20 bp, Artificial Sequence
  MKO10115376_B_Sertad4
  gRNA
cctcttgaagtatgtgacct

SEQ ID NO: 115377 - DNA, 20 bp, Artificial Sequence
  MKO10115377_B_Sertm1
  gRNA
ctcttccagctcctcgtacc

SEQ ID NO: 115378 - DNA, 20 bp, Artificial Sequence
  MKO10115378_B_Sertm1
  gRNA
aaagaactcccagcgtcact

SEQ ID NO: 115379 - DNA, 20 bp, Artificial Sequence
  MKO10115379_B_Sertm1
  gRNA
gagttctttcaccaacctag

SEQ ID NO: 115380 - DNA, 20 bp, Artificial Sequence
  MKO10115380_B_Sesn1
  gRNA
agtccagagattcattgcga

SEQ ID NO: 115381 - DNA, 20 bp, Artificial Sequence
  MKO10115381_B_Sesn1
  gRNA
cactaggacacggaccaagc

SEQ ID NO: 115382 - DNA, 20 bp, Artificial Sequence
  MKO10115382_B_Sesn1
  gRNA
ggataacatcacattagtga

SEQ ID NO: 115383 - DNA, 20 bp, Artificial Sequence
  MKO10115383_B_Sesn2
  gRNA
ccacccgccctgaggacatc

SEQ ID NO: 115384 - DNA, 20 bp, Artificial Sequence
  MKO10115384_B_Sesn2
  gRNA
cggactaccttagcagcttc

SEQ ID NO: 115385 - DNA, 20 bp, Artificial Sequence
  MKO10115385_B_Sesn2
  gRNA
cagccactcggggtcaccgc

SEQ ID NO: 115386 - DNA, 20 bp, Artificial Sequence
  MKO10115386_B_Sesn3
  gRNA
gcctgagctagtgcacgccg

SEQ ID NO: 115387 - DNA, 20 bp, Artificial Sequence
  MKO10115387_B_Sesn3
  gRNA
cgctgagtggctgaatggct

SEQ ID NO: 115388 - DNA, 20 bp, Artificial Sequence
  MKO10115388_B_Sesn3
  gRNA
gtgtctcaacccctgacaag

SEQ ID NO: 115389 - DNA, 20 bp, Artificial Sequence
  MKO10115389_B_Sestd1
  gRNA
attatctactcagcattcca

SEQ ID NO: 115390 - DNA, 20 bp, Artificial Sequence
  MKO10115390_B_Sestd1
  gRNA
tatgtaacgcgtcaacttat

SEQ ID NO: 115391 - DNA, 20 bp, Artificial Sequence
  MKO10115391_B_Sestd1
  gRNA
acagaatgttgttccagccg

SEQ ID NO: 115392 - DNA, 20 bp, Artificial Sequence
  MKO10115392_B_Setbp1
  gRNA
gcagccctcacagttcgatg

SEQ ID NO: 115393 - DNA, 20 bp, Artificial Sequence
  MKO10115393_B_Setbp1
  gRNA
agagataacacgggtgctga

SEQ ID NO: 115394 - DNA, 20 bp, Artificial Sequence
  MKO10115394_B_Setbp1
  gRNA
agcagcacacagtaagagcg

SEQ ID NO: 115395 - DNA, 20 bp, Artificial Sequence
  MKO10115395_B_Setd1a
  gRNA
ctgtgtccgaggaagaccgt

SEQ ID NO: 115396 - DNA, 20 bp, Artificial Sequence
  MKO10115396_B_Setd1a
  gRNA
ggactcaaagtatacccccg

SEQ ID NO: 115397 - DNA, 20 bp, Artificial Sequence
  MKO10115397_B_Setd1a
  gRNA
ccccgcactcgaaagcacct

SEQ ID NO: 115398 - DNA, 20 bp, Artificial Sequence
  MKO10115398_B_Setd1b
  gRNA
ggtctgaggggtgtaccggc

SEQ ID NO: 115399 - DNA, 20 bp, Artificial Sequence
  MKO10115399_B_Setd1b
  gRNA
gcagatcgatgagttctacg

SEQ ID NO: 115400 - DNA, 20 bp, Artificial Sequence
  MKO10115400_B_Setd1b
  gRNA
gattgtgagcgagaccctgc

SEQ ID NO: 115401 - DNA, 20 bp, Artificial Sequence
  MKO10115401_B_Setd2
  gRNA
agttcctctcgatgtccaaa

SEQ ID NO: 115402 - DNA, 20 bp, Artificial Sequence
  MKO10115402_B_Setd2
  gRNA
atcgtctcctcatgattgaa

SEQ ID NO: 115403 - DNA, 20 bp, Artificial Sequence
  MKO10115403_B_Setd2
  gRNA
ctggggcttaagggctgcta

SEQ ID NO: 115404 - DNA, 20 bp, Artificial Sequence
  MKO10115404_B_Setd3
  gRNA
acttccctgatctaatgaaa

SEQ ID NO: 115405 - DNA, 20 bp, Artificial Sequence
  MKO10115405_B_Setd3
  gRNA
tgaaaacggggcttctgtcg

SEQ ID NO: 115406 - DNA, 20 bp, Artificial Sequence
  MKO10115406_B_Setd3
  gRNA
acagtcattagtaactttcg

SEQ ID NO: 115407 - DNA, 20 bp, Artificial Sequence
  MKO10115407_B_Setd4
  gRNA
gcttcgaatcacagtgtccg

SEQ ID NO: 115408 - DNA, 20 bp, Artificial Sequence
  MKO10115408_B_Setd4
  gRNA
ttagtacccgccagctttcc

SEQ ID NO: 115409 - DNA, 20 bp, Artificial Sequence
  MKO10115409_B_Setd4
  gRNA
actgtgattcgaagctccct

SEQ ID NO: 115410 - DNA, 20 bp, Artificial Sequence
  MKO10115410_B_Setd5
  gRNA
atccctcgttctgacctgaa

SEQ ID NO: 115411 - DNA, 20 bp, Artificial Sequence
  MKO10115411_B_Setd5
  gRNA
ccctctttaggggaatgagc

SEQ ID NO: 115412 - DNA, 20 bp, Artificial Sequence
  MKO10115412_B_Setd5
  gRNA
ggaaggttattagacttcat

SEQ ID NO: 115413 - DNA, 20 bp, Artificial Sequence
  MKO10115413_B_Setd6
  gRNA
taatgccaatctagagtact

SEQ ID NO: 115414 - DNA, 20 bp, Artificial Sequence
  MKO10115414_B_Setd6
  gRNA
ggcgctgctccacgagctcc

SEQ ID NO: 115415 - DNA, 20 bp, Artificial Sequence
  MKO10115415_B_Setd6
  gRNA
ggcgcgctgcagagcctgtc

SEQ ID NO: 115416 - DNA, 20 bp, Artificial Sequence
  MKO10115416_B_Setd7
  gRNA
gtgacagtgcagaacccgtg

SEQ ID NO: 115417 - DNA, 20 bp, Artificial Sequence
  MKO10115417_B_Setd7
  gRNA
cttcattgacttccccgacg

SEQ ID NO: 115418 - DNA, 20 bp, Artificial Sequence
  MKO10115418_B_Setd7
  gRNA
gtctggaaggagagcatcgc

SEQ ID NO: 115419 - DNA, 20 bp, Artificial Sequence
  MKO10115419_B_Setd8
  gRNA
agccctgaaaaagtccctca

SEQ ID NO: 115420 - DNA, 20 bp, Artificial Sequence
  MKO10115420_B_Setd8
  gRNA
gaactcggttgcccatcatg

SEQ ID NO: 115421 - DNA, 20 bp, Artificial Sequence
  MKO10115421_B_Setd8
  gRNA
agcgcttcgtataacgttcc

SEQ ID NO: 115422 - DNA, 20 bp, Artificial Sequence
  MKO10115422_B_Setdb1
  gRNA
cagaactccaaaagaccaga

SEQ ID NO: 115423 - DNA, 20 bp, Artificial Sequence
  MKO10115423_B_Setdb1
  gRNA
caaagcatgtcctccctccc

SEQ ID NO: 115424 - DNA, 20 bp, Artificial Sequence
  MKO10115424_B_Setdb1
  gRNA
tctgcagagtcagctgcagc

SEQ ID NO: 115425 - DNA, 20 bp, Artificial Sequence
  MKO10115425_B_Setdb2
  gRNA
ggagttgtcacatgatgcag

SEQ ID NO: 115426 - DNA, 20 bp, Artificial Sequence
  MKO10115426_B_Setdb2
  gRNA
catttactagattcattgct

SEQ ID NO: 115427 - DNA, 20 bp, Artificial Sequence
  MKO10115427_B_Setdb2
  gRNA
tcttctgtttcagtgaatgt

SEQ ID NO: 115428 - DNA, 20 bp, Artificial Sequence
  MKO10115428_B_Setmar
  gRNA
agaccataaatgtctgcgga

SEQ ID NO: 115429 - DNA, 20 bp, Artificial Sequence
  MKO10115429_B_Setmar
  gRNA
acgatgacaatttatgcctt

SEQ ID NO: 115430 - DNA, 20 bp, Artificial Sequence
  MKO10115430_B_Setmar
  gRNA
ccacagtaacaaggctttcg

SEQ ID NO: 115431 - DNA, 20 bp, Artificial Sequence
  MKO10115431_B_Setx
  gRNA
agatgactattatgacttac

SEQ ID NO: 115432 - DNA, 20 bp, Artificial Sequence
  MKO10115432_B_Setx
  gRNA
agccatggattcactgttgc

SEQ ID NO: 115433 - DNA, 20 bp, Artificial Sequence
  MKO10115433_B_Setx
  gRNA
catgttgttgactattcttg

SEQ ID NO: 115434 - DNA, 20 bp, Artificial Sequence
  MKO10115434_B_Set
  gRNA
aatgttgttacccaaaaatt

SEQ ID NO: 115435 - DNA, 20 bp, Artificial Sequence
  MKO10115435_B_Set
  gRNA
aaattctgtcacttcaactc

SEQ ID NO: 115436 - DNA, 20 bp, Artificial Sequence
  MKO10115436_B_Set
  gRNA
tccagatttccatttgattt

SEQ ID NO: 115437 - DNA, 20 bp, Artificial Sequence
  MKO10115437_B_Sez6l2
  gRNA
catgtccttaccctcaatcc

SEQ ID NO: 115438 - DNA, 20 bp, Artificial Sequence
  MKO10115438_B_Sez6l2
  gRNA
ccttccgcagcaaagcccca

SEQ ID NO: 115439 - DNA, 20 bp, Artificial Sequence
  MKO10115439_B_Sez6l2
  gRNA
agtcgccatggggactccca

SEQ ID NO: 115440 - DNA, 20 bp, Artificial Sequence
  MKO10115440_B_Sez6l
  gRNA
cagcagccccggtagcccgc

SEQ ID NO: 115441 - DNA, 20 bp, Artificial Sequence
  MKO10115441_B_Sez6l
  gRNA
cggtgtgagcttctccgacc

SEQ ID NO: 115442 - DNA, 20 bp, Artificial Sequence
  MKO10115442_B_Sez6l
  gRNA
gctgctctccatccgaggag

SEQ ID NO: 115443 - DNA, 20 bp, Artificial Sequence
  MKO10115443_B_Sez6
  gRNA
caggaacgactggttagcca

SEQ ID NO: 115444 - DNA, 20 bp, Artificial Sequence
  MKO10115444_B_Sez6
  gRNA
taaagacggggcggttgtcc

SEQ ID NO: 115445 - DNA, 20 bp, Artificial Sequence
  MKO10115445_B_Sez6
  gRNA
acagtcacatctccatacgc

SEQ ID NO: 115446 - DNA, 20 bp, Artificial Sequence
  MKO10115446_B_Sf1
  gRNA
tgaaccaatctacaacagcg

SEQ ID NO: 115447 - DNA, 20 bp, Artificial Sequence
  MKO10115447_B_Sf1
  gRNA
atgcctacagttataccccc

SEQ ID NO: 115448 - DNA, 20 bp, Artificial Sequence
  MKO10115448_B_Sf1
  gRNA
gcccagcttacccagcggcg

SEQ ID NO: 115449 - DNA, 20 bp, Artificial Sequence
  MKO10115449_B_Sf3a1
  gRNA
acctggtccaaaacttctcg

SEQ ID NO: 115450 - DNA, 20 bp, Artificial Sequence
  MKO10115450_B_Sf3a1
  gRNA
tcgacgatgttcctgacctc

SEQ ID NO: 115451 - DNA, 20 bp, Artificial Sequence
  MKO10115451_B_Sf3a1
  gRNA
ccatgcctactaccgccaca

SEQ ID NO: 115452 - DNA, 20 bp, Artificial Sequence
  MKO10115452_B_Sf3a2
  gRNA
cagggcccggcgagctgcca

SEQ ID NO: 115453 - DNA, 20 bp, Artificial Sequence
  MKO10115453_B_Sf3a2
  gRNA
cctcattgttatgcagagtc

SEQ ID NO: 115454 - DNA, 20 bp, Artificial Sequence
  MKO10115454_B_Sf3a2
  gRNA
cccacctcacctggaacagc

SEQ ID NO: 115455 - DNA, 20 bp, Artificial Sequence
  MKO10115455_B_Sf3a3
  gRNA
cctcatttgggtgcttccga

SEQ ID NO: 115456 - DNA, 20 bp, Artificial Sequence
  MKO10115456_B_Sf3a3
  gRNA
gagggatttgtatgatgata

SEQ ID NO: 115457 - DNA, 20 bp, Artificial Sequence
  MKO10115457_B_Sf3a3
  gRNA
tcctcaaattccactgacat

SEQ ID NO: 115458 - DNA, 20 bp, Artificial Sequence
  MKO10115458_B_Sf3b1
  gRNA
tttgtattcatcttcccgat

SEQ ID NO: 115459 - DNA, 20 bp, Artificial Sequence
  MKO10115459_B_Sf3b1
  gRNA
ttctcgcataacatccatgt

SEQ ID NO: 115460 - DNA, 20 bp, Artificial Sequence
  MKO10115460_B_Sf3b1
  gRNA
gcgagaacaacatttgacta

SEQ ID NO: 115461 - DNA, 20 bp, Artificial Sequence
  MKO10115461_B_Sf3b2
  gRNA
tcacccactcgaagaggtgg

SEQ ID NO: 115462 - DNA, 20 bp, Artificial Sequence
  MKO10115462_B_Sf3b2
  gRNA
tgcagtccctcggccgcctc

SEQ ID NO: 115463 - DNA, 20 bp, Artificial Sequence
  MKO10115463_B_Sf3b2
  gRNA
tcttcttctgacagcgccac

SEQ ID NO: 115464 - DNA, 20 bp, Artificial Sequence
  MKO10115464_B_Sf3b3
  gRNA
acaccagagtgttcgctttg

SEQ ID NO: 115465 - DNA, 20 bp, Artificial Sequence
  MKO10115465_B_Sf3b3
  gRNA
gagcagattagcactccact

SEQ ID NO: 115466 - DNA, 20 bp, Artificial Sequence
  MKO10115466_B_Sf3b3
  gRNA
gaaccacatgatttaagcca

SEQ ID NO: 115467 - DNA, 20 bp, Artificial Sequence
  MKO10115467_B_Sf3b4
  gRNA
ggggtgcatcggcaaacagc

SEQ ID NO: 115468 - DNA, 20 bp, Artificial Sequence
  MKO10115468_B_Sf3b4
  gRNA
cctcgggggggcatgcccat

SEQ ID NO: 115469 - DNA, 20 bp, Artificial Sequence
  MKO10115469_B_Sf3b4
  gRNA
tacgatactttcagcgcctt

SEQ ID NO: 115470 - DNA, 20 bp, Artificial Sequence
  MKO10115470_B_Sf3b5
  gRNA
cttgtccgcgggcggcccgc

SEQ ID NO: 115471 - DNA, 20 bp, Artificial Sequence
  MKO10115471_B_Sf3b5
  gRNA
gcgggctttgctctcgttct

SEQ ID NO: 115472 - DNA, 20 bp, Artificial Sequence
  MKO10115472_B_Sf3b5
  gRNA
gccacgccgacaccaccaag

SEQ ID NO: 115473 - DNA, 20 bp, Artificial Sequence
  MKO10115473_B_Sfi1
  gRNA
gagtgactccctctagagcc

SEQ ID NO: 115474 - DNA, 20 bp, Artificial Sequence
  MKO10115474_B_Sfi1
  gRNA
cacagagcttccactccctc

SEQ ID NO: 115475 - DNA, 20 bp, Artificial Sequence
  MKO10115475_B_Sfi1
  gRNA
tgagcagaaaatattacaga

SEQ ID NO: 115476 - DNA, 20 bp, Artificial Sequence
  MKO10115476_B_Sfmbt1
  gRNA
accagtgttcaaaaccgtca

SEQ ID NO: 115477 - DNA, 20 bp, Artificial Sequence
  MKO10115477_B_Sfmbt1
  gRNA
aaagctggcctctaccccat

SEQ ID NO: 115478 - DNA, 20 bp, Artificial Sequence
  MKO10115478_B_Sfmbt1
  gRNA
gaggaccacaggctcctatc

SEQ ID NO: 115479 - DNA, 20 bp, Artificial Sequence
  MKO10115479_B_Sfmbt2
  gRNA
ttcctcatccgtgaattgac

SEQ ID NO: 115480 - DNA, 20 bp, Artificial Sequence
  MKO10115480_B_Sfmbt2
  gRNA
tccgagaaccagtcaattca

SEQ ID NO: 115481 - DNA, 20 bp, Artificial Sequence
  MKO10115481_B_Sfmbt2
  gRNA
cttcagctggggagactatt

SEQ ID NO: 115482 - DNA, 20 bp, Artificial Sequence
  MKO10115482_B_Sfn
  gRNA
ttccgtagcttacaagaacg

SEQ ID NO: 115483 - DNA, 20 bp, Artificial Sequence
  MKO10115483_B_Sfn
  gRNA
cgacaccgtactcggcctgc

SEQ ID NO: 115484 - DNA, 20 bp, Artificial Sequence
  MKO10115484_B_Sfn
  gRNA
gcctaccaaccccatccgcc

SEQ ID NO: 115485 - DNA, 20 bp, Artificial Sequence
  MKO10115485_B_Sfpq
  gRNA
gtgccatgctgagcaaaacg

SEQ ID NO: 115486 - DNA, 20 bp, Artificial Sequence
  MKO10115486_B_Sfpq
  gRNA
tcgtcatctaactgttcaag

SEQ ID NO: 115487 - DNA, 20 bp, Artificial Sequence
  MKO10115487_B_Sfpq
  gRNA
gactcctcgcccagtcattg

SEQ ID NO: 115488 - DNA, 20 bp, Artificial Sequence
  MKO10115488_B_Sfr1
  gRNA
cacgtgtgaatctaagtcgt

SEQ ID NO: 115489 - DNA, 20 bp, Artificial Sequence
  MKO10115489_B_Sfr1
  gRNA
tcaccccattcgaatagttc

SEQ ID NO: 115490 - DNA, 20 bp, Artificial Sequence
  MKO10115490_B_Sfr1
  gRNA
cacctgccgttcctcagacc

SEQ ID NO: 115491 - DNA, 20 bp, Artificial Sequence
  MKO10115491_B_Sfrp1
  gRNA
cgacaacgagttgaagtcag

SEQ ID NO: 115492 - DNA, 20 bp, Artificial Sequence
  MKO10115492_B_Sfrp1
  gRNA
tgctgacagccattcacaag

SEQ ID NO: 115493 - DNA, 20 bp, Artificial Sequence
  MKO10115493_B_Sfrp1
  gRNA
tttcttgtcccacttgtgaa

SEQ ID NO: 115494 - DNA, 20 bp, Artificial Sequence
  MKO10115494_B_Sfrp2
  gRNA
cacgccgttcagcttgtaaa

SEQ ID NO: 115495 - DNA, 20 bp, Artificial Sequence
  MKO10115495_B_Sfrp2
  gRNA
gtcgttgtcgtcctcattct

SEQ ID NO: 115496 - DNA, 20 bp, Artificial Sequence
  MKO10115496_B_Sfrp2
  gRNA
tttgcaggcttcacacacct

SEQ ID NO: 115497 - DNA, 20 bp, Artificial Sequence
  MKO10115497_B_Sfrp4
  gRNA
ttgcaatgaggtcacaactg

SEQ ID NO: 115498 - DNA, 20 bp, Artificial Sequence
  MKO10115498_B_Sfrp4
  gRNA
gactgtaaacgtctgagccc

SEQ ID NO: 115499 - DNA, 20 bp, Artificial Sequence
  MKO10115499_B_Sfrp4
  gRNA
ctgagcaaaaactacagcta

SEQ ID NO: 115500 - DNA, 20 bp, Artificial Sequence
  MKO10115500_B_Sfrp5
  gRNA
ggtcatgggccgcaaagtag

SEQ ID NO: 115501 - DNA, 20 bp, Artificial Sequence
  MKO10115501_B_Sfrp5
  gRNA
gcacagcgctgatggcctca

SEQ ID NO: 115502 - DNA, 20 bp, Artificial Sequence
  MKO10115502_B_Sfrp5
  gRNA
cgctgtgctccatctcacac

SEQ ID NO: 115503 - DNA, 20 bp, Artificial Sequence
  MKO10115503_B_Sfrs18
  gRNA
ggaacaatgtccattgggcc

SEQ ID NO: 115504 - DNA, 20 bp, Artificial Sequence
  MKO10115504_B_Sfrs18
  gRNA
cttccagcctggattcgtga

SEQ ID NO: 115505 - DNA, 20 bp, Artificial Sequence
  MKO10115505_B_Sfrs18
  gRNA
tacgatgctttgctgtcctg

SEQ ID NO: 115506 - DNA, 20 bp, Artificial Sequence
  MKO10115506_B_Sfswap
  gRNA
tccctgcttgcatacgaagt

SEQ ID NO: 115507 - DNA, 20 bp, Artificial Sequence
  MKO10115507_B_Sfswap
  gRNA
gctgccgtaagtgaacccta

SEQ ID NO: 115508 - DNA, 20 bp, Artificial Sequence
  MKO10115508_B_Sfswap
  gRNA
ttatgacccgtcagagccca

SEQ ID NO: 115509 - DNA, 20 bp, Artificial Sequence
  MKO10115509_B_Sft2d1
  gRNA
tatgacaaaccacttcaacc

SEQ ID NO: 115510 - DNA, 20 bp, Artificial Sequence
  MKO10115510_B_Sft2d1
  gRNA
catccctgagtttcaacacc

SEQ ID NO: 115511 - DNA, 20 bp, Artificial Sequence
  MKO10115511_B_Sft2d1
  gRNA
ttaccctgtgtgctgctctg

SEQ ID NO: 115512 - DNA, 20 bp, Artificial Sequence
  MKO10115512_B_Sft2d2
  gRNA
gtaacatcatgtcaattggg

SEQ ID NO: 115513 - DNA, 20 bp, Artificial Sequence
  MKO10115513_B_Sft2d2
  gRNA
cttcatcgcatgctttgctc

SEQ ID NO: 115514 - DNA, 20 bp, Artificial Sequence
  MKO10115514_B_Sft2d2
  gRNA
tcttagtaccgtcttcctca

SEQ ID NO: 115515 - DNA, 20 bp, Artificial Sequence
  MKO10115515_B_Sft2d3
  gRNA
ccgtcagcaccgtactgcgc

SEQ ID NO: 115516 - DNA, 20 bp, Artificial Sequence
  MKO10115516_B_Sft2d3
  gRNA
cagcgccgtcacaccgcccc

SEQ ID NO: 115517 - DNA, 20 bp, Artificial Sequence
  MKO10115517_B_Sft2d3
  gRNA
cgctggcctcgcgtcacgct

SEQ ID NO: 115518 - DNA, 20 bp, Artificial Sequence
  MKO10115518_B_Sfta2
  gRNA
gctttcaggctctgcaagta

SEQ ID NO: 115519 - DNA, 20 bp, Artificial Sequence
  MKO10115519_B_Sfta2
  gRNA
ggtcttgtcctgaaaagtct

SEQ ID NO: 115520 - DNA, 20 bp, Artificial Sequence
  MKO10115520_B_Sfta2
  gRNA
cattggtccctgatggcaga

SEQ ID NO: 115521 - DNA, 20 bp, Artificial Sequence
  MKO10115521_B_Sftpa1
  gRNA
ccaggtcttcctgggcgcga

SEQ ID NO: 115522 - DNA, 20 bp, Artificial Sequence
  MKO10115522_B_Sftpa1
  gRNA
catggtttgcccggcagaga

SEQ ID NO: 115523 - DNA, 20 bp, Artificial Sequence
  MKO10115523_B_Sftpa1
  gRNA
ccaggcagcccatcgcgccc

SEQ ID NO: 115524 - DNA, 20 bp, Artificial Sequence
  MKO10115524_B_Sftpb
  gRNA
tgctctcccaggaagcaatc

SEQ ID NO: 115525 - DNA, 20 bp, Artificial Sequence
  MKO10115525_B_Sftpb
  gRNA
ggccttgccaagagggctcc

SEQ ID NO: 115526 - DNA, 20 bp, Artificial Sequence
  MKO10115526_B_Sftpb
  gRNA
gagggccttgtgcacactcc

SEQ ID NO: 115527 - DNA, 20 bp, Artificial Sequence
  MKO10115527_B_Sftpc
  gRNA
gtcatacacaacgatgccag

SEQ ID NO: 115528 - DNA, 20 bp, Artificial Sequence
  MKO10115528_B_Sftpc
  gRNA
ctagcgaaagcctcaagact

SEQ ID NO: 115529 - DNA, 20 bp, Artificial Sequence
  MKO10115529_B_Sftpc
  gRNA
ctgctcgctcactcggggct

SEQ ID NO: 115530 - DNA, 20 bp, Artificial Sequence
  MKO10115530_B_Sftpd
  gRNA
caaggcaaaccaggtcctaa

SEQ ID NO: 115531 - DNA, 20 bp, Artificial Sequence
  MKO10115531_B_Sftpd
  gRNA
tcaggagaagtaggtgctcc

SEQ ID NO: 115532 - DNA, 20 bp, Artificial Sequence
  MKO10115532_B_Sftpd
  gRNA
cctctgtcccccttgagtcc

SEQ ID NO: 115533 - DNA, 20 bp, Artificial Sequence
  MKO10115533_B_Sfxn1
  gRNA
ttctgcaaccactggcgctg

SEQ ID NO: 115534 - DNA, 20 bp, Artificial Sequence
  MKO10115534_B_Sfxn1
  gRNA
aggcaaggaatcgttcctgc

SEQ ID NO: 115535 - DNA, 20 bp, Artificial Sequence
  MKO10115535_B_Sfxn1
  gRNA
tggttaaggcattgagtcct

SEQ ID NO: 115536 - DNA, 20 bp, Artificial Sequence
  MKO10115536_B_Sfxn2
  gRNA
cccgtgatgagcatgccacc

SEQ ID NO: 115537 - DNA, 20 bp, Artificial Sequence
  MKO10115537_B_Sfxn2
  gRNA
aggcacccatcggcccacca

SEQ ID NO: 115538 - DNA, 20 bp, Artificial Sequence
  MKO10115538_B_Sfxn2
  gRNA
cagcttcccccacgtctgtc

SEQ ID NO: 115539 - DNA, 20 bp, Artificial Sequence
  MKO10115539_B_Sfxn3
  gRNA
accaccttctcccccgtgtc

SEQ ID NO: 115540 - DNA, 20 bp, Artificial Sequence
  MKO10115540_B_Sfxn3
  gRNA
tgtaattctgcacgatgttc

SEQ ID NO: 115541 - DNA, 20 bp, Artificial Sequence
  MKO10115541_B_Sfxn3
  gRNA
ggaacatcgtgcagaattac

SEQ ID NO: 115542 - DNA, 20 bp, Artificial Sequence
  MKO10115542_B_Sfxn4
  gRNA
ctctttagattaaagacgca

SEQ ID NO: 115543 - DNA, 20 bp, Artificial Sequence
  MKO10115543_B_Sfxn4
  gRNA
cacctgcaggtcgaaaaaga

SEQ ID NO: 115544 - DNA, 20 bp, Artificial Sequence
  MKO10115544_B_Sfxn4
  gRNA
gggatcaacttgctgctgtc

SEQ ID NO: 115545 - DNA, 20 bp, Artificial Sequence
  MKO10115545_B_Sfxn5
  gRNA
tcgaacactctttgtcactg

SEQ ID NO: 115546 - DNA, 20 bp, Artificial Sequence
  MKO10115546_B_Sfxn5
  gRNA
tccacagaaacgtctcagag

SEQ ID NO: 115547 - DNA, 20 bp, Artificial Sequence
  MKO10115547_B_Sfxn5
  gRNA
acctgttcatttgtaactcc

SEQ ID NO: 115548 - DNA, 20 bp, Artificial Sequence
  MKO10115548_B_Sgca
  gRNA
cccctcttaccaacgtgttc

SEQ ID NO: 115549 - DNA, 20 bp, Artificial Sequence
  MKO10115549_B_Sgca
  gRNA
atgctggcacctcgatgact

SEQ ID NO: 115550 - DNA, 20 bp, Artificial Sequence
  MKO10115550_B_Sgca
  gRNA
gtggtaggtgagtcggacag

SEQ ID NO: 115551 - DNA, 20 bp, Artificial Sequence
  MKO10115551_B_Sgcb
  gRNA
gatcgtcctcctgtttatcc

SEQ ID NO: 115552 - DNA, 20 bp, Artificial Sequence
  MKO10115552_B_Sgcb
  gRNA
caggaggacgatcacgcaga

SEQ ID NO: 115553 - DNA, 20 bp, Artificial Sequence
  MKO10115553_B_Sgcb
  gRNA
gcaattgtgcgaggcaacga

SEQ ID NO: 115554 - DNA, 20 bp, Artificial Sequence
  MKO10115554_B_Sgcd
  gRNA
ttctgcggatgacagtgaag

SEQ ID NO: 115555 - DNA, 20 bp, Artificial Sequence
  MKO10115555_B_Sgcd
  gRNA
tgtcagagcagaccccttca

SEQ ID NO: 115556 - DNA, 20 bp, Artificial Sequence
  MKO10115556_B_Sgcd
  gRNA
agcttaccttagttccttga

SEQ ID NO: 115557 - DNA, 20 bp, Artificial Sequence
  MKO10115557_B_Sgce
  gRNA
aagatgagccccgcgaccac

SEQ ID NO: 115558 - DNA, 20 bp, Artificial Sequence
  MKO10115558_B_Sgce
  gRNA
gacgtacctttgagactgca

SEQ ID NO: 115559 - DNA, 20 bp, Artificial Sequence
  MKO10115559_B_Sgce
  gRNA
gttatgccttgcagtctcaa

SEQ ID NO: 115560 - DNA, 20 bp, Artificial Sequence
  MKO10115560_B_Sgcg
  gRNA
ctgacccatttcaagacctt

SEQ ID NO: 115561 - DNA, 20 bp, Artificial Sequence
  MKO10115561_B_Sgcg
  gRNA
caggacgttgtggttggcac

SEQ ID NO: 115562 - DNA, 20 bp, Artificial Sequence
  MKO10115562_B_Sgcg
  gRNA
caaagaaatacgctccagag

SEQ ID NO: 115563 - DNA, 20 bp, Artificial Sequence
  MKO10115563_B_Sgcz
  gRNA
gaaagaaattcattcccgaa

SEQ ID NO: 115564 - DNA, 20 bp, Artificial Sequence
  MKO10115564_B_Sgcz
  gRNA
gatgaagatgagatcactat

SEQ ID NO: 115565 - DNA, 20 bp, Artificial Sequence
  MKO10115565_B_Sgcz
  gRNA
gtccagtgagctgccccata

SEQ ID NO: 115566 - DNA, 20 bp, Artificial Sequence
  MKO10115566_B_Sgip1
  gRNA
gcgcacactctgctttgcta

SEQ ID NO: 115567 - DNA, 20 bp, Artificial Sequence
  MKO10115567_B_Sgip1
  gRNA
ttctttcttccgtattccaa

SEQ ID NO: 115568 - DNA, 20 bp, Artificial Sequence
  MKO10115568_B_Sgip1
  gRNA
aaatacttaccattccatct

SEQ ID NO: 115569 - DNA, 20 bp, Artificial Sequence
  MKO10115569_B_Sgk1
  gRNA
tccctctcaacaaatcaacc

SEQ ID NO: 115570 - DNA, 20 bp, Artificial Sequence
  MKO10115570_B_Sgk1
  gRNA
acccaggttgatttgttgag

SEQ ID NO: 115571 - DNA, 20 bp, Artificial Sequence
  MKO10115571_B_Sgk1
  gRNA
aacttactgtttgcatgcat

SEQ ID NO: 115572 - DNA, 20 bp, Artificial Sequence
  MKO10115572_B_Sgk2
  gRNA
acgtgctgttgaagaacgtg

SEQ ID NO: 115573 - DNA, 20 bp, Artificial Sequence
  MKO10115573_B_Sgk2
  gRNA
actcactttgggttggctga

SEQ ID NO: 115574 - DNA, 20 bp, Artificial Sequence
  MKO10115574_B_Sgk2
  gRNA
ccccaggttgatgttcccat

SEQ ID NO: 115575 - DNA, 20 bp, Artificial Sequence
  MKO10115575_B_Sgk3
  gRNA
attcctgccaagagaatatt

SEQ ID NO: 115576 - DNA, 20 bp, Artificial Sequence
  MKO10115576_B_Sgk3
  gRNA
gaatgagttcattcagaact

SEQ ID NO: 115577 - DNA, 20 bp, Artificial Sequence
  MKO10115577_B_Sgk3
  gRNA
ggaatcttcagagccatagc

SEQ ID NO: 115578 - DNA, 20 bp, Artificial Sequence
  MKO10115578_B_Sgms1
  gRNA
agcgcatgaccactacactg

SEQ ID NO: 115579 - DNA, 20 bp, Artificial Sequence
  MKO10115579_B_Sgms1
  gRNA
ggccggtagtccaccttagt

SEQ ID NO: 115580 - DNA, 20 bp, Artificial Sequence
  MKO10115580_B_Sgms1
  gRNA
catgttgtgcgagcctgtga

SEQ ID NO: 115581 - DNA, 20 bp, Artificial Sequence
  MKO10115581_B_Sgms2
  gRNA
tggcgggggactgtctatca

SEQ ID NO: 115582 - DNA, 20 bp, Artificial Sequence
  MKO10115582_B_Sgms2
  gRNA
acatagttatacagcgatac

SEQ ID NO: 115583 - DNA, 20 bp, Artificial Sequence
  MKO10115583_B_Sgms2
  gRNA
cattatcctccccgatcttc

SEQ ID NO: 115584 - DNA, 20 bp, Artificial Sequence
  MKO10115584_B_Sgol1
  gRNA
tatctatccgtcgccattta

SEQ ID NO: 115585 - DNA, 20 bp, Artificial Sequence
  MKO10115585_B_Sgol1
  gRNA
ccagcattgacaatacgacc

SEQ ID NO: 115586 - DNA, 20 bp, Artificial Sequence
  MKO10115586_B_Sgol1
  gRNA
ggacttccctgacaagtccc

SEQ ID NO: 115587 - DNA, 20 bp, Artificial Sequence
  MKO10115587_B_Sgol2
  gRNA
acaacaacagagcattagcg

SEQ ID NO: 115588 - DNA, 20 bp, Artificial Sequence
  MKO10115588_B_Sgol2
  gRNA
ctgacaggagaaaagaacct

SEQ ID NO: 115589 - DNA, 20 bp, Artificial Sequence
  MKO10115589_B_Sgol2
  gRNA
tgaaataagcagtctttctg

SEQ ID NO: 115590 - DNA, 20 bp, Artificial Sequence
  MKO10115590_B_Sgpl1
  gRNA
actccacgcaatgagctgcc

SEQ ID NO: 115591 - DNA, 20 bp, Artificial Sequence
  MKO10115591_B_Sgpl1
  gRNA
accgaagctcacggagctgc

SEQ ID NO: 115592 - DNA, 20 bp, Artificial Sequence
  MKO10115592_B_Sgpl1
  gRNA
cataatccttgtccaccttt

SEQ ID NO: 115593 - DNA, 20 bp, Artificial Sequence
  MKO10115593_B_Sgpp1
  gRNA
aatgtcatgacacggaatac

SEQ ID NO: 115594 - DNA, 20 bp, Artificial Sequence
  MKO10115594_B_Sgpp1
  gRNA
agaatcagcccgtagataag

SEQ ID NO: 115595 - DNA, 20 bp, Artificial Sequence
  MKO10115595_B_Sgpp1
  gRNA
ttcccatgtagattctactt

SEQ ID NO: 115596 - DNA, 20 bp, Artificial Sequence
  MKO10115596_B_Sgpp2
  gRNA
aagcggctgaaaaccggaac

SEQ ID NO: 115597 - DNA, 20 bp, Artificial Sequence
  MKO10115597_B_Sgpp2
  gRNA
acgtgatgtagaacacttcc

SEQ ID NO: 115598 - DNA, 20 bp, Artificial Sequence
  MKO10115598_B_Sgpp2
  gRNA
aatgccatccacccacgcca

SEQ ID NO: 115599 - DNA, 20 bp, Artificial Sequence
  MKO10115599_B_Sgsh
  gRNA
catcactagaattaagcaac

SEQ ID NO: 115600 - DNA, 20 bp, Artificial Sequence
  MKO10115600_B_Sgsh
  gRNA
tcttcctcagcggatgacgg

SEQ ID NO: 115601 - DNA, 20 bp, Artificial Sequence
  MKO10115601_B_Sgsh
  gRNA
cgttacggaagataaggctg

SEQ ID NO: 115602 - DNA, 20 bp, Artificial Sequence
  MKO10115602_B_Sgsm1
  gRNA
gtcctcgtggacgaactttc

SEQ ID NO: 115603 - DNA, 20 bp, Artificial Sequence
  MKO10115603_B_Sgsm1
  gRNA
cagaggccgagacccgccag

SEQ ID NO: 115604 - DNA, 20 bp, Artificial Sequence
  MKO10115604_B_Sgsm1
  gRNA
acccgcagggaccgaagcca

SEQ ID NO: 115605 - DNA, 20 bp, Artificial Sequence
  MKO10115605_B_Sgsm2
  gRNA
cggccctgttcaccaaagtg

SEQ ID NO: 115606 - DNA, 20 bp, Artificial Sequence
  MKO10115606_B_Sgsm2
  gRNA
ggacagggttgtacagtacc

SEQ ID NO: 115607 - DNA, 20 bp, Artificial Sequence
  MKO10115607_B_Sgsm2
  gRNA
atcttcatgcacgaatttcc

SEQ ID NO: 115608 - DNA, 20 bp, Artificial Sequence
  MKO10115608_B_Sgsm3
  gRNA
tgagaccatcgctgccaaac

SEQ ID NO: 115609 - DNA, 20 bp, Artificial Sequence
  MKO10115609_B_Sgsm3
  gRNA
aaccacacgccttctgccag

SEQ ID NO: 115610 - DNA, 20 bp, Artificial Sequence
  MKO10115610_B_Sgsm3
  gRNA
ctgccctgactccaagcata

SEQ ID NO: 115611 - DNA, 20 bp, Artificial Sequence
  MKO10115611_B_Sgta
  gRNA
gaggcggctgtgcacctcta

SEQ ID NO: 115612 - DNA, 20 bp, Artificial Sequence
  MKO10115612_B_Sgta
  gRNA
tgaggcagagcgcctcaaaa

SEQ ID NO: 115613 - DNA, 20 bp, Artificial Sequence
  MKO10115613_B_Sgta
  gRNA
ggtgtcctgtcaggggcccg

SEQ ID NO: 115614 - DNA, 20 bp, Artificial Sequence
  MKO10115614_B_Sgtb
  gRNA
gctttcaaactcagtgcccg

SEQ ID NO: 115615 - DNA, 20 bp, Artificial Sequence
  MKO10115615_B_Sgtb
  gRNA
ctacacgcaggcaatagaac

SEQ ID NO: 115616 - DNA, 20 bp, Artificial Sequence
  MKO10115616_B_Sgtb
  gRNA
taaaaacggtctccaaacac

SEQ ID NO: 115617 - DNA, 20 bp, Artificial Sequence
  MKO10115617_B_Sh2b1
  gRNA
aggcttcttacccggggctt

SEQ ID NO: 115618 - DNA, 20 bp, Artificial Sequence
  MKO10115618_B_Sh2b1
  gRNA
acgccgatggccggtctgag

SEQ ID NO: 115619 - DNA, 20 bp, Artificial Sequence
  MKO10115619_B_Sh2b1
  gRNA
acaaacgtgttctccctgtc

SEQ ID NO: 115620 - DNA, 20 bp, Artificial Sequence
  MKO10115620_B_Sh2b2
  gRNA
gcagtgagtctatcgtttcc

SEQ ID NO: 115621 - DNA, 20 bp, Artificial Sequence
  MKO10115621_B_Sh2b2
  gRNA
gaacggagcagaatacatcc

SEQ ID NO: 115622 - DNA, 20 bp, Artificial Sequence
  MKO10115622_B_Sh2b2
  gRNA
ttgtgcacggggaggctgcc

SEQ ID NO: 115623 - DNA, 20 bp, Artificial Sequence
  MKO10115623_B_Sh2b3
  gRNA
tgatgcccacggcgtgttcc

SEQ ID NO: 115624 - DNA, 20 bp, Artificial Sequence
  MKO10115624_B_Sh2b3
  gRNA
cgagttacctctttccttag

SEQ ID NO: 115625 - DNA, 20 bp, Artificial Sequence
  MKO10115625_B_Sh2b3
  gRNA
ggctctgccgctaaggaaag

SEQ ID NO: 115626 - DNA, 20 bp, Artificial Sequence
  MKO10115626_B_Sh2d1a
  gRNA
cgagtgtcccagacagaaac

SEQ ID NO: 115627 - DNA, 20 bp, Artificial Sequence
  MKO10115627_B_Sh2d1a
  gRNA
tatccagttgaaaagtcctc

SEQ ID NO: 115628 - DNA, 20 bp, Artificial Sequence
  MKO10115628_B_Sh2d1a
  gRNA
tccaagaacctgtttctgtc

SEQ ID NO: 115629 - DNA, 20 bp, Artificial Sequence
  MKO10115629_B_Sh2d1b1
  gRNA
cgaatcttcagagagaaaca

SEQ ID NO: 115630 - DNA, 20 bp, Artificial Sequence
  MKO10115630_B_Sh2d1b1
  gRNA
catgtttctctctgaagatt

SEQ ID NO: 115631 - DNA, 20 bp, Artificial Sequence
  MKO10115631_B_Sh2d1b1
  gRNA
aggatactcacgagacacag

SEQ ID NO: 115632 - DNA, 20 bp, Artificial Sequence
  MKO10115632_B_Sh2d1b2
  gRNA
cgaatcttcagagagaaaaa

SEQ ID NO: 115633 - DNA, 20 bp, Artificial Sequence
  MKO10115633_B_Sh2d1b2
  gRNA
aggatactcacgagacacag

SEQ ID NO: 115634 - DNA, 20 bp, Artificial Sequence
  MKO10115634_B_Sh2d1b2
  gRNA
atggatctgccttactacca

SEQ ID NO: 115635 - DNA, 20 bp, Artificial Sequence
  MKO10115635_B_Sh2d2a
  gRNA
cgcaccagatagcatcctag

SEQ ID NO: 115636 - DNA, 20 bp, Artificial Sequence
  MKO10115636_B_Sh2d2a
  gRNA
tgctcaagactgcccctctt

SEQ ID NO: 115637 - DNA, 20 bp, Artificial Sequence
  MKO10115637_B_Sh2d2a
  gRNA
tgaccttcgtgctgtcctac

SEQ ID NO: 115638 - DNA, 20 bp, Artificial Sequence
  MKO10115638_B_Sh2d3c
  gRNA
tgctagcttaccagtgctat

SEQ ID NO: 115639 - DNA, 20 bp, Artificial Sequence
  MKO10115639_B_Sh2d3c
  gRNA
ggccgctggggactatgtga

SEQ ID NO: 115640 - DNA, 20 bp, Artificial Sequence
  MKO10115640_B_Sh2d3c
  gRNA
gtctcgaggatggggtaatg

SEQ ID NO: 115641 - DNA, 20 bp, Artificial Sequence
  MKO10115641_B_Sh2d4a
  gRNA
tcagatgctccctctccgca

SEQ ID NO: 115642 - DNA, 20 bp, Artificial Sequence
  MKO10115642_B_Sh2d4a
  gRNA
gacccagagcaataccaacc

SEQ ID NO: 115643 - DNA, 20 bp, Artificial Sequence
  MKO10115643_B_Sh2d4a
  gRNA
gccccagttcctacagccgc

SEQ ID NO: 115644 - DNA, 20 bp, Artificial Sequence
  MKO10115644_B_Sh2d4b
  gRNA
ccgcaaggctgctaaaattt

SEQ ID NO: 115645 - DNA, 20 bp, Artificial Sequence
  MKO10115645_B_Sh2d4b
  gRNA
cgagcaacaagcatctccag

SEQ ID NO: 115646 - DNA, 20 bp, Artificial Sequence
  MKO10115646_B_Sh2d4b
  gRNA
ttcacgctcctcattctcac

SEQ ID NO: 115647 - DNA, 20 bp, Artificial Sequence
  MKO10115647_B_Sh2d5
  gRNA
tagtgcgagagcccttcagc

SEQ ID NO: 115648 - DNA, 20 bp, Artificial Sequence
  MKO10115648_B_Sh2d5
  gRNA
gcttcagcgcatgggccatt

SEQ ID NO: 115649 - DNA, 20 bp, Artificial Sequence
  MKO10115649_B_Sh2d5
  gRNA
tgagtgtccaagtcatccac

SEQ ID NO: 115650 - DNA, 20 bp, Artificial Sequence
  MKO10115650_B_Sh2d7
  gRNA
ctcggatgaagtgagtgcag

SEQ ID NO: 115651 - DNA, 20 bp, Artificial Sequence
  MKO10115651_B_Sh2d7
  gRNA
tgtctgtgaagaagagcctc

SEQ ID NO: 115652 - DNA, 20 bp, Artificial Sequence
  MKO10115652_B_Sh2d7
  gRNA
gacaagaagcacaaattctg

SEQ ID NO: 115653 - DNA, 20 bp, Artificial Sequence
  MKO10115653_B_Sh3bgrl2
  gRNA
cgccacgaagcctgagcatg

SEQ ID NO: 115654 - DNA, 20 bp, Artificial Sequence
  MKO10115654_B_Sh3bgrl2
  gRNA
gaagccacggccggcatcca

SEQ ID NO: 115655 - DNA, 20 bp, Artificial Sequence
  MKO10115655_B_Sh3bgrl2
  gRNA
ttcctcgaactctatcttgt

SEQ ID NO: 115656 - DNA, 20 bp, Artificial Sequence
  MKO10115656_B_Sh3bgrl3
  gRNA
tcaggactatgaactcttcg

SEQ ID NO: 115657 - DNA, 20 bp, Artificial Sequence
  MKO10115657_B_Sh3bgrl3
  gRNA
tcgagatgagatgcgaacct

SEQ ID NO: 115658 - DNA, 20 bp, Artificial Sequence
  MKO10115658_B_Sh3bgrl3
  gRNA
tcctgactcaggccagcttc

SEQ ID NO: 115659 - DNA, 20 bp, Artificial Sequence
  MKO10115659_B_Sh3bgrl
  gRNA
gacagcaccacctggttcaa

SEQ ID NO: 115660 - DNA, 20 bp, Artificial Sequence
  MKO10115660_B_Sh3bgrl
  gRNA
tggtgctgtcaagcctaaaa

SEQ ID NO: 115661 - DNA, 20 bp, Artificial Sequence
  MKO10115661_B_Sh3bgrl
  gRNA
gtatatattgcatcttcttc

SEQ ID NO: 115662 - DNA, 20 bp, Artificial Sequence
  MKO10115662_B_Sh3bgr
  gRNA
cttcccaatggagatgtagc

SEQ ID NO: 115663 - DNA, 20 bp, Artificial Sequence
  MKO10115663_B_Sh3bgr
  gRNA
gctgtaggtgacaaagtctg

SEQ ID NO: 115664 - DNA, 20 bp, Artificial Sequence
  MKO10115664_B_Sh3bgr
  gRNA
tgctcttcattgaagatctg

SEQ ID NO: 115665 - DNA, 20 bp, Artificial Sequence
  MKO10115665_B_Sh3bp1
  gRNA
ggctgacatggacaagcggg

SEQ ID NO: 115666 - DNA, 20 bp, Artificial Sequence
  MKO10115666_B_Sh3bp1
  gRNA
actggatcctgattccagca

SEQ ID NO: 115667 - DNA, 20 bp, Artificial Sequence
  MKO10115667_B_Sh3bp1
  gRNA
gctcaccccatgctggaatc

SEQ ID NO: 115668 - DNA, 20 bp, Artificial Sequence
  MKO10115668_B_Sh3bp2
  gRNA
ccagccttcgccacaccacc

SEQ ID NO: 115669 - DNA, 20 bp, Artificial Sequence
  MKO10115669_B_Sh3bp2
  gRNA
tcagcaagaagcaccgaaca

SEQ ID NO: 115670 - DNA, 20 bp, Artificial Sequence
  MKO10115670_B_Sh3bp2
  gRNA
caccttgcgctcatcctcag

SEQ ID NO: 115671 - DNA, 20 bp, Artificial Sequence
  MKO10115671_B_Sh3bp4
  gRNA
ctcggtagctgtccccaatc

SEQ ID NO: 115672 - DNA, 20 bp, Artificial Sequence
  MKO10115672_B_Sh3bp4
  gRNA
gtcccctccgacttgcaccg

SEQ ID NO: 115673 - DNA, 20 bp, Artificial Sequence
  MKO10115673_B_Sh3bp4
  gRNA
atgagtctcctcaccgagac

SEQ ID NO: 115674 - DNA, 20 bp, Artificial Sequence
  MKO10115674_B_Sh3bp5l
  gRNA
ctcctgcaggatcctccgat

SEQ ID NO: 115675 - DNA, 20 bp, Artificial Sequence
  MKO10115675_B_Sh3bp5l
  gRNA
ggctcttgccaatggcccgc

SEQ ID NO: 115676 - DNA, 20 bp, Artificial Sequence
  MKO10115676_B_Sh3bp5l
  gRNA
aagagcggcttcgaggtgaa

SEQ ID NO: 115677 - DNA, 20 bp, Artificial Sequence
  MKO10115677_B_Sh3bp5
  gRNA
aacggtgaaactagacgaac

SEQ ID NO: 115678 - DNA, 20 bp, Artificial Sequence
  MKO10115678_B_Sh3bp5
  gRNA
cgaggtactccgtgcagcca

SEQ ID NO: 115679 - DNA, 20 bp, Artificial Sequence
  MKO10115679_B_Sh3bp5
  gRNA
agccaggtacaacgctgcca

SEQ ID NO: 115680 - DNA, 20 bp, Artificial Sequence
  MKO10115680_B_Sh3d19
  gRNA
cttcctgccgaaaagccagt

SEQ ID NO: 115681 - DNA, 20 bp, Artificial Sequence
  MKO10115681_B_Sh3d19
  gRNA
taccaagcctcccgattcgc

SEQ ID NO: 115682 - DNA, 20 bp, Artificial Sequence
  MKO10115682_B_Sh3d19
  gRNA
actggagcaagccagcgaat

SEQ ID NO: 115683 - DNA, 20 bp, Artificial Sequence
  MKO10115683_B_Sh3d21
  gRNA
cctcgggttggtagtcaaat

SEQ ID NO: 115684 - DNA, 20 bp, Artificial Sequence
  MKO10115684_B_Sh3d21
  gRNA
ttaggaggcctctgtgaatt

SEQ ID NO: 115685 - DNA, 20 bp, Artificial Sequence
  MKO10115685_B_Sh3d21
  gRNA
caattaccccaaattcacag

SEQ ID NO: 115686 - DNA, 20 bp, Artificial Sequence
  MKO10115686_B_Sh3gl1
  gRNA
ccaacagctggtcagcgaga

SEQ ID NO: 115687 - DNA, 20 bp, Artificial Sequence
  MKO10115687_B_Sh3gl1
  gRNA
tggactcacctgcatctagc

SEQ ID NO: 115688 - DNA, 20 bp, Artificial Sequence
  MKO10115688_B_Sh3gl1
  gRNA
tggggccgaagggaccaaac

SEQ ID NO: 115689 - DNA, 20 bp, Artificial Sequence
  MKO10115689_B_Sh3gl2
  gRNA
ctcggaggtcaaggactcat

SEQ ID NO: 115690 - DNA, 20 bp, Artificial Sequence
  MKO10115690_B_Sh3gl2
  gRNA
tctcccacctcaccgagagc

SEQ ID NO: 115691 - DNA, 20 bp, Artificial Sequence
  MKO10115691_B_Sh3gl2
  gRNA
agcacttacctggattgggt

SEQ ID NO: 115692 - DNA, 20 bp, Artificial Sequence
  MKO10115692_B_Sh3gl3
  gRNA
gagtatctccaacccaatcc

SEQ ID NO: 115693 - DNA, 20 bp, Artificial Sequence
  MKO10115693_B_Sh3gl3
  gRNA
tttgcctgcatatctatccc

SEQ ID NO: 115694 - DNA, 20 bp, Artificial Sequence
  MKO10115694_B_Sh3gl3
  gRNA
taagcatacagagctaagct

SEQ ID NO: 115695 - DNA, 20 bp, Artificial Sequence
  MKO10115695_B_Sh3glb1
  gRNA
aacttaccataagctgtccc

SEQ ID NO: 115696 - DNA, 20 bp, Artificial Sequence
  MKO10115696_B_Sh3glb1
  gRNA
ccttctataaagtttcttaa

SEQ ID NO: 115697 - DNA, 20 bp, Artificial Sequence
  MKO10115697_B_Sh3glb1
  gRNA
ctgatgtttgaatcagctct

SEQ ID NO: 115698 - DNA, 20 bp, Artificial Sequence
  MKO10115698_B_Sh3glb2
  gRNA
gggggactggaaaacgattt

SEQ ID NO: 115699 - DNA, 20 bp, Artificial Sequence
  MKO10115699_B_Sh3glb2
  gRNA
tctccctacaggtgctcgag

SEQ ID NO: 115700 - DNA, 20 bp, Artificial Sequence
  MKO10115700_B_Sh3glb2
  gRNA
tgctgtctgcccgagctagg

SEQ ID NO: 115701 - DNA, 20 bp, Artificial Sequence
  MKO10115701_B_Sh3kbp1
  gRNA
aactccagacccatcgaaga

SEQ ID NO: 115702 - DNA, 20 bp, Artificial Sequence
  MKO10115702_B_Sh3kbp1
  gRNA
ccttccttgtcaaagtccga

SEQ ID NO: 115703 - DNA, 20 bp, Artificial Sequence
  MKO10115703_B_Sh3kbp1
  gRNA
tgatggaggtggcggtttct

SEQ ID NO: 115704 - DNA, 20 bp, Artificial Sequence
  MKO10115704_B_Sh3pxd2a
  gRNA
taccctgcagtattcatcga

SEQ ID NO: 115705 - DNA, 20 bp, Artificial Sequence
  MKO10115705_B_Sh3pxd2a
  gRNA
ccacctcccagactatctac

SEQ ID NO: 115706 - DNA, 20 bp, Artificial Sequence
  MKO10115706_B_Sh3pxd2a
  gRNA
agtactcacatagtgtttag

SEQ ID NO: 115707 - DNA, 20 bp, Artificial Sequence
  MKO10115707_B_Sh3pxd2b
  gRNA
tcttccgccgcagccacatc

SEQ ID NO: 115708 - DNA, 20 bp, Artificial Sequence
  MKO10115708_B_Sh3pxd2b
  gRNA
ccttacccacctggcagaaa

SEQ ID NO: 115709 - DNA, 20 bp, Artificial Sequence
  MKO10115709_B_Sh3pxd2b
  gRNA
ctacatctctcagtgtgatg

SEQ ID NO: 115710 - DNA, 20 bp, Artificial Sequence
  MKO10115710_B_Sh3rf1
  gRNA
tacctgagacggggcgctgc

SEQ ID NO: 115711 - DNA, 20 bp, Artificial Sequence
  MKO10115711_B_Sh3rf1
  gRNA
tggggtcacaattaacccag

SEQ ID NO: 115712 - DNA, 20 bp, Artificial Sequence
  MKO10115712_B_Sh3rf1
  gRNA
actgaccgtgatccgcagag

SEQ ID NO: 115713 - DNA, 20 bp, Artificial Sequence
  MKO10115713_B_Sh3rf2
  gRNA
cttacaggtgcctcgagcca

SEQ ID NO: 115714 - DNA, 20 bp, Artificial Sequence
  MKO10115714_B_Sh3rf2
  gRNA
gggagattaatggcgtcagc

SEQ ID NO: 115715 - DNA, 20 bp, Artificial Sequence
  MKO10115715_B_Sh3rf2
  gRNA
ccctgggctctttcggagcg

SEQ ID NO: 115716 - DNA, 20 bp, Artificial Sequence
  MKO10115716_B_Sh3rf3
  gRNA
gctgtccacacgtcgttgaa

SEQ ID NO: 115717 - DNA, 20 bp, Artificial Sequence
  MKO10115717_B_Sh3rf3
  gRNA
gtaagcttacctccacgtac

SEQ ID NO: 115718 - DNA, 20 bp, Artificial Sequence
  MKO10115718_B_Sh3rf3
  gRNA
ctcacacgttgaggggcagc

SEQ ID NO: 115719 - DNA, 20 bp, Artificial Sequence
  MKO10115719_B_Sh3tc1
  gRNA
gcctgctggagaacgatagc

SEQ ID NO: 115720 - DNA, 20 bp, Artificial Sequence
  MKO10115720_B_Sh3tc1
  gRNA
gctgtctatccacagtgacc

SEQ ID NO: 115721 - DNA, 20 bp, Artificial Sequence
  MKO10115721_B_Sh3tc1
  gRNA
tgtcttaccaagagcatgat

SEQ ID NO: 115722 - DNA, 20 bp, Artificial Sequence
  MKO10115722_B_Sh3tc2
  gRNA
catacctaagttcaggtacg

SEQ ID NO: 115723 - DNA, 20 bp, Artificial Sequence
  MKO10115723_B_Sh3tc2
  gRNA
tcttctttgaccacacgtac

SEQ ID NO: 115724 - DNA, 20 bp, Artificial Sequence
  MKO10115724_B_Sh3tc2
  gRNA
ataccttgggtcatattctg

SEQ ID NO: 115725 - DNA, 20 bp, Artificial Sequence
  MKO10115725_B_Sh3yl1
  gRNA
gattgtcctggcgcgtcttc

SEQ ID NO: 115726 - DNA, 20 bp, Artificial Sequence
  MKO10115726_B_Sh3yl1
  gRNA
ctaccaggaatgatcttatc

SEQ ID NO: 115727 - DNA, 20 bp, Artificial Sequence
  MKO10115727_B_Sh3yl1
  gRNA
gcttctgatttcagattaga

SEQ ID NO: 115728 - DNA, 20 bp, Artificial Sequence
  MKO10115728_B_Shank1
  gRNA
gcagcttgggacgtctgaca

SEQ ID NO: 115729 - DNA, 20 bp, Artificial Sequence
  MKO10115729_B_Shank1
  gRNA
tacctcctgaatctgagtcg

SEQ ID NO: 115730 - DNA, 20 bp, Artificial Sequence
  MKO10115730_B_Shank1
  gRNA
tgccctgagcgagagtctac

SEQ ID NO: 115731 - DNA, 20 bp, Artificial Sequence
  MKO10115731_B_Shank2
  gRNA
ggtggtgaacatgatccgcc

SEQ ID NO: 115732 - DNA, 20 bp, Artificial Sequence
  MKO10115732_B_Shank2
  gRNA
tcggagcccgctttggaggt

SEQ ID NO: 115733 - DNA, 20 bp, Artificial Sequence
  MKO10115733_B_Shank2
  gRNA
ttcctccaactccgctgtca

SEQ ID NO: 115734 - DNA, 20 bp, Artificial Sequence
  MKO10115734_B_Shank3
  gRNA
acaggactacccgcctaacc

SEQ ID NO: 115735 - DNA, 20 bp, Artificial Sequence
  MKO10115735_B_Shank3
  gRNA
cataaactctccgcttgtat

SEQ ID NO: 115736 - DNA, 20 bp, Artificial Sequence
  MKO10115736_B_Shank3
  gRNA
catagtccatgaacttcttc

SEQ ID NO: 115737 - DNA, 20 bp, Artificial Sequence
  MKO10115737_B_Sharpin
  gRNA
cacagttgaagacgccacat

SEQ ID NO: 115738 - DNA, 20 bp, Artificial Sequence
  MKO10115738_B_Sharpin
  gRNA
gagccacatgatgctgcgcc

SEQ ID NO: 115739 - DNA, 20 bp, Artificial Sequence
  MKO10115739_B_Sharpin
  gRNA
gacatgggcagacgatgaag

SEQ ID NO: 115740 - DNA, 20 bp, Artificial Sequence
  MKO10115740_B_Shbg
  gRNA
agttaccggaaaccgaagtt

SEQ ID NO: 115741 - DNA, 20 bp, Artificial Sequence
  MKO10115741_B_Shbg
  gRNA
catctcccatcgtccagccg

SEQ ID NO: 115742 - DNA, 20 bp, Artificial Sequence
  MKO10115742_B_Shbg
  gRNA
gtgcaatcctcatgctgcgc

SEQ ID NO: 115743 - DNA, 20 bp, Artificial Sequence
  MKO10115743_B_Shb
  gRNA
acggcgccagctccgtgccc

SEQ ID NO: 115744 - DNA, 20 bp, Artificial Sequence
  MKO10115744_B_Shb
  gRNA
actccttacagagtcgcagc

SEQ ID NO: 115745 - DNA, 20 bp, Artificial Sequence
  MKO10115745_B_Shb
  gRNA
agtagtcatgtttgctggtc

SEQ ID NO: 115746 - DNA, 20 bp, Artificial Sequence
  MKO10115746_B_Shc1
  gRNA
ctccagggaggccatcagtt

SEQ ID NO: 115747 - DNA, 20 bp, Artificial Sequence
  MKO10115747_B_Shc1
  gRNA
cctacctacctgtttgcagt

SEQ ID NO: 115748 - DNA, 20 bp, Artificial Sequence
  MKO10115748_B_Shc1
  gRNA
cctacagtacatgggctgtg

SEQ ID NO: 115749 - DNA, 20 bp, Artificial Sequence
  MKO10115749_B_Shc2
  gRNA
gtctgttcccgccacccgcc

SEQ ID NO: 115750 - DNA, 20 bp, Artificial Sequence
  MKO10115750_B_Shc2
  gRNA
gcagtctatttccttcgcct

SEQ ID NO: 115751 - DNA, 20 bp, Artificial Sequence
  MKO10115751_B_Shc2
  gRNA
acacccgaacacaggtgacg

SEQ ID NO: 115752 - DNA, 20 bp, Artificial Sequence
  MKO10115752_B_Shc3
  gRNA
aagagatagaccgcatatga

SEQ ID NO: 115753 - DNA, 20 bp, Artificial Sequence
  MKO10115753_B_Shc3
  gRNA
ctggcacagcttcgcagaca

SEQ ID NO: 115754 - DNA, 20 bp, Artificial Sequence
  MKO10115754_B_Shc3
  gRNA
cgtgtctgcgaagctgtgcc

SEQ ID NO: 115755 - DNA, 20 bp, Artificial Sequence
  MKO10115755_B_Shc4
  gRNA
caatcgatttcatttgcctc

SEQ ID NO: 115756 - DNA, 20 bp, Artificial Sequence
  MKO10115756_B_Shc4
  gRNA
gaatctcttaccttgtaact

SEQ ID NO: 115757 - DNA, 20 bp, Artificial Sequence
  MKO10115757_B_Shc4
  gRNA
tggagccattaaaaaacgaa

SEQ ID NO: 115758 - DNA, 20 bp, Artificial Sequence
  MKO10115758_B_Shcbp1l
  gRNA
acctcgtccaccaagtcccg

SEQ ID NO: 115759 - DNA, 20 bp, Artificial Sequence
  MKO10115759_B_Shcbp1l
  gRNA
tcgaccaggatcccaacaaa

SEQ ID NO: 115760 - DNA, 20 bp, Artificial Sequence
  MKO10115760_B_Shcbp1l
  gRNA
agctatgagtagatacctgt

SEQ ID NO: 115761 - DNA, 20 bp, Artificial Sequence
  MKO10115761_B_Shcbp1
  gRNA
tgatagccttgatcactgca

SEQ ID NO: 115762 - DNA, 20 bp, Artificial Sequence
  MKO10115762_B_Shcbp1
  gRNA
cagactgcccaccatccaga

SEQ ID NO: 115763 - DNA, 20 bp, Artificial Sequence
  MKO10115763_B_Shcbp1
  gRNA
ttaatttgtagctgactgta

SEQ ID NO: 115764 - DNA, 20 bp, Artificial Sequence
  MKO10115764_B_Shd
  gRNA
gctgtatccacacgctccgc

SEQ ID NO: 115765 - DNA, 20 bp, Artificial Sequence
  MKO10115765_B_Shd
  gRNA
cctcttccagtgcaatttga

SEQ ID NO: 115766 - DNA, 20 bp, Artificial Sequence
  MKO10115766_B_Shd
  gRNA
gaaggttctcggcctctgct

SEQ ID NO: 115767 - DNA, 20 bp, Artificial Sequence
  MKO10115767_B_She
  gRNA
atgcagggagaccgcaccac

SEQ ID NO: 115768 - DNA, 20 bp, Artificial Sequence
  MKO10115768_B_She
  gRNA
cctttgacctttcgtccgtt

SEQ ID NO: 115769 - DNA, 20 bp, Artificial Sequence
  MKO10115769_B_She
  gRNA
ctgacccgtatgatgccaaa

SEQ ID NO: 115770 - DNA, 20 bp, Artificial Sequence
  MKO10115770_B_Shfm1
  gRNA
aagatgaagatgcacatgtc

SEQ ID NO: 115771 - DNA, 20 bp, Artificial Sequence
  MKO10115771_B_Shfm1
  gRNA
agtgctgagctggagaagca

SEQ ID NO: 115772 - DNA, 20 bp, Artificial Sequence
  MKO10115772_B_Shfm1
  gRNA
cgacttgggtctcttggaag

SEQ ID NO: 115773 - DNA, 20 bp, Artificial Sequence
  MKO10115773_B_Shf
  gRNA
agttctccgatccttcaaac

SEQ ID NO: 115774 - DNA, 20 bp, Artificial Sequence
  MKO10115774_B_Shf
  gRNA
actgttgcgcaccaggtagc

SEQ ID NO: 115775 - DNA, 20 bp, Artificial Sequence
  MKO10115775_B_Shf
  gRNA
ggggttcccagcagatagcc

SEQ ID NO: 115776 - DNA, 20 bp, Artificial Sequence
  MKO10115776_B_Shh
  gRNA
gaccgggaccgcagcaagta

SEQ ID NO: 115777 - DNA, 20 bp, Artificial Sequence
  MKO10115777_B_Shh
  gRNA
aagaaactccgaacgattta

SEQ ID NO: 115778 - DNA, 20 bp, Artificial Sequence
  MKO10115778_B_Shh
  gRNA
acactatgagggtcgagcag

SEQ ID NO: 115779 - DNA, 20 bp, Artificial Sequence
  MKO10115779_B_Shisa2
  gRNA
gtcgccgccgtcgaagcgct

SEQ ID NO: 115780 - DNA, 20 bp, Artificial Sequence
  MKO10115780_B_Shisa2
  gRNA
atgcggcaacgagagacccg

SEQ ID NO: 115781 - DNA, 20 bp, Artificial Sequence
  MKO10115781_B_Shisa2
  gRNA
ccgatgtctacgtccaaagc

SEQ ID NO: 115782 - DNA, 20 bp, Artificial Sequence
  MKO10115782_B_Shisa3
  gRNA
tatgtccccttcctgatcgt

SEQ ID NO: 115783 - DNA, 20 bp, Artificial Sequence
  MKO10115783_B_Shisa3
  gRNA
cgcgcagggcaactatcacg

SEQ ID NO: 115784 - DNA, 20 bp, Artificial Sequence
  MKO10115784_B_Shisa3
  gRNA
tgctcgtgggcttgctacgt

SEQ ID NO: 115785 - DNA, 20 bp, Artificial Sequence
  MKO10115785_B_Shisa4
  gRNA
gcccgcagcgctggcgagtg

SEQ ID NO: 115786 - DNA, 20 bp, Artificial Sequence
  MKO10115786_B_Shisa4
  gRNA
gctaccagcggtactgctgc

SEQ ID NO: 115787 - DNA, 20 bp, Artificial Sequence
  MKO10115787_B_Shisa4
  gRNA
gccagtataccagtaccccc

SEQ ID NO: 115788 - DNA, 20 bp, Artificial Sequence
  MKO10115788_B_Shisa5
  gRNA
cacaaagatggtcacgccaa

SEQ ID NO: 115789 - DNA, 20 bp, Artificial Sequence
  MKO10115789_B_Shisa5
  gRNA
tagggtggtgggtactgcgt

SEQ ID NO: 115790 - DNA, 20 bp, Artificial Sequence
  MKO10115790_B_Shisa5
  gRNA
gatcgaattgtcttcaccaa

SEQ ID NO: 115791 - DNA, 20 bp, Artificial Sequence
  MKO10115791_B_Shisa6
  gRNA
tgggtagcgctgcttaagat

SEQ ID NO: 115792 - DNA, 20 bp, Artificial Sequence
  MKO10115792_B_Shisa6
  gRNA
gatgaataacattctgacgt

SEQ ID NO: 115793 - DNA, 20 bp, Artificial Sequence
  MKO10115793_B_Shisa6
  gRNA
ctctttgggagaggtatcga

SEQ ID NO: 115794 - DNA, 20 bp, Artificial Sequence
  MKO10115794_B_Shisa7
  gRNA
cttgcactcaccgaggttgg

SEQ ID NO: 115795 - DNA, 20 bp, Artificial Sequence
  MKO10115795_B_Shisa7
  gRNA
caagcaccacgccgccacac

SEQ ID NO: 115796 - DNA, 20 bp, Artificial Sequence
  MKO10115796_B_Shisa7
  gRNA
agcaggacctgcaacccgcc

SEQ ID NO: 115797 - DNA, 20 bp, Artificial Sequence
  MKO10115797_B_Shisa9
  gRNA
tgttgccataagcctgccgc

SEQ ID NO: 115798 - DNA, 20 bp, Artificial Sequence
  MKO10115798_B_Shisa9
  gRNA
caacaagtacgcctccttaa

SEQ ID NO: 115799 - DNA, 20 bp, Artificial Sequence
  MKO10115799_B_Shisa9
  gRNA
gtacttacggagattattta

SEQ ID NO: 115800 - DNA, 20 bp, Artificial Sequence
  MKO10115800_B_Shkbp1
  gRNA
ccatgcagatcttcatcgac

SEQ ID NO: 115801 - DNA, 20 bp, Artificial Sequence
  MKO10115801_B_Shkbp1
  gRNA
ctgggatccaggtaagcgtc

SEQ ID NO: 115802 - DNA, 20 bp, Artificial Sequence
  MKO10115802_B_Shkbp1
  gRNA
cagctccggtctcatctttc

SEQ ID NO: 115803 - DNA, 20 bp, Artificial Sequence
  MKO10115803_B_Shmt1
  gRNA
aagcccatgattcgcccatg

SEQ ID NO: 115804 - DNA, 20 bp, Artificial Sequence
  MKO10115804_B_Shmt1
  gRNA
tcacctgcgatgatcagctt

SEQ ID NO: 115805 - DNA, 20 bp, Artificial Sequence
  MKO10115805_B_Shmt1
  gRNA
tcggctggcaaaattctccg

SEQ ID NO: 115806 - DNA, 20 bp, Artificial Sequence
  MKO10115806_B_Shmt2
  gRNA
cctggagctcatcgcctcag

SEQ ID NO: 115807 - DNA, 20 bp, Artificial Sequence
  MKO10115807_B_Shmt2
  gRNA
cgagtacttgttgttgagac

SEQ ID NO: 115808 - DNA, 20 bp, Artificial Sequence
  MKO10115808_B_Shmt2
  gRNA
cagcaaggtggcccagacgc

SEQ ID NO: 115809 - DNA, 20 bp, Artificial Sequence
  MKO10115809_B_Shoc2
  gRNA
ttgcttccagttatatccag

SEQ ID NO: 115810 - DNA, 20 bp, Artificial Sequence
  MKO10115810_B_Shoc2
  gRNA
cgaatcaacaaaatcccatt

SEQ ID NO: 115811 - DNA, 20 bp, Artificial Sequence
  MKO10115811_B_Shoc2
  gRNA
taaattcaattctaccatac

SEQ ID NO: 115812 - DNA, 20 bp, Artificial Sequence
  MKO10115812_B_Shox2
  gRNA
atcgcaaagacgatgcgaaa

SEQ ID NO: 115813 - DNA, 20 bp, Artificial Sequence
  MKO10115813_B_Shox2
  gRNA
accgcccttcggactgccgc

SEQ ID NO: 115814 - DNA, 20 bp, Artificial Sequence
  MKO10115814_B_Shox2
  gRNA
taaagcacctacgttgacat

SEQ ID NO: 115815 - DNA, 20 bp, Artificial Sequence
  MKO10115815_B_Shpk
  gRNA
tcggctgtgcaaccatcttc

SEQ ID NO: 115816 - DNA, 20 bp, Artificial Sequence
  MKO10115816_B_Shpk
  gRNA
ctgtttctaggggcgggagc

SEQ ID NO: 115817 - DNA, 20 bp, Artificial Sequence
  MKO10115817_B_Shpk
  gRNA
ccgttgtaacagtagtttcc

SEQ ID NO: 115818 - DNA, 20 bp, Artificial Sequence
  MKO10115818_B_Shprh
  gRNA
cgagaaattgttacacctga

SEQ ID NO: 115819 - DNA, 20 bp, Artificial Sequence
  MKO10115819_B_Shprh
  gRNA
ctcaggaccggaatcaacgc

SEQ ID NO: 115820 - DNA, 20 bp, Artificial Sequence
  MKO10115820_B_Shprh
  gRNA
ctctactataatccatatac

SEQ ID NO: 115821 - DNA, 20 bp, Artificial Sequence
  MKO10115821_B_Shq1
  gRNA
caggtctgccaagccacttg

SEQ ID NO: 115822 - DNA, 20 bp, Artificial Sequence
  MKO10115822_B_Shq1
  gRNA
catacctttatctgcatcat

SEQ ID NO: 115823 - DNA, 20 bp, Artificial Sequence
  MKO10115823_B_Shq1
  gRNA
atttggccaactcagcagcc

SEQ ID NO: 115824 - DNA, 20 bp, Artificial Sequence
  MKO10115824_B_Shroom1
  gRNA
aagtctgcaggtcctgcgtg

SEQ ID NO: 115825 - DNA, 20 bp, Artificial Sequence
  MKO10115825_B_Shroom1
  gRNA
atcttgaggtgacggtgttt

SEQ ID NO: 115826 - DNA, 20 bp, Artificial Sequence
  MKO10115826_B_Shroom1
  gRNA
ttgtggacaccacctcacgc

SEQ ID NO: 115827 - DNA, 20 bp, Artificial Sequence
  MKO10115827_B_Shroom2
  gRNA
tctctgtacactacaagctg

SEQ ID NO: 115828 - DNA, 20 bp, Artificial Sequence
  MKO10115828_B_Shroom2
  gRNA
tcttgtgggagcctttcacc

SEQ ID NO: 115829 - DNA, 20 bp, Artificial Sequence
  MKO10115829_B_Shroom2
  gRNA
gtacctacctagcctggtgc

SEQ ID NO: 115830 - DNA, 20 bp, Artificial Sequence
  MKO10115830_B_Shroom3
  gRNA
acgttgcttcagatgatccg

SEQ ID NO: 115831 - DNA, 20 bp, Artificial Sequence
  MKO10115831_B_Shroom3
  gRNA
cgagtacatacctaggtcca

SEQ ID NO: 115832 - DNA, 20 bp, Artificial Sequence
  MKO10115832_B_Shroom3
  gRNA
ggcaccagagctaccattcc

SEQ ID NO: 115833 - DNA, 20 bp, Artificial Sequence
  MKO10115833_B_Shroom4
  gRNA
attgtatggctcccgccaag

SEQ ID NO: 115834 - DNA, 20 bp, Artificial Sequence
  MKO10115834_B_Shroom4
  gRNA
gactcacctagtgttgcaac

SEQ ID NO: 115835 - DNA, 20 bp, Artificial Sequence
  MKO10115835_B_Shroom4
  gRNA
tgcatggtggtggccacgtc

SEQ ID NO: 115836 - DNA, 20 bp, Artificial Sequence
  MKO10115836_B_Siae
  gRNA
cctgtggagtccctaataca

SEQ ID NO: 115837 - DNA, 20 bp, Artificial Sequence
  MKO10115837_B_Siae
  gRNA
agtgatggcgcaacagactt

SEQ ID NO: 115838 - DNA, 20 bp, Artificial Sequence
  MKO10115838_B_Siae
  gRNA
tgttgcgccatcacttcaaa

SEQ ID NO: 115839 - DNA, 20 bp, Artificial Sequence
  MKO10115839_B_Siah1a
  gRNA
tcccaatgggccccggcaag

SEQ ID NO: 115840 - DNA, 20 bp, Artificial Sequence
  MKO10115840_B_Siah1a
  gRNA
aactctgccacacaccgaaa

SEQ ID NO: 115841 - DNA, 20 bp, Artificial Sequence
  MKO10115841_B_Siah1a
  gRNA
ctgtaagtggcaaggctcct

SEQ ID NO: 115842 - DNA, 20 bp, Artificial Sequence
  MKO10115842_B_Siah1b
  gRNA
atccacagagatgagccgtc

SEQ ID NO: 115843 - DNA, 20 bp, Artificial Sequence
  MKO10115843_B_Siah1b
  gRNA
tcccaatgggccccggcagg

SEQ ID NO: 115844 - DNA, 20 bp, Artificial Sequence
  MKO10115844_B_Siah1b
  gRNA
ataatgctgtagcagcctga

SEQ ID NO: 115845 - DNA, 20 bp, Artificial Sequence
  MKO10115845_B_Siah2
  gRNA
tttcaagtaccagcatgaag

SEQ ID NO: 115846 - DNA, 20 bp, Artificial Sequence
  MKO10115846_B_Siah2
  gRNA
taagctgctgcccgacgtgc

SEQ ID NO: 115847 - DNA, 20 bp, Artificial Sequence
  MKO10115847_B_Siah2
  gRNA
agcttaacttctggcggcat

SEQ ID NO: 115848 - DNA, 20 bp, Artificial Sequence
  MKO10115848_B_Siah3
  gRNA
tgttggatctcattcacctc

SEQ ID NO: 115849 - DNA, 20 bp, Artificial Sequence
  MKO10115849_B_Siah3
  gRNA
cgactgcttcacttatcgcc

SEQ ID NO: 115850 - DNA, 20 bp, Artificial Sequence
  MKO10115850_B_Siah3
  gRNA
caatcctgtggatttgccgc

SEQ ID NO: 115851 - DNA, 20 bp, Artificial Sequence
  MKO10115851_B_Sidt1
  gRNA
ctttgtagatgtagcgtcca

SEQ ID NO: 115852 - DNA, 20 bp, Artificial Sequence
  MKO10115852_B_Sidt1
  gRNA
tggtgcccactacaagttgc

SEQ ID NO: 115853 - DNA, 20 bp, Artificial Sequence
  MKO10115853_B_Sidt1
  gRNA
tttacttacctgaggttgag

SEQ ID NO: 115854 - DNA, 20 bp, Artificial Sequence
  MKO10115854_B_Sidt2
  gRNA
ccagctccgagtcaaccgtg

SEQ ID NO: 115855 - DNA, 20 bp, Artificial Sequence
  MKO10115855_B_Sidt2
  gRNA
tgtggactcggtaattgtca

SEQ ID NO: 115856 - DNA, 20 bp, Artificial Sequence
  MKO10115856_B_Sidt2
  gRNA
gaagtacctctaccaaaaag

SEQ ID NO: 115857 - DNA, 20 bp, Artificial Sequence
  MKO10115857_B_Sigirr
  gRNA
accagctcgccaaagagtga

SEQ ID NO: 115858 - DNA, 20 bp, Artificial Sequence
  MKO10115858_B_Sigirr
  gRNA
ccctgctctatgttaagtgt

SEQ ID NO: 115859 - DNA, 20 bp, Artificial Sequence
  MKO10115859_B_Sigirr
  gRNA
agagattgtgtccagtgtcc

SEQ ID NO: 115860 - DNA, 20 bp, Artificial Sequence
  MKO10115860_B_Siglec15
  gRNA
accgagatgttgacgatccg

SEQ ID NO: 115861 - DNA, 20 bp, Artificial Sequence
  MKO10115861_B_Siglec15
  gRNA
cgtaccgtggaggggtgtcc

SEQ ID NO: 115862 - DNA, 20 bp, Artificial Sequence
  MKO10115862_B_Siglec15
  gRNA
gaaaactagaagagacgctt

SEQ ID NO: 115863 - DNA, 20 bp, Artificial Sequence
  MKO10115863_B_Siglec1
  gRNA
cggcaggtggtaatccactc

SEQ ID NO: 115864 - DNA, 20 bp, Artificial Sequence
  MKO10115864_B_Siglec1
  gRNA
tcaccagacgaccctacata

SEQ ID NO: 115865 - DNA, 20 bp, Artificial Sequence
  MKO10115865_B_Siglec1
  gRNA
gcacatgtcccgtgactccg

SEQ ID NO: 115866 - DNA, 20 bp, Artificial Sequence
  MKO10115866_B_Siglec5
  gRNA
gcaactgccacgggcggagt

SEQ ID NO: 115867 - DNA, 20 bp, Artificial Sequence
  MKO10115867_B_Siglec5
  gRNA
ctccacagaagatgaccatc

SEQ ID NO: 115868 - DNA, 20 bp, Artificial Sequence
  MKO10115868_B_Siglec5
  gRNA
catccaagtcacatctaccc

SEQ ID NO: 115869 - DNA, 20 bp, Artificial Sequence
  MKO10115869_B_Siglece
  gRNA
tggccagcttcaagcgtctc

SEQ ID NO: 115870 - DNA, 20 bp, Artificial Sequence
  MKO10115870_B_Siglece
  gRNA
cactgaggaacccgtagtgt

SEQ ID NO: 115871 - DNA, 20 bp, Artificial Sequence
  MKO10115871_B_Siglece
  gRNA
tgagtcagctccttgataga

SEQ ID NO: 115872 - DNA, 20 bp, Artificial Sequence
  MKO10115872_B_Siglecg
  gRNA
ccgagggcgcttccagctct

SEQ ID NO: 115873 - DNA, 20 bp, Artificial Sequence
  MKO10115873_B_Siglecg
  gRNA
gccagatatcttcattcctg

SEQ ID NO: 115874 - DNA, 20 bp, Artificial Sequence
  MKO10115874_B_Siglecg
  gRNA
actcacaggccactcttagt

SEQ ID NO: 115875 - DNA, 20 bp, Artificial Sequence
  MKO10115875_B_Siglech
  gRNA
tttgatagccgcttctccca

SEQ ID NO: 115876 - DNA, 20 bp, Artificial Sequence
  MKO10115876_B_Siglech
  gRNA
cactgaggagagtgtggtcg

SEQ ID NO: 115877 - DNA, 20 bp, Artificial Sequence
  MKO10115877_B_Siglech
  gRNA
gctatcaaattcctgcttct

SEQ ID NO: 115878 - DNA, 20 bp, Artificial Sequence
  MKO10115878_B_Sigmar1
  gRNA
gcagcttgctcgacagtatg

SEQ ID NO: 115879 - DNA, 20 bp, Artificial Sequence
  MKO10115879_B_Sigmar1
  gRNA
ctgtcaatcaggacgatact

SEQ ID NO: 115880 - DNA, 20 bp, Artificial Sequence
  MKO10115880_B_Sigmar1
  gRNA
ctccacgatcagccgagaga

SEQ ID NO: 115881 - DNA, 20 bp, Artificial Sequence
  MKO10115881_B_Sik1
  gRNA
aaatatcatcaagctttatc

SEQ ID NO: 115882 - DNA, 20 bp, Artificial Sequence
  MKO10115882_B_Sik1
  gRNA
gcaatctggagaagatctac

SEQ ID NO: 115883 - DNA, 20 bp, Artificial Sequence
  MKO10115883_B_Sik1
  gRNA
ctggcagattctgtcagccg

SEQ ID NO: 115884 - DNA, 20 bp, Artificial Sequence
  MKO10115884_B_Sik2
  gRNA
ggtctctgtgcactaccttc

SEQ ID NO: 115885 - DNA, 20 bp, Artificial Sequence
  MKO10115885_B_Sik2
  gRNA
tcacatcattaaactgtatc

SEQ ID NO: 115886 - DNA, 20 bp, Artificial Sequence
  MKO10115886_B_Sik2
  gRNA
tattcatgttgttatccagc

SEQ ID NO: 115887 - DNA, 20 bp, Artificial Sequence
  MKO10115887_B_Sik3
  gRNA
acagaccacttggtagccca

SEQ ID NO: 115888 - DNA, 20 bp, Artificial Sequence
  MKO10115888_B_Sik3
  gRNA
actcacccatatgtccactt

SEQ ID NO: 115889 - DNA, 20 bp, Artificial Sequence
  MKO10115889_B_Sik3
  gRNA
gttcaaacagatcgtcacag

SEQ ID NO: 115890 - DNA, 20 bp, Artificial Sequence
  MKO10115890_B_Sike1
  gRNA
ccagattagagacttacagc

SEQ ID NO: 115891 - DNA, 20 bp, Artificial Sequence
  MKO10115891_B_Sike1
  gRNA
aatggtcgctaagaaagccg

SEQ ID NO: 115892 - DNA, 20 bp, Artificial Sequence
  MKO10115892_B_Sike1
  gRNA
agtgatgcggagagctgttc

SEQ ID NO: 115893 - DNA, 20 bp, Artificial Sequence
  MKO10115893_B_Sil1
  gRNA
gtgcgaatgaacctacagac

SEQ ID NO: 115894 - DNA, 20 bp, Artificial Sequence
  MKO10115894_B_Sil1
  gRNA
gcagctcttccgccccattg

SEQ ID NO: 115895 - DNA, 20 bp, Artificial Sequence
  MKO10115895_B_Sil1
  gRNA
atttggccagcgcactcttg

SEQ ID NO: 115896 - DNA, 20 bp, Artificial Sequence
  MKO10115896_B_Sim1
  gRNA
ctaccactctcactttgtac

SEQ ID NO: 115897 - DNA, 20 bp, Artificial Sequence
  MKO10115897_B_Sim1
  gRNA
tcgaacgctccttctttcta

SEQ ID NO: 115898 - DNA, 20 bp, Artificial Sequence
  MKO10115898_B_Sim1
  gRNA
gtcatctcatcgtggtcagc

SEQ ID NO: 115899 - DNA, 20 bp, Artificial Sequence
  MKO10115899_B_Sim2
  gRNA
ctacctgggacaagcctaaa

SEQ ID NO: 115900 - DNA, 20 bp, Artificial Sequence
  MKO10115900_B_Sim2
  gRNA
gtcatctcgtcgtggtcaga

SEQ ID NO: 115901 - DNA, 20 bp, Artificial Sequence
  MKO10115901_B_Sim2
  gRNA
gagaccgcttctgtccattt

SEQ ID NO: 115902 - DNA, 20 bp, Artificial Sequence
  MKO10115902_B_Simc1
  gRNA
ctattgtataccccaacttg

SEQ ID NO: 115903 - DNA, 20 bp, Artificial Sequence
  MKO10115903_B_Simc1
  gRNA
acgctacgtagtgcaaaccc

SEQ ID NO: 115904 - DNA, 20 bp, Artificial Sequence
  MKO10115904_B_Simc1
  gRNA
ccctcatcgaagactaagaa

SEQ ID NO: 115905 - DNA, 20 bp, Artificial Sequence
  MKO10115905_B_Sin3a
  gRNA
cgagtgtcccagctatttaa

SEQ ID NO: 115906 - DNA, 20 bp, Artificial Sequence
  MKO10115906_B_Sin3a
  gRNA
tgaggtgcagactaatgaca

SEQ ID NO: 115907 - DNA, 20 bp, Artificial Sequence
  MKO10115907_B_Sin3a
  gRNA
taccgaactgcagtttcacc

SEQ ID NO: 115908 - DNA, 20 bp, Artificial Sequence
  MKO10115908_B_Sin3b
  gRNA
gacacacgcctgatcacacc

SEQ ID NO: 115909 - DNA, 20 bp, Artificial Sequence
  MKO10115909_B_Sin3b
  gRNA
aagcattaaaccccacgatg

SEQ ID NO: 115910 - DNA, 20 bp, Artificial Sequence
  MKO10115910_B_Sin3b
  gRNA
cgctctcacctacctcgacc

SEQ ID NO: 115911 - DNA, 20 bp, Artificial Sequence
  MKO10115911_B_Sipa1l1
  gRNA
tgatgagaacctcggtccag

SEQ ID NO: 115912 - DNA, 20 bp, Artificial Sequence
  MKO10115912_B_Sipa1l1
  gRNA
acaactaccgaataatattc

SEQ ID NO: 115913 - DNA, 20 bp, Artificial Sequence
  MKO10115913_B_Sipa1l1
  gRNA
tcttgtagctcatgacgctg

SEQ ID NO: 115914 - DNA, 20 bp, Artificial Sequence
  MKO10115914_B_Sipa1l2
  gRNA
cgcccggggcctacccctca

SEQ ID NO: 115915 - DNA, 20 bp, Artificial Sequence
  MKO10115915_B_Sipa1l2
  gRNA
atggaagcagcgtcgacaca

SEQ ID NO: 115916 - DNA, 20 bp, Artificial Sequence
  MKO10115916_B_Sipa1l2
  gRNA
ggtgccgtgccgagctgtgg

SEQ ID NO: 115917 - DNA, 20 bp, Artificial Sequence
  MKO10115917_B_Sipa1l3
  gRNA
caacatccattgcttgcgtc

SEQ ID NO: 115918 - DNA, 20 bp, Artificial Sequence
  MKO10115918_B_Sipa1l3
  gRNA
gagcagctcatcacgcttcg

SEQ ID NO: 115919 - DNA, 20 bp, Artificial Sequence
  MKO10115919_B_Sipa1l3
  gRNA
cgggccatacctcacgagtc

SEQ ID NO: 115920 - DNA, 20 bp, Artificial Sequence
  MKO10115920_B_Sipa1
  gRNA
agataggcccctcggggggc

SEQ ID NO: 115921 - DNA, 20 bp, Artificial Sequence
  MKO10115921_B_Sipa1
  gRNA
ggccgtgagcctgcgacggg

SEQ ID NO: 115922 - DNA, 20 bp, Artificial Sequence
  MKO10115922_B_Sipa1
  gRNA
cacgcctaataaccagcaac

SEQ ID NO: 115923 - DNA, 20 bp, Artificial Sequence
  MKO10115923_B_Sirpa
  gRNA
tttgctcgtagtcctgctga

SEQ ID NO: 115924 - DNA, 20 bp, Artificial Sequence
  MKO10115924_B_Sirpa
  gRNA
tgtggaagatgttgacccct

SEQ ID NO: 115925 - DNA, 20 bp, Artificial Sequence
  MKO10115925_B_Sirpa
  gRNA
tccgcgtcctgtttctgtac

SEQ ID NO: 115926 - DNA, 20 bp, Artificial Sequence
  MKO10115926_B_Sirpb1a
  gRNA
gttcagtgaccagcacagta

SEQ ID NO: 115927 - DNA, 20 bp, Artificial Sequence
  MKO10115927_B_Sirpb1a
  gRNA
tggagatgagatctctcact

SEQ ID NO: 115928 - DNA, 20 bp, Artificial Sequence
  MKO10115928_B_Sirpb1a
  gRNA
agctaaaccatcttcaccta

SEQ ID NO: 115929 - DNA, 20 bp, Artificial Sequence
  MKO10115929_B_Sirpb1b
  gRNA
tgtctgcttagggacagctc

SEQ ID NO: 115930 - DNA, 20 bp, Artificial Sequence
  MKO10115930_B_Sirpb1b
  gRNA
gttcagtgaccaccacagta

SEQ ID NO: 115931 - DNA, 20 bp, Artificial Sequence
  MKO10115931_B_Sirpb1b
  gRNA
actgaacatcagagagtgaa

SEQ ID NO: 115932 - DNA, 20 bp, Artificial Sequence
  MKO10115932_B_Sirt1
  gRNA
agcgtcatatcatccagctc

SEQ ID NO: 115933 - DNA, 20 bp, Artificial Sequence
  MKO10115933_B_Sirt1
  gRNA
aacaattcctccacctgagc

SEQ ID NO: 115934 - DNA, 20 bp, Artificial Sequence
  MKO10115934_B_Sirt1
  gRNA
attcatagctttgtcagata

SEQ ID NO: 115935 - DNA, 20 bp, Artificial Sequence
  MKO10115935_B_Sirt2
  gRNA
gcggaagtcagggatacccg

SEQ ID NO: 115936 - DNA, 20 bp, Artificial Sequence
  MKO10115936_B_Sirt2
  gRNA
aggccgcaaggtcatctgtt

SEQ ID NO: 115937 - DNA, 20 bp, Artificial Sequence
  MKO10115937_B_Sirt2
  gRNA
gacttccgctccccgtccac

SEQ ID NO: 115938 - DNA, 20 bp, Artificial Sequence
  MKO10115938_B_Sirt3
  gRNA
agtctcgattgatgagcagt

SEQ ID NO: 115939 - DNA, 20 bp, Artificial Sequence
  MKO10115939_B_Sirt3
  gRNA
ccaaagcgaagtcagccata

SEQ ID NO: 115940 - DNA, 20 bp, Artificial Sequence
  MKO10115940_B_Sirt3
  gRNA
cgtgcatgtagctgttacaa

SEQ ID NO: 115941 - DNA, 20 bp, Artificial Sequence
  MKO10115941_B_Sirt4
  gRNA
tgcggacgaaatcaatgtgc

SEQ ID NO: 115942 - DNA, 20 bp, Artificial Sequence
  MKO10115942_B_Sirt4
  gRNA
ggcaagccaaatcgtcagac

SEQ ID NO: 115943 - DNA, 20 bp, Artificial Sequence
  MKO10115943_B_Sirt4
  gRNA
ccccacccggtctgacgatt

SEQ ID NO: 115944 - DNA, 20 bp, Artificial Sequence
  MKO10115944_B_Sirt5
  gRNA
ccgatctgcccagctttagc

SEQ ID NO: 115945 - DNA, 20 bp, Artificial Sequence
  MKO10115945_B_Sirt5
  gRNA
gatgcaactcgtcaatgttc

SEQ ID NO: 115946 - DNA, 20 bp, Artificial Sequence
  MKO10115946_B_Sirt5
  gRNA
gctggcgttagtgcggagag

SEQ ID NO: 115947 - DNA, 20 bp, Artificial Sequence
  MKO10115947_B_Sirt6
  gRNA
gcccgtgtggaaaaccacgc

SEQ ID NO: 115948 - DNA, 20 bp, Artificial Sequence
  MKO10115948_B_Sirt6
  gRNA
caacactcacgtcttacact

SEQ ID NO: 115949 - DNA, 20 bp, Artificial Sequence
  MKO10115949_B_Sirt6
  gRNA
cctacaggcccgaagtcccc

SEQ ID NO: 115950 - DNA, 20 bp, Artificial Sequence
  MKO10115950_B_Sirt7
  gRNA
cgcgactcgcctcctcctgg

SEQ ID NO: 115951 - DNA, 20 bp, Artificial Sequence
  MKO10115951_B_Sirt7
  gRNA
ttggttgtctacacgggcgc

SEQ ID NO: 115952 - DNA, 20 bp, Artificial Sequence
  MKO10115952_B_Sirt7
  gRNA
cagcttctatcccagattat

SEQ ID NO: 115953 - DNA, 20 bp, Artificial Sequence
  MKO10115953_B_Sis
  gRNA
tcagtcacgaatgacaacag

SEQ ID NO: 115954 - DNA, 20 bp, Artificial Sequence
  MKO10115954_B_Sis
  gRNA
ctgacgcagcagtatagcca

SEQ ID NO: 115955 - DNA, 20 bp, Artificial Sequence
  MKO10115955_B_Sis
  gRNA
tgctcaggcggacaccttcc

SEQ ID NO: 115956 - DNA, 20 bp, Artificial Sequence
  MKO10115956_B_Sit1
  gRNA
cacacggaggcataaagttc

SEQ ID NO: 115957 - DNA, 20 bp, Artificial Sequence
  MKO10115957_B_Sit1
  gRNA
atacaggggaacttcttccg

SEQ ID NO: 115958 - DNA, 20 bp, Artificial Sequence
  MKO10115958_B_Sit1
  gRNA
ggtcctcctcagctgggtgc

SEQ ID NO: 115959 - DNA, 20 bp, Artificial Sequence
  MKO10115959_B_Siva1
  gRNA
cggccactcaccaccttctg

SEQ ID NO: 115960 - DNA, 20 bp, Artificial Sequence
  MKO10115960_B_Siva1
  gRNA
cggtctgcagccagtgcgag

SEQ ID NO: 115961 - DNA, 20 bp, Artificial Sequence
  MKO10115961_B_Siva1
  gRNA
cagacttcagtgactcctgc

SEQ ID NO: 115962 - DNA, 20 bp, Artificial Sequence
  MKO10115962_B_Six1
  gRNA
agcggcttgcccccttccag

SEQ ID NO: 115963 - DNA, 20 bp, Artificial Sequence
  MKO10115963_B_Six1
  gRNA
gtggaggccgagaaacttcg

SEQ ID NO: 115964 - DNA, 20 bp, Artificial Sequence
  MKO10115964_B_Six1
  gRNA
gcgcacccgatatttgccca

SEQ ID NO: 115965 - DNA, 20 bp, Artificial Sequence
  MKO10115965_B_Six2
  gRNA
tccacaaggttggccgacat

SEQ ID NO: 115966 - DNA, 20 bp, Artificial Sequence
  MKO10115966_B_Six2
  gRNA
caaggcgcactacatcgagg

SEQ ID NO: 115967 - DNA, 20 bp, Artificial Sequence
  MKO10115967_B_Six2
  gRNA
agcagggcggcaacatcgag

SEQ ID NO: 115968 - DNA, 20 bp, Artificial Sequence
  MKO10115968_B_Six3
  gRNA
caccggcacttcgatcctct

SEQ ID NO: 115969 - DNA, 20 bp, Artificial Sequence
  MKO10115969_B_Six3
  gRNA
cgccgctactcgccagaagt

SEQ ID NO: 115970 - DNA, 20 bp, Artificial Sequence
  MKO10115970_B_Six3
  gRNA
cgacgacagcgcgcgcgcgc

SEQ ID NO: 115971 - DNA, 20 bp, Artificial Sequence
  MKO10115971_B_Six4
  gRNA
aagatatcactaagctcgtc

SEQ ID NO: 115972 - DNA, 20 bp, Artificial Sequence
  MKO10115972_B_Six4
  gRNA
ctcgaaatccaagtacgtcc

SEQ ID NO: 115973 - DNA, 20 bp, Artificial Sequence
  MKO10115973_B_Six4
  gRNA
cccctgaacagcgaatcgga

SEQ ID NO: 115974 - DNA, 20 bp, Artificial Sequence
  MKO10115974_B_Six5
  gRNA
cccagtcattatcaatagct

SEQ ID NO: 115975 - DNA, 20 bp, Artificial Sequence
  MKO10115975_B_Six5
  gRNA
ccacgggtaccgactgcagc

SEQ ID NO: 115976 - DNA, 20 bp, Artificial Sequence
  MKO10115976_B_Six5
  gRNA
tctggtagccccattgtcac

SEQ ID NO: 115977 - DNA, 20 bp, Artificial Sequence
  MKO10115977_B_Six6
  gRNA
ctccgagcgtagcacccgcc

SEQ ID NO: 115978 - DNA, 20 bp, Artificial Sequence
  MKO10115978_B_Six6
  gRNA
gctcgcggtagttgccaccg

SEQ ID NO: 115979 - DNA, 20 bp, Artificial Sequence
  MKO10115979_B_Six6
  gRNA
gctgcgagcgagagccatcg

SEQ ID NO: 115980 - DNA, 20 bp, Artificial Sequence
  MKO10115980_B_Ska1
  gRNA
tcagctttgtctgactcttt

SEQ ID NO: 115981 - DNA, 20 bp, Artificial Sequence
  MKO10115981_B_Ska1
  gRNA
aagaccaccttaagtaaaat

SEQ ID NO: 115982 - DNA, 20 bp, Artificial Sequence
  MKO10115982_B_Ska1
  gRNA
acagagctcatagatgcttt

SEQ ID NO: 115983 - DNA, 20 bp, Artificial Sequence
  MKO10115983_B_Ska2
  gRNA
actattcaatatggaggcgg

SEQ ID NO: 115984 - DNA, 20 bp, Artificial Sequence
  MKO10115984_B_Ska2
  gRNA
agtagcacaaatgcagctct

SEQ ID NO: 115985 - DNA, 20 bp, Artificial Sequence
  MKO10115985_B_Ska2
  gRNA
agctttatgtgcacgcttta

SEQ ID NO: 115986 - DNA, 20 bp, Artificial Sequence
  MKO10115986_B_Ska3
  gRNA
tccatccttagagcacaccg

SEQ ID NO: 115987 - DNA, 20 bp, Artificial Sequence
  MKO10115987_B_Ska3
  gRNA
aatggcaaaagaattatcac

SEQ ID NO: 115988 - DNA, 20 bp, Artificial Sequence
  MKO10115988_B_Ska3
  gRNA
gaagactttgaagattctcc

SEQ ID NO: 115989 - DNA, 20 bp, Artificial Sequence
  MKO10115989_B_Skap1
  gRNA
tcacgtcagaagcatccttt

SEQ ID NO: 115990 - DNA, 20 bp, Artificial Sequence
  MKO10115990_B_Skap1
  gRNA
gtttccagcaaatcaaatcc

SEQ ID NO: 115991 - DNA, 20 bp, Artificial Sequence
  MKO10115991_B_Skap1
  gRNA
aggagccaacagatctcctc

SEQ ID NO: 115992 - DNA, 20 bp, Artificial Sequence
  MKO10115992_B_Skap2
  gRNA
aggtcctgggctgcaatggg

SEQ ID NO: 115993 - DNA, 20 bp, Artificial Sequence
  MKO10115993_B_Skap2
  gRNA
cttcaggaatttcaagacaa

SEQ ID NO: 115994 - DNA, 20 bp, Artificial Sequence
  MKO10115994_B_Skap2
  gRNA
aaatttatccaagaaagcca

SEQ ID NO: 115995 - DNA, 20 bp, Artificial Sequence
  MKO10115995_B_Skida1
  gRNA
gctagaagccctcgtcctac

SEQ ID NO: 115996 - DNA, 20 bp, Artificial Sequence
  MKO10115996_B_Skida1
  gRNA
aaccaaacccgctgctttcg

SEQ ID NO: 115997 - DNA, 20 bp, Artificial Sequence
  MKO10115997_B_Skida1
  gRNA
agtctggtagtaggcggcgg

SEQ ID NO: 115998 - DNA, 20 bp, Artificial Sequence
  MKO10115998_B_Skil
  gRNA
tgctgcgtcccagtctaaag

SEQ ID NO: 115999 - DNA, 20 bp, Artificial Sequence
  MKO10115999_B_Skil
  gRNA
atggtatcctgttataaaac

SEQ ID NO: 116000 - DNA, 20 bp, Artificial Sequence
  MKO10116000_B_Skil
  gRNA
gcagatgtgagcgacacatt

SEQ ID NO: 116001 - DNA, 20 bp, Artificial Sequence
  MKO10116001_B_Skint10
  gRNA
ttcagatatcctattcaaat

SEQ ID NO: 116002 - DNA, 20 bp, Artificial Sequence
  MKO10116002_B_Skint10
  gRNA
tctaccttgggtgagtactg

SEQ ID NO: 116003 - DNA, 20 bp, Artificial Sequence
  MKO10116003_B_Skint10
  gRNA
aggaaggtcataaagaatcc

SEQ ID NO: 116004 - DNA, 20 bp, Artificial Sequence
  MKO10116004_B_Skint11
  gRNA
ctctcaagtttagatgccct

SEQ ID NO: 116005 - DNA, 20 bp, Artificial Sequence
  MKO10116005_B_Skint11
  gRNA
tctcctcctagtaatgagct

SEQ ID NO: 116006 - DNA, 20 bp, Artificial Sequence
  MKO10116006_B_Skint11
  gRNA
gagcttgctgtccacttatc

SEQ ID NO: 116007 - DNA, 20 bp, Artificial Sequence
  MKO10116007_B_Skint1
  gRNA
caggctctgtatagaggttc

SEQ ID NO: 116008 - DNA, 20 bp, Artificial Sequence
  MKO10116008_B_Skint1
  gRNA
ctgctacatcatgagcataa

SEQ ID NO: 116009 - DNA, 20 bp, Artificial Sequence
  MKO10116009_B_Skint1
  gRNA
ctccagtttgtaagtggaag

SEQ ID NO: 116010 - DNA, 20 bp, Artificial Sequence
  MKO10116010_B_Skint2
  gRNA
tgtcttacacttcctccaga

SEQ ID NO: 116011 - DNA, 20 bp, Artificial Sequence
  MKO10116011_B_Skint2
  gRNA
gccacaacaagcacagcata

SEQ ID NO: 116012 - DNA, 20 bp, Artificial Sequence
  MKO10116012_B_Skint2
  gRNA
ctgtcagtttaaagatcctg

SEQ ID NO: 116013 - DNA, 20 bp, Artificial Sequence
  MKO10116013_B_Skint3
  gRNA
ccacctaatggggcaaggac

SEQ ID NO: 116014 - DNA, 20 bp, Artificial Sequence
  MKO10116014_B_Skint3
  gRNA
ctgaactcagtactaacatc

SEQ ID NO: 116015 - DNA, 20 bp, Artificial Sequence
  MKO10116015_B_Skint3
  gRNA
aagtaagtaaattgagcttg

SEQ ID NO: 116016 - DNA, 20 bp, Artificial Sequence
  MKO10116016_B_Skint4
  gRNA
gttcagcaacagctcataca

SEQ ID NO: 116017 - DNA, 20 bp, Artificial Sequence
  MKO10116017_B_Skint4
  gRNA
tgtcttatgcctcctccaga

SEQ ID NO: 116018 - DNA, 20 bp, Artificial Sequence
  MKO10116018_B_Skint4
  gRNA
caaattgttcaacatgtcaa

SEQ ID NO: 116019 - DNA, 20 bp, Artificial Sequence
  MKO10116019_B_Skint5
  gRNA
atgcatcccccaaatatcaa

SEQ ID NO: 116020 - DNA, 20 bp, Artificial Sequence
  MKO10116020_B_Skint5
  gRNA
ttattaaatccaactctcac

SEQ ID NO: 116021 - DNA, 20 bp, Artificial Sequence
  MKO10116021_B_Skint5
  gRNA
aaacaaaacaacgcagtgtg

SEQ ID NO: 116022 - DNA, 20 bp, Artificial Sequence
  MKO10116022_B_Skint6
  gRNA
tgtagacaattgcttcattc

SEQ ID NO: 116023 - DNA, 20 bp, Artificial Sequence
  MKO10116023_B_Skint6
  gRNA
aagatttcaaagttccagtg

SEQ ID NO: 116024 - DNA, 20 bp, Artificial Sequence
  MKO10116024_B_Skint6
  gRNA
gaccatacctagatccacac

SEQ ID NO: 116025 - DNA, 20 bp, Artificial Sequence
  MKO10116025_B_Skint7
  gRNA
ctaaactttccatccaaata

SEQ ID NO: 116026 - DNA, 20 bp, Artificial Sequence
  MKO10116026_B_Skint7
  gRNA
acaacttacctgtcacattg

SEQ ID NO: 116027 - DNA, 20 bp, Artificial Sequence
  MKO10116027_B_Skint7
  gRNA
gttcaggctcctgatgctga

SEQ ID NO: 116028 - DNA, 20 bp, Artificial Sequence
  MKO10116028_B_Skint8
  gRNA
acaacttacctgtcacgttg

SEQ ID NO: 116029 - DNA, 20 bp, Artificial Sequence
  MKO10116029_B_Skint8
  gRNA
gtcatggtggaatgtaatac

SEQ ID NO: 116030 - DNA, 20 bp, Artificial Sequence
  MKO10116030_B_Skint8
  gRNA
attaccttgactcctgaaaa

SEQ ID NO: 116031 - DNA, 20 bp, Artificial Sequence
  MKO10116031_B_Skint9
  gRNA
tacgtgagtttcagaagtag

SEQ ID NO: 116032 - DNA, 20 bp, Artificial Sequence
  MKO10116032_B_Skint9
  gRNA
cacagccaattagtatacaa

SEQ ID NO: 116033 - DNA, 20 bp, Artificial Sequence
  MKO10116033_B_Skint9
  gRNA
catatccattgtatactaat

SEQ ID NO: 116034 - DNA, 20 bp, Artificial Sequence
  MKO10116034_B_Skiv2l2
  gRNA
cactgactgtaccttgactc

SEQ ID NO: 116035 - DNA, 20 bp, Artificial Sequence
  MKO10116035_B_Skiv2l2
  gRNA
cagtcagtggaaacagttga

SEQ ID NO: 116036 - DNA, 20 bp, Artificial Sequence
  MKO10116036_B_Skiv2l2
  gRNA
cactacttactcggcacaca

SEQ ID NO: 116037 - DNA, 20 bp, Artificial Sequence
  MKO10116037_B_Skiv2l
  gRNA
cacagatctggggcgcatgg

SEQ ID NO: 116038 - DNA, 20 bp, Artificial Sequence
  MKO10116038_B_Skiv2l
  gRNA
ggccagcctcccagtcgcta

SEQ ID NO: 116039 - DNA, 20 bp, Artificial Sequence
  MKO10116039_B_Skiv2l
  gRNA
gagtgctctacaccgtgtag

SEQ ID NO: 116040 - DNA, 20 bp, Artificial Sequence
  MKO10116040_B_Ski
  gRNA
tcccagctttgattcgagac

SEQ ID NO: 116041 - DNA, 20 bp, Artificial Sequence
  MKO10116041_B_Ski
  gRNA
cagtccaccctgcaccaccg

SEQ ID NO: 116042 - DNA, 20 bp, Artificial Sequence
  MKO10116042_B_Ski
  gRNA
acgggcggagcatgcatgcc

SEQ ID NO: 116043 - DNA, 20 bp, Artificial Sequence
  MKO10116043_B_Skor1
  gRNA
cgaacacgtgaagagtacgg

SEQ ID NO: 116044 - DNA, 20 bp, Artificial Sequence
  MKO10116044_B_Skor1
  gRNA
cgcaggtgtatgcgcctgaa

SEQ ID NO: 116045 - DNA, 20 bp, Artificial Sequence
  MKO10116045_B_Skor1
  gRNA
tcacctcgatctgtatttgc

SEQ ID NO: 116046 - DNA, 20 bp, Artificial Sequence
  MKO10116046_B_Skor2
  gRNA
tgtttgagcaaatagatttg

SEQ ID NO: 116047 - DNA, 20 bp, Artificial Sequence
  MKO10116047_B_Skor2
  gRNA
tttggtcctagataagaaca

SEQ ID NO: 116048 - DNA, 20 bp, Artificial Sequence
  MKO10116048_B_Skor2
  gRNA
cctttgtagatataataact

SEQ ID NO: 116049 - DNA, 20 bp, Artificial Sequence
  MKO10116049_B_Skp1a
  gRNA
taatgcagcaattctaaaga

SEQ ID NO: 116050 - DNA, 20 bp, Artificial Sequence
  MKO10116050_B_Skp1a
  gRNA
agatgaccctcctcctcctg

SEQ ID NO: 116051 - DNA, 20 bp, Artificial Sequence
  MKO10116051_B_Skp1a
  gRNA
gaggagggtcatctttgtgg

SEQ ID NO: 116052 - DNA, 20 bp, Artificial Sequence
  MKO10116052_B_Skp2
  gRNA
ttgcccttgactcgtttcct

SEQ ID NO: 116053 - DNA, 20 bp, Artificial Sequence
  MKO10116053_B_Skp2
  gRNA
ttaggctcgatgagtctctc

SEQ ID NO: 116054 - DNA, 20 bp, Artificial Sequence
  MKO10116054_B_Skp2
  gRNA
ctctttccgggtacagcaca

SEQ ID NO: 116055 - DNA, 20 bp, Artificial Sequence
  MKO10116055_B_Sla2
  gRNA
aggatacagcgtcttgacaa

SEQ ID NO: 116056 - DNA, 20 bp, Artificial Sequence
  MKO10116056_B_Sla2
  gRNA
acagtccagtcggaagtctc

SEQ ID NO: 116057 - DNA, 20 bp, Artificial Sequence
  MKO10116057_B_Sla2
  gRNA
gactcagccgccctgcatct

SEQ ID NO: 116058 - DNA, 20 bp, Artificial Sequence
  MKO10116058_B_Slain1
  gRNA
ggaggatgactctatatcca

SEQ ID NO: 116059 - DNA, 20 bp, Artificial Sequence
  MKO10116059_B_Slain1
  gRNA
agagtcatcctccaactccg

SEQ ID NO: 116060 - DNA, 20 bp, Artificial Sequence
  MKO10116060_B_Slain1
  gRNA
caccccagccccgtcttccg

SEQ ID NO: 116061 - DNA, 20 bp, Artificial Sequence
  MKO10116061_B_Slain2
  gRNA
acttaactcactatctatag

SEQ ID NO: 116062 - DNA, 20 bp, Artificial Sequence
  MKO10116062_B_Slain2
  gRNA
ctgatgtgcagattctagcg

SEQ ID NO: 116063 - DNA, 20 bp, Artificial Sequence
  MKO10116063_B_Slain2
  gRNA
cactccttacctgaatttcc

SEQ ID NO: 116064 - DNA, 20 bp, Artificial Sequence
  MKO10116064_B_Slamf1
  gRNA
aagattataacgacccccag

SEQ ID NO: 116065 - DNA, 20 bp, Artificial Sequence
  MKO10116065_B_Slamf1
  gRNA
gcttgcatgcttgcgatgat

SEQ ID NO: 116066 - DNA, 20 bp, Artificial Sequence
  MKO10116066_B_Slamf1
  gRNA
gcaatatactcttgtaccac

SEQ ID NO: 116067 - DNA, 20 bp, Artificial Sequence
  MKO10116067_B_Slamf6
  gRNA
gcaaatcagcaaccttacca

SEQ ID NO: 116068 - DNA, 20 bp, Artificial Sequence
  MKO10116068_B_Slamf6
  gRNA
gtcaaactgtctcagttgag

SEQ ID NO: 116069 - DNA, 20 bp, Artificial Sequence
  MKO10116069_B_Slamf6
  gRNA
cctggatgttggctagtcaa

SEQ ID NO: 116070 - DNA, 20 bp, Artificial Sequence
  MKO10116070_B_Slamf7
  gRNA
gatttacagtacatcgagtc

SEQ ID NO: 116071 - DNA, 20 bp, Artificial Sequence
  MKO10116071_B_Slamf7
  gRNA
caaggactcacttccgtgta

SEQ ID NO: 116072 - DNA, 20 bp, Artificial Sequence
  MKO10116072_B_Slamf7
  gRNA
cgacttgtgccctcacttag

SEQ ID NO: 116073 - DNA, 20 bp, Artificial Sequence
  MKO10116073_B_Slamf8
  gRNA
tcggcatacctgcctcgtga

SEQ ID NO: 116074 - DNA, 20 bp, Artificial Sequence
  MKO10116074_B_Slamf8
  gRNA
ccaacccctcaatacctgtc

SEQ ID NO: 116075 - DNA, 20 bp, Artificial Sequence
  MKO10116075_B_Slamf8
  gRNA
gccagatagcctcacgcact

SEQ ID NO: 116076 - DNA, 20 bp, Artificial Sequence
  MKO10116076_B_Slamf9
  gRNA
ccaatatgggggcccttctg

SEQ ID NO: 116077 - DNA, 20 bp, Artificial Sequence
  MKO10116077_B_Slamf9
  gRNA
aagctccttcctatacttgc

SEQ ID NO: 116078 - DNA, 20 bp, Artificial Sequence
  MKO10116078_B_Slamf9
  gRNA
agagaaaccgcatcaaactg

SEQ ID NO: 116079 - DNA, 20 bp, Artificial Sequence
  MKO10116079_B_Sla
  gRNA
gaggccgttatccagcagtg

SEQ ID NO: 116080 - DNA, 20 bp, Artificial Sequence
  MKO10116080_B_Sla
  gRNA
aagctaccaatctttgtatc

SEQ ID NO: 116081 - DNA, 20 bp, Artificial Sequence
  MKO10116081_B_Sla
  gRNA
gtcagacttaccctcactgc

SEQ ID NO: 116082 - DNA, 20 bp, Artificial Sequence
  MKO10116082_B_Slbp
  gRNA
tgtagctttacaactcctga

SEQ ID NO: 116083 - DNA, 20 bp, Artificial Sequence
  MKO10116083_B_Slbp
  gRNA
ctatgatcgatatattaaag

SEQ ID NO: 116084 - DNA, 20 bp, Artificial Sequence
  MKO10116084_B_Slbp
  gRNA
atgaaagtgtcttgatgaga

SEQ ID NO: 116085 - DNA, 20 bp, Artificial Sequence
  MKO10116085_B_Slc10a1
  gRNA
ctctcttccgactaaatcca

SEQ ID NO: 116086 - DNA, 20 bp, Artificial Sequence
  MKO10116086_B_Slc10a1
  gRNA
tagaacagagttggacgttt

SEQ ID NO: 116087 - DNA, 20 bp, Artificial Sequence
  MKO10116087_B_Slc10a1
  gRNA
aacagtggtccaatgacttc

SEQ ID NO: 116088 - DNA, 20 bp, Artificial Sequence
  MKO10116088_B_Slc10a2
  gRNA
ttccagattggatccatcac

SEQ ID NO: 116089 - DNA, 20 bp, Artificial Sequence
  MKO10116089_B_Slc10a2
  gRNA
gaacccaaactgtggattat

SEQ ID NO: 116090 - DNA, 20 bp, Artificial Sequence
  MKO10116090_B_Slc10a2
  gRNA
gaacaccaggttgagatcct

SEQ ID NO: 116091 - DNA, 20 bp, Artificial Sequence
  MKO10116091_B_Slc10a3
  gRNA
gatcaccacacccgctgcta

SEQ ID NO: 116092 - DNA, 20 bp, Artificial Sequence
  MKO10116092_B_Slc10a3
  gRNA
ctaggatgaagacccccatg

SEQ ID NO: 116093 - DNA, 20 bp, Artificial Sequence
  MKO10116093_B_Slc10a3
  gRNA
agtggtcactatttgagtat

SEQ ID NO: 116094 - DNA, 20 bp, Artificial Sequence
  MKO10116094_B_Slc10a4
  gRNA
tcctcggtcagagggcggtc

SEQ ID NO: 116095 - DNA, 20 bp, Artificial Sequence
  MKO10116095_B_Slc10a4
  gRNA
tgcagcactctcattcctat

SEQ ID NO: 116096 - DNA, 20 bp, Artificial Sequence
  MKO10116096_B_Slc10a4
  gRNA
aggcacggctgtagatccag

SEQ ID NO: 116097 - DNA, 20 bp, Artificial Sequence
  MKO10116097_B_Slc10a5
  gRNA
tctaaacagattgctttcgc

SEQ ID NO: 116098 - DNA, 20 bp, Artificial Sequence
  MKO10116098_B_Slc10a5
  gRNA
gacttgcacatcaacgtccc

SEQ ID NO: 116099 - DNA, 20 bp, Artificial Sequence
  MKO10116099_B_Slc10a5
  gRNA
gagcttgactttaatgttcg

SEQ ID NO: 116100 - DNA, 20 bp, Artificial Sequence
  MKO10116100_B_Slc10a6
  gRNA
ccagctgctaaactttgcat

SEQ ID NO: 116101 - DNA, 20 bp, Artificial Sequence
  MKO10116101_B_Slc10a6
  gRNA
tgcttaggtcggagccattc

SEQ ID NO: 116102 - DNA, 20 bp, Artificial Sequence
  MKO10116102_B_Slc10a6
  gRNA
gactgtacctttgccaagat

SEQ ID NO: 116103 - DNA, 20 bp, Artificial Sequence
  MKO10116103_B_Slc10a7
  gRNA
ctcatttccaccaactgcct

SEQ ID NO: 116104 - DNA, 20 bp, Artificial Sequence
  MKO10116104_B_Slc10a7
  gRNA
gcgatatttaattcagcatt

SEQ ID NO: 116105 - DNA, 20 bp, Artificial Sequence
  MKO10116105_B_Slc10a7
  gRNA
atgtaggacacagttatctc

SEQ ID NO: 116106 - DNA, 20 bp, Artificial Sequence
  MKO10116106_B_Slc11a1
  gRNA
gcccggctgggcgtggtgac

SEQ ID NO: 116107 - DNA, 20 bp, Artificial Sequence
  MKO10116107_B_Slc11a1
  gRNA
tccttcaatctgctctccgc

SEQ ID NO: 116108 - DNA, 20 bp, Artificial Sequence
  MKO10116108_B_Slc11a1
  gRNA
attgagtccgaccttcaagc

SEQ ID NO: 116109 - DNA, 20 bp, Artificial Sequence
  MKO10116109_B_Slc11a2
  gRNA
agggttgatggcgccaaggc

SEQ ID NO: 116110 - DNA, 20 bp, Artificial Sequence
  MKO10116110_B_Slc11a2
  gRNA
aaatcagattcgatgtttcc

SEQ ID NO: 116111 - DNA, 20 bp, Artificial Sequence
  MKO10116111_B_Slc11a2
  gRNA
ccactccaagtctcgctgca

SEQ ID NO: 116112 - DNA, 20 bp, Artificial Sequence
  MKO10116112_B_Slc12a1
  gRNA
cctattgacccaccgaactc

SEQ ID NO: 116113 - DNA, 20 bp, Artificial Sequence
  MKO10116113_B_Slc12a1
  gRNA
attgtaggagaagcgggaat

SEQ ID NO: 116114 - DNA, 20 bp, Artificial Sequence
  MKO10116114_B_Slc12a1
  gRNA
tgcgatgcatgctgaacatc

SEQ ID NO: 116115 - DNA, 20 bp, Artificial Sequence
  MKO10116115_B_Slc12a2
  gRNA
ccggaatttggtggtgcaat

SEQ ID NO: 116116 - DNA, 20 bp, Artificial Sequence
  MKO10116116_B_Slc12a2
  gRNA
ccaattgcaccaccaaattc

SEQ ID NO: 116117 - DNA, 20 bp, Artificial Sequence
  MKO10116117_B_Slc12a2
  gRNA
actgttgtgacaactatcac

SEQ ID NO: 116118 - DNA, 20 bp, Artificial Sequence
  MKO10116118_B_Slc12a3
  gRNA
gcccgcctgcgccgtaatcc

SEQ ID NO: 116119 - DNA, 20 bp, Artificial Sequence
  MKO10116119_B_Slc12a3
  gRNA
acccgacttgaccttgccat

SEQ ID NO: 116120 - DNA, 20 bp, Artificial Sequence
  MKO10116120_B_Slc12a3
  gRNA
tgggctttgcagaaaccgta

SEQ ID NO: 116121 - DNA, 20 bp, Artificial Sequence
  MKO10116121_B_Slc12a4
  gRNA
ggagctggacatccgcccaa

SEQ ID NO: 116122 - DNA, 20 bp, Artificial Sequence
  MKO10116122_B_Slc12a4
  gRNA
tcccatgagtgtgcccatgc

SEQ ID NO: 116123 - DNA, 20 bp, Artificial Sequence
  MKO10116123_B_Slc12a4
  gRNA
tcctcttcctgcggctgacc

SEQ ID NO: 116124 - DNA, 20 bp, Artificial Sequence
  MKO10116124_B_Slc12a5
  gRNA
tggaaaaaagaagccggtgc

SEQ ID NO: 116125 - DNA, 20 bp, Artificial Sequence
  MKO10116125_B_Slc12a5
  gRNA
caactacaccaacctacccc

SEQ ID NO: 116126 - DNA, 20 bp, Artificial Sequence
  MKO10116126_B_Slc12a5
  gRNA
cataccaggcacaacaccat

SEQ ID NO: 116127 - DNA, 20 bp, Artificial Sequence
  MKO10116127_B_Slc12a6
  gRNA
ttgtgtcagatttgtatagt

SEQ ID NO: 116128 - DNA, 20 bp, Artificial Sequence
  MKO10116128_B_Slc12a6
  gRNA
gggaacagctggaatccttc

SEQ ID NO: 116129 - DNA, 20 bp, Artificial Sequence
  MKO10116129_B_Slc12a6
  gRNA
ttcgtctccttcttcatagt

SEQ ID NO: 116130 - DNA, 20 bp, Artificial Sequence
  MKO10116130_B_Slc12a7
  gRNA
acctccacattattgatgaa

SEQ ID NO: 116131 - DNA, 20 bp, Artificial Sequence
  MKO10116131_B_Slc12a7
  gRNA
cagccctttcatcaataatg

SEQ ID NO: 116132 - DNA, 20 bp, Artificial Sequence
  MKO10116132_B_Slc12a7
  gRNA
accagctgcccccacaatcc

SEQ ID NO: 116133 - DNA, 20 bp, Artificial Sequence
  MKO10116133_B_Slc12a8
  gRNA
ggggcttacctgggtccagg

SEQ ID NO: 116134 - DNA, 20 bp, Artificial Sequence
  MKO10116134_B_Slc12a8
  gRNA
atgttgctctgtagcagttc

SEQ ID NO: 116135 - DNA, 20 bp, Artificial Sequence
  MKO10116135_B_Slc12a8
  gRNA
attctgccagagtacagccc

SEQ ID NO: 116136 - DNA, 20 bp, Artificial Sequence
  MKO10116136_B_Slc12a9
  gRNA
catcccgttagctcctcgac

SEQ ID NO: 116137 - DNA, 20 bp, Artificial Sequence
  MKO10116137_B_Slc12a9
  gRNA
tgcccgtgcagccgttgaag

SEQ ID NO: 116138 - DNA, 20 bp, Artificial Sequence
  MKO10116138_B_Slc12a9
  gRNA
cacagccacagacgttagcc

SEQ ID NO: 116139 - DNA, 20 bp, Artificial Sequence
  MKO10116139_B_Slc13a1
  gRNA
tgcacaagaggatcgctctg

SEQ ID NO: 116140 - DNA, 20 bp, Artificial Sequence
  MKO10116140_B_Slc13a1
  gRNA
agaacgcatgatcccaaaca

SEQ ID NO: 116141 - DNA, 20 bp, Artificial Sequence
  MKO10116141_B_Slc13a1
  gRNA
gactttcaccttctgctaat

SEQ ID NO: 116142 - DNA, 20 bp, Artificial Sequence
  MKO10116142_B_Slc13a2
  gRNA
gacgggtaccacacccaacc

SEQ ID NO: 116143 - DNA, 20 bp, Artificial Sequence
  MKO10116143_B_Slc13a2
  gRNA
gctgaagcggtgatgctctt

SEQ ID NO: 116144 - DNA, 20 bp, Artificial Sequence
  MKO10116144_B_Slc13a2
  gRNA
tacaccacagcagcgccatg

SEQ ID NO: 116145 - DNA, 20 bp, Artificial Sequence
  MKO10116145_B_Slc13a3
  gRNA
accagtacaccgccatgagc

SEQ ID NO: 116146 - DNA, 20 bp, Artificial Sequence
  MKO10116146_B_Slc13a3
  gRNA
ctgtgctctcgtcgccttcc

SEQ ID NO: 116147 - DNA, 20 bp, Artificial Sequence
  MKO10116147_B_Slc13a3
  gRNA
tcctcctccttggagtcatc

SEQ ID NO: 116148 - DNA, 20 bp, Artificial Sequence
  MKO10116148_B_Slc13a4
  gRNA
gccttcctctacccgttctt

SEQ ID NO: 116149 - DNA, 20 bp, Artificial Sequence
  MKO10116149_B_Slc13a4
  gRNA
ctgcagcaccgcctccacga

SEQ ID NO: 116150 - DNA, 20 bp, Artificial Sequence
  MKO10116150_B_Slc13a4
  gRNA
catcgtggaggcggtgctgc

SEQ ID NO: 116151 - DNA, 20 bp, Artificial Sequence
  MKO10116151_B_Slc13a5
  gRNA
tacagccaccttgaccggga

SEQ ID NO: 116152 - DNA, 20 bp, Artificial Sequence
  MKO10116152_B_Slc13a5
  gRNA
gtgtgtttaccgtgagggct

SEQ ID NO: 116153 - DNA, 20 bp, Artificial Sequence
  MKO10116153_B_Slc13a5
  gRNA
aacgctggaaacttcataag

SEQ ID NO: 116154 - DNA, 20 bp, Artificial Sequence
  MKO10116154_B_Slc14a1
  gRNA
ctacgtcacgggtgacatga

SEQ ID NO: 116155 - DNA, 20 bp, Artificial Sequence
  MKO10116155_B_Slc14a1
  gRNA
acctgtcttggctaagcaag

SEQ ID NO: 116156 - DNA, 20 bp, Artificial Sequence
  MKO10116156_B_Slc14a1
  gRNA
ttcatggactggatacttcg

SEQ ID NO: 116157 - DNA, 20 bp, Artificial Sequence
  MKO10116157_B_Slc14a2
  gRNA
tggacgattgctgggacact

SEQ ID NO: 116158 - DNA, 20 bp, Artificial Sequence
  MKO10116158_B_Slc14a2
  gRNA
tcaatcgtggggctgctagc

SEQ ID NO: 116159 - DNA, 20 bp, Artificial Sequence
  MKO10116159_B_Slc14a2
  gRNA
cagccccacgattgacccta

SEQ ID NO: 116160 - DNA, 20 bp, Artificial Sequence
  MKO10116160_B_Slc15a1
  gRNA
cttacctcgcatgccatagt

SEQ ID NO: 116161 - DNA, 20 bp, Artificial Sequence
  MKO10116161_B_Slc15a1
  gRNA
ctatccatcgtctacacgat

SEQ ID NO: 116162 - DNA, 20 bp, Artificial Sequence
  MKO10116162_B_Slc15a1
  gRNA
gttgagcatcttcttcatcg

SEQ ID NO: 116163 - DNA, 20 bp, Artificial Sequence
  MKO10116163_B_Slc15a2
  gRNA
ctgctatttcacccccatct

SEQ ID NO: 116164 - DNA, 20 bp, Artificial Sequence
  MKO10116164_B_Slc15a2
  gRNA
ccctccaaagaagtcaactc

SEQ ID NO: 116165 - DNA, 20 bp, Artificial Sequence
  MKO10116165_B_Slc15a2
  gRNA
agcaatcgctgctcccaaga

SEQ ID NO: 116166 - DNA, 20 bp, Artificial Sequence
  MKO10116166_B_Slc15a3
  gRNA
gatcagatagcagtaactac

SEQ ID NO: 116167 - DNA, 20 bp, Artificial Sequence
  MKO10116167_B_Slc15a3
  gRNA
tcaatcaagtgatccttgac

SEQ ID NO: 116168 - DNA, 20 bp, Artificial Sequence
  MKO10116168_B_Slc15a3
  gRNA
cccacctgttgcctgaccag

SEQ ID NO: 116169 - DNA, 20 bp, Artificial Sequence
  MKO10116169_B_Slc15a4
  gRNA
ttactttaggttaaagatcg

SEQ ID NO: 116170 - DNA, 20 bp, Artificial Sequence
  MKO10116170_B_Slc15a4
  gRNA
gatgagcaccgcatcaaaca

SEQ ID NO: 116171 - DNA, 20 bp, Artificial Sequence
  MKO10116171_B_Slc15a4
  gRNA
gtctcttaccgtgtgatggg

SEQ ID NO: 116172 - DNA, 20 bp, Artificial Sequence
  MKO10116172_B_Slc15a5
  gRNA
ggttctctggccgatagatc

SEQ ID NO: 116173 - DNA, 20 bp, Artificial Sequence
  MKO10116173_B_Slc15a5
  gRNA
gcaggaggcacgttctgtac

SEQ ID NO: 116174 - DNA, 20 bp, Artificial Sequence
  MKO10116174_B_Slc15a5
  gRNA
tgtgtttaacaacacgtctg

SEQ ID NO: 116175 - DNA, 20 bp, Artificial Sequence
  MKO10116175_B_Slc16a10
  gRNA
gtccgtgaagacactcacga

SEQ ID NO: 116176 - DNA, 20 bp, Artificial Sequence
  MKO10116176_B_Slc16a10
  gRNA
atgtcgatacccatgactgt

SEQ ID NO: 116177 - DNA, 20 bp, Artificial Sequence
  MKO10116177_B_Slc16a10
  gRNA
ccccatcgtgagtgtcttca

SEQ ID NO: 116178 - DNA, 20 bp, Artificial Sequence
  MKO10116178_B_Slc16a11
  gRNA
ctcggtacttctcccgccgt

SEQ ID NO: 116179 - DNA, 20 bp, Artificial Sequence
  MKO10116179_B_Slc16a11
  gRNA
cgagaagaccaagccaagcg

SEQ ID NO: 116180 - DNA, 20 bp, Artificial Sequence
  MKO10116180_B_Slc16a11
  gRNA
gtgccccccagcgagtgctc

SEQ ID NO: 116181 - DNA, 20 bp, Artificial Sequence
  MKO10116181_B_Slc16a12
  gRNA
cagcatgatccccgcttgac

SEQ ID NO: 116182 - DNA, 20 bp, Artificial Sequence
  MKO10116182_B_Slc16a12
  gRNA
actatctctgcagtcacgac

SEQ ID NO: 116183 - DNA, 20 bp, Artificial Sequence
  MKO10116183_B_Slc16a12
  gRNA
taaccagttatcctgtcaag

SEQ ID NO: 116184 - DNA, 20 bp, Artificial Sequence
  MKO10116184_B_Slc16a13
  gRNA
ctgctgcaccgcgatcccta

SEQ ID NO: 116185 - DNA, 20 bp, Artificial Sequence
  MKO10116185_B_Slc16a13
  gRNA
gccggggccttcctactcgc

SEQ ID NO: 116186 - DNA, 20 bp, Artificial Sequence
  MKO10116186_B_Slc16a13
  gRNA
gaactccacttcctgcgagt

SEQ ID NO: 116187 - DNA, 20 bp, Artificial Sequence
  MKO10116187_B_Slc16a14
  gRNA
catgtacgcacccacgatca

SEQ ID NO: 116188 - DNA, 20 bp, Artificial Sequence
  MKO10116188_B_Slc16a14
  gRNA
gcctggtgaactccctcggc

SEQ ID NO: 116189 - DNA, 20 bp, Artificial Sequence
  MKO10116189_B_Slc16a14
  gRNA
tgccgccagacagcaatcat

SEQ ID NO: 116190 - DNA, 20 bp, Artificial Sequence
  MKO10116190_B_Slc16a1
  gRNA
tgtgtctacgccggagtctt

SEQ ID NO: 116191 - DNA, 20 bp, Artificial Sequence
  MKO10116191_B_Slc16a1
  gRNA
tggcgtgatcctcatcatcg

SEQ ID NO: 116192 - DNA, 20 bp, Artificial Sequence
  MKO10116192_B_Slc16a1
  gRNA
caaccaccagcgatcattac

SEQ ID NO: 116193 - DNA, 20 bp, Artificial Sequence
  MKO10116193_B_Slc16a2
  gRNA
gagtatattcactgaccgtt

SEQ ID NO: 116194 - DNA, 20 bp, Artificial Sequence
  MKO10116194_B_Slc16a2
  gRNA
ggcccgagacgagacgtccg

SEQ ID NO: 116195 - DNA, 20 bp, Artificial Sequence
  MKO10116195_B_Slc16a2
  gRNA
aggcctcggacgtctcgtct

SEQ ID NO: 116196 - DNA, 20 bp, Artificial Sequence
  MKO10116196_B_Slc16a3
  gRNA
gaaaaagacgctgaccgcct

SEQ ID NO: 116197 - DNA, 20 bp, Artificial Sequence
  MKO10116197_B_Slc16a3
  gRNA
ctcaccagtgatgacccccg

SEQ ID NO: 116198 - DNA, 20 bp, Artificial Sequence
  MKO10116198_B_Slc16a3
  gRNA
tgagcacctcggcccccgcc

SEQ ID NO: 116199 - DNA, 20 bp, Artificial Sequence
  MKO10116199_B_Slc16a4
  gRNA
aggccgttacttatgagcaa

SEQ ID NO: 116200 - DNA, 20 bp, Artificial Sequence
  MKO10116200_B_Slc16a4
  gRNA
cgtcacagatgatagcagcc

SEQ ID NO: 116201 - DNA, 20 bp, Artificial Sequence
  MKO10116201_B_Slc16a4
  gRNA
tcatcactccgtttctctgc

SEQ ID NO: 116202 - DNA, 20 bp, Artificial Sequence
  MKO10116202_B_Slc16a5
  gRNA
gggtgagggcctgcgtcacc

SEQ ID NO: 116203 - DNA, 20 bp, Artificial Sequence
  MKO10116203_B_Slc16a5
  gRNA
cgatctcacctcagaagaca

SEQ ID NO: 116204 - DNA, 20 bp, Artificial Sequence
  MKO10116204_B_Slc16a5
  gRNA
gtttgaccaagatgctgcac

SEQ ID NO: 116205 - DNA, 20 bp, Artificial Sequence
  MKO10116205_B_Slc16a6
  gRNA
tgtgcctagcgaagcgaaga

SEQ ID NO: 116206 - DNA, 20 bp, Artificial Sequence
  MKO10116206_B_Slc16a6
  gRNA
ctctcccgtagaagcgaccg

SEQ ID NO: 116207 - DNA, 20 bp, Artificial Sequence
  MKO10116207_B_Slc16a6
  gRNA
ctcacccgagattaccccta

SEQ ID NO: 116208 - DNA, 20 bp, Artificial Sequence
  MKO10116208_B_Slc16a7
  gRNA
ggaggactattatgctgcat

SEQ ID NO: 116209 - DNA, 20 bp, Artificial Sequence
  MKO10116209_B_Slc16a7
  gRNA
taactatggcagccggcctg

SEQ ID NO: 116210 - DNA, 20 bp, Artificial Sequence
  MKO10116210_B_Slc16a7
  gRNA
ttgtgctgttgataccttac

SEQ ID NO: 116211 - DNA, 20 bp, Artificial Sequence
  MKO10116211_B_Slc16a8
  gRNA
ttcctttgcctcgcgcctcg

SEQ ID NO: 116212 - DNA, 20 bp, Artificial Sequence
  MKO10116212_B_Slc16a8
  gRNA
caaagtcgcgcttgagctct

SEQ ID NO: 116213 - DNA, 20 bp, Artificial Sequence
  MKO10116213_B_Slc16a8
  gRNA
cgagagctcaagcgcgactt

SEQ ID NO: 116214 - DNA, 20 bp, Artificial Sequence
  MKO10116214_B_Slc16a9
  gRNA
gcaggatgaatcccccgagc

SEQ ID NO: 116215 - DNA, 20 bp, Artificial Sequence
  MKO10116215_B_Slc16a9
  gRNA
ctctgcggctgtcaaaatac

SEQ ID NO: 116216 - DNA, 20 bp, Artificial Sequence
  MKO10116216_B_Slc16a9
  gRNA
gcattagaccgccagccacc

SEQ ID NO: 116217 - DNA, 20 bp, Artificial Sequence
  MKO10116217_B_Slc17a1
  gRNA
agtctgcctcgttctaaggg

SEQ ID NO: 116218 - DNA, 20 bp, Artificial Sequence
  MKO10116218_B_Slc17a1
  gRNA
cattgtgtgtcgagtactcc

SEQ ID NO: 116219 - DNA, 20 bp, Artificial Sequence
  MKO10116219_B_Slc17a1
  gRNA
atttgacccatatttcatgc

SEQ ID NO: 116220 - DNA, 20 bp, Artificial Sequence
  MKO10116220_B_Slc17a2
  gRNA
atccccgctaaatatccact

SEQ ID NO: 116221 - DNA, 20 bp, Artificial Sequence
  MKO10116221_B_Slc17a2
  gRNA
ctcacctgaacccgcaatgc

SEQ ID NO: 116222 - DNA, 20 bp, Artificial Sequence
  MKO10116222_B_Slc17a2
  gRNA
aattgtgaactgaccagtcc

SEQ ID NO: 116223 - DNA, 20 bp, Artificial Sequence
  MKO10116223_B_Slc17a3
  gRNA
atgatactgatgcaaggtcc

SEQ ID NO: 116224 - DNA, 20 bp, Artificial Sequence
  MKO10116224_B_Slc17a3
  gRNA
cagagtcggctgcgctcatt

SEQ ID NO: 116225 - DNA, 20 bp, Artificial Sequence
  MKO10116225_B_Slc17a3
  gRNA
attgcagaaatgtgtgacga

SEQ ID NO: 116226 - DNA, 20 bp, Artificial Sequence
  MKO10116226_B_Slc17a4
  gRNA
ccagttacctgatgcagcga

SEQ ID NO: 116227 - DNA, 20 bp, Artificial Sequence
  MKO10116227_B_Slc17a4
  gRNA
ctatgaacgatccatagctg

SEQ ID NO: 116228 - DNA, 20 bp, Artificial Sequence
  MKO10116228_B_Slc17a4
  gRNA
ggtcttatttgtcaggccct

SEQ ID NO: 116229 - DNA, 20 bp, Artificial Sequence
  MKO10116229_B_Slc17a5
  gRNA
ttccagctatgcacgccatg

SEQ ID NO: 116230 - DNA, 20 bp, Artificial Sequence
  MKO10116230_B_Slc17a5
  gRNA
cttcaccctgttcacaccgc

SEQ ID NO: 116231 - DNA, 20 bp, Artificial Sequence
  MKO10116231_B_Slc17a5
  gRNA
tatcttacccgcataggaaa

SEQ ID NO: 116232 - DNA, 20 bp, Artificial Sequence
  MKO10116232_B_Slc17a6
  gRNA
agccccagaagaacgatccg

SEQ ID NO: 116233 - DNA, 20 bp, Artificial Sequence
  MKO10116233_B_Slc17a6
  gRNA
gacacatccataatgcactc

SEQ ID NO: 116234 - DNA, 20 bp, Artificial Sequence
  MKO10116234_B_Slc17a6
  gRNA
cagatgggatcagcatattg

SEQ ID NO: 116235 - DNA, 20 bp, Artificial Sequence
  MKO10116235_B_Slc17a7
  gRNA
tgccagccgactccgttcta

SEQ ID NO: 116236 - DNA, 20 bp, Artificial Sequence
  MKO10116236_B_Slc17a7
  gRNA
tcagcagcccgcgttcacta

SEQ ID NO: 116237 - DNA, 20 bp, Artificial Sequence
  MKO10116237_B_Slc17a7
  gRNA
aatgggcccctcccttagaa

SEQ ID NO: 116238 - DNA, 20 bp, Artificial Sequence
  MKO10116238_B_Slc17a8
  gRNA
tccagacagcgcagtttaac

SEQ ID NO: 116239 - DNA, 20 bp, Artificial Sequence
  MKO10116239_B_Slc17a8
  gRNA
gagacggtgggcctgatcca

SEQ ID NO: 116240 - DNA, 20 bp, Artificial Sequence
  MKO10116240_B_Slc17a8
  gRNA
gagtaagtgggcgcctcccc

SEQ ID NO: 116241 - DNA, 20 bp, Artificial Sequence
  MKO10116241_B_Slc17a9
  gRNA
acaccactgcttgcgcacct

SEQ ID NO: 116242 - DNA, 20 bp, Artificial Sequence
  MKO10116242_B_Slc17a9
  gRNA
aggccaggtggccgctgccg

SEQ ID NO: 116243 - DNA, 20 bp, Artificial Sequence
  MKO10116243_B_Slc17a9
  gRNA
tctgggcgtactatgtgtac

SEQ ID NO: 116244 - DNA, 20 bp, Artificial Sequence
  MKO10116244_B_Slc18a1
  gRNA
gtagttatccgtatagacac

SEQ ID NO: 116245 - DNA, 20 bp, Artificial Sequence
  MKO10116245_B_Slc18a1
  gRNA
gagttcgggccacaaacagc

SEQ ID NO: 116246 - DNA, 20 bp, Artificial Sequence
  MKO10116246_B_Slc18a1
  gRNA
tatcacatccccatgtttgt

SEQ ID NO: 116247 - DNA, 20 bp, Artificial Sequence
  MKO10116247_B_Slc18a2
  gRNA
atgccttcctgctgatcgcc

SEQ ID NO: 116248 - DNA, 20 bp, Artificial Sequence
  MKO10116248_B_Slc18a2
  gRNA
taacgccatggggattgctc

SEQ ID NO: 116249 - DNA, 20 bp, Artificial Sequence
  MKO10116249_B_Slc18a2
  gRNA
gccgattccctgcagggacc

SEQ ID NO: 116250 - DNA, 20 bp, Artificial Sequence
  MKO10116250_B_Slc18a3
  gRNA
gagtgcgtcgaagagcgaca

SEQ ID NO: 116251 - DNA, 20 bp, Artificial Sequence
  MKO10116251_B_Slc18a3
  gRNA
gactatatcgctcacatgcg

SEQ ID NO: 116252 - DNA, 20 bp, Artificial Sequence
  MKO10116252_B_Slc18a3
  gRNA
gcttgcccgcgaactcgtag

SEQ ID NO: 116253 - DNA, 20 bp, Artificial Sequence
  MKO10116253_B_Slc18b1
  gRNA
ttattgcagcttgtacacat

SEQ ID NO: 116254 - DNA, 20 bp, Artificial Sequence
  MKO10116254_B_Slc18b1
  gRNA
atcgtcatccatccttgcta

SEQ ID NO: 116255 - DNA, 20 bp, Artificial Sequence
  MKO10116255_B_Slc18b1
  gRNA
ggaggagttacaattctctt

SEQ ID NO: 116256 - DNA, 20 bp, Artificial Sequence
  MKO10116256_B_Slc19a1
  gRNA
gggtctccaagtccgtgatc

SEQ ID NO: 116257 - DNA, 20 bp, Artificial Sequence
  MKO10116257_B_Slc19a1
  gRNA
gccggcggagaaggacgtga

SEQ ID NO: 116258 - DNA, 20 bp, Artificial Sequence
  MKO10116258_B_Slc19a1
  gRNA
ggcttacctgatcacggact

SEQ ID NO: 116259 - DNA, 20 bp, Artificial Sequence
  MKO10116259_B_Slc19a2
  gRNA
gcagatcctcgtctccgtgg

SEQ ID NO: 116260 - DNA, 20 bp, Artificial Sequence
  MKO10116260_B_Slc19a2
  gRNA
aggtgttcacgccgaacaca

SEQ ID NO: 116261 - DNA, 20 bp, Artificial Sequence
  MKO10116261_B_Slc19a2
  gRNA
tgctgaggttcgcagcaatc

SEQ ID NO: 116262 - DNA, 20 bp, Artificial Sequence
  MKO10116262_B_Slc19a3
  gRNA
gagcttagaacgttatgccc

SEQ ID NO: 116263 - DNA, 20 bp, Artificial Sequence
  MKO10116263_B_Slc19a3
  gRNA
ctgctcagctaagtgccgaa

SEQ ID NO: 116264 - DNA, 20 bp, Artificial Sequence
  MKO10116264_B_Slc19a3
  gRNA
gtgctatgctgggtatctac

SEQ ID NO: 116265 - DNA, 20 bp, Artificial Sequence
  MKO10116265_B_Slc1a1
  gRNA
atcgtatccagcatgatcac

SEQ ID NO: 116266 - DNA, 20 bp, Artificial Sequence
  MKO10116266_B_Slc1a1
  gRNA
ccaggtacctgtgatcatgc

SEQ ID NO: 116267 - DNA, 20 bp, Artificial Sequence
  MKO10116267_B_Slc1a1
  gRNA
atgccatgttggacctgatc

SEQ ID NO: 116268 - DNA, 20 bp, Artificial Sequence
  MKO10116268_B_Slc1a2
  gRNA
tgagccaaagcaccgaaacc

SEQ ID NO: 116269 - DNA, 20 bp, Artificial Sequence
  MKO10116269_B_Slc1a2
  gRNA
aaggacgggatgaacgtctt

SEQ ID NO: 116270 - DNA, 20 bp, Artificial Sequence
  MKO10116270_B_Slc1a2
  gRNA
gatgaccgccttggtggtat

SEQ ID NO: 116271 - DNA, 20 bp, Artificial Sequence
  MKO10116271_B_Slc1a3
  gRNA
taacgaagccatcatgcgat

SEQ ID NO: 116272 - DNA, 20 bp, Artificial Sequence
  MKO10116272_B_Slc1a3
  gRNA
gaccgtataaaatgagctac

SEQ ID NO: 116273 - DNA, 20 bp, Artificial Sequence
  MKO10116273_B_Slc1a3
  gRNA
agcgcgcatccccatcttcc

SEQ ID NO: 116274 - DNA, 20 bp, Artificial Sequence
  MKO10116274_B_Slc1a4
  gRNA
gtctgcaaccgattacacag

SEQ ID NO: 116275 - DNA, 20 bp, Artificial Sequence
  MKO10116275_B_Slc1a4
  gRNA
aaaccttaccgtagtgaatg

SEQ ID NO: 116276 - DNA, 20 bp, Artificial Sequence
  MKO10116276_B_Slc1a4
  gRNA
gatccccgttgtaacagatg

SEQ ID NO: 116277 - DNA, 20 bp, Artificial Sequence
  MKO10116277_B_Slc1a5
  gRNA
agacgatagcgaagaccacc

SEQ ID NO: 116278 - DNA, 20 bp, Artificial Sequence
  MKO10116278_B_Slc1a5
  gRNA
agacaactcatgtaaaatac

SEQ ID NO: 116279 - DNA, 20 bp, Artificial Sequence
  MKO10116279_B_Slc1a5
  gRNA
gaaggcagcagacaccagat

SEQ ID NO: 116280 - DNA, 20 bp, Artificial Sequence
  MKO10116280_B_Slc1a6
  gRNA
caacaaggcgacagggcgga

SEQ ID NO: 116281 - DNA, 20 bp, Artificial Sequence
  MKO10116281_B_Slc1a6
  gRNA
attggtggcatgaagcacaa

SEQ ID NO: 116282 - DNA, 20 bp, Artificial Sequence
  MKO10116282_B_Slc1a6
  gRNA
cttcctaacctgtttgaagc

SEQ ID NO: 116283 - DNA, 20 bp, Artificial Sequence
  MKO10116283_B_Slc1a7
  gRNA
tctgctcacctgtttgaacg

SEQ ID NO: 116284 - DNA, 20 bp, Artificial Sequence
  MKO10116284_B_Slc1a7
  gRNA
tcaccgtggcatactacctg

SEQ ID NO: 116285 - DNA, 20 bp, Artificial Sequence
  MKO10116285_B_Slc1a7
  gRNA
atccgcatcaagagttctcc

SEQ ID NO: 116286 - DNA, 20 bp, Artificial Sequence
  MKO10116286_B_Slc20a1
  gRNA
ggtaccatcctcatctcggt

SEQ ID NO: 116287 - DNA, 20 bp, Artificial Sequence
  MKO10116287_B_Slc20a1
  gRNA
cggtgctccagtatacataa

SEQ ID NO: 116288 - DNA, 20 bp, Artificial Sequence
  MKO10116288_B_Slc20a1
  gRNA
ctgcacatcccaccgagatg

SEQ ID NO: 116289 - DNA, 20 bp, Artificial Sequence
  MKO10116289_B_Slc20a2
  gRNA
gaacagcagagcaacgccga

SEQ ID NO: 116290 - DNA, 20 bp, Artificial Sequence
  MKO10116290_B_Slc20a2
  gRNA
ctcgtggcgattggcccgaa

SEQ ID NO: 116291 - DNA, 20 bp, Artificial Sequence
  MKO10116291_B_Slc20a2
  gRNA
tttatatcgccacttctttc

SEQ ID NO: 116292 - DNA, 20 bp, Artificial Sequence
  MKO10116292_B_Slc22a12
  gRNA
gggcctgggagttacatacc

SEQ ID NO: 116293 - DNA, 20 bp, Artificial Sequence
  MKO10116293_B_Slc22a12
  gRNA
ggacctggtatgtaactccc

SEQ ID NO: 116294 - DNA, 20 bp, Artificial Sequence
  MKO10116294_B_Slc22a12
  gRNA
cgttcaaggtcatcaccaaa

SEQ ID NO: 116295 - DNA, 20 bp, Artificial Sequence
  MKO10116295_B_Slc22a13
  gRNA
cagtagccaagacaaagcgt

SEQ ID NO: 116296 - DNA, 20 bp, Artificial Sequence
  MKO10116296_B_Slc22a13
  gRNA
atcttggagaacacaagccg

SEQ ID NO: 116297 - DNA, 20 bp, Artificial Sequence
  MKO10116297_B_Slc22a13
  gRNA
cctgaagaagacctcccagt

SEQ ID NO: 116298 - DNA, 20 bp, Artificial Sequence
  MKO10116298_B_Slc22a14
  gRNA
accctgtcaagacgcctgac

SEQ ID NO: 116299 - DNA, 20 bp, Artificial Sequence
  MKO10116299_B_Slc22a14
  gRNA
ctttgtaagccagccccgtc

SEQ ID NO: 116300 - DNA, 20 bp, Artificial Sequence
  MKO10116300_B_Slc22a14
  gRNA
aatcatcctgctgtcgctgc

SEQ ID NO: 116301 - DNA, 20 bp, Artificial Sequence
  MKO10116301_B_Slc22a15
  gRNA
ggtcagctttcagatcgatt

SEQ ID NO: 116302 - DNA, 20 bp, Artificial Sequence
  MKO10116302_B_Slc22a15
  gRNA
aaggccaggccttcggggac

SEQ ID NO: 116303 - DNA, 20 bp, Artificial Sequence
  MKO10116303_B_Slc22a15
  gRNA
atcttatttgctgtcgcaaa

SEQ ID NO: 116304 - DNA, 20 bp, Artificial Sequence
  MKO10116304_B_Slc22a16
  gRNA
cgccgatgctcgtgcaccac

SEQ ID NO: 116305 - DNA, 20 bp, Artificial Sequence
  MKO10116305_B_Slc22a16
  gRNA
acctccaagcagatacgttg

SEQ ID NO: 116306 - DNA, 20 bp, Artificial Sequence
  MKO10116306_B_Slc22a16
  gRNA
ttccagatttggaaggcgaa

SEQ ID NO: 116307 - DNA, 20 bp, Artificial Sequence
  MKO10116307_B_Slc22a17
  gRNA
gctgagcgaaaccggcccca

SEQ ID NO: 116308 - DNA, 20 bp, Artificial Sequence
  MKO10116308_B_Slc22a17
  gRNA
gccacccgaagcctctgggt

SEQ ID NO: 116309 - DNA, 20 bp, Artificial Sequence
  MKO10116309_B_Slc22a17
  gRNA
cacggtggctgatagtgaag

SEQ ID NO: 116310 - DNA, 20 bp, Artificial Sequence
  MKO10116310_B_Slc22a18
  gRNA
gtgccgctcttgccccgcac

SEQ ID NO: 116311 - DNA, 20 bp, Artificial Sequence
  MKO10116311_B_Slc22a18
  gRNA
atactatacctgccgaacac

SEQ ID NO: 116312 - DNA, 20 bp, Artificial Sequence
  MKO10116312_B_Slc22a18
  gRNA
gatccagtgtcctgccatcc

SEQ ID NO: 116313 - DNA, 20 bp, Artificial Sequence
  MKO10116313_B_Slc22a19
  gRNA
gcaaagcactgtttgtcctc

SEQ ID NO: 116314 - DNA, 20 bp, Artificial Sequence
  MKO10116314_B_Slc22a19
  gRNA
agtttcgaaaagcaaaagcc

SEQ ID NO: 116315 - DNA, 20 bp, Artificial Sequence
  MKO10116315_B_Slc22a19
  gRNA
cacgtgctctttactgaaaa

SEQ ID NO: 116316 - DNA, 20 bp, Artificial Sequence
  MKO10116316_B_Slc22a1
  gRNA
cttcagtttaacctggtgtg

SEQ ID NO: 116317 - DNA, 20 bp, Artificial Sequence
  MKO10116317_B_Slc22a1
  gRNA
agcaacatggatgtatagtc

SEQ ID NO: 116318 - DNA, 20 bp, Artificial Sequence
  MKO10116318_B_Slc22a1
  gRNA
ctgcaatgtaacccacaacc

SEQ ID NO: 116319 - DNA, 20 bp, Artificial Sequence
  MKO10116319_B_Slc22a20
  gRNA
gagccaggtcacgaagggtg

SEQ ID NO: 116320 - DNA, 20 bp, Artificial Sequence
  MKO10116320_B_Slc22a20
  gRNA
caacaccccggacatgtaga

SEQ ID NO: 116321 - DNA, 20 bp, Artificial Sequence
  MKO10116321_B_Slc22a20
  gRNA
tgggttcaggttgggtcgca

SEQ ID NO: 116322 - DNA, 20 bp, Artificial Sequence
  MKO10116322_B_Slc22a21
  gRNA
cactatcttcgatccaagcg

SEQ ID NO: 116323 - DNA, 20 bp, Artificial Sequence
  MKO10116323_B_Slc22a21
  gRNA
gagcacacccacgtaaaaga

SEQ ID NO: 116324 - DNA, 20 bp, Artificial Sequence
  MKO10116324_B_Slc22a21
  gRNA
tgagagctgtcccgaaatga

SEQ ID NO: 116325 - DNA, 20 bp, Artificial Sequence
  MKO10116325_B_Slc22a22
  gRNA
attgggggcaaaggcacagt

SEQ ID NO: 116326 - DNA, 20 bp, Artificial Sequence
  MKO10116326_B_Slc22a22
  gRNA
tgcacaaaatctaactactg

SEQ ID NO: 116327 - DNA, 20 bp, Artificial Sequence
  MKO10116327_B_Slc22a22
  gRNA
tggaagaagcatcagtccag

SEQ ID NO: 116328 - DNA, 20 bp, Artificial Sequence
  MKO10116328_B_Slc22a23
  gRNA
atcttgtgtgtgataatacc

SEQ ID NO: 116329 - DNA, 20 bp, Artificial Sequence
  MKO10116329_B_Slc22a23
  gRNA
gcgcagccagccccggcatg

SEQ ID NO: 116330 - DNA, 20 bp, Artificial Sequence
  MKO10116330_B_Slc22a23
  gRNA
ggccacgaagctcgccacca

SEQ ID NO: 116331 - DNA, 20 bp, Artificial Sequence
  MKO10116331_B_Slc22a26
  gRNA
aggccttatcctggcaggtc

SEQ ID NO: 116332 - DNA, 20 bp, Artificial Sequence
  MKO10116332_B_Slc22a26
  gRNA
tgcttacttcgcttcctgac

SEQ ID NO: 116333 - DNA, 20 bp, Artificial Sequence
  MKO10116333_B_Slc22a26
  gRNA
gctcctgagatccacacacc

SEQ ID NO: 116334 - DNA, 20 bp, Artificial Sequence
  MKO10116334_B_Slc22a27
  gRNA
ggacttggtatgtgaatccc

SEQ ID NO: 116335 - DNA, 20 bp, Artificial Sequence
  MKO10116335_B_Slc22a27
  gRNA
caagtgactatttactaata

SEQ ID NO: 116336 - DNA, 20 bp, Artificial Sequence
  MKO10116336_B_Slc22a27
  gRNA
gttccacagacaatcctgcc

SEQ ID NO: 116337 - DNA, 20 bp, Artificial Sequence
  MKO10116337_B_Slc22a28
  gRNA
tcttcttctttatactcaca

SEQ ID NO: 116338 - DNA, 20 bp, Artificial Sequence
  MKO10116338_B_Slc22a28
  gRNA
ggacctggtgtgtgaatctc

SEQ ID NO: 116339 - DNA, 20 bp, Artificial Sequence
  MKO10116339_B_Slc22a28
  gRNA
acactcacctgtctgacaaa

SEQ ID NO: 116340 - DNA, 20 bp, Artificial Sequence
  MKO10116340_B_Slc22a29
  gRNA
tttgatcaacaaaccccaga

SEQ ID NO: 116341 - DNA, 20 bp, Artificial Sequence
  MKO10116341_B_Slc22a29
  gRNA
ggacttggtatgtgaatctc

SEQ ID NO: 116342 - DNA, 20 bp, Artificial Sequence
  MKO10116342_B_Slc22a29
  gRNA
acactcacctgtctgacaga

SEQ ID NO: 116343 - DNA, 20 bp, Artificial Sequence
  MKO10116343_B_Slc22a2
  gRNA
cgatttcacccaactatgcc

SEQ ID NO: 116344 - DNA, 20 bp, Artificial Sequence
  MKO10116344_B_Slc22a2
  gRNA
gtttcagtcattagtgaacg

SEQ ID NO: 116345 - DNA, 20 bp, Artificial Sequence
  MKO10116345_B_Slc22a2
  gRNA
ttctgggagatcaaccatct

SEQ ID NO: 116346 - DNA, 20 bp, Artificial Sequence
  MKO10116346_B_Slc22a30
  gRNA
ctactgcttacttcgattcc

SEQ ID NO: 116347 - DNA, 20 bp, Artificial Sequence
  MKO10116347_B_Slc22a30
  gRNA
caagtgactatttactgata

SEQ ID NO: 116348 - DNA, 20 bp, Artificial Sequence
  MKO10116348_B_Slc22a30
  gRNA
gctcataccttgtgagtata

SEQ ID NO: 116349 - DNA, 20 bp, Artificial Sequence
  MKO10116349_B_Slc22a3
  gRNA
tggtccctgagtctccccgc

SEQ ID NO: 116350 - DNA, 20 bp, Artificial Sequence
  MKO10116350_B_Slc22a3
  gRNA
ttgcctacttcacgcccagc

SEQ ID NO: 116351 - DNA, 20 bp, Artificial Sequence
  MKO10116351_B_Slc22a3
  gRNA
cctgtccgctgcatagccca

SEQ ID NO: 116352 - DNA, 20 bp, Artificial Sequence
  MKO10116352_B_Slc22a4
  gRNA
tgacagctgcccagacacga

SEQ ID NO: 116353 - DNA, 20 bp, Artificial Sequence
  MKO10116353_B_Slc22a4
  gRNA
gaaagtcctctttgcaacca

SEQ ID NO: 116354 - DNA, 20 bp, Artificial Sequence
  MKO10116354_B_Slc22a4
  gRNA
gtcattcctacctagtatga

SEQ ID NO: 116355 - DNA, 20 bp, Artificial Sequence
  MKO10116355_B_Slc22a5
  gRNA
cagcacacccacgaaaaaca

SEQ ID NO: 116356 - DNA, 20 bp, Artificial Sequence
  MKO10116356_B_Slc22a5
  gRNA
ctgctggcgctcactgtgcc

SEQ ID NO: 116357 - DNA, 20 bp, Artificial Sequence
  MKO10116357_B_Slc22a5
  gRNA
ctcacttggatcgaagatag

SEQ ID NO: 116358 - DNA, 20 bp, Artificial Sequence
  MKO10116358_B_Slc22a6
  gRNA
tcgcctatgctgtgccccac

SEQ ID NO: 116359 - DNA, 20 bp, Artificial Sequence
  MKO10116359_B_Slc22a6
  gRNA
gtaacactcccaccatgaac

SEQ ID NO: 116360 - DNA, 20 bp, Artificial Sequence
  MKO10116360_B_Slc22a6
  gRNA
tagccaaagacatgcccgag

SEQ ID NO: 116361 - DNA, 20 bp, Artificial Sequence
  MKO10116361_B_Slc22a7
  gRNA
taccatcattgtacttccgt

SEQ ID NO: 116362 - DNA, 20 bp, Artificial Sequence
  MKO10116362_B_Slc22a7
  gRNA
tatgggccgcccattgagct

SEQ ID NO: 116363 - DNA, 20 bp, Artificial Sequence
  MKO10116363_B_Slc22a7
  gRNA
cacgccgatgaagaagcacg

SEQ ID NO: 116364 - DNA, 20 bp, Artificial Sequence
  MKO10116364_B_Slc22a8
  gRNA
aactgtagccagcgccactg

SEQ ID NO: 116365 - DNA, 20 bp, Artificial Sequence
  MKO10116365_B_Slc22a8
  gRNA
tggcctatgccgttcctcag

SEQ ID NO: 116366 - DNA, 20 bp, Artificial Sequence
  MKO10116366_B_Slc22a8
  gRNA
tgccagcaagagatagctcc

SEQ ID NO: 116367 - DNA, 20 bp, Artificial Sequence
  MKO10116367_B_Slc23a1
  gRNA
ttccaggctgccgttgttcc

SEQ ID NO: 116368 - DNA, 20 bp, Artificial Sequence
  MKO10116368_B_Slc23a1
  gRNA
tgacatgttgtacaagattg

SEQ ID NO: 116369 - DNA, 20 bp, Artificial Sequence
  MKO10116369_B_Slc23a1
  gRNA
cttgtacaacatgtcaaact

SEQ ID NO: 116370 - DNA, 20 bp, Artificial Sequence
  MKO10116370_B_Slc23a2
  gRNA
ggccacatccagcggagagc

SEQ ID NO: 116371 - DNA, 20 bp, Artificial Sequence
  MKO10116371_B_Slc23a2
  gRNA
atcatctcacctgcaatccc

SEQ ID NO: 116372 - DNA, 20 bp, Artificial Sequence
  MKO10116372_B_Slc23a2
  gRNA
tgtgcgtgggggatgaccag

SEQ ID NO: 116373 - DNA, 20 bp, Artificial Sequence
  MKO10116373_B_Slc23a3
  gRNA
ggccgtgtgttcccctactg

SEQ ID NO: 116374 - DNA, 20 bp, Artificial Sequence
  MKO10116374_B_Slc23a3
  gRNA
agcttcttgtcaaactacac

SEQ ID NO: 116375 - DNA, 20 bp, Artificial Sequence
  MKO10116375_B_Slc23a3
  gRNA
gactcacgtacagcaaggcc

SEQ ID NO: 116376 - DNA, 20 bp, Artificial Sequence
  MKO10116376_B_Slc24a1
  gRNA
gcccagtgaggatgctgtcg

SEQ ID NO: 116377 - DNA, 20 bp, Artificial Sequence
  MKO10116377_B_Slc24a1
  gRNA
atcgtcctcctgatctccct

SEQ ID NO: 116378 - DNA, 20 bp, Artificial Sequence
  MKO10116378_B_Slc24a1
  gRNA
ttcctcgacagcatcctcac

SEQ ID NO: 116379 - DNA, 20 bp, Artificial Sequence
  MKO10116379_B_Slc24a2
  gRNA
caaggatgggccaactttac

SEQ ID NO: 116380 - DNA, 20 bp, Artificial Sequence
  MKO10116380_B_Slc24a2
  gRNA
ctgaagctaattcgagtcat

SEQ ID NO: 116381 - DNA, 20 bp, Artificial Sequence
  MKO10116381_B_Slc24a2
  gRNA
ctgctccctaccggtaaagt

SEQ ID NO: 116382 - DNA, 20 bp, Artificial Sequence
  MKO10116382_B_Slc24a3
  gRNA
ggccccagagctgttcacgt

SEQ ID NO: 116383 - DNA, 20 bp, Artificial Sequence
  MKO10116383_B_Slc24a3
  gRNA
tgtgggagttggcaccatcg

SEQ ID NO: 116384 - DNA, 20 bp, Artificial Sequence
  MKO10116384_B_Slc24a3
  gRNA
catgtacatgttctatgcgc

SEQ ID NO: 116385 - DNA, 20 bp, Artificial Sequence
  MKO10116385_B_Slc24a4
  gRNA
aaagaagtcatcgcacacga

SEQ ID NO: 116386 - DNA, 20 bp, Artificial Sequence
  MKO10116386_B_Slc24a4
  gRNA
tctgtgcagttcttagccag

SEQ ID NO: 116387 - DNA, 20 bp, Artificial Sequence
  MKO10116387_B_Slc24a4
  gRNA
atccctagagaagatctgtg

SEQ ID NO: 116388 - DNA, 20 bp, Artificial Sequence
  MKO10116388_B_Slc24a5
  gRNA
gaagtacttgtcgcagacga

SEQ ID NO: 116389 - DNA, 20 bp, Artificial Sequence
  MKO10116389_B_Slc24a5
  gRNA
ataaattgcagatcctagta

SEQ ID NO: 116390 - DNA, 20 bp, Artificial Sequence
  MKO10116390_B_Slc24a5
  gRNA
attggtatcagcaccatact

SEQ ID NO: 116391 - DNA, 20 bp, Artificial Sequence
  MKO10116391_B_Slc25a10
  gRNA
tcgcaatctacgagaccatg

SEQ ID NO: 116392 - DNA, 20 bp, Artificial Sequence
  MKO10116392_B_Slc25a10
  gRNA
tgcgaaccgagtcagagagt

SEQ ID NO: 116393 - DNA, 20 bp, Artificial Sequence
  MKO10116393_B_Slc25a10
  gRNA
cgtggggaccccagcagatt

SEQ ID NO: 116394 - DNA, 20 bp, Artificial Sequence
  MKO10116394_B_Slc25a11
  gRNA
gacaacgacagctcgagcca

SEQ ID NO: 116395 - DNA, 20 bp, Artificial Sequence
  MKO10116395_B_Slc25a11
  gRNA
tcaatctaagcagttcttgc

SEQ ID NO: 116396 - DNA, 20 bp, Artificial Sequence
  MKO10116396_B_Slc25a11
  gRNA
acccagtgtaaatgcccttc

SEQ ID NO: 116397 - DNA, 20 bp, Artificial Sequence
  MKO10116397_B_Slc25a12
  gRNA
gagttcatccggctgcactt

SEQ ID NO: 116398 - DNA, 20 bp, Artificial Sequence
  MKO10116398_B_Slc25a12
  gRNA
gctgagaaacatattcctcc

SEQ ID NO: 116399 - DNA, 20 bp, Artificial Sequence
  MKO10116399_B_Slc25a12
  gRNA
aaatgccaaaaactcttgat

SEQ ID NO: 116400 - DNA, 20 bp, Artificial Sequence
  MKO10116400_B_Slc25a13
  gRNA
aatattgctttaagctcagc

SEQ ID NO: 116401 - DNA, 20 bp, Artificial Sequence
  MKO10116401_B_Slc25a13
  gRNA
ttccagctgtttgacaaagc

SEQ ID NO: 116402 - DNA, 20 bp, Artificial Sequence
  MKO10116402_B_Slc25a13
  gRNA
taccgagtgacaaagtcatg

SEQ ID NO: 116403 - DNA, 20 bp, Artificial Sequence
  MKO10116403_B_Slc25a14
  gRNA
accgaactcggcaacaatag

SEQ ID NO: 116404 - DNA, 20 bp, Artificial Sequence
  MKO10116404_B_Slc25a14
  gRNA
gcctctattgttgccgagtt

SEQ ID NO: 116405 - DNA, 20 bp, Artificial Sequence
  MKO10116405_B_Slc25a14
  gRNA
aaaacacggctgcaagtcca

SEQ ID NO: 116406 - DNA, 20 bp, Artificial Sequence
  MKO10116406_B_Slc25a15
  gRNA
cttcattctttacgatactc

SEQ ID NO: 116407 - DNA, 20 bp, Artificial Sequence
  MKO10116407_B_Slc25a15
  gRNA
ctagatttgatacaatccac

SEQ ID NO: 116408 - DNA, 20 bp, Artificial Sequence
  MKO10116408_B_Slc25a15
  gRNA
ccggcatttcacaagctccg

SEQ ID NO: 116409 - DNA, 20 bp, Artificial Sequence
  MKO10116409_B_Slc25a16
  gRNA
ctgcacttaccctctcgatg

SEQ ID NO: 116410 - DNA, 20 bp, Artificial Sequence
  MKO10116410_B_Slc25a16
  gRNA
caaaaccacagttgcccccc

SEQ ID NO: 116411 - DNA, 20 bp, Artificial Sequence
  MKO10116411_B_Slc25a16
  gRNA
caggggggcaactgtggttt

SEQ ID NO: 116412 - DNA, 20 bp, Artificial Sequence
  MKO10116412_B_Slc25a17
  gRNA
tgctgctgacgactccgctc

SEQ ID NO: 116413 - DNA, 20 bp, Artificial Sequence
  MKO10116413_B_Slc25a17
  gRNA
tactgctagacttcggcttc

SEQ ID NO: 116414 - DNA, 20 bp, Artificial Sequence
  MKO10116414_B_Slc25a17
  gRNA
ccgaagtctagcagtatcca

SEQ ID NO: 116415 - DNA, 20 bp, Artificial Sequence
  MKO10116415_B_Slc25a18
  gRNA
atctccgcaaaactcatcaa

SEQ ID NO: 116416 - DNA, 20 bp, Artificial Sequence
  MKO10116416_B_Slc25a18
  gRNA
gacgcagcggaacctgaaga

SEQ ID NO: 116417 - DNA, 20 bp, Artificial Sequence
  MKO10116417_B_Slc25a18
  gRNA
cggcagctgctcatgcaaga

SEQ ID NO: 116418 - DNA, 20 bp, Artificial Sequence
  MKO10116418_B_Slc25a19
  gRNA
gttcgaacccgcccacctgc

SEQ ID NO: 116419 - DNA, 20 bp, Artificial Sequence
  MKO10116419_B_Slc25a19
  gRNA
gcgtacccgccttgccgctc

SEQ ID NO: 116420 - DNA, 20 bp, Artificial Sequence
  MKO10116420_B_Slc25a19
  gRNA
cggatcttgatgacgtccaa

SEQ ID NO: 116421 - DNA, 20 bp, Artificial Sequence
  MKO10116421_B_Slc25a1
  gRNA
ttaccgatgccccggtaccg

SEQ ID NO: 116422 - DNA, 20 bp, Artificial Sequence
  MKO10116422_B_Slc25a1
  gRNA
ccatccccaaggcggctgtc

SEQ ID NO: 116423 - DNA, 20 bp, Artificial Sequence
  MKO10116423_B_Slc25a1
  gRNA
tcctccaaccccaagtaccg

SEQ ID NO: 116424 - DNA, 20 bp, Artificial Sequence
  MKO10116424_B_Slc25a20
  gRNA
ccggaagactcttatgagag

SEQ ID NO: 116425 - DNA, 20 bp, Artificial Sequence
  MKO10116425_B_Slc25a20
  gRNA
gggatccgcggcttctacaa

SEQ ID NO: 116426 - DNA, 20 bp, Artificial Sequence
  MKO10116426_B_Slc25a20
  gRNA
aagcatttgatccgttctcc

SEQ ID NO: 116427 - DNA, 20 bp, Artificial Sequence
  MKO10116427_B_Slc25a21
  gRNA
gatatatgtcactatcacca

SEQ ID NO: 116428 - DNA, 20 bp, Artificial Sequence
  MKO10116428_B_Slc25a21
  gRNA
tgagctgtacaagaaatttc

SEQ ID NO: 116429 - DNA, 20 bp, Artificial Sequence
  MKO10116429_B_Slc25a21
  gRNA
aacaccaaaaagagcagtca

SEQ ID NO: 116430 - DNA, 20 bp, Artificial Sequence
  MKO10116430_B_Slc25a22
  gRNA
tggcatcgctgggctaatcg

SEQ ID NO: 116431 - DNA, 20 bp, Artificial Sequence
  MKO10116431_B_Slc25a22
  gRNA
tgcggcctgcatcttgcaac

SEQ ID NO: 116432 - DNA, 20 bp, Artificial Sequence
  MKO10116432_B_Slc25a22
  gRNA
cccggagaaggccatcaagt

SEQ ID NO: 116433 - DNA, 20 bp, Artificial Sequence
  MKO10116433_B_Slc25a23
  gRNA
ggagtttactcgctacctgc

SEQ ID NO: 116434 - DNA, 20 bp, Artificial Sequence
  MKO10116434_B_Slc25a23
  gRNA
caacagagcttccgagcact

SEQ ID NO: 116435 - DNA, 20 bp, Artificial Sequence
  MKO10116435_B_Slc25a23
  gRNA
agaactcatcaggcaccgtc

SEQ ID NO: 116436 - DNA, 20 bp, Artificial Sequence
  MKO10116436_B_Slc25a24
  gRNA
actttcagcatcgactctga

SEQ ID NO: 116437 - DNA, 20 bp, Artificial Sequence
  MKO10116437_B_Slc25a24
  gRNA
aaatatgtaaaccgagcatc

SEQ ID NO: 116438 - DNA, 20 bp, Artificial Sequence
  MKO10116438_B_Slc25a24
  gRNA
tgaccgtggactggaatgaa

SEQ ID NO: 116439 - DNA, 20 bp, Artificial Sequence
  MKO10116439_B_Slc25a25
  gRNA
gttccgagatcttgacaccc

SEQ ID NO: 116440 - DNA, 20 bp, Artificial Sequence
  MKO10116440_B_Slc25a25
  gRNA
cccccatagatcttcgatgt

SEQ ID NO: 116441 - DNA, 20 bp, Artificial Sequence
  MKO10116441_B_Slc25a25
  gRNA
caaggaccttgatgggcaac

SEQ ID NO: 116442 - DNA, 20 bp, Artificial Sequence
  MKO10116442_B_Slc25a26
  gRNA
ggcattcaaggactgtaccg

SEQ ID NO: 116443 - DNA, 20 bp, Artificial Sequence
  MKO10116443_B_Slc25a26
  gRNA
caaacccgtgaagcacatgc

SEQ ID NO: 116444 - DNA, 20 bp, Artificial Sequence
  MKO10116444_B_Slc25a26
  gRNA
aacaaggctggtggatttcg

SEQ ID NO: 116445 - DNA, 20 bp, Artificial Sequence
  MKO10116445_B_Slc25a27
  gRNA
gacttcccgtagatgttcat

SEQ ID NO: 116446 - DNA, 20 bp, Artificial Sequence
  MKO10116446_B_Slc25a27
  gRNA
ggaatccgcgggctttgggc

SEQ ID NO: 116447 - DNA, 20 bp, Artificial Sequence
  MKO10116447_B_Slc25a27
  gRNA
aagcgctgctctctgaatat

SEQ ID NO: 116448 - DNA, 20 bp, Artificial Sequence
  MKO10116448_B_Slc25a28
  gRNA
cctccaacacgttccgatag

SEQ ID NO: 116449 - DNA, 20 bp, Artificial Sequence
  MKO10116449_B_Slc25a28
  gRNA
tacttgatagaccgtcctga

SEQ ID NO: 116450 - DNA, 20 bp, Artificial Sequence
  MKO10116450_B_Slc25a28
  gRNA
gggggttaaagtgctcttgc

SEQ ID NO: 116451 - DNA, 20 bp, Artificial Sequence
  MKO10116451_B_Slc25a29
  gRNA
ggccatggcgctcgacttcc

SEQ ID NO: 116452 - DNA, 20 bp, Artificial Sequence
  MKO10116452_B_Slc25a29
  gRNA
ctcaccttgactatgtcaaa

SEQ ID NO: 116453 - DNA, 20 bp, Artificial Sequence
  MKO10116453_B_Slc25a29
  gRNA
cacactctcctgcttgatga

SEQ ID NO: 116454 - DNA, 20 bp, Artificial Sequence
  MKO10116454_B_Slc25a2
  gRNA
gaatgcagagctgaacgact

SEQ ID NO: 116455 - DNA, 20 bp, Artificial Sequence
  MKO10116455_B_Slc25a2
  gRNA
actgctagcctatgtcaccc

SEQ ID NO: 116456 - DNA, 20 bp, Artificial Sequence
  MKO10116456_B_Slc25a2
  gRNA
aagcctccacttaacatcaa

SEQ ID NO: 116457 - DNA, 20 bp, Artificial Sequence
  MKO10116457_B_Slc25a30
  gRNA
gcatgctgcacgcgctgatg

SEQ ID NO: 116458 - DNA, 20 bp, Artificial Sequence
  MKO10116458_B_Slc25a30
  gRNA
cttcatgagcatttaccagc

SEQ ID NO: 116459 - DNA, 20 bp, Artificial Sequence
  MKO10116459_B_Slc25a30
  gRNA
gcacagaacagcgctgttca

SEQ ID NO: 116460 - DNA, 20 bp, Artificial Sequence
  MKO10116460_B_Slc25a31
  gRNA
tagaagacgtatgatgatgc

SEQ ID NO: 116461 - DNA, 20 bp, Artificial Sequence
  MKO10116461_B_Slc25a31
  gRNA
acgtcttctaactgtgtcaa

SEQ ID NO: 116462 - DNA, 20 bp, Artificial Sequence
  MKO10116462_B_Slc25a31
  gRNA
ttccaatatcaacacctaat

SEQ ID NO: 116463 - DNA, 20 bp, Artificial Sequence
  MKO10116463_B_Slc25a32
  gRNA
caccaccatattgtaacata

SEQ ID NO: 116464 - DNA, 20 bp, Artificial Sequence
  MKO10116464_B_Slc25a32
  gRNA
actcatatgccataaactga

SEQ ID NO: 116465 - DNA, 20 bp, Artificial Sequence
  MKO10116465_B_Slc25a32
  gRNA
ctcgtctcagctgctgaagc

SEQ ID NO: 116466 - DNA, 20 bp, Artificial Sequence
  MKO10116466_B_Slc25a33
  gRNA
ggaccaaagtcactctttag

SEQ ID NO: 116467 - DNA, 20 bp, Artificial Sequence
  MKO10116467_B_Slc25a33
  gRNA
ataccttaatgaatcctatt

SEQ ID NO: 116468 - DNA, 20 bp, Artificial Sequence
  MKO10116468_B_Slc25a33
  gRNA
gatgccattgaattgctctt

SEQ ID NO: 116469 - DNA, 20 bp, Artificial Sequence
  MKO10116469_B_Slc25a34
  gRNA
gtggggacccaagcgcagat

SEQ ID NO: 116470 - DNA, 20 bp, Artificial Sequence
  MKO10116470_B_Slc25a34
  gRNA
gacagtggctactatggccg

SEQ ID NO: 116471 - DNA, 20 bp, Artificial Sequence
  MKO10116471_B_Slc25a34
  gRNA
gctgtgccccgagtcacagt

SEQ ID NO: 116472 - DNA, 20 bp, Artificial Sequence
  MKO10116472_B_Slc25a35
  gRNA
ccctcacctgatgcttatac

SEQ ID NO: 116473 - DNA, 20 bp, Artificial Sequence
  MKO10116473_B_Slc25a35
  gRNA
agaggagccgatgacaactc

SEQ ID NO: 116474 - DNA, 20 bp, Artificial Sequence
  MKO10116474_B_Slc25a35
  gRNA
ccaggtgaagacacacctac

SEQ ID NO: 116475 - DNA, 20 bp, Artificial Sequence
  MKO10116475_B_Slc25a36
  gRNA
cagggctatcctggaaaaag

SEQ ID NO: 116476 - DNA, 20 bp, Artificial Sequence
  MKO10116476_B_Slc25a36
  gRNA
tgctgcttattcaaactgca

SEQ ID NO: 116477 - DNA, 20 bp, Artificial Sequence
  MKO10116477_B_Slc25a36
  gRNA
cagctgaagccatgtgcact

SEQ ID NO: 116478 - DNA, 20 bp, Artificial Sequence
  MKO10116478_B_Slc25a37
  gRNA
cacccatcatcatcacgttc

SEQ ID NO: 116479 - DNA, 20 bp, Artificial Sequence
  MKO10116479_B_Slc25a37
  gRNA
ctggattcattactgcatcg

SEQ ID NO: 116480 - DNA, 20 bp, Artificial Sequence
  MKO10116480_B_Slc25a37
  gRNA
gcagtaatgaatccagcaga

SEQ ID NO: 116481 - DNA, 20 bp, Artificial Sequence
  MKO10116481_B_Slc25a38
  gRNA
agccaacatcccaacacgtc

SEQ ID NO: 116482 - DNA, 20 bp, Artificial Sequence
  MKO10116482_B_Slc25a38
  gRNA
ttcctcaggcccagacgtgt

SEQ ID NO: 116483 - DNA, 20 bp, Artificial Sequence
  MKO10116483_B_Slc25a38
  gRNA
tactgcagcgagggccaccg

SEQ ID NO: 116484 - DNA, 20 bp, Artificial Sequence
  MKO10116484_B_Slc25a39
  gRNA
ggcggaccttcaccacatcc

SEQ ID NO: 116485 - DNA, 20 bp, Artificial Sequence
  MKO10116485_B_Slc25a39
  gRNA
atgccgcacaatcttcacaa

SEQ ID NO: 116486 - DNA, 20 bp, Artificial Sequence
  MKO10116486_B_Slc25a39
  gRNA
tgacaactccctccagattc

SEQ ID NO: 116487 - DNA, 20 bp, Artificial Sequence
  MKO10116487_B_Slc25a3
  gRNA
tgcggcactttactaagtcc

SEQ ID NO: 116488 - DNA, 20 bp, Artificial Sequence
  MKO10116488_B_Slc25a3
  gRNA
ttcaacagtacgttcaaagc

SEQ ID NO: 116489 - DNA, 20 bp, Artificial Sequence
  MKO10116489_B_Slc25a3
  gRNA
gccttatatagcaacatact

SEQ ID NO: 116490 - DNA, 20 bp, Artificial Sequence
  MKO10116490_B_Slc25a40
  gRNA
atgtctttaccaatgtccca

SEQ ID NO: 116491 - DNA, 20 bp, Artificial Sequence
  MKO10116491_B_Slc25a40
  gRNA
acccgaataccaatagttgc

SEQ ID NO: 116492 - DNA, 20 bp, Artificial Sequence
  MKO10116492_B_Slc25a40
  gRNA
tcacatgtgtgtctgtgaag

SEQ ID NO: 116493 - DNA, 20 bp, Artificial Sequence
  MKO10116493_B_Slc25a41
  gRNA
gcggcgtccgctccctctgg

SEQ ID NO: 116494 - DNA, 20 bp, Artificial Sequence
  MKO10116494_B_Slc25a41
  gRNA
cgcttcactggccagtataa

SEQ ID NO: 116495 - DNA, 20 bp, Artificial Sequence
  MKO10116495_B_Slc25a41
  gRNA
actgcggagcctggtccagg

SEQ ID NO: 116496 - DNA, 20 bp, Artificial Sequence
  MKO10116496_B_Slc25a42
  gRNA
gtacgtgagggaagccgcag

SEQ ID NO: 116497 - DNA, 20 bp, Artificial Sequence
  MKO10116497_B_Slc25a42
  gRNA
cggaccaagatcatcttcca

SEQ ID NO: 116498 - DNA, 20 bp, Artificial Sequence
  MKO10116498_B_Slc25a42
  gRNA
caggggggctactgctgtct

SEQ ID NO: 116499 - DNA, 20 bp, Artificial Sequence
  MKO10116499_B_Slc25a43
  gRNA
tctttagctcccgtaattcc

SEQ ID NO: 116500 - DNA, 20 bp, Artificial Sequence
  MKO10116500_B_Slc25a43
  gRNA
ccttctagtttacatgaacc

SEQ ID NO: 116501 - DNA, 20 bp, Artificial Sequence
  MKO10116501_B_Slc25a43
  gRNA
cggcagatcgtgaaaaccca

SEQ ID NO: 116502 - DNA, 20 bp, Artificial Sequence
  MKO10116502_B_Slc25a44
  gRNA
tatgcccggggactctgaat

SEQ ID NO: 116503 - DNA, 20 bp, Artificial Sequence
  MKO10116503_B_Slc25a44
  gRNA
tgtcatcagaacccgtgtgc

SEQ ID NO: 116504 - DNA, 20 bp, Artificial Sequence
  MKO10116504_B_Slc25a44
  gRNA
ccgtgcaagagcctgacaga

SEQ ID NO: 116505 - DNA, 20 bp, Artificial Sequence
  MKO10116505_B_Slc25a45
  gRNA
tgtcgccagtacacaccaga

SEQ ID NO: 116506 - DNA, 20 bp, Artificial Sequence
  MKO10116506_B_Slc25a45
  gRNA
gcacccattcgacactgtaa

SEQ ID NO: 116507 - DNA, 20 bp, Artificial Sequence
  MKO10116507_B_Slc25a45
  gRNA
ctcacctttacagtgtcgaa

SEQ ID NO: 116508 - DNA, 20 bp, Artificial Sequence
  MKO10116508_B_Slc25a46
  gRNA
tataggtcaattaccatgct

SEQ ID NO: 116509 - DNA, 20 bp, Artificial Sequence
  MKO10116509_B_Slc25a46
  gRNA
ttatatttacctgacactgg

SEQ ID NO: 116510 - DNA, 20 bp, Artificial Sequence
  MKO10116510_B_Slc25a46
  gRNA
gaacagttgaatagatttgc

SEQ ID NO: 116511 - DNA, 20 bp, Artificial Sequence
  MKO10116511_B_Slc25a47
  gRNA
caaaggagtgaccctcacga

SEQ ID NO: 116512 - DNA, 20 bp, Artificial Sequence
  MKO10116512_B_Slc25a47
  gRNA
cacatctgccgcttccggta

SEQ ID NO: 116513 - DNA, 20 bp, Artificial Sequence
  MKO10116513_B_Slc25a47
  gRNA
ccacctcagtgggtgacgtc

SEQ ID NO: 116514 - DNA, 20 bp, Artificial Sequence
  MKO10116514_B_Slc25a48
  gRNA
ctggtatgctgccaccgccc

SEQ ID NO: 116515 - DNA, 20 bp, Artificial Sequence
  MKO10116515_B_Slc25a48
  gRNA
ctagccatggattgaagtcc

SEQ ID NO: 116516 - DNA, 20 bp, Artificial Sequence
  MKO10116516_B_Slc25a48
  gRNA
catagccgacaccagcttgc

SEQ ID NO: 116517 - DNA, 20 bp, Artificial Sequence
  MKO10116517_B_Slc25a4
  gRNA
atgtgcacattatcgtgagc

SEQ ID NO: 116518 - DNA, 20 bp, Artificial Sequence
  MKO10116518_B_Slc25a4
  gRNA
cggcggcgatgccacctgcc

SEQ ID NO: 116519 - DNA, 20 bp, Artificial Sequence
  MKO10116519_B_Slc25a4
  gRNA
agcacctttgaagaaagcgt

SEQ ID NO: 116520 - DNA, 20 bp, Artificial Sequence
  MKO10116520_B_Slc25a51
  gRNA
atggcatctgagcgccctga

SEQ ID NO: 116521 - DNA, 20 bp, Artificial Sequence
  MKO10116521_B_Slc25a51
  gRNA
tctcccacgcccgcaatgtg

SEQ ID NO: 116522 - DNA, 20 bp, Artificial Sequence
  MKO10116522_B_Slc25a51
  gRNA
cgagtttgccacccgtagcg

SEQ ID NO: 116523 - DNA, 20 bp, Artificial Sequence
  MKO10116523_B_Slc25a53
  gRNA
gtactgcttgctgtacctgc

SEQ ID NO: 116524 - DNA, 20 bp, Artificial Sequence
  MKO10116524_B_Slc25a53
  gRNA
ctccttcaaagatcctatcc

SEQ ID NO: 116525 - DNA, 20 bp, Artificial Sequence
  MKO10116525_B_Slc25a53
  gRNA
gccaatatgcagtctcatat

SEQ ID NO: 116526 - DNA, 20 bp, Artificial Sequence
  MKO10116526_B_Slc25a54
  gRNA
gtggattcccaatgatctca

SEQ ID NO: 116527 - DNA, 20 bp, Artificial Sequence
  MKO10116527_B_Slc25a54
  gRNA
gcagattccaatgctgattc

SEQ ID NO: 116528 - DNA, 20 bp, Artificial Sequence
  MKO10116528_B_Slc25a54
  gRNA
tcactgacattgttcgtttc

SEQ ID NO: 116529 - DNA, 20 bp, Artificial Sequence
  MKO10116529_B_Slc25a5
  gRNA
atcatacaagacaagcacaa

SEQ ID NO: 116530 - DNA, 20 bp, Artificial Sequence
  MKO10116530_B_Slc25a5
  gRNA
agtgtcatagataccaaagt

SEQ ID NO: 116531 - DNA, 20 bp, Artificial Sequence
  MKO10116531_B_Slc25a5
  gRNA
gcatgccagcaagcaaatca

SEQ ID NO: 116532 - DNA, 20 bp, Artificial Sequence
  MKO10116532_B_Slc26a10
  gRNA
gctccctttcgattccactg

SEQ ID NO: 116533 - DNA, 20 bp, Artificial Sequence
  MKO10116533_B_Slc26a10
  gRNA
ggtggtgcccgaacccctcg

SEQ ID NO: 116534 - DNA, 20 bp, Artificial Sequence
  MKO10116534_B_Slc26a10
  gRNA
ggacaccagcacgtgcagcg

SEQ ID NO: 116535 - DNA, 20 bp, Artificial Sequence
  MKO10116535_B_Slc26a11
  gRNA
agggtaggcgacgctgtcct

SEQ ID NO: 116536 - DNA, 20 bp, Artificial Sequence
  MKO10116536_B_Slc26a11
  gRNA
cacctcccgggatgtgactc

SEQ ID NO: 116537 - DNA, 20 bp, Artificial Sequence
  MKO10116537_B_Slc26a11
  gRNA
atacacgaagcatcccatga

SEQ ID NO: 116538 - DNA, 20 bp, Artificial Sequence
  MKO10116538_B_Slc26a1
  gRNA
gacgggactgctatgccatt

SEQ ID NO: 116539 - DNA, 20 bp, Artificial Sequence
  MKO10116539_B_Slc26a1
  gRNA
gctgcccttcttgcccgaat

SEQ ID NO: 116540 - DNA, 20 bp, Artificial Sequence
  MKO10116540_B_Slc26a1
  gRNA
aaacggaacactcgcacctc

SEQ ID NO: 116541 - DNA, 20 bp, Artificial Sequence
  MKO10116541_B_Slc26a2
  gRNA
gatgacgtagcatcagtgtc

SEQ ID NO: 116542 - DNA, 20 bp, Artificial Sequence
  MKO10116542_B_Slc26a2
  gRNA
ctatagctgacagctgcgtc

SEQ ID NO: 116543 - DNA, 20 bp, Artificial Sequence
  MKO10116543_B_Slc26a2
  gRNA
acacactgaaagaagttcgc

SEQ ID NO: 116544 - DNA, 20 bp, Artificial Sequence
  MKO10116544_B_Slc26a3
  gRNA
agccgacctgcagaaccccc

SEQ ID NO: 116545 - DNA, 20 bp, Artificial Sequence
  MKO10116545_B_Slc26a3
  gRNA
aagccattcctttatcttgt

SEQ ID NO: 116546 - DNA, 20 bp, Artificial Sequence
  MKO10116546_B_Slc26a3
  gRNA
cttctcagtgacatcgtctc

SEQ ID NO: 116547 - DNA, 20 bp, Artificial Sequence
  MKO10116547_B_Slc26a4
  gRNA
tacttggcagaccccttggt

SEQ ID NO: 116548 - DNA, 20 bp, Artificial Sequence
  MKO10116548_B_Slc26a4
  gRNA
ggttgtgaatccgccaacca

SEQ ID NO: 116549 - DNA, 20 bp, Artificial Sequence
  MKO10116549_B_Slc26a4
  gRNA
caccagcccagtgctaactc

SEQ ID NO: 116550 - DNA, 20 bp, Artificial Sequence
  MKO10116550_B_Slc26a5
  gRNA
gtggtaaagcctcgcaccaa

SEQ ID NO: 116551 - DNA, 20 bp, Artificial Sequence
  MKO10116551_B_Slc26a5
  gRNA
cacggctgccagcatggcga

SEQ ID NO: 116552 - DNA, 20 bp, Artificial Sequence
  MKO10116552_B_Slc26a5
  gRNA
gctgttattagcttgatgat

SEQ ID NO: 116553 - DNA, 20 bp, Artificial Sequence
  MKO10116553_B_Slc26a6
  gRNA
gtcctagatgctcccgtgct

SEQ ID NO: 116554 - DNA, 20 bp, Artificial Sequence
  MKO10116554_B_Slc26a6
  gRNA
gtacctggaagaggccgacc

SEQ ID NO: 116555 - DNA, 20 bp, Artificial Sequence
  MKO10116555_B_Slc26a6
  gRNA
caatcccgccagaagggcat

SEQ ID NO: 116556 - DNA, 20 bp, Artificial Sequence
  MKO10116556_B_Slc26a7
  gRNA
cttaccaaaactaagtcgac

SEQ ID NO: 116557 - DNA, 20 bp, Artificial Sequence
  MKO10116557_B_Slc26a7
  gRNA
cacagcgttggctgatatca

SEQ ID NO: 116558 - DNA, 20 bp, Artificial Sequence
  MKO10116558_B_Slc26a7
  gRNA
gtggtcatggcgctgatcac

SEQ ID NO: 116559 - DNA, 20 bp, Artificial Sequence
  MKO10116559_B_Slc26a9
  gRNA
actcagtggagggtgtatcc

SEQ ID NO: 116560 - DNA, 20 bp, Artificial Sequence
  MKO10116560_B_Slc26a9
  gRNA
gagtagagaccgttgacagc

SEQ ID NO: 116561 - DNA, 20 bp, Artificial Sequence
  MKO10116561_B_Slc26a9
  gRNA
ctacatcatccctgacttgc

SEQ ID NO: 116562 - DNA, 20 bp, Artificial Sequence
  MKO10116562_B_Slc27a1
  gRNA
tgaggcgcccaccacacccc

SEQ ID NO: 116563 - DNA, 20 bp, Artificial Sequence
  MKO10116563_B_Slc27a1
  gRNA
tgtcaccacagcggtggcgg

SEQ ID NO: 116564 - DNA, 20 bp, Artificial Sequence
  MKO10116564_B_Slc27a1
  gRNA
cggcacgcatgctgtaggaa

SEQ ID NO: 116565 - DNA, 20 bp, Artificial Sequence
  MKO10116565_B_Slc27a2
  gRNA
atgcgtagaactcatacacg

SEQ ID NO: 116566 - DNA, 20 bp, Artificial Sequence
  MKO10116566_B_Slc27a2
  gRNA
agtgtcggcggaacccaccc

SEQ ID NO: 116567 - DNA, 20 bp, Artificial Sequence
  MKO10116567_B_Slc27a2
  gRNA
acttcagacctccacgactc

SEQ ID NO: 116568 - DNA, 20 bp, Artificial Sequence
  MKO10116568_B_Slc27a3
  gRNA
cgaggtagatcacgtcctcc

SEQ ID NO: 116569 - DNA, 20 bp, Artificial Sequence
  MKO10116569_B_Slc27a3
  gRNA
ccactgccaagcgcacctta

SEQ ID NO: 116570 - DNA, 20 bp, Artificial Sequence
  MKO10116570_B_Slc27a3
  gRNA
atgactgattcgagcagcct

SEQ ID NO: 116571 - DNA, 20 bp, Artificial Sequence
  MKO10116571_B_Slc27a4
  gRNA
cccttgaaggtattatcgta

SEQ ID NO: 116572 - DNA, 20 bp, Artificial Sequence
  MKO10116572_B_Slc27a4
  gRNA
ccacctgtaaaacccttgtc

SEQ ID NO: 116573 - DNA, 20 bp, Artificial Sequence
  MKO10116573_B_Slc27a4
  gRNA
gtgactgggcaggtgcttcg

SEQ ID NO: 116574 - DNA, 20 bp, Artificial Sequence
  MKO10116574_B_Slc27a5
  gRNA
caaggacaagccctatcgta

SEQ ID NO: 116575 - DNA, 20 bp, Artificial Sequence
  MKO10116575_B_Slc27a5
  gRNA
gtacttgtgtaacgtccctg

SEQ ID NO: 116576 - DNA, 20 bp, Artificial Sequence
  MKO10116576_B_Slc27a5
  gRNA
ctacctctgtaccatacgat

SEQ ID NO: 116577 - DNA, 20 bp, Artificial Sequence
  MKO10116577_B_Slc27a6
  gRNA
gaacgcacctgttgttccag

SEQ ID NO: 116578 - DNA, 20 bp, Artificial Sequence
  MKO10116578_B_Slc27a6
  gRNA
ccccaaactctgacgtgttt

SEQ ID NO: 116579 - DNA, 20 bp, Artificial Sequence
  MKO10116579_B_Slc27a6
  gRNA
tagccagttgcaagtgttga

SEQ ID NO: 116580 - DNA, 20 bp, Artificial Sequence
  MKO10116580_B_Slc28a1
  gRNA
cgcccagcggccggaacagc

SEQ ID NO: 116581 - DNA, 20 bp, Artificial Sequence
  MKO10116581_B_Slc28a1
  gRNA
catcacctaccatcgggaga

SEQ ID NO: 116582 - DNA, 20 bp, Artificial Sequence
  MKO10116582_B_Slc28a1
  gRNA
tgcaagcgagaagcctctgc

SEQ ID NO: 116583 - DNA, 20 bp, Artificial Sequence
  MKO10116583_B_Slc28a2
  gRNA
ctgttgttggcctcatcctc

SEQ ID NO: 116584 - DNA, 20 bp, Artificial Sequence
  MKO10116584_B_Slc28a2
  gRNA
tcttgagcaaagatacacac

SEQ ID NO: 116585 - DNA, 20 bp, Artificial Sequence
  MKO10116585_B_Slc28a2
  gRNA
gcttggggcattcctctctc

SEQ ID NO: 116586 - DNA, 20 bp, Artificial Sequence
  MKO10116586_B_Slc28a3
  gRNA
tcatcttcgctatcatcctc

SEQ ID NO: 116587 - DNA, 20 bp, Artificial Sequence
  MKO10116587_B_Slc28a3
  gRNA
ttgttctccgaagcaccatc

SEQ ID NO: 116588 - DNA, 20 bp, Artificial Sequence
  MKO10116588_B_Slc28a3
  gRNA
gaaggcttctcgacaggcat

SEQ ID NO: 116589 - DNA, 20 bp, Artificial Sequence
  MKO10116589_B_Slc29a1
  gRNA
tgcggtcataaaaaaattcc

SEQ ID NO: 116590 - DNA, 20 bp, Artificial Sequence
  MKO10116590_B_Slc29a1
  gRNA
ctaggatctctcaatctgtt

SEQ ID NO: 116591 - DNA, 20 bp, Artificial Sequence
  MKO10116591_B_Slc29a1
  gRNA
tacgcaggtataaggcagta

SEQ ID NO: 116592 - DNA, 20 bp, Artificial Sequence
  MKO10116592_B_Slc29a2
  gRNA
cttcttcattaccgccatcc

SEQ ID NO: 116593 - DNA, 20 bp, Artificial Sequence
  MKO10116593_B_Slc29a2
  gRNA
gccttgaagcacggcacaga

SEQ ID NO: 116594 - DNA, 20 bp, Artificial Sequence
  MKO10116594_B_Slc29a2
  gRNA
tgaagaagctgatcccaacc

SEQ ID NO: 116595 - DNA, 20 bp, Artificial Sequence
  MKO10116595_B_Slc29a3
  gRNA
gcaccattgaagcgatcctc

SEQ ID NO: 116596 - DNA, 20 bp, Artificial Sequence
  MKO10116596_B_Slc29a3
  gRNA
cgtgctgtcccgcacatcac

SEQ ID NO: 116597 - DNA, 20 bp, Artificial Sequence
  MKO10116597_B_Slc29a3
  gRNA
ctatctattgctgtcccaac

SEQ ID NO: 116598 - DNA, 20 bp, Artificial Sequence
  MKO10116598_B_Slc29a4
  gRNA
tacacgcagggtgtgatgac

SEQ ID NO: 116599 - DNA, 20 bp, Artificial Sequence
  MKO10116599_B_Slc29a4
  gRNA
gaggctcatgtcaaatacga

SEQ ID NO: 116600 - DNA, 20 bp, Artificial Sequence
  MKO10116600_B_Slc29a4
  gRNA
acacgggattactgcccaag

SEQ ID NO: 116601 - DNA, 20 bp, Artificial Sequence
  MKO10116601_B_Slc2a10
  gRNA
agtgctcaccgatcaggtcg

SEQ ID NO: 116602 - DNA, 20 bp, Artificial Sequence
  MKO10116602_B_Slc2a10
  gRNA
ctcgcctccagtaacctggt

SEQ ID NO: 116603 - DNA, 20 bp, Artificial Sequence
  MKO10116603_B_Slc2a10
  gRNA
gtcccaaggtgccatcggct

SEQ ID NO: 116604 - DNA, 20 bp, Artificial Sequence
  MKO10116604_B_Slc2a12
  gRNA
ggcgcggcctctaattccac

SEQ ID NO: 116605 - DNA, 20 bp, Artificial Sequence
  MKO10116605_B_Slc2a12
  gRNA
tagatcttattggtttgtca

SEQ ID NO: 116606 - DNA, 20 bp, Artificial Sequence
  MKO10116606_B_Slc2a12
  gRNA
ccctgacatctagcatgaac

SEQ ID NO: 116607 - DNA, 20 bp, Artificial Sequence
  MKO10116607_B_Slc2a13
  gRNA
tgttgatgcccgagagttgc

SEQ ID NO: 116608 - DNA, 20 bp, Artificial Sequence
  MKO10116608_B_Slc2a13
  gRNA
actgtccgcctgtgatgaag

SEQ ID NO: 116609 - DNA, 20 bp, Artificial Sequence
  MKO10116609_B_Slc2a13
  gRNA
gcaaccatcctccagatgtc

SEQ ID NO: 116610 - DNA, 20 bp, Artificial Sequence
  MKO10116610_B_Slc2a1
  gRNA
ggtgacgggccgcctcatgt

SEQ ID NO: 116611 - DNA, 20 bp, Artificial Sequence
  MKO10116611_B_Slc2a1
  gRNA
tgccaacgacgattcccagc

SEQ ID NO: 116612 - DNA, 20 bp, Artificial Sequence
  MKO10116612_B_Slc2a1
  gRNA
agggctccacgtagagctgt

SEQ ID NO: 116613 - DNA, 20 bp, Artificial Sequence
  MKO10116613_B_Slc2a2
  gRNA
cacccaaaacatgtcgataa

SEQ ID NO: 116614 - DNA, 20 bp, Artificial Sequence
  MKO10116614_B_Slc2a2
  gRNA
gcacacgccctcatcattgc

SEQ ID NO: 116615 - DNA, 20 bp, Artificial Sequence
  MKO10116615_B_Slc2a2
  gRNA
cctgggtactcttcaccaac

SEQ ID NO: 116616 - DNA, 20 bp, Artificial Sequence
  MKO10116616_B_Slc2a3
  gRNA
gccgtgactgttgccacgat

SEQ ID NO: 116617 - DNA, 20 bp, Artificial Sequence
  MKO10116617_B_Slc2a3
  gRNA
ggactttcttaactacactt

SEQ ID NO: 116618 - DNA, 20 bp, Artificial Sequence
  MKO10116618_B_Slc2a3
  gRNA
gccgatcgtggcaacagtca

SEQ ID NO: 116619 - DNA, 20 bp, Artificial Sequence
  MKO10116619_B_Slc2a4
  gRNA
catgggcctagccaatgccg

SEQ ID NO: 116620 - DNA, 20 bp, Artificial Sequence
  MKO10116620_B_Slc2a4
  gRNA
aacagagctacaatgcaacg

SEQ ID NO: 116621 - DNA, 20 bp, Artificial Sequence
  MKO10116621_B_Slc2a4
  gRNA
ttctgcccagggctaacatc

SEQ ID NO: 116622 - DNA, 20 bp, Artificial Sequence
  MKO10116622_B_Slc2a5
  gRNA
cgatgagcgttgccagagca

SEQ ID NO: 116623 - DNA, 20 bp, Artificial Sequence
  MKO10116623_B_Slc2a5
  gRNA
ctcctcatttctgtcgtagt

SEQ ID NO: 116624 - DNA, 20 bp, Artificial Sequence
  MKO10116624_B_Slc2a5
  gRNA
gcaacgctcatcgctgcctt

SEQ ID NO: 116625 - DNA, 20 bp, Artificial Sequence
  MKO10116625_B_Slc2a6
  gRNA
atgctgacgggctttgccgg

SEQ ID NO: 116626 - DNA, 20 bp, Artificial Sequence
  MKO10116626_B_Slc2a6
  gRNA
attgcaccccctgatgttcg

SEQ ID NO: 116627 - DNA, 20 bp, Artificial Sequence
  MKO10116627_B_Slc2a6
  gRNA
ggctaccttcgccgctgtgc

SEQ ID NO: 116628 - DNA, 20 bp, Artificial Sequence
  MKO10116628_B_Slc2a7
  gRNA
ttcccaccagcactcgagac

SEQ ID NO: 116629 - DNA, 20 bp, Artificial Sequence
  MKO10116629_B_Slc2a7
  gRNA
ggttacctgtggcattaccc

SEQ ID NO: 116630 - DNA, 20 bp, Artificial Sequence
  MKO10116630_B_Slc2a7
  gRNA
tataacctctgccgtcctga

SEQ ID NO: 116631 - DNA, 20 bp, Artificial Sequence
  MKO10116631_B_Slc2a8
  gRNA
atcgcctacccagctgtccg

SEQ ID NO: 116632 - DNA, 20 bp, Artificial Sequence
  MKO10116632_B_Slc2a8
  gRNA
ctcagcttcggcttcgcgct

SEQ ID NO: 116633 - DNA, 20 bp, Artificial Sequence
  MKO10116633_B_Slc2a8
  gRNA
ccaccaataggtttacatct

SEQ ID NO: 116634 - DNA, 20 bp, Artificial Sequence
  MKO10116634_B_Slc2a9
  gRNA
tctcaacgagatctcaccca

SEQ ID NO: 116635 - DNA, 20 bp, Artificial Sequence
  MKO10116635_B_Slc2a9
  gRNA
gcatgccatcagcaacgctg

SEQ ID NO: 116636 - DNA, 20 bp, Artificial Sequence
  MKO10116636_B_Slc2a9
  gRNA
gcatggacagcccattgacc

SEQ ID NO: 116637 - DNA, 20 bp, Artificial Sequence
  MKO10116637_B_Slc30a10
  gRNA
cctggtattccgtgcccttc

SEQ ID NO: 116638 - DNA, 20 bp, Artificial Sequence
  MKO10116638_B_Slc30a10
  gRNA
gcttcggtaagactctcgag

SEQ ID NO: 116639 - DNA, 20 bp, Artificial Sequence
  MKO10116639_B_Slc30a10
  gRNA
tgccttggggtccgtggttg

SEQ ID NO: 116640 - DNA, 20 bp, Artificial Sequence
  MKO10116640_B_Slc30a1
  gRNA
cagcctgaattcgctagcgt

SEQ ID NO: 116641 - DNA, 20 bp, Artificial Sequence
  MKO10116641_B_Slc30a1
  gRNA
ccttgcgcgcgcccttggcg

SEQ ID NO: 116642 - DNA, 20 bp, Artificial Sequence
  MKO10116642_B_Slc30a1
  gRNA
tggccgagcgcttcgcccgg

SEQ ID NO: 116643 - DNA, 20 bp, Artificial Sequence
  MKO10116643_B_Slc30a2
  gRNA
gactggggtgctcgtgtacc

SEQ ID NO: 116644 - DNA, 20 bp, Artificial Sequence
  MKO10116644_B_Slc30a2
  gRNA
ggacaccatgttgatcactt

SEQ ID NO: 116645 - DNA, 20 bp, Artificial Sequence
  MKO10116645_B_Slc30a2
  gRNA
aggccacatagagtttgcgt

SEQ ID NO: 116646 - DNA, 20 bp, Artificial Sequence
  MKO10116646_B_Slc30a3
  gRNA
tgcagagtatgcacctctag

SEQ ID NO: 116647 - DNA, 20 bp, Artificial Sequence
  MKO10116647_B_Slc30a3
  gRNA
gtctccctctggatagtcac

SEQ ID NO: 116648 - DNA, 20 bp, Artificial Sequence
  MKO10116648_B_Slc30a3
  gRNA
gcccacttgctagcagacat

SEQ ID NO: 116649 - DNA, 20 bp, Artificial Sequence
  MKO10116649_B_Slc30a4
  gRNA
caccagcattacactgatca

SEQ ID NO: 116650 - DNA, 20 bp, Artificial Sequence
  MKO10116650_B_Slc30a4
  gRNA
tctgcacagcctcatataag

SEQ ID NO: 116651 - DNA, 20 bp, Artificial Sequence
  MKO10116651_B_Slc30a4
  gRNA
acagtagtgataatcctgga

SEQ ID NO: 116652 - DNA, 20 bp, Artificial Sequence
  MKO10116652_B_Slc30a5
  gRNA
gtgtttaaccaaatgtttga

SEQ ID NO: 116653 - DNA, 20 bp, Artificial Sequence
  MKO10116653_B_Slc30a5
  gRNA
gaaacctattacaaagcatc

SEQ ID NO: 116654 - DNA, 20 bp, Artificial Sequence
  MKO10116654_B_Slc30a5
  gRNA
tcccacagccttcaaacatt

SEQ ID NO: 116655 - DNA, 20 bp, Artificial Sequence
  MKO10116655_B_Slc30a6
  gRNA
tcaccatctttgatctcttt

SEQ ID NO: 116656 - DNA, 20 bp, Artificial Sequence
  MKO10116656_B_Slc30a6
  gRNA
ttacctaaagagatcaaaga

SEQ ID NO: 116657 - DNA, 20 bp, Artificial Sequence
  MKO10116657_B_Slc30a6
  gRNA
tttccaaaaaaagatctctg

SEQ ID NO: 116658 - DNA, 20 bp, Artificial Sequence
  MKO10116658_B_Slc30a7
  gRNA
cgtgcccaggtccatcctgt

SEQ ID NO: 116659 - DNA, 20 bp, Artificial Sequence
  MKO10116659_B_Slc30a7
  gRNA
aaacaagcagcagtctctcg

SEQ ID NO: 116660 - DNA, 20 bp, Artificial Sequence
  MKO10116660_B_Slc30a7
  gRNA
aggagtcggagatcaagcct

SEQ ID NO: 116661 - DNA, 20 bp, Artificial Sequence
  MKO10116661_B_Slc30a8
  gRNA
cctgattaccagatccaagc

SEQ ID NO: 116662 - DNA, 20 bp, Artificial Sequence
  MKO10116662_B_Slc30a8
  gRNA
cacaaaggctgctcggacac

SEQ ID NO: 116663 - DNA, 20 bp, Artificial Sequence
  MKO10116663_B_Slc30a8
  gRNA
tcactgccacaacagcgcca

SEQ ID NO: 116664 - DNA, 20 bp, Artificial Sequence
  MKO10116664_B_Slc30a9
  gRNA
tagaacaacttcgaaaaatc

SEQ ID NO: 116665 - DNA, 20 bp, Artificial Sequence
  MKO10116665_B_Slc30a9
  gRNA
gtcccatcacttacacaaac

SEQ ID NO: 116666 - DNA, 20 bp, Artificial Sequence
  MKO10116666_B_Slc30a9
  gRNA
acgagttctgccttaagtcc

SEQ ID NO: 116667 - DNA, 20 bp, Artificial Sequence
  MKO10116667_B_Slc31a1
  gRNA
tagtaaaaacactgccacga

SEQ ID NO: 116668 - DNA, 20 bp, Artificial Sequence
  MKO10116668_B_Slc31a1
  gRNA
ttggtaatcaatacacctgg

SEQ ID NO: 116669 - DNA, 20 bp, Artificial Sequence
  MKO10116669_B_Slc31a1
  gRNA
ctgctgctactgcaatgcat

SEQ ID NO: 116670 - DNA, 20 bp, Artificial Sequence
  MKO10116670_B_Slc31a2
  gRNA
caattaccacctgaatgaca

SEQ ID NO: 116671 - DNA, 20 bp, Artificial Sequence
  MKO10116671_B_Slc31a2
  gRNA
ccgtgcttctctttgatttc

SEQ ID NO: 116672 - DNA, 20 bp, Artificial Sequence
  MKO10116672_B_Slc31a2
  gRNA
gcatttcatcttctcagatg

SEQ ID NO: 116673 - DNA, 20 bp, Artificial Sequence
  MKO10116673_B_Slc32a1
  gRNA
tctcgactttgagcatcgcc

SEQ ID NO: 116674 - DNA, 20 bp, Artificial Sequence
  MKO10116674_B_Slc32a1
  gRNA
cgtcttcgttctcctcgtac

SEQ ID NO: 116675 - DNA, 20 bp, Artificial Sequence
  MKO10116675_B_Slc32a1
  gRNA
gaggttgaccacggcgcgga

SEQ ID NO: 116676 - DNA, 20 bp, Artificial Sequence
  MKO10116676_B_Slc33a1
  gRNA
cagcatgtatgtgtcgataa

SEQ ID NO: 116677 - DNA, 20 bp, Artificial Sequence
  MKO10116677_B_Slc33a1
  gRNA
tttacaaagccatgccctac

SEQ ID NO: 116678 - DNA, 20 bp, Artificial Sequence
  MKO10116678_B_Slc33a1
  gRNA
ccttctgattctaacgtcaa

SEQ ID NO: 116679 - DNA, 20 bp, Artificial Sequence
  MKO10116679_B_Slc34a1
  gRNA
tgacccactacctaccaagc

SEQ ID NO: 116680 - DNA, 20 bp, Artificial Sequence
  MKO10116680_B_Slc34a1
  gRNA
gctcagctccgccttccagt

SEQ ID NO: 116681 - DNA, 20 bp, Artificial Sequence
  MKO10116681_B_Slc34a1
  gRNA
tacatccatcattgtcagca

SEQ ID NO: 116682 - DNA, 20 bp, Artificial Sequence
  MKO10116682_B_Slc34a2
  gRNA
gctaccctcctattccgccc

SEQ ID NO: 116683 - DNA, 20 bp, Artificial Sequence
  MKO10116683_B_Slc34a2
  gRNA
ctacttgttcgtgtgctccc

SEQ ID NO: 116684 - DNA, 20 bp, Artificial Sequence
  MKO10116684_B_Slc34a2
  gRNA
agcaaccatgctgacgatga

SEQ ID NO: 116685 - DNA, 20 bp, Artificial Sequence
  MKO10116685_B_Slc34a3
  gRNA
agttggtcagcgttcttcag

SEQ ID NO: 116686 - DNA, 20 bp, Artificial Sequence
  MKO10116686_B_Slc34a3
  gRNA
ggaatctccggttccattcc

SEQ ID NO: 116687 - DNA, 20 bp, Artificial Sequence
  MKO10116687_B_Slc34a3
  gRNA
ctgactgcgccattgagacc

SEQ ID NO: 116688 - DNA, 20 bp, Artificial Sequence
  MKO10116688_B_Slc35a1
  gRNA
tgcacagcatacactagtga

SEQ ID NO: 116689 - DNA, 20 bp, Artificial Sequence
  MKO10116689_B_Slc35a1
  gRNA
agcccaagctacaaaagtcg

SEQ ID NO: 116690 - DNA, 20 bp, Artificial Sequence
  MKO10116690_B_Slc35a1
  gRNA
atagcaccaaagcctaacaa

SEQ ID NO: 116691 - DNA, 20 bp, Artificial Sequence
  MKO10116691_B_Slc35a2
  gRNA
caatgacgagcccagcgccc

SEQ ID NO: 116692 - DNA, 20 bp, Artificial Sequence
  MKO10116692_B_Slc35a2
  gRNA
ggccacctcacccgctgtag

SEQ ID NO: 116693 - DNA, 20 bp, Artificial Sequence
  MKO10116693_B_Slc35a2
  gRNA
gtgggctgagggcaccgccg

SEQ ID NO: 116694 - DNA, 20 bp, Artificial Sequence
  MKO10116694_B_Slc35a3
  gRNA
tcagaacaacttactctatg

SEQ ID NO: 116695 - DNA, 20 bp, Artificial Sequence
  MKO10116695_B_Slc35a3
  gRNA
gtggatagttgttgctctgc

SEQ ID NO: 116696 - DNA, 20 bp, Artificial Sequence
  MKO10116696_B_Slc35a3
  gRNA
ctcctgccatcagaattact

SEQ ID NO: 116697 - DNA, 20 bp, Artificial Sequence
  MKO10116697_B_Slc35a4
  gRNA
gatttatctgcagcgctaca

SEQ ID NO: 116698 - DNA, 20 bp, Artificial Sequence
  MKO10116698_B_Slc35a4
  gRNA
acagtgctaagaacggtgca

SEQ ID NO: 116699 - DNA, 20 bp, Artificial Sequence
  MKO10116699_B_Slc35a4
  gRNA
atgtttgccagcctaccagg

SEQ ID NO: 116700 - DNA, 20 bp, Artificial Sequence
  MKO10116700_B_Slc35a5
  gRNA
gaaacttgagaattccttcc

SEQ ID NO: 116701 - DNA, 20 bp, Artificial Sequence
  MKO10116701_B_Slc35a5
  gRNA
taacaacagctcttctattc

SEQ ID NO: 116702 - DNA, 20 bp, Artificial Sequence
  MKO10116702_B_Slc35a5
  gRNA
gctacttacaggctgaagat

SEQ ID NO: 116703 - DNA, 20 bp, Artificial Sequence
  MKO10116703_B_Slc35b1
  gRNA
ccctggcagtgtcaaaaaac

SEQ ID NO: 116704 - DNA, 20 bp, Artificial Sequence
  MKO10116704_B_Slc35b1
  gRNA
acatagcattgatcacacac

SEQ ID NO: 116705 - DNA, 20 bp, Artificial Sequence
  MKO10116705_B_Slc35b1
  gRNA
aaatcctgcaagccaatccc

SEQ ID NO: 116706 - DNA, 20 bp, Artificial Sequence
  MKO10116706_B_Slc35b2
  gRNA
tccgtcttaagtactgcacc

SEQ ID NO: 116707 - DNA, 20 bp, Artificial Sequence
  MKO10116707_B_Slc35b2
  gRNA
gattccgctgtctctgtccg

SEQ ID NO: 116708 - DNA, 20 bp, Artificial Sequence
  MKO10116708_B_Slc35b2
  gRNA
cttaagacggaagaactacc

SEQ ID NO: 116709 - DNA, 20 bp, Artificial Sequence
  MKO10116709_B_Slc35b3
  gRNA
gccgcacatcaagtcagttg

SEQ ID NO: 116710 - DNA, 20 bp, Artificial Sequence
  MKO10116710_B_Slc35b3
  gRNA
ctcagtgccctccaaaacgc

SEQ ID NO: 116711 - DNA, 20 bp, Artificial Sequence
  MKO10116711_B_Slc35b3
  gRNA
gcaccaaactttaatctgac

SEQ ID NO: 116712 - DNA, 20 bp, Artificial Sequence
  MKO10116712_B_Slc35b4
  gRNA
ttgcaggtactatgccatca

SEQ ID NO: 116713 - DNA, 20 bp, Artificial Sequence
  MKO10116713_B_Slc35b4
  gRNA
caagtatacctccattgccc

SEQ ID NO: 116714 - DNA, 20 bp, Artificial Sequence
  MKO10116714_B_Slc35b4
  gRNA
ctgattgccaacatgattct

SEQ ID NO: 116715 - DNA, 20 bp, Artificial Sequence
  MKO10116715_B_Slc35c1
  gRNA
gctcgcccagcactatcatc

SEQ ID NO: 116716 - DNA, 20 bp, Artificial Sequence
  MKO10116716_B_Slc35c1
  gRNA
atcctgcgcatggcgctgac

SEQ ID NO: 116717 - DNA, 20 bp, Artificial Sequence
  MKO10116717_B_Slc35c1
  gRNA
cccctgacccataacgtgtc

SEQ ID NO: 116718 - DNA, 20 bp, Artificial Sequence
  MKO10116718_B_Slc35c2
  gRNA
ccgtccagctcagcaccacc

SEQ ID NO: 116719 - DNA, 20 bp, Artificial Sequence
  MKO10116719_B_Slc35c2
  gRNA
ccgggtggtgctgagctgga

SEQ ID NO: 116720 - DNA, 20 bp, Artificial Sequence
  MKO10116720_B_Slc35c2
  gRNA
acagggacacagtgatgtag

SEQ ID NO: 116721 - DNA, 20 bp, Artificial Sequence
  MKO10116721_B_Slc35d1
  gRNA
tttccatcctcgctatgtgt

SEQ ID NO: 116722 - DNA, 20 bp, Artificial Sequence
  MKO10116722_B_Slc35d1
  gRNA
ggtacatttctgtcgaagtc

SEQ ID NO: 116723 - DNA, 20 bp, Artificial Sequence
  MKO10116723_B_Slc35d1
  gRNA
ccaaaatatagtagaggtag

SEQ ID NO: 116724 - DNA, 20 bp, Artificial Sequence
  MKO10116724_B_Slc35d2
  gRNA
tgcttgataagccacttatg

SEQ ID NO: 116725 - DNA, 20 bp, Artificial Sequence
  MKO10116725_B_Slc35d2
  gRNA
cctctgccccttctctacgt

SEQ ID NO: 116726 - DNA, 20 bp, Artificial Sequence
  MKO10116726_B_Slc35d2
  gRNA
tgtccaattccaagtacaat

SEQ ID NO: 116727 - DNA, 20 bp, Artificial Sequence
  MKO10116727_B_Slc35d3
  gRNA
aagaacggcgcgccctcgcc

SEQ ID NO: 116728 - DNA, 20 bp, Artificial Sequence
  MKO10116728_B_Slc35d3
  gRNA
ccgtgtccgcgctcgccttc

SEQ ID NO: 116729 - DNA, 20 bp, Artificial Sequence
  MKO10116729_B_Slc35d3
  gRNA
catggtggcgttcagcgacg

SEQ ID NO: 116730 - DNA, 20 bp, Artificial Sequence
  MKO10116730_B_Slc35e1
  gRNA
ctgggttgcgcagcataatg

SEQ ID NO: 116731 - DNA, 20 bp, Artificial Sequence
  MKO10116731_B_Slc35e1
  gRNA
gaggtccaccagaacccacg

SEQ ID NO: 116732 - DNA, 20 bp, Artificial Sequence
  MKO10116732_B_Slc35e1
  gRNA
caatgctcaccttgttgtac

SEQ ID NO: 116733 - DNA, 20 bp, Artificial Sequence
  MKO10116733_B_Slc35e2
  gRNA
atgattctgggggagtacac

SEQ ID NO: 116734 - DNA, 20 bp, Artificial Sequence
  MKO10116734_B_Slc35e2
  gRNA
agacatgatcaccgtgaaaa

SEQ ID NO: 116735 - DNA, 20 bp, Artificial Sequence
  MKO10116735_B_Slc35e2
  gRNA
catcatgactatgctctttg

SEQ ID NO: 116736 - DNA, 20 bp, Artificial Sequence
  MKO10116736_B_Slc35e3
  gRNA
tctatttaaggaccccctgt

SEQ ID NO: 116737 - DNA, 20 bp, Artificial Sequence
  MKO10116737_B_Slc35e3
  gRNA
tccctggtcagtttctgctt

SEQ ID NO: 116738 - DNA, 20 bp, Artificial Sequence
  MKO10116738_B_Slc35e3
  gRNA
taccaaagcagaaactgacc

SEQ ID NO: 116739 - DNA, 20 bp, Artificial Sequence
  MKO10116739_B_Slc35e4
  gRNA
ccaggtagctgagcgcgctg

SEQ ID NO: 116740 - DNA, 20 bp, Artificial Sequence
  MKO10116740_B_Slc35e4
  gRNA
gtttgtccggaggccacttg

SEQ ID NO: 116741 - DNA, 20 bp, Artificial Sequence
  MKO10116741_B_Slc35e4
  gRNA
gcggatgtgccgctgcccac

SEQ ID NO: 116742 - DNA, 20 bp, Artificial Sequence
  MKO10116742_B_Slc35f1
  gRNA
tgtacgggatctcaaatgtc

SEQ ID NO: 116743 - DNA, 20 bp, Artificial Sequence
  MKO10116743_B_Slc35f1
  gRNA
atcttcgtcgtaaaattgcc

SEQ ID NO: 116744 - DNA, 20 bp, Artificial Sequence
  MKO10116744_B_Slc35f1
  gRNA
agccaattccacaaacgaga

SEQ ID NO: 116745 - DNA, 20 bp, Artificial Sequence
  MKO10116745_B_Slc35f2
  gRNA
tctcttggggcttgccgatg

SEQ ID NO: 116746 - DNA, 20 bp, Artificial Sequence
  MKO10116746_B_Slc35f2
  gRNA
taatatgtctgcaccaacca

SEQ ID NO: 116747 - DNA, 20 bp, Artificial Sequence
  MKO10116747_B_Slc35f2
  gRNA
cactggtcagagtcgtgtac

SEQ ID NO: 116748 - DNA, 20 bp, Artificial Sequence
  MKO10116748_B_Slc35f3
  gRNA
cagcgccaagttcggagaag

SEQ ID NO: 116749 - DNA, 20 bp, Artificial Sequence
  MKO10116749_B_Slc35f3
  gRNA
taaggccgcttctccgaact

SEQ ID NO: 116750 - DNA, 20 bp, Artificial Sequence
  MKO10116750_B_Slc35f3
  gRNA
gtcatgatgacctatgccga

SEQ ID NO: 116751 - DNA, 20 bp, Artificial Sequence
  MKO10116751_B_Slc35f4
  gRNA
gaatcttccgtgaccgacag

SEQ ID NO: 116752 - DNA, 20 bp, Artificial Sequence
  MKO10116752_B_Slc35f4
  gRNA
ttccacgctgattccatcat

SEQ ID NO: 116753 - DNA, 20 bp, Artificial Sequence
  MKO10116753_B_Slc35f4
  gRNA
cctgtccttcagcacaatcc

SEQ ID NO: 116754 - DNA, 20 bp, Artificial Sequence
  MKO10116754_B_Slc35f5
  gRNA
cagtgtacaagaggatttag

SEQ ID NO: 116755 - DNA, 20 bp, Artificial Sequence
  MKO10116755_B_Slc35f5
  gRNA
tgagaatttaccttgttgca

SEQ ID NO: 116756 - DNA, 20 bp, Artificial Sequence
  MKO10116756_B_Slc35f5
  gRNA
ctgggctctgcccgctttgc

SEQ ID NO: 116757 - DNA, 20 bp, Artificial Sequence
  MKO10116757_B_Slc35f6
  gRNA
cttcaagcatcccttcgtcc

SEQ ID NO: 116758 - DNA, 20 bp, Artificial Sequence
  MKO10116758_B_Slc35f6
  gRNA
ccagccctgtgtgacatgac

SEQ ID NO: 116759 - DNA, 20 bp, Artificial Sequence
  MKO10116759_B_Slc35f6
  gRNA
gggcatcctgatcactattg

SEQ ID NO: 116760 - DNA, 20 bp, Artificial Sequence
  MKO10116760_B_Slc35g1
  gRNA
cccacgcgagccgcacgccc

SEQ ID NO: 116761 - DNA, 20 bp, Artificial Sequence
  MKO10116761_B_Slc35g1
  gRNA
cgcggcggagcttgcagccg

SEQ ID NO: 116762 - DNA, 20 bp, Artificial Sequence
  MKO10116762_B_Slc35g1
  gRNA
cgtgtaaaacaagccaagtc

SEQ ID NO: 116763 - DNA, 20 bp, Artificial Sequence
  MKO10116763_B_Slc35g2
  gRNA
cacagtcattgtatacccga

SEQ ID NO: 116764 - DNA, 20 bp, Artificial Sequence
  MKO10116764_B_Slc35g2
  gRNA
gattgttccagtccaaccga

SEQ ID NO: 116765 - DNA, 20 bp, Artificial Sequence
  MKO10116765_B_Slc35g2
  gRNA
cgggtatacaatgactgtga

SEQ ID NO: 116766 - DNA, 20 bp, Artificial Sequence
  MKO10116766_B_Slc35g3
  gRNA
cacaatggctgaagctctgc

SEQ ID NO: 116767 - DNA, 20 bp, Artificial Sequence
  MKO10116767_B_Slc35g3
  gRNA
gacctcccagttgccctcgt

SEQ ID NO: 116768 - DNA, 20 bp, Artificial Sequence
  MKO10116768_B_Slc35g3
  gRNA
aaggcccgaacccgaacatc

SEQ ID NO: 116769 - DNA, 20 bp, Artificial Sequence
  MKO10116769_B_Slc36a1
  gRNA
cgtgtccccatagtccaaaa

SEQ ID NO: 116770 - DNA, 20 bp, Artificial Sequence
  MKO10116770_B_Slc36a1
  gRNA
tgccaatgttgcctttcagc

SEQ ID NO: 116771 - DNA, 20 bp, Artificial Sequence
  MKO10116771_B_Slc36a1
  gRNA
cctctggcagtgaagaacgc

SEQ ID NO: 116772 - DNA, 20 bp, Artificial Sequence
  MKO10116772_B_Slc36a2
  gRNA
gatgggcccactcagcttgc

SEQ ID NO: 116773 - DNA, 20 bp, Artificial Sequence
  MKO10116773_B_Slc36a2
  gRNA
gtgtccccatagtccatgaa

SEQ ID NO: 116774 - DNA, 20 bp, Artificial Sequence
  MKO10116774_B_Slc36a2
  gRNA
ctgcaaaaccacgcccactg

SEQ ID NO: 116775 - DNA, 20 bp, Artificial Sequence
  MKO10116775_B_Slc36a3
  gRNA
cgtgtccaagtccttggctg

SEQ ID NO: 116776 - DNA, 20 bp, Artificial Sequence
  MKO10116776_B_Slc36a3
  gRNA
cctgctgatcgtcactcagc

SEQ ID NO: 116777 - DNA, 20 bp, Artificial Sequence
  MKO10116777_B_Slc36a3
  gRNA
ggcgctcacagtgcactgta

SEQ ID NO: 116778 - DNA, 20 bp, Artificial Sequence
  MKO10116778_B_Slc36a4
  gRNA
ttatagatatggacgtgatg

SEQ ID NO: 116779 - DNA, 20 bp, Artificial Sequence
  MKO10116779_B_Slc36a4
  gRNA
gcccgcgttctttatagcca

SEQ ID NO: 116780 - DNA, 20 bp, Artificial Sequence
  MKO10116780_B_Slc36a4
  gRNA
gtggagttgccttcagcgac

SEQ ID NO: 116781 - DNA, 20 bp, Artificial Sequence
  MKO10116781_B_Slc37a1
  gRNA
agaaatagcccaagccgaac

SEQ ID NO: 116782 - DNA, 20 bp, Artificial Sequence
  MKO10116782_B_Slc37a1
  gRNA
ttcctgtgcgcctatgccat

SEQ ID NO: 116783 - DNA, 20 bp, Artificial Sequence
  MKO10116783_B_Slc37a1
  gRNA
cttcacaagcagtgtactgc

SEQ ID NO: 116784 - DNA, 20 bp, Artificial Sequence
  MKO10116784_B_Slc37a2
  gRNA
cctcaccttgacgatgctga

SEQ ID NO: 116785 - DNA, 20 bp, Artificial Sequence
  MKO10116785_B_Slc37a2
  gRNA
ggttccttcgcgccttctct

SEQ ID NO: 116786 - DNA, 20 bp, Artificial Sequence
  MKO10116786_B_Slc37a2
  gRNA
tgtggacaatgccttcctag

SEQ ID NO: 116787 - DNA, 20 bp, Artificial Sequence
  MKO10116787_B_Slc37a3
  gRNA
ctctcgaaggtgtttgtctt

SEQ ID NO: 116788 - DNA, 20 bp, Artificial Sequence
  MKO10116788_B_Slc37a3
  gRNA
ttctgcatacctctgcaggc

SEQ ID NO: 116789 - DNA, 20 bp, Artificial Sequence
  MKO10116789_B_Slc37a3
  gRNA
atcacttgacctgcctgcag

SEQ ID NO: 116790 - DNA, 20 bp, Artificial Sequence
  MKO10116790_B_Slc37a4
  gRNA
gttgtcaaccagcatgaacc

SEQ ID NO: 116791 - DNA, 20 bp, Artificial Sequence
  MKO10116791_B_Slc37a4
  gRNA
gctgtccactggctacctcg

SEQ ID NO: 116792 - DNA, 20 bp, Artificial Sequence
  MKO10116792_B_Slc37a4
  gRNA
tggtcaacgtagtcttctca

SEQ ID NO: 116793 - DNA, 20 bp, Artificial Sequence
  MKO10116793_B_Slc38a10
  gRNA
gttcgtgatcagcccccact

SEQ ID NO: 116794 - DNA, 20 bp, Artificial Sequence
  MKO10116794_B_Slc38a10
  gRNA
cggccgcctccacctccaag

SEQ ID NO: 116795 - DNA, 20 bp, Artificial Sequence
  MKO10116795_B_Slc38a10
  gRNA
agtcggccagcctgagcaag

SEQ ID NO: 116796 - DNA, 20 bp, Artificial Sequence
  MKO10116796_B_Slc38a11
  gRNA
ccttattcaatgaagcaagc

SEQ ID NO: 116797 - DNA, 20 bp, Artificial Sequence
  MKO10116797_B_Slc38a11
  gRNA
aggtcttgttaaccaaagac

SEQ ID NO: 116798 - DNA, 20 bp, Artificial Sequence
  MKO10116798_B_Slc38a11
  gRNA
ccagcttgcttcattgaata

SEQ ID NO: 116799 - DNA, 20 bp, Artificial Sequence
  MKO10116799_B_Slc38a1
  gRNA
gaagatcaccagcttccccg

SEQ ID NO: 116800 - DNA, 20 bp, Artificial Sequence
  MKO10116800_B_Slc38a1
  gRNA
gagtctcacaaacagccatc

SEQ ID NO: 116801 - DNA, 20 bp, Artificial Sequence
  MKO10116801_B_Slc38a1
  gRNA
tctcagcttaccggtttcct

SEQ ID NO: 116802 - DNA, 20 bp, Artificial Sequence
  MKO10116802_B_Slc38a2
  gRNA
taatctgagcaatgcgattg

SEQ ID NO: 116803 - DNA, 20 bp, Artificial Sequence
  MKO10116803_B_Slc38a2
  gRNA
agctactgtacctccttcgt

SEQ ID NO: 116804 - DNA, 20 bp, Artificial Sequence
  MKO10116804_B_Slc38a2
  gRNA
atctttattgtacgaacagt

SEQ ID NO: 116805 - DNA, 20 bp, Artificial Sequence
  MKO10116805_B_Slc38a3
  gRNA
ccacaatccccgaagacttg

SEQ ID NO: 116806 - DNA, 20 bp, Artificial Sequence
  MKO10116806_B_Slc38a3
  gRNA
gaaaaggatgatgcccgtat

SEQ ID NO: 116807 - DNA, 20 bp, Artificial Sequence
  MKO10116807_B_Slc38a3
  gRNA
cagctcacatcggtgaagtg

SEQ ID NO: 116808 - DNA, 20 bp, Artificial Sequence
  MKO10116808_B_Slc38a4
  gRNA
cttaggcttgtcctatgcca

SEQ ID NO: 116809 - DNA, 20 bp, Artificial Sequence
  MKO10116809_B_Slc38a4
  gRNA
ttacataaaaaggatgatcc

SEQ ID NO: 116810 - DNA, 20 bp, Artificial Sequence
  MKO10116810_B_Slc38a4
  gRNA
ctgcattgtaatagagatga

SEQ ID NO: 116811 - DNA, 20 bp, Artificial Sequence
  MKO10116811_B_Slc38a5
  gRNA
caacctcagcaacgctatca

SEQ ID NO: 116812 - DNA, 20 bp, Artificial Sequence
  MKO10116812_B_Slc38a5
  gRNA
accacccgtaaccctgctac

SEQ ID NO: 116813 - DNA, 20 bp, Artificial Sequence
  MKO10116813_B_Slc38a5
  gRNA
tgccaacaggatggaaatgc

SEQ ID NO: 116814 - DNA, 20 bp, Artificial Sequence
  MKO10116814_B_Slc38a6
  gRNA
ccatcacatacgccaaacca

SEQ ID NO: 116815 - DNA, 20 bp, Artificial Sequence
  MKO10116815_B_Slc38a6
  gRNA
ctcaccggtgtggatgcaca

SEQ ID NO: 116816 - DNA, 20 bp, Artificial Sequence
  MKO10116816_B_Slc38a6
  gRNA
gatggactgagtaagaagcc

SEQ ID NO: 116817 - DNA, 20 bp, Artificial Sequence
  MKO10116817_B_Slc38a7
  gRNA
gccattgcggtctatacctt

SEQ ID NO: 116818 - DNA, 20 bp, Artificial Sequence
  MKO10116818_B_Slc38a7
  gRNA
agttatagctgtgatgtcga

SEQ ID NO: 116819 - DNA, 20 bp, Artificial Sequence
  MKO10116819_B_Slc38a7
  gRNA
ctccgaacctggcatatttc

SEQ ID NO: 116820 - DNA, 20 bp, Artificial Sequence
  MKO10116820_B_Slc38a8
  gRNA
tgcctgacgccccacagcct

SEQ ID NO: 116821 - DNA, 20 bp, Artificial Sequence
  MKO10116821_B_Slc38a8
  gRNA
gcaatactacctgtggcccc

SEQ ID NO: 116822 - DNA, 20 bp, Artificial Sequence
  MKO10116822_B_Slc38a8
  gRNA
ctgttcacagcccgtctccc

SEQ ID NO: 116823 - DNA, 20 bp, Artificial Sequence
  MKO10116823_B_Slc38a9
  gRNA
actttactgctgctatagag

SEQ ID NO: 116824 - DNA, 20 bp, Artificial Sequence
  MKO10116824_B_Slc38a9
  gRNA
tagtatagatgttcccatca

SEQ ID NO: 116825 - DNA, 20 bp, Artificial Sequence
  MKO10116825_B_Slc38a9
  gRNA
gctcaccactcctgcagaca

SEQ ID NO: 116826 - DNA, 20 bp, Artificial Sequence
  MKO10116826_B_Slc39a10
  gRNA
ttccttgttgcactagcagt

SEQ ID NO: 116827 - DNA, 20 bp, Artificial Sequence
  MKO10116827_B_Slc39a10
  gRNA
cgtgcgtatgctgatgactg

SEQ ID NO: 116828 - DNA, 20 bp, Artificial Sequence
  MKO10116828_B_Slc39a10
  gRNA
caaaggtacgtgaatagatc

SEQ ID NO: 116829 - DNA, 20 bp, Artificial Sequence
  MKO10116829_B_Slc39a11
  gRNA
tcacccctgcggcaaagccc

SEQ ID NO: 116830 - DNA, 20 bp, Artificial Sequence
  MKO10116830_B_Slc39a11
  gRNA
aaaggctccgaagccccccg

SEQ ID NO: 116831 - DNA, 20 bp, Artificial Sequence
  MKO10116831_B_Slc39a11
  gRNA
ttgcagaggcggatcttaga

SEQ ID NO: 116832 - DNA, 20 bp, Artificial Sequence
  MKO10116832_B_Slc39a12
  gRNA
tgaacatgctcacgaccaga

SEQ ID NO: 116833 - DNA, 20 bp, Artificial Sequence
  MKO10116833_B_Slc39a12
  gRNA
ggaagtgccaaagtacttcc

SEQ ID NO: 116834 - DNA, 20 bp, Artificial Sequence
  MKO10116834_B_Slc39a12
  gRNA
gactttaagcagctaagtcc

SEQ ID NO: 116835 - DNA, 20 bp, Artificial Sequence
  MKO10116835_B_Slc39a13
  gRNA
acagtggcctccattgagcg

SEQ ID NO: 116836 - DNA, 20 bp, Artificial Sequence
  MKO10116836_B_Slc39a13
  gRNA
tggggtcctccttgctgttg

SEQ ID NO: 116837 - DNA, 20 bp, Artificial Sequence
  MKO10116837_B_Slc39a13
  gRNA
accatagacaacttcactca

SEQ ID NO: 116838 - DNA, 20 bp, Artificial Sequence
  MKO10116838_B_Slc39a14
  gRNA
ccacatgcaggtggtcgagc

SEQ ID NO: 116839 - DNA, 20 bp, Artificial Sequence
  MKO10116839_B_Slc39a14
  gRNA
ggcgcctggcacggacgaga

SEQ ID NO: 116840 - DNA, 20 bp, Artificial Sequence
  MKO10116840_B_Slc39a14
  gRNA
cagcagacgaggcatgagtc

SEQ ID NO: 116841 - DNA, 20 bp, Artificial Sequence
  MKO10116841_B_Slc39a1
  gRNA
cttggaggccctgcatgtga

SEQ ID NO: 116842 - DNA, 20 bp, Artificial Sequence
  MKO10116842_B_Slc39a1
  gRNA
agcagtcgcatcggagccct

SEQ ID NO: 116843 - DNA, 20 bp, Artificial Sequence
  MKO10116843_B_Slc39a1
  gRNA
ggtccatcgtgccagtgctg

SEQ ID NO: 116844 - DNA, 20 bp, Artificial Sequence
  MKO10116844_B_Slc39a2
  gRNA
ccaaagatggaggtactact

SEQ ID NO: 116845 - DNA, 20 bp, Artificial Sequence
  MKO10116845_B_Slc39a2
  gRNA
gcatatgactgctgaagctc

SEQ ID NO: 116846 - DNA, 20 bp, Artificial Sequence
  MKO10116846_B_Slc39a2
  gRNA
ctagaatagtacaggaagta

SEQ ID NO: 116847 - DNA, 20 bp, Artificial Sequence
  MKO10116847_B_Slc39a3
  gRNA
cacccccgaaggtgttgcag

SEQ ID NO: 116848 - DNA, 20 bp, Artificial Sequence
  MKO10116848_B_Slc39a3
  gRNA
cgtggccatccacgagacgc

SEQ ID NO: 116849 - DNA, 20 bp, Artificial Sequence
  MKO10116849_B_Slc39a3
  gRNA
tgtggcatcggcgctgctac

SEQ ID NO: 116850 - DNA, 20 bp, Artificial Sequence
  MKO10116850_B_Slc39a4
  gRNA
tggccaggtaatcgtccaca

SEQ ID NO: 116851 - DNA, 20 bp, Artificial Sequence
  MKO10116851_B_Slc39a4
  gRNA
gagaatttgatgcatcacct

SEQ ID NO: 116852 - DNA, 20 bp, Artificial Sequence
  MKO10116852_B_Slc39a4
  gRNA
ctgaatacggatagtggggt

SEQ ID NO: 116853 - DNA, 20 bp, Artificial Sequence
  MKO10116853_B_Slc39a5
  gRNA
tcgagggccctgacccgtgc

SEQ ID NO: 116854 - DNA, 20 bp, Artificial Sequence
  MKO10116854_B_Slc39a5
  gRNA
ggacctgggtccgggactgt

SEQ ID NO: 116855 - DNA, 20 bp, Artificial Sequence
  MKO10116855_B_Slc39a5
  gRNA
tgaccagacagtacatcccc

SEQ ID NO: 116856 - DNA, 20 bp, Artificial Sequence
  MKO10116856_B_Slc39a6
  gRNA
aaaggtctgacggctctagg

SEQ ID NO: 116857 - DNA, 20 bp, Artificial Sequence
  MKO10116857_B_Slc39a6
  gRNA
ccgttgcattcaacagagcc

SEQ ID NO: 116858 - DNA, 20 bp, Artificial Sequence
  MKO10116858_B_Slc39a6
  gRNA
agcatcaatttgattgatga

SEQ ID NO: 116859 - DNA, 20 bp, Artificial Sequence
  MKO10116859_B_Slc39a7
  gRNA
ctggagcagagagcggtgcc

SEQ ID NO: 116860 - DNA, 20 bp, Artificial Sequence
  MKO10116860_B_Slc39a7
  gRNA
ggtggaggaacgcatcaccc

SEQ ID NO: 116861 - DNA, 20 bp, Artificial Sequence
  MKO10116861_B_Slc39a7
  gRNA
tctggagcgtggtgagaatg

SEQ ID NO: 116862 - DNA, 20 bp, Artificial Sequence
  MKO10116862_B_Slc39a8
  gRNA
caagtcacaccgttgactgc

SEQ ID NO: 116863 - DNA, 20 bp, Artificial Sequence
  MKO10116863_B_Slc39a8
  gRNA
gctgaacttccatccctgcg

SEQ ID NO: 116864 - DNA, 20 bp, Artificial Sequence
  MKO10116864_B_Slc39a8
  gRNA
ctcaacgtaattgtcaattt

SEQ ID NO: 116865 - DNA, 20 bp, Artificial Sequence
  MKO10116865_B_Slc39a9
  gRNA
tttctaggagcggctgaagc

SEQ ID NO: 116866 - DNA, 20 bp, Artificial Sequence
  MKO10116866_B_Slc39a9
  gRNA
cagcatggacgactagcccc

SEQ ID NO: 116867 - DNA, 20 bp, Artificial Sequence
  MKO10116867_B_Slc39a9
  gRNA
tgaaaacgaagcccaataca

SEQ ID NO: 116868 - DNA, 20 bp, Artificial Sequence
  MKO10116868_B_Slc3a1
  gRNA
ccgaaatcctgctgttcaag

SEQ ID NO: 116869 - DNA, 20 bp, Artificial Sequence
  MKO10116869_B_Slc3a1
  gRNA
tacttcatcaaagtgccagc

SEQ ID NO: 116870 - DNA, 20 bp, Artificial Sequence
  MKO10116870_B_Slc3a1
  gRNA
ttcaggaaataataacgttc

SEQ ID NO: 116871 - DNA, 20 bp, Artificial Sequence
  MKO10116871_B_Slc3a2
  gRNA
actaccagggccagaatgcg

SEQ ID NO: 116872 - DNA, 20 bp, Artificial Sequence
  MKO10116872_B_Slc3a2
  gRNA
ggaaccacgcattctggccc

SEQ ID NO: 116873 - DNA, 20 bp, Artificial Sequence
  MKO10116873_B_Slc3a2
  gRNA
gtgtggatggtttccaattc

SEQ ID NO: 116874 - DNA, 20 bp, Artificial Sequence
  MKO10116874_B_Slc40a1
  gRNA
tgtgatcgcagtggcagtac

SEQ ID NO: 116875 - DNA, 20 bp, Artificial Sequence
  MKO10116875_B_Slc40a1
  gRNA
tacagtggcccagacgtcac

SEQ ID NO: 116876 - DNA, 20 bp, Artificial Sequence
  MKO10116876_B_Slc40a1
  gRNA
cttctcttgacagctgtcta

SEQ ID NO: 116877 - DNA, 20 bp, Artificial Sequence
  MKO10116877_B_Slc41a1
  gRNA
atgggcgtggctacgttgtc

SEQ ID NO: 116878 - DNA, 20 bp, Artificial Sequence
  MKO10116878_B_Slc41a1
  gRNA
agggatccagccaaagacga

SEQ ID NO: 116879 - DNA, 20 bp, Artificial Sequence
  MKO10116879_B_Slc41a1
  gRNA
ggggaatatggcccttatcc

SEQ ID NO: 116880 - DNA, 20 bp, Artificial Sequence
  MKO10116880_B_Slc41a2
  gRNA
cttcatcgcatctctactgc

SEQ ID NO: 116881 - DNA, 20 bp, Artificial Sequence
  MKO10116881_B_Slc41a2
  gRNA
atcgttggctccaagaagac

SEQ ID NO: 116882 - DNA, 20 bp, Artificial Sequence
  MKO10116882_B_Slc41a2
  gRNA
tggcaacttggctttaaagc

SEQ ID NO: 116883 - DNA, 20 bp, Artificial Sequence
  MKO10116883_B_Slc41a3
  gRNA
tttcccttcagaccgacgag

SEQ ID NO: 116884 - DNA, 20 bp, Artificial Sequence
  MKO10116884_B_Slc41a3
  gRNA
tggaccaatcgaactcctcg

SEQ ID NO: 116885 - DNA, 20 bp, Artificial Sequence
  MKO10116885_B_Slc41a3
  gRNA
gtcatcgatttgcccagtgt

SEQ ID NO: 116886 - DNA, 20 bp, Artificial Sequence
  MKO10116886_B_Slc43a1
  gRNA
ggccaaggccattagagtgc

SEQ ID NO: 116887 - DNA, 20 bp, Artificial Sequence
  MKO10116887_B_Slc43a1
  gRNA
aagccatccaccagcgcctg

SEQ ID NO: 116888 - DNA, 20 bp, Artificial Sequence
  MKO10116888_B_Slc43a1
  gRNA
tgccgcatcctgcactctaa

SEQ ID NO: 116889 - DNA, 20 bp, Artificial Sequence
  MKO10116889_B_Slc43a2
  gRNA
cctcagctgcccaatatgtt

SEQ ID NO: 116890 - DNA, 20 bp, Artificial Sequence
  MKO10116890_B_Slc43a2
  gRNA
tgtgctcatctttatcgcct

SEQ ID NO: 116891 - DNA, 20 bp, Artificial Sequence
  MKO10116891_B_Slc43a2
  gRNA
cccaaagccgttcagagcca

SEQ ID NO: 116892 - DNA, 20 bp, Artificial Sequence
  MKO10116892_B_Slc43a3
  gRNA
gattcctcccactgcgagca

SEQ ID NO: 116893 - DNA, 20 bp, Artificial Sequence
  MKO10116893_B_Slc43a3
  gRNA
tgaccgcttcaagactactg

SEQ ID NO: 116894 - DNA, 20 bp, Artificial Sequence
  MKO10116894_B_Slc43a3
  gRNA
gttccttatcaccaacctac

SEQ ID NO: 116895 - DNA, 20 bp, Artificial Sequence
  MKO10116895_B_Slc44a1
  gRNA
gcccctcacctgcgcggcgg

SEQ ID NO: 116896 - DNA, 20 bp, Artificial Sequence
  MKO10116896_B_Slc44a1
  gRNA
gtgcagctacggtcttccaa

SEQ ID NO: 116897 - DNA, 20 bp, Artificial Sequence
  MKO10116897_B_Slc44a1
  gRNA
attagagctccaaacgagaa

SEQ ID NO: 116898 - DNA, 20 bp, Artificial Sequence
  MKO10116898_B_Slc44a2
  gRNA
cgtgaagtgtgccaaccccc

SEQ ID NO: 116899 - DNA, 20 bp, Artificial Sequence
  MKO10116899_B_Slc44a2
  gRNA
aaacgcattacctgaggggt

SEQ ID NO: 116900 - DNA, 20 bp, Artificial Sequence
  MKO10116900_B_Slc44a2
  gRNA
aaggtggggtcgtatttctg

SEQ ID NO: 116901 - DNA, 20 bp, Artificial Sequence
  MKO10116901_B_Slc44a3
  gRNA
gcaatcttgaagtcaaagac

SEQ ID NO: 116902 - DNA, 20 bp, Artificial Sequence
  MKO10116902_B_Slc44a3
  gRNA
agaggggggctccttccact

SEQ ID NO: 116903 - DNA, 20 bp, Artificial Sequence
  MKO10116903_B_Slc44a3
  gRNA
agctcttaccttggaggaac

SEQ ID NO: 116904 - DNA, 20 bp, Artificial Sequence
  MKO10116904_B_Slc44a4
  gRNA
ttacatcatagtggggcttg

SEQ ID NO: 116905 - DNA, 20 bp, Artificial Sequence
  MKO10116905_B_Slc44a4
  gRNA
ctgtaggccattctcagcga

SEQ ID NO: 116906 - DNA, 20 bp, Artificial Sequence
  MKO10116906_B_Slc44a4
  gRNA
aaatatgacccctcctttcg

SEQ ID NO: 116907 - DNA, 20 bp, Artificial Sequence
  MKO10116907_B_Slc44a5
  gRNA
cgtagcccaaaataaacagt

SEQ ID NO: 116908 - DNA, 20 bp, Artificial Sequence
  MKO10116908_B_Slc44a5
  gRNA
taaatgcaggtgacccaagg

SEQ ID NO: 116909 - DNA, 20 bp, Artificial Sequence
  MKO10116909_B_Slc44a5
  gRNA
gtgtggtagagcactgtagc

SEQ ID NO: 116910 - DNA, 20 bp, Artificial Sequence
  MKO10116910_B_Slc45a1
  gRNA
tctcatatttcacaccgttc

SEQ ID NO: 116911 - DNA, 20 bp, Artificial Sequence
  MKO10116911_B_Slc45a1
  gRNA
gccgcacacatccatcatgt

SEQ ID NO: 116912 - DNA, 20 bp, Artificial Sequence
  MKO10116912_B_Slc45a1
  gRNA
ggagtgaccgatgtacctca

SEQ ID NO: 116913 - DNA, 20 bp, Artificial Sequence
  MKO10116913_B_Slc45a2
  gRNA
accgtattcatgcatcccac

SEQ ID NO: 116914 - DNA, 20 bp, Artificial Sequence
  MKO10116914_B_Slc45a2
  gRNA
atctagatgcacccagtcta

SEQ ID NO: 116915 - DNA, 20 bp, Artificial Sequence
  MKO10116915_B_Slc45a2
  gRNA
gtgcaccgtagggatcccca

SEQ ID NO: 116916 - DNA, 20 bp, Artificial Sequence
  MKO10116916_B_Slc45a3
  gRNA
tacgggacggggcatttgcc

SEQ ID NO: 116917 - DNA, 20 bp, Artificial Sequence
  MKO10116917_B_Slc45a3
  gRNA
tgtgggccagccgtctgcta

SEQ ID NO: 116918 - DNA, 20 bp, Artificial Sequence
  MKO10116918_B_Slc45a3
  gRNA
cataggtaatgccggcagcc

SEQ ID NO: 116919 - DNA, 20 bp, Artificial Sequence
  MKO10116919_B_Slc45a4
  gRNA
aacatacacgccttctctgc

SEQ ID NO: 116920 - DNA, 20 bp, Artificial Sequence
  MKO10116920_B_Slc45a4
  gRNA
tgtagatgatcctgatgctc

SEQ ID NO: 116921 - DNA, 20 bp, Artificial Sequence
  MKO10116921_B_Slc45a4
  gRNA
ctggtcatctacgctgctac

SEQ ID NO: 116922 - DNA, 20 bp, Artificial Sequence
  MKO10116922_B_Slc46a1
  gRNA
catggccaagctattcacac

SEQ ID NO: 116923 - DNA, 20 bp, Artificial Sequence
  MKO10116923_B_Slc46a1
  gRNA
ctccgactcgctcaccagct

SEQ ID NO: 116924 - DNA, 20 bp, Artificial Sequence
  MKO10116924_B_Slc46a1
  gRNA
aactgctggaactccgggtg

SEQ ID NO: 116925 - DNA, 20 bp, Artificial Sequence
  MKO10116925_B_Slc46a2
  gRNA
ttattccgatcacaaccatc

SEQ ID NO: 116926 - DNA, 20 bp, Artificial Sequence
  MKO10116926_B_Slc46a2
  gRNA
tggcctacaaacaagtcccg

SEQ ID NO: 116927 - DNA, 20 bp, Artificial Sequence
  MKO10116927_B_Slc46a2
  gRNA
gctgacctgatggttgtgat

SEQ ID NO: 116928 - DNA, 20 bp, Artificial Sequence
  MKO10116928_B_Slc46a3
  gRNA
gtaaatcccactgtacgcag

SEQ ID NO: 116929 - DNA, 20 bp, Artificial Sequence
  MKO10116929_B_Slc46a3
  gRNA
tgcagctgcgtcaagagcat

SEQ ID NO: 116930 - DNA, 20 bp, Artificial Sequence
  MKO10116930_B_Slc46a3
  gRNA
actcaccttgctcagtcgag

SEQ ID NO: 116931 - DNA, 20 bp, Artificial Sequence
  MKO10116931_B_Slc47a1
  gRNA
agccagaacttaaagcacgt

SEQ ID NO: 116932 - DNA, 20 bp, Artificial Sequence
  MKO10116932_B_Slc47a1
  gRNA
ctgagcttatgaaactgatt

SEQ ID NO: 116933 - DNA, 20 bp, Artificial Sequence
  MKO10116933_B_Slc47a1
  gRNA
ttgtgacacgctcatctccc

SEQ ID NO: 116934 - DNA, 20 bp, Artificial Sequence
  MKO10116934_B_Slc47a2
  gRNA
ggtgctcacctggcgacatc

SEQ ID NO: 116935 - DNA, 20 bp, Artificial Sequence
  MKO10116935_B_Slc47a2
  gRNA
catcagtgtgtcacaagccg

SEQ ID NO: 116936 - DNA, 20 bp, Artificial Sequence
  MKO10116936_B_Slc47a2
  gRNA
ttgtgacacactgatgtctc

SEQ ID NO: 116937 - DNA, 20 bp, Artificial Sequence
  MKO10116937_B_Slc48a1
  gRNA
acggtcctcactctgatgct

SEQ ID NO: 116938 - DNA, 20 bp, Artificial Sequence
  MKO10116938_B_Slc48a1
  gRNA
tgatgtccgcaaagtcagcc

SEQ ID NO: 116939 - DNA, 20 bp, Artificial Sequence
  MKO10116939_B_Slc48a1
  gRNA
ggtgggcgtagaggctaagt

SEQ ID NO: 116940 - DNA, 20 bp, Artificial Sequence
  MKO10116940_B_Slc4a10
  gRNA
tctcttaccgtaggcagcag

SEQ ID NO: 116941 - DNA, 20 bp, Artificial Sequence
  MKO10116941_B_Slc4a10
  gRNA
tgttccacctctatccacaa

SEQ ID NO: 116942 - DNA, 20 bp, Artificial Sequence
  MKO10116942_B_Slc4a10
  gRNA
gcagtttattcttggaactg

SEQ ID NO: 116943 - DNA, 20 bp, Artificial Sequence
  MKO10116943_B_Slc4a11
  gRNA
gagtcactgccactgtccga

SEQ ID NO: 116944 - DNA, 20 bp, Artificial Sequence
  MKO10116944_B_Slc4a11
  gRNA
catccccataccagatttgg

SEQ ID NO: 116945 - DNA, 20 bp, Artificial Sequence
  MKO10116945_B_Slc4a11
  gRNA
cctggtgacagccggcactc

SEQ ID NO: 116946 - DNA, 20 bp, Artificial Sequence
  MKO10116946_B_Slc4a1ap
  gRNA
cctttatataaaacgcttcc

SEQ ID NO: 116947 - DNA, 20 bp, Artificial Sequence
  MKO10116947_B_Slc4a1ap
  gRNA
aagtggtcaagatgatgagc

SEQ ID NO: 116948 - DNA, 20 bp, Artificial Sequence
  MKO10116948_B_Slc4a1ap
  gRNA
taaacagcagcagatattat

SEQ ID NO: 116949 - DNA, 20 bp, Artificial Sequence
  MKO10116949_B_Slc4a1
  gRNA
agcagttcttctcggtcctg

SEQ ID NO: 116950 - DNA, 20 bp, Artificial Sequence
  MKO10116950_B_Slc4a1
  gRNA
aatgggtggaggcagcgcac

SEQ ID NO: 116951 - DNA, 20 bp, Artificial Sequence
  MKO10116951_B_Slc4a1
  gRNA
tcttcttcgctgtctcgatc

SEQ ID NO: 116952 - DNA, 20 bp, Artificial Sequence
  MKO10116952_B_Slc4a2
  gRNA
agacgaattggcagtatgac

SEQ ID NO: 116953 - DNA, 20 bp, Artificial Sequence
  MKO10116953_B_Slc4a2
  gRNA
caattcgtcttcgctcctga

SEQ ID NO: 116954 - DNA, 20 bp, Artificial Sequence
  MKO10116954_B_Slc4a2
  gRNA
tgaacttcgtaccttaggtg

SEQ ID NO: 116955 - DNA, 20 bp, Artificial Sequence
  MKO10116955_B_Slc4a3
  gRNA
ctagccgcagctacagcgag

SEQ ID NO: 116956 - DNA, 20 bp, Artificial Sequence
  MKO10116956_B_Slc4a3
  gRNA
cgaggcggaggctcaaatgt

SEQ ID NO: 116957 - DNA, 20 bp, Artificial Sequence
  MKO10116957_B_Slc4a3
  gRNA
atagggggtgtcccttctga

SEQ ID NO: 116958 - DNA, 20 bp, Artificial Sequence
  MKO10116958_B_Slc4a4
  gRNA
agaacgcatccgattcatct

SEQ ID NO: 116959 - DNA, 20 bp, Artificial Sequence
  MKO10116959_B_Slc4a4
  gRNA
aaggatccatcatgcttgac

SEQ ID NO: 116960 - DNA, 20 bp, Artificial Sequence
  MKO10116960_B_Slc4a4
  gRNA
tcgagttccgtgaagagctg

SEQ ID NO: 116961 - DNA, 20 bp, Artificial Sequence
  MKO10116961_B_Slc4a5
  gRNA
tcgaatcctcaggtcctcag

SEQ ID NO: 116962 - DNA, 20 bp, Artificial Sequence
  MKO10116962_B_Slc4a5
  gRNA
tgctccctaccacagatcat

SEQ ID NO: 116963 - DNA, 20 bp, Artificial Sequence
  MKO10116963_B_Slc4a5
  gRNA
tcataccccaaacacagacc

SEQ ID NO: 116964 - DNA, 20 bp, Artificial Sequence
  MKO10116964_B_Slc4a7
  gRNA
cgacgactctctttactaaa

SEQ ID NO: 116965 - DNA, 20 bp, Artificial Sequence
  MKO10116965_B_Slc4a7
  gRNA
agcactcttgatgaaattgc

SEQ ID NO: 116966 - DNA, 20 bp, Artificial Sequence
  MKO10116966_B_Slc4a7
  gRNA
ttgaagatggtggtgaccga

SEQ ID NO: 116967 - DNA, 20 bp, Artificial Sequence
  MKO10116967_B_Slc4a8
  gRNA
atgaactgaacacgctgaga

SEQ ID NO: 116968 - DNA, 20 bp, Artificial Sequence
  MKO10116968_B_Slc4a8
  gRNA
gtgaatgttgagaattgtgc

SEQ ID NO: 116969 - DNA, 20 bp, Artificial Sequence
  MKO10116969_B_Slc4a8
  gRNA
tggaggacgggggagagcgc

SEQ ID NO: 116970 - DNA, 20 bp, Artificial Sequence
  MKO10116970_B_Slc4a9
  gRNA
ccagaagcttcgaagtctgt

SEQ ID NO: 116971 - DNA, 20 bp, Artificial Sequence
  MKO10116971_B_Slc4a9
  gRNA
tgatgaggacgccccactga

SEQ ID NO: 116972 - DNA, 20 bp, Artificial Sequence
  MKO10116972_B_Slc4a9
  gRNA
tctccagagcaggtagtcag

SEQ ID NO: 116973 - DNA, 20 bp, Artificial Sequence
  MKO10116973_B_Slc50a1
  gRNA
aaacccgtaaatagaccaag

SEQ ID NO: 116974 - DNA, 20 bp, Artificial Sequence
  MKO10116974_B_Slc50a1
  gRNA
acactctcacttgacatccg

SEQ ID NO: 116975 - DNA, 20 bp, Artificial Sequence
  MKO10116975_B_Slc50a1
  gRNA
tcccttccagctcggacctc

SEQ ID NO: 116976 - DNA, 20 bp, Artificial Sequence
  MKO10116976_B_Slc51a
  gRNA
atcttgacctttcttaccac

SEQ ID NO: 116977 - DNA, 20 bp, Artificial Sequence
  MKO10116977_B_Slc51a
  gRNA
cgccctcacacttgtagaaa

SEQ ID NO: 116978 - DNA, 20 bp, Artificial Sequence
  MKO10116978_B_Slc51a
  gRNA
tggccatttctacaagtgtg

SEQ ID NO: 116979 - DNA, 20 bp, Artificial Sequence
  MKO10116979_B_Slc51b
  gRNA
gcatttcttccagcagttcc

SEQ ID NO: 116980 - DNA, 20 bp, Artificial Sequence
  MKO10116980_B_Slc51b
  gRNA
tgtctttctgccagacccac

SEQ ID NO: 116981 - DNA, 20 bp, Artificial Sequence
  MKO10116981_B_Slc51b
  gRNA
gaaagctgcagccaatgccg

SEQ ID NO: 116982 - DNA, 20 bp, Artificial Sequence
  MKO10116982_B_Slc52a2
  gRNA
gatcccgttgacagcagccc

SEQ ID NO: 116983 - DNA, 20 bp, Artificial Sequence
  MKO10116983_B_Slc52a2
  gRNA
cctaatggcagcacctccgc

SEQ ID NO: 116984 - DNA, 20 bp, Artificial Sequence
  MKO10116984_B_Slc52a2
  gRNA
gggctcctacctgatgacac

SEQ ID NO: 116985 - DNA, 20 bp, Artificial Sequence
  MKO10116985_B_Slc52a3
  gRNA
tggggcctacaatatggcca

SEQ ID NO: 116986 - DNA, 20 bp, Artificial Sequence
  MKO10116986_B_Slc52a3
  gRNA
tgggcggagcgaagccacac

SEQ ID NO: 116987 - DNA, 20 bp, Artificial Sequence
  MKO10116987_B_Slc52a3
  gRNA
caccttgacatagctgagac

SEQ ID NO: 116988 - DNA, 20 bp, Artificial Sequence
  MKO10116988_B_Slc5a10
  gRNA
acaggacagataagtacgtg

SEQ ID NO: 116989 - DNA, 20 bp, Artificial Sequence
  MKO10116989_B_Slc5a10
  gRNA
ccggccaccaagccatgtcc

SEQ ID NO: 116990 - DNA, 20 bp, Artificial Sequence
  MKO10116990_B_Slc5a10
  gRNA
ctcgctgcttgcaaagagtg

SEQ ID NO: 116991 - DNA, 20 bp, Artificial Sequence
  MKO10116991_B_Slc5a11
  gRNA
ccacgatgccagaatatcta

SEQ ID NO: 116992 - DNA, 20 bp, Artificial Sequence
  MKO10116992_B_Slc5a11
  gRNA
gcctttcactgtgtctcgtt

SEQ ID NO: 116993 - DNA, 20 bp, Artificial Sequence
  MKO10116993_B_Slc5a11
  gRNA
ggacacttcattggcctcgc

SEQ ID NO: 116994 - DNA, 20 bp, Artificial Sequence
  MKO10116994_B_Slc5a12
  gRNA
cattatctacatcgtacaga

SEQ ID NO: 116995 - DNA, 20 bp, Artificial Sequence
  MKO10116995_B_Slc5a12
  gRNA
cctgctgaagtctaccgctt

SEQ ID NO: 116996 - DNA, 20 bp, Artificial Sequence
  MKO10116996_B_Slc5a12
  gRNA
atgccagacctgtagaacac

SEQ ID NO: 116997 - DNA, 20 bp, Artificial Sequence
  MKO10116997_B_Slc5a1
  gRNA
ccggccaccacaccatactt

SEQ ID NO: 116998 - DNA, 20 bp, Artificial Sequence
  MKO10116998_B_Slc5a1
  gRNA
atttgtcccgatttacatca

SEQ ID NO: 116999 - DNA, 20 bp, Artificial Sequence
  MKO10116999_B_Slc5a1
  gRNA
gtgaccacttccaatgttac

SEQ ID NO: 117000 - DNA, 20 bp, Artificial Sequence
  MKO10117000_B_Slc5a2
  gRNA
cgcttcggtcatcgctctct

SEQ ID NO: 117001 - DNA, 20 bp, Artificial Sequence
  MKO10117001_B_Slc5a2
  gRNA
gactggcgcagcaagtggct

SEQ ID NO: 117002 - DNA, 20 bp, Artificial Sequence
  MKO10117002_B_Slc5a2
  gRNA
tctatgttcagaaccaatag

SEQ ID NO: 117003 - DNA, 20 bp, Artificial Sequence
  MKO10117003_B_Slc5a3
  gRNA
tacccctgaccggatgtaaa

SEQ ID NO: 117004 - DNA, 20 bp, Artificial Sequence
  MKO10117004_B_Slc5a3
  gRNA
cgctattctcgctgcactgc

SEQ ID NO: 117005 - DNA, 20 bp, Artificial Sequence
  MKO10117005_B_Slc5a3
  gRNA
accagcagattaacgtcttc

SEQ ID NO: 117006 - DNA, 20 bp, Artificial Sequence
  MKO10117006_B_Slc5a4a
  gRNA
gtggccactgccgatgttgc

SEQ ID NO: 117007 - DNA, 20 bp, Artificial Sequence
  MKO10117007_B_Slc5a4a
  gRNA
tcaatatcacgcagatgaaa

SEQ ID NO: 117008 - DNA, 20 bp, Artificial Sequence
  MKO10117008_B_Slc5a4a
  gRNA
caccccagccttgatgtaaa

SEQ ID NO: 117009 - DNA, 20 bp, Artificial Sequence
  MKO10117009_B_Slc5a4b
  gRNA
aggaatcgctattgcagctg

SEQ ID NO: 117010 - DNA, 20 bp, Artificial Sequence
  MKO10117010_B_Slc5a4b
  gRNA
ctgaactcacggaagtttga

SEQ ID NO: 117011 - DNA, 20 bp, Artificial Sequence
  MKO10117011_B_Slc5a4b
  gRNA
caagaaccagcaccataagc

SEQ ID NO: 117012 - DNA, 20 bp, Artificial Sequence
  MKO10117012_B_Slc5a5
  gRNA
ctgcgggacgctgcagtact

SEQ ID NO: 117013 - DNA, 20 bp, Artificial Sequence
  MKO10117013_B_Slc5a5
  gRNA
ctgcaccttgtacacgaccg

SEQ ID NO: 117014 - DNA, 20 bp, Artificial Sequence
  MKO10117014_B_Slc5a5
  gRNA
ccttggttcaggatgagcgc

SEQ ID NO: 117015 - DNA, 20 bp, Artificial Sequence
  MKO10117015_B_Slc5a6
  gRNA
tccgcttcaataaagcagtt

SEQ ID NO: 117016 - DNA, 20 bp, Artificial Sequence
  MKO10117016_B_Slc5a6
  gRNA
acttaccatctgaaagatga

SEQ ID NO: 117017 - DNA, 20 bp, Artificial Sequence
  MKO10117017_B_Slc5a6
  gRNA
ttccctgcagggtgggctga

SEQ ID NO: 117018 - DNA, 20 bp, Artificial Sequence
  MKO10117018_B_Slc5a7
  gRNA
catcagcgtgatcattgatg

SEQ ID NO: 117019 - DNA, 20 bp, Artificial Sequence
  MKO10117019_B_Slc5a7
  gRNA
gcccaagctagaccacaacc

SEQ ID NO: 117020 - DNA, 20 bp, Artificial Sequence
  MKO10117020_B_Slc5a7
  gRNA
taacatagtcacatatccct

SEQ ID NO: 117021 - DNA, 20 bp, Artificial Sequence
  MKO10117021_B_Slc5a8
  gRNA
gaatgtgcagaccacccctg

SEQ ID NO: 117022 - DNA, 20 bp, Artificial Sequence
  MKO10117022_B_Slc5a8
  gRNA
ccttgattcaaagccagagc

SEQ ID NO: 117023 - DNA, 20 bp, Artificial Sequence
  MKO10117023_B_Slc5a8
  gRNA
tattgatgcctgtataatta

SEQ ID NO: 117024 - DNA, 20 bp, Artificial Sequence
  MKO10117024_B_Slc5a9
  gRNA
gaccgttggtggctatttcc

SEQ ID NO: 117025 - DNA, 20 bp, Artificial Sequence
  MKO10117025_B_Slc5a9
  gRNA
gtcccccaaatcgtttcttc

SEQ ID NO: 117026 - DNA, 20 bp, Artificial Sequence
  MKO10117026_B_Slc5a9
  gRNA
atctctaatgtccagcaatg

SEQ ID NO: 117027 - DNA, 20 bp, Artificial Sequence
  MKO10117027_B_Slc6a11
  gRNA
tccgatggcattgagcacat

SEQ ID NO: 117028 - DNA, 20 bp, Artificial Sequence
  MKO10117028_B_Slc6a11
  gRNA
tgtgggcacgagtggaacac

SEQ ID NO: 117029 - DNA, 20 bp, Artificial Sequence
  MKO10117029_B_Slc6a11
  gRNA
aggcattggctatgcaacac

SEQ ID NO: 117030 - DNA, 20 bp, Artificial Sequence
  MKO10117030_B_Slc6a12
  gRNA
cagggcctccctatccagta

SEQ ID NO: 117031 - DNA, 20 bp, Artificial Sequence
  MKO10117031_B_Slc6a12
  gRNA
ctgaatcactcatcggccag

SEQ ID NO: 117032 - DNA, 20 bp, Artificial Sequence
  MKO10117032_B_Slc6a12
  gRNA
gaactttacctcgcctgtca

SEQ ID NO: 117033 - DNA, 20 bp, Artificial Sequence
  MKO10117033_B_Slc6a13
  gRNA
ggatgccatccgagagcttc

SEQ ID NO: 117034 - DNA, 20 bp, Artificial Sequence
  MKO10117034_B_Slc6a13
  gRNA
tgcagccatgagtggaatac

SEQ ID NO: 117035 - DNA, 20 bp, Artificial Sequence
  MKO10117035_B_Slc6a13
  gRNA
tttgcgggtagaaaactgtg

SEQ ID NO: 117036 - DNA, 20 bp, Artificial Sequence
  MKO10117036_B_Slc6a14
  gRNA
caatgctagcatgattgcat

SEQ ID NO: 117037 - DNA, 20 bp, Artificial Sequence
  MKO10117037_B_Slc6a14
  gRNA
aacaatctcacctgcttgaa

SEQ ID NO: 117038 - DNA, 20 bp, Artificial Sequence
  MKO10117038_B_Slc6a14
  gRNA
tccaggtgtgggaatcacga

SEQ ID NO: 117039 - DNA, 20 bp, Artificial Sequence
  MKO10117039_B_Slc6a15
  gRNA
gttctgccaccacctattac

SEQ ID NO: 117040 - DNA, 20 bp, Artificial Sequence
  MKO10117040_B_Slc6a15
  gRNA
ccgacacatgttcactccta

SEQ ID NO: 117041 - DNA, 20 bp, Artificial Sequence
  MKO10117041_B_Slc6a15
  gRNA
ggactgaatgcctttgatca

SEQ ID NO: 117042 - DNA, 20 bp, Artificial Sequence
  MKO10117042_B_Slc6a17
  gRNA
cccactctctgaaatcgagt

SEQ ID NO: 117043 - DNA, 20 bp, Artificial Sequence
  MKO10117043_B_Slc6a17
  gRNA
cgtgggcatggctgtcgtca

SEQ ID NO: 117044 - DNA, 20 bp, Artificial Sequence
  MKO10117044_B_Slc6a17
  gRNA
acagtcccattcctgatgac

SEQ ID NO: 117045 - DNA, 20 bp, Artificial Sequence
  MKO10117045_B_Slc6a18
  gRNA
aggcagcttacctcctccgt

SEQ ID NO: 117046 - DNA, 20 bp, Artificial Sequence
  MKO10117046_B_Slc6a18
  gRNA
actacaacacggttctcctg

SEQ ID NO: 117047 - DNA, 20 bp, Artificial Sequence
  MKO10117047_B_Slc6a18
  gRNA
gtggcaccgtgagctacttc

SEQ ID NO: 117048 - DNA, 20 bp, Artificial Sequence
  MKO10117048_B_Slc6a19os
  gRNA
taatatcgtgggcttaactg

SEQ ID NO: 117049 - DNA, 20 bp, Artificial Sequence
  MKO10117049_B_Slc6a19os
  gRNA
gggtgccgctggggagacat

SEQ ID NO: 117050 - DNA, 20 bp, Artificial Sequence
  MKO10117050_B_Slc6a19os
  gRNA
gtgttgcagaatccctttag

SEQ ID NO: 117051 - DNA, 20 bp, Artificial Sequence
  MKO10117051_B_Slc6a19
  gRNA
tcccagtggtctcgatgcca

SEQ ID NO: 117052 - DNA, 20 bp, Artificial Sequence
  MKO10117052_B_Slc6a19
  gRNA
tcggtaccagaagtagtcca

SEQ ID NO: 117053 - DNA, 20 bp, Artificial Sequence
  MKO10117053_B_Slc6a19
  gRNA
caccatgaaggacacgaaca

SEQ ID NO: 117054 - DNA, 20 bp, Artificial Sequence
  MKO10117054_B_Slc6a1
  gRNA
gcagaaatacacgagcaccc

SEQ ID NO: 117055 - DNA, 20 bp, Artificial Sequence
  MKO10117055_B_Slc6a1
  gRNA
acaagccaggacagatccgc

SEQ ID NO: 117056 - DNA, 20 bp, Artificial Sequence
  MKO10117056_B_Slc6a1
  gRNA
ccgtggtgaaggagttgtac

SEQ ID NO: 117057 - DNA, 20 bp, Artificial Sequence
  MKO10117057_B_Slc6a20a
  gRNA
attgatgacattgtagtaca

SEQ ID NO: 117058 - DNA, 20 bp, Artificial Sequence
  MKO10117058_B_Slc6a20a
  gRNA
cctgtccacagggagtttcc

SEQ ID NO: 117059 - DNA, 20 bp, Artificial Sequence
  MKO10117059_B_Slc6a20a
  gRNA
taggtgtgaacatgtacatc

SEQ ID NO: 117060 - DNA, 20 bp, Artificial Sequence
  MKO10117060_B_Slc6a20b
  gRNA
acttcaatgtcatcaacacc

SEQ ID NO: 117061 - DNA, 20 bp, Artificial Sequence
  MKO10117061_B_Slc6a20b
  gRNA
ctttgtgctcatcatctacc

SEQ ID NO: 117062 - DNA, 20 bp, Artificial Sequence
  MKO10117062_B_Slc6a20b
  gRNA
cctgttcacaggaaatttcc

SEQ ID NO: 117063 - DNA, 20 bp, Artificial Sequence
  MKO10117063_B_Slc6a2
  gRNA
cattgacttctaccgcctca

SEQ ID NO: 117064 - DNA, 20 bp, Artificial Sequence
  MKO10117064_B_Slc6a2
  gRNA
atgatgaggaacagcgtgta

SEQ ID NO: 117065 - DNA, 20 bp, Artificial Sequence
  MKO10117065_B_Slc6a2
  gRNA
acactgcccggtgcctccaa

SEQ ID NO: 117066 - DNA, 20 bp, Artificial Sequence
  MKO10117066_B_Slc6a3
  gRNA
ggatccactgcaacaacacc

SEQ ID NO: 117067 - DNA, 20 bp, Artificial Sequence
  MKO10117067_B_Slc6a3
  gRNA
cggcaataaccatgaagagc

SEQ ID NO: 117068 - DNA, 20 bp, Artificial Sequence
  MKO10117068_B_Slc6a3
  gRNA
ttgatgacctgggccctcca

SEQ ID NO: 117069 - DNA, 20 bp, Artificial Sequence
  MKO10117069_B_Slc6a4
  gRNA
tgacgtggaatggagtgtcc

SEQ ID NO: 117070 - DNA, 20 bp, Artificial Sequence
  MKO10117070_B_Slc6a4
  gRNA
ggggatcccactcttctaca

SEQ ID NO: 117071 - DNA, 20 bp, Artificial Sequence
  MKO10117071_B_Slc6a4
  gRNA
ccattatctacttcagcatc

SEQ ID NO: 117072 - DNA, 20 bp, Artificial Sequence
  MKO10117072_B_Slc6a5
  gRNA
gatgatgacgttgtagtata

SEQ ID NO: 117073 - DNA, 20 bp, Artificial Sequence
  MKO10117073_B_Slc6a5
  gRNA
cgccctcaggaggacgagca

SEQ ID NO: 117074 - DNA, 20 bp, Artificial Sequence
  MKO10117074_B_Slc6a5
  gRNA
aaacttacctagtaaaagtt

SEQ ID NO: 117075 - DNA, 20 bp, Artificial Sequence
  MKO10117075_B_Slc6a6
  gRNA
cgctctgcctcctcttagtc

SEQ ID NO: 117076 - DNA, 20 bp, Artificial Sequence
  MKO10117076_B_Slc6a6
  gRNA
tttcccgtttgccatgcttc

SEQ ID NO: 117077 - DNA, 20 bp, Artificial Sequence
  MKO10117077_B_Slc6a6
  gRNA
aacagacgagccagactaag

SEQ ID NO: 117078 - DNA, 20 bp, Artificial Sequence
  MKO10117078_B_Slc6a7
  gRNA
caggcccataccgcctccat

SEQ ID NO: 117079 - DNA, 20 bp, Artificial Sequence
  MKO10117079_B_Slc6a7
  gRNA
ccctcaccagcaatttgccc

SEQ ID NO: 117080 - DNA, 20 bp, Artificial Sequence
  MKO10117080_B_Slc6a7
  gRNA
catgctgctcattgtaggcc

SEQ ID NO: 117081 - DNA, 20 bp, Artificial Sequence
  MKO10117081_B_Slc6a8
  gRNA
gtgaccagcttgctgaccgc

SEQ ID NO: 117082 - DNA, 20 bp, Artificial Sequence
  MKO10117082_B_Slc6a8
  gRNA
tggcggctcacctttgaata

SEQ ID NO: 117083 - DNA, 20 bp, Artificial Sequence
  MKO10117083_B_Slc6a8
  gRNA
actggcccaatgagatttcc

SEQ ID NO: 117084 - DNA, 20 bp, Artificial Sequence
  MKO10117084_B_Slc6a9
  gRNA
gacgcttccaacctcaccaa

SEQ ID NO: 117085 - DNA, 20 bp, Artificial Sequence
  MKO10117085_B_Slc6a9
  gRNA
cggatcagccccatgttcaa

SEQ ID NO: 117086 - DNA, 20 bp, Artificial Sequence
  MKO10117086_B_Slc6a9
  gRNA
ctgaagctgtcagacgacat

SEQ ID NO: 117087 - DNA, 20 bp, Artificial Sequence
  MKO10117087_B_Slc7a10
  gRNA
gacaccgtctgtgggtcacc

SEQ ID NO: 117088 - DNA, 20 bp, Artificial Sequence
  MKO10117088_B_Slc7a10
  gRNA
cgtagtccccaccagacttg

SEQ ID NO: 117089 - DNA, 20 bp, Artificial Sequence
  MKO10117089_B_Slc7a10
  gRNA
gagctgtcacgcccccaccc

SEQ ID NO: 117090 - DNA, 20 bp, Artificial Sequence
  MKO10117090_B_Slc7a11
  gRNA
ggatgtagcgtccaaatgcc

SEQ ID NO: 117091 - DNA, 20 bp, Artificial Sequence
  MKO10117091_B_Slc7a11
  gRNA
acgagcttgattgcaagttc

SEQ ID NO: 117092 - DNA, 20 bp, Artificial Sequence
  MKO10117092_B_Slc7a11
  gRNA
aagtctaatggggttgccct

SEQ ID NO: 117093 - DNA, 20 bp, Artificial Sequence
  MKO10117093_B_Slc7a12
  gRNA
attctactctgcaagtcaag

SEQ ID NO: 117094 - DNA, 20 bp, Artificial Sequence
  MKO10117094_B_Slc7a12
  gRNA
tgacttaccttataaggtct

SEQ ID NO: 117095 - DNA, 20 bp, Artificial Sequence
  MKO10117095_B_Slc7a12
  gRNA
tgatagacatgctctatact

SEQ ID NO: 117096 - DNA, 20 bp, Artificial Sequence
  MKO10117096_B_Slc7a13
  gRNA
ccacaatccacagcatcgcc

SEQ ID NO: 117097 - DNA, 20 bp, Artificial Sequence
  MKO10117097_B_Slc7a13
  gRNA
actttaaagtgaagttcgtt

SEQ ID NO: 117098 - DNA, 20 bp, Artificial Sequence
  MKO10117098_B_Slc7a13
  gRNA
gatagtttatcagatcaatt

SEQ ID NO: 117099 - DNA, 20 bp, Artificial Sequence
  MKO10117099_B_Slc7a14
  gRNA
aaatgccacgaactccccaa

SEQ ID NO: 117100 - DNA, 20 bp, Artificial Sequence
  MKO10117100_B_Slc7a14
  gRNA
ctatgctgcgaagtttgtag

SEQ ID NO: 117101 - DNA, 20 bp, Artificial Sequence
  MKO10117101_B_Slc7a14
  gRNA
cgtcctcaatgtgctgaacc

SEQ ID NO: 117102 - DNA, 20 bp, Artificial Sequence
  MKO10117102_B_Slc7a15
  gRNA
gcaggtaactgatattgacc

SEQ ID NO: 117103 - DNA, 20 bp, Artificial Sequence
  MKO10117103_B_Slc7a15
  gRNA
ggtagttccataggtgagcc

SEQ ID NO: 117104 - DNA, 20 bp, Artificial Sequence
  MKO10117104_B_Slc7a15
  gRNA
gcacctttgtgaacctctta

SEQ ID NO: 117105 - DNA, 20 bp, Artificial Sequence
  MKO10117105_B_Slc7a1
  gRNA
ttgtgcttcatcgtggtgtc

SEQ ID NO: 117106 - DNA, 20 bp, Artificial Sequence
  MKO10117106_B_Slc7a1
  gRNA
catcatgagcgtgagagcgg

SEQ ID NO: 117107 - DNA, 20 bp, Artificial Sequence
  MKO10117107_B_Slc7a1
  gRNA
tttgactgcatcgccaccac

SEQ ID NO: 117108 - DNA, 20 bp, Artificial Sequence
  MKO10117108_B_Slc7a2
  gRNA
actccatgctcttgcgacac

SEQ ID NO: 117109 - DNA, 20 bp, Artificial Sequence
  MKO10117109_B_Slc7a2
  gRNA
acaagcatctacggggctgg

SEQ ID NO: 117110 - DNA, 20 bp, Artificial Sequence
  MKO10117110_B_Slc7a2
  gRNA
caacgtccctgtaaagccat

SEQ ID NO: 117111 - DNA, 20 bp, Artificial Sequence
  MKO10117111_B_Slc7a3
  gRNA
agaaacaggtagcagcgcca

SEQ ID NO: 117112 - DNA, 20 bp, Artificial Sequence
  MKO10117112_B_Slc7a3
  gRNA
aatacagtcaaaaccaacga

SEQ ID NO: 117113 - DNA, 20 bp, Artificial Sequence
  MKO10117113_B_Slc7a3
  gRNA
ttgaccatgagtgaatccaa

SEQ ID NO: 117114 - DNA, 20 bp, Artificial Sequence
  MKO10117114_B_Slc7a4
  gRNA
gcaggacttgtcgtgtattt

SEQ ID NO: 117115 - DNA, 20 bp, Artificial Sequence
  MKO10117115_B_Slc7a4
  gRNA
cctgtgtccgggggtgtaca

SEQ ID NO: 117116 - DNA, 20 bp, Artificial Sequence
  MKO10117116_B_Slc7a4
  gRNA
gctgactacagcacactacg

SEQ ID NO: 117117 - DNA, 20 bp, Artificial Sequence
  MKO10117117_B_Slc7a5
  gRNA
tgtgaactgctacagcgtaa

SEQ ID NO: 117118 - DNA, 20 bp, Artificial Sequence
  MKO10117118_B_Slc7a5
  gRNA
aggagatgatcaacccctac

SEQ ID NO: 117119 - DNA, 20 bp, Artificial Sequence
  MKO10117119_B_Slc7a5
  gRNA
tcctttcaggaacctgcccc

SEQ ID NO: 117120 - DNA, 20 bp, Artificial Sequence
  MKO10117120_B_Slc7a6os
  gRNA
atgatgttctcaatccaccc

SEQ ID NO: 117121 - DNA, 20 bp, Artificial Sequence
  MKO10117121_B_Slc7a6os
  gRNA
tgaatacaacagcctcagcg

SEQ ID NO: 117122 - DNA, 20 bp, Artificial Sequence
  MKO10117122_B_Slc7a6os
  gRNA
gaagctgcgagcgactgatg

SEQ ID NO: 117123 - DNA, 20 bp, Artificial Sequence
  MKO10117123_B_Slc7a6
  gRNA
cagccacagcgtcactctta

SEQ ID NO: 117124 - DNA, 20 bp, Artificial Sequence
  MKO10117124_B_Slc7a6
  gRNA
tgtccataagagtgacgctg

SEQ ID NO: 117125 - DNA, 20 bp, Artificial Sequence
  MKO10117125_B_Slc7a6
  gRNA
tcgtgtgccccacttgacgt

SEQ ID NO: 117126 - DNA, 20 bp, Artificial Sequence
  MKO10117126_B_Slc7a7
  gRNA
actatgtcaccgaagagatc

SEQ ID NO: 117127 - DNA, 20 bp, Artificial Sequence
  MKO10117127_B_Slc7a7
  gRNA
ggagttctcaaagttagctg

SEQ ID NO: 117128 - DNA, 20 bp, Artificial Sequence
  MKO10117128_B_Slc7a7
  gRNA
ggccagtgacgctgttgccg

SEQ ID NO: 117129 - DNA, 20 bp, Artificial Sequence
  MKO10117129_B_Slc7a8
  gRNA
gttcctcagtcacataatta

SEQ ID NO: 117130 - DNA, 20 bp, Artificial Sequence
  MKO10117130_B_Slc7a8
  gRNA
gctggaaaacgcgggctctg

SEQ ID NO: 117131 - DNA, 20 bp, Artificial Sequence
  MKO10117131_B_Slc7a8
  gRNA
tggagcagttgacccatgtg

SEQ ID NO: 117132 - DNA, 20 bp, Artificial Sequence
  MKO10117132_B_Slc7a9
  gRNA
catgacgatcaggctggtcc

SEQ ID NO: 117133 - DNA, 20 bp, Artificial Sequence
  MKO10117133_B_Slc7a9
  gRNA
ggcggcccatatgatgagac

SEQ ID NO: 117134 - DNA, 20 bp, Artificial Sequence
  MKO10117134_B_Slc7a9
  gRNA
aatggactctgggcctacga

SEQ ID NO: 117135 - DNA, 20 bp, Artificial Sequence
  MKO10117135_B_Slc8a1
  gRNA
tgctaggccaacctatcttc

SEQ ID NO: 117136 - DNA, 20 bp, Artificial Sequence
  MKO10117136_B_Slc8a1
  gRNA
gaatcggatgatctctagca

SEQ ID NO: 117137 - DNA, 20 bp, Artificial Sequence
  MKO10117137_B_Slc8a1
  gRNA
ctctccaatctcaatgaaga

SEQ ID NO: 117138 - DNA, 20 bp, Artificial Sequence
  MKO10117138_B_Slc8a2
  gRNA
tgtgcgcgtggttcgcagct

SEQ ID NO: 117139 - DNA, 20 bp, Artificial Sequence
  MKO10117139_B_Slc8a2
  gRNA
agatgcctcgcttaagccac

SEQ ID NO: 117140 - DNA, 20 bp, Artificial Sequence
  MKO10117140_B_Slc8a2
  gRNA
ccaccccaggaaaactcttc

SEQ ID NO: 117141 - DNA, 20 bp, Artificial Sequence
  MKO10117141_B_Slc8a3
  gRNA
ggagcatcttcgcctacatt

SEQ ID NO: 117142 - DNA, 20 bp, Artificial Sequence
  MKO10117142_B_Slc8a3
  gRNA
gggtccccacaaccaatgcc

SEQ ID NO: 117143 - DNA, 20 bp, Artificial Sequence
  MKO10117143_B_Slc8a3
  gRNA
gggtgaacaccccaaactag

SEQ ID NO: 117144 - DNA, 20 bp, Artificial Sequence
  MKO10117144_B_Slc8b1
  gRNA
ccaggtagcccgcctcgctg

SEQ ID NO: 117145 - DNA, 20 bp, Artificial Sequence
  MKO10117145_B_Slc8b1
  gRNA
tcacatccgccatggcagtc

SEQ ID NO: 117146 - DNA, 20 bp, Artificial Sequence
  MKO10117146_B_Slc8b1
  gRNA
ctcaccaaacagagccccga

SEQ ID NO: 117147 - DNA, 20 bp, Artificial Sequence
  MKO10117147_B_Slc9a1
  gRNA
aggggccatcgccttctcgc

SEQ ID NO: 117148 - DNA, 20 bp, Artificial Sequence
  MKO10117148_B_Slc9a1
  gRNA
agtagtgatgcgcccctatg

SEQ ID NO: 117149 - DNA, 20 bp, Artificial Sequence
  MKO10117149_B_Slc9a1
  gRNA
cgcccacaaacaccccaccg

SEQ ID NO: 117150 - DNA, 20 bp, Artificial Sequence
  MKO10117150_B_Slc9a2
  gRNA
gatgccagcaaacacgtcta

SEQ ID NO: 117151 - DNA, 20 bp, Artificial Sequence
  MKO10117151_B_Slc9a2
  gRNA
gaagcccgaccattatgaga

SEQ ID NO: 117152 - DNA, 20 bp, Artificial Sequence
  MKO10117152_B_Slc9a2
  gRNA
gaccatcccgctaaccttca

SEQ ID NO: 117153 - DNA, 20 bp, Artificial Sequence
  MKO10117153_B_Slc9a3r1
  gRNA
gtgcaaagtgatcccatccc

SEQ ID NO: 117154 - DNA, 20 bp, Artificial Sequence
  MKO10117154_B_Slc9a3r1
  gRNA
gggcaagcagcacggggacg

SEQ ID NO: 117155 - DNA, 20 bp, Artificial Sequence
  MKO10117155_B_Slc9a3r1
  gRNA
tacctcctcactggtatcgc

SEQ ID NO: 117156 - DNA, 20 bp, Artificial Sequence
  MKO10117156_B_Slc9a3r2
  gRNA
ctgccatcaccagtcacgaa

SEQ ID NO: 117157 - DNA, 20 bp, Artificial Sequence
  MKO10117157_B_Slc9a3r2
  gRNA
agactgatgaacacttcaag

SEQ ID NO: 117158 - DNA, 20 bp, Artificial Sequence
  MKO10117158_B_Slc9a3r2
  gRNA
ttcgtgactggtgatggcag

SEQ ID NO: 117159 - DNA, 20 bp, Artificial Sequence
  MKO10117159_B_Slc9a3
  gRNA
atgcccaatcgactcttctt

SEQ ID NO: 117160 - DNA, 20 bp, Artificial Sequence
  MKO10117160_B_Slc9a3
  gRNA
tggtgacgcagtgactggcg

SEQ ID NO: 117161 - DNA, 20 bp, Artificial Sequence
  MKO10117161_B_Slc9a3
  gRNA
cattgcagctgtggacccag

SEQ ID NO: 117162 - DNA, 20 bp, Artificial Sequence
  MKO10117162_B_Slc9a4
  gRNA
gtgtgccagattcgtcatcg

SEQ ID NO: 117163 - DNA, 20 bp, Artificial Sequence
  MKO10117163_B_Slc9a4
  gRNA
cgctgtagaatattatgaac

SEQ ID NO: 117164 - DNA, 20 bp, Artificial Sequence
  MKO10117164_B_Slc9a4
  gRNA
agtgaccatgaaaaagtacg

SEQ ID NO: 117165 - DNA, 20 bp, Artificial Sequence
  MKO10117165_B_Slc9a5
  gRNA
ccgcatcatcgagccgttgc

SEQ ID NO: 117166 - DNA, 20 bp, Artificial Sequence
  MKO10117166_B_Slc9a5
  gRNA
cctcccatcgtgctagactc

SEQ ID NO: 117167 - DNA, 20 bp, Artificial Sequence
  MKO10117167_B_Slc9a5
  gRNA
cgtgttggccgtctttgagg

SEQ ID NO: 117168 - DNA, 20 bp, Artificial Sequence
  MKO10117168_B_Slc9a6
  gRNA
gtcacattattcacatcgct

SEQ ID NO: 117169 - DNA, 20 bp, Artificial Sequence
  MKO10117169_B_Slc9a6
  gRNA
gcaatttcttgtttcgttat

SEQ ID NO: 117170 - DNA, 20 bp, Artificial Sequence
  MKO10117170_B_Slc9a6
  gRNA
catatgctaagatagaccca

SEQ ID NO: 117171 - DNA, 20 bp, Artificial Sequence
  MKO10117171_B_Slc9a7
  gRNA
tctttaagctgtatccagca

SEQ ID NO: 117172 - DNA, 20 bp, Artificial Sequence
  MKO10117172_B_Slc9a7
  gRNA
gctgtttcttgcttcattat

SEQ ID NO: 117173 - DNA, 20 bp, Artificial Sequence
  MKO10117173_B_Slc9a7
  gRNA
tcttacagaaatcttatgta

SEQ ID NO: 117174 - DNA, 20 bp, Artificial Sequence
  MKO10117174_B_Slc9a8
  gRNA
tatcctgactcaaagataat

SEQ ID NO: 117175 - DNA, 20 bp, Artificial Sequence
  MKO10117175_B_Slc9a8
  gRNA
tttccttccaggtattctca

SEQ ID NO: 117176 - DNA, 20 bp, Artificial Sequence
  MKO10117176_B_Slc9a8
  gRNA
agttatagagtttaaaaagc

SEQ ID NO: 117177 - DNA, 20 bp, Artificial Sequence
  MKO10117177_B_Slc9a9
  gRNA
cctcccatcatatttcatgc

SEQ ID NO: 117178 - DNA, 20 bp, Artificial Sequence
  MKO10117178_B_Slc9a9
  gRNA
gtatcctgcatgaaatatga

SEQ ID NO: 117179 - DNA, 20 bp, Artificial Sequence
  MKO10117179_B_Slc9a9
  gRNA
ctgatgtctgctacagatcc

SEQ ID NO: 117180 - DNA, 20 bp, Artificial Sequence
  MKO10117180_B_Slc9b1
  gRNA
actctactctgggcccttat

SEQ ID NO: 117181 - DNA, 20 bp, Artificial Sequence
  MKO10117181_B_Slc9b1
  gRNA
accaaaggaaccagaaccga

SEQ ID NO: 117182 - DNA, 20 bp, Artificial Sequence
  MKO10117182_B_Slc9b1
  gRNA
aatagttactgtcctccaca

SEQ ID NO: 117183 - DNA, 20 bp, Artificial Sequence
  MKO10117183_B_Slc9b2
  gRNA
agcacacgcctccacgatgc

SEQ ID NO: 117184 - DNA, 20 bp, Artificial Sequence
  MKO10117184_B_Slc9b2
  gRNA
atggcaatgggggttcatcc

SEQ ID NO: 117185 - DNA, 20 bp, Artificial Sequence
  MKO10117185_B_Slc9b2
  gRNA
gccggtaactgaccaaacca

SEQ ID NO: 117186 - DNA, 20 bp, Artificial Sequence
  MKO10117186_B_Slc9c1
  gRNA
tcagcctccataagagacct

SEQ ID NO: 117187 - DNA, 20 bp, Artificial Sequence
  MKO10117187_B_Slc9c1
  gRNA
aacaccactatatataacta

SEQ ID NO: 117188 - DNA, 20 bp, Artificial Sequence
  MKO10117188_B_Slc9c1
  gRNA
ctccattaattaaatttgtg

SEQ ID NO: 117189 - DNA, 20 bp, Artificial Sequence
  MKO10117189_B_Slco1a1
  gRNA
caacctgttggatcttgcgt

SEQ ID NO: 117190 - DNA, 20 bp, Artificial Sequence
  MKO10117190_B_Slco1a1
  gRNA
aagccaacgcaagatccaac

SEQ ID NO: 117191 - DNA, 20 bp, Artificial Sequence
  MKO10117191_B_Slco1a1
  gRNA
tggatgtgtggttatgggcc

SEQ ID NO: 117192 - DNA, 20 bp, Artificial Sequence
  MKO10117192_B_Slco1a4
  gRNA
cgtacacacaaagctatttg

SEQ ID NO: 117193 - DNA, 20 bp, Artificial Sequence
  MKO10117193_B_Slco1a4
  gRNA
tctgtagttgggcttatcaa

SEQ ID NO: 117194 - DNA, 20 bp, Artificial Sequence
  MKO10117194_B_Slco1a4
  gRNA
aagccaacgcaagacccaac

SEQ ID NO: 117195 - DNA, 20 bp, Artificial Sequence
  MKO10117195_B_Slco1a5
  gRNA
ctggtaggaaacatcatacg

SEQ ID NO: 117196 - DNA, 20 bp, Artificial Sequence
  MKO10117196_B_Slco1a5
  gRNA
caacctgcagggtcttgcgt

SEQ ID NO: 117197 - DNA, 20 bp, Artificial Sequence
  MKO10117197_B_Slco1a5
  gRNA
tatgtatccaaatcactctc

SEQ ID NO: 117198 - DNA, 20 bp, Artificial Sequence
  MKO10117198_B_Slco1a6
  gRNA
tatatatccaaaatactatc

SEQ ID NO: 117199 - DNA, 20 bp, Artificial Sequence
  MKO10117199_B_Slco1a6
  gRNA
tttggcaaagtcttctatat

SEQ ID NO: 117200 - DNA, 20 bp, Artificial Sequence
  MKO10117200_B_Slco1a6
  gRNA
caacctgctgggtcttgtgt

SEQ ID NO: 117201 - DNA, 20 bp, Artificial Sequence
  MKO10117201_B_Slco1b2
  gRNA
tgcgttgccacatttcttca

SEQ ID NO: 117202 - DNA, 20 bp, Artificial Sequence
  MKO10117202_B_Slco1b2
  gRNA
tgtagtttgattgactaaac

SEQ ID NO: 117203 - DNA, 20 bp, Artificial Sequence
  MKO10117203_B_Slco1b2
  gRNA
ctcattcagctacatatgca

SEQ ID NO: 117204 - DNA, 20 bp, Artificial Sequence
  MKO10117204_B_Slco1c1
  gRNA
taggcgtctcccctaaccct

SEQ ID NO: 117205 - DNA, 20 bp, Artificial Sequence
  MKO10117205_B_Slco1c1
  gRNA
tccatcaccaagctcaatcc

SEQ ID NO: 117206 - DNA, 20 bp, Artificial Sequence
  MKO10117206_B_Slco1c1
  gRNA
tgagcttggtgatggactgc

SEQ ID NO: 117207 - DNA, 20 bp, Artificial Sequence
  MKO10117207_B_Slco2a1
  gRNA
aatgggcaccgtcccaacgc

SEQ ID NO: 117208 - DNA, 20 bp, Artificial Sequence
  MKO10117208_B_Slco2a1
  gRNA
cccaaagcgcttctcgatag

SEQ ID NO: 117209 - DNA, 20 bp, Artificial Sequence
  MKO10117209_B_Slco2a1
  gRNA
ttatttgctatcgccgtgtt

SEQ ID NO: 117210 - DNA, 20 bp, Artificial Sequence
  MKO10117210_B_Slco2b1
  gRNA
ctggagccatagtcgtgggc

SEQ ID NO: 117211 - DNA, 20 bp, Artificial Sequence
  MKO10117211_B_Slco2b1
  gRNA
gctgcagtagactgtgacat

SEQ ID NO: 117212 - DNA, 20 bp, Artificial Sequence
  MKO10117212_B_Slco2b1
  gRNA
cgggatgttccacaacatca

SEQ ID NO: 117213 - DNA, 20 bp, Artificial Sequence
  MKO10117213_B_Slco3a1
  gRNA
gtctgagtgcgccttgatgc

SEQ ID NO: 117214 - DNA, 20 bp, Artificial Sequence
  MKO10117214_B_Slco3a1
  gRNA
aggaatcctgttcacgatgt

SEQ ID NO: 117215 - DNA, 20 bp, Artificial Sequence
  MKO10117215_B_Slco3a1
  gRNA
tcactccagatgacccgcgt

SEQ ID NO: 117216 - DNA, 20 bp, Artificial Sequence
  MKO10117216_B_Slco4a1
  gRNA
gcgctacgttgttatgagag

SEQ ID NO: 117217 - DNA, 20 bp, Artificial Sequence
  MKO10117217_B_Slco4a1
  gRNA
ttctgtgtaaacgtttagca

SEQ ID NO: 117218 - DNA, 20 bp, Artificial Sequence
  MKO10117218_B_Slco4a1
  gRNA
atgcagcaatcccggttcct

SEQ ID NO: 117219 - DNA, 20 bp, Artificial Sequence
  MKO10117219_B_Slco4c1
  gRNA
ttatagttcggatctgactg

SEQ ID NO: 117220 - DNA, 20 bp, Artificial Sequence
  MKO10117220_B_Slco4c1
  gRNA
atccccggtggctgggggct

SEQ ID NO: 117221 - DNA, 20 bp, Artificial Sequence
  MKO10117221_B_Slco4c1
  gRNA
acaaagatacgtgcttaaca

SEQ ID NO: 117222 - DNA, 20 bp, Artificial Sequence
  MKO10117222_B_Slco5a1
  gRNA
cagagtgaccctcgtttcat

SEQ ID NO: 117223 - DNA, 20 bp, Artificial Sequence
  MKO10117223_B_Slco5a1
  gRNA
caccagtttccgatgaaacg

SEQ ID NO: 117224 - DNA, 20 bp, Artificial Sequence
  MKO10117224_B_Slco5a1
  gRNA
acaataccaacaccggcact

SEQ ID NO: 117225 - DNA, 20 bp, Artificial Sequence
  MKO10117225_B_Slco6b1
  gRNA
cataaatataggttacacca

SEQ ID NO: 117226 - DNA, 20 bp, Artificial Sequence
  MKO10117226_B_Slco6b1
  gRNA
ctgaagagactgcccgatga

SEQ ID NO: 117227 - DNA, 20 bp, Artificial Sequence
  MKO10117227_B_Slco6b1
  gRNA
tccgaactgtgattaaatga

SEQ ID NO: 117228 - DNA, 20 bp, Artificial Sequence
  MKO10117228_B_Slco6c1
  gRNA
atagaagccgcatgaacttg

SEQ ID NO: 117229 - DNA, 20 bp, Artificial Sequence
  MKO10117229_B_Slco6c1
  gRNA
tgtaccaactgttgcagagt

SEQ ID NO: 117230 - DNA, 20 bp, Artificial Sequence
  MKO10117230_B_Slco6c1
  gRNA
gcaataattatagcacactt

SEQ ID NO: 117231 - DNA, 20 bp, Artificial Sequence
  MKO10117231_B_Slco6d1
  gRNA
ttatttaaaagagttgtgcg

SEQ ID NO: 117232 - DNA, 20 bp, Artificial Sequence
  MKO10117232_B_Slco6d1
  gRNA
tcgaaaatacaaagatccct

SEQ ID NO: 117233 - DNA, 20 bp, Artificial Sequence
  MKO10117233_B_Slco6d1
  gRNA
cacgttcccacaaactcatc

SEQ ID NO: 117234 - DNA, 20 bp, Artificial Sequence
  MKO10117234_B_Slfn14
  gRNA
acaccgcccttcagttaaag

SEQ ID NO: 117235 - DNA, 20 bp, Artificial Sequence
  MKO10117235_B_Slfn14
  gRNA
gagcctcctggaacgttgcc

SEQ ID NO: 117236 - DNA, 20 bp, Artificial Sequence
  MKO10117236_B_Slfn14
  gRNA
agcgtatctcacaaaagtcc

SEQ ID NO: 117237 - DNA, 20 bp, Artificial Sequence
  MKO10117237_B_Slfn1
  gRNA
ttcatcgaagtccacgattc

SEQ ID NO: 117238 - DNA, 20 bp, Artificial Sequence
  MKO10117238_B_Slfn1
  gRNA
aaaatgaacatcaccgatga

SEQ ID NO: 117239 - DNA, 20 bp, Artificial Sequence
  MKO10117239_B_Slfn1
  gRNA
acctgactagctaagacatg

SEQ ID NO: 117240 - DNA, 20 bp, Artificial Sequence
  MKO10117240_B_Slfn2
  gRNA
ttacttacctctgagttctg

SEQ ID NO: 117241 - DNA, 20 bp, Artificial Sequence
  MKO10117241_B_Slfn2
  gRNA
cttcgctctccgtgaagtcc

SEQ ID NO: 117242 - DNA, 20 bp, Artificial Sequence
  MKO10117242_B_Slfn2
  gRNA
ctccagatgaatgccccatc

SEQ ID NO: 117243 - DNA, 20 bp, Artificial Sequence
  MKO10117243_B_Slfn3
  gRNA
taaccagtgttcctttaagc

SEQ ID NO: 117244 - DNA, 20 bp, Artificial Sequence
  MKO10117244_B_Slfn3
  gRNA
cagtgcagctcctcaaatcc

SEQ ID NO: 117245 - DNA, 20 bp, Artificial Sequence
  MKO10117245_B_Slfn3
  gRNA
ccattgaagccgaatcagaa

SEQ ID NO: 117246 - DNA, 20 bp, Artificial Sequence
  MKO10117246_B_Slfn4
  gRNA
tgtggttacactgcgaaaat

SEQ ID NO: 117247 - DNA, 20 bp, Artificial Sequence
  MKO10117247_B_Slfn4
  gRNA
gatttggtaaatcccttgcc

SEQ ID NO: 117248 - DNA, 20 bp, Artificial Sequence
  MKO10117248_B_Slfn4
  gRNA
cgccatccatcttcctcgct

SEQ ID NO: 117249 - DNA, 20 bp, Artificial Sequence
  MKO10117249_B_Slfn5
  gRNA
ctactatcgatgcctgtatc

SEQ ID NO: 117250 - DNA, 20 bp, Artificial Sequence
  MKO10117250_B_Slfn5
  gRNA
tacaggattggaacgttgtt

SEQ ID NO: 117251 - DNA, 20 bp, Artificial Sequence
  MKO10117251_B_Slfn5
  gRNA
gtcctctgtaatctgcgaag

SEQ ID NO: 117252 - DNA, 20 bp, Artificial Sequence
  MKO10117252_B_Slfn8
  gRNA
cagaacaatattgagaccaa

SEQ ID NO: 117253 - DNA, 20 bp, Artificial Sequence
  MKO10117253_B_Slfn8
  gRNA
cagggcaaaaagaatctgcc

SEQ ID NO: 117254 - DNA, 20 bp, Artificial Sequence
  MKO10117254_B_Slfn8
  gRNA
agaccagtgtattctaaaaa

SEQ ID NO: 117255 - DNA, 20 bp, Artificial Sequence
  MKO10117255_B_Slfn9
  gRNA
tttgcaaggttataggagct

SEQ ID NO: 117256 - DNA, 20 bp, Artificial Sequence
  MKO10117256_B_Slfn9
  gRNA
agaatatttagggactcttg

SEQ ID NO: 117257 - DNA, 20 bp, Artificial Sequence
  MKO10117257_B_Slfn9
  gRNA
cgaggaatgaaaaactgtcc

SEQ ID NO: 117258 - DNA, 20 bp, Artificial Sequence
  MKO10117258_B_Slfnl1
  gRNA
tgctaaggtactccgcctga

SEQ ID NO: 117259 - DNA, 20 bp, Artificial Sequence
  MKO10117259_B_Slfnl1
  gRNA
gtcctcgcagaagtgggcga

SEQ ID NO: 117260 - DNA, 20 bp, Artificial Sequence
  MKO10117260_B_Slfnl1
  gRNA
ttgaggtagtgaggcggcca

SEQ ID NO: 117261 - DNA, 20 bp, Artificial Sequence
  MKO10117261_B_Slirp
  gRNA
cgttcaagctcaaagagcaa

SEQ ID NO: 117262 - DNA, 20 bp, Artificial Sequence
  MKO10117262_B_Slirp
  gRNA
gtacagtgcaccttcttaca

SEQ ID NO: 117263 - DNA, 20 bp, Artificial Sequence
  MKO10117263_B_Slirp
  gRNA
ctttcacagaggcatgggtt

SEQ ID NO: 117264 - DNA, 20 bp, Artificial Sequence
  MKO10117264_B_Slit1
  gRNA
ggctccccgaaaagccttcc

SEQ ID NO: 117265 - DNA, 20 bp, Artificial Sequence
  MKO10117265_B_Slit1
  gRNA
ctcacagtctggatagagcc

SEQ ID NO: 117266 - DNA, 20 bp, Artificial Sequence
  MKO10117266_B_Slit1
  gRNA
ttgttctggaacagtagttc

SEQ ID NO: 117267 - DNA, 20 bp, Artificial Sequence
  MKO10117267_B_Slit2
  gRNA
attccaggatcttaaggagc

SEQ ID NO: 117268 - DNA, 20 bp, Artificial Sequence
  MKO10117268_B_Slit2
  gRNA
atcaaattcaagcaattcca

SEQ ID NO: 117269 - DNA, 20 bp, Artificial Sequence
  MKO10117269_B_Slit2
  gRNA
aacacacttacagaactctg

SEQ ID NO: 117270 - DNA, 20 bp, Artificial Sequence
  MKO10117270_B_Slit3
  gRNA
tggacagaaataacatcacc

SEQ ID NO: 117271 - DNA, 20 bp, Artificial Sequence
  MKO10117271_B_Slit3
  gRNA
acaagactcgaagattcttc

SEQ ID NO: 117272 - DNA, 20 bp, Artificial Sequence
  MKO10117272_B_Slit3
  gRNA
actcacagtctggtgagctt

SEQ ID NO: 117273 - DNA, 20 bp, Artificial Sequence
  MKO10117273_B_Slitrk1
  gRNA
tggtctgcgaagcccccacc

SEQ ID NO: 117274 - DNA, 20 bp, Artificial Sequence
  MKO10117274_B_Slitrk1
  gRNA
gcgagatcctcgcatacagc

SEQ ID NO: 117275 - DNA, 20 bp, Artificial Sequence
  MKO10117275_B_Slitrk1
  gRNA
tttactgtgcgaagttaacg

SEQ ID NO: 117276 - DNA, 20 bp, Artificial Sequence
  MKO10117276_B_Slitrk2
  gRNA
gctgaatgcccctgcctcga

SEQ ID NO: 117277 - DNA, 20 bp, Artificial Sequence
  MKO10117277_B_Slitrk2
  gRNA
acagctgatagatgcgatac

SEQ ID NO: 117278 - DNA, 20 bp, Artificial Sequence
  MKO10117278_B_Slitrk2
  gRNA
tgcggtttagcttgcagtaa

SEQ ID NO: 117279 - DNA, 20 bp, Artificial Sequence
  MKO10117279_B_Slitrk3
  gRNA
ccccatctataagcctcgag

SEQ ID NO: 117280 - DNA, 20 bp, Artificial Sequence
  MKO10117280_B_Slitrk3
  gRNA
taccccaattcccctgatag

SEQ ID NO: 117281 - DNA, 20 bp, Artificial Sequence
  MKO10117281_B_Slitrk3
  gRNA
tctttaacttcgcagtagca

SEQ ID NO: 117282 - DNA, 20 bp, Artificial Sequence
  MKO10117282_B_Slitrk4
  gRNA
tgatcaagtactccgctgac

SEQ ID NO: 117283 - DNA, 20 bp, Artificial Sequence
  MKO10117283_B_Slitrk4
  gRNA
cccccaggaggacttcgaat

SEQ ID NO: 117284 - DNA, 20 bp, Artificial Sequence
  MKO10117284_B_Slitrk4
  gRNA
ttaatcaagtatattgaacg

SEQ ID NO: 117285 - DNA, 20 bp, Artificial Sequence
  MKO10117285_B_Slitrk5
  gRNA
aatactgatgggggcgtcgc

SEQ ID NO: 117286 - DNA, 20 bp, Artificial Sequence
  MKO10117286_B_Slitrk5
  gRNA
cggaattgccttctcgagac

SEQ ID NO: 117287 - DNA, 20 bp, Artificial Sequence
  MKO10117287_B_Slitrk5
  gRNA
cccgcgggagtcttcacctt

SEQ ID NO: 117288 - DNA, 20 bp, Artificial Sequence
  MKO10117288_B_Slitrk6
  gRNA
tccaattggaggacaataag

SEQ ID NO: 117289 - DNA, 20 bp, Artificial Sequence
  MKO10117289_B_Slitrk6
  gRNA
accagtatacgaagagcatg

SEQ ID NO: 117290 - DNA, 20 bp, Artificial Sequence
  MKO10117290_B_Slitrk6
  gRNA
agaacacattggccggatat

SEQ ID NO: 117291 - DNA, 20 bp, Artificial Sequence
  MKO10117291_B_Slk
  gRNA
tctagaagcttgacgatgtt

SEQ ID NO: 117292 - DNA, 20 bp, Artificial Sequence
  MKO10117292_B_Slk
  gRNA
cccctgcacagaattcaatg

SEQ ID NO: 117293 - DNA, 20 bp, Artificial Sequence
  MKO10117293_B_Slk
  gRNA
atccaccgagatctaaaagc

SEQ ID NO: 117294 - DNA, 20 bp, Artificial Sequence
  MKO10117294_B_Slmap
  gRNA
agttcctgagagtacatact

SEQ ID NO: 117295 - DNA, 20 bp, Artificial Sequence
  MKO10117295_B_Slmap
  gRNA
tcacaacttactttgtctac

SEQ ID NO: 117296 - DNA, 20 bp, Artificial Sequence
  MKO10117296_B_Slmap
  gRNA
cactccaagtatgtactctc

SEQ ID NO: 117297 - DNA, 20 bp, Artificial Sequence
  MKO10117297_B_Slmo1
  gRNA
aaagatcacgctcacgaatc

SEQ ID NO: 117298 - DNA, 20 bp, Artificial Sequence
  MKO10117298_B_Slmo1
  gRNA
gcgctctttgatgtacgtca

SEQ ID NO: 117299 - DNA, 20 bp, Artificial Sequence
  MKO10117299_B_Slmo1
  gRNA
ggcgttcaccttcttagcat

SEQ ID NO: 117300 - DNA, 20 bp, Artificial Sequence
  MKO10117300_B_Slmo2
  gRNA
ctgtagttgacccggtaacg

SEQ ID NO: 117301 - DNA, 20 bp, Artificial Sequence
  MKO10117301_B_Slmo2
  gRNA
tgcttgccatgagtccttcc

SEQ ID NO: 117302 - DNA, 20 bp, Artificial Sequence
  MKO10117302_B_Slmo2
  gRNA
tgacccctttcactgtgatg

SEQ ID NO: 117303 - DNA, 20 bp, Artificial Sequence
  MKO10117303_B_Sln
  gRNA
acctcacgaggagccacata

SEQ ID NO: 117304 - DNA, 20 bp, Artificial Sequence
  MKO10117304_B_Sln
  gRNA
catggcccctcagtattggt

SEQ ID NO: 117305 - DNA, 20 bp, Artificial Sequence
  MKO10117305_B_Slpi
  gRNA
gtctgcctgcccccgatgtg

SEQ ID NO: 117306 - DNA, 20 bp, Artificial Sequence
  MKO10117306_B_Slpi
  gRNA
cgtgaaaggtaaaaggccgc

SEQ ID NO: 117307 - DNA, 20 bp, Artificial Sequence
  MKO10117307_B_Slpi
  gRNA
tttcacggtgctccttgctc

SEQ ID NO: 117308 - DNA, 20 bp, Artificial Sequence
  MKO10117308_B_Sltm
  gRNA
ccattaaaaggactgtgaat

SEQ ID NO: 117309 - DNA, 20 bp, Artificial Sequence
  MKO10117309_B_Sltm
  gRNA
cttctgtagaaagcaactcc

SEQ ID NO: 117310 - DNA, 20 bp, Artificial Sequence
  MKO10117310_B_Sltm
  gRNA
caagaagcagatgagttgag

SEQ ID NO: 117311 - DNA, 20 bp, Artificial Sequence
  MKO10117311_B_Slu7
  gRNA
ctgcaagaagagttagcctc

SEQ ID NO: 117312 - DNA, 20 bp, Artificial Sequence
  MKO10117312_B_Slu7
  gRNA
agagcacatgaagattgtcg

SEQ ID NO: 117313 - DNA, 20 bp, Artificial Sequence
  MKO10117313_B_Slu7
  gRNA
tttgatggatcaatgtacca

SEQ ID NO: 117314 - DNA, 20 bp, Artificial Sequence
  MKO10117314_B_Slurp1
  gRNA
actgaagaatgacccttcgc

SEQ ID NO: 117315 - DNA, 20 bp, Artificial Sequence
  MKO10117315_B_Slurp1
  gRNA
cacagcctgtaagactgtac

SEQ ID NO: 117316 - DNA, 20 bp, Artificial Sequence
  MKO10117316_B_Slurp1
  gRNA
ctcaccatagcccatgctcc

SEQ ID NO: 117317 - DNA, 20 bp, Artificial Sequence
  MKO10117317_B_Slx1b
  gRNA
cgtctgctgtggccgccctt

SEQ ID NO: 117318 - DNA, 20 bp, Artificial Sequence
  MKO10117318_B_Slx1b
  gRNA
acctaggacaatgtccctct

SEQ ID NO: 117319 - DNA, 20 bp, Artificial Sequence
  MKO10117319_B_Slx1b
  gRNA
cccttaggggacaaccaggg

SEQ ID NO: 117320 - DNA, 20 bp, Artificial Sequence
  MKO10117320_B_Slx4ip
  gRNA
atccagaactcccagaatac

SEQ ID NO: 117321 - DNA, 20 bp, Artificial Sequence
  MKO10117321_B_Slx4ip
  gRNA
gtgtgggaacttcgcagtcc

SEQ ID NO: 117322 - DNA, 20 bp, Artificial Sequence
  MKO10117322_B_Slx4ip
  gRNA
cttctgttcagaaaaccaac

SEQ ID NO: 117323 - DNA, 20 bp, Artificial Sequence
  MKO10117323_B_Slx4
  gRNA
atccctgattgcccaatatg

SEQ ID NO: 117324 - DNA, 20 bp, Artificial Sequence
  MKO10117324_B_Slx4
  gRNA
tgttcacatgttgctccctc

SEQ ID NO: 117325 - DNA, 20 bp, Artificial Sequence
  MKO10117325_B_Slx4
  gRNA
agatcttcagacggagcctc

SEQ ID NO: 117326 - DNA, 20 bp, Artificial Sequence
  MKO10117326_B_Slxl1
  gRNA
gaaattcctgaagaaatcgt

SEQ ID NO: 117327 - DNA, 20 bp, Artificial Sequence
  MKO10117327_B_Slxl1
  gRNA
cttgctgttcattgaaattc

SEQ ID NO: 117328 - DNA, 20 bp, Artificial Sequence
  MKO10117328_B_Slxl1
  gRNA
tacatttcagaagtttgata

SEQ ID NO: 117329 - DNA, 20 bp, Artificial Sequence
  MKO10117329_B_Slx
  gRNA
tcttcatctgcttctacgtg

SEQ ID NO: 117330 - DNA, 20 bp, Artificial Sequence
  MKO10117330_B_Slx
  gRNA
agatgaacaagacagtatgt

SEQ ID NO: 117331 - DNA, 20 bp, Artificial Sequence
  MKO10117331_B_Slx
  gRNA
agaaaacgtaagtttctcag

SEQ ID NO: 117332 - DNA, 20 bp, Artificial Sequence
  MKO10117332_B_Sly
  gRNA
agcagaagcagatgaagata

SEQ ID NO: 117333 - DNA, 20 bp, Artificial Sequence
  MKO10117333_B_Sly
  gRNA
agatgaagtagacagtatgt

SEQ ID NO: 117334 - DNA, 20 bp, Artificial Sequence
  MKO10117334_B_Sly
  gRNA
acagtaaataatccagcaat

SEQ ID NO: 117335 - DNA, 20 bp, Artificial Sequence
  MKO10117335_B_Smad1
  gRNA
cgtggaacgcttcacccaca

SEQ ID NO: 117336 - DNA, 20 bp, Artificial Sequence
  MKO10117336_B_Smad1
  gRNA
cgccatcatgttcgtgtcca

SEQ ID NO: 117337 - DNA, 20 bp, Artificial Sequence
  MKO10117337_B_Smad1
  gRNA
ctgtgcctcggaaccagcac

SEQ ID NO: 117338 - DNA, 20 bp, Artificial Sequence
  MKO10117338_B_Smad2
  gRNA
tgccacatgttatatattgc

SEQ ID NO: 117339 - DNA, 20 bp, Artificial Sequence
  MKO10117339_B_Smad2
  gRNA
acttacctgtgtccatactt

SEQ ID NO: 117340 - DNA, 20 bp, Artificial Sequence
  MKO10117340_B_Smad2
  gRNA
cagcaaatacggtagatcag

SEQ ID NO: 117341 - DNA, 20 bp, Artificial Sequence
  MKO10117341_B_Smad3
  gRNA
gccacgccacaccgagatcc

SEQ ID NO: 117342 - DNA, 20 bp, Artificial Sequence
  MKO10117342_B_Smad3
  gRNA
atcggattcggggagaggtt

SEQ ID NO: 117343 - DNA, 20 bp, Artificial Sequence
  MKO10117343_B_Smad3
  gRNA
gtccccagcacacaataact

SEQ ID NO: 117344 - DNA, 20 bp, Artificial Sequence
  MKO10117344_B_Smad4
  gRNA
agacgggcatagatcacatg

SEQ ID NO: 117345 - DNA, 20 bp, Artificial Sequence
  MKO10117345_B_Smad4
  gRNA
ctgcccgccagaatactggc

SEQ ID NO: 117346 - DNA, 20 bp, Artificial Sequence
  MKO10117346_B_Smad4
  gRNA
aggtcagccggccagtattc

SEQ ID NO: 117347 - DNA, 20 bp, Artificial Sequence
  MKO10117347_B_Smad5
  gRNA
tatgaattaaacaatcgtgt

SEQ ID NO: 117348 - DNA, 20 bp, Artificial Sequence
  MKO10117348_B_Smad5
  gRNA
gtggcatgtgcggttcattg

SEQ ID NO: 117349 - DNA, 20 bp, Artificial Sequence
  MKO10117349_B_Smad5
  gRNA
tgttcagcctgtcgcctatg

SEQ ID NO: 117350 - DNA, 20 bp, Artificial Sequence
  MKO10117350_B_Smad6
  gRNA
gtggcaccttgcgcacgacc

SEQ ID NO: 117351 - DNA, 20 bp, Artificial Sequence
  MKO10117351_B_Smad6
  gRNA
tcctgaccagtacaagccac

SEQ ID NO: 117352 - DNA, 20 bp, Artificial Sequence
  MKO10117352_B_Smad6
  gRNA
acttacccagtggcttgtac

SEQ ID NO: 117353 - DNA, 20 bp, Artificial Sequence
  MKO10117353_B_Smad7
  gRNA
ggccagataattcgttcccc

SEQ ID NO: 117354 - DNA, 20 bp, Artificial Sequence
  MKO10117354_B_Smad7
  gRNA
cttcatcaagtccgccacac

SEQ ID NO: 117355 - DNA, 20 bp, Artificial Sequence
  MKO10117355_B_Smad7
  gRNA
aaccgggggaacgaattatc

SEQ ID NO: 117356 - DNA, 20 bp, Artificial Sequence
  MKO10117356_B_Smad9
  gRNA
ctcgcccagtccgtgcacca

SEQ ID NO: 117357 - DNA, 20 bp, Artificial Sequence
  MKO10117357_B_Smad9
  gRNA
gggagcagagtatcatcgcc

SEQ ID NO: 117358 - DNA, 20 bp, Artificial Sequence
  MKO10117358_B_Smad9
  gRNA
aggtggcgttgtgcggcatg

SEQ ID NO: 117359 - DNA, 20 bp, Artificial Sequence
  MKO10117359_B_Smagp
  gRNA
gttcctcaccctgctctcgg

SEQ ID NO: 117360 - DNA, 20 bp, Artificial Sequence
  MKO10117360_B_Smagp
  gRNA
agcaacgatgaacaacctac

SEQ ID NO: 117361 - DNA, 20 bp, Artificial Sequence
  MKO10117361_B_Smagp
  gRNA
catcacctaccttcaggaga

SEQ ID NO: 117362 - DNA, 20 bp, Artificial Sequence
  MKO10117362_B_Smap1
  gRNA
aaaggatactgatctgtctg

SEQ ID NO: 117363 - DNA, 20 bp, Artificial Sequence
  MKO10117363_B_Smap1
  gRNA
gcctgcaaaaccactaacaa

SEQ ID NO: 117364 - DNA, 20 bp, Artificial Sequence
  MKO10117364_B_Smap1
  gRNA
gaaagaaaaggaaaaaaaaa

SEQ ID NO: 117365 - DNA, 20 bp, Artificial Sequence
  MKO10117365_B_Smap2
  gRNA
ccgaaaggtctcgggaaggt

SEQ ID NO: 117366 - DNA, 20 bp, Artificial Sequence
  MKO10117366_B_Smap2
  gRNA
aaaagatacgggtctatctg

SEQ ID NO: 117367 - DNA, 20 bp, Artificial Sequence
  MKO10117367_B_Smap2
  gRNA
gtctggacatcaatgtcctt

SEQ ID NO: 117368 - DNA, 20 bp, Artificial Sequence
  MKO10117368_B_Smarca1
  gRNA
gaatgtgtgtgtcagattcg

SEQ ID NO: 117369 - DNA, 20 bp, Artificial Sequence
  MKO10117369_B_Smarca1
  gRNA
aaatcaaccagtttagtcct

SEQ ID NO: 117370 - DNA, 20 bp, Artificial Sequence
  MKO10117370_B_Smarca1
  gRNA
gcagcaagtttgagttgaaa

SEQ ID NO: 117371 - DNA, 20 bp, Artificial Sequence
  MKO10117371_B_Smarca2
  gRNA
cactcttaaacactgactgt

SEQ ID NO: 117372 - DNA, 20 bp, Artificial Sequence
  MKO10117372_B_Smarca2
  gRNA
ttcatctgcttcgttagttt

SEQ ID NO: 117373 - DNA, 20 bp, Artificial Sequence
  MKO10117373_B_Smarca2
  gRNA
ctaattaattcatagtattc

SEQ ID NO: 117374 - DNA, 20 bp, Artificial Sequence
  MKO10117374_B_Smarca4
  gRNA
ggtgtgccccccgggatgcc

SEQ ID NO: 117375 - DNA, 20 bp, Artificial Sequence
  MKO10117375_B_Smarca4
  gRNA
catcccggggggcacacctg

SEQ ID NO: 117376 - DNA, 20 bp, Artificial Sequence
  MKO10117376_B_Smarca4
  gRNA
atgcggtcaggggcccacac

SEQ ID NO: 117377 - DNA, 20 bp, Artificial Sequence
  MKO10117377_B_Smarca5
  gRNA
cctcctcttgctccgttcta

SEQ ID NO: 117378 - DNA, 20 bp, Artificial Sequence
  MKO10117378_B_Smarca5
  gRNA
tcctacatatgaagaaaaaa

SEQ ID NO: 117379 - DNA, 20 bp, Artificial Sequence
  MKO10117379_B_Smarca5
  gRNA
tcacccttgaagatgaaacc

SEQ ID NO: 117380 - DNA, 20 bp, Artificial Sequence
  MKO10117380_B_Smarcad1
  gRNA
aagtgacagtgatcttctaa

SEQ ID NO: 117381 - DNA, 20 bp, Artificial Sequence
  MKO10117381_B_Smarcad1
  gRNA
gattgaatcaacaagcacta

SEQ ID NO: 117382 - DNA, 20 bp, Artificial Sequence
  MKO10117382_B_Smarcad1
  gRNA
ccaaaatcaaagagcaatac

SEQ ID NO: 117383 - DNA, 20 bp, Artificial Sequence
  MKO10117383_B_Smarcal1
  gRNA
tcattgcagatatcaagacc

SEQ ID NO: 117384 - DNA, 20 bp, Artificial Sequence
  MKO10117384_B_Smarcal1
  gRNA
ctagcctcatgccctttcag

SEQ ID NO: 117385 - DNA, 20 bp, Artificial Sequence
  MKO10117385_B_Smarcal1
  gRNA
gtcgctcatgctgaagtccc

SEQ ID NO: 117386 - DNA, 20 bp, Artificial Sequence
  MKO10117386_B_Smarcb1
  gRNA
cagagcccccgacctacctc

SEQ ID NO: 117387 - DNA, 20 bp, Artificial Sequence
  MKO10117387_B_Smarcb1
  gRNA
agatcatggatataccaccc

SEQ ID NO: 117388 - DNA, 20 bp, Artificial Sequence
  MKO10117388_B_Smarcb1
  gRNA
tcttcttgtcccgacccatg

SEQ ID NO: 117389 - DNA, 20 bp, Artificial Sequence
  MKO10117389_B_Smarcc1
  gRNA
gccaacttcaaatcaatgtc

SEQ ID NO: 117390 - DNA, 20 bp, Artificial Sequence
  MKO10117390_B_Smarcc1
  gRNA
acaggtagtttggtgaaagc

SEQ ID NO: 117391 - DNA, 20 bp, Artificial Sequence
  MKO10117391_B_Smarcc1
  gRNA
ggcaccttgtgtcacattct

SEQ ID NO: 117392 - DNA, 20 bp, Artificial Sequence
  MKO10117392_B_Smarcc2
  gRNA
ctcaccggcagtttagtaag

SEQ ID NO: 117393 - DNA, 20 bp, Artificial Sequence
  MKO10117393_B_Smarcc2
  gRNA
tttccagaatccatcacgca

SEQ ID NO: 117394 - DNA, 20 bp, Artificial Sequence
  MKO10117394_B_Smarcc2
  gRNA
ctggtcactcttgaatttgt

SEQ ID NO: 117395 - DNA, 20 bp, Artificial Sequence
  MKO10117395_B_Smarcd1
  gRNA
taccttgatgggacgtttca

SEQ ID NO: 117396 - DNA, 20 bp, Artificial Sequence
  MKO10117396_B_Smarcd1
  gRNA
cggctacctggcagcatacc

SEQ ID NO: 117397 - DNA, 20 bp, Artificial Sequence
  MKO10117397_B_Smarcd1
  gRNA
gggaacccttcagtccgacc

SEQ ID NO: 117398 - DNA, 20 bp, Artificial Sequence
  MKO10117398_B_Smarcd2
  gRNA
cctcctgccggttccccatt

SEQ ID NO: 117399 - DNA, 20 bp, Artificial Sequence
  MKO10117399_B_Smarcd2
  gRNA
attatctccatccgccttgc

SEQ ID NO: 117400 - DNA, 20 bp, Artificial Sequence
  MKO10117400_B_Smarcd2
  gRNA
ctcctgggagcttcgagtag

SEQ ID NO: 117401 - DNA, 20 bp, Artificial Sequence
  MKO10117401_B_Smarcd3
  gRNA
atcaaaccatcatgcggaag

SEQ ID NO: 117402 - DNA, 20 bp, Artificial Sequence
  MKO10117402_B_Smarcd3
  gRNA
cttcgcagggttaaaagtat

SEQ ID NO: 117403 - DNA, 20 bp, Artificial Sequence
  MKO10117403_B_Smarcd3
  gRNA
ccatcagagtcttccgcatc

SEQ ID NO: 117404 - DNA, 20 bp, Artificial Sequence
  MKO10117404_B_Smarce1
  gRNA
aaacgaatacgaagcagaaa

SEQ ID NO: 117405 - DNA, 20 bp, Artificial Sequence
  MKO10117405_B_Smarce1
  gRNA
taaggtctgggaccaagtaa

SEQ ID NO: 117406 - DNA, 20 bp, Artificial Sequence
  MKO10117406_B_Smarce1
  gRNA
gtgggaggtggggcataaga

SEQ ID NO: 117407 - DNA, 20 bp, Artificial Sequence
  MKO10117407_B_Smc1a
  gRNA
accctgcgggacctgataca

SEQ ID NO: 117408 - DNA, 20 bp, Artificial Sequence
  MKO10117408_B_Smc1a
  gRNA
caaccgagcctttgtcagca

SEQ ID NO: 117409 - DNA, 20 bp, Artificial Sequence
  MKO10117409_B_Smc1a
  gRNA
taaactctaccacaacgaag

SEQ ID NO: 117410 - DNA, 20 bp, Artificial Sequence
  MKO10117410_B_Smc1b
  gRNA
tgtgacaattatatacatag

SEQ ID NO: 117411 - DNA, 20 bp, Artificial Sequence
  MKO10117411_B_Smc1b
  gRNA
tttgaagaaatcagtacttc

SEQ ID NO: 117412 - DNA, 20 bp, Artificial Sequence
  MKO10117412_B_Smc1b
  gRNA
tttcctcattataatatagt

SEQ ID NO: 117413 - DNA, 20 bp, Artificial Sequence
  MKO10117413_B_Smc2
  gRNA
tccatgattgaagaagctgc

SEQ ID NO: 117414 - DNA, 20 bp, Artificial Sequence
  MKO10117414_B_Smc2
  gRNA
tccagcagcttcttcaatca

SEQ ID NO: 117415 - DNA, 20 bp, Artificial Sequence
  MKO10117415_B_Smc2
  gRNA
acctgcatgatgagaaagtg

SEQ ID NO: 117416 - DNA, 20 bp, Artificial Sequence
  MKO10117416_B_Smc3
  gRNA
ctcggtaacttcggaagccc

SEQ ID NO: 117417 - DNA, 20 bp, Artificial Sequence
  MKO10117417_B_Smc3
  gRNA
acaaaagcagaaataacacg

SEQ ID NO: 117418 - DNA, 20 bp, Artificial Sequence
  MKO10117418_B_Smc3
  gRNA
tctttaataggtgatcatcc

SEQ ID NO: 117419 - DNA, 20 bp, Artificial Sequence
  MKO10117419_B_Smc4
  gRNA
gcaagattaaaaatcgatta

SEQ ID NO: 117420 - DNA, 20 bp, Artificial Sequence
  MKO10117420_B_Smc4
  gRNA
aacctattaaagtcttgtgt

SEQ ID NO: 117421 - DNA, 20 bp, Artificial Sequence
  MKO10117421_B_Smc4
  gRNA
acttctgtctaccacataag

SEQ ID NO: 117422 - DNA, 20 bp, Artificial Sequence
  MKO10117422_B_Smc5
  gRNA
gcctgtaacccagaagatag

SEQ ID NO: 117423 - DNA, 20 bp, Artificial Sequence
  MKO10117423_B_Smc5
  gRNA
tgatgctgtaggacaaagtt

SEQ ID NO: 117424 - DNA, 20 bp, Artificial Sequence
  MKO10117424_B_Smc5
  gRNA
ttcaatttcaaccaaacctt

SEQ ID NO: 117425 - DNA, 20 bp, Artificial Sequence
  MKO10117425_B_Smc6
  gRNA
gtgctcaccgcactcatagt

SEQ ID NO: 117426 - DNA, 20 bp, Artificial Sequence
  MKO10117426_B_Smc6
  gRNA
tctaacgtcaactttgttgt

SEQ ID NO: 117427 - DNA, 20 bp, Artificial Sequence
  MKO10117427_B_Smc6
  gRNA
caattacctggatgttaaaa

SEQ ID NO: 117428 - DNA, 20 bp, Artificial Sequence
  MKO10117428_B_Smchd1
  gRNA
ttaactagagtgtcgtagtg

SEQ ID NO: 117429 - DNA, 20 bp, Artificial Sequence
  MKO10117429_B_Smchd1
  gRNA
tcagctacttctcgaaataa

SEQ ID NO: 117430 - DNA, 20 bp, Artificial Sequence
  MKO10117430_B_Smchd1
  gRNA
ttacttaccaaaattattac

SEQ ID NO: 117431 - DNA, 20 bp, Artificial Sequence
  MKO10117431_B_Smco1
  gRNA
ggcttgccaaagtcttgcta

SEQ ID NO: 117432 - DNA, 20 bp, Artificial Sequence
  MKO10117432_B_Smco1
  gRNA
cacaaccctgatatccttga

SEQ ID NO: 117433 - DNA, 20 bp, Artificial Sequence
  MKO10117433_B_Smco1
  gRNA
atatcagggttgtggtctca

SEQ ID NO: 117434 - DNA, 20 bp, Artificial Sequence
  MKO10117434_B_Smco2
  gRNA
agaagtgactctagtttgcg

SEQ ID NO: 117435 - DNA, 20 bp, Artificial Sequence
  MKO10117435_B_Smco2
  gRNA
ggggtgctctcatccgtaga

SEQ ID NO: 117436 - DNA, 20 bp, Artificial Sequence
  MKO10117436_B_Smco2
  gRNA
gataagggaagtttcggaaa

SEQ ID NO: 117437 - DNA, 20 bp, Artificial Sequence
  MKO10117437_B_Smco3
  gRNA
gaatgatcatatctatcccg

SEQ ID NO: 117438 - DNA, 20 bp, Artificial Sequence
  MKO10117438_B_Smco3
  gRNA
aactagagccaaccctttat

SEQ ID NO: 117439 - DNA, 20 bp, Artificial Sequence
  MKO10117439_B_Smco3
  gRNA
cagtttaacagccactgcac

SEQ ID NO: 117440 - DNA, 20 bp, Artificial Sequence
  MKO10117440_B_Smco4
  gRNA
catacacaaacacgacaatg

SEQ ID NO: 117441 - DNA, 20 bp, Artificial Sequence
  MKO10117441_B_Smco4
  gRNA
cattgtcgtgtttgtgtatg

SEQ ID NO: 117442 - DNA, 20 bp, Artificial Sequence
  MKO10117442_B_Smco4
  gRNA
ctgctgccgcgcctcctgca

SEQ ID NO: 117443 - DNA, 20 bp, Artificial Sequence
  MKO10117443_B_Smcp
  gRNA
aagaactgtgttgccagatc

SEQ ID NO: 117444 - DNA, 20 bp, Artificial Sequence
  MKO10117444_B_Smcp
  gRNA
tgcaatagtagcctacagtt

SEQ ID NO: 117445 - DNA, 20 bp, Artificial Sequence
  MKO10117445_B_Smcp
  gRNA
ttctgtggacagcacggttt

SEQ ID NO: 117446 - DNA, 20 bp, Artificial Sequence
  MKO10117446_B_Smcr8
  gRNA
cccgcttgatctgagtgcga

SEQ ID NO: 117447 - DNA, 20 bp, Artificial Sequence
  MKO10117447_B_Smcr8
  gRNA
ggccccctcattatccgcat

SEQ ID NO: 117448 - DNA, 20 bp, Artificial Sequence
  MKO10117448_B_Smcr8
  gRNA
gattaccaggcttcattcgt

SEQ ID NO: 117449 - DNA, 20 bp, Artificial Sequence
  MKO10117449_B_Smdt1
  gRNA
gaacttcgctgctctgcttg

SEQ ID NO: 117450 - DNA, 20 bp, Artificial Sequence
  MKO10117450_B_Smdt1
  gRNA
gcctgggttgcagttcgacc

SEQ ID NO: 117451 - DNA, 20 bp, Artificial Sequence
  MKO10117451_B_Smdt1
  gRNA
gtgacgatgactgacctcga

SEQ ID NO: 117452 - DNA, 20 bp, Artificial Sequence
  MKO10117452_B_Smek1
  gRNA
agtcgacttaactcacatga

SEQ ID NO: 117453 - DNA, 20 bp, Artificial Sequence
  MKO10117453_B_Smek1
  gRNA
caaaggatactctgattgtg

SEQ ID NO: 117454 - DNA, 20 bp, Artificial Sequence
  MKO10117454_B_Smek1
  gRNA
tgcagtgttaggatttattt

SEQ ID NO: 117455 - DNA, 20 bp, Artificial Sequence
  MKO10117455_B_Smek2
  gRNA
aacaggatacattaattgtt

SEQ ID NO: 117456 - DNA, 20 bp, Artificial Sequence
  MKO10117456_B_Smek2
  gRNA
aagctacagatgatgataaa

SEQ ID NO: 117457 - DNA, 20 bp, Artificial Sequence
  MKO10117457_B_Smek2
  gRNA
tgtttctgatatgcagtgtt

SEQ ID NO: 117458 - DNA, 20 bp, Artificial Sequence
  MKO10117458_B_Smg1
  gRNA
cgtcattctgtatgtcagca

SEQ ID NO: 117459 - DNA, 20 bp, Artificial Sequence
  MKO10117459_B_Smg1
  gRNA
agatgacagagaccgaagac

SEQ ID NO: 117460 - DNA, 20 bp, Artificial Sequence
  MKO10117460_B_Smg1
  gRNA
agtcgttggggcaagagctg

SEQ ID NO: 117461 - DNA, 20 bp, Artificial Sequence
  MKO10117461_B_Smg5
  gRNA
ttcttgcatccagtagacta

SEQ ID NO: 117462 - DNA, 20 bp, Artificial Sequence
  MKO10117462_B_Smg5
  gRNA
ccaccgatgcctggtgtacc

SEQ ID NO: 117463 - DNA, 20 bp, Artificial Sequence
  MKO10117463_B_Smg5
  gRNA
gccttcctcccatagtctac

SEQ ID NO: 117464 - DNA, 20 bp, Artificial Sequence
  MKO10117464_B_Smg6
  gRNA
caacgaagtatgatttgcca

SEQ ID NO: 117465 - DNA, 20 bp, Artificial Sequence
  MKO10117465_B_Smg6
  gRNA
gatagaaagcgttcttccac

SEQ ID NO: 117466 - DNA, 20 bp, Artificial Sequence
  MKO10117466_B_Smg6
  gRNA
agtctgttccgaatctgctc

SEQ ID NO: 117467 - DNA, 20 bp, Artificial Sequence
  MKO10117467_B_Smg7
  gRNA
ccgtgtgaagtcttcccagt

SEQ ID NO: 117468 - DNA, 20 bp, Artificial Sequence
  MKO10117468_B_Smg7
  gRNA
cggctgaggtctggacatcc

SEQ ID NO: 117469 - DNA, 20 bp, Artificial Sequence
  MKO10117469_B_Smg7
  gRNA
gctagactgtggcttcacta

SEQ ID NO: 117470 - DNA, 20 bp, Artificial Sequence
  MKO10117470_B_Smg8
  gRNA
aatagccgagcccgatccac

SEQ ID NO: 117471 - DNA, 20 bp, Artificial Sequence
  MKO10117471_B_Smg8
  gRNA
gtacatcctgtcctcgtcgc

SEQ ID NO: 117472 - DNA, 20 bp, Artificial Sequence
  MKO10117472_B_Smg8
  gRNA
tacctaccccgctgatccac

SEQ ID NO: 117473 - DNA, 20 bp, Artificial Sequence
  MKO10117473_B_Smg9
  gRNA
acacgtccgtctgatccagc

SEQ ID NO: 117474 - DNA, 20 bp, Artificial Sequence
  MKO10117474_B_Smg9
  gRNA
ctgtgtaccagattcaaaac

SEQ ID NO: 117475 - DNA, 20 bp, Artificial Sequence
  MKO10117475_B_Smg9
  gRNA
tgtgctcatgaagccacgtg

SEQ ID NO: 117476 - DNA, 20 bp, Artificial Sequence
  MKO10117476_B_Smgc
  gRNA
aagaatcttagtcctgctac

SEQ ID NO: 117477 - DNA, 20 bp, Artificial Sequence
  MKO10117477_B_Smgc
  gRNA
ctcttaaaccgatattacca

SEQ ID NO: 117478 - DNA, 20 bp, Artificial Sequence
  MKO10117478_B_Smgc
  gRNA
aggaaatgatgccaccgtcc

SEQ ID NO: 117479 - DNA, 20 bp, Artificial Sequence
  MKO10117479_B_Smim11
  gRNA
ctggcccgccatgaactgga

SEQ ID NO: 117480 - DNA, 20 bp, Artificial Sequence
  MKO10117480_B_Smim11
  gRNA
aaaaaccctgatcctgtgcc

SEQ ID NO: 117481 - DNA, 20 bp, Artificial Sequence
  MKO10117481_B_Smim11
  gRNA
gaaaactgcaagcagagaag

SEQ ID NO: 117482 - DNA, 20 bp, Artificial Sequence
  MKO10117482_B_Smim12
  gRNA
ttcccctgatgaaccattcc

SEQ ID NO: 117483 - DNA, 20 bp, Artificial Sequence
  MKO10117483_B_Smim12
  gRNA
cgcaccacggtccaaagcac

SEQ ID NO: 117484 - DNA, 20 bp, Artificial Sequence
  MKO10117484_B_Smim12
  gRNA
cactcaggtggtgagcctta

SEQ ID NO: 117485 - DNA, 20 bp, Artificial Sequence
  MKO10117485_B_Smim13
  gRNA
cgagcagatctgatcttctg

SEQ ID NO: 117486 - DNA, 20 bp, Artificial Sequence
  MKO10117486_B_Smim13
  gRNA
gctgaccctgctggtgttcg

SEQ ID NO: 117487 - DNA, 20 bp, Artificial Sequence
  MKO10117487_B_Smim13
  gRNA
caccgcacaccatcagcaac

SEQ ID NO: 117488 - DNA, 20 bp, Artificial Sequence
  MKO10117488_B_Smim14
  gRNA
cgatcaccatccaggccatc

SEQ ID NO: 117489 - DNA, 20 bp, Artificial Sequence
  MKO10117489_B_Smim14
  gRNA
ctcccgaaggcactctgtgt

SEQ ID NO: 117490 - DNA, 20 bp, Artificial Sequence
  MKO10117490_B_Smim14
  gRNA
agctcttacactgtgaggac

SEQ ID NO: 117491 - DNA, 20 bp, Artificial Sequence
  MKO10117491_B_Smim15
  gRNA
aatcatcttggccaacttcc

SEQ ID NO: 117492 - DNA, 20 bp, Artificial Sequence
  MKO10117492_B_Smim15
  gRNA
acagcactagctaggaacag

SEQ ID NO: 117493 - DNA, 20 bp, Artificial Sequence
  MKO10117493_B_Smim15
  gRNA
gggctgagtatgttgtggag

SEQ ID NO: 117494 - DNA, 20 bp, Artificial Sequence
  MKO10117494_B_Smim18
  gRNA
tgcaaagaacaaaaccgtga

SEQ ID NO: 117495 - DNA, 20 bp, Artificial Sequence
  MKO10117495_B_Smim18
  gRNA
ttcaccctttccatgacaac

SEQ ID NO: 117496 - DNA, 20 bp, Artificial Sequence
  MKO10117496_B_Smim18
  gRNA
gaatcctctcagaagtatga

SEQ ID NO: 117497 - DNA, 20 bp, Artificial Sequence
  MKO10117497_B_Smim19
  gRNA
tttagcgtgcctcccacaga

SEQ ID NO: 117498 - DNA, 20 bp, Artificial Sequence
  MKO10117498_B_Smim19
  gRNA
gtatcaacagccacaaagcc

SEQ ID NO: 117499 - DNA, 20 bp, Artificial Sequence
  MKO10117499_B_Smim19
  gRNA
cgacagtgtgcagctctcat

SEQ ID NO: 117500 - DNA, 20 bp, Artificial Sequence
  MKO10117500_B_Smim1
  gRNA
agtagccagtgatgtaaccc

SEQ ID NO: 117501 - DNA, 20 bp, Artificial Sequence
  MKO10117501_B_Smim1
  gRNA
actgtacctcctatagcatg

SEQ ID NO: 117502 - DNA, 20 bp, Artificial Sequence
  MKO10117502_B_Smim1
  gRNA
catgaccgccatgtccagct

SEQ ID NO: 117503 - DNA, 20 bp, Artificial Sequence
  MKO10117503_B_Smim20
  gRNA
tttccatagggttgaaagtg

SEQ ID NO: 117504 - DNA, 20 bp, Artificial Sequence
  MKO10117504_B_Smim20
  gRNA
aaatcgagctggtattgtcc

SEQ ID NO: 117505 - DNA, 20 bp, Artificial Sequence
  MKO10117505_B_Smim20
  gRNA
cagcctcatttcctgccaaa

SEQ ID NO: 117506 - DNA, 20 bp, Artificial Sequence
  MKO10117506_B_Smim22
  gRNA
caagttagcattaaggttcc

SEQ ID NO: 117507 - DNA, 20 bp, Artificial Sequence
  MKO10117507_B_Smim22
  gRNA
ctcttgcaggaaaagcgcaa

SEQ ID NO: 117508 - DNA, 20 bp, Artificial Sequence
  MKO10117508_B_Smim22
  gRNA
ccttcccggggctcaccttc

SEQ ID NO: 117509 - DNA, 20 bp, Artificial Sequence
  MKO10117509_B_Smim3
  gRNA
cgctatcacccaatcccctg

SEQ ID NO: 117510 - DNA, 20 bp, Artificial Sequence
  MKO10117510_B_Smim3
  gRNA
ggccatagtcctcatcatcc

SEQ ID NO: 117511 - DNA, 20 bp, Artificial Sequence
  MKO10117511_B_Smim3
  gRNA
cgtgcttcccaagcacatcc

SEQ ID NO: 117512 - DNA, 20 bp, Artificial Sequence
  MKO10117512_B_Smim5
  gRNA
cggcaggagccctaccacca

SEQ ID NO: 117513 - DNA, 20 bp, Artificial Sequence
  MKO10117513_B_Smim5
  gRNA
gtcagcttagcagatgcccc

SEQ ID NO: 117514 - DNA, 20 bp, Artificial Sequence
  MKO10117514_B_Smim5
  gRNA
cttctcactcgggcacctcc

SEQ ID NO: 117515 - DNA, 20 bp, Artificial Sequence
  MKO10117515_B_Smim6
  gRNA
tgctccttggtggtaccatt

SEQ ID NO: 117516 - DNA, 20 bp, Artificial Sequence
  MKO10117516_B_Smim6
  gRNA
gcatccagaatgaagacttc

SEQ ID NO: 117517 - DNA, 20 bp, Artificial Sequence
  MKO10117517_B_Smim6
  gRNA
tcttccagaagtcttcattc

SEQ ID NO: 117518 - DNA, 20 bp, Artificial Sequence
  MKO10117518_B_Smim7
  gRNA
tttaaagttgagcacagccc

SEQ ID NO: 117519 - DNA, 20 bp, Artificial Sequence
  MKO10117519_B_Smim7
  gRNA
gaatcgaaggaacccagcac

SEQ ID NO: 117520 - DNA, 20 bp, Artificial Sequence
  MKO10117520_B_Smim7
  gRNA
aggaaaaagaaggacacaca

SEQ ID NO: 117521 - DNA, 20 bp, Artificial Sequence
  MKO10117521_B_Smim8
  gRNA
ccgatgcccttcactgtcaa

SEQ ID NO: 117522 - DNA, 20 bp, Artificial Sequence
  MKO10117522_B_Smim8
  gRNA
tacgggtttaatgaagagct

SEQ ID NO: 117523 - DNA, 20 bp, Artificial Sequence
  MKO10117523_B_Smim8
  gRNA
accaatccaaaagccatcac

SEQ ID NO: 117524 - DNA, 20 bp, Artificial Sequence
  MKO10117524_B_Smim9
  gRNA
agctcttgaagaaatctgac

SEQ ID NO: 117525 - DNA, 20 bp, Artificial Sequence
  MKO10117525_B_Smim9
  gRNA
caatgggagtatttgctatt

SEQ ID NO: 117526 - DNA, 20 bp, Artificial Sequence
  MKO10117526_B_Smim9
  gRNA
aaaagagcaaaaatagctgc

SEQ ID NO: 117527 - DNA, 20 bp, Artificial Sequence
  MKO10117527_B_Smlr1
  gRNA
atcttcttgcaggaactccc

SEQ ID NO: 117528 - DNA, 20 bp, Artificial Sequence
  MKO10117528_B_Smlr1
  gRNA
catcagtttgatcctgaagt

SEQ ID NO: 117529 - DNA, 20 bp, Artificial Sequence
  MKO10117529_B_Smlr1
  gRNA
tctgatcgccagaacaagtt

SEQ ID NO: 117530 - DNA, 20 bp, Artificial Sequence
  MKO10117530_B_Smn1
  gRNA
tgctttacttctgagcgatc

SEQ ID NO: 117531 - DNA, 20 bp, Artificial Sequence
  MKO10117531_B_Smn1
  gRNA
tgccacaactcccttgaaac

SEQ ID NO: 117532 - DNA, 20 bp, Artificial Sequence
  MKO10117532_B_Smn1
  gRNA
caatctatcacctgtttcaa

SEQ ID NO: 117533 - DNA, 20 bp, Artificial Sequence
  MKO10117533_B_Smndc1
  gRNA
atacatccaagtacaatgtc

SEQ ID NO: 117534 - DNA, 20 bp, Artificial Sequence
  MKO10117534_B_Smndc1
  gRNA
caaatgcctgacattgtact

SEQ ID NO: 117535 - DNA, 20 bp, Artificial Sequence
  MKO10117535_B_Smndc1
  gRNA
gcgtactccaagaacaagaa

SEQ ID NO: 117536 - DNA, 20 bp, Artificial Sequence
  MKO10117536_B_Smoc1
  gRNA
agcagtaccctgtgtacgta

SEQ ID NO: 117537 - DNA, 20 bp, Artificial Sequence
  MKO10117537_B_Smoc1
  gRNA
gtgcagtgccatacgtacac

SEQ ID NO: 117538 - DNA, 20 bp, Artificial Sequence
  MKO10117538_B_Smoc1
  gRNA
gccggcggccaccgcaccac

SEQ ID NO: 117539 - DNA, 20 bp, Artificial Sequence
  MKO10117539_B_Smoc2
  gRNA
gctggaactcacatcgggac

SEQ ID NO: 117540 - DNA, 20 bp, Artificial Sequence
  MKO10117540_B_Smoc2
  gRNA
gtccagtgtcacagctacac

SEQ ID NO: 117541 - DNA, 20 bp, Artificial Sequence
  MKO10117541_B_Smoc2
  gRNA
tgccgcagcgggaaggagca

SEQ ID NO: 117542 - DNA, 20 bp, Artificial Sequence
  MKO10117542_B_Smok2a
  gRNA
ctgtcattaaaagagtaatc

SEQ ID NO: 117543 - DNA, 20 bp, Artificial Sequence
  MKO10117543_B_Smok2a
  gRNA
cttggcatccaagtgaagcc

SEQ ID NO: 117544 - DNA, 20 bp, Artificial Sequence
  MKO10117544_B_Smok2a
  gRNA
attgtgggtgttatgttaat

SEQ ID NO: 117545 - DNA, 20 bp, Artificial Sequence
  MKO10117545_B_Smok2b
  gRNA
agaagcccctctgcctatcc

SEQ ID NO: 117546 - DNA, 20 bp, Artificial Sequence
  MKO10117546_B_Smok2b
  gRNA
tagatacaatgaaattgcaa

SEQ ID NO: 117547 - DNA, 20 bp, Artificial Sequence
  MKO10117547_B_Smok2b
  gRNA
gtctgattatgaccctggat

SEQ ID NO: 117548 - DNA, 20 bp, Artificial Sequence
  MKO10117548_B_Smok3a
  gRNA
gtagcagtatcaacaaggga

SEQ ID NO: 117549 - DNA, 20 bp, Artificial Sequence
  MKO10117549_B_Smok3a
  gRNA
agttcacagggacctgaaac

SEQ ID NO: 117550 - DNA, 20 bp, Artificial Sequence
  MKO10117550_B_Smok3a
  gRNA
tggggtcaccgatgggttca

SEQ ID NO: 117551 - DNA, 20 bp, Artificial Sequence
  MKO10117551_B_Smok3b
  gRNA
gtagcagtatcaacaaggga

SEQ ID NO: 117552 - DNA, 20 bp, Artificial Sequence
  MKO10117552_B_Smok3b
  gRNA
agttcacagggacctgaaac

SEQ ID NO: 117553 - DNA, 20 bp, Artificial Sequence
  MKO10117553_B_Smok3b
  gRNA
tggggtcaccgatgggttca

SEQ ID NO: 117554 - DNA, 20 bp, Artificial Sequence
  MKO10117554_B_Smox
  gRNA
ggagtagtacttgcggtgtg

SEQ ID NO: 117555 - DNA, 20 bp, Artificial Sequence
  MKO10117555_B_Smox
  gRNA
ctccgtaggccacgactgag

SEQ ID NO: 117556 - DNA, 20 bp, Artificial Sequence
  MKO10117556_B_Smox
  gRNA
catggcgagcttcaggcgct

SEQ ID NO: 117557 - DNA, 20 bp, Artificial Sequence
  MKO10117557_B_Smo
  gRNA
gttccgccagtcagccacaa

SEQ ID NO: 117558 - DNA, 20 bp, Artificial Sequence
  MKO10117558_B_Smo
  gRNA
tgactttctgcgttgcacac

SEQ ID NO: 117559 - DNA, 20 bp, Artificial Sequence
  MKO10117559_B_Smo
  gRNA
actcccctttgtcctcacgg

SEQ ID NO: 117560 - DNA, 20 bp, Artificial Sequence
  MKO10117560_B_Smpd1
  gRNA
accactagctgtagccttcc

SEQ ID NO: 117561 - DNA, 20 bp, Artificial Sequence
  MKO10117561_B_Smpd1
  gRNA
atcaactccacagatcctgc

SEQ ID NO: 117562 - DNA, 20 bp, Artificial Sequence
  MKO10117562_B_Smpd1
  gRNA
cttcaggctgctgagaatcg

SEQ ID NO: 117563 - DNA, 20 bp, Artificial Sequence
  MKO10117563_B_Smpd2
  gRNA
cttctgaagtagtgtgcatc

SEQ ID NO: 117564 - DNA, 20 bp, Artificial Sequence
  MKO10117564_B_Smpd2
  gRNA
tgagcaccagtccacttaga

SEQ ID NO: 117565 - DNA, 20 bp, Artificial Sequence
  MKO10117565_B_Smpd2
  gRNA
cccactcacatgagtcacgt

SEQ ID NO: 117566 - DNA, 20 bp, Artificial Sequence
  MKO10117566_B_Smpd3
  gRNA
gcctacctggtggggcatgc

SEQ ID NO: 117567 - DNA, 20 bp, Artificial Sequence
  MKO10117567_B_Smpd3
  gRNA
gtggtgtttgacgtcatctg

SEQ ID NO: 117568 - DNA, 20 bp, Artificial Sequence
  MKO10117568_B_Smpd3
  gRNA
tacaaagacccctgccgcct

SEQ ID NO: 117569 - DNA, 20 bp, Artificial Sequence
  MKO10117569_B_Smpd4
  gRNA
cagtggtccaatgatgaagt

SEQ ID NO: 117570 - DNA, 20 bp, Artificial Sequence
  MKO10117570_B_Smpd4
  gRNA
caatgactttcaccaaatct

SEQ ID NO: 117571 - DNA, 20 bp, Artificial Sequence
  MKO10117571_B_Smpd4
  gRNA
ttataaaccaacttcatcat

SEQ ID NO: 117572 - DNA, 20 bp, Artificial Sequence
  MKO10117572_B_Smpd5
  gRNA
actcacctccgaagcatctc

SEQ ID NO: 117573 - DNA, 20 bp, Artificial Sequence
  MKO10117573_B_Smpd5
  gRNA
gcaggcgcagctaggcatcg

SEQ ID NO: 117574 - DNA, 20 bp, Artificial Sequence
  MKO10117574_B_Smpd5
  gRNA
tgtagccttcagcgtcctcc

SEQ ID NO: 117575 - DNA, 20 bp, Artificial Sequence
  MKO10117575_B_Smpdl3a
  gRNA
ggcgcaaatgcctccaaccc

SEQ ID NO: 117576 - DNA, 20 bp, Artificial Sequence
  MKO10117576_B_Smpdl3a
  gRNA
cagaaagttgcaagtaatcc

SEQ ID NO: 117577 - DNA, 20 bp, Artificial Sequence
  MKO10117577_B_Smpdl3a
  gRNA
ccagtacctgaactctccac

SEQ ID NO: 117578 - DNA, 20 bp, Artificial Sequence
  MKO10117578_B_Smpdl3b
  gRNA
catcccgagatgcattgctc

SEQ ID NO: 117579 - DNA, 20 bp, Artificial Sequence
  MKO10117579_B_Smpdl3b
  gRNA
acgcttgaccaacctcatca

SEQ ID NO: 117580 - DNA, 20 bp, Artificial Sequence
  MKO10117580_B_Smpdl3b
  gRNA
gagcaaccgcatctataacc

SEQ ID NO: 117581 - DNA, 20 bp, Artificial Sequence
  MKO10117581_B_Smpx
  gRNA
tttcgactactgttcacctt

SEQ ID NO: 117582 - DNA, 20 bp, Artificial Sequence
  MKO10117582_B_Smpx
  gRNA
atctcagacaagttgacaac

SEQ ID NO: 117583 - DNA, 20 bp, Artificial Sequence
  MKO10117583_B_Smpx
  gRNA
ttccaacgtcagagccatcc

SEQ ID NO: 117584 - DNA, 20 bp, Artificial Sequence
  MKO10117584_B_Smr2
  gRNA
aacatcctataagaacccag

SEQ ID NO: 117585 - DNA, 20 bp, Artificial Sequence
  MKO10117585_B_Smr2
  gRNA
tctggacgtattagtatata

SEQ ID NO: 117586 - DNA, 20 bp, Artificial Sequence
  MKO10117586_B_Smr2
  gRNA
tcaaaagctatcagtagaat

SEQ ID NO: 117587 - DNA, 20 bp, Artificial Sequence
  MKO10117587_B_Smr3a
  gRNA
ttaggcctctgcattcttgt

SEQ ID NO: 117588 - DNA, 20 bp, Artificial Sequence
  MKO10117588_B_Smr3a
  gRNA
ggtccggtaggaggaatgct

SEQ ID NO: 117589 - DNA, 20 bp, Artificial Sequence
  MKO10117589_B_Smr3a
  gRNA
actccaagcattcctcctac

SEQ ID NO: 117590 - DNA, 20 bp, Artificial Sequence
  MKO10117590_B_Sms
  gRNA
tgtaagttgctaaatatcca

SEQ ID NO: 117591 - DNA, 20 bp, Artificial Sequence
  MKO10117591_B_Sms
  gRNA
aatttgcgaatttatccaca

SEQ ID NO: 117592 - DNA, 20 bp, Artificial Sequence
  MKO10117592_B_Sms
  gRNA
catcactgtcgtaactctga

SEQ ID NO: 117593 - DNA, 20 bp, Artificial Sequence
  MKO10117593_B_Smtnl1
  gRNA
cccgccaaatttgtccatga

SEQ ID NO: 117594 - DNA, 20 bp, Artificial Sequence
  MKO10117594_B_Smtnl1
  gRNA
actttacctggctgaaggac

SEQ ID NO: 117595 - DNA, 20 bp, Artificial Sequence
  MKO10117595_B_Smtnl1
  gRNA
gcccgaaagccccacagatg

SEQ ID NO: 117596 - DNA, 20 bp, Artificial Sequence
  MKO10117596_B_Smtnl2
  gRNA
cgaggggcctgagtcatagc

SEQ ID NO: 117597 - DNA, 20 bp, Artificial Sequence
  MKO10117597_B_Smtnl2
  gRNA
agtgacggctggcaaacgca

SEQ ID NO: 117598 - DNA, 20 bp, Artificial Sequence
  MKO10117598_B_Smtnl2
  gRNA
caagggctgatggcctcact

SEQ ID NO: 117599 - DNA, 20 bp, Artificial Sequence
  MKO10117599_B_Smtn
  gRNA
cacccacagcttcggagtgc

SEQ ID NO: 117600 - DNA, 20 bp, Artificial Sequence
  MKO10117600_B_Smtn
  gRNA
ggagtccatgaatgatgtcg

SEQ ID NO: 117601 - DNA, 20 bp, Artificial Sequence
  MKO10117601_B_Smtn
  gRNA
ggcggatccgctcagccatc

SEQ ID NO: 117602 - DNA, 20 bp, Artificial Sequence
  MKO10117602_B_Smu1
  gRNA
atgaccatcgatttgtttcg

SEQ ID NO: 117603 - DNA, 20 bp, Artificial Sequence
  MKO10117603_B_Smu1
  gRNA
gaacagtttacatcgggcac

SEQ ID NO: 117604 - DNA, 20 bp, Artificial Sequence
  MKO10117604_B_Smu1
  gRNA
tcaagtactgcatgattagt

SEQ ID NO: 117605 - DNA, 20 bp, Artificial Sequence
  MKO10117605_B_Smug1
  gRNA
agtagcgagtcacatagtta

SEQ ID NO: 117606 - DNA, 20 bp, Artificial Sequence
  MKO10117606_B_Smug1
  gRNA
gcaccccaagcgaccagtgt

SEQ ID NO: 117607 - DNA, 20 bp, Artificial Sequence
  MKO10117607_B_Smug1
  gRNA
aagtgaatgtggtccgggac

SEQ ID NO: 117608 - DNA, 20 bp, Artificial Sequence
  MKO10117608_B_Smurf1
  gRNA
cccctttgccaagattgttg

SEQ ID NO: 117609 - DNA, 20 bp, Artificial Sequence
  MKO10117609_B_Smurf1
  gRNA
actcgataaccatcagtgtg

SEQ ID NO: 117610 - DNA, 20 bp, Artificial Sequence
  MKO10117610_B_Smurf1
  gRNA
agccagccccctgcttcttg

SEQ ID NO: 117611 - DNA, 20 bp, Artificial Sequence
  MKO10117611_B_Smurf2
  gRNA
aatgacaatgatacagttcg

SEQ ID NO: 117612 - DNA, 20 bp, Artificial Sequence
  MKO10117612_B_Smurf2
  gRNA
agtactctgtgcaaaaaact

SEQ ID NO: 117613 - DNA, 20 bp, Artificial Sequence
  MKO10117613_B_Smurf2
  gRNA
cgaactgtatcattgtcatt

SEQ ID NO: 117614 - DNA, 20 bp, Artificial Sequence
  MKO10117614_B_Smyd1
  gRNA
acttgcactgcccgcagcga

SEQ ID NO: 117615 - DNA, 20 bp, Artificial Sequence
  MKO10117615_B_Smyd1
  gRNA
gcctggtgaaccatgattgc

SEQ ID NO: 117616 - DNA, 20 bp, Artificial Sequence
  MKO10117616_B_Smyd1
  gRNA
cgtggaggtcttcacttccg

SEQ ID NO: 117617 - DNA, 20 bp, Artificial Sequence
  MKO10117617_B_Smyd2
  gRNA
gcggctcacagcaagaattc

SEQ ID NO: 117618 - DNA, 20 bp, Artificial Sequence
  MKO10117618_B_Smyd2
  gRNA
ggagagcggcgatgtcactc

SEQ ID NO: 117619 - DNA, 20 bp, Artificial Sequence
  MKO10117619_B_Smyd2
  gRNA
acagccaacaatttctctga

SEQ ID NO: 117620 - DNA, 20 bp, Artificial Sequence
  MKO10117620_B_Smyd3
  gRNA
aagtcattgcaagttgcctc

SEQ ID NO: 117621 - DNA, 20 bp, Artificial Sequence
  MKO10117621_B_Smyd3
  gRNA
atactgcagtgccaagtgtc

SEQ ID NO: 117622 - DNA, 20 bp, Artificial Sequence
  MKO10117622_B_Smyd3
  gRNA
ataaagtttctctgactctg

SEQ ID NO: 117623 - DNA, 20 bp, Artificial Sequence
  MKO10117623_B_Smyd4
  gRNA
ctctgcagcgctcttccatc

SEQ ID NO: 117624 - DNA, 20 bp, Artificial Sequence
  MKO10117624_B_Smyd4
  gRNA
aaggcgtatctgcctgctgt

SEQ ID NO: 117625 - DNA, 20 bp, Artificial Sequence
  MKO10117625_B_Smyd4
  gRNA
caggagattctgcactgcta

SEQ ID NO: 117626 - DNA, 20 bp, Artificial Sequence
  MKO10117626_B_Smyd5
  gRNA
ggaatgcactttatcagtac

SEQ ID NO: 117627 - DNA, 20 bp, Artificial Sequence
  MKO10117627_B_Smyd5
  gRNA
gcaccccctcaataagctgc

SEQ ID NO: 117628 - DNA, 20 bp, Artificial Sequence
  MKO10117628_B_Smyd5
  gRNA
ttacgcacactgcatagctc

SEQ ID NO: 117629 - DNA, 20 bp, Artificial Sequence
  MKO10117629_B_Snai1
  gRNA
ggtatctcttcacatccgag

SEQ ID NO: 117630 - DNA, 20 bp, Artificial Sequence
  MKO10117630_B_Snai1
  gRNA
ggtcggacggcttcctgacc

SEQ ID NO: 117631 - DNA, 20 bp, Artificial Sequence
  MKO10117631_B_Snai1
  gRNA
cagcaaaagcacggttgcag

SEQ ID NO: 117632 - DNA, 20 bp, Artificial Sequence
  MKO10117632_B_Snai2
  gRNA
gggttcgaatgtgcatcttc

SEQ ID NO: 117633 - DNA, 20 bp, Artificial Sequence
  MKO10117633_B_Snai2
  gRNA
gcaaaagccctattgcagtg

SEQ ID NO: 117634 - DNA, 20 bp, Artificial Sequence
  MKO10117634_B_Snai2
  gRNA
tgtgtccagttcgctgtagt

SEQ ID NO: 117635 - DNA, 20 bp, Artificial Sequence
  MKO10117635_B_Snai3
  gRNA
caggtgcgccgtgtgcccca

SEQ ID NO: 117636 - DNA, 20 bp, Artificial Sequence
  MKO10117636_B_Snai3
  gRNA
tgaaaacgcactccagtcac

SEQ ID NO: 117637 - DNA, 20 bp, Artificial Sequence
  MKO10117637_B_Snai3
  gRNA
tgtctccagtttcccgtagt

SEQ ID NO: 117638 - DNA, 20 bp, Artificial Sequence
  MKO10117638_B_Snap23
  gRNA
gcccgcagctgaacttcctc

SEQ ID NO: 117639 - DNA, 20 bp, Artificial Sequence
  MKO10117639_B_Snap23
  gRNA
catcaacttacctattacaa

SEQ ID NO: 117640 - DNA, 20 bp, Artificial Sequence
  MKO10117640_B_Snap23
  gRNA
caactaaatcgcatagaaga

SEQ ID NO: 117641 - DNA, 20 bp, Artificial Sequence
  MKO10117641_B_Snap25
  gRNA
agaacaactggaacgcattg

SEQ ID NO: 117642 - DNA, 20 bp, Artificial Sequence
  MKO10117642_B_Snap25
  gRNA
gcggatgaagccaccactga

SEQ ID NO: 117643 - DNA, 20 bp, Artificial Sequence
  MKO10117643_B_Snap25
  gRNA
agggatggaccaaatcaata

SEQ ID NO: 117644 - DNA, 20 bp, Artificial Sequence
  MKO10117644_B_Snap29
  gRNA
ctaggttgctgtcaatcttc

SEQ ID NO: 117645 - DNA, 20 bp, Artificial Sequence
  MKO10117645_B_Snap29
  gRNA
tcgtctcccagcccaacagc

SEQ ID NO: 117646 - DNA, 20 bp, Artificial Sequence
  MKO10117646_B_Snap29
  gRNA
gcactcacctgctgttgggc

SEQ ID NO: 117647 - DNA, 20 bp, Artificial Sequence
  MKO10117647_B_Snap47
  gRNA
acatcagctttctcatacgc

SEQ ID NO: 117648 - DNA, 20 bp, Artificial Sequence
  MKO10117648_B_Snap47
  gRNA
tgttccagcatccagaccga

SEQ ID NO: 117649 - DNA, 20 bp, Artificial Sequence
  MKO10117649_B_Snap47
  gRNA
ctggcttcccaatgaagcgc

SEQ ID NO: 117650 - DNA, 20 bp, Artificial Sequence
  MKO10117650_B_Snap91
  gRNA
gggctacaggcatcgcggcc

SEQ ID NO: 117651 - DNA, 20 bp, Artificial Sequence
  MKO10117651_B_Snap91
  gRNA
tgtttgtcgcccgctcaaag

SEQ ID NO: 117652 - DNA, 20 bp, Artificial Sequence
  MKO10117652_B_Snap91
  gRNA
attgaatagcgtattcctag

SEQ ID NO: 117653 - DNA, 20 bp, Artificial Sequence
  MKO10117653_B_Snapc1
  gRNA
gtagatccgagttgccttga

SEQ ID NO: 117654 - DNA, 20 bp, Artificial Sequence
  MKO10117654_B_Snapc1
  gRNA
agtttcattacacgatcatt

SEQ ID NO: 117655 - DNA, 20 bp, Artificial Sequence
  MKO10117655_B_Snapc1
  gRNA
tatcacttctgatgtattag

SEQ ID NO: 117656 - DNA, 20 bp, Artificial Sequence
  MKO10117656_B_Snapc2
  gRNA
ccacccggcccttgagctgc

SEQ ID NO: 117657 - DNA, 20 bp, Artificial Sequence
  MKO10117657_B_Snapc2
  gRNA
acccctgggcctcgtgagcc

SEQ ID NO: 117658 - DNA, 20 bp, Artificial Sequence
  MKO10117658_B_Snapc2
  gRNA
ggcaagcccacaaaggcccg

SEQ ID NO: 117659 - DNA, 20 bp, Artificial Sequence
  MKO10117659_B_Snapc3
  gRNA
ctgaccttattaaatataac

SEQ ID NO: 117660 - DNA, 20 bp, Artificial Sequence
  MKO10117660_B_Snapc3
  gRNA
ctccaggaatctcatgcact

SEQ ID NO: 117661 - DNA, 20 bp, Artificial Sequence
  MKO10117661_B_Snapc3
  gRNA
tgtgtcagtgacctccagat

SEQ ID NO: 117662 - DNA, 20 bp, Artificial Sequence
  MKO10117662_B_Snapc4
  gRNA
gagatcctgtttgatctgtc

SEQ ID NO: 117663 - DNA, 20 bp, Artificial Sequence
  MKO10117663_B_Snapc4
  gRNA
gacctgtctgcagctaaata

SEQ ID NO: 117664 - DNA, 20 bp, Artificial Sequence
  MKO10117664_B_Snapc4
  gRNA
gcagtttccaagtcctcatc

SEQ ID NO: 117665 - DNA, 20 bp, Artificial Sequence
  MKO10117665_B_Snapc5
  gRNA
caatccatgataaattctcg

SEQ ID NO: 117666 - DNA, 20 bp, Artificial Sequence
  MKO10117666_B_Snapc5
  gRNA
tcacttcgttgtctacatgt

SEQ ID NO: 117667 - DNA, 20 bp, Artificial Sequence
  MKO10117667_B_Snapc5
  gRNA
ctacactgaagctgagcaca

SEQ ID NO: 117668 - DNA, 20 bp, Artificial Sequence
  MKO10117668_B_Snapin
  gRNA
agaactgtgccggatcaatg

SEQ ID NO: 117669 - DNA, 20 bp, Artificial Sequence
  MKO10117669_B_Snapin
  gRNA
gttaaaccacagcgtggcca

SEQ ID NO: 117670 - DNA, 20 bp, Artificial Sequence
  MKO10117670_B_Snapin
  gRNA
ctgtcttacaggaacgacta

SEQ ID NO: 117671 - DNA, 20 bp, Artificial Sequence
  MKO10117671_B_Sncaip
  gRNA
agcccctgaataccttgatt

SEQ ID NO: 117672 - DNA, 20 bp, Artificial Sequence
  MKO10117672_B_Sncaip
  gRNA
agtcgatttcatccaaatca

SEQ ID NO: 117673 - DNA, 20 bp, Artificial Sequence
  MKO10117673_B_Sncaip
  gRNA
gttacacattgctgcatcaa

SEQ ID NO: 117674 - DNA, 20 bp, Artificial Sequence
  MKO10117674_B_Snca
  gRNA
ggcttatgaaatgccttcag

SEQ ID NO: 117675 - DNA, 20 bp, Artificial Sequence
  MKO10117675_B_Snca
  gRNA
ttctttaggttccaaaacta

SEQ ID NO: 117676 - DNA, 20 bp, Artificial Sequence
  MKO10117676_B_Snca
  gRNA
aatcctggaagacatgcctg

SEQ ID NO: 117677 - DNA, 20 bp, Artificial Sequence
  MKO10117677_B_Sncb
  gRNA
gcttcttgggccacctcctc

SEQ ID NO: 117678 - DNA, 20 bp, Artificial Sequence
  MKO10117678_B_Sncb
  gRNA
tacaccttgtaccactccac

SEQ ID NO: 117679 - DNA, 20 bp, Artificial Sequence
  MKO10117679_B_Sncb
  gRNA
tcctcataactttccccttc

SEQ ID NO: 117680 - DNA, 20 bp, Artificial Sequence
  MKO10117680_B_Sncg
  gRNA
actttgtaccacgttctcct

SEQ ID NO: 117681 - DNA, 20 bp, Artificial Sequence
  MKO10117681_B_Sncg
  gRNA
gtggtacaaagtgtcacctc

SEQ ID NO: 117682 - DNA, 20 bp, Artificial Sequence
  MKO10117682_B_Sncg
  gRNA
cttctagtcttctccactct

SEQ ID NO: 117683 - DNA, 20 bp, Artificial Sequence
  MKO10117683_B_Snd1
  gRNA
ttgtgtggcagctgcccgac

SEQ ID NO: 117684 - DNA, 20 bp, Artificial Sequence
  MKO10117684_B_Snd1
  gRNA
tcccaatcagcttcttgcga

SEQ ID NO: 117685 - DNA, 20 bp, Artificial Sequence
  MKO10117685_B_Snd1
  gRNA
tcatcccatactctcgtccc

SEQ ID NO: 117686 - DNA, 20 bp, Artificial Sequence
  MKO10117686_B_Sned1
  gRNA
catcgccaaagaccgctgtg

SEQ ID NO: 117687 - DNA, 20 bp, Artificial Sequence
  MKO10117687_B_Sned1
  gRNA
caaactgtactcatcaccga

SEQ ID NO: 117688 - DNA, 20 bp, Artificial Sequence
  MKO10117688_B_Sned1
  gRNA
tgtgccggtagtccacaaga

SEQ ID NO: 117689 - DNA, 20 bp, Artificial Sequence
  MKO10117689_B_Snf8
  gRNA
tgtctgacaggccaagtata

SEQ ID NO: 117690 - DNA, 20 bp, Artificial Sequence
  MKO10117690_B_Snf8
  gRNA
ataacagatgtcaaaacagc

SEQ ID NO: 117691 - DNA, 20 bp, Artificial Sequence
  MKO10117691_B_Snf8
  gRNA
gcaagcacaagcaagagatc

SEQ ID NO: 117692 - DNA, 20 bp, Artificial Sequence
  MKO10117692_B_Snhg11
  gRNA
ggatgacgacgcaaaacctg

SEQ ID NO: 117693 - DNA, 20 bp, Artificial Sequence
  MKO10117693_B_Snhg11
  gRNA
ttattgcagaattgacagct

SEQ ID NO: 117694 - DNA, 20 bp, Artificial Sequence
  MKO10117694_B_Snhg11
  gRNA
atcctaccttgggagcgctg

SEQ ID NO: 117695 - DNA, 20 bp, Artificial Sequence
  MKO10117695_B_Snip1
  gRNA
ctcggaacagtgagcgagac

SEQ ID NO: 117696 - DNA, 20 bp, Artificial Sequence
  MKO10117696_B_Snip1
  gRNA
gacgagaggatcggcagcac

SEQ ID NO: 117697 - DNA, 20 bp, Artificial Sequence
  MKO10117697_B_Snip1
  gRNA
gaccaaccgtgccgtcagca

SEQ ID NO: 117698 - DNA, 20 bp, Artificial Sequence
  MKO10117698_B_Snn
  gRNA
agagtactgcaccagtagaa

SEQ ID NO: 117699 - DNA, 20 bp, Artificial Sequence
  MKO10117699_B_Snn
  gRNA
cctcatcgccatagctgccc

SEQ ID NO: 117700 - DNA, 20 bp, Artificial Sequence
  MKO10117700_B_Snn
  gRNA
agcactgaccatgtctatta

SEQ ID NO: 117701 - DNA, 20 bp, Artificial Sequence
  MKO10117701_B_Snph
  gRNA
agaaactcacctgcgagatc

SEQ ID NO: 117702 - DNA, 20 bp, Artificial Sequence
  MKO10117702_B_Snph
  gRNA
taggcgtcccgcacactcac

SEQ ID NO: 117703 - DNA, 20 bp, Artificial Sequence
  MKO10117703_B_Snph
  gRNA
acactatgcagcgacaatca

SEQ ID NO: 117704 - DNA, 20 bp, Artificial Sequence
  MKO10117704_B_Snrk
  gRNA
tctgtagcattcgtgtgatc

SEQ ID NO: 117705 - DNA, 20 bp, Artificial Sequence
  MKO10117705_B_Snrk
  gRNA
ggtaatgtggttgtacctgt

SEQ ID NO: 117706 - DNA, 20 bp, Artificial Sequence
  MKO10117706_B_Snrk
  gRNA
tctcgctgtcgttggcttct

SEQ ID NO: 117707 - DNA, 20 bp, Artificial Sequence
  MKO10117707_B_Snrnp200
  gRNA
acgggagattgacctgctgc

SEQ ID NO: 117708 - DNA, 20 bp, Artificial Sequence
  MKO10117708_B_Snrnp200
  gRNA
tctcgggtctccttcgtctt

SEQ ID NO: 117709 - DNA, 20 bp, Artificial Sequence
  MKO10117709_B_Snrnp200
  gRNA
catctacaagcctaagacga

SEQ ID NO: 117710 - DNA, 20 bp, Artificial Sequence
  MKO10117710_B_Snrnp25
  gRNA
tccctaggttactctagaag

SEQ ID NO: 117711 - DNA, 20 bp, Artificial Sequence
  MKO10117711_B_Snrnp25
  gRNA
gactgtccgtgtgtgcaaga

SEQ ID NO: 117712 - DNA, 20 bp, Artificial Sequence
  MKO10117712_B_Snrnp25
  gRNA
ctccttgcaggtcctatgta

SEQ ID NO: 117713 - DNA, 20 bp, Artificial Sequence
  MKO10117713_B_Snrnp27
  gRNA
ccatcaacgtgtctcaaaag

SEQ ID NO: 117714 - DNA, 20 bp, Artificial Sequence
  MKO10117714_B_Snrnp27
  gRNA
ctccaggggaagaaggtaga

SEQ ID NO: 117715 - DNA, 20 bp, Artificial Sequence
  MKO10117715_B_Snrnp27
  gRNA
aagaaataaagaacaaagaa

SEQ ID NO: 117716 - DNA, 20 bp, Artificial Sequence
  MKO10117716_B_Snrnp35
  gRNA
cctgtcatgatcccgttccc

SEQ ID NO: 117717 - DNA, 20 bp, Artificial Sequence
  MKO10117717_B_Snrnp35
  gRNA
atggtgacattcggcggctg

SEQ ID NO: 117718 - DNA, 20 bp, Artificial Sequence
  MKO10117718_B_Snrnp35
  gRNA
gggtcaaaagccgggacaag

SEQ ID NO: 117719 - DNA, 20 bp, Artificial Sequence
  MKO10117719_B_Snrnp40
  gRNA
acagtgttgtggaacgtcta

SEQ ID NO: 117720 - DNA, 20 bp, Artificial Sequence
  MKO10117720_B_Snrnp40
  gRNA
agcgtcgacagacaaaactg

SEQ ID NO: 117721 - DNA, 20 bp, Artificial Sequence
  MKO10117721_B_Snrnp40
  gRNA
ctttggtttagggaccgccc

SEQ ID NO: 117722 - DNA, 20 bp, Artificial Sequence
  MKO10117722_B_Snrnp48
  gRNA
atgcgatgattggaatcata

SEQ ID NO: 117723 - DNA, 20 bp, Artificial Sequence
  MKO10117723_B_Snrnp48
  gRNA
gtgctttgttagtgatgatt

SEQ ID NO: 117724 - DNA, 20 bp, Artificial Sequence
  MKO10117724_B_Snrnp48
  gRNA
tccagataattaaacaagct

SEQ ID NO: 117725 - DNA, 20 bp, Artificial Sequence
  MKO10117725_B_Snrnp70
  gRNA
acacaacagaatctaagctt

SEQ ID NO: 117726 - DNA, 20 bp, Artificial Sequence
  MKO10117726_B_Snrnp70
  gRNA
agagacgggaaaaaattgaa

SEQ ID NO: 117727 - DNA, 20 bp, Artificial Sequence
  MKO10117727_B_Snrnp70
  gRNA
ctccaacaagagcagaaacc

SEQ ID NO: 117728 - DNA, 20 bp, Artificial Sequence
  MKO10117728_B_Snrpa1
  gRNA
cagttccactagactgttgt

SEQ ID NO: 117729 - DNA, 20 bp, Artificial Sequence
  MKO10117729_B_Snrpa1
  gRNA
gaggatgagctctgtcagac

SEQ ID NO: 117730 - DNA, 20 bp, Artificial Sequence
  MKO10117730_B_Snrpa1
  gRNA
aagtccagtactctgacttg

SEQ ID NO: 117731 - DNA, 20 bp, Artificial Sequence
  MKO10117731_B_Snrpa
  gRNA
gggtggggcagctgcgcccg

SEQ ID NO: 117732 - DNA, 20 bp, Artificial Sequence
  MKO10117732_B_Snrpa
  gRNA
cacttactggttgaagagca

SEQ ID NO: 117733 - DNA, 20 bp, Artificial Sequence
  MKO10117733_B_Snrpa
  gRNA
ccctttctacgacaagccca

SEQ ID NO: 117734 - DNA, 20 bp, Artificial Sequence
  MKO10117734_B_Snrpb2
  gRNA
atttcttaataacttaccag

SEQ ID NO: 117735 - DNA, 20 bp, Artificial Sequence
  MKO10117735_B_Snrpb2
  gRNA
accattggtttaccataaaa

SEQ ID NO: 117736 - DNA, 20 bp, Artificial Sequence
  MKO10117736_B_Snrpb2
  gRNA
taactgtctcaaagcatttg

SEQ ID NO: 117737 - DNA, 20 bp, Artificial Sequence
  MKO10117737_B_Snrpb
  gRNA
attgcccgagtgccacttgc

SEQ ID NO: 117738 - DNA, 20 bp, Artificial Sequence
  MKO10117738_B_Snrpb
  gRNA
cctcggcccataggtggagg

SEQ ID NO: 117739 - DNA, 20 bp, Artificial Sequence
  MKO10117739_B_Snrpb
  gRNA
cgaccaggtgggtactgagt

SEQ ID NO: 117740 - DNA, 20 bp, Artificial Sequence
  MKO10117740_B_Snrpc
  gRNA
ttccgacttacctggtccca

SEQ ID NO: 117741 - DNA, 20 bp, Artificial Sequence
  MKO10117741_B_Snrpc
  gRNA
taagcggctgcatttcaaca

SEQ ID NO: 117742 - DNA, 20 bp, Artificial Sequence
  MKO10117742_B_Snrpc
  gRNA
tgaaagactattatcagaaa

SEQ ID NO: 117743 - DNA, 20 bp, Artificial Sequence
  MKO10117743_B_Snrpd1
  gRNA
ctttctctagttgcaggaag

SEQ ID NO: 117744 - DNA, 20 bp, Artificial Sequence
  MKO10117744_B_Snrpd1
  gRNA
cgtggtcgtggcagaggaag

SEQ ID NO: 117745 - DNA, 20 bp, Artificial Sequence
  MKO10117745_B_Snrpd1
  gRNA
aagtctaagaaaagagaagc

SEQ ID NO: 117746 - DNA, 20 bp, Artificial Sequence
  MKO10117746_B_Snrpd2
  gRNA
caagagtgagatgaccccag

SEQ ID NO: 117747 - DNA, 20 bp, Artificial Sequence
  MKO10117747_B_Snrpd2
  gRNA
ccgactgcgtgagcactgag

SEQ ID NO: 117748 - DNA, 20 bp, Artificial Sequence
  MKO10117748_B_Snrpd2
  gRNA
gctgcagaagcgggaggagg

SEQ ID NO: 117749 - DNA, 20 bp, Artificial Sequence
  MKO10117749_B_Snrpd3
  gRNA
cccacgtcctctccctcgtg

SEQ ID NO: 117750 - DNA, 20 bp, Artificial Sequence
  MKO10117750_B_Snrpd3
  gRNA
tcgagtggcacagctggaac

SEQ ID NO: 117751 - DNA, 20 bp, Artificial Sequence
  MKO10117751_B_Snrpd3
  gRNA
ggtacctaccttgggccttc

SEQ ID NO: 117752 - DNA, 20 bp, Artificial Sequence
  MKO10117752_B_Snrpe
  gRNA
tttgcaagtatctgaagata

SEQ ID NO: 117753 - DNA, 20 bp, Artificial Sequence
  MKO10117753_B_Snrpe
  gRNA
tgtatgaacaagtgaatatg

SEQ ID NO: 117754 - DNA, 20 bp, Artificial Sequence
  MKO10117754_B_Snrpe
  gRNA
aacaaagtcaagaaaacaac

SEQ ID NO: 117755 - DNA, 20 bp, Artificial Sequence
  MKO10117755_B_Snrpf
  gRNA
atctgggcgaagttctaata

SEQ ID NO: 117756 - DNA, 20 bp, Artificial Sequence
  MKO10117756_B_Snrpf
  gRNA
aataatgtcctctacatcag

SEQ ID NO: 117757 - DNA, 20 bp, Artificial Sequence
  MKO10117757_B_Snrpf
  gRNA
cttcaacgcctctgatgtag

SEQ ID NO: 117758 - DNA, 20 bp, Artificial Sequence
  MKO10117758_B_Snrpg
  gRNA
cacaggtcagactctttcca

SEQ ID NO: 117759 - DNA, 20 bp, Artificial Sequence
  MKO10117759_B_Snrpg
  gRNA
catcatcatgttagaagcct

SEQ ID NO: 117760 - DNA, 20 bp, Artificial Sequence
  MKO10117760_B_Snrpg
  gRNA
ccacacactcgtcaatcaca

SEQ ID NO: 117761 - DNA, 20 bp, Artificial Sequence
  MKO10117761_B_Snrpn
  gRNA
atcttccttacatctttagg

SEQ ID NO: 117762 - DNA, 20 bp, Artificial Sequence
  MKO10117762_B_Snrpn
  gRNA
gctggcagaggagtgccagc

SEQ ID NO: 117763 - DNA, 20 bp, Artificial Sequence
  MKO10117763_B_Snrpn
  gRNA
gaacttggtttcaatgactg

SEQ ID NO: 117764 - DNA, 20 bp, Artificial Sequence
  MKO10117764_B_Snta1
  gRNA
catcttcaaagatacgtgtt

SEQ ID NO: 117765 - DNA, 20 bp, Artificial Sequence
  MKO10117765_B_Snta1
  gRNA
tgaatgtgccgatctgcgct

SEQ ID NO: 117766 - DNA, 20 bp, Artificial Sequence
  MKO10117766_B_Snta1
  gRNA
cagtgcgggtcggcctgctc

SEQ ID NO: 117767 - DNA, 20 bp, Artificial Sequence
  MKO10117767_B_Sntb1
  gRNA
agtcgtgagatcaggcatct

SEQ ID NO: 117768 - DNA, 20 bp, Artificial Sequence
  MKO10117768_B_Sntb1
  gRNA
gcagagccaccccctaatct

SEQ ID NO: 117769 - DNA, 20 bp, Artificial Sequence
  MKO10117769_B_Sntb1
  gRNA
cagtgagctccgctgaattg

SEQ ID NO: 117770 - DNA, 20 bp, Artificial Sequence
  MKO10117770_B_Sntb2
  gRNA
ggtcctaggttggttcattc

SEQ ID NO: 117771 - DNA, 20 bp, Artificial Sequence
  MKO10117771_B_Sntb2
  gRNA
gctatgacacggtgatgccc

SEQ ID NO: 117772 - DNA, 20 bp, Artificial Sequence
  MKO10117772_B_Sntb2
  gRNA
ctttagtatcagatctgcca

SEQ ID NO: 117773 - DNA, 20 bp, Artificial Sequence
  MKO10117773_B_Sntg1
  gRNA
cagagacctgttgatgctac

SEQ ID NO: 117774 - DNA, 20 bp, Artificial Sequence
  MKO10117774_B_Sntg1
  gRNA
aggtgcagaacataacatcc

SEQ ID NO: 117775 - DNA, 20 bp, Artificial Sequence
  MKO10117775_B_Sntg1
  gRNA
ctcattcacagcagagctgt

SEQ ID NO: 117776 - DNA, 20 bp, Artificial Sequence
  MKO10117776_B_Sntg2
  gRNA
ctatgaacaacatctctgtc

SEQ ID NO: 117777 - DNA, 20 bp, Artificial Sequence
  MKO10117777_B_Sntg2
  gRNA
gaactcataccttgatactt

SEQ ID NO: 117778 - DNA, 20 bp, Artificial Sequence
  MKO10117778_B_Sntg2
  gRNA
cagacagagatgttgttcat

SEQ ID NO: 117779 - DNA, 20 bp, Artificial Sequence
  MKO10117779_B_Sntn
  gRNA
ctcctcttgagtggagtgcg

SEQ ID NO: 117780 - DNA, 20 bp, Artificial Sequence
  MKO10117780_B_Sntn
  gRNA
agccattgctactattgctc

SEQ ID NO: 117781 - DNA, 20 bp, Artificial Sequence
  MKO10117781_B_Sntn
  gRNA
tcgtagcagatctgacatga

SEQ ID NO: 117782 - DNA, 20 bp, Artificial Sequence
  MKO10117782_B_Snupn
  gRNA
acaagtgcctacactaagag

SEQ ID NO: 117783 - DNA, 20 bp, Artificial Sequence
  MKO10117783_B_Snupn
  gRNA
acagtagccactcttagtgt

SEQ ID NO: 117784 - DNA, 20 bp, Artificial Sequence
  MKO10117784_B_Snupn
  gRNA
atctgtagactacaccattc

SEQ ID NO: 117785 - DNA, 20 bp, Artificial Sequence
  MKO10117785_B_Snurf
  gRNA
atactgctttaaccacctct

SEQ ID NO: 117786 - DNA, 20 bp, Artificial Sequence
  MKO10117786_B_Snurf
  gRNA
tcagcaacagcaagttcctg

SEQ ID NO: 117787 - DNA, 20 bp, Artificial Sequence
  MKO10117787_B_Snurf
  gRNA
ctgtccttcgacgtttgacc

SEQ ID NO: 117788 - DNA, 20 bp, Artificial Sequence
  MKO10117788_B_Snw1
  gRNA
acatttacctctaatagtct

SEQ ID NO: 117789 - DNA, 20 bp, Artificial Sequence
  MKO10117789_B_Snw1
  gRNA
cgatgaagaggcaattaaag

SEQ ID NO: 117790 - DNA, 20 bp, Artificial Sequence
  MKO10117790_B_Snw1
  gRNA
ttacagcaaatacactgacc

SEQ ID NO: 117791 - DNA, 20 bp, Artificial Sequence
  MKO10117791_B_Snx10
  gRNA
tgcaggagttcgtgagtgtc

SEQ ID NO: 117792 - DNA, 20 bp, Artificial Sequence
  MKO10117792_B_Snx10
  gRNA
acgtagagtatgattcagaa

SEQ ID NO: 117793 - DNA, 20 bp, Artificial Sequence
  MKO10117793_B_Snx10
  gRNA
aaagtcctccttctgaatcc

SEQ ID NO: 117794 - DNA, 20 bp, Artificial Sequence
  MKO10117794_B_Snx11
  gRNA
ggcgctaccgtgagtttgtg

SEQ ID NO: 117795 - DNA, 20 bp, Artificial Sequence
  MKO10117795_B_Snx11
  gRNA
aggcctgttccggagcttcc

SEQ ID NO: 117796 - DNA, 20 bp, Artificial Sequence
  MKO10117796_B_Snx11
  gRNA
ggtgatcacagttcgagttc

SEQ ID NO: 117797 - DNA, 20 bp, Artificial Sequence
  MKO10117797_B_Snx12
  gRNA
aagcggcagctccctttccg

SEQ ID NO: 117798 - DNA, 20 bp, Artificial Sequence
  MKO10117798_B_Snx12
  gRNA
attgataggaactacgtccc

SEQ ID NO: 117799 - DNA, 20 bp, Artificial Sequence
  MKO10117799_B_Snx12
  gRNA
gacgctatagtgactttgag

SEQ ID NO: 117800 - DNA, 20 bp, Artificial Sequence
  MKO10117800_B_Snx13
  gRNA
ttaatgtataataccagtac

SEQ ID NO: 117801 - DNA, 20 bp, Artificial Sequence
  MKO10117801_B_Snx13
  gRNA
ttcaggccagtctatccata

SEQ ID NO: 117802 - DNA, 20 bp, Artificial Sequence
  MKO10117802_B_Snx13
  gRNA
ttaggaaccccagatgatgt

SEQ ID NO: 117803 - DNA, 20 bp, Artificial Sequence
  MKO10117803_B_Snx14
  gRNA
gcaggttcttgaattagtgt

SEQ ID NO: 117804 - DNA, 20 bp, Artificial Sequence
  MKO10117804_B_Snx14
  gRNA
gtgacattctactgttcatt

SEQ ID NO: 117805 - DNA, 20 bp, Artificial Sequence
  MKO10117805_B_Snx14
  gRNA
tgcatgtcttaatgatcttc

SEQ ID NO: 117806 - DNA, 20 bp, Artificial Sequence
  MKO10117806_B_Snx15
  gRNA
ccaagtccccgtggagctta

SEQ ID NO: 117807 - DNA, 20 bp, Artificial Sequence
  MKO10117807_B_Snx15
  gRNA
cccggaaaaactccttgagt

SEQ ID NO: 117808 - DNA, 20 bp, Artificial Sequence
  MKO10117808_B_Snx15
  gRNA
cccctcctttccgcaggcag

SEQ ID NO: 117809 - DNA, 20 bp, Artificial Sequence
  MKO10117809_B_Snx16
  gRNA
tagcacttcctccaaaacgc

SEQ ID NO: 117810 - DNA, 20 bp, Artificial Sequence
  MKO10117810_B_Snx16
  gRNA
ttgatagcctagaagaaagc

SEQ ID NO: 117811 - DNA, 20 bp, Artificial Sequence
  MKO10117811_B_Snx16
  gRNA
acttactttgtcattaagcc

SEQ ID NO: 117812 - DNA, 20 bp, Artificial Sequence
  MKO10117812_B_Snx17
  gRNA
ccatagcttcggaaggagta

SEQ ID NO: 117813 - DNA, 20 bp, Artificial Sequence
  MKO10117813_B_Snx17
  gRNA
ggggaatgcaggaaccacgt

SEQ ID NO: 117814 - DNA, 20 bp, Artificial Sequence
  MKO10117814_B_Snx17
  gRNA
tgaccagacagaagatgtcc

SEQ ID NO: 117815 - DNA, 20 bp, Artificial Sequence
  MKO10117815_B_Snx18
  gRNA
cactatttccttcgccacgt

SEQ ID NO: 117816 - DNA, 20 bp, Artificial Sequence
  MKO10117816_B_Snx18
  gRNA
ggagacgcctacgacgccat

SEQ ID NO: 117817 - DNA, 20 bp, Artificial Sequence
  MKO10117817_B_Snx18
  gRNA
acttaaagtcgtagagcgcc

SEQ ID NO: 117818 - DNA, 20 bp, Artificial Sequence
  MKO10117818_B_Snx19
  gRNA
gatggtggtgagtgctatcg

SEQ ID NO: 117819 - DNA, 20 bp, Artificial Sequence
  MKO10117819_B_Snx19
  gRNA
caaccttcaggaatgactcc

SEQ ID NO: 117820 - DNA, 20 bp, Artificial Sequence
  MKO10117820_B_Snx19
  gRNA
tcctcactgttgccaatctc

SEQ ID NO: 117821 - DNA, 20 bp, Artificial Sequence
  MKO10117821_B_Snx1
  gRNA
gtccagggatagttccactg

SEQ ID NO: 117822 - DNA, 20 bp, Artificial Sequence
  MKO10117822_B_Snx1
  gRNA
gagccacaggatctctttgc

SEQ ID NO: 117823 - DNA, 20 bp, Artificial Sequence
  MKO10117823_B_Snx1
  gRNA
agcctacaaagtcaccacac

SEQ ID NO: 117824 - DNA, 20 bp, Artificial Sequence
  MKO10117824_B_Snx20
  gRNA
gatcgcctcagcccgcatag

SEQ ID NO: 117825 - DNA, 20 bp, Artificial Sequence
  MKO10117825_B_Snx20
  gRNA
agacaggaagtattgccccc

SEQ ID NO: 117826 - DNA, 20 bp, Artificial Sequence
  MKO10117826_B_Snx20
  gRNA
tttatgggtcctctccagcc

SEQ ID NO: 117827 - DNA, 20 bp, Artificial Sequence
  MKO10117827_B_Snx21
  gRNA
acaccggctgcgacacgccc

SEQ ID NO: 117828 - DNA, 20 bp, Artificial Sequence
  MKO10117828_B_Snx21
  gRNA
gaacgaagtcccccacctga

SEQ ID NO: 117829 - DNA, 20 bp, Artificial Sequence
  MKO10117829_B_Snx21
  gRNA
ctcactcaccacgtacttgg

SEQ ID NO: 117830 - DNA, 20 bp, Artificial Sequence
  MKO10117830_B_Snx22
  gRNA
ccagaggactggaacagcgc

SEQ ID NO: 117831 - DNA, 20 bp, Artificial Sequence
  MKO10117831_B_Snx22
  gRNA
caagaattccagtaactcct

SEQ ID NO: 117832 - DNA, 20 bp, Artificial Sequence
  MKO10117832_B_Snx22
  gRNA
gggcatcctgtacctgaatc

SEQ ID NO: 117833 - DNA, 20 bp, Artificial Sequence
  MKO10117833_B_Snx24
  gRNA
agggcaagtgccgtacattg

SEQ ID NO: 117834 - DNA, 20 bp, Artificial Sequence
  MKO10117834_B_Snx24
  gRNA
attccatgccttgcacaaaa

SEQ ID NO: 117835 - DNA, 20 bp, Artificial Sequence
  MKO10117835_B_Snx24
  gRNA
aaaatagaagtgctaatgaa

SEQ ID NO: 117836 - DNA, 20 bp, Artificial Sequence
  MKO10117836_B_Snx25
  gRNA
gcagaaattcttacgacaaa

SEQ ID NO: 117837 - DNA, 20 bp, Artificial Sequence
  MKO10117837_B_Snx25
  gRNA
ttgtacgtaagctgagagac

SEQ ID NO: 117838 - DNA, 20 bp, Artificial Sequence
  MKO10117838_B_Snx25
  gRNA
aatcaggtatcaaattgtag

SEQ ID NO: 117839 - DNA, 20 bp, Artificial Sequence
  MKO10117839_B_Snx27
  gRNA
taggaacggcgtgaatgttg

SEQ ID NO: 117840 - DNA, 20 bp, Artificial Sequence
  MKO10117840_B_Snx27
  gRNA
agatcccagtgacgactcct

SEQ ID NO: 117841 - DNA, 20 bp, Artificial Sequence
  MKO10117841_B_Snx27
  gRNA
gtgtgttcaatccgagtcat

SEQ ID NO: 117842 - DNA, 20 bp, Artificial Sequence
  MKO10117842_B_Snx29
  gRNA
ctgcagtgccagatccgctt

SEQ ID NO: 117843 - DNA, 20 bp, Artificial Sequence
  MKO10117843_B_Snx29
  gRNA
cagccgtgagtgctaatcct

SEQ ID NO: 117844 - DNA, 20 bp, Artificial Sequence
  MKO10117844_B_Snx29
  gRNA
ttcaccagcaagaccgaaac

SEQ ID NO: 117845 - DNA, 20 bp, Artificial Sequence
  MKO10117845_B_Snx2
  gRNA
gatcttctctgtcatcgtct

SEQ ID NO: 117846 - DNA, 20 bp, Artificial Sequence
  MKO10117846_B_Snx2
  gRNA
ctggctggttcgggagatga

SEQ ID NO: 117847 - DNA, 20 bp, Artificial Sequence
  MKO10117847_B_Snx2
  gRNA
tgatggcatgaatgcttaca

SEQ ID NO: 117848 - DNA, 20 bp, Artificial Sequence
  MKO10117848_B_Snx30
  gRNA
tcctcagccagtcgaaatcc

SEQ ID NO: 117849 - DNA, 20 bp, Artificial Sequence
  MKO10117849_B_Snx30
  gRNA
taagaagcacgtctgcacaa

SEQ ID NO: 117850 - DNA, 20 bp, Artificial Sequence
  MKO10117850_B_Snx30
  gRNA
cgctggacaaattcctaaaa

SEQ ID NO: 117851 - DNA, 20 bp, Artificial Sequence
  MKO10117851_B_Snx31
  gRNA
tttcagctgagacgggtgtt

SEQ ID NO: 117852 - DNA, 20 bp, Artificial Sequence
  MKO10117852_B_Snx31
  gRNA
tttgcaggtagcgttccaac

SEQ ID NO: 117853 - DNA, 20 bp, Artificial Sequence
  MKO10117853_B_Snx31
  gRNA
tgtagcgtactttgcagaag

SEQ ID NO: 117854 - DNA, 20 bp, Artificial Sequence
  MKO10117854_B_Snx32
  gRNA
gcagggggacagtcccttac

SEQ ID NO: 117855 - DNA, 20 bp, Artificial Sequence
  MKO10117855_B_Snx32
  gRNA
cccctgcagatccactgacg

SEQ ID NO: 117856 - DNA, 20 bp, Artificial Sequence
  MKO10117856_B_Snx32
  gRNA
ccacaacttctccgtcttct

SEQ ID NO: 117857 - DNA, 20 bp, Artificial Sequence
  MKO10117857_B_Snx33
  gRNA
ccagctgctggcctacccgc

SEQ ID NO: 117858 - DNA, 20 bp, Artificial Sequence
  MKO10117858_B_Snx33
  gRNA
acaatctcgacgtaagaagc

SEQ ID NO: 117859 - DNA, 20 bp, Artificial Sequence
  MKO10117859_B_Snx33
  gRNA
cgtcctacagcttagcaacg

SEQ ID NO: 117860 - DNA, 20 bp, Artificial Sequence
  MKO10117860_B_Snx3
  gRNA
tgtgaagacaacgttcattc

SEQ ID NO: 117861 - DNA, 20 bp, Artificial Sequence
  MKO10117861_B_Snx3
  gRNA
gttgtagttcccccactccc

SEQ ID NO: 117862 - DNA, 20 bp, Artificial Sequence
  MKO10117862_B_Snx3
  gRNA
cagggtcgctggtcatcctc

SEQ ID NO: 117863 - DNA, 20 bp, Artificial Sequence
  MKO10117863_B_Snx4
  gRNA
tgtgagcacactctgaccat

SEQ ID NO: 117864 - DNA, 20 bp, Artificial Sequence
  MKO10117864_B_Snx4
  gRNA
caacccaccgagtctcgatg

SEQ ID NO: 117865 - DNA, 20 bp, Artificial Sequence
  MKO10117865_B_Snx4
  gRNA
ctgcctacctcatcgagact

SEQ ID NO: 117866 - DNA, 20 bp, Artificial Sequence
  MKO10117866_B_Snx5
  gRNA
ttccagttcttgcttcatct

SEQ ID NO: 117867 - DNA, 20 bp, Artificial Sequence
  MKO10117867_B_Snx5
  gRNA
agtttctgcatcttctctcg

SEQ ID NO: 117868 - DNA, 20 bp, Artificial Sequence
  MKO10117868_B_Snx5
  gRNA
gctctgaaatgtggacagtg

SEQ ID NO: 117869 - DNA, 20 bp, Artificial Sequence
  MKO10117869_B_Snx6
  gRNA
tttcagacgcgctcagtgag

SEQ ID NO: 117870 - DNA, 20 bp, Artificial Sequence
  MKO10117870_B_Snx6
  gRNA
ttcctctcggaggaagaccg

SEQ ID NO: 117871 - DNA, 20 bp, Artificial Sequence
  MKO10117871_B_Snx6
  gRNA
ctccgcggtcttcctccgag

SEQ ID NO: 117872 - DNA, 20 bp, Artificial Sequence
  MKO10117872_B_Snx7
  gRNA
atctggtttatcatcgacaa

SEQ ID NO: 117873 - DNA, 20 bp, Artificial Sequence
  MKO10117873_B_Snx7
  gRNA
gcagtggcatcttccatgcg

SEQ ID NO: 117874 - DNA, 20 bp, Artificial Sequence
  MKO10117874_B_Snx7
  gRNA
actcacgggaataatgagag

SEQ ID NO: 117875 - DNA, 20 bp, Artificial Sequence
  MKO10117875_B_Snx8
  gRNA
ccttaagcatgtggagtacg

SEQ ID NO: 117876 - DNA, 20 bp, Artificial Sequence
  MKO10117876_B_Snx8
  gRNA
agccgacagggagttcatcg

SEQ ID NO: 117877 - DNA, 20 bp, Artificial Sequence
  MKO10117877_B_Snx8
  gRNA
cacacttaccgagccactga

SEQ ID NO: 117878 - DNA, 20 bp, Artificial Sequence
  MKO10117878_B_Snx9
  gRNA
cagacggaactagcgctcag

SEQ ID NO: 117879 - DNA, 20 bp, Artificial Sequence
  MKO10117879_B_Snx9
  gRNA
gcttgttcctactgactacg

SEQ ID NO: 117880 - DNA, 20 bp, Artificial Sequence
  MKO10117880_B_Snx9
  gRNA
tttgagctgtgctagctgtc

SEQ ID NO: 117881 - DNA, 20 bp, Artificial Sequence
  MKO10117881_B_Soat1
  gRNA
tggtcacaaagtcatcgaag

SEQ ID NO: 117882 - DNA, 20 bp, Artificial Sequence
  MKO10117882_B_Soat1
  gRNA
tgctgccaacagcctcttct

SEQ ID NO: 117883 - DNA, 20 bp, Artificial Sequence
  MKO10117883_B_Soat1
  gRNA
ctgagagcacctccagaaca

SEQ ID NO: 117884 - DNA, 20 bp, Artificial Sequence
  MKO10117884_B_Soat2
  gRNA
cgagtccattgcaccaagtc

SEQ ID NO: 117885 - DNA, 20 bp, Artificial Sequence
  MKO10117885_B_Soat2
  gRNA
cttactcgatcagtgacttg

SEQ ID NO: 117886 - DNA, 20 bp, Artificial Sequence
  MKO10117886_B_Soat2
  gRNA
aagcttgcatagcctcccat

SEQ ID NO: 117887 - DNA, 20 bp, Artificial Sequence
  MKO10117887_B_Sobp
  gRNA
tcacctcgcttcccatactc

SEQ ID NO: 117888 - DNA, 20 bp, Artificial Sequence
  MKO10117888_B_Sobp
  gRNA
tttccttagcatagtgctgc

SEQ ID NO: 117889 - DNA, 20 bp, Artificial Sequence
  MKO10117889_B_Sobp
  gRNA
tatcatagccataccagcca

SEQ ID NO: 117890 - DNA, 20 bp, Artificial Sequence
  MKO10117890_B_Socs1
  gRNA
tccgctcccactccgattac

SEQ ID NO: 117891 - DNA, 20 bp, Artificial Sequence
  MKO10117891_B_Socs1
  gRNA
acgcacgggggccgctggcg

SEQ ID NO: 117892 - DNA, 20 bp, Artificial Sequence
  MKO10117892_B_Socs1
  gRNA
gctgtgtcgccagcgcatcg

SEQ ID NO: 117893 - DNA, 20 bp, Artificial Sequence
  MKO10117893_B_Socs2
  gRNA
actcatctcccatgaccctg

SEQ ID NO: 117894 - DNA, 20 bp, Artificial Sequence
  MKO10117894_B_Socs2
  gRNA
ctgtttgactgagctcgcgc

SEQ ID NO: 117895 - DNA, 20 bp, Artificial Sequence
  MKO10117895_B_Socs2
  gRNA
tgcctggagccctccgggaa

SEQ ID NO: 117896 - DNA, 20 bp, Artificial Sequence
  MKO10117896_B_Socs3
  gRNA
ctccaaaagcgagtaccagc

SEQ ID NO: 117897 - DNA, 20 bp, Artificial Sequence
  MKO10117897_B_Socs3
  gRNA
tgacgctcaacgtgaagaag

SEQ ID NO: 117898 - DNA, 20 bp, Artificial Sequence
  MKO10117898_B_Socs3
  gRNA
gttgagcgtcaagacccagt

SEQ ID NO: 117899 - DNA, 20 bp, Artificial Sequence
  MKO10117899_B_Socs4
  gRNA
cgctgaatctcgaagtaaaa

SEQ ID NO: 117900 - DNA, 20 bp, Artificial Sequence
  MKO10117900_B_Socs4
  gRNA
tttacttcgagattcagcgc

SEQ ID NO: 117901 - DNA, 20 bp, Artificial Sequence
  MKO10117901_B_Socs4
  gRNA
gagcggctcaaagaacatac

SEQ ID NO: 117902 - DNA, 20 bp, Artificial Sequence
  MKO10117902_B_Socs5
  gRNA
cctgtctgctaacgtgcgcg

SEQ ID NO: 117903 - DNA, 20 bp, Artificial Sequence
  MKO10117903_B_Socs5
  gRNA
tgagcttccgccgctacaac

SEQ ID NO: 117904 - DNA, 20 bp, Artificial Sequence
  MKO10117904_B_Socs5
  gRNA
tgcagatgcactacgtatga

SEQ ID NO: 117905 - DNA, 20 bp, Artificial Sequence
  MKO10117905_B_Socs6
  gRNA
acctgcatgaatcgtgacac

SEQ ID NO: 117906 - DNA, 20 bp, Artificial Sequence
  MKO10117906_B_Socs6
  gRNA
actcgcccccggcaggggta

SEQ ID NO: 117907 - DNA, 20 bp, Artificial Sequence
  MKO10117907_B_Socs6
  gRNA
actgggtaagttgctgatcc

SEQ ID NO: 117908 - DNA, 20 bp, Artificial Sequence
  MKO10117908_B_Socs7
  gRNA
tgcagccagccttcgagagc

SEQ ID NO: 117909 - DNA, 20 bp, Artificial Sequence
  MKO10117909_B_Socs7
  gRNA
tctcttgtagatgatatcag

SEQ ID NO: 117910 - DNA, 20 bp, Artificial Sequence
  MKO10117910_B_Socs7
  gRNA
agggtccttacctgtgaaca

SEQ ID NO: 117911 - DNA, 20 bp, Artificial Sequence
  MKO10117911_B_Sod1
  gRNA
gctcacctctcttcatccgc

SEQ ID NO: 117912 - DNA, 20 bp, Artificial Sequence
  MKO10117912_B_Sod1
  gRNA
gtgtattgtccccatactga

SEQ ID NO: 117913 - DNA, 20 bp, Artificial Sequence
  MKO10117913_B_Sod1
  gRNA
cgcaatcccaatcactccac

SEQ ID NO: 117914 - DNA, 20 bp, Artificial Sequence
  MKO10117914_B_Sod2
  gRNA
aggctatcaagcgtgacttt

SEQ ID NO: 117915 - DNA, 20 bp, Artificial Sequence
  MKO10117915_B_Sod2
  gRNA
gattgctgcctgctctaatc

SEQ ID NO: 117916 - DNA, 20 bp, Artificial Sequence
  MKO10117916_B_Sod2
  gRNA
ccaccattgaacttcagtgc

SEQ ID NO: 117917 - DNA, 20 bp, Artificial Sequence
  MKO10117917_B_Sod3
  gRNA
cgacgcgatgcctccagagc

SEQ ID NO: 117918 - DNA, 20 bp, Artificial Sequence
  MKO10117918_B_Sod3
  gRNA
cctgtctgctaggtcgaagc

SEQ ID NO: 117919 - DNA, 20 bp, Artificial Sequence
  MKO10117919_B_Sod3
  gRNA
ggtccccgaactcatgcacg

SEQ ID NO: 117920 - DNA, 20 bp, Artificial Sequence
  MKO10117920_B_Soga1
  gRNA
cctgcagtaccgactgcgta

SEQ ID NO: 117921 - DNA, 20 bp, Artificial Sequence
  MKO10117921_B_Soga1
  gRNA
gttgatggggaactcatccg

SEQ ID NO: 117922 - DNA, 20 bp, Artificial Sequence
  MKO10117922_B_Soga1
  gRNA
cagctccttgtgaagccgca

SEQ ID NO: 117923 - DNA, 20 bp, Artificial Sequence
  MKO10117923_B_Soga2
  gRNA
aagacgacaacgaaacgctc

SEQ ID NO: 117924 - DNA, 20 bp, Artificial Sequence
  MKO10117924_B_Soga2
  gRNA
gaatcctgcagtaccgactc

SEQ ID NO: 117925 - DNA, 20 bp, Artificial Sequence
  MKO10117925_B_Soga2
  gRNA
agagaagaaacttgttaacc

SEQ ID NO: 117926 - DNA, 20 bp, Artificial Sequence
  MKO10117926_B_Soga3
  gRNA
tttccccagtctgcgcgtag

SEQ ID NO: 117927 - DNA, 20 bp, Artificial Sequence
  MKO10117927_B_Soga3
  gRNA
gcaagctttacagaacgaac

SEQ ID NO: 117928 - DNA, 20 bp, Artificial Sequence
  MKO10117928_B_Soga3
  gRNA
tcaccatgaattagaaaatg

SEQ ID NO: 117929 - DNA, 20 bp, Artificial Sequence
  MKO10117929_B_Sohlh1
  gRNA
cagatgccatgtcctcccgt

SEQ ID NO: 117930 - DNA, 20 bp, Artificial Sequence
  MKO10117930_B_Sohlh1
  gRNA
tgtctgcaatctgattcgcc

SEQ ID NO: 117931 - DNA, 20 bp, Artificial Sequence
  MKO10117931_B_Sohlh1
  gRNA
gcgttgtcattcagtgagcc

SEQ ID NO: 117932 - DNA, 20 bp, Artificial Sequence
  MKO10117932_B_Sohlh2
  gRNA
gacttccactctaactgcag

SEQ ID NO: 117933 - DNA, 20 bp, Artificial Sequence
  MKO10117933_B_Sohlh2
  gRNA
cgagttagcagccaaaagca

SEQ ID NO: 117934 - DNA, 20 bp, Artificial Sequence
  MKO10117934_B_Sohlh2
  gRNA
tttcagtgagccgctgacct

SEQ ID NO: 117935 - DNA, 20 bp, Artificial Sequence
  MKO10117935_B_Son
  gRNA
ctttcgtggtcagtaaattc

SEQ ID NO: 117936 - DNA, 20 bp, Artificial Sequence
  MKO10117936_B_Son
  gRNA
gatttgtttcaccattcagc

SEQ ID NO: 117937 - DNA, 20 bp, Artificial Sequence
  MKO10117937_B_Son
  gRNA
cctctctggggtcttagata

SEQ ID NO: 117938 - DNA, 20 bp, Artificial Sequence
  MKO10117938_B_Sorbs1
  gRNA
ccttacctttgtctggtcca

SEQ ID NO: 117939 - DNA, 20 bp, Artificial Sequence
  MKO10117939_B_Sorbs1
  gRNA
gccctccccacttgctgcca

SEQ ID NO: 117940 - DNA, 20 bp, Artificial Sequence
  MKO10117940_B_Sorbs1
  gRNA
agctctaaagctgtggtgaa

SEQ ID NO: 117941 - DNA, 20 bp, Artificial Sequence
  MKO10117941_B_Sorbs2
  gRNA
tcaaagttctccaaacctat

SEQ ID NO: 117942 - DNA, 20 bp, Artificial Sequence
  MKO10117942_B_Sorbs2
  gRNA
gagtctcagtctccagattc

SEQ ID NO: 117943 - DNA, 20 bp, Artificial Sequence
  MKO10117943_B_Sorbs2
  gRNA
cttggagatcttacaatgat

SEQ ID NO: 117944 - DNA, 20 bp, Artificial Sequence
  MKO10117944_B_Sorbs3
  gRNA
ggccaggtctgataccatgc

SEQ ID NO: 117945 - DNA, 20 bp, Artificial Sequence
  MKO10117945_B_Sorbs3
  gRNA
ctcatcctcccgggggacaa

SEQ ID NO: 117946 - DNA, 20 bp, Artificial Sequence
  MKO10117946_B_Sorbs3
  gRNA
cattcttcgataccagtctc

SEQ ID NO: 117947 - DNA, 20 bp, Artificial Sequence
  MKO10117947_B_Sorcs1
  gRNA
gtatcaccgagagctcgctt

SEQ ID NO: 117948 - DNA, 20 bp, Artificial Sequence
  MKO10117948_B_Sorcs1
  gRNA
gtacctccaaagcgagctct

SEQ ID NO: 117949 - DNA, 20 bp, Artificial Sequence
  MKO10117949_B_Sorcs1
  gRNA
gtgtccaaccaacaagcgta

SEQ ID NO: 117950 - DNA, 20 bp, Artificial Sequence
  MKO10117950_B_Sorcs2
  gRNA
tgaccaaggaccacgtgttc

SEQ ID NO: 117951 - DNA, 20 bp, Artificial Sequence
  MKO10117951_B_Sorcs2
  gRNA
atatctgcccagctaacaaa

SEQ ID NO: 117952 - DNA, 20 bp, Artificial Sequence
  MKO10117952_B_Sorcs2
  gRNA
aaagaagtggacacttctgc

SEQ ID NO: 117953 - DNA, 20 bp, Artificial Sequence
  MKO10117953_B_Sorcs3
  gRNA
tgaagtcatagagcttcgtc

SEQ ID NO: 117954 - DNA, 20 bp, Artificial Sequence
  MKO10117954_B_Sorcs3
  gRNA
gctccttagtgaccccgaga

SEQ ID NO: 117955 - DNA, 20 bp, Artificial Sequence
  MKO10117955_B_Sorcs3
  gRNA
ggttgacatagagataactg

SEQ ID NO: 117956 - DNA, 20 bp, Artificial Sequence
  MKO10117956_B_Sord
  gRNA
gcatagatccccacagagag

SEQ ID NO: 117957 - DNA, 20 bp, Artificial Sequence
  MKO10117957_B_Sord
  gRNA
gtagatgagtactgcaagat

SEQ ID NO: 117958 - DNA, 20 bp, Artificial Sequence
  MKO10117958_B_Sord
  gRNA
aactacccaatacctgagct

SEQ ID NO: 117959 - DNA, 20 bp, Artificial Sequence
  MKO10117959_B_Sorl1
  gRNA
gtgttcctgaatcatgatcc

SEQ ID NO: 117960 - DNA, 20 bp, Artificial Sequence
  MKO10117960_B_Sorl1
  gRNA
agagaaaagcaacgtgatcg

SEQ ID NO: 117961 - DNA, 20 bp, Artificial Sequence
  MKO10117961_B_Sorl1
  gRNA
agtgcaccaccatctgattg

SEQ ID NO: 117962 - DNA, 20 bp, Artificial Sequence
  MKO10117962_B_Sort1
  gRNA
gacagtccaagttgtatcga

SEQ ID NO: 117963 - DNA, 20 bp, Artificial Sequence
  MKO10117963_B_Sort1
  gRNA
ctgtacatcatctgcgtcag

SEQ ID NO: 117964 - DNA, 20 bp, Artificial Sequence
  MKO10117964_B_Sort1
  gRNA
acctgaacactcttccgcct

SEQ ID NO: 117965 - DNA, 20 bp, Artificial Sequence
  MKO10117965_B_Sos1
  gRNA
ataataagtttgttctcctg

SEQ ID NO: 117966 - DNA, 20 bp, Artificial Sequence
  MKO10117966_B_Sos1
  gRNA
tcatcattagactcaagagt

SEQ ID NO: 117967 - DNA, 20 bp, Artificial Sequence
  MKO10117967_B_Sos1
  gRNA
ctactatgtaaacagaaacc

SEQ ID NO: 117968 - DNA, 20 bp, Artificial Sequence
  MKO10117968_B_Sos2
  gRNA
ccatgtgtccctctacattg

SEQ ID NO: 117969 - DNA, 20 bp, Artificial Sequence
  MKO10117969_B_Sos2
  gRNA
ccaatacagccacaatgtag

SEQ ID NO: 117970 - DNA, 20 bp, Artificial Sequence
  MKO10117970_B_Sos2
  gRNA
aaatcctctcttactacctg

SEQ ID NO: 117971 - DNA, 20 bp, Artificial Sequence
  MKO10117971_B_Sostdc1
  gRNA
ggcaggcatttcagtagcac

SEQ ID NO: 117972 - DNA, 20 bp, Artificial Sequence
  MKO10117972_B_Sostdc1
  gRNA
gcacttgcacgccgtgacca

SEQ ID NO: 117973 - DNA, 20 bp, Artificial Sequence
  MKO10117973_B_Sostdc1
  gRNA
gcgacacgctttcaaagttg

SEQ ID NO: 117974 - DNA, 20 bp, Artificial Sequence
  MKO10117974_B_Sost
  gRNA
caccatccctatgacgccaa

SEQ ID NO: 117975 - DNA, 20 bp, Artificial Sequence
  MKO10117975_B_Sost
  gRNA
agcgggtgtagtgcagctcg

SEQ ID NO: 117976 - DNA, 20 bp, Artificial Sequence
  MKO10117976_B_Sost
  gRNA
agacgcaccttgcgcgagcg

SEQ ID NO: 117977 - DNA, 20 bp, Artificial Sequence
  MKO10117977_B_Sowaha
  gRNA
gccggacatgaagtcgcgct

SEQ ID NO: 117978 - DNA, 20 bp, Artificial Sequence
  MKO10117978_B_Sowaha
  gRNA
tgcgcacggccagcggtcgt

SEQ ID NO: 117979 - DNA, 20 bp, Artificial Sequence
  MKO10117979_B_Sowaha
  gRNA
cggcaggccaccgcgaatct

SEQ ID NO: 117980 - DNA, 20 bp, Artificial Sequence
  MKO10117980_B_Sowahb
  gRNA
ctacagggcccggtcgctgc

SEQ ID NO: 117981 - DNA, 20 bp, Artificial Sequence
  MKO10117981_B_Sowahb
  gRNA
ctggcctccgaccgccgtcg

SEQ ID NO: 117982 - DNA, 20 bp, Artificial Sequence
  MKO10117982_B_Sowahb
  gRNA
gcgcattccctctatatccg

SEQ ID NO: 117983 - DNA, 20 bp, Artificial Sequence
  MKO10117983_B_Sowahc
  gRNA
cgtcggggcctcggttaccc

SEQ ID NO: 117984 - DNA, 20 bp, Artificial Sequence
  MKO10117984_B_Sowahc
  gRNA
ccgcgcccgcgagcgcttca

SEQ ID NO: 117985 - DNA, 20 bp, Artificial Sequence
  MKO10117985_B_Sowahc
  gRNA
cgcgggtgcgctgttcgcgc

SEQ ID NO: 117986 - DNA, 20 bp, Artificial Sequence
  MKO10117986_B_Sowahd
  gRNA
gtcccgccgctccagcggac

SEQ ID NO: 117987 - DNA, 20 bp, Artificial Sequence
  MKO10117987_B_Sowahd
  gRNA
cacagcgccctgaccgtgag

SEQ ID NO: 117988 - DNA, 20 bp, Artificial Sequence
  MKO10117988_B_Sowahd
  gRNA
ggccaagcacgggcgccacg

SEQ ID NO: 117989 - DNA, 20 bp, Artificial Sequence
  MKO10117989_B_Sox10
  gRNA
gcgccgtcgctgggacccga

SEQ ID NO: 117990 - DNA, 20 bp, Artificial Sequence
  MKO10117990_B_Sox10
  gRNA
ttcccgttcttccgccgccg

SEQ ID NO: 117991 - DNA, 20 bp, Artificial Sequence
  MKO10117991_B_Sox10
  gRNA
tgacaagcgccccttcattg

SEQ ID NO: 117992 - DNA, 20 bp, Artificial Sequence
  MKO10117992_B_Sox11
  gRNA
gttccccgactactgcacgc

SEQ ID NO: 117993 - DNA, 20 bp, Artificial Sequence
  MKO10117993_B_Sox11
  gRNA
agtagtcggggaactcgaag

SEQ ID NO: 117994 - DNA, 20 bp, Artificial Sequence
  MKO10117994_B_Sox11
  gRNA
tcaagctcaggtcgaacatg

SEQ ID NO: 117995 - DNA, 20 bp, Artificial Sequence
  MKO10117995_B_Sox12
  gRNA
cggagaagatcccgttcgtg

SEQ ID NO: 117996 - DNA, 20 bp, Artificial Sequence
  MKO10117996_B_Sox12
  gRNA
agacccccgggcgcgagctg

SEQ ID NO: 117997 - DNA, 20 bp, Artificial Sequence
  MKO10117997_B_Sox12
  gRNA
catcctccacagctcgcgcc

SEQ ID NO: 117998 - DNA, 20 bp, Artificial Sequence
  MKO10117998_B_Sox13
  gRNA
ctgctgcttctcaaacagca

SEQ ID NO: 117999 - DNA, 20 bp, Artificial Sequence
  MKO10117999_B_Sox13
  gRNA
gtttctgggaagaagcaatg

SEQ ID NO: 118000 - DNA, 20 bp, Artificial Sequence
  MKO10118000_B_Sox13
  gRNA
aaacctctccttccagtcac

SEQ ID NO: 118001 - DNA, 20 bp, Artificial Sequence
  MKO10118001_B_Sox14
  gRNA
ttattcgtcagcccacgcta

SEQ ID NO: 118002 - DNA, 20 bp, Artificial Sequence
  MKO10118002_B_Sox14
  gRNA
cgacacggacccgctcaagg

SEQ ID NO: 118003 - DNA, 20 bp, Artificial Sequence
  MKO10118003_B_Sox14
  gRNA
gcactggaactaaattgcgc

SEQ ID NO: 118004 - DNA, 20 bp, Artificial Sequence
  MKO10118004_B_Sox15
  gRNA
ccatataatacttcccttgc

SEQ ID NO: 118005 - DNA, 20 bp, Artificial Sequence
  MKO10118005_B_Sox15
  gRNA
caggtaggctgtcgaatagt

SEQ ID NO: 118006 - DNA, 20 bp, Artificial Sequence
  MKO10118006_B_Sox15
  gRNA
agcgtctgggggacttccgc

SEQ ID NO: 118007 - DNA, 20 bp, Artificial Sequence
  MKO10118007_B_Sox17
  gRNA
caaccgcttgcgttcgtctt

SEQ ID NO: 118008 - DNA, 20 bp, Artificial Sequence
  MKO10118008_B_Sox17
  gRNA
tcactccgcagtcgtgtccc

SEQ ID NO: 118009 - DNA, 20 bp, Artificial Sequence
  MKO10118009_B_Sox17
  gRNA
tcactggcgtatcccgcatc

SEQ ID NO: 118010 - DNA, 20 bp, Artificial Sequence
  MKO10118010_B_Sox18
  gRNA
cttccgcgagctacccactc

SEQ ID NO: 118011 - DNA, 20 bp, Artificial Sequence
  MKO10118011_B_Sox18
  gRNA
gtcgtcctgtgcgccgtagc

SEQ ID NO: 118012 - DNA, 20 bp, Artificial Sequence
  MKO10118012_B_Sox18
  gRNA
gtgcggagttcgatggcttg

SEQ ID NO: 118013 - DNA, 20 bp, Artificial Sequence
  MKO10118013_B_Sox1
  gRNA
gtgcagcgcgcgcagtctct

SEQ ID NO: 118014 - DNA, 20 bp, Artificial Sequence
  MKO10118014_B_Sox1
  gRNA
tgggctaacggcgcctaccc

SEQ ID NO: 118015 - DNA, 20 bp, Artificial Sequence
  MKO10118015_B_Sox1
  gRNA
cgcgcaccagaactcggcgg

SEQ ID NO: 118016 - DNA, 20 bp, Artificial Sequence
  MKO10118016_B_Sox21
  gRNA
tctgctcgcgaaccccgaga

SEQ ID NO: 118017 - DNA, 20 bp, Artificial Sequence
  MKO10118017_B_Sox21
  gRNA
cgccttgagcgccgggtgct

SEQ ID NO: 118018 - DNA, 20 bp, Artificial Sequence
  MKO10118018_B_Sox21
  gRNA
cccctactcactgctcgacc

SEQ ID NO: 118019 - DNA, 20 bp, Artificial Sequence
  MKO10118019_B_Sox2
  gRNA
cgcggccggtatttataatc

SEQ ID NO: 118020 - DNA, 20 bp, Artificial Sequence
  MKO10118020_B_Sox2
  gRNA
gtgccgcgccgtgagcgttg

SEQ ID NO: 118021 - DNA, 20 bp, Artificial Sequence
  MKO10118021_B_Sox2
  gRNA
cagcatgtcctactcgcagc

SEQ ID NO: 118022 - DNA, 20 bp, Artificial Sequence
  MKO10118022_B_Sox30
  gRNA
tgggtttatcagcctcgtcc

SEQ ID NO: 118023 - DNA, 20 bp, Artificial Sequence
  MKO10118023_B_Sox30
  gRNA
acagcacgtgcccttatagt

SEQ ID NO: 118024 - DNA, 20 bp, Artificial Sequence
  MKO10118024_B_Sox30
  gRNA
acctgatactcccttcagta

SEQ ID NO: 118025 - DNA, 20 bp, Artificial Sequence
  MKO10118025_B_Sox3
  gRNA
cactcgcagcgcgcgtgcct

SEQ ID NO: 118026 - DNA, 20 bp, Artificial Sequence
  MKO10118026_B_Sox3
  gRNA
cggagcgaacgcaggcaacg

SEQ ID NO: 118027 - DNA, 20 bp, Artificial Sequence
  MKO10118027_B_Sox3
  gRNA
cggcgcctactcgctcgtgc

SEQ ID NO: 118028 - DNA, 20 bp, Artificial Sequence
  MKO10118028_B_Sox4
  gRNA
cgatcgcccgctgaccaccg

SEQ ID NO: 118029 - DNA, 20 bp, Artificial Sequence
  MKO10118029_B_Sox4
  gRNA
cgcggtggtcagcgggcgat

SEQ ID NO: 118030 - DNA, 20 bp, Artificial Sequence
  MKO10118030_B_Sox4
  gRNA
ggcgcttcggcgtctcccgt

SEQ ID NO: 118031 - DNA, 20 bp, Artificial Sequence
  MKO10118031_B_Sox5
  gRNA
tattgaaaagctactctcca

SEQ ID NO: 118032 - DNA, 20 bp, Artificial Sequence
  MKO10118032_B_Sox5
  gRNA
agttccctgatcccattgcc

SEQ ID NO: 118033 - DNA, 20 bp, Artificial Sequence
  MKO10118033_B_Sox5
  gRNA
tactgaccctgatttacctc

SEQ ID NO: 118034 - DNA, 20 bp, Artificial Sequence
  MKO10118034_B_Sox6
  gRNA
catcgcagatcgagaaacag

SEQ ID NO: 118035 - DNA, 20 bp, Artificial Sequence
  MKO10118035_B_Sox6
  gRNA
gctcccgcaagctgatcagc

SEQ ID NO: 118036 - DNA, 20 bp, Artificial Sequence
  MKO10118036_B_Sox6
  gRNA
ttcctctccatccgctgtac

SEQ ID NO: 118037 - DNA, 20 bp, Artificial Sequence
  MKO10118037_B_Sox7
  gRNA
cggataggcgcccagcagcg

SEQ ID NO: 118038 - DNA, 20 bp, Artificial Sequence
  MKO10118038_B_Sox7
  gRNA
cagggtccacgcgcttgcag

SEQ ID NO: 118039 - DNA, 20 bp, Artificial Sequence
  MKO10118039_B_Sox7
  gRNA
tgctgagctccgcgttgtgc

SEQ ID NO: 118040 - DNA, 20 bp, Artificial Sequence
  MKO10118040_B_Sox8
  gRNA
cattgctgaagtcgatgttc

SEQ ID NO: 118041 - DNA, 20 bp, Artificial Sequence
  MKO10118041_B_Sox8
  gRNA
ggtctttcttgtgctgcaca

SEQ ID NO: 118042 - DNA, 20 bp, Artificial Sequence
  MKO10118042_B_Sox8
  gRNA
ctctcggcctcctccacaaa

SEQ ID NO: 118043 - DNA, 20 bp, Artificial Sequence
  MKO10118043_B_Sox9
  gRNA
accagccgagtcctccgaca

SEQ ID NO: 118044 - DNA, 20 bp, Artificial Sequence
  MKO10118044_B_Sox9
  gRNA
ccgattacaagtaccagccc

SEQ ID NO: 118045 - DNA, 20 bp, Artificial Sequence
  MKO10118045_B_Sox9
  gRNA
gagcgagaagagacccttcg

SEQ ID NO: 118046 - DNA, 20 bp, Artificial Sequence
  MKO10118046_B_Sp100
  gRNA
ttagatctctccgcatctga

SEQ ID NO: 118047 - DNA, 20 bp, Artificial Sequence
  MKO10118047_B_Sp100
  gRNA
tcccagctaagtcttgaaca

SEQ ID NO: 118048 - DNA, 20 bp, Artificial Sequence
  MKO10118048_B_Sp100
  gRNA
ctctaggatgtccactgaac

SEQ ID NO: 118049 - DNA, 20 bp, Artificial Sequence
  MKO10118049_B_Sp110
  gRNA
agcttctgaaaattgccacc

SEQ ID NO: 118050 - DNA, 20 bp, Artificial Sequence
  MKO10118050_B_Sp110
  gRNA
actgaccctgcttgaagacc

SEQ ID NO: 118051 - DNA, 20 bp, Artificial Sequence
  MKO10118051_B_Sp110
  gRNA
agatcaccagagaaaagata

SEQ ID NO: 118052 - DNA, 20 bp, Artificial Sequence
  MKO10118052_B_Sp140
  gRNA
tcaagaaacatgtaagaacc

SEQ ID NO: 118053 - DNA, 20 bp, Artificial Sequence
  MKO10118053_B_Sp140
  gRNA
atatcactttcagaagatcc

SEQ ID NO: 118054 - DNA, 20 bp, Artificial Sequence
  MKO10118054_B_Sp140
  gRNA
tgcttgttcatcattcgttt

SEQ ID NO: 118055 - DNA, 20 bp, Artificial Sequence
  MKO10118055_B_Sp1
  gRNA
atgatctgttggtttgcacc

SEQ ID NO: 118056 - DNA, 20 bp, Artificial Sequence
  MKO10118056_B_Sp1
  gRNA
aataatgggggtagcggcaa

SEQ ID NO: 118057 - DNA, 20 bp, Artificial Sequence
  MKO10118057_B_Sp1
  gRNA
gacgagtcctgcgtccagct

SEQ ID NO: 118058 - DNA, 20 bp, Artificial Sequence
  MKO10118058_B_Sp2
  gRNA
gccaacgtggtgaagctgac

SEQ ID NO: 118059 - DNA, 20 bp, Artificial Sequence
  MKO10118059_B_Sp2
  gRNA
gtttatatccgtacaccttc

SEQ ID NO: 118060 - DNA, 20 bp, Artificial Sequence
  MKO10118060_B_Sp2
  gRNA
cagcctgaacgccgcacagc

SEQ ID NO: 118061 - DNA, 20 bp, Artificial Sequence
  MKO10118061_B_Sp3
  gRNA
aatcaaaccttactcgcctc

SEQ ID NO: 118062 - DNA, 20 bp, Artificial Sequence
  MKO10118062_B_Sp3
  gRNA
tcagtcaacagacgctcagc

SEQ ID NO: 118063 - DNA, 20 bp, Artificial Sequence
  MKO10118063_B_Sp3
  gRNA
gggacttaccgctccggcgg

SEQ ID NO: 118064 - DNA, 20 bp, Artificial Sequence
  MKO10118064_B_Sp4
  gRNA
aaagaccgttcatatgcaac

SEQ ID NO: 118065 - DNA, 20 bp, Artificial Sequence
  MKO10118065_B_Sp4
  gRNA
actcttcggagcctcttgcc

SEQ ID NO: 118066 - DNA, 20 bp, Artificial Sequence
  MKO10118066_B_Sp4
  gRNA
acctccgagcacatctccga

SEQ ID NO: 118067 - DNA, 20 bp, Artificial Sequence
  MKO10118067_B_Sp5
  gRNA
aggcctgcagtgagtcgttc

SEQ ID NO: 118068 - DNA, 20 bp, Artificial Sequence
  MKO10118068_B_Sp5
  gRNA
ttgaccggcgagaactcgta

SEQ ID NO: 118069 - DNA, 20 bp, Artificial Sequence
  MKO10118069_B_Sp5
  gRNA
gtacccttacgagttctcgc

SEQ ID NO: 118070 - DNA, 20 bp, Artificial Sequence
  MKO10118070_B_Sp6
  gRNA
tggcgtggtggaaccacccg

SEQ ID NO: 118071 - DNA, 20 bp, Artificial Sequence
  MKO10118071_B_Sp6
  gRNA
gatggacctcccccatactc

SEQ ID NO: 118072 - DNA, 20 bp, Artificial Sequence
  MKO10118072_B_Sp6
  gRNA
cttcatgcgcagcgaccacc

SEQ ID NO: 118073 - DNA, 20 bp, Artificial Sequence
  MKO10118073_B_Sp7
  gRNA
aacagttacctcaagcagag

SEQ ID NO: 118074 - DNA, 20 bp, Artificial Sequence
  MKO10118074_B_Sp7
  gRNA
tcagacgagctgtgcccctt

SEQ ID NO: 118075 - DNA, 20 bp, Artificial Sequence
  MKO10118075_B_Sp7
  gRNA
cccactattgccaaccgcct

SEQ ID NO: 118076 - DNA, 20 bp, Artificial Sequence
  MKO10118076_B_Sp8
  gRNA
cgccgcgctgtgctcgctgt

SEQ ID NO: 118077 - DNA, 20 bp, Artificial Sequence
  MKO10118077_B_Sp8
  gRNA
cgattccgccccgtcgccgc

SEQ ID NO: 118078 - DNA, 20 bp, Artificial Sequence
  MKO10118078_B_Sp8
  gRNA
gagcgagcctgcgtcgcaaa

SEQ ID NO: 118079 - DNA, 20 bp, Artificial Sequence
  MKO10118079_B_Sp9
  gRNA
gctatggccacgtctatact

SEQ ID NO: 118080 - DNA, 20 bp, Artificial Sequence
  MKO10118080_B_Sp9
  gRNA
gcgctccgcccgtcgctact

SEQ ID NO: 118081 - DNA, 20 bp, Artificial Sequence
  MKO10118081_B_Sp9
  gRNA
gacttgtaccacgactcgta

SEQ ID NO: 118082 - DNA, 20 bp, Artificial Sequence
  MKO10118082_B_Spa17
  gRNA
ctataacaaccacgcattca

SEQ ID NO: 118083 - DNA, 20 bp, Artificial Sequence
  MKO10118083_B_Spa17
  gRNA
ctacgtacgaagggagtgac

SEQ ID NO: 118084 - DNA, 20 bp, Artificial Sequence
  MKO10118084_B_Spa17
  gRNA
caagaattagctaagtcatc

SEQ ID NO: 118085 - DNA, 20 bp, Artificial Sequence
  MKO10118085_B_Spaca1
  gRNA
ttcaccgtctatacaacaaa

SEQ ID NO: 118086 - DNA, 20 bp, Artificial Sequence
  MKO10118086_B_Spaca1
  gRNA
atagtcaaagaagtagaatt

SEQ ID NO: 118087 - DNA, 20 bp, Artificial Sequence
  MKO10118087_B_Spaca1
  gRNA
aaaatcgtttcaaatatgta

SEQ ID NO: 118088 - DNA, 20 bp, Artificial Sequence
  MKO10118088_B_Spaca3
  gRNA
cgagggttctgcaccacctc

SEQ ID NO: 118089 - DNA, 20 bp, Artificial Sequence
  MKO10118089_B_Spaca3
  gRNA
gaagatagttcaagaacccc

SEQ ID NO: 118090 - DNA, 20 bp, Artificial Sequence
  MKO10118090_B_Spaca3
  gRNA
gccctggcagtggtgcctcc

SEQ ID NO: 118091 - DNA, 20 bp, Artificial Sequence
  MKO10118091_B_Spaca4
  gRNA
ggccagtgcccttattgcaa

SEQ ID NO: 118092 - DNA, 20 bp, Artificial Sequence
  MKO10118092_B_Spaca4
  gRNA
ccacaccctgggctactccg

SEQ ID NO: 118093 - DNA, 20 bp, Artificial Sequence
  MKO10118093_B_Spaca4
  gRNA
tccttgatgcctgtcacacc

SEQ ID NO: 118094 - DNA, 20 bp, Artificial Sequence
  MKO10118094_B_Spaca5
  gRNA
tatagcctttgaagccatcg

SEQ ID NO: 118095 - DNA, 20 bp, Artificial Sequence
  MKO10118095_B_Spaca5
  gRNA
cgtattgttgattgccaaat

SEQ ID NO: 118096 - DNA, 20 bp, Artificial Sequence
  MKO10118096_B_Spaca5
  gRNA
ctgactcaagctataataac

SEQ ID NO: 118097 - DNA, 20 bp, Artificial Sequence
  MKO10118097_B_Spaca6
  gRNA
ccggcctgcatccctccttg

SEQ ID NO: 118098 - DNA, 20 bp, Artificial Sequence
  MKO10118098_B_Spaca6
  gRNA
tctgtgtaaattcatcatgc

SEQ ID NO: 118099 - DNA, 20 bp, Artificial Sequence
  MKO10118099_B_Spaca6
  gRNA
cttaccacaaggagggatgc

SEQ ID NO: 118100 - DNA, 20 bp, Artificial Sequence
  MKO10118100_B_Spaca7
  gRNA
gttccaggtccaattactga

SEQ ID NO: 118101 - DNA, 20 bp, Artificial Sequence
  MKO10118101_B_Spaca7
  gRNA
gctctcaccttcaggagacg

SEQ ID NO: 118102 - DNA, 20 bp, Artificial Sequence
  MKO10118102_B_Spaca7
  gRNA
tattgatgaaaactaccaag

SEQ ID NO: 118103 - DNA, 20 bp, Artificial Sequence
  MKO10118103_B_Spag11a
  gRNA
gtcttcttctgctttgtcca

SEQ ID NO: 118104 - DNA, 20 bp, Artificial Sequence
  MKO10118104_B_Spag11a
  gRNA
aggctcttcatgtgccgttc

SEQ ID NO: 118105 - DNA, 20 bp, Artificial Sequence
  MKO10118105_B_Spag11a
  gRNA
cacacggtgtttctgattcc

SEQ ID NO: 118106 - DNA, 20 bp, Artificial Sequence
  MKO10118106_B_Spag11b
  gRNA
gtcaactgcaagaaaagtga

SEQ ID NO: 118107 - DNA, 20 bp, Artificial Sequence
  MKO10118107_B_Spag11b
  gRNA
ctgctttacctggaaacagc

SEQ ID NO: 118108 - DNA, 20 bp, Artificial Sequence
  MKO10118108_B_Spag11b
  gRNA
aaaagtagactggcaaagaa

SEQ ID NO: 118109 - DNA, 20 bp, Artificial Sequence
  MKO10118109_B_Spag16
  gRNA
caccaaaatatggatgtctc

SEQ ID NO: 118110 - DNA, 20 bp, Artificial Sequence
  MKO10118110_B_Spag16
  gRNA
tcctgcattacattccttgc

SEQ ID NO: 118111 - DNA, 20 bp, Artificial Sequence
  MKO10118111_B_Spag16
  gRNA
agatgaatgcgaatatgaag

SEQ ID NO: 118112 - DNA, 20 bp, Artificial Sequence
  MKO10118112_B_Spag17
  gRNA
cctccatcgccttcgtggtt

SEQ ID NO: 118113 - DNA, 20 bp, Artificial Sequence
  MKO10118113_B_Spag17
  gRNA
cccaaccacgaaggcgatgg

SEQ ID NO: 118114 - DNA, 20 bp, Artificial Sequence
  MKO10118114_B_Spag17
  gRNA
gacgaggccaaatcctatat

SEQ ID NO: 118115 - DNA, 20 bp, Artificial Sequence
  MKO10118115_B_Spag1
  gRNA
aggcagaggatcttccactc

SEQ ID NO: 118116 - DNA, 20 bp, Artificial Sequence
  MKO10118116_B_Spag1
  gRNA
ttccaagggattatgcagaa

SEQ ID NO: 118117 - DNA, 20 bp, Artificial Sequence
  MKO10118117_B_Spag1
  gRNA
tcccattctgcataatccct

SEQ ID NO: 118118 - DNA, 20 bp, Artificial Sequence
  MKO10118118_B_Spag4
  gRNA
ccccaactcacgttctccaa

SEQ ID NO: 118119 - DNA, 20 bp, Artificial Sequence
  MKO10118119_B_Spag4
  gRNA
cctgtacctgatccctcctt

SEQ ID NO: 118120 - DNA, 20 bp, Artificial Sequence
  MKO10118120_B_Spag4
  gRNA
gtccctaggcctcctctttc

SEQ ID NO: 118121 - DNA, 20 bp, Artificial Sequence
  MKO10118121_B_Spag5
  gRNA
ggtcagcgcggagatcatag

SEQ ID NO: 118122 - DNA, 20 bp, Artificial Sequence
  MKO10118122_B_Spag5
  gRNA
acccctcgccacgtgttctg

SEQ ID NO: 118123 - DNA, 20 bp, Artificial Sequence
  MKO10118123_B_Spag5
  gRNA
ttccaagtcgtgtcgggaca

SEQ ID NO: 118124 - DNA, 20 bp, Artificial Sequence
  MKO10118124_B_Spag6
  gRNA
aacagaattatctcaagccg

SEQ ID NO: 118125 - DNA, 20 bp, Artificial Sequence
  MKO10118125_B_Spag6
  gRNA
catagttgactgcggagctc

SEQ ID NO: 118126 - DNA, 20 bp, Artificial Sequence
  MKO10118126_B_Spag6
  gRNA
aattcaacagactgcagctt

SEQ ID NO: 118127 - DNA, 20 bp, Artificial Sequence
  MKO10118127_B_Spag7
  gRNA
ggtcccactcctctccatga

SEQ ID NO: 118128 - DNA, 20 bp, Artificial Sequence
  MKO10118128_B_Spag7
  gRNA
ttacagacatgatgtggtag

SEQ ID NO: 118129 - DNA, 20 bp, Artificial Sequence
  MKO10118129_B_Spag7
  gRNA
ctatgtcatgatcttcaaaa

SEQ ID NO: 118130 - DNA, 20 bp, Artificial Sequence
  MKO10118130_B_Spag8
  gRNA
ctcaccagatctggtgtcgc

SEQ ID NO: 118131 - DNA, 20 bp, Artificial Sequence
  MKO10118131_B_Spag8
  gRNA
agggatttgatccagctggt

SEQ ID NO: 118132 - DNA, 20 bp, Artificial Sequence
  MKO10118132_B_Spag8
  gRNA
cacatctgtcagccacttcg

SEQ ID NO: 118133 - DNA, 20 bp, Artificial Sequence
  MKO10118133_B_Spag9
  gRNA
gagactaggaatgtgtctac

SEQ ID NO: 118134 - DNA, 20 bp, Artificial Sequence
  MKO10118134_B_Spag9
  gRNA
ttgaacctttatatccactg

SEQ ID NO: 118135 - DNA, 20 bp, Artificial Sequence
  MKO10118135_B_Spag9
  gRNA
acgttctcataccagcctga

SEQ ID NO: 118136 - DNA, 20 bp, Artificial Sequence
  MKO10118136_B_Spam1
  gRNA
tatgagtttagcacaacgtg

SEQ ID NO: 118137 - DNA, 20 bp, Artificial Sequence
  MKO10118137_B_Spam1
  gRNA
caagacgtgaatgtgtgcgt

SEQ ID NO: 118138 - DNA, 20 bp, Artificial Sequence
  MKO10118138_B_Spam1
  gRNA
attgttgctctgggtacctc

SEQ ID NO: 118139 - DNA, 20 bp, Artificial Sequence
  MKO10118139_B_Sparcl1
  gRNA
ccctgcaaaaatcctagatc

SEQ ID NO: 118140 - DNA, 20 bp, Artificial Sequence
  MKO10118140_B_Sparcl1
  gRNA
gacgctacagtccccattgc

SEQ ID NO: 118141 - DNA, 20 bp, Artificial Sequence
  MKO10118141_B_Sparcl1
  gRNA
cttgagttgccctcatctga

SEQ ID NO: 118142 - DNA, 20 bp, Artificial Sequence
  MKO10118142_B_Sparc
  gRNA
tgcatggtccgatgtagtcc

SEQ ID NO: 118143 - DNA, 20 bp, Artificial Sequence
  MKO10118143_B_Sparc
  gRNA
tgtgggtgccaacccagtcc

SEQ ID NO: 118144 - DNA, 20 bp, Artificial Sequence
  MKO10118144_B_Sparc
  gRNA
gatagtggaggaggaaaccg

SEQ ID NO: 118145 - DNA, 20 bp, Artificial Sequence
  MKO10118145_B_Spast
  gRNA
aggaatcgctgttatagtta

SEQ ID NO: 118146 - DNA, 20 bp, Artificial Sequence
  MKO10118146_B_Spast
  gRNA
tctggagcaagaccgggacc

SEQ ID NO: 118147 - DNA, 20 bp, Artificial Sequence
  MKO10118147_B_Spast
  gRNA
aaggaccgtttacaacttct

SEQ ID NO: 118148 - DNA, 20 bp, Artificial Sequence
  MKO10118148_B_Spata13
  gRNA
tggaccgcgtggggcggcga

SEQ ID NO: 118149 - DNA, 20 bp, Artificial Sequence
  MKO10118149_B_Spata13
  gRNA
tctgccgtcgccgccccacg

SEQ ID NO: 118150 - DNA, 20 bp, Artificial Sequence
  MKO10118150_B_Spata13
  gRNA
gcaggtaccgagggttggcc

SEQ ID NO: 118151 - DNA, 20 bp, Artificial Sequence
  MKO10118151_B_Spata16
  gRNA
ctgcctgacgaagatggttt

SEQ ID NO: 118152 - DNA, 20 bp, Artificial Sequence
  MKO10118152_B_Spata16
  gRNA
gaacatgtagtccgcaatca

SEQ ID NO: 118153 - DNA, 20 bp, Artificial Sequence
  MKO10118153_B_Spata16
  gRNA
tcacatgctacctacgtatg

SEQ ID NO: 118154 - DNA, 20 bp, Artificial Sequence
  MKO10118154_B_Spata17
  gRNA
tatttacctcaacaacaagt

SEQ ID NO: 118155 - DNA, 20 bp, Artificial Sequence
  MKO10118155_B_Spata17
  gRNA
tagaaagtcagtactacttt

SEQ ID NO: 118156 - DNA, 20 bp, Artificial Sequence
  MKO10118156_B_Spata17
  gRNA
tagtgacaattattcaaaag

SEQ ID NO: 118157 - DNA, 20 bp, Artificial Sequence
  MKO10118157_B_Spata18
  gRNA
tcttacagtctggctgaaag

SEQ ID NO: 118158 - DNA, 20 bp, Artificial Sequence
  MKO10118158_B_Spata18
  gRNA
gtctgagatgtgtgctacac

SEQ ID NO: 118159 - DNA, 20 bp, Artificial Sequence
  MKO10118159_B_Spata18
  gRNA
ctcttagggggaaataatga

SEQ ID NO: 118160 - DNA, 20 bp, Artificial Sequence
  MKO10118160_B_Spata19
  gRNA
acgtcatccatcacttcact

SEQ ID NO: 118161 - DNA, 20 bp, Artificial Sequence
  MKO10118161_B_Spata19
  gRNA
atcaacgactctcccaccca

SEQ ID NO: 118162 - DNA, 20 bp, Artificial Sequence
  MKO10118162_B_Spata19
  gRNA
gttcaaccagtgctgcacaa

SEQ ID NO: 118163 - DNA, 20 bp, Artificial Sequence
  MKO10118163_B_Spata1
  gRNA
gagcgtcttggggagtttct

SEQ ID NO: 118164 - DNA, 20 bp, Artificial Sequence
  MKO10118164_B_Spata1
  gRNA
aacagttactttagatgaac

SEQ ID NO: 118165 - DNA, 20 bp, Artificial Sequence
  MKO10118165_B_Spata1
  gRNA
attaacaactttatttctgc

SEQ ID NO: 118166 - DNA, 20 bp, Artificial Sequence
  MKO10118166_B_Spata20
  gRNA
gggcacctacttcccgccag

SEQ ID NO: 118167 - DNA, 20 bp, Artificial Sequence
  MKO10118167_B_Spata20
  gRNA
gttgggtctaggtacccctg

SEQ ID NO: 118168 - DNA, 20 bp, Artificial Sequence
  MKO10118168_B_Spata20
  gRNA
tggggtactctacctgtcac

SEQ ID NO: 118169 - DNA, 20 bp, Artificial Sequence
  MKO10118169_B_Spata21
  gRNA
ccttcttgccgagagctgcc

SEQ ID NO: 118170 - DNA, 20 bp, Artificial Sequence
  MKO10118170_B_Spata21
  gRNA
gaggcgaggctgccgagatc

SEQ ID NO: 118171 - DNA, 20 bp, Artificial Sequence
  MKO10118171_B_Spata21
  gRNA
gagagggagctccgacccac

SEQ ID NO: 118172 - DNA, 20 bp, Artificial Sequence
  MKO10118172_B_Spata22
  gRNA
agtactgtttctgacagtta

SEQ ID NO: 118173 - DNA, 20 bp, Artificial Sequence
  MKO10118173_B_Spata22
  gRNA
ttcttacctgttggaaaaga

SEQ ID NO: 118174 - DNA, 20 bp, Artificial Sequence
  MKO10118174_B_Spata22
  gRNA
cacagaatcttgacttctcc

SEQ ID NO: 118175 - DNA, 20 bp, Artificial Sequence
  MKO10118175_B_Spata24
  gRNA
gatgagctggtccttcttgc

SEQ ID NO: 118176 - DNA, 20 bp, Artificial Sequence
  MKO10118176_B_Spata24
  gRNA
tgccaaaaccaaagccctcc

SEQ ID NO: 118177 - DNA, 20 bp, Artificial Sequence
  MKO10118177_B_Spata24
  gRNA
tctgttgcagatggttctcc

SEQ ID NO: 118178 - DNA, 20 bp, Artificial Sequence
  MKO10118178_B_Spata25
  gRNA
gccctctcaccttggccaga

SEQ ID NO: 118179 - DNA, 20 bp, Artificial Sequence
  MKO10118179_B_Spata25
  gRNA
aggtatgccagcgatcatca

SEQ ID NO: 118180 - DNA, 20 bp, Artificial Sequence
  MKO10118180_B_Spata25
  gRNA
aggtcctcttcccgcaggcc

SEQ ID NO: 118181 - DNA, 20 bp, Artificial Sequence
  MKO10118181_B_Spata2l
  gRNA
ccccactagcccgtcgagct

SEQ ID NO: 118182 - DNA, 20 bp, Artificial Sequence
  MKO10118182_B_Spata2l
  gRNA
cgcctttgagctcctagagc

SEQ ID NO: 118183 - DNA, 20 bp, Artificial Sequence
  MKO10118183_B_Spata2l
  gRNA
ctccgagctcgacgggctag

SEQ ID NO: 118184 - DNA, 20 bp, Artificial Sequence
  MKO10118184_B_Spata2
  gRNA
cagcgatgagtacctgcgcg

SEQ ID NO: 118185 - DNA, 20 bp, Artificial Sequence
  MKO10118185_B_Spata2
  gRNA
ctatgtcaagtccacgttgc

SEQ ID NO: 118186 - DNA, 20 bp, Artificial Sequence
  MKO10118186_B_Spata2
  gRNA
aggacatccgagccattcta

SEQ ID NO: 118187 - DNA, 20 bp, Artificial Sequence
  MKO10118187_B_Spata31d1a
  gRNA
gtataagcagtttcaatatc

SEQ ID NO: 118188 - DNA, 20 bp, Artificial Sequence
  MKO10118188_B_Spata31d1a
  gRNA
gaaactgcttatacatttgc

SEQ ID NO: 118189 - DNA, 20 bp, Artificial Sequence
  MKO10118189_B_Spata31d1a
  gRNA
ggctgcagacagtcctacaa

SEQ ID NO: 118190 - DNA, 20 bp, Artificial Sequence
  MKO10118190_B_Spata31d1b
  gRNA
aagagaaggcaaaccctcaa

SEQ ID NO: 118191 - DNA, 20 bp, Artificial Sequence
  MKO10118191_B_Spata31d1b
  gRNA
tcctctgcgccgcttctctc

SEQ ID NO: 118192 - DNA, 20 bp, Artificial Sequence
  MKO10118192_B_Spata31d1b
  gRNA
aactgcttatacacttgctg

SEQ ID NO: 118193 - DNA, 20 bp, Artificial Sequence
  MKO10118193_B_Spata31d1c
  gRNA
ggtctattcttctatacctg

SEQ ID NO: 118194 - DNA, 20 bp, Artificial Sequence
  MKO10118194_B_Spata31d1c
  gRNA
agctgctgtctgttgtgcaa

SEQ ID NO: 118195 - DNA, 20 bp, Artificial Sequence
  MKO10118195_B_Spata31d1c
  gRNA
agggctcagctaacaaagaa

SEQ ID NO: 118196 - DNA, 20 bp, Artificial Sequence
  MKO10118196_B_Spata31d1d
  gRNA
ttccttagcgctagttagaa

SEQ ID NO: 118197 - DNA, 20 bp, Artificial Sequence
  MKO10118197_B_Spata31d1d
  gRNA
gaaaggagagcgtcatttaa

SEQ ID NO: 118198 - DNA, 20 bp, Artificial Sequence
  MKO10118198_B_Spata31d1d
  gRNA
agctgcaagctgttgtgcaa

SEQ ID NO: 118199 - DNA, 20 bp, Artificial Sequence
  MKO10118199_B_Spata31
  gRNA
catgtccattgcccatatag

SEQ ID NO: 118200 - DNA, 20 bp, Artificial Sequence
  MKO10118200_B_Spata31
  gRNA
cattgtaggaatgatgcaaa

SEQ ID NO: 118201 - DNA, 20 bp, Artificial Sequence
  MKO10118201_B_Spata31
  gRNA
gccagttcaagaaaaagttt

SEQ ID NO: 118202 - DNA, 20 bp, Artificial Sequence
  MKO10118202_B_Spata32
  gRNA
cactgaatccttgccgcagc

SEQ ID NO: 118203 - DNA, 20 bp, Artificial Sequence
  MKO10118203_B_Spata32
  gRNA
gaggggatgacagcttaaaa

SEQ ID NO: 118204 - DNA, 20 bp, Artificial Sequence
  MKO10118204_B_Spata32
  gRNA
tcacacccatgaagaaaacg

SEQ ID NO: 118205 - DNA, 20 bp, Artificial Sequence
  MKO10118205_B_Spata33
  gRNA
ctaccttcagacgaagacga

SEQ ID NO: 118206 - DNA, 20 bp, Artificial Sequence
  MKO10118206_B_Spata33
  gRNA
ccctttacctttcttctctc

SEQ ID NO: 118207 - DNA, 20 bp, Artificial Sequence
  MKO10118207_B_Spata33
  gRNA
agcaaacccagagagaagaa

SEQ ID NO: 118208 - DNA, 20 bp, Artificial Sequence
  MKO10118208_B_Spata3
  gRNA
atgaccagtcccgaggtagg

SEQ ID NO: 118209 - DNA, 20 bp, Artificial Sequence
  MKO10118209_B_Spata3
  gRNA
ggagctagtctgcggtgaaa

SEQ ID NO: 118210 - DNA, 20 bp, Artificial Sequence
  MKO10118210_B_Spata3
  gRNA
agcttgaagcacgagagtta

SEQ ID NO: 118211 - DNA, 20 bp, Artificial Sequence
  MKO10118211_B_Spata4
  gRNA
tgaaattagcgagatcatcc

SEQ ID NO: 118212 - DNA, 20 bp, Artificial Sequence
  MKO10118212_B_Spata4
  gRNA
tacagaatatctctgcaact

SEQ ID NO: 118213 - DNA, 20 bp, Artificial Sequence
  MKO10118213_B_Spata4
  gRNA
tttcaaaggatgataatcga

SEQ ID NO: 118214 - DNA, 20 bp, Artificial Sequence
  MKO10118214_B_Spata5l1
  gRNA
ctcctggcagaaatgacggt

SEQ ID NO: 118215 - DNA, 20 bp, Artificial Sequence
  MKO10118215_B_Spata5l1
  gRNA
gggagccccgagttccgccg

SEQ ID NO: 118216 - DNA, 20 bp, Artificial Sequence
  MKO10118216_B_Spata5l1
  gRNA
ccatccaccctgtcgcgccg

SEQ ID NO: 118217 - DNA, 20 bp, Artificial Sequence
  MKO10118217_B_Spata5
  gRNA
cctccaggaaatcctgcaac

SEQ ID NO: 118218 - DNA, 20 bp, Artificial Sequence
  MKO10118218_B_Spata5
  gRNA
ctggataggtttatacagcc

SEQ ID NO: 118219 - DNA, 20 bp, Artificial Sequence
  MKO10118219_B_Spata5
  gRNA
cagaattcccttgttcatct

SEQ ID NO: 118220 - DNA, 20 bp, Artificial Sequence
  MKO10118220_B_Spata6
  gRNA
tgctttcaggtaacttgtcc

SEQ ID NO: 118221 - DNA, 20 bp, Artificial Sequence
  MKO10118221_B_Spata6
  gRNA
ttgatacagctagttccacc

SEQ ID NO: 118222 - DNA, 20 bp, Artificial Sequence
  MKO10118222_B_Spata6
  gRNA
agctgtgcgaccacatctcc

SEQ ID NO: 118223 - DNA, 20 bp, Artificial Sequence
  MKO10118223_B_Spata7
  gRNA
ggagttggcacggtgtgaaa

SEQ ID NO: 118224 - DNA, 20 bp, Artificial Sequence
  MKO10118224_B_Spata7
  gRNA
cagactaagcaccctgcagc

SEQ ID NO: 118225 - DNA, 20 bp, Artificial Sequence
  MKO10118225_B_Spata7
  gRNA
ctttgtaaattctctacaga

SEQ ID NO: 118226 - DNA, 20 bp, Artificial Sequence
  MKO10118226_B_Spata9
  gRNA
acccttgaatgagcgtccca

SEQ ID NO: 118227 - DNA, 20 bp, Artificial Sequence
  MKO10118227_B_Spata9
  gRNA
cttagttgaggggctccaga

SEQ ID NO: 118228 - DNA, 20 bp, Artificial Sequence
  MKO10118228_B_Spata9
  gRNA
aagattatcacagtctagcc

SEQ ID NO: 118229 - DNA, 20 bp, Artificial Sequence
  MKO10118229_B_Spatc1l
  gRNA
acgcgatctccccaacgatt

SEQ ID NO: 118230 - DNA, 20 bp, Artificial Sequence
  MKO10118230_B_Spatc1l
  gRNA
gcatcgctatctgactctga

SEQ ID NO: 118231 - DNA, 20 bp, Artificial Sequence
  MKO10118231_B_Spatc1l
  gRNA
taccataccattgaggtaat

SEQ ID NO: 118232 - DNA, 20 bp, Artificial Sequence
  MKO10118232_B_Spatc1
  gRNA
ccagagcgcgtacgtctcta

SEQ ID NO: 118233 - DNA, 20 bp, Artificial Sequence
  MKO10118233_B_Spatc1
  gRNA
acgttctgagcaacacctag

SEQ ID NO: 118234 - DNA, 20 bp, Artificial Sequence
  MKO10118234_B_Spatc1
  gRNA
catcagctgtcccacgatga

SEQ ID NO: 118235 - DNA, 20 bp, Artificial Sequence
  MKO10118235_B_Spats1
  gRNA
attctagagcatcaccgtgc

SEQ ID NO: 118236 - DNA, 20 bp, Artificial Sequence
  MKO10118236_B_Spats1
  gRNA
aagatgggcagcgtcctgag

SEQ ID NO: 118237 - DNA, 20 bp, Artificial Sequence
  MKO10118237_B_Spats1
  gRNA
taccgtatttcttcttcccg

SEQ ID NO: 118238 - DNA, 20 bp, Artificial Sequence
  MKO10118238_B_Spats2l
  gRNA
gaacctccaagggctcagcg

SEQ ID NO: 118239 - DNA, 20 bp, Artificial Sequence
  MKO10118239_B_Spats2l
  gRNA
ctattcaagttcttaaagaa

SEQ ID NO: 118240 - DNA, 20 bp, Artificial Sequence
  MKO10118240_B_Spats2l
  gRNA
tcatgtgaacatcaaagaga

SEQ ID NO: 118241 - DNA, 20 bp, Artificial Sequence
  MKO10118241_B_Spats2
  gRNA
tgtcaaagtgctgcaagacc

SEQ ID NO: 118242 - DNA, 20 bp, Artificial Sequence
  MKO10118242_B_Spats2
  gRNA
tttgcagtccaatactgtcc

SEQ ID NO: 118243 - DNA, 20 bp, Artificial Sequence
  MKO10118243_B_Spats2
  gRNA
ccattctttgagcacttcac

SEQ ID NO: 118244 - DNA, 20 bp, Artificial Sequence
  MKO10118244_B_Spc24
  gRNA
agttcatcagtgactacctc

SEQ ID NO: 118245 - DNA, 20 bp, Artificial Sequence
  MKO10118245_B_Spc24
  gRNA
atactgcccttgatcatccc

SEQ ID NO: 118246 - DNA, 20 bp, Artificial Sequence
  MKO10118246_B_Spc24
  gRNA
agtccaccacggccccacag

SEQ ID NO: 118247 - DNA, 20 bp, Artificial Sequence
  MKO10118247_B_Spc25
  gRNA
cttagcttcatttatgctca

SEQ ID NO: 118248 - DNA, 20 bp, Artificial Sequence
  MKO10118248_B_Spc25
  gRNA
gaggatgactgagatgattc

SEQ ID NO: 118249 - DNA, 20 bp, Artificial Sequence
  MKO10118249_B_Spc25
  gRNA
ttcattagctttgttagcag

SEQ ID NO: 118250 - DNA, 20 bp, Artificial Sequence
  MKO10118250_B_Spcs1
  gRNA
cagatagttgggtttatcta

SEQ ID NO: 118251 - DNA, 20 bp, Artificial Sequence
  MKO10118251_B_Spcs1
  gRNA
tctagctgacacttcctcca

SEQ ID NO: 118252 - DNA, 20 bp, Artificial Sequence
  MKO10118252_B_Spcs1
  gRNA
actgtctacatagttatggc

SEQ ID NO: 118253 - DNA, 20 bp, Artificial Sequence
  MKO10118253_B_Spcs2
  gRNA
tcctgagtccaagccagttt

SEQ ID NO: 118254 - DNA, 20 bp, Artificial Sequence
  MKO10118254_B_Spcs2
  gRNA
agcctgtaaaaattgataag

SEQ ID NO: 118255 - DNA, 20 bp, Artificial Sequence
  MKO10118255_B_Spcs2
  gRNA
cagaaaagaccccacaggaa

SEQ ID NO: 118256 - DNA, 20 bp, Artificial Sequence
  MKO10118256_B_Spcs3
  gRNA
ctctgaaccaagttgtcctt

SEQ ID NO: 118257 - DNA, 20 bp, Artificial Sequence
  MKO10118257_B_Spcs3
  gRNA
tatcaaatgtgatgaatccc

SEQ ID NO: 118258 - DNA, 20 bp, Artificial Sequence
  MKO10118258_B_Spcs3
  gRNA
atctagagaatatatttgat

SEQ ID NO: 118259 - DNA, 20 bp, Artificial Sequence
  MKO10118259_B_Spdef
  gRNA
cctactcaccgcagtagtga

SEQ ID NO: 118260 - DNA, 20 bp, Artificial Sequence
  MKO10118260_B_Spdef
  gRNA
atccgtccagccctcctcgc

SEQ ID NO: 118261 - DNA, 20 bp, Artificial Sequence
  MKO10118261_B_Spdef
  gRNA
cttcatccgctggctcaaca

SEQ ID NO: 118262 - DNA, 20 bp, Artificial Sequence
  MKO10118262_B_Spdl1
  gRNA
caatacttccttactgcacc

SEQ ID NO: 118263 - DNA, 20 bp, Artificial Sequence
  MKO10118263_B_Spdl1
  gRNA
agacgcacaccttgttcttc

SEQ ID NO: 118264 - DNA, 20 bp, Artificial Sequence
  MKO10118264_B_Spdl1
  gRNA
cttctttaagcctgtctacc

SEQ ID NO: 118265 - DNA, 20 bp, Artificial Sequence
  MKO10118265_B_Spdya
  gRNA
gtcctattcttaaagatagt

SEQ ID NO: 118266 - DNA, 20 bp, Artificial Sequence
  MKO10118266_B_Spdya
  gRNA
ttactataaatgagcatacc

SEQ ID NO: 118267 - DNA, 20 bp, Artificial Sequence
  MKO10118267_B_Spdya
  gRNA
agtcaattctgtcccagagt

SEQ ID NO: 118268 - DNA, 20 bp, Artificial Sequence
  MKO10118268_B_Spdyb
  gRNA
tgaactgaaagcgcagtttg

SEQ ID NO: 118269 - DNA, 20 bp, Artificial Sequence
  MKO10118269_B_Spdyb
  gRNA
ttccttcacagaggatcctg

SEQ ID NO: 118270 - DNA, 20 bp, Artificial Sequence
  MKO10118270_B_Spdyb
  gRNA
caccctcagcatcttgtccc

SEQ ID NO: 118271 - DNA, 20 bp, Artificial Sequence
  MKO10118271_B_Specc1l
  gRNA
ggaggagtaaacgtgactaa

SEQ ID NO: 118272 - DNA, 20 bp, Artificial Sequence
  MKO10118272_B_Specc1l
  gRNA
tgaaggcgctgcagatgaac

SEQ ID NO: 118273 - DNA, 20 bp, Artificial Sequence
  MKO10118273_B_Specc1l
  gRNA
agatgaataccgagctttcc

SEQ ID NO: 118274 - DNA, 20 bp, Artificial Sequence
  MKO10118274_B_Specc1
  gRNA
gcgtctttaactgccgctct

SEQ ID NO: 118275 - DNA, 20 bp, Artificial Sequence
  MKO10118275_B_Specc1
  gRNA
gacgctaacaaaacagataa

SEQ ID NO: 118276 - DNA, 20 bp, Artificial Sequence
  MKO10118276_B_Specc1
  gRNA
ggccaacgacatcaagtgtg

SEQ ID NO: 118277 - DNA, 20 bp, Artificial Sequence
  MKO10118277_B_Speer2
  gRNA
ttgcctgatcgctttcaaag

SEQ ID NO: 118278 - DNA, 20 bp, Artificial Sequence
  MKO10118278_B_Speer2
  gRNA
gctctcccgcttctgtgtga

SEQ ID NO: 118279 - DNA, 20 bp, Artificial Sequence
  MKO10118279_B_Speer2
  gRNA
cttgttcgtctttaccattc

SEQ ID NO: 118280 - DNA, 20 bp, Artificial Sequence
  MKO10118280_B_Speer3
  gRNA
gctctcccctttctgtgtga

SEQ ID NO: 118281 - DNA, 20 bp, Artificial Sequence
  MKO10118281_B_Speer3
  gRNA
gcacaatgagtttctgcctc

SEQ ID NO: 118282 - DNA, 20 bp, Artificial Sequence
  MKO10118282_B_Speer3
  gRNA
atgtatcttctggaagggcc

SEQ ID NO: 118283 - DNA, 20 bp, Artificial Sequence
  MKO10118283_B_Speer4a
  gRNA
ggtagggcctattcccacgc

SEQ ID NO: 118284 - DNA, 20 bp, Artificial Sequence
  MKO10118284_B_Speer4a
  gRNA
atatctacacaacttagaga

SEQ ID NO: 118285 - DNA, 20 bp, Artificial Sequence
  MKO10118285_B_Speer4a
  gRNA
tgaactcctgcttgttctct

SEQ ID NO: 118286 - DNA, 20 bp, Artificial Sequence
  MKO10118286_B_Speer4b
  gRNA
tccttctcttccttctcaaa

SEQ ID NO: 118287 - DNA, 20 bp, Artificial Sequence
  MKO10118287_B_Speer4b
  gRNA
aagcaagaagccgtttgaga

SEQ ID NO: 118288 - DNA, 20 bp, Artificial Sequence
  MKO10118288_B_Speer4b
  gRNA
ttataaagaactaaaattaa

SEQ ID NO: 118289 - DNA, 20 bp, Artificial Sequence
  MKO10118289_B_Speer4c
  gRNA
ctggggcaaggccctaccac

SEQ ID NO: 118290 - DNA, 20 bp, Artificial Sequence
  MKO10118290_B_Speer4c
  gRNA
cttacagtaacctgcacagc

SEQ ID NO: 118291 - DNA, 20 bp, Artificial Sequence
  MKO10118291_B_Speer4c
  gRNA
tttgtctctacctgatattc

SEQ ID NO: 118292 - DNA, 20 bp, Artificial Sequence
  MKO10118292_B_Speer4d
  gRNA
attcctcggtcacgtagatc

SEQ ID NO: 118293 - DNA, 20 bp, Artificial Sequence
  MKO10118293_B_Speer4d
  gRNA
tgagctcctgcttgttctct

SEQ ID NO: 118294 - DNA, 20 bp, Artificial Sequence
  MKO10118294_B_Speer4d
  gRNA
ctggggcaaggccctaccac

SEQ ID NO: 118295 - DNA, 20 bp, Artificial Sequence
  MKO10118295_B_Speer4e
  gRNA
caatgtatacctcttgttca

SEQ ID NO: 118296 - DNA, 20 bp, Artificial Sequence
  MKO10118296_B_Speer4e
  gRNA
ctggggcaaggccctaccac

SEQ ID NO: 118297 - DNA, 20 bp, Artificial Sequence
  MKO10118297_B_Speer4e
  gRNA
ctccttcttgagctcctgct

SEQ ID NO: 118298 - DNA, 20 bp, Artificial Sequence
  MKO10118298_B_Speer4f
  gRNA
tcagcaggggcctactgggg

SEQ ID NO: 118299 - DNA, 20 bp, Artificial Sequence
  MKO10118299_B_Speer4f
  gRNA
tgaggagttgccaccccagt

SEQ ID NO: 118300 - DNA, 20 bp, Artificial Sequence
  MKO10118300_B_Speer4f
  gRNA
cacaagcaatcagtttgaga

SEQ ID NO: 118301 - DNA, 20 bp, Artificial Sequence
  MKO10118301_B_Spef1
  gRNA
tgtcttaggtttgccccaga

SEQ ID NO: 118302 - DNA, 20 bp, Artificial Sequence
  MKO10118302_B_Spef1
  gRNA
caccctctcctcgaaccttc

SEQ ID NO: 118303 - DNA, 20 bp, Artificial Sequence
  MKO10118303_B_Spef1
  gRNA
tagcagtggctacatggata

SEQ ID NO: 118304 - DNA, 20 bp, Artificial Sequence
  MKO10118304_B_Spef2
  gRNA
tgcaaccccagacaaacttg

SEQ ID NO: 118305 - DNA, 20 bp, Artificial Sequence
  MKO10118305_B_Spef2
  gRNA
taccctacctttctttaatt

SEQ ID NO: 118306 - DNA, 20 bp, Artificial Sequence
  MKO10118306_B_Spef2
  gRNA
aggtcccaagtcatttgcaa

SEQ ID NO: 118307 - DNA, 20 bp, Artificial Sequence
  MKO10118307_B_Speg
  gRNA
aggggtctgaccttgaacgt

SEQ ID NO: 118308 - DNA, 20 bp, Artificial Sequence
  MKO10118308_B_Speg
  gRNA
cattatgagcatccgtgtgc

SEQ ID NO: 118309 - DNA, 20 bp, Artificial Sequence
  MKO10118309_B_Speg
  gRNA
cccccgccatgaagaagctg

SEQ ID NO: 118310 - DNA, 20 bp, Artificial Sequence
  MKO10118310_B_Spem1
  gRNA
cttatcgtctgtattaacat

SEQ ID NO: 118311 - DNA, 20 bp, Artificial Sequence
  MKO10118311_B_Spem1
  gRNA
ccccaacatcaacaactgcc

SEQ ID NO: 118312 - DNA, 20 bp, Artificial Sequence
  MKO10118312_B_Spem1
  gRNA
ttccatatcatttgtgaaaa

SEQ ID NO: 118313 - DNA, 20 bp, Artificial Sequence
  MKO10118313_B_Spen
  gRNA
aacttacctgtagagcgtac

SEQ ID NO: 118314 - DNA, 20 bp, Artificial Sequence
  MKO10118314_B_Spen
  gRNA
tctacagggacgacattacc

SEQ ID NO: 118315 - DNA, 20 bp, Artificial Sequence
  MKO10118315_B_Spen
  gRNA
cttcttcggcatgcagatcg

SEQ ID NO: 118316 - DNA, 20 bp, Artificial Sequence
  MKO10118316_B_Spert
  gRNA
tgaggtagaatcacattgac

SEQ ID NO: 118317 - DNA, 20 bp, Artificial Sequence
  MKO10118317_B_Spert
  gRNA
agataagttacctgtgcctt

SEQ ID NO: 118318 - DNA, 20 bp, Artificial Sequence
  MKO10118318_B_Spert
  gRNA
ccataccaatgtgagatgcc

SEQ ID NO: 118319 - DNA, 20 bp, Artificial Sequence
  MKO10118319_B_Spesp1
  gRNA
aacgacgcccatgaagctgg

SEQ ID NO: 118320 - DNA, 20 bp, Artificial Sequence
  MKO10118320_B_Spesp1
  gRNA
ttacagtaatacgagttgcc

SEQ ID NO: 118321 - DNA, 20 bp, Artificial Sequence
  MKO10118321_B_Spesp1
  gRNA
cgcagccgccgagcacaagt

SEQ ID NO: 118322 - DNA, 20 bp, Artificial Sequence
  MKO10118322_B_Spg11
  gRNA
catcctacgcgttgtgtttc

SEQ ID NO: 118323 - DNA, 20 bp, Artificial Sequence
  MKO10118323_B_Spg11
  gRNA
tgtgacgcagccttattaca

SEQ ID NO: 118324 - DNA, 20 bp, Artificial Sequence
  MKO10118324_B_Spg11
  gRNA
cccacaacagccgtgtaata

SEQ ID NO: 118325 - DNA, 20 bp, Artificial Sequence
  MKO10118325_B_Spg20
  gRNA
aatcgaaagaattgcctgaa

SEQ ID NO: 118326 - DNA, 20 bp, Artificial Sequence
  MKO10118326_B_Spg20
  gRNA
tataccctctagttcctgat

SEQ ID NO: 118327 - DNA, 20 bp, Artificial Sequence
  MKO10118327_B_Spg20
  gRNA
cttcgctatgtagagacccc

SEQ ID NO: 118328 - DNA, 20 bp, Artificial Sequence
  MKO10118328_B_Spg21
  gRNA
agttgcagtatccagtttat

SEQ ID NO: 118329 - DNA, 20 bp, Artificial Sequence
  MKO10118329_B_Spg21
  gRNA
ctttgactggatggggttac

SEQ ID NO: 118330 - DNA, 20 bp, Artificial Sequence
  MKO10118330_B_Spg21
  gRNA
gaagatagacgtgtcactga

SEQ ID NO: 118331 - DNA, 20 bp, Artificial Sequence
  MKO10118331_B_Spg7
  gRNA
aaagaatcctgtccgcttgt

SEQ ID NO: 118332 - DNA, 20 bp, Artificial Sequence
  MKO10118332_B_Spg7
  gRNA
ccgctaataccttcaaagct

SEQ ID NO: 118333 - DNA, 20 bp, Artificial Sequence
  MKO10118333_B_Spg7
  gRNA
tgcataccttcatcatcttc

SEQ ID NO: 118334 - DNA, 20 bp, Artificial Sequence
  MKO10118334_B_Sphk1
  gRNA
accggtgagtatcagtttaa

SEQ ID NO: 118335 - DNA, 20 bp, Artificial Sequence
  MKO10118335_B_Sphk1
  gRNA
agaagctgccagcgcattgc

SEQ ID NO: 118336 - DNA, 20 bp, Artificial Sequence
  MKO10118336_B_Sphk1
  gRNA
ctatttaacaggtggtgaat

SEQ ID NO: 118337 - DNA, 20 bp, Artificial Sequence
  MKO10118337_B_Sphk2
  gRNA
tagcgcattgcccgatccac

SEQ ID NO: 118338 - DNA, 20 bp, Artificial Sequence
  MKO10118338_B_Sphk2
  gRNA
gtggtccatacagcgctgcc

SEQ ID NO: 118339 - DNA, 20 bp, Artificial Sequence
  MKO10118339_B_Sphk2
  gRNA
ctcatattggtcaatccctt

SEQ ID NO: 118340 - DNA, 20 bp, Artificial Sequence
  MKO10118340_B_Sphkap
  gRNA
tctgaaccttcatgcatcag

SEQ ID NO: 118341 - DNA, 20 bp, Artificial Sequence
  MKO10118341_B_Sphkap
  gRNA
gaaactggtcaatgtttcac

SEQ ID NO: 118342 - DNA, 20 bp, Artificial Sequence
  MKO10118342_B_Sphkap
  gRNA
ggacattcatggagctgatg

SEQ ID NO: 118343 - DNA, 20 bp, Artificial Sequence
  MKO10118343_B_Spi1
  gRNA
taagtaaccaagtcatccga

SEQ ID NO: 118344 - DNA, 20 bp, Artificial Sequence
  MKO10118344_B_Spi1
  gRNA
agttctcaaactcgttgttg

SEQ ID NO: 118345 - DNA, 20 bp, Artificial Sequence
  MKO10118345_B_Spi1
  gRNA
acagcagctctatcgccaca

SEQ ID NO: 118346 - DNA, 20 bp, Artificial Sequence
  MKO10118346_B_Spib
  gRNA
ccccatggggctataggtgg

SEQ ID NO: 118347 - DNA, 20 bp, Artificial Sequence
  MKO10118347_B_Spib
  gRNA
gaaggcttcatagggagcga

SEQ ID NO: 118348 - DNA, 20 bp, Artificial Sequence
  MKO10118348_B_Spib
  gRNA
ccaaggcccccatctgaatc

SEQ ID NO: 118349 - DNA, 20 bp, Artificial Sequence
  MKO10118349_B_Spice1
  gRNA
tgaatgatctaacagttcac

SEQ ID NO: 118350 - DNA, 20 bp, Artificial Sequence
  MKO10118350_B_Spice1
  gRNA
tgaatcaatcatagagcctc

SEQ ID NO: 118351 - DNA, 20 bp, Artificial Sequence
  MKO10118351_B_Spice1
  gRNA
gctctatgattgattcatta

SEQ ID NO: 118352 - DNA, 20 bp, Artificial Sequence
  MKO10118352_B_Spic
  gRNA
cagctatgttctgtacggat

SEQ ID NO: 118353 - DNA, 20 bp, Artificial Sequence
  MKO10118353_B_Spic
  gRNA
aaactgaggtagccctgatc

SEQ ID NO: 118354 - DNA, 20 bp, Artificial Sequence
  MKO10118354_B_Spic
  gRNA
agaaggggggttgtaccagc

SEQ ID NO: 118355 - DNA, 20 bp, Artificial Sequence
  MKO10118355_B_Spidr
  gRNA
caagtgtggagaaggatttc

SEQ ID NO: 118356 - DNA, 20 bp, Artificial Sequence
  MKO10118356_B_Spidr
  gRNA
caagtctgacaagtgatgac

SEQ ID NO: 118357 - DNA, 20 bp, Artificial Sequence
  MKO10118357_B_Spidr
  gRNA
atcacttgtcagacttgcac

SEQ ID NO: 118358 - DNA, 20 bp, Artificial Sequence
  MKO10118358_B_Spin1
  gRNA
gaagtcctccctgatagagt

SEQ ID NO: 118359 - DNA, 20 bp, Artificial Sequence
  MKO10118359_B_Spin1
  gRNA
atgattcgcctccagcagaa

SEQ ID NO: 118360 - DNA, 20 bp, Artificial Sequence
  MKO10118360_B_Spin1
  gRNA
tactggaatcaggcatgatg

SEQ ID NO: 118361 - DNA, 20 bp, Artificial Sequence
  MKO10118361_B_Spin2-ps1
  gRNA
attaacttctttgcccacta

SEQ ID NO: 118362 - DNA, 20 bp, Artificial Sequence
  MKO10118362_B_Spin2-ps1
  gRNA
aaagctggaatcagtgactc

SEQ ID NO: 118363 - DNA, 20 bp, Artificial Sequence
  MKO10118363_B_Spin2-ps1
  gRNA
agaagttaatcatctatttg

SEQ ID NO: 118364 - DNA, 20 bp, Artificial Sequence
  MKO10118364_B_Spin2c
  gRNA
ccagagaacgacaccttatc

SEQ ID NO: 118365 - DNA, 20 bp, Artificial Sequence
  MKO10118365_B_Spin2c
  gRNA
ggagcagatcttcatcccgt

SEQ ID NO: 118366 - DNA, 20 bp, Artificial Sequence
  MKO10118366_B_Spin2c
  gRNA
cactggactctggcatgata

SEQ ID NO: 118367 - DNA, 20 bp, Artificial Sequence
  MKO10118367_B_Spin2d
  gRNA
agcatggctctaaggaagag

SEQ ID NO: 118368 - DNA, 20 bp, Artificial Sequence
  MKO10118368_B_Spin2d
  gRNA
attaacttctttgcccacta

SEQ ID NO: 118369 - DNA, 20 bp, Artificial Sequence
  MKO10118369_B_Spin2d
  gRNA
cctgagccaagcgcctatct

SEQ ID NO: 118370 - DNA, 20 bp, Artificial Sequence
  MKO10118370_B_Spin4
  gRNA
gccaggcgagagtcaatgcg

SEQ ID NO: 118371 - DNA, 20 bp, Artificial Sequence
  MKO10118371_B_Spin4
  gRNA
gaaaggtactgtgctcgagc

SEQ ID NO: 118372 - DNA, 20 bp, Artificial Sequence
  MKO10118372_B_Spin4
  gRNA
gtggaacacgccaaagacga

SEQ ID NO: 118373 - DNA, 20 bp, Artificial Sequence
  MKO10118373_B_Spink10
  gRNA
aatgtactcaccatagtaaa

SEQ ID NO: 118374 - DNA, 20 bp, Artificial Sequence
  MKO10118374_B_Spink10
  gRNA
tttccgctagttgaacatac

SEQ ID NO: 118375 - DNA, 20 bp, Artificial Sequence
  MKO10118375_B_Spink10
  gRNA
caatgtcttcctctctatta

SEQ ID NO: 118376 - DNA, 20 bp, Artificial Sequence
  MKO10118376_B_Spink11
  gRNA
tccagagagtcttagaaaag

SEQ ID NO: 118377 - DNA, 20 bp, Artificial Sequence
  MKO10118377_B_Spink11
  gRNA
ccaattaaatataaatacca

SEQ ID NO: 118378 - DNA, 20 bp, Artificial Sequence
  MKO10118378_B_Spink11
  gRNA
ttgataaaatgtcctcaaca

SEQ ID NO: 118379 - DNA, 20 bp, Artificial Sequence
  MKO10118379_B_Spink12
  gRNA
tattggcttacatggctgtt

SEQ ID NO: 118380 - DNA, 20 bp, Artificial Sequence
  MKO10118380_B_Spink12
  gRNA
aagacccacaaacctgtgtg

SEQ ID NO: 118381 - DNA, 20 bp, Artificial Sequence
  MKO10118381_B_Spink12
  gRNA
aaacttggtttcaaacatga

SEQ ID NO: 118382 - DNA, 20 bp, Artificial Sequence
  MKO10118382_B_Spink13
  gRNA
actttccatatttgacaaac

SEQ ID NO: 118383 - DNA, 20 bp, Artificial Sequence
  MKO10118383_B_Spink13
  gRNA
gcatatgtttgtgctaccaa

SEQ ID NO: 118384 - DNA, 20 bp, Artificial Sequence
  MKO10118384_B_Spink13
  gRNA
aaagaagccatgaaaagaag

SEQ ID NO: 118385 - DNA, 20 bp, Artificial Sequence
  MKO10118385_B_Spink14
  gRNA
caccagccaggataaccaag

SEQ ID NO: 118386 - DNA, 20 bp, Artificial Sequence
  MKO10118386_B_Spink14
  gRNA
gacctaaaacaacccatctg

SEQ ID NO: 118387 - DNA, 20 bp, Artificial Sequence
  MKO10118387_B_Spink14
  gRNA
gttctccattatgctccact

SEQ ID NO: 118388 - DNA, 20 bp, Artificial Sequence
  MKO10118388_B_Spink2
  gRNA
ctcctggtcacagactttgc

SEQ ID NO: 118389 - DNA, 20 bp, Artificial Sequence
  MKO10118389_B_Spink2
  gRNA
cgtctttgatgatattaata

SEQ ID NO: 118390 - DNA, 20 bp, Artificial Sequence
  MKO10118390_B_Spink2
  gRNA
ccgattctcaaatcatgaag

SEQ ID NO: 118391 - DNA, 20 bp, Artificial Sequence
  MKO10118391_B_Spink3
  gRNA
attccgtcagtcccacacac

SEQ ID NO: 118392 - DNA, 20 bp, Artificial Sequence
  MKO10118392_B_Spink3
  gRNA
catctttcttctcagtgctt

SEQ ID NO: 118393 - DNA, 20 bp, Artificial Sequence
  MKO10118393_B_Spink3
  gRNA
ggctagttgccatgatgcag

SEQ ID NO: 118394 - DNA, 20 bp, Artificial Sequence
  MKO10118394_B_Spink4
  gRNA
tgattctaggaaaaccatga

SEQ ID NO: 118395 - DNA, 20 bp, Artificial Sequence
  MKO10118395_B_Spink4
  gRNA
actcacccctgtccatgcca

SEQ ID NO: 118396 - DNA, 20 bp, Artificial Sequence
  MKO10118396_B_Spink4
  gRNA
catgatttgaatgtccttca

SEQ ID NO: 118397 - DNA, 20 bp, Artificial Sequence
  MKO10118397_B_Spink5
  gRNA
cacacagttcacatctactg

SEQ ID NO: 118398 - DNA, 20 bp, Artificial Sequence
  MKO10118398_B_Spink5
  gRNA
tctcacctttgctgggtcag

SEQ ID NO: 118399 - DNA, 20 bp, Artificial Sequence
  MKO10118399_B_Spink5
  gRNA
tctgacacttcttcagtttg

SEQ ID NO: 118400 - DNA, 20 bp, Artificial Sequence
  MKO10118400_B_Spink6
  gRNA
tgccttaagacacctttccc

SEQ ID NO: 118401 - DNA, 20 bp, Artificial Sequence
  MKO10118401_B_Spink6
  gRNA
agcatttcccacgatgcttc

SEQ ID NO: 118402 - DNA, 20 bp, Artificial Sequence
  MKO10118402_B_Spink6
  gRNA
ttactccaatgccttgcaga

SEQ ID NO: 118403 - DNA, 20 bp, Artificial Sequence
  MKO10118403_B_Spink7
  gRNA
ctctccaccatgaagcttgt

SEQ ID NO: 118404 - DNA, 20 bp, Artificial Sequence
  MKO10118404_B_Spink7
  gRNA
catatacaagaagtacccag

SEQ ID NO: 118405 - DNA, 20 bp, Artificial Sequence
  MKO10118405_B_Spink7
  gRNA
agtgcccttcatgaagaaac

SEQ ID NO: 118406 - DNA, 20 bp, Artificial Sequence
  MKO10118406_B_Spink8
  gRNA
ggagcttctacaaaagacaa

SEQ ID NO: 118407 - DNA, 20 bp, Artificial Sequence
  MKO10118407_B_Spink8
  gRNA
cctatgaactttcacatgac

SEQ ID NO: 118408 - DNA, 20 bp, Artificial Sequence
  MKO10118408_B_Spink8
  gRNA
actgtaattaaagtgcatga

SEQ ID NO: 118409 - DNA, 20 bp, Artificial Sequence
  MKO10118409_B_Spinkl
  gRNA
tttctatcatctgcacaaac

SEQ ID NO: 118410 - DNA, 20 bp, Artificial Sequence
  MKO10118410_B_Spinkl
  gRNA
ctcagatttactcttataca

SEQ ID NO: 118411 - DNA, 20 bp, Artificial Sequence
  MKO10118411_B_Spinkl
  gRNA
ttgataaaatgtcctcaaca

SEQ ID NO: 118412 - DNA, 20 bp, Artificial Sequence
  MKO10118412_B_Spint1
  gRNA
tcgtgtatagagaaaacgtc

SEQ ID NO: 118413 - DNA, 20 bp, Artificial Sequence
  MKO10118413_B_Spint1
  gRNA
ccggcagcggcccaccttgt

SEQ ID NO: 118414 - DNA, 20 bp, Artificial Sequence
  MKO10118414_B_Spint1
  gRNA
tgtctgcctcgttcagtacc

SEQ ID NO: 118415 - DNA, 20 bp, Artificial Sequence
  MKO10118415_B_Spint2
  gRNA
gccgtagatgaagctgatac

SEQ ID NO: 118416 - DNA, 20 bp, Artificial Sequence
  MKO10118416_B_Spint2
  gRNA
gctgagatcttcaactatga

SEQ ID NO: 118417 - DNA, 20 bp, Artificial Sequence
  MKO10118417_B_Spint2
  gRNA
agttgaagatctcagcagac

SEQ ID NO: 118418 - DNA, 20 bp, Artificial Sequence
  MKO10118418_B_Spint3
  gRNA
gcctatgtgcatccttccta

SEQ ID NO: 118419 - DNA, 20 bp, Artificial Sequence
  MKO10118419_B_Spint3
  gRNA
aggtgttggtgcaaactgcc

SEQ ID NO: 118420 - DNA, 20 bp, Artificial Sequence
  MKO10118420_B_Spint3
  gRNA
atccgcctatgtccttagga

SEQ ID NO: 118421 - DNA, 20 bp, Artificial Sequence
  MKO10118421_B_Spint4
  gRNA
acaaaaaccctccgctgccg

SEQ ID NO: 118422 - DNA, 20 bp, Artificial Sequence
  MKO10118422_B_Spint4
  gRNA
ctctcaacaccgctcagtac

SEQ ID NO: 118423 - DNA, 20 bp, Artificial Sequence
  MKO10118423_B_Spint4
  gRNA
ctcagtcctccagtactgag

SEQ ID NO: 118424 - DNA, 20 bp, Artificial Sequence
  MKO10118424_B_Spint5
  gRNA
gcgaatccctggacccgcca

SEQ ID NO: 118425 - DNA, 20 bp, Artificial Sequence
  MKO10118425_B_Spint5
  gRNA
cgaagtcaactctgcgaaag

SEQ ID NO: 118426 - DNA, 20 bp, Artificial Sequence
  MKO10118426_B_Spint5
  gRNA
aggagcgccatggcgggtcc

SEQ ID NO: 118427 - DNA, 20 bp, Artificial Sequence
  MKO10118427_B_Spire1
  gRNA
gtgatgagggatttgcgaaa

SEQ ID NO: 118428 - DNA, 20 bp, Artificial Sequence
  MKO10118428_B_Spire1
  gRNA
ctcctttgcactcttaattt

SEQ ID NO: 118429 - DNA, 20 bp, Artificial Sequence
  MKO10118429_B_Spire1
  gRNA
ccatttcttgaatcttctta

SEQ ID NO: 118430 - DNA, 20 bp, Artificial Sequence
  MKO10118430_B_Spire2
  gRNA
tcttcagctttaccccgtga

SEQ ID NO: 118431 - DNA, 20 bp, Artificial Sequence
  MKO10118431_B_Spire2
  gRNA
ggtggtaccaccatggttgt

SEQ ID NO: 118432 - DNA, 20 bp, Artificial Sequence
  MKO10118432_B_Spire2
  gRNA
tcggccagtggcttctcccg

SEQ ID NO: 118433 - DNA, 20 bp, Artificial Sequence
  MKO10118433_B_Spns1
  gRNA
agtggtctaggttacattgc

SEQ ID NO: 118434 - DNA, 20 bp, Artificial Sequence
  MKO10118434_B_Spns1
  gRNA
tccaaagtgaaagacgtggc

SEQ ID NO: 118435 - DNA, 20 bp, Artificial Sequence
  MKO10118435_B_Spns1
  gRNA
tggtgccaacaccatgtaac

SEQ ID NO: 118436 - DNA, 20 bp, Artificial Sequence
  MKO10118436_B_Spns2
  gRNA
caccaatacctactagccct

SEQ ID NO: 118437 - DNA, 20 bp, Artificial Sequence
  MKO10118437_B_Spns2
  gRNA
agactggcattgggccctgc

SEQ ID NO: 118438 - DNA, 20 bp, Artificial Sequence
  MKO10118438_B_Spns2
  gRNA
tccagctgcctgcttcacgc

SEQ ID NO: 118439 - DNA, 20 bp, Artificial Sequence
  MKO10118439_B_Spns3
  gRNA
ccctacctggtaggagatga

SEQ ID NO: 118440 - DNA, 20 bp, Artificial Sequence
  MKO10118440_B_Spns3
  gRNA
cgcaaagccatactgagctt

SEQ ID NO: 118441 - DNA, 20 bp, Artificial Sequence
  MKO10118441_B_Spns3
  gRNA
cactgatgtgaaaatacttc

SEQ ID NO: 118442 - DNA, 20 bp, Artificial Sequence
  MKO10118442_B_Spn
  gRNA
gagtccatgcatctcactcg

SEQ ID NO: 118443 - DNA, 20 bp, Artificial Sequence
  MKO10118443_B_Spn
  gRNA
ggtgcccatgcttattgcct

SEQ ID NO: 118444 - DNA, 20 bp, Artificial Sequence
  MKO10118444_B_Spn
  gRNA
gtcagggacagtggactcga

SEQ ID NO: 118445 - DNA, 20 bp, Artificial Sequence
  MKO10118445_B_Spo11
  gRNA
catacaggaaatgtcatcga

SEQ ID NO: 118446 - DNA, 20 bp, Artificial Sequence
  MKO10118446_B_Spo11
  gRNA
tacactgaggtatcatccga

SEQ ID NO: 118447 - DNA, 20 bp, Artificial Sequence
  MKO10118447_B_Spo11
  gRNA
ccgaatttcttaactgattt

SEQ ID NO: 118448 - DNA, 20 bp, Artificial Sequence
  MKO10118448_B_Spock1
  gRNA
cccaacaagcccttcgacca

SEQ ID NO: 118449 - DNA, 20 bp, Artificial Sequence
  MKO10118449_B_Spock1
  gRNA
gcatcctttaccttggtcga

SEQ ID NO: 118450 - DNA, 20 bp, Artificial Sequence
  MKO10118450_B_Spock1
  gRNA
gccgcaagcacctgttgccc

SEQ ID NO: 118451 - DNA, 20 bp, Artificial Sequence
  MKO10118451_B_Spock2
  gRNA
agccacagactgaagcgagc

SEQ ID NO: 118452 - DNA, 20 bp, Artificial Sequence
  MKO10118452_B_Spock2
  gRNA
aggatgattacatcaagagc

SEQ ID NO: 118453 - DNA, 20 bp, Artificial Sequence
  MKO10118453_B_Spock2
  gRNA
gacaatcagcaaggagatga

SEQ ID NO: 118454 - DNA, 20 bp, Artificial Sequence
  MKO10118454_B_Spock3
  gRNA
cctgcgtaatgcaaactttg

SEQ ID NO: 118455 - DNA, 20 bp, Artificial Sequence
  MKO10118455_B_Spock3
  gRNA
ctggcataggcgatagggca

SEQ ID NO: 118456 - DNA, 20 bp, Artificial Sequence
  MKO10118456_B_Spock3
  gRNA
gacaatctctcagtatgaca

SEQ ID NO: 118457 - DNA, 20 bp, Artificial Sequence
  MKO10118457_B_Spon1
  gRNA
ccgtcactgaaagcacccct

SEQ ID NO: 118458 - DNA, 20 bp, Artificial Sequence
  MKO10118458_B_Spon1
  gRNA
taacgtgaaacctctgaagt

SEQ ID NO: 118459 - DNA, 20 bp, Artificial Sequence
  MKO10118459_B_Spon1
  gRNA
gataaggaagaagatcatgc

SEQ ID NO: 118460 - DNA, 20 bp, Artificial Sequence
  MKO10118460_B_Spon2
  gRNA
tgggtttagacgcagttatc

SEQ ID NO: 118461 - DNA, 20 bp, Artificial Sequence
  MKO10118461_B_Spon2
  gRNA
tgtcaacgatttcgttgcct

SEQ ID NO: 118462 - DNA, 20 bp, Artificial Sequence
  MKO10118462_B_Spon2
  gRNA
gacatagcgagttctgctct

SEQ ID NO: 118463 - DNA, 20 bp, Artificial Sequence
  MKO10118463_B_Spopl
  gRNA
aagagcatatcgatttgtac

SEQ ID NO: 118464 - DNA, 20 bp, Artificial Sequence
  MKO10118464_B_Spopl
  gRNA
agtcagctgcccaaaaagtg

SEQ ID NO: 118465 - DNA, 20 bp, Artificial Sequence
  MKO10118465_B_Spopl
  gRNA
tcttctgctagtcgacattc

SEQ ID NO: 118466 - DNA, 20 bp, Artificial Sequence
  MKO10118466_B_Spop
  gRNA
tgccggttggcagatgagtt

SEQ ID NO: 118467 - DNA, 20 bp, Artificial Sequence
  MKO10118467_B_Spop
  gRNA
ttcgtgcaaggcaaagactg

SEQ ID NO: 118468 - DNA, 20 bp, Artificial Sequence
  MKO10118468_B_Spop
  gRNA
ccaacaacaggtaaagcgac

SEQ ID NO: 118469 - DNA, 20 bp, Artificial Sequence
  MKO10118469_B_Spp1
  gRNA
gcaaatcactgccaatctca

SEQ ID NO: 118470 - DNA, 20 bp, Artificial Sequence
  MKO10118470_B_Spp1
  gRNA
tgtactcaccgggagggagg

SEQ ID NO: 118471 - DNA, 20 bp, Artificial Sequence
  MKO10118471_B_Spp1
  gRNA
tgctgtgtcctctgaagaaa

SEQ ID NO: 118472 - DNA, 20 bp, Artificial Sequence
  MKO10118472_B_Spp2
  gRNA
atgtgtgggctcactgccgc

SEQ ID NO: 118473 - DNA, 20 bp, Artificial Sequence
  MKO10118473_B_Spp2
  gRNA
actcagatgaggacgcccag

SEQ ID NO: 118474 - DNA, 20 bp, Artificial Sequence
  MKO10118474_B_Spp2
  gRNA
ttactctcttcaaggagctc

SEQ ID NO: 118475 - DNA, 20 bp, Artificial Sequence
  MKO10118475_B_Sppl2a
  gRNA
attctgcatgcgtctacaaa

SEQ ID NO: 118476 - DNA, 20 bp, Artificial Sequence
  MKO10118476_B_Sppl2a
  gRNA
gccttgttccttatgccatc

SEQ ID NO: 118477 - DNA, 20 bp, Artificial Sequence
  MKO10118477_B_Sppl2a
  gRNA
taactttgactatactctgg

SEQ ID NO: 118478 - DNA, 20 bp, Artificial Sequence
  MKO10118478_B_Sppl2b
  gRNA
gggacagcgctttggccgtg

SEQ ID NO: 118479 - DNA, 20 bp, Artificial Sequence
  MKO10118479_B_Sppl2b
  gRNA
cagccgcactttctcataga

SEQ ID NO: 118480 - DNA, 20 bp, Artificial Sequence
  MKO10118480_B_Sppl2b
  gRNA
gagtggtgtcccaaaccagt

SEQ ID NO: 118481 - DNA, 20 bp, Artificial Sequence
  MKO10118481_B_Sppl2c
  gRNA
catgtcgaagcggtgacagt

SEQ ID NO: 118482 - DNA, 20 bp, Artificial Sequence
  MKO10118482_B_Sppl2c
  gRNA
gctccgctacactgacatgt

SEQ ID NO: 118483 - DNA, 20 bp, Artificial Sequence
  MKO10118483_B_Sppl2c
  gRNA
ggtgaccacagcgcccgtca

SEQ ID NO: 118484 - DNA, 20 bp, Artificial Sequence
  MKO10118484_B_Sppl3
  gRNA
agagagacagacgctccaat

SEQ ID NO: 118485 - DNA, 20 bp, Artificial Sequence
  MKO10118485_B_Sppl3
  gRNA
tcacttgttctgaggtgagc

SEQ ID NO: 118486 - DNA, 20 bp, Artificial Sequence
  MKO10118486_B_Sppl3
  gRNA
tttccacaggtctcttaata

SEQ ID NO: 118487 - DNA, 20 bp, Artificial Sequence
  MKO10118487_B_Spred1
  gRNA
aatgcctcgatcaaaagccc

SEQ ID NO: 118488 - DNA, 20 bp, Artificial Sequence
  MKO10118488_B_Spred1
  gRNA
gagtgaccttattatagatg

SEQ ID NO: 118489 - DNA, 20 bp, Artificial Sequence
  MKO10118489_B_Spred1
  gRNA
agtgatctttcactagggaa

SEQ ID NO: 118490 - DNA, 20 bp, Artificial Sequence
  MKO10118490_B_Spred2
  gRNA
accttccaatgatgaaacgt

SEQ ID NO: 118491 - DNA, 20 bp, Artificial Sequence
  MKO10118491_B_Spred2
  gRNA
ctccataacgaagctgagct

SEQ ID NO: 118492 - DNA, 20 bp, Artificial Sequence
  MKO10118492_B_Spred2
  gRNA
accttctataaggtcttcaa

SEQ ID NO: 118493 - DNA, 20 bp, Artificial Sequence
  MKO10118493_B_Spred3
  gRNA
aagactcaccgtcagagggc

SEQ ID NO: 118494 - DNA, 20 bp, Artificial Sequence
  MKO10118494_B_Spred3
  gRNA
ccaccttggagtgtaccctg

SEQ ID NO: 118495 - DNA, 20 bp, Artificial Sequence
  MKO10118495_B_Spred3
  gRNA
aaggcgccgctcctctgctc

SEQ ID NO: 118496 - DNA, 20 bp, Artificial Sequence
  MKO10118496_B_Sprn
  gRNA
gaggcgctcgaggcagtgcc

SEQ ID NO: 118497 - DNA, 20 bp, Artificial Sequence
  MKO10118497_B_Sprn
  gRNA
cactgcctcgagcgcctccg

SEQ ID NO: 118498 - DNA, 20 bp, Artificial Sequence
  MKO10118498_B_Sprn
  gRNA
ctacggctcctctctgcgcg

SEQ ID NO: 118499 - DNA, 20 bp, Artificial Sequence
  MKO10118499_B_Sprr1a
  gRNA
cagctgaggaggtacagtgc

SEQ ID NO: 118500 - DNA, 20 bp, Artificial Sequence
  MKO10118500_B_Sprr1a
  gRNA
gccttgccagccaccacccc

SEQ ID NO: 118501 - DNA, 20 bp, Artificial Sequence
  MKO10118501_B_Sprr1a
  gRNA
gccagagccctgccaaccta

SEQ ID NO: 118502 - DNA, 20 bp, Artificial Sequence
  MKO10118502_B_Sprr1b
  gRNA
tagtattggagtgacagttg

SEQ ID NO: 118503 - DNA, 20 bp, Artificial Sequence
  MKO10118503_B_Sprr1b
  gRNA
gtcttgacttgtgagacaca

SEQ ID NO: 118504 - DNA, 20 bp, Artificial Sequence
  MKO10118504_B_Sprr1b
  gRNA
agggctcaggaacaatgggt

SEQ ID NO: 118505 - DNA, 20 bp, Artificial Sequence
  MKO10118505_B_Sprr2a1
  gRNA
catggtggaaattgcacagg

SEQ ID NO: 118506 - DNA, 20 bp, Artificial Sequence
  MKO10118506_B_Sprr2a1
  gRNA
agccttgtcctccccaagtg

SEQ ID NO: 118507 - DNA, 20 bp, Artificial Sequence
  MKO10118507_B_Sprr2a1
  gRNA
catgttgactgccatggctg

SEQ ID NO: 118508 - DNA, 20 bp, Artificial Sequence
  MKO10118508_B_Sprr2a2
  gRNA
catggtggaaattgcacagg

SEQ ID NO: 118509 - DNA, 20 bp, Artificial Sequence
  MKO10118509_B_Sprr2a2
  gRNA
agccttgtcctccccaagtg

SEQ ID NO: 118510 - DNA, 20 bp, Artificial Sequence
  MKO10118510_B_Sprr2a2
  gRNA
catgttgactgccatggctg

SEQ ID NO: 118511 - DNA, 20 bp, Artificial Sequence
  MKO10118511_B_Sprr2b
  gRNA
agccatgcccccctcagcca

SEQ ID NO: 118512 - DNA, 20 bp, Artificial Sequence
  MKO10118512_B_Sprr2b
  gRNA
gggaaaccctcatttattct

SEQ ID NO: 118513 - DNA, 20 bp, Artificial Sequence
  MKO10118513_B_Sprr2b
  gRNA
cagcacactgggggaggaca

SEQ ID NO: 118514 - DNA, 20 bp, Artificial Sequence
  MKO10118514_B_Sprr2d
  gRNA
gcgcaggagggcatttctgc

SEQ ID NO: 118515 - DNA, 20 bp, Artificial Sequence
  MKO10118515_B_Sprr2d
  gRNA
gctgcttgcactgctgctgc

SEQ ID NO: 118516 - DNA, 20 bp, Artificial Sequence
  MKO10118516_B_Sprr2d
  gRNA
gggcacttctgctggcaggg

SEQ ID NO: 118517 - DNA, 20 bp, Artificial Sequence
  MKO10118517_B_Sprr2e
  gRNA
tgcccacccaagagcaagtg

SEQ ID NO: 118518 - DNA, 20 bp, Artificial Sequence
  MKO10118518_B_Sprr2e
  gRNA
gcacaggagggcatttctgc

SEQ ID NO: 118519 - DNA, 20 bp, Artificial Sequence
  MKO10118519_B_Sprr2e
  gRNA
gagggaggaggacatggctc

SEQ ID NO: 118520 - DNA, 20 bp, Artificial Sequence
  MKO10118520_B_Sprr2f
  gRNA
cccagagccttgttctccct

SEQ ID NO: 118521 - DNA, 20 bp, Artificial Sequence
  MKO10118521_B_Sprr2f
  gRNA
gtggacacacaggaggaggc

SEQ ID NO: 118522 - DNA, 20 bp, Artificial Sequence
  MKO10118522_B_Sprr2f
  gRNA
gaacaaggctctgggcactt

SEQ ID NO: 118523 - DNA, 20 bp, Artificial Sequence
  MKO10118523_B_Sprr2h
  gRNA
ggacatggctcagtgcactt

SEQ ID NO: 118524 - DNA, 20 bp, Artificial Sequence
  MKO10118524_B_Sprr2h
  gRNA
ggacaaggctcagtgcactt

SEQ ID NO: 118525 - DNA, 20 bp, Artificial Sequence
  MKO10118525_B_Sprr2h
  gRNA
gcacagaagggcatttctgc

SEQ ID NO: 118526 - DNA, 20 bp, Artificial Sequence
  MKO10118526_B_Sprr2i
  gRNA
gggcacttctgctggcatgg

SEQ ID NO: 118527 - DNA, 20 bp, Artificial Sequence
  MKO10118527_B_Sprr2i
  gRNA
gcacaggagggcatttctgc

SEQ ID NO: 118528 - DNA, 20 bp, Artificial Sequence
  MKO10118528_B_Sprr2i
  gRNA
caaggctcagggcactttgg

SEQ ID NO: 118529 - DNA, 20 bp, Artificial Sequence
  MKO10118529_B_Sprr2k
  gRNA
ggagaacaaggctttggggg

SEQ ID NO: 118530 - DNA, 20 bp, Artificial Sequence
  MKO10118530_B_Sprr2k
  gRNA
gggcatgtctcagggcactt

SEQ ID NO: 118531 - DNA, 20 bp, Artificial Sequence
  MKO10118531_B_Sprr2k
  gRNA
gctgcttacactgctgctct

SEQ ID NO: 118532 - DNA, 20 bp, Artificial Sequence
  MKO10118532_B_Sprr3
  gRNA
atcttggtgtagccctgatc

SEQ ID NO: 118533 - DNA, 20 bp, Artificial Sequence
  MKO10118533_B_Sprr3
  gRNA
tgcttcacttgatgctgttc

SEQ ID NO: 118534 - DNA, 20 bp, Artificial Sequence
  MKO10118534_B_Sprr3
  gRNA
acagttggggggcacacctc

SEQ ID NO: 118535 - DNA, 20 bp, Artificial Sequence
  MKO10118535_B_Sprr4
  gRNA
ccttacttctgcttacactt

SEQ ID NO: 118536 - DNA, 20 bp, Artificial Sequence
  MKO10118536_B_Sprr4
  gRNA
cacacatgcctcttgacatt

SEQ ID NO: 118537 - DNA, 20 bp, Artificial Sequence
  MKO10118537_B_Sprr4
  gRNA
cctaagtgtaagcagaagta

SEQ ID NO: 118538 - DNA, 20 bp, Artificial Sequence
  MKO10118538_B_Sprtn
  gRNA
aattcctgaacaagcgaccc

SEQ ID NO: 118539 - DNA, 20 bp, Artificial Sequence
  MKO10118539_B_Sprtn
  gRNA
gctgggatctgcacctatga

SEQ ID NO: 118540 - DNA, 20 bp, Artificial Sequence
  MKO10118540_B_Sprtn
  gRNA
catcgaatcaaccaactgac

SEQ ID NO: 118541 - DNA, 20 bp, Artificial Sequence
  MKO10118541_B_Spry1
  gRNA
gaatcaccactagcgaagtg

SEQ ID NO: 118542 - DNA, 20 bp, Artificial Sequence
  MKO10118542_B_Spry1
  gRNA
tctagggacagaatcgtagc

SEQ ID NO: 118543 - DNA, 20 bp, Artificial Sequence
  MKO10118543_B_Spry1
  gRNA
atacgggacctgcatgtgcc

SEQ ID NO: 118544 - DNA, 20 bp, Artificial Sequence
  MKO10118544_B_Spry2
  gRNA
tcccatagtcaatgacgttc

SEQ ID NO: 118545 - DNA, 20 bp, Artificial Sequence
  MKO10118545_B_Spry2
  gRNA
acaattgtcctcatcgtcat

SEQ ID NO: 118546 - DNA, 20 bp, Artificial Sequence
  MKO10118546_B_Spry2
  gRNA
tcactgctccaatgacgatg

SEQ ID NO: 118547 - DNA, 20 bp, Artificial Sequence
  MKO10118547_B_Spry3
  gRNA
ctacctatatcaaagccttc

SEQ ID NO: 118548 - DNA, 20 bp, Artificial Sequence
  MKO10118548_B_Spry3
  gRNA
ttcagagcaccatcgacctt

SEQ ID NO: 118549 - DNA, 20 bp, Artificial Sequence
  MKO10118549_B_Spry3
  gRNA
ctagctcttgcttcattcgc

SEQ ID NO: 118550 - DNA, 20 bp, Artificial Sequence
  MKO10118550_B_Spry4
  gRNA
ctgcgcccgctggtccttca

SEQ ID NO: 118551 - DNA, 20 bp, Artificial Sequence
  MKO10118551_B_Spry4
  gRNA
gcaaagagtgtgcgtcccct

SEQ ID NO: 118552 - DNA, 20 bp, Artificial Sequence
  MKO10118552_B_Spry4
  gRNA
tgtaagccgctggacctcaa

SEQ ID NO: 118553 - DNA, 20 bp, Artificial Sequence
  MKO10118553_B_Spryd3
  gRNA
gctcaatgccacagccgatc

SEQ ID NO: 118554 - DNA, 20 bp, Artificial Sequence
  MKO10118554_B_Spryd3
  gRNA
atcccttcaggtatctatcg

SEQ ID NO: 118555 - DNA, 20 bp, Artificial Sequence
  MKO10118555_B_Spryd3
  gRNA
atgacctcaacttgcactac

SEQ ID NO: 118556 - DNA, 20 bp, Artificial Sequence
  MKO10118556_B_Spryd4
  gRNA
caacttccaacagcgtgcaa

SEQ ID NO: 118557 - DNA, 20 bp, Artificial Sequence
  MKO10118557_B_Spryd4
  gRNA
ttggtgctgatgatcgttcc

SEQ ID NO: 118558 - DNA, 20 bp, Artificial Sequence
  MKO10118558_B_Spryd4
  gRNA
acatgctgtgccacttgcgc

SEQ ID NO: 118559 - DNA, 20 bp, Artificial Sequence
  MKO10118559_B_Spryd7
  gRNA
aacatgcattgtccagcatc

SEQ ID NO: 118560 - DNA, 20 bp, Artificial Sequence
  MKO10118560_B_Spryd7
  gRNA
accactacatctccctcctg

SEQ ID NO: 118561 - DNA, 20 bp, Artificial Sequence
  MKO10118561_B_Spryd7
  gRNA
agaagaatctgtggcactgg

SEQ ID NO: 118562 - DNA, 20 bp, Artificial Sequence
  MKO10118562_B_Spr
  gRNA
tgcagtttgctccttaactc

SEQ ID NO: 118563 - DNA, 20 bp, Artificial Sequence
  MKO10118563_B_Spr
  gRNA
ctgctgaggaaccgagtgtg

SEQ ID NO: 118564 - DNA, 20 bp, Artificial Sequence
  MKO10118564_B_Spr
  gRNA
gtacagaccccagcctttgt

SEQ ID NO: 118565 - DNA, 20 bp, Artificial Sequence
  MKO10118565_B_Spsb1
  gRNA
gcgttcggtgcgcctagcgc

SEQ ID NO: 118566 - DNA, 20 bp, Artificial Sequence
  MKO10118566_B_Spsb1
  gRNA
ttcgctcaacgtcttcgtga

SEQ ID NO: 118567 - DNA, 20 bp, Artificial Sequence
  MKO10118567_B_Spsb1
  gRNA
cccagagcacggacgccatc

SEQ ID NO: 118568 - DNA, 20 bp, Artificial Sequence
  MKO10118568_B_Spsb2
  gRNA
ccagagcatggcgcacacac

SEQ ID NO: 118569 - DNA, 20 bp, Artificial Sequence
  MKO10118569_B_Spsb2
  gRNA
ttgcccaacggcaccacggc

SEQ ID NO: 118570 - DNA, 20 bp, Artificial Sequence
  MKO10118570_B_Spsb2
  gRNA
gcaaaggggcacacacgccg

SEQ ID NO: 118571 - DNA, 20 bp, Artificial Sequence
  MKO10118571_B_Spsb3
  gRNA
tagctccttggtgccccgaa

SEQ ID NO: 118572 - DNA, 20 bp, Artificial Sequence
  MKO10118572_B_Spsb3
  gRNA
agagtccttctgtgactgcg

SEQ ID NO: 118573 - DNA, 20 bp, Artificial Sequence
  MKO10118573_B_Spsb3
  gRNA
acgtgtggtggtacttgtcc

SEQ ID NO: 118574 - DNA, 20 bp, Artificial Sequence
  MKO10118574_B_Spsb4
  gRNA
catgtccagtacgaccaata

SEQ ID NO: 118575 - DNA, 20 bp, Artificial Sequence
  MKO10118575_B_Spsb4
  gRNA
cccgctgcctagcgggccaa

SEQ ID NO: 118576 - DNA, 20 bp, Artificial Sequence
  MKO10118576_B_Spsb4
  gRNA
gcgccgctcactggtactgc

SEQ ID NO: 118577 - DNA, 20 bp, Artificial Sequence
  MKO10118577_B_Spt1
  gRNA
tctcttacagttattaaaag

SEQ ID NO: 118578 - DNA, 20 bp, Artificial Sequence
  MKO10118578_B_Spt1
  gRNA
gtttcagtactgtttgtctc

SEQ ID NO: 118579 - DNA, 20 bp, Artificial Sequence
  MKO10118579_B_Spt1
  gRNA
acaaacagtactgaaacttc

SEQ ID NO: 118580 - DNA, 20 bp, Artificial Sequence
  MKO10118580_B_Spta1
  gRNA
gaccgctcggaagggaaaag

SEQ ID NO: 118581 - DNA, 20 bp, Artificial Sequence
  MKO10118581_B_Spta1
  gRNA
gcacgaatcctttgtatcag

SEQ ID NO: 118582 - DNA, 20 bp, Artificial Sequence
  MKO10118582_B_Spta1
  gRNA
tgaagcaacttcgcctgctg

SEQ ID NO: 118583 - DNA, 20 bp, Artificial Sequence
  MKO10118583_B_Sptan1
  gRNA
taatctccagacacgtttaa

SEQ ID NO: 118584 - DNA, 20 bp, Artificial Sequence
  MKO10118584_B_Sptan1
  gRNA
tgaagagtttcagactgatc

SEQ ID NO: 118585 - DNA, 20 bp, Artificial Sequence
  MKO10118585_B_Sptan1
  gRNA
agtgtgaggatgtaatggac

SEQ ID NO: 118586 - DNA, 20 bp, Artificial Sequence
  MKO10118586_B_Sptbn1
  gRNA
ttagatccaggatattagtg

SEQ ID NO: 118587 - DNA, 20 bp, Artificial Sequence
  MKO10118587_B_Sptbn1
  gRNA
ccgaatcacagacctgtaca

SEQ ID NO: 118588 - DNA, 20 bp, Artificial Sequence
  MKO10118588_B_Sptbn1
  gRNA
cagtctccacactaatatcc

SEQ ID NO: 118589 - DNA, 20 bp, Artificial Sequence
  MKO10118589_B_Sptbn2
  gRNA
cgctgtacaggtctcccacc

SEQ ID NO: 118590 - DNA, 20 bp, Artificial Sequence
  MKO10118590_B_Sptbn2
  gRNA
tgcacaactttaccaccagt

SEQ ID NO: 118591 - DNA, 20 bp, Artificial Sequence
  MKO10118591_B_Sptbn2
  gRNA
ttaccggtgtttgtgcacaa

SEQ ID NO: 118592 - DNA, 20 bp, Artificial Sequence
  MKO10118592_B_Sptbn4
  gRNA
acctaatttcttgcgcacag

SEQ ID NO: 118593 - DNA, 20 bp, Artificial Sequence
  MKO10118593_B_Sptbn4
  gRNA
aagatgctgatggctcgtga

SEQ ID NO: 118594 - DNA, 20 bp, Artificial Sequence
  MKO10118594_B_Sptbn4
  gRNA
ccagctcagccatgaacgcc

SEQ ID NO: 118595 - DNA, 20 bp, Artificial Sequence
  MKO10118595_B_Sptb
  gRNA
ggagttcacccatttcgtaa

SEQ ID NO: 118596 - DNA, 20 bp, Artificial Sequence
  MKO10118596_B_Sptb
  gRNA
cttaccggtgtttgtgtatt

SEQ ID NO: 118597 - DNA, 20 bp, Artificial Sequence
  MKO10118597_B_Sptb
  gRNA
tctcccgaccttcttgagtt

SEQ ID NO: 118598 - DNA, 20 bp, Artificial Sequence
  MKO10118598_B_Sptlc1
  gRNA
aatgtgccatagaaccctcg

SEQ ID NO: 118599 - DNA, 20 bp, Artificial Sequence
  MKO10118599_B_Sptlc1
  gRNA
tccagcataccatcttattt

SEQ ID NO: 118600 - DNA, 20 bp, Artificial Sequence
  MKO10118600_B_Sptlc1
  gRNA
tccaaaataagatggtatgc

SEQ ID NO: 118601 - DNA, 20 bp, Artificial Sequence
  MKO10118601_B_Sptlc2
  gRNA
aatctcgaagatatccaaag

SEQ ID NO: 118602 - DNA, 20 bp, Artificial Sequence
  MKO10118602_B_Sptlc2
  gRNA
cgcaaatccaagatagttgt

SEQ ID NO: 118603 - DNA, 20 bp, Artificial Sequence
  MKO10118603_B_Sptlc2
  gRNA
tgttgcaaatcccatgccat

SEQ ID NO: 118604 - DNA, 20 bp, Artificial Sequence
  MKO10118604_B_Sptlc3
  gRNA
gccagtctttgagccctacc

SEQ ID NO: 118605 - DNA, 20 bp, Artificial Sequence
  MKO10118605_B_Sptlc3
  gRNA
caactccttgtgtatatcca

SEQ ID NO: 118606 - DNA, 20 bp, Artificial Sequence
  MKO10118606_B_Sptlc3
  gRNA
aggtaccttggatatacaca

SEQ ID NO: 118607 - DNA, 20 bp, Artificial Sequence
  MKO10118607_B_Sptssa
  gRNA
cgggaggcgcatggcgggca

SEQ ID NO: 118608 - DNA, 20 bp, Artificial Sequence
  MKO10118608_B_Sptssa
  gRNA
cttcatgccccagcacatca

SEQ ID NO: 118609 - DNA, 20 bp, Artificial Sequence
  MKO10118609_B_Sptssa
  gRNA
tgaagacgtagccagtgtac

SEQ ID NO: 118610 - DNA, 20 bp, Artificial Sequence
  MKO10118610_B_Sptssb
  gRNA
ttgagcatcgattgttccca

SEQ ID NO: 118611 - DNA, 20 bp, Artificial Sequence
  MKO10118611_B_Sptssb
  gRNA
catccccatccacatccgcc

SEQ ID NO: 118612 - DNA, 20 bp, Artificial Sequence
  MKO10118612_B_Sptssb
  gRNA
cagcacagcaggtgatgatc

SEQ ID NO: 118613 - DNA, 20 bp, Artificial Sequence
  MKO10118613_B_Spty2d1
  gRNA
actgctctccatgtaacgta

SEQ ID NO: 118614 - DNA, 20 bp, Artificial Sequence
  MKO10118614_B_Spty2d1
  gRNA
aagcttgcacagctgccgac

SEQ ID NO: 118615 - DNA, 20 bp, Artificial Sequence
  MKO10118615_B_Spty2d1
  gRNA
aaagatttctcgaatgtgct

SEQ ID NO: 118616 - DNA, 20 bp, Artificial Sequence
  MKO10118616_B_Spz1
  gRNA
ggagtgatccgatttcaagg

SEQ ID NO: 118617 - DNA, 20 bp, Artificial Sequence
  MKO10118617_B_Spz1
  gRNA
acgctttcaagcataccacg

SEQ ID NO: 118618 - DNA, 20 bp, Artificial Sequence
  MKO10118618_B_Spz1
  gRNA
caagaaatgtccgaagttag

SEQ ID NO: 118619 - DNA, 20 bp, Artificial Sequence
  MKO10118619_B_Sqle
  gRNA
cgccccgctcaccgttgttg

SEQ ID NO: 118620 - DNA, 20 bp, Artificial Sequence
  MKO10118620_B_Sqle
  gRNA
gactcatgatgaatcggcca

SEQ ID NO: 118621 - DNA, 20 bp, Artificial Sequence
  MKO10118621_B_Sqle
  gRNA
gaagagtccatccgcaacaa

SEQ ID NO: 118622 - DNA, 20 bp, Artificial Sequence
  MKO10118622_B_Sqrdl
  gRNA
agataccttatcatcgctct

SEQ ID NO: 118623 - DNA, 20 bp, Artificial Sequence
  MKO10118623_B_Sqrdl
  gRNA
gagccgtaccttcctgaagt

SEQ ID NO: 118624 - DNA, 20 bp, Artificial Sequence
  MKO10118624_B_Sqrdl
  gRNA
acctatcagaagcctacttc

SEQ ID NO: 118625 - DNA, 20 bp, Artificial Sequence
  MKO10118625_B_Sqstm1
  gRNA
cattgtcagctcctcatcac

SEQ ID NO: 118626 - DNA, 20 bp, Artificial Sequence
  MKO10118626_B_Sqstm1
  gRNA
agcccacgtcctcctcgtgc

SEQ ID NO: 118627 - DNA, 20 bp, Artificial Sequence
  MKO10118627_B_Sqstm1
  gRNA
aaattgacattgggatcttc

SEQ ID NO: 118628 - DNA, 20 bp, Artificial Sequence
  MKO10118628_B_Sra1
  gRNA
tgatgatatcagccgacgct

SEQ ID NO: 118629 - DNA, 20 bp, Artificial Sequence
  MKO10118629_B_Sra1
  gRNA
tgacattcaccgatcactca

SEQ ID NO: 118630 - DNA, 20 bp, Artificial Sequence
  MKO10118630_B_Sra1
  gRNA
gggggctccacaccagtagc

SEQ ID NO: 118631 - DNA, 20 bp, Artificial Sequence
  MKO10118631_B_Srbd1
  gRNA
agcaggctgtctacgatttc

SEQ ID NO: 118632 - DNA, 20 bp, Artificial Sequence
  MKO10118632_B_Srbd1
  gRNA
ttgattcgtcatccacctgt

SEQ ID NO: 118633 - DNA, 20 bp, Artificial Sequence
  MKO10118633_B_Srbd1
  gRNA
tttcttaccgtagctcatct

SEQ ID NO: 118634 - DNA, 20 bp, Artificial Sequence
  MKO10118634_B_Srcin1
  gRNA
gtcgctggagacaatgtccg

SEQ ID NO: 118635 - DNA, 20 bp, Artificial Sequence
  MKO10118635_B_Srcin1
  gRNA
tccatcagcaaccaaactac

SEQ ID NO: 118636 - DNA, 20 bp, Artificial Sequence
  MKO10118636_B_Srcin1
  gRNA
cacacacacaggtcggcggc

SEQ ID NO: 118637 - DNA, 20 bp, Artificial Sequence
  MKO10118637_B_Srcrb4d
  gRNA
ggcggcgccagcccgtgtca

SEQ ID NO: 118638 - DNA, 20 bp, Artificial Sequence
  MKO10118638_B_Srcrb4d
  gRNA
cccgctacagccctccaaaa

SEQ ID NO: 118639 - DNA, 20 bp, Artificial Sequence
  MKO10118639_B_Srcrb4d
  gRNA
ggctgtagcgggtgccatac

SEQ ID NO: 118640 - DNA, 20 bp, Artificial Sequence
  MKO10118640_B_Src
  gRNA
tccgtgactcatagtcatag

SEQ ID NO: 118641 - DNA, 20 bp, Artificial Sequence
  MKO10118641_B_Src
  gRNA
ggagggcgccacatagttgc

SEQ ID NO: 118642 - DNA, 20 bp, Artificial Sequence
  MKO10118642_B_Src
  gRNA
tcccactccaggtggtactt

SEQ ID NO: 118643 - DNA, 20 bp, Artificial Sequence
  MKO10118643_B_Srd5a1
  gRNA
gtgcactgttcaccagagcg

SEQ ID NO: 118644 - DNA, 20 bp, Artificial Sequence
  MKO10118644_B_Srd5a1
  gRNA
gctctgcaagtagccattta

SEQ ID NO: 118645 - DNA, 20 bp, Artificial Sequence
  MKO10118645_B_Srd5a1
  gRNA
cttcagcatacaccgcaaac

SEQ ID NO: 118646 - DNA, 20 bp, Artificial Sequence
  MKO10118646_B_Srd5a2
  gRNA
tcctgggcgagattattgaa

SEQ ID NO: 118647 - DNA, 20 bp, Artificial Sequence
  MKO10118647_B_Srd5a2
  gRNA
agcccggagaggtcatctac

SEQ ID NO: 118648 - DNA, 20 bp, Artificial Sequence
  MKO10118648_B_Srd5a2
  gRNA
actgcatgctgcgccagctc

SEQ ID NO: 118649 - DNA, 20 bp, Artificial Sequence
  MKO10118649_B_Srd5a3
  gRNA
tactcccgtagtgtatgttc

SEQ ID NO: 118650 - DNA, 20 bp, Artificial Sequence
  MKO10118650_B_Srd5a3
  gRNA
tccaaggcttctcggatgcc

SEQ ID NO: 118651 - DNA, 20 bp, Artificial Sequence
  MKO10118651_B_Srd5a3
  gRNA
actttctcagtcgttgttcc

SEQ ID NO: 118652 - DNA, 20 bp, Artificial Sequence
  MKO10118652_B_Srebf1
  gRNA
atgccattgagaagcgctac

SEQ ID NO: 118653 - DNA, 20 bp, Artificial Sequence
  MKO10118653_B_Srebf1
  gRNA
gccaccatctagcctgccgc

SEQ ID NO: 118654 - DNA, 20 bp, Artificial Sequence
  MKO10118654_B_Srebf1
  gRNA
ggggccagcggcaggctaga

SEQ ID NO: 118655 - DNA, 20 bp, Artificial Sequence
  MKO10118655_B_Srebf2
  gRNA
cgacccttactggcacttga

SEQ ID NO: 118656 - DNA, 20 bp, Artificial Sequence
  MKO10118656_B_Srebf2
  gRNA
cgacaaaatcatagagttga

SEQ ID NO: 118657 - DNA, 20 bp, Artificial Sequence
  MKO10118657_B_Srebf2
  gRNA
gctgcgttctggtatatcaa

SEQ ID NO: 118658 - DNA, 20 bp, Artificial Sequence
  MKO10118658_B_Srek1ip1
  gRNA
ttactccagtgccactgaag

SEQ ID NO: 118659 - DNA, 20 bp, Artificial Sequence
  MKO10118659_B_Srek1ip1
  gRNA
agagcaggctgcagaaaatg

SEQ ID NO: 118660 - DNA, 20 bp, Artificial Sequence
  MKO10118660_B_Srek1ip1
  gRNA
aaaaagaacaagtcaaagaa

SEQ ID NO: 118661 - DNA, 20 bp, Artificial Sequence
  MKO10118661_B_Srek1
  gRNA
agaagtgaagtttgttcgga

SEQ ID NO: 118662 - DNA, 20 bp, Artificial Sequence
  MKO10118662_B_Srek1
  gRNA
tggtgtttcacttagcagtt

SEQ ID NO: 118663 - DNA, 20 bp, Artificial Sequence
  MKO10118663_B_Srek1
  gRNA
tgtggccttacctggttcaa

SEQ ID NO: 118664 - DNA, 20 bp, Artificial Sequence
  MKO10118664_B_Srfbp1
  gRNA
ttctaccgcgaccgacagag

SEQ ID NO: 118665 - DNA, 20 bp, Artificial Sequence
  MKO10118665_B_Srfbp1
  gRNA
taatctggcaaccgctctgt

SEQ ID NO: 118666 - DNA, 20 bp, Artificial Sequence
  MKO10118666_B_Srfbp1
  gRNA
tgaggagatccatgccatga

SEQ ID NO: 118667 - DNA, 20 bp, Artificial Sequence
  MKO10118667_B_Srf
  gRNA
tgggggcatacatcactgca

SEQ ID NO: 118668 - DNA, 20 bp, Artificial Sequence
  MKO10118668_B_Srf
  gRNA
ggtctgaatcagcgccttgc

SEQ ID NO: 118669 - DNA, 20 bp, Artificial Sequence
  MKO10118669_B_Srf
  gRNA
ggggccgctgctgacttgca

SEQ ID NO: 118670 - DNA, 20 bp, Artificial Sequence
  MKO10118670_B_Srgap1
  gRNA
ttgtccttcttgaatctgct

SEQ ID NO: 118671 - DNA, 20 bp, Artificial Sequence
  MKO10118671_B_Srgap1
  gRNA
agaatattccgtctcaattt

SEQ ID NO: 118672 - DNA, 20 bp, Artificial Sequence
  MKO10118672_B_Srgap1
  gRNA
ggttctgaatgagctctaca

SEQ ID NO: 118673 - DNA, 20 bp, Artificial Sequence
  MKO10118673_B_Srgap2
  gRNA
tcgctgacttgaacaaatcg

SEQ ID NO: 118674 - DNA, 20 bp, Artificial Sequence
  MKO10118674_B_Srgap2
  gRNA
tgtcttggctagaaagcgct

SEQ ID NO: 118675 - DNA, 20 bp, Artificial Sequence
  MKO10118675_B_Srgap2
  gRNA
ttaccgagtaaagctcgttc

SEQ ID NO: 118676 - DNA, 20 bp, Artificial Sequence
  MKO10118676_B_Srgap3
  gRNA
cctccaagattcgcagctcc

SEQ ID NO: 118677 - DNA, 20 bp, Artificial Sequence
  MKO10118677_B_Srgap3
  gRNA
tgttcatgaagatgtcgttg

SEQ ID NO: 118678 - DNA, 20 bp, Artificial Sequence
  MKO10118678_B_Srgap3
  gRNA
agctaagcatgaacctgctc

SEQ ID NO: 118679 - DNA, 20 bp, Artificial Sequence
  MKO10118679_B_Srgn
  gRNA
caggacaagcctgctgccga

SEQ ID NO: 118680 - DNA, 20 bp, Artificial Sequence
  MKO10118680_B_Srgn
  gRNA
tgacccatagtcatcataat

SEQ ID NO: 118681 - DNA, 20 bp, Artificial Sequence
  MKO10118681_B_Srgn
  gRNA
atctccaattatgatgacta

SEQ ID NO: 118682 - DNA, 20 bp, Artificial Sequence
  MKO10118682_B_Sri
  gRNA
ccgcaatgccagactgtgtt

SEQ ID NO: 118683 - DNA, 20 bp, Artificial Sequence
  MKO10118683_B_Sri
  gRNA
gcagcaaagtaaccatatag

SEQ ID NO: 118684 - DNA, 20 bp, Artificial Sequence
  MKO10118684_B_Sri
  gRNA
catccaacattgaaaccata

SEQ ID NO: 118685 - DNA, 20 bp, Artificial Sequence
  MKO10118685_B_Srl
  gRNA
ggacaggctagcttcggttt

SEQ ID NO: 118686 - DNA, 20 bp, Artificial Sequence
  MKO10118686_B_Srl
  gRNA
actcgataccaactttatac

SEQ ID NO: 118687 - DNA, 20 bp, Artificial Sequence
  MKO10118687_B_Srl
  gRNA
tcatacgtccatcaagcccc

SEQ ID NO: 118688 - DNA, 20 bp, Artificial Sequence
  MKO10118688_B_Srms
  gRNA
cggcccagcgaaagcagcat

SEQ ID NO: 118689 - DNA, 20 bp, Artificial Sequence
  MKO10118689_B_Srms
  gRNA
gcccccgatgctgctttcgc

SEQ ID NO: 118690 - DNA, 20 bp, Artificial Sequence
  MKO10118690_B_Srms
  gRNA
cccacagatacccttggttc

SEQ ID NO: 118691 - DNA, 20 bp, Artificial Sequence
  MKO10118691_B_Srm
  gRNA
ataggtaggaatgctacagt

SEQ ID NO: 118692 - DNA, 20 bp, Artificial Sequence
  MKO10118692_B_Srm
  gRNA
gtcggtgatgatgacgtcaa

SEQ ID NO: 118693 - DNA, 20 bp, Artificial Sequence
  MKO10118693_B_Srm
  gRNA
ctgcaaatctctcttccccg

SEQ ID NO: 118694 - DNA, 20 bp, Artificial Sequence
  MKO10118694_B_Srp14
  gRNA
gaaaaggaagatcagcaccg

SEQ ID NO: 118695 - DNA, 20 bp, Artificial Sequence
  MKO10118695_B_Srp14
  gRNA
agccacgcctgtcactgtgc

SEQ ID NO: 118696 - DNA, 20 bp, Artificial Sequence
  MKO10118696_B_Srp14
  gRNA
ctgaaacttgttcacttctt

SEQ ID NO: 118697 - DNA, 20 bp, Artificial Sequence
  MKO10118697_B_Srp19
  gRNA
ccctctccttgctgaagact

SEQ ID NO: 118698 - DNA, 20 bp, Artificial Sequence
  MKO10118698_B_Srp19
  gRNA
tgcctcgaaactgaacatca

SEQ ID NO: 118699 - DNA, 20 bp, Artificial Sequence
  MKO10118699_B_Srp19
  gRNA
tcttgaatctcagtagctgt

SEQ ID NO: 118700 - DNA, 20 bp, Artificial Sequence
  MKO10118700_B_Srp54a
  gRNA
ggtgtgtagcttgtagaccc

SEQ ID NO: 118701 - DNA, 20 bp, Artificial Sequence
  MKO10118701_B_Srp54a
  gRNA
taaagcgtggacaccgacta

SEQ ID NO: 118702 - DNA, 20 bp, Artificial Sequence
  MKO10118702_B_Srp54a
  gRNA
tgtatctgcacatatcaaac

SEQ ID NO: 118703 - DNA, 20 bp, Artificial Sequence
  MKO10118703_B_Srp54b
  gRNA
ggtgtgtagcttgtagaccc

SEQ ID NO: 118704 - DNA, 20 bp, Artificial Sequence
  MKO10118704_B_Srp54b
  gRNA
taaagcgtggacaccgacta

SEQ ID NO: 118705 - DNA, 20 bp, Artificial Sequence
  MKO10118705_B_Srp54b
  gRNA
tgtatctgcacatatcaaac

SEQ ID NO: 118706 - DNA, 20 bp, Artificial Sequence
  MKO10118706_B_Srp54c
  gRNA
ggtgtgtagcttgtagaccc

SEQ ID NO: 118707 - DNA, 20 bp, Artificial Sequence
  MKO10118707_B_Srp54c
  gRNA
taaagcgtggacaccgacta

SEQ ID NO: 118708 - DNA, 20 bp, Artificial Sequence
  MKO10118708_B_Srp54c
  gRNA
tgtatctgcacatatcaaac

SEQ ID NO: 118709 - DNA, 20 bp, Artificial Sequence
  MKO10118709_B_Srp68
  gRNA
acggagacttccagcggtac

SEQ ID NO: 118710 - DNA, 20 bp, Artificial Sequence
  MKO10118710_B_Srp68
  gRNA
caaagcgcaacattcctgag

SEQ ID NO: 118711 - DNA, 20 bp, Artificial Sequence
  MKO10118711_B_Srp68
  gRNA
gcctgcacctgttatcagtc

SEQ ID NO: 118712 - DNA, 20 bp, Artificial Sequence
  MKO10118712_B_Srp72
  gRNA
aacgctgcatgtgcactgat

SEQ ID NO: 118713 - DNA, 20 bp, Artificial Sequence
  MKO10118713_B_Srp72
  gRNA
ctcgcaatatgccttctcaa

SEQ ID NO: 118714 - DNA, 20 bp, Artificial Sequence
  MKO10118714_B_Srp72
  gRNA
gtagtttgccttatccagaa

SEQ ID NO: 118715 - DNA, 20 bp, Artificial Sequence
  MKO10118715_B_Srp9
  gRNA
gaatttgtgtatcaaagtaa

SEQ ID NO: 118716 - DNA, 20 bp, Artificial Sequence
  MKO10118716_B_Srp9
  gRNA
ctgtttccatagtgacattg

SEQ ID NO: 118717 - DNA, 20 bp, Artificial Sequence
  MKO10118717_B_Srp9
  gRNA
cagtcagttaatgcgactta

SEQ ID NO: 118718 - DNA, 20 bp, Artificial Sequence
  MKO10118718_B_Srpk1
  gRNA
aactcaccgatttcagcagc

SEQ ID NO: 118719 - DNA, 20 bp, Artificial Sequence
  MKO10118719_B_Srpk1
  gRNA
ataccatgtgattcgaaaat

SEQ ID NO: 118720 - DNA, 20 bp, Artificial Sequence
  MKO10118720_B_Srpk1
  gRNA
atcccatgataaccacactg

SEQ ID NO: 118721 - DNA, 20 bp, Artificial Sequence
  MKO10118721_B_Srpk2
  gRNA
tatcatgtcattagaaagct

SEQ ID NO: 118722 - DNA, 20 bp, Artificial Sequence
  MKO10118722_B_Srpk2
  gRNA
attacctttgcagtaatctg

SEQ ID NO: 118723 - DNA, 20 bp, Artificial Sequence
  MKO10118723_B_Srpk2
  gRNA
actaaaggagctttctgttg

SEQ ID NO: 118724 - DNA, 20 bp, Artificial Sequence
  MKO10118724_B_Srpk3
  gRNA
agcctagctttcgcaccaca

SEQ ID NO: 118725 - DNA, 20 bp, Artificial Sequence
  MKO10118725_B_Srpk3
  gRNA
accagcacctcgtttgctgc

SEQ ID NO: 118726 - DNA, 20 bp, Artificial Sequence
  MKO10118726_B_Srpk3
  gRNA
ccctgcagcaaacgaggtgc

SEQ ID NO: 118727 - DNA, 20 bp, Artificial Sequence
  MKO10118727_B_Srprb
  gRNA
ggaaaacgttgctgtttgtc

SEQ ID NO: 118728 - DNA, 20 bp, Artificial Sequence
  MKO10118728_B_Srprb
  gRNA
ctgactctgatcgacctccc

SEQ ID NO: 118729 - DNA, 20 bp, Artificial Sequence
  MKO10118729_B_Srprb
  gRNA
cagtgttctggaagttcatc

SEQ ID NO: 118730 - DNA, 20 bp, Artificial Sequence
  MKO10118730_B_Srpr
  gRNA
ttccccccgtgtttcaatca

SEQ ID NO: 118731 - DNA, 20 bp, Artificial Sequence
  MKO10118731_B_Srpr
  gRNA
aacacggggggaaaagacca

SEQ ID NO: 118732 - DNA, 20 bp, Artificial Sequence
  MKO10118732_B_Srpr
  gRNA
aacaggttctgatggcactt

SEQ ID NO: 118733 - DNA, 20 bp, Artificial Sequence
  MKO10118733_B_Srpx2
  gRNA
aacttacctgcgtaccatgt

SEQ ID NO: 118734 - DNA, 20 bp, Artificial Sequence
  MKO10118734_B_Srpx2
  gRNA
acccccgactgactgatgag

SEQ ID NO: 118735 - DNA, 20 bp, Artificial Sequence
  MKO10118735_B_Srpx2
  gRNA
tatagctttaagacgacttt

SEQ ID NO: 118736 - DNA, 20 bp, Artificial Sequence
  MKO10118736_B_Srpx
  gRNA
gctatacgttctttcacact

SEQ ID NO: 118737 - DNA, 20 bp, Artificial Sequence
  MKO10118737_B_Srpx
  gRNA
cacccggactgtcagcttat

SEQ ID NO: 118738 - DNA, 20 bp, Artificial Sequence
  MKO10118738_B_Srpx
  gRNA
cagactccatcgtcttctag

SEQ ID NO: 118739 - DNA, 20 bp, Artificial Sequence
  MKO10118739_B_Srrd
  gRNA
atcatcgggaacagcttccg

SEQ ID NO: 118740 - DNA, 20 bp, Artificial Sequence
  MKO10118740_B_Srrd
  gRNA
aaaccatcaccgagtgtctt

SEQ ID NO: 118741 - DNA, 20 bp, Artificial Sequence
  MKO10118741_B_Srrd
  gRNA
cacgccgagggaggtgagaa

SEQ ID NO: 118742 - DNA, 20 bp, Artificial Sequence
  MKO10118742_B_Srrm1
  gRNA
cttcctgcagggaacaagtg

SEQ ID NO: 118743 - DNA, 20 bp, Artificial Sequence
  MKO10118743_B_Srrm1
  gRNA
agtgcacaagaaaatatcgc

SEQ ID NO: 118744 - DNA, 20 bp, Artificial Sequence
  MKO10118744_B_Srrm1
  gRNA
tgcagaatgcttagaaaaaa

SEQ ID NO: 118745 - DNA, 20 bp, Artificial Sequence
  MKO10118745_B_Srrm2
  gRNA
ttacctgtgtttccgtttct

SEQ ID NO: 118746 - DNA, 20 bp, Artificial Sequence
  MKO10118746_B_Srrm2
  gRNA
ctcttcttcctctctcgtcg

SEQ ID NO: 118747 - DNA, 20 bp, Artificial Sequence
  MKO10118747_B_Srrm2
  gRNA
agttggtgagcgagaactgc

SEQ ID NO: 118748 - DNA, 20 bp, Artificial Sequence
  MKO10118748_B_Srrm3
  gRNA
aatgctcacatgtgggcccc

SEQ ID NO: 118749 - DNA, 20 bp, Artificial Sequence
  MKO10118749_B_Srrm3
  gRNA
tctcgctcaggaccaagcac

SEQ ID NO: 118750 - DNA, 20 bp, Artificial Sequence
  MKO10118750_B_Srrm3
  gRNA
ggagactagagtcagaatgc

SEQ ID NO: 118751 - DNA, 20 bp, Artificial Sequence
  MKO10118751_B_Srrm4
  gRNA
tgtcgggtctctgtcttgag

SEQ ID NO: 118752 - DNA, 20 bp, Artificial Sequence
  MKO10118752_B_Srrm4
  gRNA
aggccctgggtaccaacagc

SEQ ID NO: 118753 - DNA, 20 bp, Artificial Sequence
  MKO10118753_B_Srrm4
  gRNA
cgacaccaccaccttcctcc

SEQ ID NO: 118754 - DNA, 20 bp, Artificial Sequence
  MKO10118754_B_Srrt
  gRNA
acgctacaatgactacaagc

SEQ ID NO: 118755 - DNA, 20 bp, Artificial Sequence
  MKO10118755_B_Srrt
  gRNA
actcctcgtctttgtgagcc

SEQ ID NO: 118756 - DNA, 20 bp, Artificial Sequence
  MKO10118756_B_Srrt
  gRNA
gcaccatgtcctgcccatcc

SEQ ID NO: 118757 - DNA, 20 bp, Artificial Sequence
  MKO10118757_B_Srr
  gRNA
taccaccagtgcatctacca

SEQ ID NO: 118758 - DNA, 20 bp, Artificial Sequence
  MKO10118758_B_Srr
  gRNA
ggttcccttggtagatgcac

SEQ ID NO: 118759 - DNA, 20 bp, Artificial Sequence
  MKO10118759_B_Srr
  gRNA
ccttgtccagctatcactgc

SEQ ID NO: 118760 - DNA, 20 bp, Artificial Sequence
  MKO10118760_B_Srsf10
  gRNA
tgaacatatgcaaatcctct

SEQ ID NO: 118761 - DNA, 20 bp, Artificial Sequence
  MKO10118761_B_Srsf10
  gRNA
tccgatccccctgtgcgaac

SEQ ID NO: 118762 - DNA, 20 bp, Artificial Sequence
  MKO10118762_B_Srsf10
  gRNA
tgaagacgctttacataatt

SEQ ID NO: 118763 - DNA, 20 bp, Artificial Sequence
  MKO10118763_B_Srsf11
  gRNA
agacctgccactgcattagc

SEQ ID NO: 118764 - DNA, 20 bp, Artificial Sequence
  MKO10118764_B_Srsf11
  gRNA
gcagattggcgctgttcccc

SEQ ID NO: 118765 - DNA, 20 bp, Artificial Sequence
  MKO10118765_B_Srsf11
  gRNA
ctggagctcccaacgcagcc

SEQ ID NO: 118766 - DNA, 20 bp, Artificial Sequence
  MKO10118766_B_Srsf12
  gRNA
ctcgttccaaatcgctaccc

SEQ ID NO: 118767 - DNA, 20 bp, Artificial Sequence
  MKO10118767_B_Srsf12
  gRNA
agactgcctgggtagcgatt

SEQ ID NO: 118768 - DNA, 20 bp, Artificial Sequence
  MKO10118768_B_Srsf12
  gRNA
ctgcgcgatctcctctggct

SEQ ID NO: 118769 - DNA, 20 bp, Artificial Sequence
  MKO10118769_B_Srsf1
  gRNA
gcctggacggcgggccatag

SEQ ID NO: 118770 - DNA, 20 bp, Artificial Sequence
  MKO10118770_B_Srsf1
  gRNA
gacgtatgcagttcgaaaac

SEQ ID NO: 118771 - DNA, 20 bp, Artificial Sequence
  MKO10118771_B_Srsf1
  gRNA
tacgctgatgtttaccgaga

SEQ ID NO: 118772 - DNA, 20 bp, Artificial Sequence
  MKO10118772_B_Srsf2
  gRNA
tctcgcttcgacacgggcgg

SEQ ID NO: 118773 - DNA, 20 bp, Artificial Sequence
  MKO10118773_B_Srsf2
  gRNA
ggcccgccaccccgtcggta

SEQ ID NO: 118774 - DNA, 20 bp, Artificial Sequence
  MKO10118774_B_Srsf2
  gRNA
atttctcgaagacgcgcctc

SEQ ID NO: 118775 - DNA, 20 bp, Artificial Sequence
  MKO10118775_B_Srsf3
  gRNA
ttacctacgagacctagaga

SEQ ID NO: 118776 - DNA, 20 bp, Artificial Sequence
  MKO10118776_B_Srsf3
  gRNA
ctgcttctagatccccaaga

SEQ ID NO: 118777 - DNA, 20 bp, Artificial Sequence
  MKO10118777_B_Srsf3
  gRNA
ttaggtcactttctagagat

SEQ ID NO: 118778 - DNA, 20 bp, Artificial Sequence
  MKO10118778_B_Srsf4
  gRNA
tctttaggattacatgcgtc

SEQ ID NO: 118779 - DNA, 20 bp, Artificial Sequence
  MKO10118779_B_Srsf4
  gRNA
aggcccacctggatcgagac

SEQ ID NO: 118780 - DNA, 20 bp, Artificial Sequence
  MKO10118780_B_Srsf4
  gRNA
ggatatggttatcgaagaag

SEQ ID NO: 118781 - DNA, 20 bp, Artificial Sequence
  MKO10118781_B_Srsf5
  gRNA
tttaggaatttgaggaccca

SEQ ID NO: 118782 - DNA, 20 bp, Artificial Sequence
  MKO10118782_B_Srsf5
  gRNA
aacctgccagctgactcttg

SEQ ID NO: 118783 - DNA, 20 bp, Artificial Sequence
  MKO10118783_B_Srsf5
  gRNA
acagcatcatctgcatccct

SEQ ID NO: 118784 - DNA, 20 bp, Artificial Sequence
  MKO10118784_B_Srsf6
  gRNA
ctccgacatgaagcgtgctt

SEQ ID NO: 118785 - DNA, 20 bp, Artificial Sequence
  MKO10118785_B_Srsf6
  gRNA
atccaaagcacgcttcatgt

SEQ ID NO: 118786 - DNA, 20 bp, Artificial Sequence
  MKO10118786_B_Srsf6
  gRNA
agcctgtactctgtacgaac

SEQ ID NO: 118787 - DNA, 20 bp, Artificial Sequence
  MKO10118787_B_Srsf7
  gRNA
ctagatcccattcccgatcc

SEQ ID NO: 118788 - DNA, 20 bp, Artificial Sequence
  MKO10118788_B_Srsf7
  gRNA
tcaaagggacgacgggcagg

SEQ ID NO: 118789 - DNA, 20 bp, Artificial Sequence
  MKO10118789_B_Srsf7
  gRNA
atagccgacgaagaagaagc

SEQ ID NO: 118790 - DNA, 20 bp, Artificial Sequence
  MKO10118790_B_Srsf9
  gRNA
caccaaattccgctctcacg

SEQ ID NO: 118791 - DNA, 20 bp, Artificial Sequence
  MKO10118791_B_Srsf9
  gRNA
actccacacggagtcgacac

SEQ ID NO: 118792 - DNA, 20 bp, Artificial Sequence
  MKO10118792_B_Srsf9
  gRNA
ggaatatgctctgcgtaaac

SEQ ID NO: 118793 - DNA, 20 bp, Artificial Sequence
  MKO10118793_B_Srxn1
  gRNA
tgccccccatcgacgtcctc

SEQ ID NO: 118794 - DNA, 20 bp, Artificial Sequence
  MKO10118794_B_Srxn1
  gRNA
ccgagtggatgctgccgccc

SEQ ID NO: 118795 - DNA, 20 bp, Artificial Sequence
  MKO10118795_B_Srxn1
  gRNA
aatagtagtagtcgccaccc

SEQ ID NO: 118796 - DNA, 20 bp, Artificial Sequence
  MKO10118796_B_Sry
  gRNA
tgcccagtggggatatcaac

SEQ ID NO: 118797 - DNA, 20 bp, Artificial Sequence
  MKO10118797_B_Sry
  gRNA
gtgctgaggtgctcctggta

SEQ ID NO: 118798 - DNA, 20 bp, Artificial Sequence
  MKO10118798_B_Sry
  gRNA
gatgtcagctgttagtaagt

SEQ ID NO: 118799 - DNA, 20 bp, Artificial Sequence
  MKO10118799_B_Ss18l1
  gRNA
ccgagacacatagttgctga

SEQ ID NO: 118800 - DNA, 20 bp, Artificial Sequence
  MKO10118800_B_Ss18l1
  gRNA
cgttactcactgcgtgcact

SEQ ID NO: 118801 - DNA, 20 bp, Artificial Sequence
  MKO10118801_B_Ss18l1
  gRNA
cagtacctaccgcgggaagc

SEQ ID NO: 118802 - DNA, 20 bp, Artificial Sequence
  MKO10118802_B_Ss18
  gRNA
ccatcttattcagtgtataa

SEQ ID NO: 118803 - DNA, 20 bp, Artificial Sequence
  MKO10118803_B_Ss18
  gRNA
gcagatattgcatacaaacc

SEQ ID NO: 118804 - DNA, 20 bp, Artificial Sequence
  MKO10118804_B_Ss18
  gRNA
tagagtctgctattgtagca

SEQ ID NO: 118805 - DNA, 20 bp, Artificial Sequence
  MKO10118805_B_Ssbp1
  gRNA
gtttcgaagacctgtgttac

SEQ ID NO: 118806 - DNA, 20 bp, Artificial Sequence
  MKO10118806_B_Ssbp1
  gRNA
tcgttcaagaaccaaactgc

SEQ ID NO: 118807 - DNA, 20 bp, Artificial Sequence
  MKO10118807_B_Ssbp1
  gRNA
gtctgaagtagccagcagtt

SEQ ID NO: 118808 - DNA, 20 bp, Artificial Sequence
  MKO10118808_B_Ssbp2
  gRNA
ggcacaagcatgtacggcaa

SEQ ID NO: 118809 - DNA, 20 bp, Artificial Sequence
  MKO10118809_B_Ssbp2
  gRNA
ccgatttctgagctcctaca

SEQ ID NO: 118810 - DNA, 20 bp, Artificial Sequence
  MKO10118810_B_Ssbp2
  gRNA
ctctcttacataatcatgga

SEQ ID NO: 118811 - DNA, 20 bp, Artificial Sequence
  MKO10118811_B_Ssbp3
  gRNA
cttaccaccaccacgagtgc

SEQ ID NO: 118812 - DNA, 20 bp, Artificial Sequence
  MKO10118812_B_Ssbp3
  gRNA
cgcctgggttcctgcactcg

SEQ ID NO: 118813 - DNA, 20 bp, Artificial Sequence
  MKO10118813_B_Ssbp3
  gRNA
gttactcacataatcatgaa

SEQ ID NO: 118814 - DNA, 20 bp, Artificial Sequence
  MKO10118814_B_Ssbp4
  gRNA
cttctgggacctgtattgtg

SEQ ID NO: 118815 - DNA, 20 bp, Artificial Sequence
  MKO10118815_B_Ssbp4
  gRNA
cataccaccaccaggagtgc

SEQ ID NO: 118816 - DNA, 20 bp, Artificial Sequence
  MKO10118816_B_Ssbp4
  gRNA
ggcgcagaccttcctgtctg

SEQ ID NO: 118817 - DNA, 20 bp, Artificial Sequence
  MKO10118817_B_Ssb
  gRNA
gtgtctttgtacttctggcc

SEQ ID NO: 118818 - DNA, 20 bp, Artificial Sequence
  MKO10118818_B_Ssb
  gRNA
cccttgatgatataaaagaa

SEQ ID NO: 118819 - DNA, 20 bp, Artificial Sequence
  MKO10118819_B_Ssb
  gRNA
tcatttgaatattcagtatt

SEQ ID NO: 118820 - DNA, 20 bp, Artificial Sequence
  MKO10118820_B_Ssc5d
  gRNA
ggagctccatttgtcagtac

SEQ ID NO: 118821 - DNA, 20 bp, Artificial Sequence
  MKO10118821_B_Ssc5d
  gRNA
agaagattcaatgtccctgc

SEQ ID NO: 118822 - DNA, 20 bp, Artificial Sequence
  MKO10118822_B_Ssc5d
  gRNA
gtggccgggggttcttcttc

SEQ ID NO: 118823 - DNA, 20 bp, Artificial Sequence
  MKO10118823_B_Ssfa2
  gRNA
tgtgattacagcacccctct

SEQ ID NO: 118824 - DNA, 20 bp, Artificial Sequence
  MKO10118824_B_Ssfa2
  gRNA
actgctttgctcatccagtg

SEQ ID NO: 118825 - DNA, 20 bp, Artificial Sequence
  MKO10118825_B_Ssfa2
  gRNA
ctttgaagatgacctgtcac

SEQ ID NO: 118826 - DNA, 20 bp, Artificial Sequence
  MKO10118826_B_Ssh1
  gRNA
aggctggcagcgatgaagaa

SEQ ID NO: 118827 - DNA, 20 bp, Artificial Sequence
  MKO10118827_B_Ssh1
  gRNA
tgaagactccgctggccctg

SEQ ID NO: 118828 - DNA, 20 bp, Artificial Sequence
  MKO10118828_B_Ssh1
  gRNA
cagcaccctcacaagcatgc

SEQ ID NO: 118829 - DNA, 20 bp, Artificial Sequence
  MKO10118829_B_Ssh2
  gRNA
tatatataggaggccgacag

SEQ ID NO: 118830 - DNA, 20 bp, Artificial Sequence
  MKO10118830_B_Ssh2
  gRNA
ctgcatgcttgttgcgtctg

SEQ ID NO: 118831 - DNA, 20 bp, Artificial Sequence
  MKO10118831_B_Ssh2
  gRNA
cgtaccttctgggctgtgac

SEQ ID NO: 118832 - DNA, 20 bp, Artificial Sequence
  MKO10118832_B_Ssh3
  gRNA
gcccctctggagtgataccc

SEQ ID NO: 118833 - DNA, 20 bp, Artificial Sequence
  MKO10118833_B_Ssh3
  gRNA
gaactcacctgcgctggagc

SEQ ID NO: 118834 - DNA, 20 bp, Artificial Sequence
  MKO10118834_B_Ssh3
  gRNA
gagccaatggaggaaccctc

SEQ ID NO: 118835 - DNA, 20 bp, Artificial Sequence
  MKO10118835_B_Ssmem1
  gRNA
gatgactcttgcgggacaat

SEQ ID NO: 118836 - DNA, 20 bp, Artificial Sequence
  MKO10118836_B_Ssmem1
  gRNA
accagtgcgtcactcagtaa

SEQ ID NO: 118837 - DNA, 20 bp, Artificial Sequence
  MKO10118837_B_Ssmem1
  gRNA
acctttactgagtgacgcac

SEQ ID NO: 118838 - DNA, 20 bp, Artificial Sequence
  MKO10118838_B_Ssna1
  gRNA
gcagaactacaacaacgagt

SEQ ID NO: 118839 - DNA, 20 bp, Artificial Sequence
  MKO10118839_B_Ssna1
  gRNA
ccttgcctccactactcttc

SEQ ID NO: 118840 - DNA, 20 bp, Artificial Sequence
  MKO10118840_B_Ssna1
  gRNA
gcttcagaccagaagagtag

SEQ ID NO: 118841 - DNA, 20 bp, Artificial Sequence
  MKO10118841_B_Sspn
  gRNA
cacatgtcctctcgtcaact

SEQ ID NO: 118842 - DNA, 20 bp, Artificial Sequence
  MKO10118842_B_Sspn
  gRNA
actgactgtaccagcgtcac

SEQ ID NO: 118843 - DNA, 20 bp, Artificial Sequence
  MKO10118843_B_Sspn
  gRNA
tggggcgcaagccgagcccc

SEQ ID NO: 118844 - DNA, 20 bp, Artificial Sequence
  MKO10118844_B_Sspo
  gRNA
ctacttggaaccggacagtg

SEQ ID NO: 118845 - DNA, 20 bp, Artificial Sequence
  MKO10118845_B_Sspo
  gRNA
tggcattgccaacctctagc

SEQ ID NO: 118846 - DNA, 20 bp, Artificial Sequence
  MKO10118846_B_Sspo
  gRNA
actgtccggttccaagtagc

SEQ ID NO: 118847 - DNA, 20 bp, Artificial Sequence
  MKO10118847_B_Ssr1
  gRNA
cagaatagttgtgtctgcac

SEQ ID NO: 118848 - DNA, 20 bp, Artificial Sequence
  MKO10118848_B_Ssr1
  gRNA
ggtcacagttattgaaagag

SEQ ID NO: 118849 - DNA, 20 bp, Artificial Sequence
  MKO10118849_B_Ssr1
  gRNA
agagaacttaccaaatctgt

SEQ ID NO: 118850 - DNA, 20 bp, Artificial Sequence
  MKO10118850_B_Ssr2
  gRNA
tgtcaaactcccgctgagcg

SEQ ID NO: 118851 - DNA, 20 bp, Artificial Sequence
  MKO10118851_B_Ssr2
  gRNA
aaaaaggatacggggcaatc

SEQ ID NO: 118852 - DNA, 20 bp, Artificial Sequence
  MKO10118852_B_Ssr2
  gRNA
gtcatgaccttgccctccat

SEQ ID NO: 118853 - DNA, 20 bp, Artificial Sequence
  MKO10118853_B_Ssr3
  gRNA
ctataacaacactctgttcc

SEQ ID NO: 118854 - DNA, 20 bp, Artificial Sequence
  MKO10118854_B_Ssr3
  gRNA
tactaagtaagtgcttacta

SEQ ID NO: 118855 - DNA, 20 bp, Artificial Sequence
  MKO10118855_B_Ssr3
  gRNA
gaagttcttcagtataaaga

SEQ ID NO: 118856 - DNA, 20 bp, Artificial Sequence
  MKO10118856_B_Ssr4
  gRNA
cgctacctgagcagcaagat

SEQ ID NO: 118857 - DNA, 20 bp, Artificial Sequence
  MKO10118857_B_Ssr4
  gRNA
aagagtcctatagcctccta

SEQ ID NO: 118858 - DNA, 20 bp, Artificial Sequence
  MKO10118858_B_Ssr4
  gRNA
tttcactgacctgcaagaac

SEQ ID NO: 118859 - DNA, 20 bp, Artificial Sequence
  MKO10118859_B_Ssrp1
  gRNA
gtccacaccatcttcctgcg

SEQ ID NO: 118860 - DNA, 20 bp, Artificial Sequence
  MKO10118860_B_Ssrp1
  gRNA
ctgcagtgtttgactcctcg

SEQ ID NO: 118861 - DNA, 20 bp, Artificial Sequence
  MKO10118861_B_Ssrp1
  gRNA
cttctatgttcctcccacgc

SEQ ID NO: 118862 - DNA, 20 bp, Artificial Sequence
  MKO10118862_B_Sssca1
  gRNA
cacggcaacatggccttgaa

SEQ ID NO: 118863 - DNA, 20 bp, Artificial Sequence
  MKO10118863_B_Sssca1
  gRNA
gcccagctcgactgacgccc

SEQ ID NO: 118864 - DNA, 20 bp, Artificial Sequence
  MKO10118864_B_Sssca1
  gRNA
cgggcttgcgccgaggccct

SEQ ID NO: 118865 - DNA, 20 bp, Artificial Sequence
  MKO10118865_B_Sstr1
  gRNA
cggcgcgctactttgccgcc

SEQ ID NO: 118866 - DNA, 20 bp, Artificial Sequence
  MKO10118866_B_Sstr1
  gRNA
agcgcttgaagttgtccgac

SEQ ID NO: 118867 - DNA, 20 bp, Artificial Sequence
  MKO10118867_B_Sstr1
  gRNA
cacggtggcgtcgtcttgct

SEQ ID NO: 118868 - DNA, 20 bp, Artificial Sequence
  MKO10118868_B_Sstr2
  gRNA
agcggaagacatcattgcct

SEQ ID NO: 118869 - DNA, 20 bp, Artificial Sequence
  MKO10118869_B_Sstr2
  gRNA
gaggccggcgtatatcatga

SEQ ID NO: 118870 - DNA, 20 bp, Artificial Sequence
  MKO10118870_B_Sstr2
  gRNA
tgtccggggtcgcctccatt

SEQ ID NO: 118871 - DNA, 20 bp, Artificial Sequence
  MKO10118871_B_Sstr3
  gRNA
tctgctcaacatcgtcaatg

SEQ ID NO: 118872 - DNA, 20 bp, Artificial Sequence
  MKO10118872_B_Sstr3
  gRNA
cggatctctcatgtgccgtc

SEQ ID NO: 118873 - DNA, 20 bp, Artificial Sequence
  MKO10118873_B_Sstr3
  gRNA
caactcgctggtgatctacg

SEQ ID NO: 118874 - DNA, 20 bp, Artificial Sequence
  MKO10118874_B_Sstr4
  gRNA
agcgccggaagttgtcagag

SEQ ID NO: 118875 - DNA, 20 bp, Artificial Sequence
  MKO10118875_B_Sstr4
  gRNA
ttgattagcttggccacgct

SEQ ID NO: 118876 - DNA, 20 bp, Artificial Sequence
  MKO10118876_B_Sstr4
  gRNA
acacgagcgcatagatgcac

SEQ ID NO: 118877 - DNA, 20 bp, Artificial Sequence
  MKO10118877_B_Sstr5
  gRNA
gggctcctcgggtagcgtga

SEQ ID NO: 118878 - DNA, 20 bp, Artificial Sequence
  MKO10118878_B_Sstr5
  gRNA
ctatttgctcatcgtagtga

SEQ ID NO: 118879 - DNA, 20 bp, Artificial Sequence
  MKO10118879_B_Sstr5
  gRNA
ggtcgacactcatgaccatc

SEQ ID NO: 118880 - DNA, 20 bp, Artificial Sequence
  MKO10118880_B_Ssty1
  gRNA
agctgataagcatagagagc

SEQ ID NO: 118881 - DNA, 20 bp, Artificial Sequence
  MKO10118881_B_Ssty1
  gRNA
caaaagcttgaggaacaagt

SEQ ID NO: 118882 - DNA, 20 bp, Artificial Sequence
  MKO10118882_B_Ssty1
  gRNA
gcttgcctttcacagaccac

SEQ ID NO: 118883 - DNA, 20 bp, Artificial Sequence
  MKO10118883_B_Ssty2
  gRNA
aagatctcctgatacagacc

SEQ ID NO: 118884 - DNA, 20 bp, Artificial Sequence
  MKO10118884_B_Ssty2
  gRNA
taaaaatagtcctgtaagaa

SEQ ID NO: 118885 - DNA, 20 bp, Artificial Sequence
  MKO10118885_B_Ssty2
  gRNA
aacaaacccttctctttatt

SEQ ID NO: 118886 - DNA, 20 bp, Artificial Sequence
  MKO10118886_B_Sst
  gRNA
tgccaactcgaacccagcaa

SEQ ID NO: 118887 - DNA, 20 bp, Artificial Sequence
  MKO10118887_B_Sst
  gRNA
agtccttacctgtttcccgg

SEQ ID NO: 118888 - DNA, 20 bp, Artificial Sequence
  MKO10118888_B_Sst
  gRNA
tctggggtccgagggcgcgc

SEQ ID NO: 118889 - DNA, 20 bp, Artificial Sequence
  MKO10118889_B_Ssu2
  gRNA
gcaggtcttcttcccgccct

SEQ ID NO: 118890 - DNA, 20 bp, Artificial Sequence
  MKO10118890_B_Ssu2
  gRNA
gccacctcctcggtcaccac

SEQ ID NO: 118891 - DNA, 20 bp, Artificial Sequence
  MKO10118891_B_Ssu2
  gRNA
aaatgtccactcgctgactc

SEQ ID NO: 118892 - DNA, 20 bp, Artificial Sequence
  MKO10118892_B_Ssu72
  gRNA
agttcgaggagaagagtggc

SEQ ID NO: 118893 - DNA, 20 bp, Artificial Sequence
  MKO10118893_B_Ssu72
  gRNA
tgaagagagagtctatgacc

SEQ ID NO: 118894 - DNA, 20 bp, Artificial Sequence
  MKO10118894_B_Ssu72
  gRNA
catccaggacaaccatgaag

SEQ ID NO: 118895 - DNA, 20 bp, Artificial Sequence
  MKO10118895_B_Ssx2ip
  gRNA
gtttggcgtagcagctctgc

SEQ ID NO: 118896 - DNA, 20 bp, Artificial Sequence
  MKO10118896_B_Ssx2ip
  gRNA
aggagcagttggaaacgtcc

SEQ ID NO: 118897 - DNA, 20 bp, Artificial Sequence
  MKO10118897_B_Ssx2ip
  gRNA
acacactacctgatcaagat

SEQ ID NO: 118898 - DNA, 20 bp, Artificial Sequence
  MKO10118898_B_Ssx9
  gRNA
gagcatgattccaacttggc

SEQ ID NO: 118899 - DNA, 20 bp, Artificial Sequence
  MKO10118899_B_Ssx9
  gRNA
catactactctgatgaagag

SEQ ID NO: 118900 - DNA, 20 bp, Artificial Sequence
  MKO10118900_B_Ssx9
  gRNA
tctgtagttgaatgctttga

SEQ ID NO: 118901 - DNA, 20 bp, Artificial Sequence
  MKO10118901_B_Ssxb10
  gRNA
gatcttcaatgccttcaacc

SEQ ID NO: 118902 - DNA, 20 bp, Artificial Sequence
  MKO10118902_B_Ssxb10
  gRNA
tccttgccgcgcatgaaaac

SEQ ID NO: 118903 - DNA, 20 bp, Artificial Sequence
  MKO10118903_B_Ssxb10
  gRNA
tctgtagatgaatgctttga

SEQ ID NO: 118904 - DNA, 20 bp, Artificial Sequence
  MKO10118904_B_Ssxb1
  gRNA
agaagtatgtagaaatatcc

SEQ ID NO: 118905 - DNA, 20 bp, Artificial Sequence
  MKO10118905_B_Ssxb1
  gRNA
gaacttcaatgccttcgacc

SEQ ID NO: 118906 - DNA, 20 bp, Artificial Sequence
  MKO10118906_B_Ssxb1
  gRNA
tccttgccgcgcatgaaaac

SEQ ID NO: 118907 - DNA, 20 bp, Artificial Sequence
  MKO10118907_B_Ssxb2
  gRNA
ctcaccttgcagatattctt

SEQ ID NO: 118908 - DNA, 20 bp, Artificial Sequence
  MKO10118908_B_Ssxb2
  gRNA
catacttctctgatgaagag

SEQ ID NO: 118909 - DNA, 20 bp, Artificial Sequence
  MKO10118909_B_Ssxb2
  gRNA
tacatcagaatgactgacct

SEQ ID NO: 118910 - DNA, 20 bp, Artificial Sequence
  MKO10118910_B_Ssxb3
  gRNA
catacttctctgatgaagag

SEQ ID NO: 118911 - DNA, 20 bp, Artificial Sequence
  MKO10118911_B_Ssxb3
  gRNA
tacatcagaatgactgacct

SEQ ID NO: 118912 - DNA, 20 bp, Artificial Sequence
  MKO10118912_B_Ssxb3
  gRNA
gaacttcaatgccttcaacc

SEQ ID NO: 118913 - DNA, 20 bp, Artificial Sequence
  MKO10118913_B_Ssxb5
  gRNA
agaagtatgtagaaatatcc

SEQ ID NO: 118914 - DNA, 20 bp, Artificial Sequence
  MKO10118914_B_Ssxb5
  gRNA
gatcttcaatgccttcaacc

SEQ ID NO: 118915 - DNA, 20 bp, Artificial Sequence
  MKO10118915_B_Ssxb5
  gRNA
gaatgctttgaagaatcttt

SEQ ID NO: 118916 - DNA, 20 bp, Artificial Sequence
  MKO10118916_B_Ssxb6
  gRNA
attgaaattcatgacagtga

SEQ ID NO: 118917 - DNA, 20 bp, Artificial Sequence
  MKO10118917_B_Ssxb6
  gRNA
catacttctctgatgaagag

SEQ ID NO: 118918 - DNA, 20 bp, Artificial Sequence
  MKO10118918_B_Ssxb6
  gRNA
tacatcagaatgactgacct

SEQ ID NO: 118919 - DNA, 20 bp, Artificial Sequence
  MKO10118919_B_Ssxb8
  gRNA
tccttgccactcatgaaaac

SEQ ID NO: 118920 - DNA, 20 bp, Artificial Sequence
  MKO10118920_B_Ssxb8
  gRNA
catacttctctgatgaagag

SEQ ID NO: 118921 - DNA, 20 bp, Artificial Sequence
  MKO10118921_B_Ssxb8
  gRNA
tacatcagaatgactgacct

SEQ ID NO: 118922 - DNA, 20 bp, Artificial Sequence
  MKO10118922_B_Ssxb9
  gRNA
agaagtatgtagaaatatcc

SEQ ID NO: 118923 - DNA, 20 bp, Artificial Sequence
  MKO10118923_B_Ssxb9
  gRNA
gatcttcaatgccttcgacc

SEQ ID NO: 118924 - DNA, 20 bp, Artificial Sequence
  MKO10118924_B_Ssxb9
  gRNA
tccttgccacgcatgaaaac

SEQ ID NO: 118925 - DNA, 20 bp, Artificial Sequence
  MKO10118925_B_St13
  gRNA
atgctactcaccatcattta

SEQ ID NO: 118926 - DNA, 20 bp, Artificial Sequence
  MKO10118926_B_St13
  gRNA
aaaaagagacaagacgacag

SEQ ID NO: 118927 - DNA, 20 bp, Artificial Sequence
  MKO10118927_B_St13
  gRNA
tttgcagaaattgacaatga

SEQ ID NO: 118928 - DNA, 20 bp, Artificial Sequence
  MKO10118928_B_St14
  gRNA
gactcaccgcctccttcacc

SEQ ID NO: 118929 - DNA, 20 bp, Artificial Sequence
  MKO10118929_B_St14
  gRNA
ctttggcagatcggaatgtg

SEQ ID NO: 118930 - DNA, 20 bp, Artificial Sequence
  MKO10118930_B_St14
  gRNA
agaagcgaggccccaggcgc

SEQ ID NO: 118931 - DNA, 20 bp, Artificial Sequence
  MKO10118931_B_St18
  gRNA
tctatggttcattccgacaa

SEQ ID NO: 118932 - DNA, 20 bp, Artificial Sequence
  MKO10118932_B_St18
  gRNA
ggtgcacttaggcaaatttg

SEQ ID NO: 118933 - DNA, 20 bp, Artificial Sequence
  MKO10118933_B_St18
  gRNA
ggttccatatgattgctcta

SEQ ID NO: 118934 - DNA, 20 bp, Artificial Sequence
  MKO10118934_B_St3gal1
  gRNA
tggcgctgatcacccactgc

SEQ ID NO: 118935 - DNA, 20 bp, Artificial Sequence
  MKO10118935_B_St3gal1
  gRNA
tcaagaccaccgacctgcag

SEQ ID NO: 118936 - DNA, 20 bp, Artificial Sequence
  MKO10118936_B_St3gal1
  gRNA
gtcaaagacatacttgatga

SEQ ID NO: 118937 - DNA, 20 bp, Artificial Sequence
  MKO10118937_B_St3gal2
  gRNA
ggttctcgccaggcacgatc

SEQ ID NO: 118938 - DNA, 20 bp, Artificial Sequence
  MKO10118938_B_St3gal2
  gRNA
gatgaatcaggcaccgactg

SEQ ID NO: 118939 - DNA, 20 bp, Artificial Sequence
  MKO10118939_B_St3gal2
  gRNA
gggcgctggcaatccacatt

SEQ ID NO: 118940 - DNA, 20 bp, Artificial Sequence
  MKO10118940_B_St3gal3
  gRNA
actcctttcgcaagtgggct

SEQ ID NO: 118941 - DNA, 20 bp, Artificial Sequence
  MKO10118941_B_St3gal3
  gRNA
cttctttcccttgactccgc

SEQ ID NO: 118942 - DNA, 20 bp, Artificial Sequence
  MKO10118942_B_St3gal3
  gRNA
ggagttggtacctgtgccta

SEQ ID NO: 118943 - DNA, 20 bp, Artificial Sequence
  MKO10118943_B_St3gal4
  gRNA
attccatctcccgagaagat

SEQ ID NO: 118944 - DNA, 20 bp, Artificial Sequence
  MKO10118944_B_St3gal4
  gRNA
ttacttgccaaaaatcttag

SEQ ID NO: 118945 - DNA, 20 bp, Artificial Sequence
  MKO10118945_B_St3gal4
  gRNA
tcttgcagactggaagctcc

SEQ ID NO: 118946 - DNA, 20 bp, Artificial Sequence
  MKO10118946_B_St3gal5
  gRNA
catagccgtcttcgcgtacc

SEQ ID NO: 118947 - DNA, 20 bp, Artificial Sequence
  MKO10118947_B_St3gal5
  gRNA
gttgaacagtgcgccagttg

SEQ ID NO: 118948 - DNA, 20 bp, Artificial Sequence
  MKO10118948_B_St3gal5
  gRNA
aggtgcacgttggttgcatt

SEQ ID NO: 118949 - DNA, 20 bp, Artificial Sequence
  MKO10118949_B_St3gal6
  gRNA
ccaacagagtgccatgtaaa

SEQ ID NO: 118950 - DNA, 20 bp, Artificial Sequence
  MKO10118950_B_St3gal6
  gRNA
atctctttgacgagtttgac

SEQ ID NO: 118951 - DNA, 20 bp, Artificial Sequence
  MKO10118951_B_St3gal6
  gRNA
accgaaggtctttattccat

SEQ ID NO: 118952 - DNA, 20 bp, Artificial Sequence
  MKO10118952_B_St5
  gRNA
gtacaaccacccacccatgc

SEQ ID NO: 118953 - DNA, 20 bp, Artificial Sequence
  MKO10118953_B_St5
  gRNA
ctgaccagttcccactgcgc

SEQ ID NO: 118954 - DNA, 20 bp, Artificial Sequence
  MKO10118954_B_St5
  gRNA
actgagagtcaacccaagtt

SEQ ID NO: 118955 - DNA, 20 bp, Artificial Sequence
  MKO10118955_B_St6gal1
  gRNA
ctttgacagcgcctgcacga

SEQ ID NO: 118956 - DNA, 20 bp, Artificial Sequence
  MKO10118956_B_St6gal1
  gRNA
aaacctataagagttaccga

SEQ ID NO: 118957 - DNA, 20 bp, Artificial Sequence
  MKO10118957_B_St6gal1
  gRNA
catccgcctagtgaactctc

SEQ ID NO: 118958 - DNA, 20 bp, Artificial Sequence
  MKO10118958_B_St6gal2
  gRNA
ctccatatatccagcatcgc

SEQ ID NO: 118959 - DNA, 20 bp, Artificial Sequence
  MKO10118959_B_St6gal2
  gRNA
tttaactctgcccctacacg

SEQ ID NO: 118960 - DNA, 20 bp, Artificial Sequence
  MKO10118960_B_St6gal2
  gRNA
agaattaatgatgcgtactg

SEQ ID NO: 118961 - DNA, 20 bp, Artificial Sequence
  MKO10118961_B_St6galnac1
  gRNA
tcgccagcagcagctcctcc

SEQ ID NO: 118962 - DNA, 20 bp, Artificial Sequence
  MKO10118962_B_St6galnac1
  gRNA
ctctgcttctgtgaagatca

SEQ ID NO: 118963 - DNA, 20 bp, Artificial Sequence
  MKO10118963_B_St6galnac1
  gRNA
attgagttccatgaagccaa

SEQ ID NO: 118964 - DNA, 20 bp, Artificial Sequence
  MKO10118964_B_St6galnac2
  gRNA
gggagctgtttggtgccccc

SEQ ID NO: 118965 - DNA, 20 bp, Artificial Sequence
  MKO10118965_B_St6galnac2
  gRNA
gtgggagggcctcttcactc

SEQ ID NO: 118966 - DNA, 20 bp, Artificial Sequence
  MKO10118966_B_St6galnac2
  gRNA
ttggggtcaaagaatgctcg

SEQ ID NO: 118967 - DNA, 20 bp, Artificial Sequence
  MKO10118967_B_St6galnac3
  gRNA
tagtattcacacacccgaac

SEQ ID NO: 118968 - DNA, 20 bp, Artificial Sequence
  MKO10118968_B_St6galnac3
  gRNA
cagcctcttcgaactcacta

SEQ ID NO: 118969 - DNA, 20 bp, Artificial Sequence
  MKO10118969_B_St6galnac3
  gRNA
gtagatctgcgcatctggat

SEQ ID NO: 118970 - DNA, 20 bp, Artificial Sequence
  MKO10118970_B_St6galnac4
  gRNA
ccatcgcttcattaccgaga

SEQ ID NO: 118971 - DNA, 20 bp, Artificial Sequence
  MKO10118971_B_St6galnac4
  gRNA
cggttggttcaccatgattc

SEQ ID NO: 118972 - DNA, 20 bp, Artificial Sequence
  MKO10118972_B_St6galnac4
  gRNA
tggtcagcgatagttactgc

SEQ ID NO: 118973 - DNA, 20 bp, Artificial Sequence
  MKO10118973_B_St6galnac5
  gRNA
tgtgacaggatcgatgttta

SEQ ID NO: 118974 - DNA, 20 bp, Artificial Sequence
  MKO10118974_B_St6galnac5
  gRNA
ccttcatgatcacgcgccac

SEQ ID NO: 118975 - DNA, 20 bp, Artificial Sequence
  MKO10118975_B_St6galnac5
  gRNA
tggaatgtgcgatgacccgc

SEQ ID NO: 118976 - DNA, 20 bp, Artificial Sequence
  MKO10118976_B_St6galnac6
  gRNA
gccgacgcgtgcggccccgc

SEQ ID NO: 118977 - DNA, 20 bp, Artificial Sequence
  MKO10118977_B_St6galnac6
  gRNA
agcggtggtgattgccctta

SEQ ID NO: 118978 - DNA, 20 bp, Artificial Sequence
  MKO10118978_B_St6galnac6
  gRNA
accgcttcatcaccgagaag

SEQ ID NO: 118979 - DNA, 20 bp, Artificial Sequence
  MKO10118979_B_St7l
  gRNA
ctcagacaccaccatctatc

SEQ ID NO: 118980 - DNA, 20 bp, Artificial Sequence
  MKO10118980_B_St7l
  gRNA
tgtaagtgccacatagaact

SEQ ID NO: 118981 - DNA, 20 bp, Artificial Sequence
  MKO10118981_B_St7l
  gRNA
gggacatcttctttgatatc

SEQ ID NO: 118982 - DNA, 20 bp, Artificial Sequence
  MKO10118982_B_St7
  gRNA
tgaagattcagtaccaaaca

SEQ ID NO: 118983 - DNA, 20 bp, Artificial Sequence
  MKO10118983_B_St7
  gRNA
acctgagacactttgtctgt

SEQ ID NO: 118984 - DNA, 20 bp, Artificial Sequence
  MKO10118984_B_St7
  gRNA
ttgttacagaatgcaaagta

SEQ ID NO: 118985 - DNA, 20 bp, Artificial Sequence
  MKO10118985_B_St8sia1
  gRNA
agagctccccatcgtaccac

SEQ ID NO: 118986 - DNA, 20 bp, Artificial Sequence
  MKO10118986_B_St8sia1
  gRNA
ggaagagcctgtggtacgat

SEQ ID NO: 118987 - DNA, 20 bp, Artificial Sequence
  MKO10118987_B_St8sia1
  gRNA
ttacctctggcgaattatgc

SEQ ID NO: 118988 - DNA, 20 bp, Artificial Sequence
  MKO10118988_B_St8sia2
  gRNA
ttacttctgtcagcgacagc

SEQ ID NO: 118989 - DNA, 20 bp, Artificial Sequence
  MKO10118989_B_St8sia2
  gRNA
tcgggggtcttgctgaacag

SEQ ID NO: 118990 - DNA, 20 bp, Artificial Sequence
  MKO10118990_B_St8sia2
  gRNA
gcttacatagcaaatctaat

SEQ ID NO: 118991 - DNA, 20 bp, Artificial Sequence
  MKO10118991_B_St8sia3
  gRNA
aactgtaacgagaacgctag

SEQ ID NO: 118992 - DNA, 20 bp, Artificial Sequence
  MKO10118992_B_St8sia3
  gRNA
agggccagaaaccgtacaag

SEQ ID NO: 118993 - DNA, 20 bp, Artificial Sequence
  MKO10118993_B_St8sia3
  gRNA
atacctgtgctcagtcgttt

SEQ ID NO: 118994 - DNA, 20 bp, Artificial Sequence
  MKO10118994_B_St8sia4
  gRNA
tttccaacgccagtcctcac

SEQ ID NO: 118995 - DNA, 20 bp, Artificial Sequence
  MKO10118995_B_St8sia4
  gRNA
catcctgtgaggactggcgt

SEQ ID NO: 118996 - DNA, 20 bp, Artificial Sequence
  MKO10118996_B_St8sia4
  gRNA
tggagttcgctgctgatgtg

SEQ ID NO: 118997 - DNA, 20 bp, Artificial Sequence
  MKO10118997_B_St8sia5
  gRNA
agcagtctgaactcttcgaa

SEQ ID NO: 118998 - DNA, 20 bp, Artificial Sequence
  MKO10118998_B_St8sia5
  gRNA
ctccgccaacagagatttgt

SEQ ID NO: 118999 - DNA, 20 bp, Artificial Sequence
  MKO10118999_B_St8sia5
  gRNA
tacctgagattcgtctccac

SEQ ID NO: 119000 - DNA, 20 bp, Artificial Sequence
  MKO10119000_B_St8sia6
  gRNA
tagtacctgttcctggtgcg

SEQ ID NO: 119001 - DNA, 20 bp, Artificial Sequence
  MKO10119001_B_St8sia6
  gRNA
ctttatctaacaaaacgaga

SEQ ID NO: 119002 - DNA, 20 bp, Artificial Sequence
  MKO10119002_B_St8sia6
  gRNA
caaacatacagagatgccca

SEQ ID NO: 119003 - DNA, 20 bp, Artificial Sequence
  MKO10119003_B_Stab1
  gRNA
ggcgccgcgatatccttaag

SEQ ID NO: 119004 - DNA, 20 bp, Artificial Sequence
  MKO10119004_B_Stab1
  gRNA
gcagccacttaaggatatcg

SEQ ID NO: 119005 - DNA, 20 bp, Artificial Sequence
  MKO10119005_B_Stab1
  gRNA
tgccgagaccccaacagatt

SEQ ID NO: 119006 - DNA, 20 bp, Artificial Sequence
  MKO10119006_B_Stab2
  gRNA
tcgaaccccgacagtgccat

SEQ ID NO: 119007 - DNA, 20 bp, Artificial Sequence
  MKO10119007_B_Stab2
  gRNA
agactcacctgctgaacaat

SEQ ID NO: 119008 - DNA, 20 bp, Artificial Sequence
  MKO10119008_B_Stab2
  gRNA
caagggcaccgtgtggtggc

SEQ ID NO: 119009 - DNA, 20 bp, Artificial Sequence
  MKO10119009_B_Stac2
  gRNA
tagcgcagcgtctcataaac

SEQ ID NO: 119010 - DNA, 20 bp, Artificial Sequence
  MKO10119010_B_Stac2
  gRNA
gggtcacttaccagtaggtg

SEQ ID NO: 119011 - DNA, 20 bp, Artificial Sequence
  MKO10119011_B_Stac2
  gRNA
cttacatcgcaagccctgtt

SEQ ID NO: 119012 - DNA, 20 bp, Artificial Sequence
  MKO10119012_B_Stac3
  gRNA
acttacagacagcgtactgt

SEQ ID NO: 119013 - DNA, 20 bp, Artificial Sequence
  MKO10119013_B_Stac3
  gRNA
tgagcattgtcagtcctacg

SEQ ID NO: 119014 - DNA, 20 bp, Artificial Sequence
  MKO10119014_B_Stac3
  gRNA
tccagccacctggtttccgt

SEQ ID NO: 119015 - DNA, 20 bp, Artificial Sequence
  MKO10119015_B_Stac
  gRNA
ccaacttgcccatgcaccgc

SEQ ID NO: 119016 - DNA, 20 bp, Artificial Sequence
  MKO10119016_B_Stac
  gRNA
agccgcccttcttcgttctc

SEQ ID NO: 119017 - DNA, 20 bp, Artificial Sequence
  MKO10119017_B_Stac
  gRNA
cctggcgccccagcggtgca

SEQ ID NO: 119018 - DNA, 20 bp, Artificial Sequence
  MKO10119018_B_Stag1
  gRNA
atacatactggaggccggcc

SEQ ID NO: 119019 - DNA, 20 bp, Artificial Sequence
  MKO10119019_B_Stag1
  gRNA
ttcaatccagtcatccacca

SEQ ID NO: 119020 - DNA, 20 bp, Artificial Sequence
  MKO10119020_B_Stag1
  gRNA
aaaagaaaaaggggtcgtcc

SEQ ID NO: 119021 - DNA, 20 bp, Artificial Sequence
  MKO10119021_B_Stag2
  gRNA
aacggtcatcatcaacagaa

SEQ ID NO: 119022 - DNA, 20 bp, Artificial Sequence
  MKO10119022_B_Stag2
  gRNA
aatgacagaagaatttgacg

SEQ ID NO: 119023 - DNA, 20 bp, Artificial Sequence
  MKO10119023_B_Stag2
  gRNA
aaaaatcagaagcaaggcaa

SEQ ID NO: 119024 - DNA, 20 bp, Artificial Sequence
  MKO10119024_B_Stag3
  gRNA
cattcccactagatactatt

SEQ ID NO: 119025 - DNA, 20 bp, Artificial Sequence
  MKO10119025_B_Stag3
  gRNA
cctagtctttggtggatgag

SEQ ID NO: 119026 - DNA, 20 bp, Artificial Sequence
  MKO10119026_B_Stag3
  gRNA
agagatcatccaacacctaa

SEQ ID NO: 119027 - DNA, 20 bp, Artificial Sequence
  MKO10119027_B_Stam2
  gRNA
tgatcatggacatctgtgac

SEQ ID NO: 119028 - DNA, 20 bp, Artificial Sequence
  MKO10119028_B_Stam2
  gRNA
gcctaaaagccataatgaaa

SEQ ID NO: 119029 - DNA, 20 bp, Artificial Sequence
  MKO10119029_B_Stam2
  gRNA
acgttctgtgataaaaaata

SEQ ID NO: 119030 - DNA, 20 bp, Artificial Sequence
  MKO10119030_B_Stambpl1
  gRNA
gttcagactctagttgctgc

SEQ ID NO: 119031 - DNA, 20 bp, Artificial Sequence
  MKO10119031_B_Stambpl1
  gRNA
aattgaaaacggacctgcta

SEQ ID NO: 119032 - DNA, 20 bp, Artificial Sequence
  MKO10119032_B_Stambpl1
  gRNA
ctgcacactgctggtaatct

SEQ ID NO: 119033 - DNA, 20 bp, Artificial Sequence
  MKO10119033_B_Stambp
  gRNA
cgtgggcgagaacggtgagc

SEQ ID NO: 119034 - DNA, 20 bp, Artificial Sequence
  MKO10119034_B_Stambp
  gRNA
tgagcagtataaagagcgaa

SEQ ID NO: 119035 - DNA, 20 bp, Artificial Sequence
  MKO10119035_B_Stambp
  gRNA
gatgtggcgcaggccttcaa

SEQ ID NO: 119036 - DNA, 20 bp, Artificial Sequence
  MKO10119036_B_Stam
  gRNA
tagtgagttgaatactgctg

SEQ ID NO: 119037 - DNA, 20 bp, Artificial Sequence
  MKO10119037_B_Stam
  gRNA
attcccagctattggctctc

SEQ ID NO: 119038 - DNA, 20 bp, Artificial Sequence
  MKO10119038_B_Stam
  gRNA
agtaagcaatgtattaaata

SEQ ID NO: 119039 - DNA, 20 bp, Artificial Sequence
  MKO10119039_B_Stap1
  gRNA
cccaggagtacaaacactat

SEQ ID NO: 119040 - DNA, 20 bp, Artificial Sequence
  MKO10119040_B_Stap1
  gRNA
gtcagtgtaaaagaacagcg

SEQ ID NO: 119041 - DNA, 20 bp, Artificial Sequence
  MKO10119041_B_Stap1
  gRNA
cttcacatgcacttcttctt

SEQ ID NO: 119042 - DNA, 20 bp, Artificial Sequence
  MKO10119042_B_Stap2
  gRNA
gagaaccaggctgaagtgat

SEQ ID NO: 119043 - DNA, 20 bp, Artificial Sequence
  MKO10119043_B_Stap2
  gRNA
tctgtttctacaatagcaat

SEQ ID NO: 119044 - DNA, 20 bp, Artificial Sequence
  MKO10119044_B_Stap2
  gRNA
ctctctctaggtggagagcc

SEQ ID NO: 119045 - DNA, 20 bp, Artificial Sequence
  MKO10119045_B_Stard10
  gRNA
gagctgcgtcatcacctacc

SEQ ID NO: 119046 - DNA, 20 bp, Artificial Sequence
  MKO10119046_B_Stard10
  gRNA
aatgatgtaatcagcgccca

SEQ ID NO: 119047 - DNA, 20 bp, Artificial Sequence
  MKO10119047_B_Stard10
  gRNA
agccacttaccttgggggcc

SEQ ID NO: 119048 - DNA, 20 bp, Artificial Sequence
  MKO10119048_B_Stard13
  gRNA
cagtacgctcagctgtatga

SEQ ID NO: 119049 - DNA, 20 bp, Artificial Sequence
  MKO10119049_B_Stard13
  gRNA
accttgtagaacctctttgc

SEQ ID NO: 119050 - DNA, 20 bp, Artificial Sequence
  MKO10119050_B_Stard13
  gRNA
gcagttccccatcaacattg

SEQ ID NO: 119051 - DNA, 20 bp, Artificial Sequence
  MKO10119051_B_Stard3nl
  gRNA
catcgagaacaccctgaaga

SEQ ID NO: 119052 - DNA, 20 bp, Artificial Sequence
  MKO10119052_B_Stard3nl
  gRNA
agcaaaagtgatcctctcaa

SEQ ID NO: 119053 - DNA, 20 bp, Artificial Sequence
  MKO10119053_B_Stard3nl
  gRNA
tttcaaagtgttacctcaag

SEQ ID NO: 119054 - DNA, 20 bp, Artificial Sequence
  MKO10119054_B_Stard3
  gRNA
tgatttcaaagtcttacccc

SEQ ID NO: 119055 - DNA, 20 bp, Artificial Sequence
  MKO10119055_B_Stard3
  gRNA
gacggagcacagcatagccc

SEQ ID NO: 119056 - DNA, 20 bp, Artificial Sequence
  MKO10119056_B_Stard3
  gRNA
cagtgcattcctcattgtca

SEQ ID NO: 119057 - DNA, 20 bp, Artificial Sequence
  MKO10119057_B_Stard4
  gRNA
gtgatgcgttacaccactgc

SEQ ID NO: 119058 - DNA, 20 bp, Artificial Sequence
  MKO10119058_B_Stard4
  gRNA
ctgaagtttagttgaaatag

SEQ ID NO: 119059 - DNA, 20 bp, Artificial Sequence
  MKO10119059_B_Stard4
  gRNA
aaaccctcagaagagtttaa

SEQ ID NO: 119060 - DNA, 20 bp, Artificial Sequence
  MKO10119060_B_Stard5
  gRNA
ggttcacagaagcacccgca

SEQ ID NO: 119061 - DNA, 20 bp, Artificial Sequence
  MKO10119061_B_Stard5
  gRNA
aggccatctgaggagtttcc

SEQ ID NO: 119062 - DNA, 20 bp, Artificial Sequence
  MKO10119062_B_Stard5
  gRNA
ccatgaagcttatttctccc

SEQ ID NO: 119063 - DNA, 20 bp, Artificial Sequence
  MKO10119063_B_Stard6
  gRNA
aagacctctagaatattcca

SEQ ID NO: 119064 - DNA, 20 bp, Artificial Sequence
  MKO10119064_B_Stard6
  gRNA
ctctgtgatcatgtttgaag

SEQ ID NO: 119065 - DNA, 20 bp, Artificial Sequence
  MKO10119065_B_Stard6
  gRNA
actaagtcgataaagtctct

SEQ ID NO: 119066 - DNA, 20 bp, Artificial Sequence
  MKO10119066_B_Stard7
  gRNA
ccgacagttcttcaatgttc

SEQ ID NO: 119067 - DNA, 20 bp, Artificial Sequence
  MKO10119067_B_Stard7
  gRNA
tcacctctagcttgatcaca

SEQ ID NO: 119068 - DNA, 20 bp, Artificial Sequence
  MKO10119068_B_Stard7
  gRNA
caaccgtttcatctcattaa

SEQ ID NO: 119069 - DNA, 20 bp, Artificial Sequence
  MKO10119069_B_Stard8
  gRNA
gtgggcatctttcgcaagtc

SEQ ID NO: 119070 - DNA, 20 bp, Artificial Sequence
  MKO10119070_B_Stard8
  gRNA
gtaggtatcgcatagcttgc

SEQ ID NO: 119071 - DNA, 20 bp, Artificial Sequence
  MKO10119071_B_Stard8
  gRNA
acttacgctgatagatttgt

SEQ ID NO: 119072 - DNA, 20 bp, Artificial Sequence
  MKO10119072_B_Star
  gRNA
tgtgggcaaggtgtttcgct

SEQ ID NO: 119073 - DNA, 20 bp, Artificial Sequence
  MKO10119073_B_Star
  gRNA
attaaggcaccaagctgtgc

SEQ ID NO: 119074 - DNA, 20 bp, Artificial Sequence
  MKO10119074_B_Star
  gRNA
cgaaacaccttgcccacatc

SEQ ID NO: 119075 - DNA, 20 bp, Artificial Sequence
  MKO10119075_B_Stat1
  gRNA
actcttacctctgttctgag

SEQ ID NO: 119076 - DNA, 20 bp, Artificial Sequence
  MKO10119076_B_Stat1
  gRNA
gatcatctacaactgtctga

SEQ ID NO: 119077 - DNA, 20 bp, Artificial Sequence
  MKO10119077_B_Stat1
  gRNA
ttatctgcagtgcatagagc

SEQ ID NO: 119078 - DNA, 20 bp, Artificial Sequence
  MKO10119078_B_Stat2
  gRNA
agttcttggtgagatccatc

SEQ ID NO: 119079 - DNA, 20 bp, Artificial Sequence
  MKO10119079_B_Stat2
  gRNA
ataacttgcgaaaattcagc

SEQ ID NO: 119080 - DNA, 20 bp, Artificial Sequence
  MKO10119080_B_Stat2
  gRNA
cctacttagacctttcccaa

SEQ ID NO: 119081 - DNA, 20 bp, Artificial Sequence
  MKO10119081_B_Stat3
  gRNA
acgatccgggcaatttccat

SEQ ID NO: 119082 - DNA, 20 bp, Artificial Sequence
  MKO10119082_B_Stat3
  gRNA
gtacagcgacagcttcccca

SEQ ID NO: 119083 - DNA, 20 bp, Artificial Sequence
  MKO10119083_B_Stat3
  gRNA
ggaggcgagactcttcccac

SEQ ID NO: 119084 - DNA, 20 bp, Artificial Sequence
  MKO10119084_B_Stat4
  gRNA
tgtagtcaaactcatcttgc

SEQ ID NO: 119085 - DNA, 20 bp, Artificial Sequence
  MKO10119085_B_Stat4
  gRNA
gagaattagaaaagttcttc

SEQ ID NO: 119086 - DNA, 20 bp, Artificial Sequence
  MKO10119086_B_Stat4
  gRNA
agcttctaacaatgaaacta

SEQ ID NO: 119087 - DNA, 20 bp, Artificial Sequence
  MKO10119087_B_Stat5a
  gRNA
tctgggacatggcgtcaacc

SEQ ID NO: 119088 - DNA, 20 bp, Artificial Sequence
  MKO10119088_B_Stat5a
  gRNA
cacgtatgaccgctgtccca

SEQ ID NO: 119089 - DNA, 20 bp, Artificial Sequence
  MKO10119089_B_Stat5a
  gRNA
taatccccaggaccgaggtc

SEQ ID NO: 119090 - DNA, 20 bp, Artificial Sequence
  MKO10119090_B_Stat5b
  gRNA
gttcgttgtacagaatgtgc

SEQ ID NO: 119091 - DNA, 20 bp, Artificial Sequence
  MKO10119091_B_Stat5b
  gRNA
aatagatcttgataatccac

SEQ ID NO: 119092 - DNA, 20 bp, Artificial Sequence
  MKO10119092_B_Stat5b
  gRNA
cattaaggccacccagctcc

SEQ ID NO: 119093 - DNA, 20 bp, Artificial Sequence
  MKO10119093_B_Stat6
  gRNA
cttgccgcacatcagcacct

SEQ ID NO: 119094 - DNA, 20 bp, Artificial Sequence
  MKO10119094_B_Stat6
  gRNA
ctcgatgctgaagccttccg

SEQ ID NO: 119095 - DNA, 20 bp, Artificial Sequence
  MKO10119095_B_Stat6
  gRNA
ttgatagaccctcctgtcaa

SEQ ID NO: 119096 - DNA, 20 bp, Artificial Sequence
  MKO10119096_B_Stau1
  gRNA
tgtttgaaattgcgctgaag

SEQ ID NO: 119097 - DNA, 20 bp, Artificial Sequence
  MKO10119097_B_Stau1
  gRNA
aaaaccaatgtataagcccg

SEQ ID NO: 119098 - DNA, 20 bp, Artificial Sequence
  MKO10119098_B_Stau1
  gRNA
aggcttacctcaaaattcac

SEQ ID NO: 119099 - DNA, 20 bp, Artificial Sequence
  MKO10119099_B_Stau2
  gRNA
taactgaacataaaagatct

SEQ ID NO: 119100 - DNA, 20 bp, Artificial Sequence
  MKO10119100_B_Stau2
  gRNA
ctttgttagcaacagcttgt

SEQ ID NO: 119101 - DNA, 20 bp, Artificial Sequence
  MKO10119101_B_Stau2
  gRNA
acacatacctcaaaactgac

SEQ ID NO: 119102 - DNA, 20 bp, Artificial Sequence
  MKO10119102_B_Stbd1
  gRNA
gttcgtgttggtagagaata

SEQ ID NO: 119103 - DNA, 20 bp, Artificial Sequence
  MKO10119103_B_Stbd1
  gRNA
ctagacccccgccgaccagc

SEQ ID NO: 119104 - DNA, 20 bp, Artificial Sequence
  MKO10119104_B_Stbd1
  gRNA
ggttgcggagccgccgcaga

SEQ ID NO: 119105 - DNA, 20 bp, Artificial Sequence
  MKO10119105_B_Stc1
  gRNA
cagtgcagctgcagcgcacg

SEQ ID NO: 119106 - DNA, 20 bp, Artificial Sequence
  MKO10119106_B_Stc1
  gRNA
cagacttgtccgaagccttc

SEQ ID NO: 119107 - DNA, 20 bp, Artificial Sequence
  MKO10119107_B_Stc1
  gRNA
tgctgctaaatttgacactc

SEQ ID NO: 119108 - DNA, 20 bp, Artificial Sequence
  MKO10119108_B_Stc2
  gRNA
gacggactccacgaaccctc

SEQ ID NO: 119109 - DNA, 20 bp, Artificial Sequence
  MKO10119109_B_Stc2
  gRNA
gtggagtccgtcccctgcgc

SEQ ID NO: 119110 - DNA, 20 bp, Artificial Sequence
  MKO10119110_B_Stc2
  gRNA
aatgccggggacgtgggctg

SEQ ID NO: 119111 - DNA, 20 bp, Artificial Sequence
  MKO10119111_B_Steap1
  gRNA
gacatctacccatttattcc

SEQ ID NO: 119112 - DNA, 20 bp, Artificial Sequence
  MKO10119112_B_Steap1
  gRNA
tagatgtcagtcaatttgta

SEQ ID NO: 119113 - DNA, 20 bp, Artificial Sequence
  MKO10119113_B_Steap1
  gRNA
cctgggtagagcatgatgtc

SEQ ID NO: 119114 - DNA, 20 bp, Artificial Sequence
  MKO10119114_B_Steap2
  gRNA
gccacatctaataagccgaa

SEQ ID NO: 119115 - DNA, 20 bp, Artificial Sequence
  MKO10119115_B_Steap2
  gRNA
cgataacctgctgtcgagct

SEQ ID NO: 119116 - DNA, 20 bp, Artificial Sequence
  MKO10119116_B_Steap2
  gRNA
agtaccgccgatttcccccg

SEQ ID NO: 119117 - DNA, 20 bp, Artificial Sequence
  MKO10119117_B_Steap3
  gRNA
aaaggcacgggtccagccgt

SEQ ID NO: 119118 - DNA, 20 bp, Artificial Sequence
  MKO10119118_B_Steap3
  gRNA
ccaggtactcagcgttagac

SEQ ID NO: 119119 - DNA, 20 bp, Artificial Sequence
  MKO10119119_B_Steap3
  gRNA
tggccaacaagagccgcctc

SEQ ID NO: 119120 - DNA, 20 bp, Artificial Sequence
  MKO10119120_B_Steap4
  gRNA
cgtcatcccctgcgcagtgc

SEQ ID NO: 119121 - DNA, 20 bp, Artificial Sequence
  MKO10119121_B_Steap4
  gRNA
gataatcaactagttccgtg

SEQ ID NO: 119122 - DNA, 20 bp, Artificial Sequence
  MKO10119122_B_Steap4
  gRNA
taatgattcctacttggcgc

SEQ ID NO: 119123 - DNA, 20 bp, Artificial Sequence
  MKO10119123_B_Stfa1
  gRNA
tataaaactcaagtcgtcgc

SEQ ID NO: 119124 - DNA, 20 bp, Artificial Sequence
  MKO10119124_B_Stfa1
  gRNA
tttcagatggatgtaggtca

SEQ ID NO: 119125 - DNA, 20 bp, Artificial Sequence
  MKO10119125_B_Stfa1
  gRNA
aatccagatgattgctaaca

SEQ ID NO: 119126 - DNA, 20 bp, Artificial Sequence
  MKO10119126_B_Stfa2l1
  gRNA
aatctcctgaatttctgatg

SEQ ID NO: 119127 - DNA, 20 bp, Artificial Sequence
  MKO10119127_B_Stfa2l1
  gRNA
taatgaagtaatttagtcct

SEQ ID NO: 119128 - DNA, 20 bp, Artificial Sequence
  MKO10119128_B_Stfa2l1
  gRNA
tataaagttcaagtcgtcca

SEQ ID NO: 119129 - DNA, 20 bp, Artificial Sequence
  MKO10119129_B_Stfa2
  gRNA
caaacctccaattatttcta

SEQ ID NO: 119130 - DNA, 20 bp, Artificial Sequence
  MKO10119130_B_Stfa2
  gRNA
tataaagttcaagtcgtcca

SEQ ID NO: 119131 - DNA, 20 bp, Artificial Sequence
  MKO10119131_B_Stfa2
  gRNA
taatgaagtaatttagtcct

SEQ ID NO: 119132 - DNA, 20 bp, Artificial Sequence
  MKO10119132_B_Stfa3
  gRNA
tcaccttgtcagcaatcatc

SEQ ID NO: 119133 - DNA, 20 bp, Artificial Sequence
  MKO10119133_B_Stfa3
  gRNA
aatccagatgattgctgaca

SEQ ID NO: 119134 - DNA, 20 bp, Artificial Sequence
  MKO10119134_B_Stfa3
  gRNA
tgagaaatatgaaaaattcg

SEQ ID NO: 119135 - DNA, 20 bp, Artificial Sequence
  MKO10119135_B_Stil
  gRNA
aaaggtaccatcttgcttga

SEQ ID NO: 119136 - DNA, 20 bp, Artificial Sequence
  MKO10119136_B_Stil
  gRNA
acttgcatctcagttactac

SEQ ID NO: 119137 - DNA, 20 bp, Artificial Sequence
  MKO10119137_B_Stil
  gRNA
tgcaagtgctgtagggataa

SEQ ID NO: 119138 - DNA, 20 bp, Artificial Sequence
  MKO10119138_B_Stim1
  gRNA
atgacttccacgccttccac

SEQ ID NO: 119139 - DNA, 20 bp, Artificial Sequence
  MKO10119139_B_Stim1
  gRNA
gtaaccaacaccaccatgac

SEQ ID NO: 119140 - DNA, 20 bp, Artificial Sequence
  MKO10119140_B_Stim1
  gRNA
catcgtcatccatcagctta

SEQ ID NO: 119141 - DNA, 20 bp, Artificial Sequence
  MKO10119141_B_Stim2
  gRNA
cttgcttcactgaagaagac

SEQ ID NO: 119142 - DNA, 20 bp, Artificial Sequence
  MKO10119142_B_Stim2
  gRNA
agataagcacataactgttg

SEQ ID NO: 119143 - DNA, 20 bp, Artificial Sequence
  MKO10119143_B_Stim2
  gRNA
gcccaaacagaaccacatcc

SEQ ID NO: 119144 - DNA, 20 bp, Artificial Sequence
  MKO10119144_B_Stip1
  gRNA
gcagaacaagccgtcagacc

SEQ ID NO: 119145 - DNA, 20 bp, Artificial Sequence
  MKO10119145_B_Stip1
  gRNA
ttcgtttggcttcctcaaac

SEQ ID NO: 119146 - DNA, 20 bp, Artificial Sequence
  MKO10119146_B_Stip1
  gRNA
actgagcagcgaccttgtcc

SEQ ID NO: 119147 - DNA, 20 bp, Artificial Sequence
  MKO10119147_B_Stk10
  gRNA
caacgtgcttatgacccttg

SEQ ID NO: 119148 - DNA, 20 bp, Artificial Sequence
  MKO10119148_B_Stk10
  gRNA
atcatgattgagttctgccc

SEQ ID NO: 119149 - DNA, 20 bp, Artificial Sequence
  MKO10119149_B_Stk10
  gRNA
ccagtaaggtgtccctatga

SEQ ID NO: 119150 - DNA, 20 bp, Artificial Sequence
  MKO10119150_B_Stk11ip
  gRNA
gagcgcattgtagctgaagt

SEQ ID NO: 119151 - DNA, 20 bp, Artificial Sequence
  MKO10119151_B_Stk11ip
  gRNA
ggtttgcaacagaagcatcc

SEQ ID NO: 119152 - DNA, 20 bp, Artificial Sequence
  MKO10119152_B_Stk11ip
  gRNA
tttcagctggtccatatccc

SEQ ID NO: 119153 - DNA, 20 bp, Artificial Sequence
  MKO10119153_B_Stk11
  gRNA
gtactgcgtatgtggcatgc

SEQ ID NO: 119154 - DNA, 20 bp, Artificial Sequence
  MKO10119154_B_Stk11
  gRNA
tcggaatgtgatccagcttg

SEQ ID NO: 119155 - DNA, 20 bp, Artificial Sequence
  MKO10119155_B_Stk11
  gRNA
tgacacctgccggacaagcc

SEQ ID NO: 119156 - DNA, 20 bp, Artificial Sequence
  MKO10119156_B_Stk16
  gRNA
gccactgtgtcatcgatgag

SEQ ID NO: 119157 - DNA, 20 bp, Artificial Sequence
  MKO10119157_B_Stk16
  gRNA
ttacctgaagagctagtgcc

SEQ ID NO: 119158 - DNA, 20 bp, Artificial Sequence
  MKO10119158_B_Stk16
  gRNA
catcatgcaagccctccact

SEQ ID NO: 119159 - DNA, 20 bp, Artificial Sequence
  MKO10119159_B_Stk17b
  gRNA
ttgggaatgcaagtgagctt

SEQ ID NO: 119160 - DNA, 20 bp, Artificial Sequence
  MKO10119160_B_Stk17b
  gRNA
atgggaacacctgaatactt

SEQ ID NO: 119161 - DNA, 20 bp, Artificial Sequence
  MKO10119161_B_Stk17b
  gRNA
gtagataatgaactccttca

SEQ ID NO: 119162 - DNA, 20 bp, Artificial Sequence
  MKO10119162_B_Stk19
  gRNA
tggggcggtgcagaagttcc

SEQ ID NO: 119163 - DNA, 20 bp, Artificial Sequence
  MKO10119163_B_Stk19
  gRNA
tgctcatgggattgtcttca

SEQ ID NO: 119164 - DNA, 20 bp, Artificial Sequence
  MKO10119164_B_Stk19
  gRNA
tgcaggcagctggtgaacgc

SEQ ID NO: 119165 - DNA, 20 bp, Artificial Sequence
  MKO10119165_B_Stk24
  gRNA
tgacgtagggactgtcacac

SEQ ID NO: 119166 - DNA, 20 bp, Artificial Sequence
  MKO10119166_B_Stk24
  gRNA
tttcagaatttctcgtaata

SEQ ID NO: 119167 - DNA, 20 bp, Artificial Sequence
  MKO10119167_B_Stk24
  gRNA
tgacggatacccagatcaaa

SEQ ID NO: 119168 - DNA, 20 bp, Artificial Sequence
  MKO10119168_B_Stk25
  gRNA
ctgctccgagagcagcacgt

SEQ ID NO: 119169 - DNA, 20 bp, Artificial Sequence
  MKO10119169_B_Stk25
  gRNA
catttgtgggtacacccttc

SEQ ID NO: 119170 - DNA, 20 bp, Artificial Sequence
  MKO10119170_B_Stk25
  gRNA
aagatccaccgagatatcaa

SEQ ID NO: 119171 - DNA, 20 bp, Artificial Sequence
  MKO10119171_B_Stk30
  gRNA
tgcactaatatgtgaactta

SEQ ID NO: 119172 - DNA, 20 bp, Artificial Sequence
  MKO10119172_B_Stk30
  gRNA
cctatagactacaaagcaat

SEQ ID NO: 119173 - DNA, 20 bp, Artificial Sequence
  MKO10119173_B_Stk30
  gRNA
aatatttatgagctaatacg

SEQ ID NO: 119174 - DNA, 20 bp, Artificial Sequence
  MKO10119174_B_Stk31
  gRNA
gaagatacacattacaataa

SEQ ID NO: 119175 - DNA, 20 bp, Artificial Sequence
  MKO10119175_B_Stk31
  gRNA
ttagaatgtcagtaaaaata

SEQ ID NO: 119176 - DNA, 20 bp, Artificial Sequence
  MKO10119176_B_Stk31
  gRNA
aatgtgtatcttcatccatt

SEQ ID NO: 119177 - DNA, 20 bp, Artificial Sequence
  MKO10119177_B_Stk32a
  gRNA
gcacttaccacagattcacc

SEQ ID NO: 119178 - DNA, 20 bp, Artificial Sequence
  MKO10119178_B_Stk32a
  gRNA
tcatcaagtaaaatattgtc

SEQ ID NO: 119179 - DNA, 20 bp, Artificial Sequence
  MKO10119179_B_Stk32a
  gRNA
cccaaaacttcccttcccaa

SEQ ID NO: 119180 - DNA, 20 bp, Artificial Sequence
  MKO10119180_B_Stk32b
  gRNA
tgtccctaggtactccttcc

SEQ ID NO: 119181 - DNA, 20 bp, Artificial Sequence
  MKO10119181_B_Stk32b
  gRNA
ttgaccacttccagatcctg

SEQ ID NO: 119182 - DNA, 20 bp, Artificial Sequence
  MKO10119182_B_Stk32b
  gRNA
tggctctggagtacctgcag

SEQ ID NO: 119183 - DNA, 20 bp, Artificial Sequence
  MKO10119183_B_Stk32c
  gRNA
ccagctcccggaagacattc

SEQ ID NO: 119184 - DNA, 20 bp, Artificial Sequence
  MKO10119184_B_Stk32c
  gRNA
cacacctgtggatgatgtgt

SEQ ID NO: 119185 - DNA, 20 bp, Artificial Sequence
  MKO10119185_B_Stk32c
  gRNA
gggactcaccttgttcatcc

SEQ ID NO: 119186 - DNA, 20 bp, Artificial Sequence
  MKO10119186_B_Stk33
  gRNA
cttgttatgaagatatgcga

SEQ ID NO: 119187 - DNA, 20 bp, Artificial Sequence
  MKO10119187_B_Stk33
  gRNA
aagttctgcaatgaagctac

SEQ ID NO: 119188 - DNA, 20 bp, Artificial Sequence
  MKO10119188_B_Stk33
  gRNA
ttccaggaattctatacctt

SEQ ID NO: 119189 - DNA, 20 bp, Artificial Sequence
  MKO10119189_B_Stk35
  gRNA
caaaaagcccggagcggaaa

SEQ ID NO: 119190 - DNA, 20 bp, Artificial Sequence
  MKO10119190_B_Stk35
  gRNA
ataaaaaccacatcgtgcac

SEQ ID NO: 119191 - DNA, 20 bp, Artificial Sequence
  MKO10119191_B_Stk35
  gRNA
tgagatcgtccctgttggtg

SEQ ID NO: 119192 - DNA, 20 bp, Artificial Sequence
  MKO10119192_B_Stk36
  gRNA
gggctgcatcctgtatgagc

SEQ ID NO: 119193 - DNA, 20 bp, Artificial Sequence
  MKO10119193_B_Stk36
  gRNA
ttctcaaggaccctgtgcgc

SEQ ID NO: 119194 - DNA, 20 bp, Artificial Sequence
  MKO10119194_B_Stk36
  gRNA
tttctctgagcgccccagtt

SEQ ID NO: 119195 - DNA, 20 bp, Artificial Sequence
  MKO10119195_B_Stk38l
  gRNA
agaagaaggattggcagatg

SEQ ID NO: 119196 - DNA, 20 bp, Artificial Sequence
  MKO10119196_B_Stk38l
  gRNA
caagcatgtcagctttcctc

SEQ ID NO: 119197 - DNA, 20 bp, Artificial Sequence
  MKO10119197_B_Stk38l
  gRNA
gctggtccagaagaaagaca

SEQ ID NO: 119198 - DNA, 20 bp, Artificial Sequence
  MKO10119198_B_Stk38
  gRNA
gctaaacctctacctaatca

SEQ ID NO: 119199 - DNA, 20 bp, Artificial Sequence
  MKO10119199_B_Stk38
  gRNA
cgagcatgtctgctttgcgc

SEQ ID NO: 119200 - DNA, 20 bp, Artificial Sequence
  MKO10119200_B_Stk38
  gRNA
aaatcacctcttcgtctttc

SEQ ID NO: 119201 - DNA, 20 bp, Artificial Sequence
  MKO10119201_B_Stk39
  gRNA
ggagttcatccatactcgtc

SEQ ID NO: 119202 - DNA, 20 bp, Artificial Sequence
  MKO10119202_B_Stk39
  gRNA
ttgcaattatcgcctcttct

SEQ ID NO: 119203 - DNA, 20 bp, Artificial Sequence
  MKO10119203_B_Stk39
  gRNA
gacttattacacctcctttg

SEQ ID NO: 119204 - DNA, 20 bp, Artificial Sequence
  MKO10119204_B_Stk3
  gRNA
cctgtcacattgttgcatta

SEQ ID NO: 119205 - DNA, 20 bp, Artificial Sequence
  MKO10119205_B_Stk3
  gRNA
aatattctcctcaatacaga

SEQ ID NO: 119206 - DNA, 20 bp, Artificial Sequence
  MKO10119206_B_Stk3
  gRNA
agtacatcaaaaacttcttc

SEQ ID NO: 119207 - DNA, 20 bp, Artificial Sequence
  MKO10119207_B_Stk40
  gRNA
tctacagatcctcacccttg

SEQ ID NO: 119208 - DNA, 20 bp, Artificial Sequence
  MKO10119208_B_Stk40
  gRNA
ggaaataacgcaaagagagc

SEQ ID NO: 119209 - DNA, 20 bp, Artificial Sequence
  MKO10119209_B_Stk40
  gRNA
agatgacttctatcagttga

SEQ ID NO: 119210 - DNA, 20 bp, Artificial Sequence
  MKO10119210_B_Stk4
  gRNA
gtcttatggcagcgtgtaca

SEQ ID NO: 119211 - DNA, 20 bp, Artificial Sequence
  MKO10119211_B_Stk4
  gRNA
tatttcccgccttgatatct

SEQ ID NO: 119212 - DNA, 20 bp, Artificial Sequence
  MKO10119212_B_Stk4
  gRNA
tgcaatcaagcaagtgcccg

SEQ ID NO: 119213 - DNA, 20 bp, Artificial Sequence
  MKO10119213_B_Stmn1
  gRNA
agatattcaggtgaaagagc

SEQ ID NO: 119214 - DNA, 20 bp, Artificial Sequence
  MKO10119214_B_Stmn1
  gRNA
ctctcgcaagcgctccagct

SEQ ID NO: 119215 - DNA, 20 bp, Artificial Sequence
  MKO10119215_B_Stmn1
  gRNA
tgaagcagctcgcggagaag

SEQ ID NO: 119216 - DNA, 20 bp, Artificial Sequence
  MKO10119216_B_Stmn2
  gRNA
tttggagaagctagagttcg

SEQ ID NO: 119217 - DNA, 20 bp, Artificial Sequence
  MKO10119217_B_Stmn2
  gRNA
cgagcgagaggtgctccaga

SEQ ID NO: 119218 - DNA, 20 bp, Artificial Sequence
  MKO10119218_B_Stmn2
  gRNA
aggtgaagcagatcaacaag

SEQ ID NO: 119219 - DNA, 20 bp, Artificial Sequence
  MKO10119219_B_Stmn3
  gRNA
ctcacctccatactggtaga

SEQ ID NO: 119220 - DNA, 20 bp, Artificial Sequence
  MKO10119220_B_Stmn3
  gRNA
ggcctctggccagagcttcg

SEQ ID NO: 119221 - DNA, 20 bp, Artificial Sequence
  MKO10119221_B_Stmn3
  gRNA
agatatggaagtgaagcagc

SEQ ID NO: 119222 - DNA, 20 bp, Artificial Sequence
  MKO10119222_B_Stmn4
  gRNA
cagatacagtagacctgaac

SEQ ID NO: 119223 - DNA, 20 bp, Artificial Sequence
  MKO10119223_B_Stmn4
  gRNA
tccccaggacaagcacgcag

SEQ ID NO: 119224 - DNA, 20 bp, Artificial Sequence
  MKO10119224_B_Stmn4
  gRNA
ccacttaccttcatatttgt

SEQ ID NO: 119225 - DNA, 20 bp, Artificial Sequence
  MKO10119225_B_Stmnd1
  gRNA
agacatgtattacaaccaag

SEQ ID NO: 119226 - DNA, 20 bp, Artificial Sequence
  MKO10119226_B_Stmnd1
  gRNA
tggagagtcgtatgatgtca

SEQ ID NO: 119227 - DNA, 20 bp, Artificial Sequence
  MKO10119227_B_Stmnd1
  gRNA
caactcctagtaaaacaagc

SEQ ID NO: 119228 - DNA, 20 bp, Artificial Sequence
  MKO10119228_B_Stoml1
  gRNA
ccatggcctcgtcagtgtcc

SEQ ID NO: 119229 - DNA, 20 bp, Artificial Sequence
  MKO10119229_B_Stoml1
  gRNA
agcccacaacgccatgacta

SEQ ID NO: 119230 - DNA, 20 bp, Artificial Sequence
  MKO10119230_B_Stoml1
  gRNA
ggaagtatgaactcagcggt

SEQ ID NO: 119231 - DNA, 20 bp, Artificial Sequence
  MKO10119231_B_Stoml2
  gRNA
agtcctttatctgcgcatca

SEQ ID NO: 119232 - DNA, 20 bp, Artificial Sequence
  MKO10119232_B_Stoml2
  gRNA
gatccatgatgcgcagataa

SEQ ID NO: 119233 - DNA, 20 bp, Artificial Sequence
  MKO10119233_B_Stoml2
  gRNA
ttctcaccggttccaggatc

SEQ ID NO: 119234 - DNA, 20 bp, Artificial Sequence
  MKO10119234_B_Stoml3
  gRNA
caatgtgaacgatgttcacc

SEQ ID NO: 119235 - DNA, 20 bp, Artificial Sequence
  MKO10119235_B_Stoml3
  gRNA
ttgacaaacacgtcaatgca

SEQ ID NO: 119236 - DNA, 20 bp, Artificial Sequence
  MKO10119236_B_Stoml3
  gRNA
ttaccttcccaatctcagta

SEQ ID NO: 119237 - DNA, 20 bp, Artificial Sequence
  MKO10119237_B_Stom
  gRNA
ctcctttgacattcctccgc

SEQ ID NO: 119238 - DNA, 20 bp, Artificial Sequence
  MKO10119238_B_Stom
  gRNA
cgagtactgacctggtcctt

SEQ ID NO: 119239 - DNA, 20 bp, Artificial Sequence
  MKO10119239_B_Stom
  gRNA
gagagtcatcatctttagac

SEQ ID NO: 119240 - DNA, 20 bp, Artificial Sequence
  MKO10119240_B_Ston1
  gRNA
agcaaatggataccaatctg

SEQ ID NO: 119241 - DNA, 20 bp, Artificial Sequence
  MKO10119241_B_Ston1
  gRNA
ggagaagacgcagataaaac

SEQ ID NO: 119242 - DNA, 20 bp, Artificial Sequence
  MKO10119242_B_Ston1
  gRNA
aggttgaaatagaaaagaag

SEQ ID NO: 119243 - DNA, 20 bp, Artificial Sequence
  MKO10119243_B_Ston2
  gRNA
ctccggcttaccggtagagt

SEQ ID NO: 119244 - DNA, 20 bp, Artificial Sequence
  MKO10119244_B_Ston2
  gRNA
ttgacccacttcctgacgtc

SEQ ID NO: 119245 - DNA, 20 bp, Artificial Sequence
  MKO10119245_B_Ston2
  gRNA
gggagccttcatccacgaca

SEQ ID NO: 119246 - DNA, 20 bp, Artificial Sequence
  MKO10119246_B_Stox1
  gRNA
ccgaggcttccgcatcaccg

SEQ ID NO: 119247 - DNA, 20 bp, Artificial Sequence
  MKO10119247_B_Stox1
  gRNA
atctactaattccgccattt

SEQ ID NO: 119248 - DNA, 20 bp, Artificial Sequence
  MKO10119248_B_Stox1
  gRNA
tgctatagctgatatgaacg

SEQ ID NO: 119249 - DNA, 20 bp, Artificial Sequence
  MKO10119249_B_Stox2
  gRNA
aggttggaccagctccgcca

SEQ ID NO: 119250 - DNA, 20 bp, Artificial Sequence
  MKO10119250_B_Stox2
  gRNA
ggtgttccatcagcgcctcc

SEQ ID NO: 119251 - DNA, 20 bp, Artificial Sequence
  MKO10119251_B_Stox2
  gRNA
tgcgagaaagcctgtcaccc

SEQ ID NO: 119252 - DNA, 20 bp, Artificial Sequence
  MKO10119252_B_Stpg1
  gRNA
ctgccaacgcgtataccatc

SEQ ID NO: 119253 - DNA, 20 bp, Artificial Sequence
  MKO10119253_B_Stpg1
  gRNA
attgacgtcctgtgtctata

SEQ ID NO: 119254 - DNA, 20 bp, Artificial Sequence
  MKO10119254_B_Stpg1
  gRNA
tccttctcaggatgacgtcc

SEQ ID NO: 119255 - DNA, 20 bp, Artificial Sequence
  MKO10119255_B_Stpg2
  gRNA
attatgtatcacaaccagac

SEQ ID NO: 119256 - DNA, 20 bp, Artificial Sequence
  MKO10119256_B_Stpg2
  gRNA
tggatgatatcatactgtcc

SEQ ID NO: 119257 - DNA, 20 bp, Artificial Sequence
  MKO10119257_B_Stpg2
  gRNA
cctattgtgttgtcactagg

SEQ ID NO: 119258 - DNA, 20 bp, Artificial Sequence
  MKO10119258_B_Stra13
  gRNA
gactactccatttgcacttc

SEQ ID NO: 119259 - DNA, 20 bp, Artificial Sequence
  MKO10119259_B_Stra13
  gRNA
gatccacttccacaacatcc

SEQ ID NO: 119260 - DNA, 20 bp, Artificial Sequence
  MKO10119260_B_Stra13
  gRNA
tgttgtggaagtggatcagc

SEQ ID NO: 119261 - DNA, 20 bp, Artificial Sequence
  MKO10119261_B_Stra6
  gRNA
tccccagccaagaaatccac

SEQ ID NO: 119262 - DNA, 20 bp, Artificial Sequence
  MKO10119262_B_Stra6
  gRNA
aacttaccgacagtgaagcc

SEQ ID NO: 119263 - DNA, 20 bp, Artificial Sequence
  MKO10119263_B_Stra6
  gRNA
caggcatggagcagggcagg

SEQ ID NO: 119264 - DNA, 20 bp, Artificial Sequence
  MKO10119264_B_Stra8
  gRNA
tgagcttcagcaacttatcc

SEQ ID NO: 119265 - DNA, 20 bp, Artificial Sequence
  MKO10119265_B_Stra8
  gRNA
attcccatcttgcaggttga

SEQ ID NO: 119266 - DNA, 20 bp, Artificial Sequence
  MKO10119266_B_Stra8
  gRNA
cttgacctcctctaagctgt

SEQ ID NO: 119267 - DNA, 20 bp, Artificial Sequence
  MKO10119267_B_Strada
  gRNA
gagagtatgtgacagtacga

SEQ ID NO: 119268 - DNA, 20 bp, Artificial Sequence
  MKO10119268_B_Strada
  gRNA
agctcataacacccgccctc

SEQ ID NO: 119269 - DNA, 20 bp, Artificial Sequence
  MKO10119269_B_Strada
  gRNA
agaaagctgctcatcatctc

SEQ ID NO: 119270 - DNA, 20 bp, Artificial Sequence
  MKO10119270_B_Stradb
  gRNA
gtctcactatgaactgcaag

SEQ ID NO: 119271 - DNA, 20 bp, Artificial Sequence
  MKO10119271_B_Stradb
  gRNA
agaacgtctgaaagctttac

SEQ ID NO: 119272 - DNA, 20 bp, Artificial Sequence
  MKO10119272_B_Stradb
  gRNA
gtgccgtgcaagatgaacag

SEQ ID NO: 119273 - DNA, 20 bp, Artificial Sequence
  MKO10119273_B_Strap
  gRNA
atttagcaaagtatgggatg

SEQ ID NO: 119274 - DNA, 20 bp, Artificial Sequence
  MKO10119274_B_Strap
  gRNA
gatagcaattacctgctaac

SEQ ID NO: 119275 - DNA, 20 bp, Artificial Sequence
  MKO10119275_B_Strap
  gRNA
tatcctgtcccccagttagc

SEQ ID NO: 119276 - DNA, 20 bp, Artificial Sequence
  MKO10119276_B_Strbp
  gRNA
tgcacattaagactagctcc

SEQ ID NO: 119277 - DNA, 20 bp, Artificial Sequence
  MKO10119277_B_Strbp
  gRNA
tttcgtgttccgaattataa

SEQ ID NO: 119278 - DNA, 20 bp, Artificial Sequence
  MKO10119278_B_Strbp
  gRNA
gtacttacctgaatctgaat

SEQ ID NO: 119279 - DNA, 20 bp, Artificial Sequence
  MKO10119279_B_Strc
  gRNA
tgactcgcagtagcccctcc

SEQ ID NO: 119280 - DNA, 20 bp, Artificial Sequence
  MKO10119280_B_Strc
  gRNA
cccaaacgctcttctctctc

SEQ ID NO: 119281 - DNA, 20 bp, Artificial Sequence
  MKO10119281_B_Strc
  gRNA
accataaaagcagctgttga

SEQ ID NO: 119282 - DNA, 20 bp, Artificial Sequence
  MKO10119282_B_Strip1
  gRNA
gatgaatcgaaaatgctttg

SEQ ID NO: 119283 - DNA, 20 bp, Artificial Sequence
  MKO10119283_B_Strip1
  gRNA
gccattctctatgttgccca

SEQ ID NO: 119284 - DNA, 20 bp, Artificial Sequence
  MKO10119284_B_Strip1
  gRNA
cacgccatgaggcttctgga

SEQ ID NO: 119285 - DNA, 20 bp, Artificial Sequence
  MKO10119285_B_Strip2
  gRNA
cagtagggagaaacggctta

SEQ ID NO: 119286 - DNA, 20 bp, Artificial Sequence
  MKO10119286_B_Strip2
  gRNA
acctggaatttaccactaac

SEQ ID NO: 119287 - DNA, 20 bp, Artificial Sequence
  MKO10119287_B_Strip2
  gRNA
tacagaattatatagctaca

SEQ ID NO: 119288 - DNA, 20 bp, Artificial Sequence
  MKO10119288_B_Strn3
  gRNA
tggaggagcctccacatctt

SEQ ID NO: 119289 - DNA, 20 bp, Artificial Sequence
  MKO10119289_B_Strn3
  gRNA
aaaatgcccacctttgaatc

SEQ ID NO: 119290 - DNA, 20 bp, Artificial Sequence
  MKO10119290_B_Strn3
  gRNA
aataaagttacctgattcaa

SEQ ID NO: 119291 - DNA, 20 bp, Artificial Sequence
  MKO10119291_B_Strn4
  gRNA
tgcactttatccaacacgag

SEQ ID NO: 119292 - DNA, 20 bp, Artificial Sequence
  MKO10119292_B_Strn4
  gRNA
tccagtgtgaccgactctac

SEQ ID NO: 119293 - DNA, 20 bp, Artificial Sequence
  MKO10119293_B_Strn4
  gRNA
cgaccctccttccacaccaa

SEQ ID NO: 119294 - DNA, 20 bp, Artificial Sequence
  MKO10119294_B_Strn
  gRNA
gctggaatatgctttgaagc

SEQ ID NO: 119295 - DNA, 20 bp, Artificial Sequence
  MKO10119295_B_Strn
  gRNA
gttaaagagacagcaatgat

SEQ ID NO: 119296 - DNA, 20 bp, Artificial Sequence
  MKO10119296_B_Strn
  gRNA
ggctcagattgctttccttc

SEQ ID NO: 119297 - DNA, 20 bp, Artificial Sequence
  MKO10119297_B_Stt3a
  gRNA
acagatcgagaaatataccc

SEQ ID NO: 119298 - DNA, 20 bp, Artificial Sequence
  MKO10119298_B_Stt3a
  gRNA
acagacattccgaatgtcaa

SEQ ID NO: 119299 - DNA, 20 bp, Artificial Sequence
  MKO10119299_B_Stt3a
  gRNA
tatatttctcgatctgtagc

SEQ ID NO: 119300 - DNA, 20 bp, Artificial Sequence
  MKO10119300_B_Stt3b
  gRNA
taggtaaagtctgtgaagac

SEQ ID NO: 119301 - DNA, 20 bp, Artificial Sequence
  MKO10119301_B_Stt3b
  gRNA
ctgcttgtcatatttctaca

SEQ ID NO: 119302 - DNA, 20 bp, Artificial Sequence
  MKO10119302_B_Stt3b
  gRNA
tacccactgggaagaatagt

SEQ ID NO: 119303 - DNA, 20 bp, Artificial Sequence
  MKO10119303_B_Stub1
  gRNA
tgctgactgccggcgagccc

SEQ ID NO: 119304 - DNA, 20 bp, Artificial Sequence
  MKO10119304_B_Stub1
  gRNA
aactctgcaggataaataca

SEQ ID NO: 119305 - DNA, 20 bp, Artificial Sequence
  MKO10119305_B_Stub1
  gRNA
cacgagggtcatgaagatga

SEQ ID NO: 119306 - DNA, 20 bp, Artificial Sequence
  MKO10119306_B_Stx11
  gRNA
tgtactcgtacatggcttgc

SEQ ID NO: 119307 - DNA, 20 bp, Artificial Sequence
  MKO10119307_B_Stx11
  gRNA
agcccgcgcgcccttcaagt

SEQ ID NO: 119308 - DNA, 20 bp, Artificial Sequence
  MKO10119308_B_Stx11
  gRNA
agccagcggctagttgacac

SEQ ID NO: 119309 - DNA, 20 bp, Artificial Sequence
  MKO10119309_B_Stx12
  gRNA
aagaatttgatgagccaact

SEQ ID NO: 119310 - DNA, 20 bp, Artificial Sequence
  MKO10119310_B_Stx12
  gRNA
acccttgtctgcatcagagc

SEQ ID NO: 119311 - DNA, 20 bp, Artificial Sequence
  MKO10119311_B_Stx12
  gRNA
acagcactccacaaatcagc

SEQ ID NO: 119312 - DNA, 20 bp, Artificial Sequence
  MKO10119312_B_Stx16
  gRNA
tgcctgataccagcgccatg

SEQ ID NO: 119313 - DNA, 20 bp, Artificial Sequence
  MKO10119313_B_Stx16
  gRNA
tgccatcgagatcaccaccc

SEQ ID NO: 119314 - DNA, 20 bp, Artificial Sequence
  MKO10119314_B_Stx16
  gRNA
acaaccacaggagctggacg

SEQ ID NO: 119315 - DNA, 20 bp, Artificial Sequence
  MKO10119315_B_Stx17
  gRNA
taccgcttctaaggtttccc

SEQ ID NO: 119316 - DNA, 20 bp, Artificial Sequence
  MKO10119316_B_Stx17
  gRNA
acatacttacactcactagg

SEQ ID NO: 119317 - DNA, 20 bp, Artificial Sequence
  MKO10119317_B_Stx17
  gRNA
cttaattgagctgagccatc

SEQ ID NO: 119318 - DNA, 20 bp, Artificial Sequence
  MKO10119318_B_Stx18
  gRNA
agagcgagaccagatagacc

SEQ ID NO: 119319 - DNA, 20 bp, Artificial Sequence
  MKO10119319_B_Stx18
  gRNA
aggagtatattaatgcctac

SEQ ID NO: 119320 - DNA, 20 bp, Artificial Sequence
  MKO10119320_B_Stx18
  gRNA
gatacattcccagcaagtga

SEQ ID NO: 119321 - DNA, 20 bp, Artificial Sequence
  MKO10119321_B_Stx19
  gRNA
agccagtccaaatttctctt

SEQ ID NO: 119322 - DNA, 20 bp, Artificial Sequence
  MKO10119322_B_Stx19
  gRNA
aagagactctaccattgcaa

SEQ ID NO: 119323 - DNA, 20 bp, Artificial Sequence
  MKO10119323_B_Stx19
  gRNA
tattgttcgtcagcttgaag

SEQ ID NO: 119324 - DNA, 20 bp, Artificial Sequence
  MKO10119324_B_Stx1a
  gRNA
accgctcatcagccgacctg

SEQ ID NO: 119325 - DNA, 20 bp, Artificial Sequence
  MKO10119325_B_Stx1a
  gRNA
gcggaaacacagcgccatcc

SEQ ID NO: 119326 - DNA, 20 bp, Artificial Sequence
  MKO10119326_B_Stx1a
  gRNA
tcctcaggtcggctgatgag

SEQ ID NO: 119327 - DNA, 20 bp, Artificial Sequence
  MKO10119327_B_Stx1b
  gRNA
gcactcactctcatcggggt

SEQ ID NO: 119328 - DNA, 20 bp, Artificial Sequence
  MKO10119328_B_Stx1b
  gRNA
cgtggatcgagaccacttta

SEQ ID NO: 119329 - DNA, 20 bp, Artificial Sequence
  MKO10119329_B_Stx1b
  gRNA
ttctcccccagagactaaac

SEQ ID NO: 119330 - DNA, 20 bp, Artificial Sequence
  MKO10119330_B_Stx2
  gRNA
tctgcggatacgaaggaccc

SEQ ID NO: 119331 - DNA, 20 bp, Artificial Sequence
  MKO10119331_B_Stx2
  gRNA
acttacacttcagcttgccc

SEQ ID NO: 119332 - DNA, 20 bp, Artificial Sequence
  MKO10119332_B_Stx2
  gRNA
agattcgaagcagcatagcc

SEQ ID NO: 119333 - DNA, 20 bp, Artificial Sequence
  MKO10119333_B_Stx3
  gRNA
ttcggtcatctgcagacctt

SEQ ID NO: 119334 - DNA, 20 bp, Artificial Sequence
  MKO10119334_B_Stx3
  gRNA
tctcagttgtgagctgttca

SEQ ID NO: 119335 - DNA, 20 bp, Artificial Sequence
  MKO10119335_B_Stx3
  gRNA
cggccttcagctgctccagc

SEQ ID NO: 119336 - DNA, 20 bp, Artificial Sequence
  MKO10119336_B_Stx4a
  gRNA
gctgtttgatctcctctcgc

SEQ ID NO: 119337 - DNA, 20 bp, Artificial Sequence
  MKO10119337_B_Stx4a
  gRNA
cttcctaggtgcagacaatt

SEQ ID NO: 119338 - DNA, 20 bp, Artificial Sequence
  MKO10119338_B_Stx4a
  gRNA
gtcgcgctggtggtgcactc

SEQ ID NO: 119339 - DNA, 20 bp, Artificial Sequence
  MKO10119339_B_Stx5a
  gRNA
gtgcagtgaatttaccctca

SEQ ID NO: 119340 - DNA, 20 bp, Artificial Sequence
  MKO10119340_B_Stx5a
  gRNA
gctaacatacatcatcaaac

SEQ ID NO: 119341 - DNA, 20 bp, Artificial Sequence
  MKO10119341_B_Stx5a
  gRNA
tctcaactcacctggccatg

SEQ ID NO: 119342 - DNA, 20 bp, Artificial Sequence
  MKO10119342_B_Stx6
  gRNA
agccaactcccacttcatcg

SEQ ID NO: 119343 - DNA, 20 bp, Artificial Sequence
  MKO10119343_B_Stx6
  gRNA
gctggagtggcagatcgcta

SEQ ID NO: 119344 - DNA, 20 bp, Artificial Sequence
  MKO10119344_B_Stx6
  gRNA
aagccttcatcacaagtact

SEQ ID NO: 119345 - DNA, 20 bp, Artificial Sequence
  MKO10119345_B_Stx7
  gRNA
tggaacacctcaagactcac

SEQ ID NO: 119346 - DNA, 20 bp, Artificial Sequence
  MKO10119346_B_Stx7
  gRNA
tgatagccgtggaaatacaa

SEQ ID NO: 119347 - DNA, 20 bp, Artificial Sequence
  MKO10119347_B_Stx7
  gRNA
gataagtacattaaagagtt

SEQ ID NO: 119348 - DNA, 20 bp, Artificial Sequence
  MKO10119348_B_Stx8
  gRNA
gctttgcttcttcgctcatc

SEQ ID NO: 119349 - DNA, 20 bp, Artificial Sequence
  MKO10119349_B_Stx8
  gRNA
caacaacgttctgattgtca

SEQ ID NO: 119350 - DNA, 20 bp, Artificial Sequence
  MKO10119350_B_Stx8
  gRNA
atgagcgaagaagcaaagcg

SEQ ID NO: 119351 - DNA, 20 bp, Artificial Sequence
  MKO10119351_B_Stxbp1
  gRNA
catgcatgatgtgatcaaga

SEQ ID NO: 119352 - DNA, 20 bp, Artificial Sequence
  MKO10119352_B_Stxbp1
  gRNA
aagaacgccatggcccccat

SEQ ID NO: 119353 - DNA, 20 bp, Artificial Sequence
  MKO10119353_B_Stxbp1
  gRNA
gatgtctgtcatcttgcagc

SEQ ID NO: 119354 - DNA, 20 bp, Artificial Sequence
  MKO10119354_B_Stxbp2
  gRNA
ttccctggaagtccgcaatc

SEQ ID NO: 119355 - DNA, 20 bp, Artificial Sequence
  MKO10119355_B_Stxbp2
  gRNA
cactggtgatgccctccgcc

SEQ ID NO: 119356 - DNA, 20 bp, Artificial Sequence
  MKO10119356_B_Stxbp2
  gRNA
gtcggttcaggccctgattg

SEQ ID NO: 119357 - DNA, 20 bp, Artificial Sequence
  MKO10119357_B_Stxbp3a
  gRNA
cagttatgccctcctctaga

SEQ ID NO: 119358 - DNA, 20 bp, Artificial Sequence
  MKO10119358_B_Stxbp3a
  gRNA
agagctttcatttgtctgac

SEQ ID NO: 119359 - DNA, 20 bp, Artificial Sequence
  MKO10119359_B_Stxbp3a
  gRNA
gattgtttcttgagagattt

SEQ ID NO: 119360 - DNA, 20 bp, Artificial Sequence
  MKO10119360_B_Stxbp4
  gRNA
atcgtaggtcagaatctccc

SEQ ID NO: 119361 - DNA, 20 bp, Artificial Sequence
  MKO10119361_B_Stxbp4
  gRNA
cctgcagatacatctaatgc

SEQ ID NO: 119362 - DNA, 20 bp, Artificial Sequence
  MKO10119362_B_Stxbp4
  gRNA
tcgttacctcaacttggctc

SEQ ID NO: 119363 - DNA, 20 bp, Artificial Sequence
  MKO10119363_B_Stxbp5l
  gRNA
cagccgcaccactttcatgt

SEQ ID NO: 119364 - DNA, 20 bp, Artificial Sequence
  MKO10119364_B_Stxbp5l
  gRNA
cagatgacacgcttcatttg

SEQ ID NO: 119365 - DNA, 20 bp, Artificial Sequence
  MKO10119365_B_Stxbp5l
  gRNA
aaaaacttacctcattgatg

SEQ ID NO: 119366 - DNA, 20 bp, Artificial Sequence
  MKO10119366_B_Stxbp5
  gRNA
tgatcccgttcagaagatcc

SEQ ID NO: 119367 - DNA, 20 bp, Artificial Sequence
  MKO10119367_B_Stxbp5
  gRNA
tctgaacgggatcaaaggcc

SEQ ID NO: 119368 - DNA, 20 bp, Artificial Sequence
  MKO10119368_B_Stxbp5
  gRNA
ctctatgtgggcactgagcg

SEQ ID NO: 119369 - DNA, 20 bp, Artificial Sequence
  MKO10119369_B_Stxbp6
  gRNA
gctagcaacccactggtcaa

SEQ ID NO: 119370 - DNA, 20 bp, Artificial Sequence
  MKO10119370_B_Stxbp6
  gRNA
agccaggccttgaacgagcg

SEQ ID NO: 119371 - DNA, 20 bp, Artificial Sequence
  MKO10119371_B_Stxbp6
  gRNA
ccacttacctcccataattt

SEQ ID NO: 119372 - DNA, 20 bp, Artificial Sequence
  MKO10119372_B_Styk1
  gRNA
gctgccactctatatgatgc

SEQ ID NO: 119373 - DNA, 20 bp, Artificial Sequence
  MKO10119373_B_Styk1
  gRNA
gcccctagatgcaggtacag

SEQ ID NO: 119374 - DNA, 20 bp, Artificial Sequence
  MKO10119374_B_Styk1
  gRNA
tggtcattgttgcatgatag

SEQ ID NO: 119375 - DNA, 20 bp, Artificial Sequence
  MKO10119375_B_Styxl1
  gRNA
gccgccgtatgcacagctcc

SEQ ID NO: 119376 - DNA, 20 bp, Artificial Sequence
  MKO10119376_B_Styxl1
  gRNA
cttgtgcatcttagcattgc

SEQ ID NO: 119377 - DNA, 20 bp, Artificial Sequence
  MKO10119377_B_Styxl1
  gRNA
tacccagttgagatacttcc

SEQ ID NO: 119378 - DNA, 20 bp, Artificial Sequence
  MKO10119378_B_Styx
  gRNA
ccctatgagacgagagatgc

SEQ ID NO: 119379 - DNA, 20 bp, Artificial Sequence
  MKO10119379_B_Styx
  gRNA
ctaaataattgttgaaagtt

SEQ ID NO: 119380 - DNA, 20 bp, Artificial Sequence
  MKO10119380_B_Styx
  gRNA
ctacctatacttcagaaaca

SEQ ID NO: 119381 - DNA, 20 bp, Artificial Sequence
  MKO10119381_B_Sub1
  gRNA
tttcagaatgcctaaatcaa

SEQ ID NO: 119382 - DNA, 20 bp, Artificial Sequence
  MKO10119382_B_Sub1
  gRNA
tttaggtatttctttaaaca

SEQ ID NO: 119383 - DNA, 20 bp, Artificial Sequence
  MKO10119383_B_Sub1
  gRNA
tcagaaggtgaaatgaaacc

SEQ ID NO: 119384 - DNA, 20 bp, Artificial Sequence
  MKO10119384_B_Sucla2
  gRNA
ttgtagggtcctgtactgat

SEQ ID NO: 119385 - DNA, 20 bp, Artificial Sequence
  MKO10119385_B_Sucla2
  gRNA
tgcaaagtagtattctctcc

SEQ ID NO: 119386 - DNA, 20 bp, Artificial Sequence
  MKO10119386_B_Sucla2
  gRNA
acatttacaagtggcctcaa

SEQ ID NO: 119387 - DNA, 20 bp, Artificial Sequence
  MKO10119387_B_Suclg1
  gRNA
aatatagatatgtttccgag

SEQ ID NO: 119388 - DNA, 20 bp, Artificial Sequence
  MKO10119388_B_Suclg1
  gRNA
agtggttcctcccacgagtt

SEQ ID NO: 119389 - DNA, 20 bp, Artificial Sequence
  MKO10119389_B_Suclg1
  gRNA
aaatacgaagattatttgcc

SEQ ID NO: 119390 - DNA, 20 bp, Artificial Sequence
  MKO10119390_B_Suclg2
  gRNA
cataccttaaagatgagttc

SEQ ID NO: 119391 - DNA, 20 bp, Artificial Sequence
  MKO10119391_B_Suclg2
  gRNA
acgaaacaaactccaaaaga

SEQ ID NO: 119392 - DNA, 20 bp, Artificial Sequence
  MKO10119392_B_Suclg2
  gRNA
gtcacttaaccccccgaaga

SEQ ID NO: 119393 - DNA, 20 bp, Artificial Sequence
  MKO10119393_B_Sucnr1
  gRNA
ggtacttcatgagcagatat

SEQ ID NO: 119394 - DNA, 20 bp, Artificial Sequence
  MKO10119394_B_Sucnr1
  gRNA
tgcatcgactatgcaagttc

SEQ ID NO: 119395 - DNA, 20 bp, Artificial Sequence
  MKO10119395_B_Sucnr1
  gRNA
cattggcataactctttatc

SEQ ID NO: 119396 - DNA, 20 bp, Artificial Sequence
  MKO10119396_B_Suco
  gRNA
ttcactgcctacaactacac

SEQ ID NO: 119397 - DNA, 20 bp, Artificial Sequence
  MKO10119397_B_Suco
  gRNA
cctagtaatgctgagctatc

SEQ ID NO: 119398 - DNA, 20 bp, Artificial Sequence
  MKO10119398_B_Suco
  gRNA
caagatgataattgtgcaat

SEQ ID NO: 119399 - DNA, 20 bp, Artificial Sequence
  MKO10119399_B_Suds3
  gRNA
cttcctcatcgtgcttcgcc

SEQ ID NO: 119400 - DNA, 20 bp, Artificial Sequence
  MKO10119400_B_Suds3
  gRNA
ggatgccagcgagactgacc

SEQ ID NO: 119401 - DNA, 20 bp, Artificial Sequence
  MKO10119401_B_Suds3
  gRNA
tgccccgtcaggtacgctcc

SEQ ID NO: 119402 - DNA, 20 bp, Artificial Sequence
  MKO10119402_B_Sufu
  gRNA
gcccgatatgtcttccagtc

SEQ ID NO: 119403 - DNA, 20 bp, Artificial Sequence
  MKO10119403_B_Sufu
  gRNA
cttgactcactgttatccaa

SEQ ID NO: 119404 - DNA, 20 bp, Artificial Sequence
  MKO10119404_B_Sufu
  gRNA
tacctgactggaagacatat

SEQ ID NO: 119405 - DNA, 20 bp, Artificial Sequence
  MKO10119405_B_Sugp1
  gRNA
gccatcattggcaaacttgt

SEQ ID NO: 119406 - DNA, 20 bp, Artificial Sequence
  MKO10119406_B_Sugp1
  gRNA
cttgtgctcagcaagcgaac

SEQ ID NO: 119407 - DNA, 20 bp, Artificial Sequence
  MKO10119407_B_Sugp1
  gRNA
ggcctccttctgccacaaaa

SEQ ID NO: 119408 - DNA, 20 bp, Artificial Sequence
  MKO10119408_B_Sugp2
  gRNA
tatgtttagagatcggcctc

SEQ ID NO: 119409 - DNA, 20 bp, Artificial Sequence
  MKO10119409_B_Sugp2
  gRNA
ccaccctgtgatccgcccgc

SEQ ID NO: 119410 - DNA, 20 bp, Artificial Sequence
  MKO10119410_B_Sugp2
  gRNA
aaggcacgtaccacaggtca

SEQ ID NO: 119411 - DNA, 20 bp, Artificial Sequence
  MKO10119411_B_Sugt1
  gRNA
ataattgtactgctcttctg

SEQ ID NO: 119412 - DNA, 20 bp, Artificial Sequence
  MKO10119412_B_Sugt1
  gRNA
agaagagcagtacaattatt

SEQ ID NO: 119413 - DNA, 20 bp, Artificial Sequence
  MKO10119413_B_Sugt1
  gRNA
gtgtttgtaggagctgacca

SEQ ID NO: 119414 - DNA, 20 bp, Artificial Sequence
  MKO10119414_B_Sulf1
  gRNA
aattacactgtttgtcgcaa

SEQ ID NO: 119415 - DNA, 20 bp, Artificial Sequence
  MKO10119415_B_Sulf1
  gRNA
ctcgtgcattgcctgccacg

SEQ ID NO: 119416 - DNA, 20 bp, Artificial Sequence
  MKO10119416_B_Sulf1
  gRNA
tcgtcttgttcatgacttgc

SEQ ID NO: 119417 - DNA, 20 bp, Artificial Sequence
  MKO10119417_B_Sulf2
  gRNA
atgagccgttgtactcattg

SEQ ID NO: 119418 - DNA, 20 bp, Artificial Sequence
  MKO10119418_B_Sulf2
  gRNA
cccgccccaggattacctca

SEQ ID NO: 119419 - DNA, 20 bp, Artificial Sequence
  MKO10119419_B_Sulf2
  gRNA
ttacatgtgctgggacgcat

SEQ ID NO: 119420 - DNA, 20 bp, Artificial Sequence
  MKO10119420_B_Sult1a1
  gRNA
agatgtgtcttaatgatccg

SEQ ID NO: 119421 - DNA, 20 bp, Artificial Sequence
  MKO10119421_B_Sult1a1
  gRNA
cacatacctggggggacccc

SEQ ID NO: 119422 - DNA, 20 bp, Artificial Sequence
  MKO10119422_B_Sult1a1
  gRNA
cttactccctcagagtctgc

SEQ ID NO: 119423 - DNA, 20 bp, Artificial Sequence
  MKO10119423_B_Sult1b1
  gRNA
gttcctggaataagaatatc

SEQ ID NO: 119424 - DNA, 20 bp, Artificial Sequence
  MKO10119424_B_Sult1b1
  gRNA
atgatcaaaccatgaaccat

SEQ ID NO: 119425 - DNA, 20 bp, Artificial Sequence
  MKO10119425_B_Sult1b1
  gRNA
ttgatcatgttaagagttgg

SEQ ID NO: 119426 - DNA, 20 bp, Artificial Sequence
  MKO10119426_B_Sult1c1
  gRNA
atgtattctcccagggtacc

SEQ ID NO: 119427 - DNA, 20 bp, Artificial Sequence
  MKO10119427_B_Sult1c1
  gRNA
atgaccatgtaaagggatgg

SEQ ID NO: 119428 - DNA, 20 bp, Artificial Sequence
  MKO10119428_B_Sult1c1
  gRNA
acaaatttagattatctatg

SEQ ID NO: 119429 - DNA, 20 bp, Artificial Sequence
  MKO10119429_B_Sult1c2
  gRNA
ttacagtaagttggggatcc

SEQ ID NO: 119430 - DNA, 20 bp, Artificial Sequence
  MKO10119430_B_Sult1c2
  gRNA
gcacggccaccccaaccatc

SEQ ID NO: 119431 - DNA, 20 bp, Artificial Sequence
  MKO10119431_B_Sult1c2
  gRNA
gtccttaatatccttggagc

SEQ ID NO: 119432 - DNA, 20 bp, Artificial Sequence
  MKO10119432_B_Sult1d1
  gRNA
tttcctcttaggaacaactt

SEQ ID NO: 119433 - DNA, 20 bp, Artificial Sequence
  MKO10119433_B_Sult1d1
  gRNA
gtccagccatgaatttctct

SEQ ID NO: 119434 - DNA, 20 bp, Artificial Sequence
  MKO10119434_B_Sult1d1
  gRNA
ctttcatatcttcataaaac

SEQ ID NO: 119435 - DNA, 20 bp, Artificial Sequence
  MKO10119435_B_Sult1e1
  gRNA
agctttcacatgatcatacc

SEQ ID NO: 119436 - DNA, 20 bp, Artificial Sequence
  MKO10119436_B_Sult1e1
  gRNA
agaaacgaagacctaataaa

SEQ ID NO: 119437 - DNA, 20 bp, Artificial Sequence
  MKO10119437_B_Sult1e1
  gRNA
agctccttccagcatcattt

SEQ ID NO: 119438 - DNA, 20 bp, Artificial Sequence
  MKO10119438_B_Sult2a1
  gRNA
ggttccaaatgggcacagtt

SEQ ID NO: 119439 - DNA, 20 bp, Artificial Sequence
  MKO10119439_B_Sult2a1
  gRNA
atattctgcattaatcaata

SEQ ID NO: 119440 - DNA, 20 bp, Artificial Sequence
  MKO10119440_B_Sult2a1
  gRNA
tttactcaccatttcctttg

SEQ ID NO: 119441 - DNA, 20 bp, Artificial Sequence
  MKO10119441_B_Sult2a2
  gRNA
ccgagagatattcttgtgtc

SEQ ID NO: 119442 - DNA, 20 bp, Artificial Sequence
  MKO10119442_B_Sult2a2
  gRNA
aatttctctttgatatgata

SEQ ID NO: 119443 - DNA, 20 bp, Artificial Sequence
  MKO10119443_B_Sult2a2
  gRNA
tcatgatgtcagactataat

SEQ ID NO: 119444 - DNA, 20 bp, Artificial Sequence
  MKO10119444_B_Sult2a3
  gRNA
atatcttgcattaattaata

SEQ ID NO: 119445 - DNA, 20 bp, Artificial Sequence
  MKO10119445_B_Sult2a3
  gRNA
gaagttatcccattctctca

SEQ ID NO: 119446 - DNA, 20 bp, Artificial Sequence
  MKO10119446_B_Sult2a3
  gRNA
gatactcaccatttcctttg

SEQ ID NO: 119447 - DNA, 20 bp, Artificial Sequence
  MKO10119447_B_Sult2a4
  gRNA
agcgaagatataattactaa

SEQ ID NO: 119448 - DNA, 20 bp, Artificial Sequence
  MKO10119448_B_Sult2a4
  gRNA
accagaaagaagaatatctc

SEQ ID NO: 119449 - DNA, 20 bp, Artificial Sequence
  MKO10119449_B_Sult2a4
  gRNA
gatggctgtccatgagagaa

SEQ ID NO: 119450 - DNA, 20 bp, Artificial Sequence
  MKO10119450_B_Sult2a5
  gRNA
atactatgaagacttgaaaa

SEQ ID NO: 119451 - DNA, 20 bp, Artificial Sequence
  MKO10119451_B_Sult2a5
  gRNA
ccctctttattgattaatgc

SEQ ID NO: 119452 - DNA, 20 bp, Artificial Sequence
  MKO10119452_B_Sult2a5
  gRNA
ttccgtaatgagactaaaat

SEQ ID NO: 119453 - DNA, 20 bp, Artificial Sequence
  MKO10119453_B_Sult2a6
  gRNA
gtgaagaatctagagtcact

SEQ ID NO: 119454 - DNA, 20 bp, Artificial Sequence
  MKO10119454_B_Sult2a6
  gRNA
ttccttaatgagactataat

SEQ ID NO: 119455 - DNA, 20 bp, Artificial Sequence
  MKO10119455_B_Sult2a6
  gRNA
gtccaattatagtctcatta

SEQ ID NO: 119456 - DNA, 20 bp, Artificial Sequence
  MKO10119456_B_Sult2a7
  gRNA
caccatcatcatgataaaca

SEQ ID NO: 119457 - DNA, 20 bp, Artificial Sequence
  MKO10119457_B_Sult2a7
  gRNA
acaacaaataatggatggat

SEQ ID NO: 119458 - DNA, 20 bp, Artificial Sequence
  MKO10119458_B_Sult2a7
  gRNA
aaataagtttccagtgaccc

SEQ ID NO: 119459 - DNA, 20 bp, Artificial Sequence
  MKO10119459_B_Sult2b1
  gRNA
tccggtgagtacatgccgac

SEQ ID NO: 119460 - DNA, 20 bp, Artificial Sequence
  MKO10119460_B_Sult2b1
  gRNA
ccacgacatcgcgggggttc

SEQ ID NO: 119461 - DNA, 20 bp, Artificial Sequence
  MKO10119461_B_Sult2b1
  gRNA
ctgagaacactagcaacgtg

SEQ ID NO: 119462 - DNA, 20 bp, Artificial Sequence
  MKO10119462_B_Sult3a1
  gRNA
atgtgttcatagtttgctct

SEQ ID NO: 119463 - DNA, 20 bp, Artificial Sequence
  MKO10119463_B_Sult3a1
  gRNA
ataaaactttctacagtgtc

SEQ ID NO: 119464 - DNA, 20 bp, Artificial Sequence
  MKO10119464_B_Sult3a1
  gRNA
tcccagtggtaggaagcctt

SEQ ID NO: 119465 - DNA, 20 bp, Artificial Sequence
  MKO10119465_B_Sult4a1
  gRNA
ccacagtgggctacggctcc

SEQ ID NO: 119466 - DNA, 20 bp, Artificial Sequence
  MKO10119466_B_Sult4a1
  gRNA
agctcatggtccgcagcgag

SEQ ID NO: 119467 - DNA, 20 bp, Artificial Sequence
  MKO10119467_B_Sult4a1
  gRNA
tcagagggcaggaagcggta

SEQ ID NO: 119468 - DNA, 20 bp, Artificial Sequence
  MKO10119468_B_Sult5a1
  gRNA
tcgatagcctccattccaag

SEQ ID NO: 119469 - DNA, 20 bp, Artificial Sequence
  MKO10119469_B_Sult5a1
  gRNA
ttccacttccaccgaatagc

SEQ ID NO: 119470 - DNA, 20 bp, Artificial Sequence
  MKO10119470_B_Sult5a1
  gRNA
tgaagaacttgccctcgctc

SEQ ID NO: 119471 - DNA, 20 bp, Artificial Sequence
  MKO10119471_B_Sult6b1
  gRNA
tgaaactcttcccatcacca

SEQ ID NO: 119472 - DNA, 20 bp, Artificial Sequence
  MKO10119472_B_Sult6b1
  gRNA
gaatttccagttcttgaatg

SEQ ID NO: 119473 - DNA, 20 bp, Artificial Sequence
  MKO10119473_B_Sult6b1
  gRNA
ggtaccaacctgatatttct

SEQ ID NO: 119474 - DNA, 20 bp, Artificial Sequence
  MKO10119474_B_Sumf1
  gRNA
gagaagtttgtgaactcgac

SEQ ID NO: 119475 - DNA, 20 bp, Artificial Sequence
  MKO10119475_B_Sumf1
  gRNA
ctccaattagctcccttgac

SEQ ID NO: 119476 - DNA, 20 bp, Artificial Sequence
  MKO10119476_B_Sumf1
  gRNA
atccgcattgctgacttcat

SEQ ID NO: 119477 - DNA, 20 bp, Artificial Sequence
  MKO10119477_B_Sumf2
  gRNA
gttccagctcacgtgtacca

SEQ ID NO: 119478 - DNA, 20 bp, Artificial Sequence
  MKO10119478_B_Sumf2
  gRNA
gaagctccacccgaatgcct

SEQ ID NO: 119479 - DNA, 20 bp, Artificial Sequence
  MKO10119479_B_Sumf2
  gRNA
atggggacagacgctccaga

SEQ ID NO: 119480 - DNA, 20 bp, Artificial Sequence
  MKO10119480_B_Sumo1
  gRNA
agaatcatactgtcaaagac

SEQ ID NO: 119481 - DNA, 20 bp, Artificial Sequence
  MKO10119481_B_Sumo1
  gRNA
gagttccaatgaattcactc

SEQ ID NO: 119482 - DNA, 20 bp, Artificial Sequence
  MKO10119482_B_Sumo1
  gRNA
agaaacctgagtgaattcat

SEQ ID NO: 119483 - DNA, 20 bp, Artificial Sequence
  MKO10119483_B_Sumo2
  gRNA
cgaaacagacacacctgcac

SEQ ID NO: 119484 - DNA, 20 bp, Artificial Sequence
  MKO10119484_B_Sumo2
  gRNA
tctgtgctagttggaaatgg

SEQ ID NO: 119485 - DNA, 20 bp, Artificial Sequence
  MKO10119485_B_Sumo2
  gRNA
catggccgacgagaaaccca

SEQ ID NO: 119486 - DNA, 20 bp, Artificial Sequence
  MKO10119486_B_Sumo3
  gRNA
acacacctgcctctcacagt

SEQ ID NO: 119487 - DNA, 20 bp, Artificial Sequence
  MKO10119487_B_Sumo3
  gRNA
tgaaacagacactccagccc

SEQ ID NO: 119488 - DNA, 20 bp, Artificial Sequence
  MKO10119488_B_Sumo3
  gRNA
tgaccacatcaacctgaaag

SEQ ID NO: 119489 - DNA, 20 bp, Artificial Sequence
  MKO10119489_B_Sun1
  gRNA
taatgtgcgaatcaatagcc

SEQ ID NO: 119490 - DNA, 20 bp, Artificial Sequence
  MKO10119490_B_Sun1
  gRNA
gtttcaggtctcgatgatga

SEQ ID NO: 119491 - DNA, 20 bp, Artificial Sequence
  MKO10119491_B_Sun1
  gRNA
gattcgtgagcagaccaaag

SEQ ID NO: 119492 - DNA, 20 bp, Artificial Sequence
  MKO10119492_B_Sun2
  gRNA
aaccacagactcgctgtagt

SEQ ID NO: 119493 - DNA, 20 bp, Artificial Sequence
  MKO10119493_B_Sun2
  gRNA
agatccgaaaaagtcttctg

SEQ ID NO: 119494 - DNA, 20 bp, Artificial Sequence
  MKO10119494_B_Sun2
  gRNA
catcctgagagtagcgagtg

SEQ ID NO: 119495 - DNA, 20 bp, Artificial Sequence
  MKO10119495_B_Sun3
  gRNA
cactactgacgttctagatg

SEQ ID NO: 119496 - DNA, 20 bp, Artificial Sequence
  MKO10119496_B_Sun3
  gRNA
cctcaactatgagatgcctc

SEQ ID NO: 119497 - DNA, 20 bp, Artificial Sequence
  MKO10119497_B_Sun3
  gRNA
cataatcagccaactgtatt

SEQ ID NO: 119498 - DNA, 20 bp, Artificial Sequence
  MKO10119498_B_Sun5
  gRNA
gttgttctgccagaaagtca

SEQ ID NO: 119499 - DNA, 20 bp, Artificial Sequence
  MKO10119499_B_Sun5
  gRNA
ccttgctcactcatgtttgc

SEQ ID NO: 119500 - DNA, 20 bp, Artificial Sequence
  MKO10119500_B_Sun5
  gRNA
aagaagctatatcagcagaa

SEQ ID NO: 119501 - DNA, 20 bp, Artificial Sequence
  MKO10119501_B_Suox
  gRNA
gcaccacacccaggcctaac

SEQ ID NO: 119502 - DNA, 20 bp, Artificial Sequence
  MKO10119502_B_Suox
  gRNA
gctgcagctatacagatccg

SEQ ID NO: 119503 - DNA, 20 bp, Artificial Sequence
  MKO10119503_B_Suox
  gRNA
aaaacctacctgatggcctg

SEQ ID NO: 119504 - DNA, 20 bp, Artificial Sequence
  MKO10119504_B_Supt16
  gRNA
ggtagacatcagcgctgttg

SEQ ID NO: 119505 - DNA, 20 bp, Artificial Sequence
  MKO10119505_B_Supt16
  gRNA
attctcattgcctttagtat

SEQ ID NO: 119506 - DNA, 20 bp, Artificial Sequence
  MKO10119506_B_Supt16
  gRNA
ctggagtgattgtctcaaca

SEQ ID NO: 119507 - DNA, 20 bp, Artificial Sequence
  MKO10119507_B_Supt20
  gRNA
agaatgtgaaaaagaacccg

SEQ ID NO: 119508 - DNA, 20 bp, Artificial Sequence
  MKO10119508_B_Supt20
  gRNA
acaagctgtagaacaagctt

SEQ ID NO: 119509 - DNA, 20 bp, Artificial Sequence
  MKO10119509_B_Supt20
  gRNA
ctcagcagagacctcctaaa

SEQ ID NO: 119510 - DNA, 20 bp, Artificial Sequence
  MKO10119510_B_Supt3
  gRNA
tacaagtcaaagatcatcaa

SEQ ID NO: 119511 - DNA, 20 bp, Artificial Sequence
  MKO10119511_B_Supt3
  gRNA
cattgacgaggatgacctcc

SEQ ID NO: 119512 - DNA, 20 bp, Artificial Sequence
  MKO10119512_B_Supt3
  gRNA
gttcttgatgagaaaagata

SEQ ID NO: 119513 - DNA, 20 bp, Artificial Sequence
  MKO10119513_B_Supt4a
  gRNA
atagaccagttcgaatatga

SEQ ID NO: 119514 - DNA, 20 bp, Artificial Sequence
  MKO10119514_B_Supt4a
  gRNA
cattgcgatgatgagtccag

SEQ ID NO: 119515 - DNA, 20 bp, Artificial Sequence
  MKO10119515_B_Supt4a
  gRNA
cttactgactcgctgccact

SEQ ID NO: 119516 - DNA, 20 bp, Artificial Sequence
  MKO10119516_B_Supt5
  gRNA
ccccccaagaaaccacgcca

SEQ ID NO: 119517 - DNA, 20 bp, Artificial Sequence
  MKO10119517_B_Supt5
  gRNA
ctccgagtagaagagattga

SEQ ID NO: 119518 - DNA, 20 bp, Artificial Sequence
  MKO10119518_B_Supt5
  gRNA
agatggagctgaagatatcc

SEQ ID NO: 119519 - DNA, 20 bp, Artificial Sequence
  MKO10119519_B_Supt6
  gRNA
ctagatgatcaagatgagcg

SEQ ID NO: 119520 - DNA, 20 bp, Artificial Sequence
  MKO10119520_B_Supt6
  gRNA
agacattgacgatttcattg

SEQ ID NO: 119521 - DNA, 20 bp, Artificial Sequence
  MKO10119521_B_Supt6
  gRNA
ttgggtgttaaagtcaaacg

SEQ ID NO: 119522 - DNA, 20 bp, Artificial Sequence
  MKO10119522_B_Supt7l
  gRNA
gcgctttgctgtcgaccgag

SEQ ID NO: 119523 - DNA, 20 bp, Artificial Sequence
  MKO10119523_B_Supt7l
  gRNA
tgagcgcttcccatccaacc

SEQ ID NO: 119524 - DNA, 20 bp, Artificial Sequence
  MKO10119524_B_Supt7l
  gRNA
ctgcagcgctgattgaacac

SEQ ID NO: 119525 - DNA, 20 bp, Artificial Sequence
  MKO10119525_B_Supv3l1
  gRNA
tacgtaaaatcagtgacttg

SEQ ID NO: 119526 - DNA, 20 bp, Artificial Sequence
  MKO10119526_B_Supv3l1
  gRNA
cactgaagcagatatcattc

SEQ ID NO: 119527 - DNA, 20 bp, Artificial Sequence
  MKO10119527_B_Supv3l1
  gRNA
tcatccttgcattccaatac

SEQ ID NO: 119528 - DNA, 20 bp, Artificial Sequence
  MKO10119528_B_Surf1
  gRNA
aacagccgccgctaaagcag

SEQ ID NO: 119529 - DNA, 20 bp, Artificial Sequence
  MKO10119529_B_Surf1
  gRNA
atgggccccactttcagttg

SEQ ID NO: 119530 - DNA, 20 bp, Artificial Sequence
  MKO10119530_B_Surf1
  gRNA
aggcccagttctgcgctgtc

SEQ ID NO: 119531 - DNA, 20 bp, Artificial Sequence
  MKO10119531_B_Surf2
  gRNA
acgaacagtgatgaactccc

SEQ ID NO: 119532 - DNA, 20 bp, Artificial Sequence
  MKO10119532_B_Surf2
  gRNA
ggacttattgatgtgcctca

SEQ ID NO: 119533 - DNA, 20 bp, Artificial Sequence
  MKO10119533_B_Surf2
  gRNA
gtgtgcctcagcacgtgttc

SEQ ID NO: 119534 - DNA, 20 bp, Artificial Sequence
  MKO10119534_B_Surf4
  gRNA
gtgactatatcgacaccacc

SEQ ID NO: 119535 - DNA, 20 bp, Artificial Sequence
  MKO10119535_B_Surf4
  gRNA
gggagctctcacgcatggtt

SEQ ID NO: 119536 - DNA, 20 bp, Artificial Sequence
  MKO10119536_B_Surf4
  gRNA
caagtcccacaaaatgctat

SEQ ID NO: 119537 - DNA, 20 bp, Artificial Sequence
  MKO10119537_B_Surf6
  gRNA
ttacccacagggtagcacca

SEQ ID NO: 119538 - DNA, 20 bp, Artificial Sequence
  MKO10119538_B_Surf6
  gRNA
agctccctggggtcccctaa

SEQ ID NO: 119539 - DNA, 20 bp, Artificial Sequence
  MKO10119539_B_Surf6
  gRNA
ggagcgccaagcaaagcagc

SEQ ID NO: 119540 - DNA, 20 bp, Artificial Sequence
  MKO10119540_B_Susd1
  gRNA
tgcacagaaagtgccgtcat

SEQ ID NO: 119541 - DNA, 20 bp, Artificial Sequence
  MKO10119541_B_Susd1
  gRNA
acacctacctgtgcacgatg

SEQ ID NO: 119542 - DNA, 20 bp, Artificial Sequence
  MKO10119542_B_Susd1
  gRNA
tgtggcatgttcatggcacg

SEQ ID NO: 119543 - DNA, 20 bp, Artificial Sequence
  MKO10119543_B_Susd2
  gRNA
aagtgccgtagtattgccaa

SEQ ID NO: 119544 - DNA, 20 bp, Artificial Sequence
  MKO10119544_B_Susd2
  gRNA
ccgcatcacctcagtaccag

SEQ ID NO: 119545 - DNA, 20 bp, Artificial Sequence
  MKO10119545_B_Susd2
  gRNA
atgctgctctcaacaatacc

SEQ ID NO: 119546 - DNA, 20 bp, Artificial Sequence
  MKO10119546_B_Susd3
  gRNA
gtgccaccgcatgagacctt

SEQ ID NO: 119547 - DNA, 20 bp, Artificial Sequence
  MKO10119547_B_Susd3
  gRNA
cactgccaccttaaagccga

SEQ ID NO: 119548 - DNA, 20 bp, Artificial Sequence
  MKO10119548_B_Susd3
  gRNA
taacctacgtggtgaagctg

SEQ ID NO: 119549 - DNA, 20 bp, Artificial Sequence
  MKO10119549_B_Susd4
  gRNA
agtgcttacacaaccttatc

SEQ ID NO: 119550 - DNA, 20 bp, Artificial Sequence
  MKO10119550_B_Susd4
  gRNA
ctgggtcagcacacacgttg

SEQ ID NO: 119551 - DNA, 20 bp, Artificial Sequence
  MKO10119551_B_Susd4
  gRNA
ggtgatgtacttgtagtcac

SEQ ID NO: 119552 - DNA, 20 bp, Artificial Sequence
  MKO10119552_B_Susd5
  gRNA
tggctggcggatggcaccct

SEQ ID NO: 119553 - DNA, 20 bp, Artificial Sequence
  MKO10119553_B_Susd5
  gRNA
tctccaagccagtgcgaccc

SEQ ID NO: 119554 - DNA, 20 bp, Artificial Sequence
  MKO10119554_B_Susd5
  gRNA
gtgacacttacctttcccgc

SEQ ID NO: 119555 - DNA, 20 bp, Artificial Sequence
  MKO10119555_B_Suv39h1
  gRNA
tgcatcttccgcactaatga

SEQ ID NO: 119556 - DNA, 20 bp, Artificial Sequence
  MKO10119556_B_Suv39h1
  gRNA
gagctcctcgcccgcccaga

SEQ ID NO: 119557 - DNA, 20 bp, Artificial Sequence
  MKO10119557_B_Suv39h1
  gRNA
tctttgccacaagaaccatc

SEQ ID NO: 119558 - DNA, 20 bp, Artificial Sequence
  MKO10119558_B_Suv39h2
  gRNA
tcatcgataaccttgatact

SEQ ID NO: 119559 - DNA, 20 bp, Artificial Sequence
  MKO10119559_B_Suv39h2
  gRNA
actcatcagactcgtagtcc

SEQ ID NO: 119560 - DNA, 20 bp, Artificial Sequence
  MKO10119560_B_Suv39h2
  gRNA
tctacaagaaccataaacgc

SEQ ID NO: 119561 - DNA, 20 bp, Artificial Sequence
  MKO10119561_B_Suv420h1
  gRNA
ttcagatttcggcctataaa

SEQ ID NO: 119562 - DNA, 20 bp, Artificial Sequence
  MKO10119562_B_Suv420h1
  gRNA
tctgctggaccgcctctcaa

SEQ ID NO: 119563 - DNA, 20 bp, Artificial Sequence
  MKO10119563_B_Suv420h1
  gRNA
agatagttgcaacaaaagag

SEQ ID NO: 119564 - DNA, 20 bp, Artificial Sequence
  MKO10119564_B_Suv420h2
  gRNA
tcatgtactccacccgaaaa

SEQ ID NO: 119565 - DNA, 20 bp, Artificial Sequence
  MKO10119565_B_Suv420h2
  gRNA
agcacgggtagacacaatct

SEQ ID NO: 119566 - DNA, 20 bp, Artificial Sequence
  MKO10119566_B_Suv420h2
  gRNA
gatgctgaagtcgttctcac

SEQ ID NO: 119567 - DNA, 20 bp, Artificial Sequence
  MKO10119567_B_Suz12
  gRNA
attccagaacaagcatcaaa

SEQ ID NO: 119568 - DNA, 20 bp, Artificial Sequence
  MKO10119568_B_Suz12
  gRNA
agagttctgtgcaaaaatat

SEQ ID NO: 119569 - DNA, 20 bp, Artificial Sequence
  MKO10119569_B_Suz12
  gRNA
agaaatctatatatctgtgt

SEQ ID NO: 119570 - DNA, 20 bp, Artificial Sequence
  MKO10119570_B_Sv2a
  gRNA
cgacaccaacatgcgagcca

SEQ ID NO: 119571 - DNA, 20 bp, Artificial Sequence
  MKO10119571_B_Sv2a
  gRNA
ggaggcctggctgatcggct

SEQ ID NO: 119572 - DNA, 20 bp, Artificial Sequence
  MKO10119572_B_Sv2a
  gRNA
ctgcgtagtcagagccccga

SEQ ID NO: 119573 - DNA, 20 bp, Artificial Sequence
  MKO10119573_B_Sv2b
  gRNA
ttcttatcacgagagaaacg

SEQ ID NO: 119574 - DNA, 20 bp, Artificial Sequence
  MKO10119574_B_Sv2b
  gRNA
ctaattaccacttccacagc

SEQ ID NO: 119575 - DNA, 20 bp, Artificial Sequence
  MKO10119575_B_Sv2b
  gRNA
tggagcatcattccacacta

SEQ ID NO: 119576 - DNA, 20 bp, Artificial Sequence
  MKO10119576_B_Sv2c
  gRNA
gctcccgtgcgtctcctctg

SEQ ID NO: 119577 - DNA, 20 bp, Artificial Sequence
  MKO10119577_B_Sv2c
  gRNA
tgatggtgggggcgttcttc

SEQ ID NO: 119578 - DNA, 20 bp, Artificial Sequence
  MKO10119578_B_Sv2c
  gRNA
ctcaccgtgaagaccttctc

SEQ ID NO: 119579 - DNA, 20 bp, Artificial Sequence
  MKO10119579_B_Sval1
  gRNA
ttaggtgaaaatcagtattg

SEQ ID NO: 119580 - DNA, 20 bp, Artificial Sequence
  MKO10119580_B_Sval1
  gRNA
actcacagttacaaataacg

SEQ ID NO: 119581 - DNA, 20 bp, Artificial Sequence
  MKO10119581_B_Sval1
  gRNA
gtctcaacataagaagttac

SEQ ID NO: 119582 - DNA, 20 bp, Artificial Sequence
  MKO10119582_B_Sval2
  gRNA
atagacaatactgccttaca

SEQ ID NO: 119583 - DNA, 20 bp, Artificial Sequence
  MKO10119583_B_Sval2
  gRNA
aagagatgcataagagctcc

SEQ ID NO: 119584 - DNA, 20 bp, Artificial Sequence
  MKO10119584_B_Sval2
  gRNA
agtatttgtttgcactgcaa

SEQ ID NO: 119585 - DNA, 20 bp, Artificial Sequence
  MKO10119585_B_Sval3
  gRNA
ttacctattgtcttgaccat

SEQ ID NO: 119586 - DNA, 20 bp, Artificial Sequence
  MKO10119586_B_Sval3
  gRNA
gtagaaaggtacttgatatt

SEQ ID NO: 119587 - DNA, 20 bp, Artificial Sequence
  MKO10119587_B_Sval3
  gRNA
gaatgctgtcctacaaatga

SEQ ID NO: 119588 - DNA, 20 bp, Artificial Sequence
  MKO10119588_B_Sva
  gRNA
actagcattactaacaaaaa

SEQ ID NO: 119589 - DNA, 20 bp, Artificial Sequence
  MKO10119589_B_Sva
  gRNA
aaacaacgtgaagcaatgcc

SEQ ID NO: 119590 - DNA, 20 bp, Artificial Sequence
  MKO10119590_B_Sva
  gRNA
cttcaaaagttctatcaacc

SEQ ID NO: 119591 - DNA, 20 bp, Artificial Sequence
  MKO10119591_B_Svep1
  gRNA
tccggcttatatgtccctga

SEQ ID NO: 119592 - DNA, 20 bp, Artificial Sequence
  MKO10119592_B_Svep1
  gRNA
aaccacttcaatgccgcctg

SEQ ID NO: 119593 - DNA, 20 bp, Artificial Sequence
  MKO10119593_B_Svep1
  gRNA
tgaagactgcgtgtgccgag

SEQ ID NO: 119594 - DNA, 20 bp, Artificial Sequence
  MKO10119594_B_Svil
  gRNA
ccagctccgaaacatattta

SEQ ID NO: 119595 - DNA, 20 bp, Artificial Sequence
  MKO10119595_B_Svil
  gRNA
gtctgtggcacgcatgtatc

SEQ ID NO: 119596 - DNA, 20 bp, Artificial Sequence
  MKO10119596_B_Svil
  gRNA
gccagaaccttgcgcttctt

SEQ ID NO: 119597 - DNA, 20 bp, Artificial Sequence
  MKO10119597_B_Svip
  gRNA
ggtgcggactccgcgggaca

SEQ ID NO: 119598 - DNA, 20 bp, Artificial Sequence
  MKO10119598_B_Svip
  gRNA
ggcagcagaaagaaggcaga

SEQ ID NO: 119599 - DNA, 20 bp, Artificial Sequence
  MKO10119599_B_Svip
  gRNA
ggaagagaaaagagaaaagc

SEQ ID NO: 119600 - DNA, 20 bp, Artificial Sequence
  MKO10119600_B_Svopl
  gRNA
atcctccaccgtgaatgtct

SEQ ID NO: 119601 - DNA, 20 bp, Artificial Sequence
  MKO10119601_B_Svopl
  gRNA
gcaagtcttacccttgagca

SEQ ID NO: 119602 - DNA, 20 bp, Artificial Sequence
  MKO10119602_B_Svopl
  gRNA
agcggccatatctgtcagcc

SEQ ID NO: 119603 - DNA, 20 bp, Artificial Sequence
  MKO10119603_B_Svop
  gRNA
ctcctcagctgcattgcgag

SEQ ID NO: 119604 - DNA, 20 bp, Artificial Sequence
  MKO10119604_B_Svop
  gRNA
cgagatgtttccccagagcg

SEQ ID NO: 119605 - DNA, 20 bp, Artificial Sequence
  MKO10119605_B_Svop
  gRNA
cgccactcgcaatgcagctg

SEQ ID NO: 119606 - DNA, 20 bp, Artificial Sequence
  MKO10119606_B_Svs1
  gRNA
cgtggaaccgctcagactcc

SEQ ID NO: 119607 - DNA, 20 bp, Artificial Sequence
  MKO10119607_B_Svs1
  gRNA
tgagaggccgactgtcaccc

SEQ ID NO: 119608 - DNA, 20 bp, Artificial Sequence
  MKO10119608_B_Svs1
  gRNA
gttggcagtgactaagtacc

SEQ ID NO: 119609 - DNA, 20 bp, Artificial Sequence
  MKO10119609_B_Svs2
  gRNA
cagagaaaggacgaagacag

SEQ ID NO: 119610 - DNA, 20 bp, Artificial Sequence
  MKO10119610_B_Svs2
  gRNA
tatcccaattcggacaacag

SEQ ID NO: 119611 - DNA, 20 bp, Artificial Sequence
  MKO10119611_B_Svs2
  gRNA
attgccgctgttgtccgaat

SEQ ID NO: 119612 - DNA, 20 bp, Artificial Sequence
  MKO10119612_B_Svs3a
  gRNA
cctttctctgctcctccttc

SEQ ID NO: 119613 - DNA, 20 bp, Artificial Sequence
  MKO10119613_B_Svs3a
  gRNA
caaactaagcaccatgaata

SEQ ID NO: 119614 - DNA, 20 bp, Artificial Sequence
  MKO10119614_B_Svs3a
  gRNA
ttgtgacttcacctgcccta

SEQ ID NO: 119615 - DNA, 20 bp, Artificial Sequence
  MKO10119615_B_Svs3b
  gRNA
cagctgctttcttctccaga

SEQ ID NO: 119616 - DNA, 20 bp, Artificial Sequence
  MKO10119616_B_Svs3b
  gRNA
ttgtgacttcatctgcccta

SEQ ID NO: 119617 - DNA, 20 bp, Artificial Sequence
  MKO10119617_B_Svs3b
  gRNA
acctcaccactcatgtttat

SEQ ID NO: 119618 - DNA, 20 bp, Artificial Sequence
  MKO10119618_B_Svs4
  gRNA
gaaggagaagcagagaaaag

SEQ ID NO: 119619 - DNA, 20 bp, Artificial Sequence
  MKO10119619_B_Svs4
  gRNA
cgagtgcatcttgagaaaac

SEQ ID NO: 119620 - DNA, 20 bp, Artificial Sequence
  MKO10119620_B_Svs4
  gRNA
tgtggcctaacaaatacctc

SEQ ID NO: 119621 - DNA, 20 bp, Artificial Sequence
  MKO10119621_B_Svs5
  gRNA
ttgcttctgtcaccagaacg

SEQ ID NO: 119622 - DNA, 20 bp, Artificial Sequence
  MKO10119622_B_Svs5
  gRNA
atacccatgtgactactaga

SEQ ID NO: 119623 - DNA, 20 bp, Artificial Sequence
  MKO10119623_B_Svs5
  gRNA
acttacgctgtattcctcca

SEQ ID NO: 119624 - DNA, 20 bp, Artificial Sequence
  MKO10119624_B_Svs6
  gRNA
tgacagaaacagctgcaaag

SEQ ID NO: 119625 - DNA, 20 bp, Artificial Sequence
  MKO10119625_B_Svs6
  gRNA
gcaacagtttgcacaagaaa

SEQ ID NO: 119626 - DNA, 20 bp, Artificial Sequence
  MKO10119626_B_Svs6
  gRNA
gacagcaagagagcatctgc

SEQ ID NO: 119627 - DNA, 20 bp, Artificial Sequence
  MKO10119627_B_Swap70
  gRNA
tgaggggcctgtctccaatc

SEQ ID NO: 119628 - DNA, 20 bp, Artificial Sequence
  MKO10119628_B_Swap70
  gRNA
gaaccttcagcaccgtgcac

SEQ ID NO: 119629 - DNA, 20 bp, Artificial Sequence
  MKO10119629_B_Swap70
  gRNA
aatttcctactatgtgagcg

SEQ ID NO: 119630 - DNA, 20 bp, Artificial Sequence
  MKO10119630_B_Swi5
  gRNA
gcttctccagctcaatcaca

SEQ ID NO: 119631 - DNA, 20 bp, Artificial Sequence
  MKO10119631_B_Swi5
  gRNA
aaaatctggatataactcct

SEQ ID NO: 119632 - DNA, 20 bp, Artificial Sequence
  MKO10119632_B_Swi5
  gRNA
atgtatcacagatgctgctg

SEQ ID NO: 119633 - DNA, 20 bp, Artificial Sequence
  MKO10119633_B_Swsap1
  gRNA
ggtcggtgctggggcctcat

SEQ ID NO: 119634 - DNA, 20 bp, Artificial Sequence
  MKO10119634_B_Swsap1
  gRNA
agcaaatggcggaggcgctg

SEQ ID NO: 119635 - DNA, 20 bp, Artificial Sequence
  MKO10119635_B_Swsap1
  gRNA
ggtgctgaatgccggctgcg

SEQ ID NO: 119636 - DNA, 20 bp, Artificial Sequence
  MKO10119636_B_Swt1
  gRNA
tatcaaagaatcttgtgcaa

SEQ ID NO: 119637 - DNA, 20 bp, Artificial Sequence
  MKO10119637_B_Swt1
  gRNA
attcttacttcattaaaagt

SEQ ID NO: 119638 - DNA, 20 bp, Artificial Sequence
  MKO10119638_B_Swt1
  gRNA
ttcaaccaagaagagaaaac

SEQ ID NO: 119639 - DNA, 20 bp, Artificial Sequence
  MKO10119639_B_Syap1
  gRNA
tcatcatgactctcaaccca

SEQ ID NO: 119640 - DNA, 20 bp, Artificial Sequence
  MKO10119640_B_Syap1
  gRNA
gtgcttacagtttaggaaca

SEQ ID NO: 119641 - DNA, 20 bp, Artificial Sequence
  MKO10119641_B_Syap1
  gRNA
gacaattcaacagcagattt

SEQ ID NO: 119642 - DNA, 20 bp, Artificial Sequence
  MKO10119642_B_Sybu
  gRNA
taaagtcttcatcgcttcca

SEQ ID NO: 119643 - DNA, 20 bp, Artificial Sequence
  MKO10119643_B_Sybu
  gRNA
gaggtccacatgtccacgac

SEQ ID NO: 119644 - DNA, 20 bp, Artificial Sequence
  MKO10119644_B_Sybu
  gRNA
tttagctcctcgagcagcac

SEQ ID NO: 119645 - DNA, 20 bp, Artificial Sequence
  MKO10119645_B_Syce1l
  gRNA
cccagccactccgccatcaa

SEQ ID NO: 119646 - DNA, 20 bp, Artificial Sequence
  MKO10119646_B_Syce1l
  gRNA
gggagaggctcaagcactcc

SEQ ID NO: 119647 - DNA, 20 bp, Artificial Sequence
  MKO10119647_B_Syce1l
  gRNA
tggatcaggtcctcaatctg

SEQ ID NO: 119648 - DNA, 20 bp, Artificial Sequence
  MKO10119648_B_Syce1
  gRNA
ttggagaggcccagactgtc

SEQ ID NO: 119649 - DNA, 20 bp, Artificial Sequence
  MKO10119649_B_Syce1
  gRNA
atggtgaaaaagttgcagaa

SEQ ID NO: 119650 - DNA, 20 bp, Artificial Sequence
  MKO10119650_B_Syce1
  gRNA
gtaagtccagttccttctgc

SEQ ID NO: 119651 - DNA, 20 bp, Artificial Sequence
  MKO10119651_B_Syce2
  gRNA
tgtacaccgtttccacagtt

SEQ ID NO: 119652 - DNA, 20 bp, Artificial Sequence
  MKO10119652_B_Syce2
  gRNA
tgaagttggtcataagtgca

SEQ ID NO: 119653 - DNA, 20 bp, Artificial Sequence
  MKO10119653_B_Syce2
  gRNA
ttacctcagactggacacat

SEQ ID NO: 119654 - DNA, 20 bp, Artificial Sequence
  MKO10119654_B_Syce3
  gRNA
ttatcatagcttctttcccc

SEQ ID NO: 119655 - DNA, 20 bp, Artificial Sequence
  MKO10119655_B_Syce3
  gRNA
acgcatgaccaccatatcat

SEQ ID NO: 119656 - DNA, 20 bp, Artificial Sequence
  MKO10119656_B_Syce3
  gRNA
ttgttgtagtgcaggcaacc

SEQ ID NO: 119657 - DNA, 20 bp, Artificial Sequence
  MKO10119657_B_Sycn
  gRNA
tgcagtgttagaccagcccg

SEQ ID NO: 119658 - DNA, 20 bp, Artificial Sequence
  MKO10119658_B_Sycn
  gRNA
gcgggtcttgccatgcttac

SEQ ID NO: 119659 - DNA, 20 bp, Artificial Sequence
  MKO10119659_B_Sycn
  gRNA
caagacccgcaagttcaccg

SEQ ID NO: 119660 - DNA, 20 bp, Artificial Sequence
  MKO10119660_B_Sycp1
  gRNA
ttccatttacaatgtccagt

SEQ ID NO: 119661 - DNA, 20 bp, Artificial Sequence
  MKO10119661_B_Sycp1
  gRNA
actgccaacaaatgtacaga

SEQ ID NO: 119662 - DNA, 20 bp, Artificial Sequence
  MKO10119662_B_Sycp1
  gRNA
tttgaatacagtctgctcat

SEQ ID NO: 119663 - DNA, 20 bp, Artificial Sequence
  MKO10119663_B_Sycp2
  gRNA
tcaagatgcttgaaacagtt

SEQ ID NO: 119664 - DNA, 20 bp, Artificial Sequence
  MKO10119664_B_Sycp2
  gRNA
ttgatttagaataatctcct

SEQ ID NO: 119665 - DNA, 20 bp, Artificial Sequence
  MKO10119665_B_Sycp2
  gRNA
atatatgacatcagtgatga

SEQ ID NO: 119666 - DNA, 20 bp, Artificial Sequence
  MKO10119666_B_Sycp3
  gRNA
cctggtggaagaaagcattc

SEQ ID NO: 119667 - DNA, 20 bp, Artificial Sequence
  MKO10119667_B_Sycp3
  gRNA
acaaagctcttcttgccaag

SEQ ID NO: 119668 - DNA, 20 bp, Artificial Sequence
  MKO10119668_B_Sycp3
  gRNA
aggtgaagtacagaatatgc

SEQ ID NO: 119669 - DNA, 20 bp, Artificial Sequence
  MKO10119669_B_Syde1
  gRNA
gtagaacgtgagcagtcccc

SEQ ID NO: 119670 - DNA, 20 bp, Artificial Sequence
  MKO10119670_B_Syde1
  gRNA
gccccccgagtggggcttcg

SEQ ID NO: 119671 - DNA, 20 bp, Artificial Sequence
  MKO10119671_B_Syde1
  gRNA
tggagcccagtagccgccga

SEQ ID NO: 119672 - DNA, 20 bp, Artificial Sequence
  MKO10119672_B_Syde2
  gRNA
ctgaaccacacaatcgatac

SEQ ID NO: 119673 - DNA, 20 bp, Artificial Sequence
  MKO10119673_B_Syde2
  gRNA
gtaggcctgtatcgattgtg

SEQ ID NO: 119674 - DNA, 20 bp, Artificial Sequence
  MKO10119674_B_Syde2
  gRNA
gggctcgttctcacaaccac

SEQ ID NO: 119675 - DNA, 20 bp, Artificial Sequence
  MKO10119675_B_Syf2
  gRNA
ccactccagacgcgctttct

SEQ ID NO: 119676 - DNA, 20 bp, Artificial Sequence
  MKO10119676_B_Syf2
  gRNA
ctacgagaaggtgaagttgc

SEQ ID NO: 119677 - DNA, 20 bp, Artificial Sequence
  MKO10119677_B_Syf2
  gRNA
cccaattacgccagtatcac

SEQ ID NO: 119678 - DNA, 20 bp, Artificial Sequence
  MKO10119678_B_Syk
  gRNA
acggtaccatgccaaaagat

SEQ ID NO: 119679 - DNA, 20 bp, Artificial Sequence
  MKO10119679_B_Syk
  gRNA
aggactcttagtagcccatc

SEQ ID NO: 119680 - DNA, 20 bp, Artificial Sequence
  MKO10119680_B_Syk
  gRNA
cttaccacgggatgggcatt

SEQ ID NO: 119681 - DNA, 20 bp, Artificial Sequence
  MKO10119681_B_Sympk
  gRNA
gacaaacttgcgcacttcaa

SEQ ID NO: 119682 - DNA, 20 bp, Artificial Sequence
  MKO10119682_B_Sympk
  gRNA
ccaagagctgatcatcaaca

SEQ ID NO: 119683 - DNA, 20 bp, Artificial Sequence
  MKO10119683_B_Sympk
  gRNA
caagatcacagtgctcaaac

SEQ ID NO: 119684 - DNA, 20 bp, Artificial Sequence
  MKO10119684_B_Syn1
  gRNA
tccattacgtgccatgctga

SEQ ID NO: 119685 - DNA, 20 bp, Artificial Sequence
  MKO10119685_B_Syn1
  gRNA
cccagggcaaaatacttcaa

SEQ ID NO: 119686 - DNA, 20 bp, Artificial Sequence
  MKO10119686_B_Syn1
  gRNA
ggaatggagtcaaagttgtg

SEQ ID NO: 119687 - DNA, 20 bp, Artificial Sequence
  MKO10119687_B_Syn2
  gRNA
tgcagatggaacctacgccg

SEQ ID NO: 119688 - DNA, 20 bp, Artificial Sequence
  MKO10119688_B_Syn2
  gRNA
cgtactgcatgccaatgacc

SEQ ID NO: 119689 - DNA, 20 bp, Artificial Sequence
  MKO10119689_B_Syn2
  gRNA
gaatgaagacttccgccacc

SEQ ID NO: 119690 - DNA, 20 bp, Artificial Sequence
  MKO10119690_B_Syn3
  gRNA
tcgatgacgcccatacagac

SEQ ID NO: 119691 - DNA, 20 bp, Artificial Sequence
  MKO10119691_B_Syn3
  gRNA
gtctgcttaccgcacaattt

SEQ ID NO: 119692 - DNA, 20 bp, Artificial Sequence
  MKO10119692_B_Syn3
  gRNA
ggctccggtagtcctcagcc

SEQ ID NO: 119693 - DNA, 20 bp, Artificial Sequence
  MKO10119693_B_Syna
  gRNA
cgagcttgtgccgagttccg

SEQ ID NO: 119694 - DNA, 20 bp, Artificial Sequence
  MKO10119694_B_Syna
  gRNA
gccgcgatacagaatgagtc

SEQ ID NO: 119695 - DNA, 20 bp, Artificial Sequence
  MKO10119695_B_Syna
  gRNA
accctatcaccgaccttgag

SEQ ID NO: 119696 - DNA, 20 bp, Artificial Sequence
  MKO10119696_B_Synb
  gRNA
tctttactgagaccgtgctc

SEQ ID NO: 119697 - DNA, 20 bp, Artificial Sequence
  MKO10119697_B_Synb
  gRNA
cgtcccggactattccagac

SEQ ID NO: 119698 - DNA, 20 bp, Artificial Sequence
  MKO10119698_B_Synb
  gRNA
cgtagaagcagcactcttcc

SEQ ID NO: 119699 - DNA, 20 bp, Artificial Sequence
  MKO10119699_B_Syncrip
  gRNA
gcagccttctgttggcactg

SEQ ID NO: 119700 - DNA, 20 bp, Artificial Sequence
  MKO10119700_B_Syncrip
  gRNA
atggctacagaacatgttaa

SEQ ID NO: 119701 - DNA, 20 bp, Artificial Sequence
  MKO10119701_B_Syncrip
  gRNA
aaatggtactgaagagccca

SEQ ID NO: 119702 - DNA, 20 bp, Artificial Sequence
  MKO10119702_B_Sync
  gRNA
ggctatgctacccaagagtc

SEQ ID NO: 119703 - DNA, 20 bp, Artificial Sequence
  MKO10119703_B_Sync
  gRNA
agacagaggcagttgcgcag

SEQ ID NO: 119704 - DNA, 20 bp, Artificial Sequence
  MKO10119704_B_Sync
  gRNA
agttcagcaacagaagaaca

SEQ ID NO: 119705 - DNA, 20 bp, Artificial Sequence
  MKO10119705_B_Syndig1l
  gRNA
ggccaggcggaagtcccctt

SEQ ID NO: 119706 - DNA, 20 bp, Artificial Sequence
  MKO10119706_B_Syndig1l
  gRNA
caggaagagagctcggcgag

SEQ ID NO: 119707 - DNA, 20 bp, Artificial Sequence
  MKO10119707_B_Syndig1l
  gRNA
agaagagagtgagtcccaag

SEQ ID NO: 119708 - DNA, 20 bp, Artificial Sequence
  MKO10119708_B_Syndig1
  gRNA
gaagtacaccatctgagtag

SEQ ID NO: 119709 - DNA, 20 bp, Artificial Sequence
  MKO10119709_B_Syndig1
  gRNA
gtcctcactttctgtgtcgc

SEQ ID NO: 119710 - DNA, 20 bp, Artificial Sequence
  MKO10119710_B_Syndig1
  gRNA
tacctcatgggacaagtaga

SEQ ID NO: 119711 - DNA, 20 bp, Artificial Sequence
  MKO10119711_B_Syne1
  gRNA
cttgcagcggaagcctccca

SEQ ID NO: 119712 - DNA, 20 bp, Artificial Sequence
  MKO10119712_B_Syne1
  gRNA
ggtcctgtctgggcagaaac

SEQ ID NO: 119713 - DNA, 20 bp, Artificial Sequence
  MKO10119713_B_Syne1
  gRNA
agaaacgtaccttcacaaaa

SEQ ID NO: 119714 - DNA, 20 bp, Artificial Sequence
  MKO10119714_B_Syne2
  gRNA
cagctgtgagtttatccagc

SEQ ID NO: 119715 - DNA, 20 bp, Artificial Sequence
  MKO10119715_B_Syne2
  gRNA
cttattcgcagacatcaaga

SEQ ID NO: 119716 - DNA, 20 bp, Artificial Sequence
  MKO10119716_B_Syne2
  gRNA
catgttgctgacattgtaga

SEQ ID NO: 119717 - DNA, 20 bp, Artificial Sequence
  MKO10119717_B_Syne3
  gRNA
cgtcctcccggtactgctca

SEQ ID NO: 119718 - DNA, 20 bp, Artificial Sequence
  MKO10119718_B_Syne3
  gRNA
tcaggtcaatgacaacacga

SEQ ID NO: 119719 - DNA, 20 bp, Artificial Sequence
  MKO10119719_B_Syne3
  gRNA
ccctcgccaggacatcgcca

SEQ ID NO: 119720 - DNA, 20 bp, Artificial Sequence
  MKO10119720_B_Syne4
  gRNA
ccagttgatcagctatagcc

SEQ ID NO: 119721 - DNA, 20 bp, Artificial Sequence
  MKO10119721_B_Syne4
  gRNA
gggcctgcctgagcattgca

SEQ ID NO: 119722 - DNA, 20 bp, Artificial Sequence
  MKO10119722_B_Syne4
  gRNA
cagcccctcaagactccccc

SEQ ID NO: 119723 - DNA, 20 bp, Artificial Sequence
  MKO10119723_B_Syngap1
  gRNA
ccgccgtaccatgctcgccg

SEQ ID NO: 119724 - DNA, 20 bp, Artificial Sequence
  MKO10119724_B_Syngap1
  gRNA
tccgaagtgctgaccatgac

SEQ ID NO: 119725 - DNA, 20 bp, Artificial Sequence
  MKO10119725_B_Syngap1
  gRNA
agtcacaacccaaacttgac

SEQ ID NO: 119726 - DNA, 20 bp, Artificial Sequence
  MKO10119726_B_Syngr1
  gRNA
gcgtccgtcccttcgttcag

SEQ ID NO: 119727 - DNA, 20 bp, Artificial Sequence
  MKO10119727_B_Syngr1
  gRNA
aagctccttgaatctgcgta

SEQ ID NO: 119728 - DNA, 20 bp, Artificial Sequence
  MKO10119728_B_Syngr1
  gRNA
gatagagccgaagaccacga

SEQ ID NO: 119729 - DNA, 20 bp, Artificial Sequence
  MKO10119729_B_Syngr2
  gRNA
atccacgtagttctgaatga

SEQ ID NO: 119730 - DNA, 20 bp, Artificial Sequence
  MKO10119730_B_Syngr2
  gRNA
tgccttcattcagaactacg

SEQ ID NO: 119731 - DNA, 20 bp, Artificial Sequence
  MKO10119731_B_Syngr2
  gRNA
gtcgaaggagccgcccgcgt

SEQ ID NO: 119732 - DNA, 20 bp, Artificial Sequence
  MKO10119732_B_Syngr3
  gRNA
gggccgccgcgcaaagctca

SEQ ID NO: 119733 - DNA, 20 bp, Artificial Sequence
  MKO10119733_B_Syngr3
  gRNA
cccaggacacgacccgcaac

SEQ ID NO: 119734 - DNA, 20 bp, Artificial Sequence
  MKO10119734_B_Syngr3
  gRNA
agagagacatatcggtgcct

SEQ ID NO: 119735 - DNA, 20 bp, Artificial Sequence
  MKO10119735_B_Syngr4
  gRNA
ccctgaaagcctccacgacc

SEQ ID NO: 119736 - DNA, 20 bp, Artificial Sequence
  MKO10119736_B_Syngr4
  gRNA
agctcctactgcaaagctac

SEQ ID NO: 119737 - DNA, 20 bp, Artificial Sequence
  MKO10119737_B_Syngr4
  gRNA
atgagactgtgcgctttctg

SEQ ID NO: 119738 - DNA, 20 bp, Artificial Sequence
  MKO10119738_B_Synj1
  gRNA
gaatgtctcatgttcgagtc

SEQ ID NO: 119739 - DNA, 20 bp, Artificial Sequence
  MKO10119739_B_Synj1
  gRNA
tgataccatgctgcactatc

SEQ ID NO: 119740 - DNA, 20 bp, Artificial Sequence
  MKO10119740_B_Synj1
  gRNA
tccgtatgcatccagtactt

SEQ ID NO: 119741 - DNA, 20 bp, Artificial Sequence
  MKO10119741_B_Synj2bp
  gRNA
tacccgaaggtcctctcgtc

SEQ ID NO: 119742 - DNA, 20 bp, Artificial Sequence
  MKO10119742_B_Synj2bp
  gRNA
agcagtcagatatgaacgga

SEQ ID NO: 119743 - DNA, 20 bp, Artificial Sequence
  MKO10119743_B_Synj2bp
  gRNA
gaaggcccaaactgctacca

SEQ ID NO: 119744 - DNA, 20 bp, Artificial Sequence
  MKO10119744_B_Synj2
  gRNA
tatttcgcatggcccaatga

SEQ ID NO: 119745 - DNA, 20 bp, Artificial Sequence
  MKO10119745_B_Synj2
  gRNA
atcgaagcaggcgccatcat

SEQ ID NO: 119746 - DNA, 20 bp, Artificial Sequence
  MKO10119746_B_Synj2
  gRNA
ttgctcccagaacagcggaa

SEQ ID NO: 119747 - DNA, 20 bp, Artificial Sequence
  MKO10119747_B_Synm
  gRNA
gctcctggtaatcccgcagc

SEQ ID NO: 119748 - DNA, 20 bp, Artificial Sequence
  MKO10119748_B_Synm
  gRNA
tgaccggctgcgggattacc

SEQ ID NO: 119749 - DNA, 20 bp, Artificial Sequence
  MKO10119749_B_Synm
  gRNA
gcaatccggagatattgatc

SEQ ID NO: 119750 - DNA, 20 bp, Artificial Sequence
  MKO10119750_B_Synpo2l
  gRNA
gaccagctcttagcgatcaa

SEQ ID NO: 119751 - DNA, 20 bp, Artificial Sequence
  MKO10119751_B_Synpo2l
  gRNA
tcggcgtggcttctcttgtg

SEQ ID NO: 119752 - DNA, 20 bp, Artificial Sequence
  MKO10119752_B_Synpo2l
  gRNA
ccatagtaagcttcgctgtc

SEQ ID NO: 119753 - DNA, 20 bp, Artificial Sequence
  MKO10119753_B_Synpo2
  gRNA
cgatgagagaatcgcagtgc

SEQ ID NO: 119754 - DNA, 20 bp, Artificial Sequence
  MKO10119754_B_Synpo2
  gRNA
gccttctgacgagaccgcaa

SEQ ID NO: 119755 - DNA, 20 bp, Artificial Sequence
  MKO10119755_B_Synpo2
  gRNA
cacatgtagtctccgcagct

SEQ ID NO: 119756 - DNA, 20 bp, Artificial Sequence
  MKO10119756_B_Synpo
  gRNA
gcgtgatggagtgcgcgatg

SEQ ID NO: 119757 - DNA, 20 bp, Artificial Sequence
  MKO10119757_B_Synpo
  gRNA
cggggtccgcgctggactta

SEQ ID NO: 119758 - DNA, 20 bp, Artificial Sequence
  MKO10119758_B_Synpo
  gRNA
aagtacaccactaacgcccc

SEQ ID NO: 119759 - DNA, 20 bp, Artificial Sequence
  MKO10119759_B_Synpr
  gRNA
gggccaacttccgatgagtt

SEQ ID NO: 119760 - DNA, 20 bp, Artificial Sequence
  MKO10119760_B_Synpr
  gRNA
ttggccccagattcgcctgc

SEQ ID NO: 119761 - DNA, 20 bp, Artificial Sequence
  MKO10119761_B_Synpr
  gRNA
gtccagcttaaacacatctg

SEQ ID NO: 119762 - DNA, 20 bp, Artificial Sequence
  MKO10119762_B_Synrg
  gRNA
gtcatgcagcccaatatgca

SEQ ID NO: 119763 - DNA, 20 bp, Artificial Sequence
  MKO10119763_B_Synrg
  gRNA
agcagcgggtgtgcctttcc

SEQ ID NO: 119764 - DNA, 20 bp, Artificial Sequence
  MKO10119764_B_Synrg
  gRNA
tctcagcagcgtgaagccca

SEQ ID NO: 119765 - DNA, 20 bp, Artificial Sequence
  MKO10119765_B_Sypl2
  gRNA
ggccacaccctctatggggc

SEQ ID NO: 119766 - DNA, 20 bp, Artificial Sequence
  MKO10119766_B_Sypl2
  gRNA
gccgagttctttgtgaccct

SEQ ID NO: 119767 - DNA, 20 bp, Artificial Sequence
  MKO10119767_B_Sypl2
  gRNA
ggcgctgccagcgcagcccc

SEQ ID NO: 119768 - DNA, 20 bp, Artificial Sequence
  MKO10119768_B_Sypl
  gRNA
caagtgaactgtcctaaagt

SEQ ID NO: 119769 - DNA, 20 bp, Artificial Sequence
  MKO10119769_B_Sypl
  gRNA
tgggcagtttgcgactatcc

SEQ ID NO: 119770 - DNA, 20 bp, Artificial Sequence
  MKO10119770_B_Sypl
  gRNA
tcagtgtgtgtgacgtgaac

SEQ ID NO: 119771 - DNA, 20 bp, Artificial Sequence
  MKO10119771_B_Syp
  gRNA
atgcctatgtgccgccagac

SEQ ID NO: 119772 - DNA, 20 bp, Artificial Sequence
  MKO10119772_B_Syp
  gRNA
gatgcaccctcctgcgttaa

SEQ ID NO: 119773 - DNA, 20 bp, Artificial Sequence
  MKO10119773_B_Syp
  gRNA
gacttcaggactcaacacct

SEQ ID NO: 119774 - DNA, 20 bp, Artificial Sequence
  MKO10119774_B_Sys1
  gRNA
tgagctccgtccgcatgcac

SEQ ID NO: 119775 - DNA, 20 bp, Artificial Sequence
  MKO10119775_B_Sys1
  gRNA
tcgtcctcaacgccctcacc

SEQ ID NO: 119776 - DNA, 20 bp, Artificial Sequence
  MKO10119776_B_Sys1
  gRNA
ctcaccaggtgagggcgttg

SEQ ID NO: 119777 - DNA, 20 bp, Artificial Sequence
  MKO10119777_B_Syt10
  gRNA
ccttaccgggatgaagacgt

SEQ ID NO: 119778 - DNA, 20 bp, Artificial Sequence
  MKO10119778_B_Syt10
  gRNA
gataatggcttcgttgtaca

SEQ ID NO: 119779 - DNA, 20 bp, Artificial Sequence
  MKO10119779_B_Syt10
  gRNA
cagcctgtgcattgcagtca

SEQ ID NO: 119780 - DNA, 20 bp, Artificial Sequence
  MKO10119780_B_Syt11
  gRNA
agccagacacttgccgaaga

SEQ ID NO: 119781 - DNA, 20 bp, Artificial Sequence
  MKO10119781_B_Syt11
  gRNA
tgcgatcgaagtcaatgaca

SEQ ID NO: 119782 - DNA, 20 bp, Artificial Sequence
  MKO10119782_B_Syt11
  gRNA
atccatcttcggcaagtgtc

SEQ ID NO: 119783 - DNA, 20 bp, Artificial Sequence
  MKO10119783_B_Syt12
  gRNA
ctgtagtcgtaattagggaa

SEQ ID NO: 119784 - DNA, 20 bp, Artificial Sequence
  MKO10119784_B_Syt12
  gRNA
ggagctgaagctgtccgttc

SEQ ID NO: 119785 - DNA, 20 bp, Artificial Sequence
  MKO10119785_B_Syt12
  gRNA
gaacttctcatcgaagaaga

SEQ ID NO: 119786 - DNA, 20 bp, Artificial Sequence
  MKO10119786_B_Syt13
  gRNA
ggagttccccaatcacacta

SEQ ID NO: 119787 - DNA, 20 bp, Artificial Sequence
  MKO10119787_B_Syt13
  gRNA
cccagctgccaatcgcctcc

SEQ ID NO: 119788 - DNA, 20 bp, Artificial Sequence
  MKO10119788_B_Syt13
  gRNA
gtccaggcggaagtggagtt

SEQ ID NO: 119789 - DNA, 20 bp, Artificial Sequence
  MKO10119789_B_Syt14
  gRNA
gaggagaaccgctgtcgtct

SEQ ID NO: 119790 - DNA, 20 bp, Artificial Sequence
  MKO10119790_B_Syt14
  gRNA
gacaaaaatccaaccgcctc

SEQ ID NO: 119791 - DNA, 20 bp, Artificial Sequence
  MKO10119791_B_Syt14
  gRNA
gataagttcatgtactccac

SEQ ID NO: 119792 - DNA, 20 bp, Artificial Sequence
  MKO10119792_B_Syt15
  gRNA
gctaccaagtgtaccatttg

SEQ ID NO: 119793 - DNA, 20 bp, Artificial Sequence
  MKO10119793_B_Syt15
  gRNA
actgccagagacgtcagacc

SEQ ID NO: 119794 - DNA, 20 bp, Artificial Sequence
  MKO10119794_B_Syt15
  gRNA
actccaccgagaaccacagc

SEQ ID NO: 119795 - DNA, 20 bp, Artificial Sequence
  MKO10119795_B_Syt16
  gRNA
ctcacgctcagattacttct

SEQ ID NO: 119796 - DNA, 20 bp, Artificial Sequence
  MKO10119796_B_Syt16
  gRNA
atactcctgaacgaaaactc

SEQ ID NO: 119797 - DNA, 20 bp, Artificial Sequence
  MKO10119797_B_Syt16
  gRNA
ctcccagataaggaccgaag

SEQ ID NO: 119798 - DNA, 20 bp, Artificial Sequence
  MKO10119798_B_Syt17
  gRNA
tactggagattctccgagtc

SEQ ID NO: 119799 - DNA, 20 bp, Artificial Sequence
  MKO10119799_B_Syt17
  gRNA
gcagttggaaccactgaacg

SEQ ID NO: 119800 - DNA, 20 bp, Artificial Sequence
  MKO10119800_B_Syt17
  gRNA
gcgatgttcctttgacccca

SEQ ID NO: 119801 - DNA, 20 bp, Artificial Sequence
  MKO10119801_B_Syt1
  gRNA
atggcaattaaggcccacgg

SEQ ID NO: 119802 - DNA, 20 bp, Artificial Sequence
  MKO10119802_B_Syt1
  gRNA
cccctcagacctggttattc

SEQ ID NO: 119803 - DNA, 20 bp, Artificial Sequence
  MKO10119803_B_Syt1
  gRNA
agcaggaagactttgacgta

SEQ ID NO: 119804 - DNA, 20 bp, Artificial Sequence
  MKO10119804_B_Syt2
  gRNA
gagaaaactgcaatttgccc

SEQ ID NO: 119805 - DNA, 20 bp, Artificial Sequence
  MKO10119805_B_Syt2
  gRNA
gaagaacgccatgaacatga

SEQ ID NO: 119806 - DNA, 20 bp, Artificial Sequence
  MKO10119806_B_Syt2
  gRNA
ctgggagttccgcagcctgc

SEQ ID NO: 119807 - DNA, 20 bp, Artificial Sequence
  MKO10119807_B_Syt3
  gRNA
cacggtgaggcgcccagccg

SEQ ID NO: 119808 - DNA, 20 bp, Artificial Sequence
  MKO10119808_B_Syt3
  gRNA
atgacttcgaccgcttctcg

SEQ ID NO: 119809 - DNA, 20 bp, Artificial Sequence
  MKO10119809_B_Syt3
  gRNA
tgagatcatgccgcgagaag

SEQ ID NO: 119810 - DNA, 20 bp, Artificial Sequence
  MKO10119810_B_Syt4
  gRNA
accgtccaatcacctcattt

SEQ ID NO: 119811 - DNA, 20 bp, Artificial Sequence
  MKO10119811_B_Syt4
  gRNA
aagtttgtgcacgtgcttaa

SEQ ID NO: 119812 - DNA, 20 bp, Artificial Sequence
  MKO10119812_B_Syt4
  gRNA
tcctatcaccaccagccgcg

SEQ ID NO: 119813 - DNA, 20 bp, Artificial Sequence
  MKO10119813_B_Syt5
  gRNA
tcatgtcgcctccgcttgtc

SEQ ID NO: 119814 - DNA, 20 bp, Artificial Sequence
  MKO10119814_B_Syt5
  gRNA
cggtccagctcctctatttc

SEQ ID NO: 119815 - DNA, 20 bp, Artificial Sequence
  MKO10119815_B_Syt5
  gRNA
ctaggttcagcctgaaatag

SEQ ID NO: 119816 - DNA, 20 bp, Artificial Sequence
  MKO10119816_B_Syt6
  gRNA
cctaaaccccatctacaacg

SEQ ID NO: 119817 - DNA, 20 bp, Artificial Sequence
  MKO10119817_B_Syt6
  gRNA
cttatccgccatgttgcctc

SEQ ID NO: 119818 - DNA, 20 bp, Artificial Sequence
  MKO10119818_B_Syt6
  gRNA
gagcctgctcatctccgtta

SEQ ID NO: 119819 - DNA, 20 bp, Artificial Sequence
  MKO10119819_B_Syt7
  gRNA
agaggacgatagtgacgcta

SEQ ID NO: 119820 - DNA, 20 bp, Artificial Sequence
  MKO10119820_B_Syt7
  gRNA
ggggaccatgtaccgggacc

SEQ ID NO: 119821 - DNA, 20 bp, Artificial Sequence
  MKO10119821_B_Syt7
  gRNA
ctgcggtcagactcatcgtg

SEQ ID NO: 119822 - DNA, 20 bp, Artificial Sequence
  MKO10119822_B_Syt8
  gRNA
gcacagcagacccctacgcc

SEQ ID NO: 119823 - DNA, 20 bp, Artificial Sequence
  MKO10119823_B_Syt8
  gRNA
gcgataaagagggtccagcg

SEQ ID NO: 119824 - DNA, 20 bp, Artificial Sequence
  MKO10119824_B_Syt8
  gRNA
ccaactacccctgggcaccg

SEQ ID NO: 119825 - DNA, 20 bp, Artificial Sequence
  MKO10119825_B_Syt9
  gRNA
ccacttgtccatagccgtca

SEQ ID NO: 119826 - DNA, 20 bp, Artificial Sequence
  MKO10119826_B_Syt9
  gRNA
cggcatgggcacagttctcc

SEQ ID NO: 119827 - DNA, 20 bp, Artificial Sequence
  MKO10119827_B_Syt9
  gRNA
ttaaaggcgatggacataac

SEQ ID NO: 119828 - DNA, 20 bp, Artificial Sequence
  MKO10119828_B_Sytl1
  gRNA
ggactccggctctccttcaa

SEQ ID NO: 119829 - DNA, 20 bp, Artificial Sequence
  MKO10119829_B_Sytl1
  gRNA
taccctccagctcacattcc

SEQ ID NO: 119830 - DNA, 20 bp, Artificial Sequence
  MKO10119830_B_Sytl1
  gRNA
tccttccagggtctccatag

SEQ ID NO: 119831 - DNA, 20 bp, Artificial Sequence
  MKO10119831_B_Sytl2
  gRNA
ctgggacatatcaatcacac

SEQ ID NO: 119832 - DNA, 20 bp, Artificial Sequence
  MKO10119832_B_Sytl2
  gRNA
cgacttaagtttcctgacag

SEQ ID NO: 119833 - DNA, 20 bp, Artificial Sequence
  MKO10119833_B_Sytl2
  gRNA
ctctgatgatgtcagcaccg

SEQ ID NO: 119834 - DNA, 20 bp, Artificial Sequence
  MKO10119834_B_Sytl3
  gRNA
cgttgactgcagtgtctgac

SEQ ID NO: 119835 - DNA, 20 bp, Artificial Sequence
  MKO10119835_B_Sytl3
  gRNA
gacctctgagaagcatcttc

SEQ ID NO: 119836 - DNA, 20 bp, Artificial Sequence
  MKO10119836_B_Sytl3
  gRNA
gagaagacagcgctgtgtgt

SEQ ID NO: 119837 - DNA, 20 bp, Artificial Sequence
  MKO10119837_B_Sytl4
  gRNA
tgattatctcgctgcctgtt

SEQ ID NO: 119838 - DNA, 20 bp, Artificial Sequence
  MKO10119838_B_Sytl4
  gRNA
cagtgcactctttccacttc

SEQ ID NO: 119839 - DNA, 20 bp, Artificial Sequence
  MKO10119839_B_Sytl4
  gRNA
ggaggctgagagcgagagtc

SEQ ID NO: 119840 - DNA, 20 bp, Artificial Sequence
  MKO10119840_B_Sytl5
  gRNA
ctatagctccttccgctttc

SEQ ID NO: 119841 - DNA, 20 bp, Artificial Sequence
  MKO10119841_B_Sytl5
  gRNA
acctggacttcttcttaaga

SEQ ID NO: 119842 - DNA, 20 bp, Artificial Sequence
  MKO10119842_B_Sytl5
  gRNA
aagttcagatcagcaaccag

SEQ ID NO: 119843 - DNA, 20 bp, Artificial Sequence
  MKO10119843_B_Syvn1
  gRNA
tatcacagcatcctgacccg

SEQ ID NO: 119844 - DNA, 20 bp, Artificial Sequence
  MKO10119844_B_Syvn1
  gRNA
tcaggatgctgtgataagcg

SEQ ID NO: 119845 - DNA, 20 bp, Artificial Sequence
  MKO10119845_B_Syvn1
  gRNA
cccccaggtcctgtacatcc

SEQ ID NO: 119846 - DNA, 20 bp, Artificial Sequence
  MKO10119846_B_Szrd1
  gRNA
caatgtgatcagacagccgt

SEQ ID NO: 119847 - DNA, 20 bp, Artificial Sequence
  MKO10119847_B_Szrd1
  gRNA
ggcgagtaagatggaagatg

SEQ ID NO: 119848 - DNA, 20 bp, Artificial Sequence
  MKO10119848_B_Szrd1
  gRNA
tcctctaggaaatagacaga

SEQ ID NO: 119849 - DNA, 20 bp, Artificial Sequence
  MKO10119849_B_Szt2
  gRNA
tcgtcagcttcagtccgagc

SEQ ID NO: 119850 - DNA, 20 bp, Artificial Sequence
  MKO10119850_B_Szt2
  gRNA
accaagccaggcgaacattt

SEQ ID NO: 119851 - DNA, 20 bp, Artificial Sequence
  MKO10119851_B_Szt2
  gRNA
atggcagccagatgaacccg

SEQ ID NO: 119852 - DNA, 20 bp, Artificial Sequence
  MKO10119852_B_T2
  gRNA
ttccaggtccaacgcctacc

SEQ ID NO: 119853 - DNA, 20 bp, Artificial Sequence
  MKO10119853_B_T2
  gRNA
caaaacgagctgaccaaatg

SEQ ID NO: 119854 - DNA, 20 bp, Artificial Sequence
  MKO10119854_B_T2
  gRNA
cgctgtgtcccctcgatgct

SEQ ID NO: 119855 - DNA, 20 bp, Artificial Sequence
  MKO10119855_B_Taar1
  gRNA
ggcggagctcagcatgatat

SEQ ID NO: 119856 - DNA, 20 bp, Artificial Sequence
  MKO10119856_B_Taar1
  gRNA
tgagaactgttgagcgctgt

SEQ ID NO: 119857 - DNA, 20 bp, Artificial Sequence
  MKO10119857_B_Taar1
  gRNA
ggccattgtcgactttctgc

SEQ ID NO: 119858 - DNA, 20 bp, Artificial Sequence
  MKO10119858_B_Taar2
  gRNA
gtccccggggcgtttgcctt

SEQ ID NO: 119859 - DNA, 20 bp, Artificial Sequence
  MKO10119859_B_Taar2
  gRNA
ttctccgaggcttacgctga

SEQ ID NO: 119860 - DNA, 20 bp, Artificial Sequence
  MKO10119860_B_Taar2
  gRNA
tccgtactctgaacaatcaa

SEQ ID NO: 119861 - DNA, 20 bp, Artificial Sequence
  MKO10119861_B_Taar3
  gRNA
cgcttacgttcaacaagttt

SEQ ID NO: 119862 - DNA, 20 bp, Artificial Sequence
  MKO10119862_B_Taar3
  gRNA
gcatcatgtcgaagctcgcg

SEQ ID NO: 119863 - DNA, 20 bp, Artificial Sequence
  MKO10119863_B_Taar3
  gRNA
acacccccatgacgatgccc

SEQ ID NO: 119864 - DNA, 20 bp, Artificial Sequence
  MKO10119864_B_Taar4
  gRNA
atggcacagacaacgagcgc

SEQ ID NO: 119865 - DNA, 20 bp, Artificial Sequence
  MKO10119865_B_Taar4
  gRNA
atttgggtgacgtagtgcaa

SEQ ID NO: 119866 - DNA, 20 bp, Artificial Sequence
  MKO10119866_B_Taar4
  gRNA
gtcgcagccattgactgtac

SEQ ID NO: 119867 - DNA, 20 bp, Artificial Sequence
  MKO10119867_B_Taar5
  gRNA
cccaccctgccacgatgtag

SEQ ID NO: 119868 - DNA, 20 bp, Artificial Sequence
  MKO10119868_B_Taar5
  gRNA
gccctccgctacatcgtggc

SEQ ID NO: 119869 - DNA, 20 bp, Artificial Sequence
  MKO10119869_B_Taar5
  gRNA
acctggtagcagaacgctgt

SEQ ID NO: 119870 - DNA, 20 bp, Artificial Sequence
  MKO10119870_B_Taar6
  gRNA
gacagcgatgtacctgtcga

SEQ ID NO: 119871 - DNA, 20 bp, Artificial Sequence
  MKO10119871_B_Taar6
  gRNA
taaaataaagcgtagatcag

SEQ ID NO: 119872 - DNA, 20 bp, Artificial Sequence
  MKO10119872_B_Taar6
  gRNA
ggtttatgatgacggcctgg

SEQ ID NO: 119873 - DNA, 20 bp, Artificial Sequence
  MKO10119873_B_Taar7a
  gRNA
gacagtcatcatcacaagag

SEQ ID NO: 119874 - DNA, 20 bp, Artificial Sequence
  MKO10119874_B_Taar7a
  gRNA
acccactaagaaatcagcac

SEQ ID NO: 119875 - DNA, 20 bp, Artificial Sequence
  MKO10119875_B_Taar7a
  gRNA
aggcagccactgcaatgccc

SEQ ID NO: 119876 - DNA, 20 bp, Artificial Sequence
  MKO10119876_B_Taar7b
  gRNA
caaggacaccaccaggaagt

SEQ ID NO: 119877 - DNA, 20 bp, Artificial Sequence
  MKO10119877_B_Taar7b
  gRNA
aggcgagggcctggggaata

SEQ ID NO: 119878 - DNA, 20 bp, Artificial Sequence
  MKO10119878_B_Taar7b
  gRNA
acactcccctgccaacttcc

SEQ ID NO: 119879 - DNA, 20 bp, Artificial Sequence
  MKO10119879_B_Taar7d
  gRNA
agccaatgatgctgggctgg

SEQ ID NO: 119880 - DNA, 20 bp, Artificial Sequence
  MKO10119880_B_Taar7d
  gRNA
atcctctgacctaccccacc

SEQ ID NO: 119881 - DNA, 20 bp, Artificial Sequence
  MKO10119881_B_Taar7d
  gRNA
aggcgagggcctggagagta

SEQ ID NO: 119882 - DNA, 20 bp, Artificial Sequence
  MKO10119882_B_Taar7e
  gRNA
agcaagtgaagctgggctag

SEQ ID NO: 119883 - DNA, 20 bp, Artificial Sequence
  MKO10119883_B_Taar7e
  gRNA
acgtgggcgtgatgaacccc

SEQ ID NO: 119884 - DNA, 20 bp, Artificial Sequence
  MKO10119884_B_Taar7e
  gRNA
ctccttcattgatgccttcc

SEQ ID NO: 119885 - DNA, 20 bp, Artificial Sequence
  MKO10119885_B_Taar7f
  gRNA
tagctgatgaaactgtttcc

SEQ ID NO: 119886 - DNA, 20 bp, Artificial Sequence
  MKO10119886_B_Taar7f
  gRNA
tggctcctgtccatcagcta

SEQ ID NO: 119887 - DNA, 20 bp, Artificial Sequence
  MKO10119887_B_Taar7f
  gRNA
cacttgctcctgtgtaaatg

SEQ ID NO: 119888 - DNA, 20 bp, Artificial Sequence
  MKO10119888_B_Taar8a
  gRNA
ccttcacagttgttgtgatg

SEQ ID NO: 119889 - DNA, 20 bp, Artificial Sequence
  MKO10119889_B_Taar8a
  gRNA
acactgcactgctgtacacc

SEQ ID NO: 119890 - DNA, 20 bp, Artificial Sequence
  MKO10119890_B_Taar8a
  gRNA
accaatgcgtcaattgtgta

SEQ ID NO: 119891 - DNA, 20 bp, Artificial Sequence
  MKO10119891_B_Taar8b
  gRNA
acttctgtaagtgacaacag

SEQ ID NO: 119892 - DNA, 20 bp, Artificial Sequence
  MKO10119892_B_Taar8b
  gRNA
accaatgagtcaattgtgta

SEQ ID NO: 119893 - DNA, 20 bp, Artificial Sequence
  MKO10119893_B_Taar8b
  gRNA
gcccaccaagaagtcagcgc

SEQ ID NO: 119894 - DNA, 20 bp, Artificial Sequence
  MKO10119894_B_Taar8c
  gRNA
accaatgcatcaattgtgta

SEQ ID NO: 119895 - DNA, 20 bp, Artificial Sequence
  MKO10119895_B_Taar8c
  gRNA
catagctgtcacggaccctc

SEQ ID NO: 119896 - DNA, 20 bp, Artificial Sequence
  MKO10119896_B_Taar8c
  gRNA
ctctgctatgagaacacgaa

SEQ ID NO: 119897 - DNA, 20 bp, Artificial Sequence
  MKO10119897_B_Taar9
  gRNA
gcacacgcctacgaacttcc

SEQ ID NO: 119898 - DNA, 20 bp, Artificial Sequence
  MKO10119898_B_Taar9
  gRNA
tccgaccaagttcactgtat

SEQ ID NO: 119899 - DNA, 20 bp, Artificial Sequence
  MKO10119899_B_Taar9
  gRNA
ccaaaccgaggaccccatag

SEQ ID NO: 119900 - DNA, 20 bp, Artificial Sequence
  MKO10119900_B_Tab1
  gRNA
gctcctctccaccacatcaa

SEQ ID NO: 119901 - DNA, 20 bp, Artificial Sequence
  MKO10119901_B_Tab1
  gRNA
acgctgaaccaactccagag

SEQ ID NO: 119902 - DNA, 20 bp, Artificial Sequence
  MKO10119902_B_Tab1
  gRNA
aagctctacgttgccaatgt

SEQ ID NO: 119903 - DNA, 20 bp, Artificial Sequence
  MKO10119903_B_Tab2
  gRNA
ataaaagttatgaatagcgc

SEQ ID NO: 119904 - DNA, 20 bp, Artificial Sequence
  MKO10119904_B_Tab2
  gRNA
atgcactaacctttgggttt

SEQ ID NO: 119905 - DNA, 20 bp, Artificial Sequence
  MKO10119905_B_Tab2
  gRNA
agctctgctggtgcaccaga

SEQ ID NO: 119906 - DNA, 20 bp, Artificial Sequence
  MKO10119906_B_Tab3
  gRNA
acttaccgtgggaattgcag

SEQ ID NO: 119907 - DNA, 20 bp, Artificial Sequence
  MKO10119907_B_Tab3
  gRNA
gttgacctccttcaatctag

SEQ ID NO: 119908 - DNA, 20 bp, Artificial Sequence
  MKO10119908_B_Tab3
  gRNA
ctgcaccactgcaattccca

SEQ ID NO: 119909 - DNA, 20 bp, Artificial Sequence
  MKO10119909_B_Tac1
  gRNA
attaatccaaagaactgctg

SEQ ID NO: 119910 - DNA, 20 bp, Artificial Sequence
  MKO10119910_B_Tac1
  gRNA
cataaaacagattcctttgt

SEQ ID NO: 119911 - DNA, 20 bp, Artificial Sequence
  MKO10119911_B_Tac1
  gRNA
ttcctcagttgaaaaacaag

SEQ ID NO: 119912 - DNA, 20 bp, Artificial Sequence
  MKO10119912_B_Tac2
  gRNA
gaagagaacacccccagctt

SEQ ID NO: 119913 - DNA, 20 bp, Artificial Sequence
  MKO10119913_B_Tac2
  gRNA
cgacagccgccctgtctctc

SEQ ID NO: 119914 - DNA, 20 bp, Artificial Sequence
  MKO10119914_B_Tac2
  gRNA
tgtggaagtgatgtctcctt

SEQ ID NO: 119915 - DNA, 20 bp, Artificial Sequence
  MKO10119915_B_Tac4
  gRNA
cgtatagtgcaggatctcct

SEQ ID NO: 119916 - DNA, 20 bp, Artificial Sequence
  MKO10119916_B_Tac4
  gRNA
tccccatcagaccatagaac

SEQ ID NO: 119917 - DNA, 20 bp, Artificial Sequence
  MKO10119917_B_Tac4
  gRNA
ctgaagcttaagttcaatgc

SEQ ID NO: 119918 - DNA, 20 bp, Artificial Sequence
  MKO10119918_B_Tacc1
  gRNA
tggacgtggtccgcggtgcg

SEQ ID NO: 119919 - DNA, 20 bp, Artificial Sequence
  MKO10119919_B_Tacc1
  gRNA
ctctgagatcttcgagatca

SEQ ID NO: 119920 - DNA, 20 bp, Artificial Sequence
  MKO10119920_B_Tacc1
  gRNA
cgaagctcagcctctcgatt

SEQ ID NO: 119921 - DNA, 20 bp, Artificial Sequence
  MKO10119921_B_Tacc2
  gRNA
caccaggagttccgactctg

SEQ ID NO: 119922 - DNA, 20 bp, Artificial Sequence
  MKO10119922_B_Tacc2
  gRNA
tcagacagaggagaccgctt

SEQ ID NO: 119923 - DNA, 20 bp, Artificial Sequence
  MKO10119923_B_Tacc2
  gRNA
ttatttacagtgacacgttt

SEQ ID NO: 119924 - DNA, 20 bp, Artificial Sequence
  MKO10119924_B_Tacc3
  gRNA
tgacgttccagacaccacct

SEQ ID NO: 119925 - DNA, 20 bp, Artificial Sequence
  MKO10119925_B_Tacc3
  gRNA
gtaactcgccttctgctctt

SEQ ID NO: 119926 - DNA, 20 bp, Artificial Sequence
  MKO10119926_B_Tacc3
  gRNA
attgtttcagtcctaggtac

SEQ ID NO: 119927 - DNA, 20 bp, Artificial Sequence
  MKO10119927_B_Taco1
  gRNA
cagtggtcccaagtgccatc

SEQ ID NO: 119928 - DNA, 20 bp, Artificial Sequence
  MKO10119928_B_Taco1
  gRNA
aactccattgaacaggacac

SEQ ID NO: 119929 - DNA, 20 bp, Artificial Sequence
  MKO10119929_B_Taco1
  gRNA
tgtcttcagtgctgactcga

SEQ ID NO: 119930 - DNA, 20 bp, Artificial Sequence
  MKO10119930_B_Tacr1
  gRNA
gcaagtctctgccaagcgca

SEQ ID NO: 119931 - DNA, 20 bp, Artificial Sequence
  MKO10119931_B_Tacr1
  gRNA
ggtctactcacctgtcattg

SEQ ID NO: 119932 - DNA, 20 bp, Artificial Sequence
  MKO10119932_B_Tacr1
  gRNA
tgtgtaccttcgccatctgc

SEQ ID NO: 119933 - DNA, 20 bp, Artificial Sequence
  MKO10119933_B_Tacr2
  gRNA
gtgacaccggttgactctcc

SEQ ID NO: 119934 - DNA, 20 bp, Artificial Sequence
  MKO10119934_B_Tacr2
  gRNA
gatgacagcaataaccgcct

SEQ ID NO: 119935 - DNA, 20 bp, Artificial Sequence
  MKO10119935_B_Tacr2
  gRNA
cggcgcgtttccacagtgtg

SEQ ID NO: 119936 - DNA, 20 bp, Artificial Sequence
  MKO10119936_B_Tacr3
  gRNA
ccagagagtaattccaacga

SEQ ID NO: 119937 - DNA, 20 bp, Artificial Sequence
  MKO10119937_B_Tacr3
  gRNA
cgatctaccaacagttaaac

SEQ ID NO: 119938 - DNA, 20 bp, Artificial Sequence
  MKO10119938_B_Tacr3
  gRNA
tacttacgtgaaatgttgct

SEQ ID NO: 119939 - DNA, 20 bp, Artificial Sequence
  MKO10119939_B_Tacstd2
  gRNA
gtgagcccattgcccgacat

SEQ ID NO: 119940 - DNA, 20 bp, Artificial Sequence
  MKO10119940_B_Tacstd2
  gRNA
caacgatggcctctacgacc

SEQ ID NO: 119941 - DNA, 20 bp, Artificial Sequence
  MKO10119941_B_Tacstd2
  gRNA
gccggcggtgaggcgcttca

SEQ ID NO: 119942 - DNA, 20 bp, Artificial Sequence
  MKO10119942_B_Tada1
  gRNA
actgggccaacctgaagttg

SEQ ID NO: 119943 - DNA, 20 bp, Artificial Sequence
  MKO10119943_B_Tada1
  gRNA
cctcacacgttgtcagattt

SEQ ID NO: 119944 - DNA, 20 bp, Artificial Sequence
  MKO10119944_B_Tada1
  gRNA
tctgcttgaaccacaacttc

SEQ ID NO: 119945 - DNA, 20 bp, Artificial Sequence
  MKO10119945_B_Tada2a
  gRNA
tcttcacagtgtttcactcg

SEQ ID NO: 119946 - DNA, 20 bp, Artificial Sequence
  MKO10119946_B_Tada2a
  gRNA
agggagttacctgtaaacac

SEQ ID NO: 119947 - DNA, 20 bp, Artificial Sequence
  MKO10119947_B_Tada2a
  gRNA
agtccattacagcttctaaa

SEQ ID NO: 119948 - DNA, 20 bp, Artificial Sequence
  MKO10119948_B_Tada2b
  gRNA
atgccgagacgctcatcagt

SEQ ID NO: 119949 - DNA, 20 bp, Artificial Sequence
  MKO10119949_B_Tada2b
  gRNA
gccatcgagcagttcggctt

SEQ ID NO: 119950 - DNA, 20 bp, Artificial Sequence
  MKO10119950_B_Tada2b
  gRNA
atcgtccgccgtctaccagc

SEQ ID NO: 119951 - DNA, 20 bp, Artificial Sequence
  MKO10119951_B_Tada3
  gRNA
gctgggagtagtgtttccct

SEQ ID NO: 119952 - DNA, 20 bp, Artificial Sequence
  MKO10119952_B_Tada3
  gRNA
cgctgtgtcagggctccaaa

SEQ ID NO: 119953 - DNA, 20 bp, Artificial Sequence
  MKO10119953_B_Tada3
  gRNA
ttgtgccgacatcaccagtg

SEQ ID NO: 119954 - DNA, 20 bp, Artificial Sequence
  MKO10119954_B_Taf10
  gRNA
cagatcccagatgcagtgac

SEQ ID NO: 119955 - DNA, 20 bp, Artificial Sequence
  MKO10119955_B_Taf10
  gRNA
ctgaagcttcaaagccagcg

SEQ ID NO: 119956 - DNA, 20 bp, Artificial Sequence
  MKO10119956_B_Taf10
  gRNA
cctacagcactgcaaaatga

SEQ ID NO: 119957 - DNA, 20 bp, Artificial Sequence
  MKO10119957_B_Taf11
  gRNA
gccccttggacttcaacctc

SEQ ID NO: 119958 - DNA, 20 bp, Artificial Sequence
  MKO10119958_B_Taf11
  gRNA
cagatgtaacagcagccgag

SEQ ID NO: 119959 - DNA, 20 bp, Artificial Sequence
  MKO10119959_B_Taf11
  gRNA
aaagctgaaactagacatta

SEQ ID NO: 119960 - DNA, 20 bp, Artificial Sequence
  MKO10119960_B_Taf12
  gRNA
agtagatcctaatgagcagc

SEQ ID NO: 119961 - DNA, 20 bp, Artificial Sequence
  MKO10119961_B_Taf12
  gRNA
cagagcgccagtggaacatg

SEQ ID NO: 119962 - DNA, 20 bp, Artificial Sequence
  MKO10119962_B_Taf12
  gRNA
caaaaaagcatgtaccacag

SEQ ID NO: 119963 - DNA, 20 bp, Artificial Sequence
  MKO10119963_B_Taf13
  gRNA
aaagtctctttctcttcccc

SEQ ID NO: 119964 - DNA, 20 bp, Artificial Sequence
  MKO10119964_B_Taf13
  gRNA
gaggaggagaatgaagaaat

SEQ ID NO: 119965 - DNA, 20 bp, Artificial Sequence
  MKO10119965_B_Taf13
  gRNA
acggtgtcaagatccatagt

SEQ ID NO: 119966 - DNA, 20 bp, Artificial Sequence
  MKO10119966_B_Taf15
  gRNA
caaaactatggtggttactc

SEQ ID NO: 119967 - DNA, 20 bp, Artificial Sequence
  MKO10119967_B_Taf15
  gRNA
tctggaagttacagtcagtc

SEQ ID NO: 119968 - DNA, 20 bp, Artificial Sequence
  MKO10119968_B_Taf15
  gRNA
aatcaaggcagtcaaggcta

SEQ ID NO: 119969 - DNA, 20 bp, Artificial Sequence
  MKO10119969_B_Taf1a
  gRNA
ctcagacaccgacaagagac

SEQ ID NO: 119970 - DNA, 20 bp, Artificial Sequence
  MKO10119970_B_Taf1a
  gRNA
cacaagcacgttgaagctgt

SEQ ID NO: 119971 - DNA, 20 bp, Artificial Sequence
  MKO10119971_B_Taf1a
  gRNA
gcacagttacctgcagaccc

SEQ ID NO: 119972 - DNA, 20 bp, Artificial Sequence
  MKO10119972_B_Taf1b
  gRNA
ctaccttcagaagagcaaac

SEQ ID NO: 119973 - DNA, 20 bp, Artificial Sequence
  MKO10119973_B_Taf1b
  gRNA
aggcctgtttgctcttctga

SEQ ID NO: 119974 - DNA, 20 bp, Artificial Sequence
  MKO10119974_B_Taf1b
  gRNA
ctgtctcagccccctgttga

SEQ ID NO: 119975 - DNA, 20 bp, Artificial Sequence
  MKO10119975_B_Taf1c
  gRNA
cagcgcgaagaagctgcttc

SEQ ID NO: 119976 - DNA, 20 bp, Artificial Sequence
  MKO10119976_B_Taf1c
  gRNA
cctttgccaagaacctactg

SEQ ID NO: 119977 - DNA, 20 bp, Artificial Sequence
  MKO10119977_B_Taf1c
  gRNA
actggtagcagtgacctccc

SEQ ID NO: 119978 - DNA, 20 bp, Artificial Sequence
  MKO10119978_B_Taf1d
  gRNA
acttacaatggctcttcaat

SEQ ID NO: 119979 - DNA, 20 bp, Artificial Sequence
  MKO10119979_B_Taf1d
  gRNA
gtgactcttctatagaacca

SEQ ID NO: 119980 - DNA, 20 bp, Artificial Sequence
  MKO10119980_B_Taf1d
  gRNA
agatgaagcaacaaatcctc

SEQ ID NO: 119981 - DNA, 20 bp, Artificial Sequence
  MKO10119981_B_Taf1
  gRNA
aaggaccaagatgatattac

SEQ ID NO: 119982 - DNA, 20 bp, Artificial Sequence
  MKO10119982_B_Taf1
  gRNA
taccaccagtaatatcatct

SEQ ID NO: 119983 - DNA, 20 bp, Artificial Sequence
  MKO10119983_B_Taf1
  gRNA
gcaagcttcccattgtctgc

SEQ ID NO: 119984 - DNA, 20 bp, Artificial Sequence
  MKO10119984_B_Taf2
  gRNA
cttccagcgaaaatcagttg

SEQ ID NO: 119985 - DNA, 20 bp, Artificial Sequence
  MKO10119985_B_Taf2
  gRNA
gagctctggaaacatgtcga

SEQ ID NO: 119986 - DNA, 20 bp, Artificial Sequence
  MKO10119986_B_Taf2
  gRNA
tgttgatacagacgacctga

SEQ ID NO: 119987 - DNA, 20 bp, Artificial Sequence
  MKO10119987_B_Taf3
  gRNA
gcgggcttagcctccggggc

SEQ ID NO: 119988 - DNA, 20 bp, Artificial Sequence
  MKO10119988_B_Taf3
  gRNA
tggccgaacagaccccattt

SEQ ID NO: 119989 - DNA, 20 bp, Artificial Sequence
  MKO10119989_B_Taf3
  gRNA
ccccaagtccagttatcccc

SEQ ID NO: 119990 - DNA, 20 bp, Artificial Sequence
  MKO10119990_B_Taf4a
  gRNA
gccccagggactgttcgttg

SEQ ID NO: 119991 - DNA, 20 bp, Artificial Sequence
  MKO10119991_B_Taf4a
  gRNA
caggaacacctattattgca

SEQ ID NO: 119992 - DNA, 20 bp, Artificial Sequence
  MKO10119992_B_Taf4a
  gRNA
tcttaccgtggcagctgtag

SEQ ID NO: 119993 - DNA, 20 bp, Artificial Sequence
  MKO10119993_B_Taf4b
  gRNA
tacttgtcctgaggaagtac

SEQ ID NO: 119994 - DNA, 20 bp, Artificial Sequence
  MKO10119994_B_Taf4b
  gRNA
agtaaagatctgtacagtgc

SEQ ID NO: 119995 - DNA, 20 bp, Artificial Sequence
  MKO10119995_B_Taf4b
  gRNA
ttaataaaactagcatgtag

SEQ ID NO: 119996 - DNA, 20 bp, Artificial Sequence
  MKO10119996_B_Taf5l
  gRNA
tggggctgcagacaccgcat

SEQ ID NO: 119997 - DNA, 20 bp, Artificial Sequence
  MKO10119997_B_Taf5l
  gRNA
tgtcctgctacctcaaacgc

SEQ ID NO: 119998 - DNA, 20 bp, Artificial Sequence
  MKO10119998_B_Taf5l
  gRNA
caccggtgagaaagctcctc

SEQ ID NO: 119999 - DNA, 20 bp, Artificial Sequence
  MKO10119999_B_Taf5
  gRNA
gttgggataactctgctcga

SEQ ID NO: 120000 - DNA, 20 bp, Artificial Sequence
  MKO10120000_B_Taf5
  gRNA
actaccaaacgagtgcgcct

SEQ ID NO: 120001 - DNA, 20 bp, Artificial Sequence
  MKO10120001_B_Taf5
  gRNA
ccaatgccccgcctcaaaac

SEQ ID NO: 120002 - DNA, 20 bp, Artificial Sequence
  MKO10120002_B_Taf6l
  gRNA
tctagagctgagtgacgagg

SEQ ID NO: 120003 - DNA, 20 bp, Artificial Sequence
  MKO10120003_B_Taf6l
  gRNA
caccgtcagcttccttcgtt

SEQ ID NO: 120004 - DNA, 20 bp, Artificial Sequence
  MKO10120004_B_Taf6l
  gRNA
tctcaggtggagcagcgtgg

SEQ ID NO: 120005 - DNA, 20 bp, Artificial Sequence
  MKO10120005_B_Taf6
  gRNA
atccctttccggtttgcctc

SEQ ID NO: 120006 - DNA, 20 bp, Artificial Sequence
  MKO10120006_B_Taf6
  gRNA
caatgcatagtcaatgtcac

SEQ ID NO: 120007 - DNA, 20 bp, Artificial Sequence
  MKO10120007_B_Taf6
  gRNA
tgcattgaagttaaagaatg

SEQ ID NO: 120008 - DNA, 20 bp, Artificial Sequence
  MKO10120008_B_Taf7l
  gRNA
gaagaaccagttgtctctac

SEQ ID NO: 120009 - DNA, 20 bp, Artificial Sequence
  MKO10120009_B_Taf7l
  gRNA
ggagaatgaggctcaccttc

SEQ ID NO: 120010 - DNA, 20 bp, Artificial Sequence
  MKO10120010_B_Taf7l
  gRNA
aggaacaagcttatgctgtc

SEQ ID NO: 120011 - DNA, 20 bp, Artificial Sequence
  MKO10120011_B_Taf7
  gRNA
cagaagctgtcagtactcgt

SEQ ID NO: 120012 - DNA, 20 bp, Artificial Sequence
  MKO10120012_B_Taf7
  gRNA
cactgccctcctcaccgtag

SEQ ID NO: 120013 - DNA, 20 bp, Artificial Sequence
  MKO10120013_B_Taf7
  gRNA
gcccccagaatatgccgcta

SEQ ID NO: 120014 - DNA, 20 bp, Artificial Sequence
  MKO10120014_B_Taf8
  gRNA
ccggttctgccctgcagtga

SEQ ID NO: 120015 - DNA, 20 bp, Artificial Sequence
  MKO10120015_B_Taf8
  gRNA
tgtctccacagacgctttct

SEQ ID NO: 120016 - DNA, 20 bp, Artificial Sequence
  MKO10120016_B_Taf8
  gRNA
ctctacctgcctatgcaaaa

SEQ ID NO: 120017 - DNA, 20 bp, Artificial Sequence
  MKO10120017_B_Taf9b
  gRNA
gttcttgataggcgccatct

SEQ ID NO: 120018 - DNA, 20 bp, Artificial Sequence
  MKO10120018_B_Taf9b
  gRNA
aggactggtcagcccgacac

SEQ ID NO: 120019 - DNA, 20 bp, Artificial Sequence
  MKO10120019_B_Taf9b
  gRNA
ggcagtctgggtcctgcata

SEQ ID NO: 120020 - DNA, 20 bp, Artificial Sequence
  MKO10120020_B_Taf9
  gRNA
tttcagtgcatttgctgact

SEQ ID NO: 120021 - DNA, 20 bp, Artificial Sequence
  MKO10120021_B_Taf9
  gRNA
tatcatggagtctggcaaga

SEQ ID NO: 120022 - DNA, 20 bp, Artificial Sequence
  MKO10120022_B_Taf9
  gRNA
aaagacttaagcctatagtt

SEQ ID NO: 120023 - DNA, 20 bp, Artificial Sequence
  MKO10120023_B_Tagap1
  gRNA
tctccagcgtctgcaccagc

SEQ ID NO: 120024 - DNA, 20 bp, Artificial Sequence
  MKO10120024_B_Tagap1
  gRNA
tttaaaggctgaactcagag

SEQ ID NO: 120025 - DNA, 20 bp, Artificial Sequence
  MKO10120025_B_Tagap1
  gRNA
agaagaacaagaaaaagtag

SEQ ID NO: 120026 - DNA, 20 bp, Artificial Sequence
  MKO10120026_B_Tagap
  gRNA
cacacctacctggatgggtc

SEQ ID NO: 120027 - DNA, 20 bp, Artificial Sequence
  MKO10120027_B_Tagap
  gRNA
cactctcacatgatgtcagc

SEQ ID NO: 120028 - DNA, 20 bp, Artificial Sequence
  MKO10120028_B_Tagap
  gRNA
gacagcatttgccagctaac

SEQ ID NO: 120029 - DNA, 20 bp, Artificial Sequence
  MKO10120029_B_Tagln2
  gRNA
gcagcggacactaatgaacc

SEQ ID NO: 120030 - DNA, 20 bp, Artificial Sequence
  MKO10120030_B_Tagln2
  gRNA
gaacgtgattgggttgcaga

SEQ ID NO: 120031 - DNA, 20 bp, Artificial Sequence
  MKO10120031_B_Tagln2
  gRNA
gccgtaggaaggtcccctgt

SEQ ID NO: 120032 - DNA, 20 bp, Artificial Sequence
  MKO10120032_B_Tagln3
  gRNA
tgacggggtacgggatgccc

SEQ ID NO: 120033 - DNA, 20 bp, Artificial Sequence
  MKO10120033_B_Tagln3
  gRNA
catagacctcggcagctttc

SEQ ID NO: 120034 - DNA, 20 bp, Artificial Sequence
  MKO10120034_B_Tagln3
  gRNA
gctaccggggagagccatcc

SEQ ID NO: 120035 - DNA, 20 bp, Artificial Sequence
  MKO10120035_B_Tagln
  gRNA
aagcccaggcgcccacgatc

SEQ ID NO: 120036 - DNA, 20 bp, Artificial Sequence
  MKO10120036_B_Tagln
  gRNA
gcacgtcattggccttcaaa

SEQ ID NO: 120037 - DNA, 20 bp, Artificial Sequence
  MKO10120037_B_Tagln
  gRNA
tgagggatcgaagccagtga

SEQ ID NO: 120038 - DNA, 20 bp, Artificial Sequence
  MKO10120038_B_Tal1
  gRNA
tctgctgccgccatcgttcc

SEQ ID NO: 120039 - DNA, 20 bp, Artificial Sequence
  MKO10120039_B_Tal1
  gRNA
gaggccctccccatatgaga

SEQ ID NO: 120040 - DNA, 20 bp, Artificial Sequence
  MKO10120040_B_Tal1
  gRNA
cctcttcacccggttgttgt

SEQ ID NO: 120041 - DNA, 20 bp, Artificial Sequence
  MKO10120041_B_Tal2
  gRNA
aatgaggtatatcaacttct

SEQ ID NO: 120042 - DNA, 20 bp, Artificial Sequence
  MKO10120042_B_Tal2
  gRNA
ccaagccacggggctcccta

SEQ ID NO: 120043 - DNA, 20 bp, Artificial Sequence
  MKO10120043_B_Tal2
  gRNA
aaagacccgcctgccagatg

SEQ ID NO: 120044 - DNA, 20 bp, Artificial Sequence
  MKO10120044_B_Taldo1
  gRNA
atcgagctttacaaagaagc

SEQ ID NO: 120045 - DNA, 20 bp, Artificial Sequence
  MKO10120045_B_Taldo1
  gRNA
acaccttgcatcaacttctg

SEQ ID NO: 120046 - DNA, 20 bp, Artificial Sequence
  MKO10120046_B_Taldo1
  gRNA
caccaacccatccctgatcc

SEQ ID NO: 120047 - DNA, 20 bp, Artificial Sequence
  MKO10120047_B_Tamm41
  gRNA
gacctgttcatagagatagc

SEQ ID NO: 120048 - DNA, 20 bp, Artificial Sequence
  MKO10120048_B_Tamm41
  gRNA
tatataggttattccagttc

SEQ ID NO: 120049 - DNA, 20 bp, Artificial Sequence
  MKO10120049_B_Tamm41
  gRNA
ccttcccgtcacacctgatc

SEQ ID NO: 120050 - DNA, 20 bp, Artificial Sequence
  MKO10120050_B_Tanc1
  gRNA
aagggctgatgccttgactc

SEQ ID NO: 120051 - DNA, 20 bp, Artificial Sequence
  MKO10120051_B_Tanc1
  gRNA
acgataagtgtcctctgttg

SEQ ID NO: 120052 - DNA, 20 bp, Artificial Sequence
  MKO10120052_B_Tanc1
  gRNA
tatcgtgtgagcttggccaa

SEQ ID NO: 120053 - DNA, 20 bp, Artificial Sequence
  MKO10120053_B_Tanc2
  gRNA
agtggtggaacagcatagtc

SEQ ID NO: 120054 - DNA, 20 bp, Artificial Sequence
  MKO10120054_B_Tanc2
  gRNA
agccccatagctacagtcct

SEQ ID NO: 120055 - DNA, 20 bp, Artificial Sequence
  MKO10120055_B_Tanc2
  gRNA
gctgcatttgtactgactgg

SEQ ID NO: 120056 - DNA, 20 bp, Artificial Sequence
  MKO10120056_B_Tango2
  gRNA
cgtccaagttggcagacttc

SEQ ID NO: 120057 - DNA, 20 bp, Artificial Sequence
  MKO10120057_B_Tango2
  gRNA
tctattcacagcacgtcaaa

SEQ ID NO: 120058 - DNA, 20 bp, Artificial Sequence
  MKO10120058_B_Tango2
  gRNA
gagcctattgtcttgacacc

SEQ ID NO: 120059 - DNA, 20 bp, Artificial Sequence
  MKO10120059_B_Tango6
  gRNA
ctgcagggtccttctcgacc

SEQ ID NO: 120060 - DNA, 20 bp, Artificial Sequence
  MKO10120060_B_Tango6
  gRNA
attgaaatcagctacgaggc

SEQ ID NO: 120061 - DNA, 20 bp, Artificial Sequence
  MKO10120061_B_Tango6
  gRNA
catgtgacagcgggcgcggc

SEQ ID NO: 120062 - DNA, 20 bp, Artificial Sequence
  MKO10120062_B_Tank
  gRNA
gtgatttcagcctgtcaatt

SEQ ID NO: 120063 - DNA, 20 bp, Artificial Sequence
  MKO10120063_B_Tank
  gRNA
tgtcttgcagataacagtta

SEQ ID NO: 120064 - DNA, 20 bp, Artificial Sequence
  MKO10120064_B_Tank
  gRNA
cctagtttcactttatcatg

SEQ ID NO: 120065 - DNA, 20 bp, Artificial Sequence
  MKO10120065_B_Taok1
  gRNA
atttacgtgaacacacagca

SEQ ID NO: 120066 - DNA, 20 bp, Artificial Sequence
  MKO10120066_B_Taok1
  gRNA
agatgtgcgtactaatgaag

SEQ ID NO: 120067 - DNA, 20 bp, Artificial Sequence
  MKO10120067_B_Taok1
  gRNA
gaaatggcaggatattatta

SEQ ID NO: 120068 - DNA, 20 bp, Artificial Sequence
  MKO10120068_B_Taok2
  gRNA
atcctaataccattcagtac

SEQ ID NO: 120069 - DNA, 20 bp, Artificial Sequence
  MKO10120069_B_Taok2
  gRNA
gctggtgatggagtattgcc

SEQ ID NO: 120070 - DNA, 20 bp, Artificial Sequence
  MKO10120070_B_Taok2
  gRNA
ctggggccatcatgccagct

SEQ ID NO: 120071 - DNA, 20 bp, Artificial Sequence
  MKO10120071_B_Taok3
  gRNA
gagatcgctgctatcaccca

SEQ ID NO: 120072 - DNA, 20 bp, Artificial Sequence
  MKO10120072_B_Taok3
  gRNA
cttaacagcgaccacctcgt

SEQ ID NO: 120073 - DNA, 20 bp, Artificial Sequence
  MKO10120073_B_Taok3
  gRNA
actttcactccctgattcac

SEQ ID NO: 120074 - DNA, 20 bp, Artificial Sequence
  MKO10120074_B_Tap1
  gRNA
ctagcttcacccgcaacata

SEQ ID NO: 120075 - DNA, 20 bp, Artificial Sequence
  MKO10120075_B_Tap1
  gRNA
gccgtccttcgccaggagac

SEQ ID NO: 120076 - DNA, 20 bp, Artificial Sequence
  MKO10120076_B_Tap1
  gRNA
aacgtgtgcgagtccattag

SEQ ID NO: 120077 - DNA, 20 bp, Artificial Sequence
  MKO10120077_B_Tap2
  gRNA
aaagctgctctcgtatccgc

SEQ ID NO: 120078 - DNA, 20 bp, Artificial Sequence
  MKO10120078_B_Tap2
  gRNA
tgcacacatacctgatggcg

SEQ ID NO: 120079 - DNA, 20 bp, Artificial Sequence
  MKO10120079_B_Tap2
  gRNA
gcgcaccacctgccccgcct

SEQ ID NO: 120080 - DNA, 20 bp, Artificial Sequence
  MKO10120080_B_Tapbpl
  gRNA
atttggcaaaaccctcatgc

SEQ ID NO: 120081 - DNA, 20 bp, Artificial Sequence
  MKO10120081_B_Tapbpl
  gRNA
gcagtctaagatgatgtccg

SEQ ID NO: 120082 - DNA, 20 bp, Artificial Sequence
  MKO10120082_B_Tapbpl
  gRNA
gccgccactccacgccagtg

SEQ ID NO: 120083 - DNA, 20 bp, Artificial Sequence
  MKO10120083_B_Tapbp
  gRNA
gccttcaggcggtaccccgc

SEQ ID NO: 120084 - DNA, 20 bp, Artificial Sequence
  MKO10120084_B_Tapbp
  gRNA
accatccgccaccattccga

SEQ ID NO: 120085 - DNA, 20 bp, Artificial Sequence
  MKO10120085_B_Tapbp
  gRNA
cgcctacgcaccctccgccc

SEQ ID NO: 120086 - DNA, 20 bp, Artificial Sequence
  MKO10120086_B_Tapt1
  gRNA
tatgcgaataccaagagaat

SEQ ID NO: 120087 - DNA, 20 bp, Artificial Sequence
  MKO10120087_B_Tapt1
  gRNA
agcgccagaaagactcttaa

SEQ ID NO: 120088 - DNA, 20 bp, Artificial Sequence
  MKO10120088_B_Tapt1
  gRNA
acttaccttaagccatagca

SEQ ID NO: 120089 - DNA, 20 bp, Artificial Sequence
  MKO10120089_B_Tarbp2
  gRNA
gcacacctgcagagcaccga

SEQ ID NO: 120090 - DNA, 20 bp, Artificial Sequence
  MKO10120090_B_Tarbp2
  gRNA
tacctggttagtacagcaga

SEQ ID NO: 120091 - DNA, 20 bp, Artificial Sequence
  MKO10120091_B_Tarbp2
  gRNA
aaggagctggtggtgcaaaa

SEQ ID NO: 120092 - DNA, 20 bp, Artificial Sequence
  MKO10120092_B_Tardbp
  gRNA
gttgtgacattactttcact

SEQ ID NO: 120093 - DNA, 20 bp, Artificial Sequence
  MKO10120093_B_Tardbp
  gRNA
atataccttatcatctgcaa

SEQ ID NO: 120094 - DNA, 20 bp, Artificial Sequence
  MKO10120094_B_Tardbp
  gRNA
cccctggaaaacaactgagc

SEQ ID NO: 120095 - DNA, 20 bp, Artificial Sequence
  MKO10120095_B_Tarm1
  gRNA
cgtaaagtttgcgttactga

SEQ ID NO: 120096 - DNA, 20 bp, Artificial Sequence
  MKO10120096_B_Tarm1
  gRNA
ggtgaggttgctgtcagttg

SEQ ID NO: 120097 - DNA, 20 bp, Artificial Sequence
  MKO10120097_B_Tarm1
  gRNA
gtcgaggcagcaagatcttg

SEQ ID NO: 120098 - DNA, 20 bp, Artificial Sequence
  MKO10120098_B_Tars2
  gRNA
ctttaagcttcatctgatcg

SEQ ID NO: 120099 - DNA, 20 bp, Artificial Sequence
  MKO10120099_B_Tars2
  gRNA
gaagtgatatcttaatagcc

SEQ ID NO: 120100 - DNA, 20 bp, Artificial Sequence
  MKO10120100_B_Tars2
  gRNA
aaatggagaactttacgatc

SEQ ID NO: 120101 - DNA, 20 bp, Artificial Sequence
  MKO10120101_B_Tarsl2
  gRNA
cagcgacttacctcccggcc

SEQ ID NO: 120102 - DNA, 20 bp, Artificial Sequence
  MKO10120102_B_Tarsl2
  gRNA
ctcccccaggatgtgagcgc

SEQ ID NO: 120103 - DNA, 20 bp, Artificial Sequence
  MKO10120103_B_Tarsl2
  gRNA
gcctccatagtaaagttcca

SEQ ID NO: 120104 - DNA, 20 bp, Artificial Sequence
  MKO10120104_B_Tars
  gRNA
tgacaacaccgttgttgcta

SEQ ID NO: 120105 - DNA, 20 bp, Artificial Sequence
  MKO10120105_B_Tars
  gRNA
agcagaacacgattctatcc

SEQ ID NO: 120106 - DNA, 20 bp, Artificial Sequence
  MKO10120106_B_Tars
  gRNA
tcttcaggtggatgccagcg

SEQ ID NO: 120107 - DNA, 20 bp, Artificial Sequence
  MKO10120107_B_Tas1r1
  gRNA
gccgcactatgacttccacc

SEQ ID NO: 120108 - DNA, 20 bp, Artificial Sequence
  MKO10120108_B_Tas1r1
  gRNA
gttattatgacatcatcgcc

SEQ ID NO: 120109 - DNA, 20 bp, Artificial Sequence
  MKO10120109_B_Tas1r1
  gRNA
cttgctgggcgagcaccctc

SEQ ID NO: 120110 - DNA, 20 bp, Artificial Sequence
  MKO10120110_B_Tas1r2
  gRNA
ctggtgagcgatgacgatta

SEQ ID NO: 120111 - DNA, 20 bp, Artificial Sequence
  MKO10120111_B_Tas1r2
  gRNA
cttgttcgtcgaagaagagc

SEQ ID NO: 120112 - DNA, 20 bp, Artificial Sequence
  MKO10120112_B_Tas1r2
  gRNA
cctactcccccaccgagacg

SEQ ID NO: 120113 - DNA, 20 bp, Artificial Sequence
  MKO10120113_B_Tas1r3
  gRNA
acttcccaatattgcccgtg

SEQ ID NO: 120114 - DNA, 20 bp, Artificial Sequence
  MKO10120114_B_Tas1r3
  gRNA
acagtaccaaccccgtgtgc

SEQ ID NO: 120115 - DNA, 20 bp, Artificial Sequence
  MKO10120115_B_Tas1r3
  gRNA
tacacctgtattacatactg

SEQ ID NO: 120116 - DNA, 20 bp, Artificial Sequence
  MKO10120116_B_Tas2r102
  gRNA
catagtgttgtcaaacttct

SEQ ID NO: 120117 - DNA, 20 bp, Artificial Sequence
  MKO10120117_B_Tas2r102
  gRNA
tgagcaatgaccttgcaatg

SEQ ID NO: 120118 - DNA, 20 bp, Artificial Sequence
  MKO10120118_B_Tas2r102
  gRNA
tcagaatagctaactgctcc

SEQ ID NO: 120119 - DNA, 20 bp, Artificial Sequence
  MKO10120119_B_Tas2r103
  gRNA
attgataactattataagtc

SEQ ID NO: 120120 - DNA, 20 bp, Artificial Sequence
  MKO10120120_B_Tas2r103
  gRNA
tgaccaatcatttcagtgtc

SEQ ID NO: 120121 - DNA, 20 bp, Artificial Sequence
  MKO10120121_B_Tas2r103
  gRNA
tgttacttgtactacagttc

SEQ ID NO: 120122 - DNA, 20 bp, Artificial Sequence
  MKO10120122_B_Tas2r104
  gRNA
agcaggcagatgcaatccat

SEQ ID NO: 120123 - DNA, 20 bp, Artificial Sequence
  MKO10120123_B_Tas2r104
  gRNA
atctaaagttattatccata

SEQ ID NO: 120124 - DNA, 20 bp, Artificial Sequence
  MKO10120124_B_Tas2r104
  gRNA
taagtaactcactcttctcc

SEQ ID NO: 120125 - DNA, 20 bp, Artificial Sequence
  MKO10120125_B_Tas2r105
  gRNA
cccagcttcaacagttgcaa

SEQ ID NO: 120126 - DNA, 20 bp, Artificial Sequence
  MKO10120126_B_Tas2r105
  gRNA
ctataaaatacaagacgaaa

SEQ ID NO: 120127 - DNA, 20 bp, Artificial Sequence
  MKO10120127_B_Tas2r105
  gRNA
tggtggcaaaccagacagtc

SEQ ID NO: 120128 - DNA, 20 bp, Artificial Sequence
  MKO10120128_B_Tas2r106
  gRNA
ctatgaaatgcaagattaac

SEQ ID NO: 120129 - DNA, 20 bp, Artificial Sequence
  MKO10120129_B_Tas2r106
  gRNA
taaagaagaatataactccc

SEQ ID NO: 120130 - DNA, 20 bp, Artificial Sequence
  MKO10120130_B_Tas2r106
  gRNA
ttatcaatcatacaagtata

SEQ ID NO: 120131 - DNA, 20 bp, Artificial Sequence
  MKO10120131_B_Tas2r107
  gRNA
cctcactagtgacaacacaa

SEQ ID NO: 120132 - DNA, 20 bp, Artificial Sequence
  MKO10120132_B_Tas2r107
  gRNA
taaccaaagtgtgaccaatc

SEQ ID NO: 120133 - DNA, 20 bp, Artificial Sequence
  MKO10120133_B_Tas2r107
  gRNA
ttctcaatcacttaagtgtc

SEQ ID NO: 120134 - DNA, 20 bp, Artificial Sequence
  MKO10120134_B_Tas2r108
  gRNA
cttgacgttagtagcctctt

SEQ ID NO: 120135 - DNA, 20 bp, Artificial Sequence
  MKO10120135_B_Tas2r108
  gRNA
tagtgatggccaagctgaac

SEQ ID NO: 120136 - DNA, 20 bp, Artificial Sequence
  MKO10120136_B_Tas2r108
  gRNA
agcagggtagcaattgaata

SEQ ID NO: 120137 - DNA, 20 bp, Artificial Sequence
  MKO10120137_B_Tas2r109
  gRNA
ctactagcatgaaccagagc

SEQ ID NO: 120138 - DNA, 20 bp, Artificial Sequence
  MKO10120138_B_Tas2r109
  gRNA
agtctagtagtaactaaata

SEQ ID NO: 120139 - DNA, 20 bp, Artificial Sequence
  MKO10120139_B_Tas2r109
  gRNA
taataaaatcctcaccgctt

SEQ ID NO: 120140 - DNA, 20 bp, Artificial Sequence
  MKO10120140_B_Tas2r110
  gRNA
cacattaaagccttgcaaac

SEQ ID NO: 120141 - DNA, 20 bp, Artificial Sequence
  MKO10120141_B_Tas2r110
  gRNA
catagcactagtgaatatca

SEQ ID NO: 120142 - DNA, 20 bp, Artificial Sequence
  MKO10120142_B_Tas2r110
  gRNA
catacatgcttagagataac

SEQ ID NO: 120143 - DNA, 20 bp, Artificial Sequence
  MKO10120143_B_Tas2r113
  gRNA
tacccagcattacacgaaac

SEQ ID NO: 120144 - DNA, 20 bp, Artificial Sequence
  MKO10120144_B_Tas2r113
  gRNA
aatatgcagcacaccgccaa

SEQ ID NO: 120145 - DNA, 20 bp, Artificial Sequence
  MKO10120145_B_Tas2r113
  gRNA
ttaccagtttcgtgtaatgc

SEQ ID NO: 120146 - DNA, 20 bp, Artificial Sequence
  MKO10120146_B_Tas2r114
  gRNA
atgagctcaattatgttgac

SEQ ID NO: 120147 - DNA, 20 bp, Artificial Sequence
  MKO10120147_B_Tas2r114
  gRNA
agataagcaagcaccctatc

SEQ ID NO: 120148 - DNA, 20 bp, Artificial Sequence
  MKO10120148_B_Tas2r114
  gRNA
cattgcacttgtaaactgta

SEQ ID NO: 120149 - DNA, 20 bp, Artificial Sequence
  MKO10120149_B_Tas2r115
  gRNA
tacaatggtctatgaatcca

SEQ ID NO: 120150 - DNA, 20 bp, Artificial Sequence
  MKO10120150_B_Tas2r115
  gRNA
gtgcaagcgtgagaaaacct

SEQ ID NO: 120151 - DNA, 20 bp, Artificial Sequence
  MKO10120151_B_Tas2r115
  gRNA
acttgctttcagtactgaag

SEQ ID NO: 120152 - DNA, 20 bp, Artificial Sequence
  MKO10120152_B_Tas2r116
  gRNA
ctatcagtcatccattgtcc

SEQ ID NO: 120153 - DNA, 20 bp, Artificial Sequence
  MKO10120153_B_Tas2r116
  gRNA
taaccacagcagtgcaattc

SEQ ID NO: 120154 - DNA, 20 bp, Artificial Sequence
  MKO10120154_B_Tas2r116
  gRNA
tcttagcattgcccagaatc

SEQ ID NO: 120155 - DNA, 20 bp, Artificial Sequence
  MKO10120155_B_Tas2r117
  gRNA
aaatgactgaaagtgtgctc

SEQ ID NO: 120156 - DNA, 20 bp, Artificial Sequence
  MKO10120156_B_Tas2r117
  gRNA
atattcatttgtccacatgt

SEQ ID NO: 120157 - DNA, 20 bp, Artificial Sequence
  MKO10120157_B_Tas2r117
  gRNA
tagccaaccatttcagcatc

SEQ ID NO: 120158 - DNA, 20 bp, Artificial Sequence
  MKO10120158_B_Tas2r118
  gRNA
ctagggtgactaattccatc

SEQ ID NO: 120159 - DNA, 20 bp, Artificial Sequence
  MKO10120159_B_Tas2r118
  gRNA
tattcctttcttcgtgttcc

SEQ ID NO: 120160 - DNA, 20 bp, Artificial Sequence
  MKO10120160_B_Tas2r118
  gRNA
catcttactcacagtctcat

SEQ ID NO: 120161 - DNA, 20 bp, Artificial Sequence
  MKO10120161_B_Tas2r119
  gRNA
aattaagacaatcgagtgta

SEQ ID NO: 120162 - DNA, 20 bp, Artificial Sequence
  MKO10120162_B_Tas2r119
  gRNA
taacgtgtgtctcaccaaac

SEQ ID NO: 120163 - DNA, 20 bp, Artificial Sequence
  MKO10120163_B_Tas2r119
  gRNA
ctgacgagggcatgtctgct

SEQ ID NO: 120164 - DNA, 20 bp, Artificial Sequence
  MKO10120164_B_Tas2r120
  gRNA
ctgataaacattgtaccatt

SEQ ID NO: 120165 - DNA, 20 bp, Artificial Sequence
  MKO10120165_B_Tas2r120
  gRNA
tccccagccaagtggtaaaa

SEQ ID NO: 120166 - DNA, 20 bp, Artificial Sequence
  MKO10120166_B_Tas2r120
  gRNA
tattcttgagatgtttactc

SEQ ID NO: 120167 - DNA, 20 bp, Artificial Sequence
  MKO10120167_B_Tas2r121
  gRNA
aatagccagtttctccaaac

SEQ ID NO: 120168 - DNA, 20 bp, Artificial Sequence
  MKO10120168_B_Tas2r121
  gRNA
atttaaggcaagccagtctt

SEQ ID NO: 120169 - DNA, 20 bp, Artificial Sequence
  MKO10120169_B_Tas2r121
  gRNA
tgctgataaactgcattgat

SEQ ID NO: 120170 - DNA, 20 bp, Artificial Sequence
  MKO10120170_B_Tas2r122
  gRNA
ccttaggaggatgaaactac

SEQ ID NO: 120171 - DNA, 20 bp, Artificial Sequence
  MKO10120171_B_Tas2r122
  gRNA
ccagctttctcaatacatgc

SEQ ID NO: 120172 - DNA, 20 bp, Artificial Sequence
  MKO10120172_B_Tas2r122
  gRNA
tagcaacattatgcttattg

SEQ ID NO: 120173 - DNA, 20 bp, Artificial Sequence
  MKO10120173_B_Tas2r123
  gRNA
ttctcaattgctgcttatgt

SEQ ID NO: 120174 - DNA, 20 bp, Artificial Sequence
  MKO10120174_B_Tas2r123
  gRNA
ccactcatttgtactgattc

SEQ ID NO: 120175 - DNA, 20 bp, Artificial Sequence
  MKO10120175_B_Tas2r123
  gRNA
tagtaagccagatgctaaaa

SEQ ID NO: 120176 - DNA, 20 bp, Artificial Sequence
  MKO10120176_B_Tas2r124
  gRNA
aagatctgccagtagcaatt

SEQ ID NO: 120177 - DNA, 20 bp, Artificial Sequence
  MKO10120177_B_Tas2r124
  gRNA
tactaattgcagagtttgtt

SEQ ID NO: 120178 - DNA, 20 bp, Artificial Sequence
  MKO10120178_B_Tas2r124
  gRNA
ctgcctcattacccaaagag

SEQ ID NO: 120179 - DNA, 20 bp, Artificial Sequence
  MKO10120179_B_Tas2r125
  gRNA
ttagaataagcaataacacc

SEQ ID NO: 120180 - DNA, 20 bp, Artificial Sequence
  MKO10120180_B_Tas2r125
  gRNA
tgtctcttgccatacaatat

SEQ ID NO: 120181 - DNA, 20 bp, Artificial Sequence
  MKO10120181_B_Tas2r125
  gRNA
tgaacatgcatattgatatc

SEQ ID NO: 120182 - DNA, 20 bp, Artificial Sequence
  MKO10120182_B_Tas2r126
  gRNA
gcgtggtaggctgctcccct

SEQ ID NO: 120183 - DNA, 20 bp, Artificial Sequence
  MKO10120183_B_Tas2r126
  gRNA
aggacaccgcataaagaacc

SEQ ID NO: 120184 - DNA, 20 bp, Artificial Sequence
  MKO10120184_B_Tas2r126
  gRNA
ggaatctccacttcaaccac

SEQ ID NO: 120185 - DNA, 20 bp, Artificial Sequence
  MKO10120185_B_Tas2r129
  gRNA
tggtttgcaagactctgatg

SEQ ID NO: 120186 - DNA, 20 bp, Artificial Sequence
  MKO10120186_B_Tas2r129
  gRNA
ctcactcctcaaaatttgca

SEQ ID NO: 120187 - DNA, 20 bp, Artificial Sequence
  MKO10120187_B_Tas2r129
  gRNA
gaatcaaatactcacagcct

SEQ ID NO: 120188 - DNA, 20 bp, Artificial Sequence
  MKO10120188_B_Tas2r130
  gRNA
tatccagacacctacaacag

SEQ ID NO: 120189 - DNA, 20 bp, Artificial Sequence
  MKO10120189_B_Tas2r130
  gRNA
cagatacaactcagtgtaac

SEQ ID NO: 120190 - DNA, 20 bp, Artificial Sequence
  MKO10120190_B_Tas2r130
  gRNA
cagacgttgtgttaagacaa

SEQ ID NO: 120191 - DNA, 20 bp, Artificial Sequence
  MKO10120191_B_Tas2r131
  gRNA
atcttcgacagagagcaatg

SEQ ID NO: 120192 - DNA, 20 bp, Artificial Sequence
  MKO10120192_B_Tas2r131
  gRNA
taactgatcaactatcaaca

SEQ ID NO: 120193 - DNA, 20 bp, Artificial Sequence
  MKO10120193_B_Tas2r131
  gRNA
agaggatcagctcttgaagc

SEQ ID NO: 120194 - DNA, 20 bp, Artificial Sequence
  MKO10120194_B_Tas2r134
  gRNA
gtgctgtaatcatgagtcct

SEQ ID NO: 120195 - DNA, 20 bp, Artificial Sequence
  MKO10120195_B_Tas2r134
  gRNA
gaatttctcggtcagtgccc

SEQ ID NO: 120196 - DNA, 20 bp, Artificial Sequence
  MKO10120196_B_Tas2r134
  gRNA
ttatggccaccgtgctgggc

SEQ ID NO: 120197 - DNA, 20 bp, Artificial Sequence
  MKO10120197_B_Tas2r135
  gRNA
tgccagcaacacaccatatc

SEQ ID NO: 120198 - DNA, 20 bp, Artificial Sequence
  MKO10120198_B_Tas2r135
  gRNA
tcgattctgtctccaatgtg

SEQ ID NO: 120199 - DNA, 20 bp, Artificial Sequence
  MKO10120199_B_Tas2r135
  gRNA
attcaggtactggatgtggc

SEQ ID NO: 120200 - DNA, 20 bp, Artificial Sequence
  MKO10120200_B_Tas2r136
  gRNA
gacattcttatatcttgcta

SEQ ID NO: 120201 - DNA, 20 bp, Artificial Sequence
  MKO10120201_B_Tas2r136
  gRNA
ctgaaccattgccaacacaa

SEQ ID NO: 120202 - DNA, 20 bp, Artificial Sequence
  MKO10120202_B_Tas2r136
  gRNA
tgcttgtgttgtctcacata

SEQ ID NO: 120203 - DNA, 20 bp, Artificial Sequence
  MKO10120203_B_Tas2r137
  gRNA
atacatcagactgaagcgac

SEQ ID NO: 120204 - DNA, 20 bp, Artificial Sequence
  MKO10120204_B_Tas2r137
  gRNA
ggcctaaattctaatatgtt

SEQ ID NO: 120205 - DNA, 20 bp, Artificial Sequence
  MKO10120205_B_Tas2r137
  gRNA
gcagcagaaggtaggcaacc

SEQ ID NO: 120206 - DNA, 20 bp, Artificial Sequence
  MKO10120206_B_Tas2r138
  gRNA
ccatagagaccatgctattc

SEQ ID NO: 120207 - DNA, 20 bp, Artificial Sequence
  MKO10120207_B_Tas2r138
  gRNA
tagtcctcatgtgactcccc

SEQ ID NO: 120208 - DNA, 20 bp, Artificial Sequence
  MKO10120208_B_Tas2r138
  gRNA
acccagcttgctacatggag

SEQ ID NO: 120209 - DNA, 20 bp, Artificial Sequence
  MKO10120209_B_Tas2r139
  gRNA
ttactaattcagaacaaccc

SEQ ID NO: 120210 - DNA, 20 bp, Artificial Sequence
  MKO10120210_B_Tas2r139
  gRNA
aagcagaatcctagtagtta

SEQ ID NO: 120211 - DNA, 20 bp, Artificial Sequence
  MKO10120211_B_Tas2r139
  gRNA
cccacttgcaatgataccta

SEQ ID NO: 120212 - DNA, 20 bp, Artificial Sequence
  MKO10120212_B_Tas2r140
  gRNA
cactaactggtctaaggacc

SEQ ID NO: 120213 - DNA, 20 bp, Artificial Sequence
  MKO10120213_B_Tas2r140
  gRNA
gaaatcattatagggtgttt

SEQ ID NO: 120214 - DNA, 20 bp, Artificial Sequence
  MKO10120214_B_Tas2r140
  gRNA
ctaaaacgtttacaaacaag

SEQ ID NO: 120215 - DNA, 20 bp, Artificial Sequence
  MKO10120215_B_Tas2r143
  gRNA
tcctccacttgagccaaaag

SEQ ID NO: 120216 - DNA, 20 bp, Artificial Sequence
  MKO10120216_B_Tas2r143
  gRNA
tgagaacatgagcacgataa

SEQ ID NO: 120217 - DNA, 20 bp, Artificial Sequence
  MKO10120217_B_Tas2r143
  gRNA
gaagccattctgcaacatag

SEQ ID NO: 120218 - DNA, 20 bp, Artificial Sequence
  MKO10120218_B_Tas2r144
  gRNA
tctctacattattaatgcac

SEQ ID NO: 120219 - DNA, 20 bp, Artificial Sequence
  MKO10120219_B_Tas2r144
  gRNA
tcaagatcagatgcactgac

SEQ ID NO: 120220 - DNA, 20 bp, Artificial Sequence
  MKO10120220_B_Tas2r144
  gRNA
ccatatctgtagcaacagcc

SEQ ID NO: 120221 - DNA, 20 bp, Artificial Sequence
  MKO10120221_B_Tasp1
  gRNA
tgctgctaaagtaacagtca

SEQ ID NO: 120222 - DNA, 20 bp, Artificial Sequence
  MKO10120222_B_Tasp1
  gRNA
atgcaaacgagcttgtcaga

SEQ ID NO: 120223 - DNA, 20 bp, Artificial Sequence
  MKO10120223_B_Tasp1
  gRNA
tgctgctctggtggaacttg

SEQ ID NO: 120224 - DNA, 20 bp, Artificial Sequence
  MKO10120224_B_Tatdn1
  gRNA
ctgacagatcctatgttcag

SEQ ID NO: 120225 - DNA, 20 bp, Artificial Sequence
  MKO10120225_B_Tatdn1
  gRNA
cagtaaagatgcactgcagt

SEQ ID NO: 120226 - DNA, 20 bp, Artificial Sequence
  MKO10120226_B_Tatdn1
  gRNA
ctataaattcctctgaacat

SEQ ID NO: 120227 - DNA, 20 bp, Artificial Sequence
  MKO10120227_B_Tatdn2
  gRNA
atggctgctagtccagtagc

SEQ ID NO: 120228 - DNA, 20 bp, Artificial Sequence
  MKO10120228_B_Tatdn2
  gRNA
tgcccttagacagatcccgt

SEQ ID NO: 120229 - DNA, 20 bp, Artificial Sequence
  MKO10120229_B_Tatdn2
  gRNA
accgaagtgagtgggaattc

SEQ ID NO: 120230 - DNA, 20 bp, Artificial Sequence
  MKO10120230_B_Tatdn3
  gRNA
gtaggatctggatgatgtgt

SEQ ID NO: 120231 - DNA, 20 bp, Artificial Sequence
  MKO10120231_B_Tatdn3
  gRNA
gtggcagttgctgaacatgc

SEQ ID NO: 120232 - DNA, 20 bp, Artificial Sequence
  MKO10120232_B_Tatdn3
  gRNA
tcactgccatctctccgcct

SEQ ID NO: 120233 - DNA, 20 bp, Artificial Sequence
  MKO10120233_B_Tat
  gRNA
cgaaaaaacagcttgtctcg

SEQ ID NO: 120234 - DNA, 20 bp, Artificial Sequence
  MKO10120234_B_Tat
  gRNA
aaaacccgggcctcggaatg

SEQ ID NO: 120235 - DNA, 20 bp, Artificial Sequence
  MKO10120235_B_Tat
  gRNA
tgagctgtgtctagccgtgt

SEQ ID NO: 120236 - DNA, 20 bp, Artificial Sequence
  MKO10120236_B_Tax1bp1
  gRNA
tcctatgcctgaacattatg

SEQ ID NO: 120237 - DNA, 20 bp, Artificial Sequence
  MKO10120237_B_Tax1bp1
  gRNA
gatccttccacataatgttc

SEQ ID NO: 120238 - DNA, 20 bp, Artificial Sequence
  MKO10120238_B_Tax1bp1
  gRNA
gctcacaccgccctttctcc

SEQ ID NO: 120239 - DNA, 20 bp, Artificial Sequence
  MKO10120239_B_Tax1bp3
  gRNA
gaaattcataagttgcgtca

SEQ ID NO: 120240 - DNA, 20 bp, Artificial Sequence
  MKO10120240_B_Tax1bp3
  gRNA
ttaatcttgggcttcagtat

SEQ ID NO: 120241 - DNA, 20 bp, Artificial Sequence
  MKO10120241_B_Tax1bp3
  gRNA
tgcagcccagcaatttcagc

SEQ ID NO: 120242 - DNA, 20 bp, Artificial Sequence
  MKO10120242_B_Taz
  gRNA
agcagctcacctcgacacac

SEQ ID NO: 120243 - DNA, 20 bp, Artificial Sequence
  MKO10120243_B_Taz
  gRNA
ccacctcaccgtgcacaaca

SEQ ID NO: 120244 - DNA, 20 bp, Artificial Sequence
  MKO10120244_B_Taz
  gRNA
acggtgataaggggggtggc

SEQ ID NO: 120245 - DNA, 20 bp, Artificial Sequence
  MKO10120245_B_Tbata
  gRNA
acaccaacctcatcgggctt

SEQ ID NO: 120246 - DNA, 20 bp, Artificial Sequence
  MKO10120246_B_Tbata
  gRNA
ggatttcgagctgatccatg

SEQ ID NO: 120247 - DNA, 20 bp, Artificial Sequence
  MKO10120247_B_Tbata
  gRNA
agctcgaaatccacaatgcc

SEQ ID NO: 120248 - DNA, 20 bp, Artificial Sequence
  MKO10120248_B_Tbc1d10a
  gRNA
caagcccgtccgcgcagaga

SEQ ID NO: 120249 - DNA, 20 bp, Artificial Sequence
  MKO10120249_B_Tbc1d10a
  gRNA
tgattgagcgtgacctgcac

SEQ ID NO: 120250 - DNA, 20 bp, Artificial Sequence
  MKO10120250_B_Tbc1d10a
  gRNA
cagcaatgggtgcctgcgcc

SEQ ID NO: 120251 - DNA, 20 bp, Artificial Sequence
  MKO10120251_B_Tbc1d10b
  gRNA
gtggctcgatgtgattgaga

SEQ ID NO: 120252 - DNA, 20 bp, Artificial Sequence
  MKO10120252_B_Tbc1d10b
  gRNA
gcagtacctgtctaatagca

SEQ ID NO: 120253 - DNA, 20 bp, Artificial Sequence
  MKO10120253_B_Tbc1d10b
  gRNA
cttaggtaaagctgcgctgc

SEQ ID NO: 120254 - DNA, 20 bp, Artificial Sequence
  MKO10120254_B_Tbc1d10c
  gRNA
ccacccatttcatctctcgc

SEQ ID NO: 120255 - DNA, 20 bp, Artificial Sequence
  MKO10120255_B_Tbc1d10c
  gRNA
tcaaggcctacaccctgtac

SEQ ID NO: 120256 - DNA, 20 bp, Artificial Sequence
  MKO10120256_B_Tbc1d10c
  gRNA
tggcctcgtacccgtgtccc

SEQ ID NO: 120257 - DNA, 20 bp, Artificial Sequence
  MKO10120257_B_Tbc1d12
  gRNA
gtggccgaagctaaaaaacg

SEQ ID NO: 120258 - DNA, 20 bp, Artificial Sequence
  MKO10120258_B_Tbc1d12
  gRNA
tcaatgaaatactgcccaat

SEQ ID NO: 120259 - DNA, 20 bp, Artificial Sequence
  MKO10120259_B_Tbc1d12
  gRNA
acttacctgctgaataattt

SEQ ID NO: 120260 - DNA, 20 bp, Artificial Sequence
  MKO10120260_B_Tbc1d13
  gRNA
caccgcagtccgccctcaca

SEQ ID NO: 120261 - DNA, 20 bp, Artificial Sequence
  MKO10120261_B_Tbc1d13
  gRNA
gcggactgcggtgcctctgc

SEQ ID NO: 120262 - DNA, 20 bp, Artificial Sequence
  MKO10120262_B_Tbc1d13
  gRNA
gaaggagccctccattgtgt

SEQ ID NO: 120263 - DNA, 20 bp, Artificial Sequence
  MKO10120263_B_Tbc1d14
  gRNA
atgagcgccgtggtggacag

SEQ ID NO: 120264 - DNA, 20 bp, Artificial Sequence
  MKO10120264_B_Tbc1d14
  gRNA
ccagctgcttcctccgacgc

SEQ ID NO: 120265 - DNA, 20 bp, Artificial Sequence
  MKO10120265_B_Tbc1d14
  gRNA
agcttaaagaagcccagcgt

SEQ ID NO: 120266 - DNA, 20 bp, Artificial Sequence
  MKO10120266_B_Tbc1d15
  gRNA
ccccgatgagctctttcctt

SEQ ID NO: 120267 - DNA, 20 bp, Artificial Sequence
  MKO10120267_B_Tbc1d15
  gRNA
gtaggatgctgaagtaatag

SEQ ID NO: 120268 - DNA, 20 bp, Artificial Sequence
  MKO10120268_B_Tbc1d15
  gRNA
gaatctaatgcatcatccaa

SEQ ID NO: 120269 - DNA, 20 bp, Artificial Sequence
  MKO10120269_B_Tbc1d16
  gRNA
cggcagcttgggccttcgga

SEQ ID NO: 120270 - DNA, 20 bp, Artificial Sequence
  MKO10120270_B_Tbc1d16
  gRNA
cttacctgaagaagagccgc

SEQ ID NO: 120271 - DNA, 20 bp, Artificial Sequence
  MKO10120271_B_Tbc1d16
  gRNA
agtgacgaggcttgcacgag

SEQ ID NO: 120272 - DNA, 20 bp, Artificial Sequence
  MKO10120272_B_Tbc1d17
  gRNA
ttccaccactcgtatgacgc

SEQ ID NO: 120273 - DNA, 20 bp, Artificial Sequence
  MKO10120273_B_Tbc1d17
  gRNA
gtgctgggctcaccccgact

SEQ ID NO: 120274 - DNA, 20 bp, Artificial Sequence
  MKO10120274_B_Tbc1d17
  gRNA
ggatggacttgagctccccc

SEQ ID NO: 120275 - DNA, 20 bp, Artificial Sequence
  MKO10120275_B_Tbc1d19
  gRNA
gctttcctcatgtacaccaa

SEQ ID NO: 120276 - DNA, 20 bp, Artificial Sequence
  MKO10120276_B_Tbc1d19
  gRNA
agatgctcagggggtgcaga

SEQ ID NO: 120277 - DNA, 20 bp, Artificial Sequence
  MKO10120277_B_Tbc1d19
  gRNA
atcactcaaagaagatatta

SEQ ID NO: 120278 - DNA, 20 bp, Artificial Sequence
  MKO10120278_B_Tbc1d1
  gRNA
gcctgcacaagctctgcgaa

SEQ ID NO: 120279 - DNA, 20 bp, Artificial Sequence
  MKO10120279_B_Tbc1d1
  gRNA
tgccgccacccgagcactct

SEQ ID NO: 120280 - DNA, 20 bp, Artificial Sequence
  MKO10120280_B_Tbc1d1
  gRNA
ggtagctgcggtgcagcaga

SEQ ID NO: 120281 - DNA, 20 bp, Artificial Sequence
  MKO10120281_B_Tbc1d20
  gRNA
cgatatcatcctcctcgtcc

SEQ ID NO: 120282 - DNA, 20 bp, Artificial Sequence
  MKO10120282_B_Tbc1d20
  gRNA
tgggctcacttggtcaatga

SEQ ID NO: 120283 - DNA, 20 bp, Artificial Sequence
  MKO10120283_B_Tbc1d20
  gRNA
tgacgtccagcagcacttgc

SEQ ID NO: 120284 - DNA, 20 bp, Artificial Sequence
  MKO10120284_B_Tbc1d21
  gRNA
acctagcgtacgacatccag

SEQ ID NO: 120285 - DNA, 20 bp, Artificial Sequence
  MKO10120285_B_Tbc1d21
  gRNA
gcaaatgaagtctcgtgact

SEQ ID NO: 120286 - DNA, 20 bp, Artificial Sequence
  MKO10120286_B_Tbc1d21
  gRNA
gagaaacccccccattgaca

SEQ ID NO: 120287 - DNA, 20 bp, Artificial Sequence
  MKO10120287_B_Tbc1d22a
  gRNA
ccactccggtgaaggccaag

SEQ ID NO: 120288 - DNA, 20 bp, Artificial Sequence
  MKO10120288_B_Tbc1d22a
  gRNA
agagactgggaccgttgcag

SEQ ID NO: 120289 - DNA, 20 bp, Artificial Sequence
  MKO10120289_B_Tbc1d22a
  gRNA
gcctctggctgtgattgcgc

SEQ ID NO: 120290 - DNA, 20 bp, Artificial Sequence
  MKO10120290_B_Tbc1d22b
  gRNA
gggaagttcgaccagtgacc

SEQ ID NO: 120291 - DNA, 20 bp, Artificial Sequence
  MKO10120291_B_Tbc1d22b
  gRNA
ccatcatcccccttgtcgcc

SEQ ID NO: 120292 - DNA, 20 bp, Artificial Sequence
  MKO10120292_B_Tbc1d22b
  gRNA
gggtgctgagccccatacac

SEQ ID NO: 120293 - DNA, 20 bp, Artificial Sequence
  MKO10120293_B_Tbc1d23
  gRNA
tcagtagatgaatccagctc

SEQ ID NO: 120294 - DNA, 20 bp, Artificial Sequence
  MKO10120294_B_Tbc1d23
  gRNA
aaggtgatagtttggcatca

SEQ ID NO: 120295 - DNA, 20 bp, Artificial Sequence
  MKO10120295_B_Tbc1d23
  gRNA
gatcacaacctcctgcttca

SEQ ID NO: 120296 - DNA, 20 bp, Artificial Sequence
  MKO10120296_B_Tbc1d24
  gRNA
gctcatcaagaccactcaaa

SEQ ID NO: 120297 - DNA, 20 bp, Artificial Sequence
  MKO10120297_B_Tbc1d24
  gRNA
tcacgctgacaatctctgag

SEQ ID NO: 120298 - DNA, 20 bp, Artificial Sequence
  MKO10120298_B_Tbc1d24
  gRNA
tgggctcatgtccttcacac

SEQ ID NO: 120299 - DNA, 20 bp, Artificial Sequence
  MKO10120299_B_Tbc1d25
  gRNA
tcagctacctggctcgagac

SEQ ID NO: 120300 - DNA, 20 bp, Artificial Sequence
  MKO10120300_B_Tbc1d25
  gRNA
gtgctgcaacacgtccagcg

SEQ ID NO: 120301 - DNA, 20 bp, Artificial Sequence
  MKO10120301_B_Tbc1d25
  gRNA
cgggatggcaaccacctccg

SEQ ID NO: 120302 - DNA, 20 bp, Artificial Sequence
  MKO10120302_B_Tbc1d2b
  gRNA
atcgtgagctcatgacttac

SEQ ID NO: 120303 - DNA, 20 bp, Artificial Sequence
  MKO10120303_B_Tbc1d2b
  gRNA
agcaggacttccccgactcc

SEQ ID NO: 120304 - DNA, 20 bp, Artificial Sequence
  MKO10120304_B_Tbc1d2b
  gRNA
tcaatgtcatcattccgtcc

SEQ ID NO: 120305 - DNA, 20 bp, Artificial Sequence
  MKO10120305_B_Tbc1d2
  gRNA
actcgtggaagactcgcctc

SEQ ID NO: 120306 - DNA, 20 bp, Artificial Sequence
  MKO10120306_B_Tbc1d2
  gRNA
tgaggcgagtcttccacgag

SEQ ID NO: 120307 - DNA, 20 bp, Artificial Sequence
  MKO10120307_B_Tbc1d2
  gRNA
tggctccctagagcaagagg

SEQ ID NO: 120308 - DNA, 20 bp, Artificial Sequence
  MKO10120308_B_Tbc1d30
  gRNA
ctgtggccagactgtcaacg

SEQ ID NO: 120309 - DNA, 20 bp, Artificial Sequence
  MKO10120309_B_Tbc1d30
  gRNA
tgcacagtatagccatcgac

SEQ ID NO: 120310 - DNA, 20 bp, Artificial Sequence
  MKO10120310_B_Tbc1d30
  gRNA
ttagtggtatgatgctctca

SEQ ID NO: 120311 - DNA, 20 bp, Artificial Sequence
  MKO10120311_B_Tbc1d31
  gRNA
tataagatgttagagccctc

SEQ ID NO: 120312 - DNA, 20 bp, Artificial Sequence
  MKO10120312_B_Tbc1d31
  gRNA
tcaggcgattccttcattgc

SEQ ID NO: 120313 - DNA, 20 bp, Artificial Sequence
  MKO10120313_B_Tbc1d31
  gRNA
aagacaactccatcttcgcc

SEQ ID NO: 120314 - DNA, 20 bp, Artificial Sequence
  MKO10120314_B_Tbc1d32
  gRNA
atgcacatctgatcagaatc

SEQ ID NO: 120315 - DNA, 20 bp, Artificial Sequence
  MKO10120315_B_Tbc1d32
  gRNA
acgtcctgagctgtgagaac

SEQ ID NO: 120316 - DNA, 20 bp, Artificial Sequence
  MKO10120316_B_Tbc1d32
  gRNA
ttaatcttacctctttaggt

SEQ ID NO: 120317 - DNA, 20 bp, Artificial Sequence
  MKO10120317_B_Tbc1d4
  gRNA
gcacagtttaatctgcgtct

SEQ ID NO: 120318 - DNA, 20 bp, Artificial Sequence
  MKO10120318_B_Tbc1d4
  gRNA
cagcacgactgatttagtgt

SEQ ID NO: 120319 - DNA, 20 bp, Artificial Sequence
  MKO10120319_B_Tbc1d4
  gRNA
ctttatctgtcgggagtctc

SEQ ID NO: 120320 - DNA, 20 bp, Artificial Sequence
  MKO10120320_B_Tbc1d5
  gRNA
gaacgtcccttcagtgtcta

SEQ ID NO: 120321 - DNA, 20 bp, Artificial Sequence
  MKO10120321_B_Tbc1d5
  gRNA
ctaggagatctaagtcaaaa

SEQ ID NO: 120322 - DNA, 20 bp, Artificial Sequence
  MKO10120322_B_Tbc1d5
  gRNA
gtaagacagaaggggattaa

SEQ ID NO: 120323 - DNA, 20 bp, Artificial Sequence
  MKO10120323_B_Tbc1d7
  gRNA
ggcatcccgcgaagcacctt

SEQ ID NO: 120324 - DNA, 20 bp, Artificial Sequence
  MKO10120324_B_Tbc1d7
  gRNA
ttaactgcttcacgaagcat

SEQ ID NO: 120325 - DNA, 20 bp, Artificial Sequence
  MKO10120325_B_Tbc1d7
  gRNA
ctttgcggtaggccatcacc

SEQ ID NO: 120326 - DNA, 20 bp, Artificial Sequence
  MKO10120326_B_Tbc1d8b
  gRNA
gtgtacttgtcaattgcatg

SEQ ID NO: 120327 - DNA, 20 bp, Artificial Sequence
  MKO10120327_B_Tbc1d8b
  gRNA
agcattcacgtatgttctca

SEQ ID NO: 120328 - DNA, 20 bp, Artificial Sequence
  MKO10120328_B_Tbc1d8b
  gRNA
taatgagacataccttctta

SEQ ID NO: 120329 - DNA, 20 bp, Artificial Sequence
  MKO10120329_B_Tbc1d8
  gRNA
ctcccttaaggtcgccttgt

SEQ ID NO: 120330 - DNA, 20 bp, Artificial Sequence
  MKO10120330_B_Tbc1d8
  gRNA
cgtgaccagcttctccgcct

SEQ ID NO: 120331 - DNA, 20 bp, Artificial Sequence
  MKO10120331_B_Tbc1d8
  gRNA
ccggatcactacacagaata

SEQ ID NO: 120332 - DNA, 20 bp, Artificial Sequence
  MKO10120332_B_Tbc1d9b
  gRNA
tccagtagacctgcgagtcc

SEQ ID NO: 120333 - DNA, 20 bp, Artificial Sequence
  MKO10120333_B_Tbc1d9b
  gRNA
cctggccatgcgacaactgc

SEQ ID NO: 120334 - DNA, 20 bp, Artificial Sequence
  MKO10120334_B_Tbc1d9b
  gRNA
gtctggtgcaggatgcggta

SEQ ID NO: 120335 - DNA, 20 bp, Artificial Sequence
  MKO10120335_B_Tbc1d9
  gRNA
ctttccccaggtaaccatcg

SEQ ID NO: 120336 - DNA, 20 bp, Artificial Sequence
  MKO10120336_B_Tbc1d9
  gRNA
tactgctggccaacgcgctg

SEQ ID NO: 120337 - DNA, 20 bp, Artificial Sequence
  MKO10120337_B_Tbc1d9
  gRNA
ccacatcgagggtacccaca

SEQ ID NO: 120338 - DNA, 20 bp, Artificial Sequence
  MKO10120338_B_Tbca
  gRNA
atgcagcctctaaccgacgc

SEQ ID NO: 120339 - DNA, 20 bp, Artificial Sequence
  MKO10120339_B_Tbca
  gRNA
tcaggaaagtgaaaaagact

SEQ ID NO: 120340 - DNA, 20 bp, Artificial Sequence
  MKO10120340_B_Tbca
  gRNA
agaaaagattgaaaaaatga

SEQ ID NO: 120341 - DNA, 20 bp, Artificial Sequence
  MKO10120341_B_Tbcb
  gRNA
gtccgatatgatgagccgtt

SEQ ID NO: 120342 - DNA, 20 bp, Artificial Sequence
  MKO10120342_B_Tbcb
  gRNA
cgggtgcccgcacctcacaa

SEQ ID NO: 120343 - DNA, 20 bp, Artificial Sequence
  MKO10120343_B_Tbcb
  gRNA
acatgacagtgcccctgcga

SEQ ID NO: 120344 - DNA, 20 bp, Artificial Sequence
  MKO10120344_B_Tbccd1
  gRNA
aagccacttgctacgtgcag

SEQ ID NO: 120345 - DNA, 20 bp, Artificial Sequence
  MKO10120345_B_Tbccd1
  gRNA
ttgctacagtgcctaactat

SEQ ID NO: 120346 - DNA, 20 bp, Artificial Sequence
  MKO10120346_B_Tbccd1
  gRNA
tgtatatccagcagttaaac

SEQ ID NO: 120347 - DNA, 20 bp, Artificial Sequence
  MKO10120347_B_Tbcc
  gRNA
ttcgcgcctctgaagtcgct

SEQ ID NO: 120348 - DNA, 20 bp, Artificial Sequence
  MKO10120348_B_Tbcc
  gRNA
caagaagacgcgcgtgtctt

SEQ ID NO: 120349 - DNA, 20 bp, Artificial Sequence
  MKO10120349_B_Tbcc
  gRNA
agtcgttcaggagcttccgc

SEQ ID NO: 120350 - DNA, 20 bp, Artificial Sequence
  MKO10120350_B_Tbcd
  gRNA
tcagaaccctaaagaccatg

SEQ ID NO: 120351 - DNA, 20 bp, Artificial Sequence
  MKO10120351_B_Tbcd
  gRNA
ccgaattctgcaaatagcag

SEQ ID NO: 120352 - DNA, 20 bp, Artificial Sequence
  MKO10120352_B_Tbcd
  gRNA
agaaacacgagtacccacca

SEQ ID NO: 120353 - DNA, 20 bp, Artificial Sequence
  MKO10120353_B_Tbcel
  gRNA
caatcacttgaatgcaatcg

SEQ ID NO: 120354 - DNA, 20 bp, Artificial Sequence
  MKO10120354_B_Tbcel
  gRNA
gattagggaacaacctagcc

SEQ ID NO: 120355 - DNA, 20 bp, Artificial Sequence
  MKO10120355_B_Tbcel
  gRNA
aacagtgcacaccatactgc

SEQ ID NO: 120356 - DNA, 20 bp, Artificial Sequence
  MKO10120356_B_Tbce
  gRNA
taaaatacatagtaccttcg

SEQ ID NO: 120357 - DNA, 20 bp, Artificial Sequence
  MKO10120357_B_Tbce
  gRNA
ccaaaaacttgttgtcaact

SEQ ID NO: 120358 - DNA, 20 bp, Artificial Sequence
  MKO10120358_B_Tbce
  gRNA
acctgagatcaagagcctcc

SEQ ID NO: 120359 - DNA, 20 bp, Artificial Sequence
  MKO10120359_B_Tbck
  gRNA
ctttatcacatgacagccca

SEQ ID NO: 120360 - DNA, 20 bp, Artificial Sequence
  MKO10120360_B_Tbck
  gRNA
agttctgtgcatagcatatg

SEQ ID NO: 120361 - DNA, 20 bp, Artificial Sequence
  MKO10120361_B_Tbck
  gRNA
ccctagaaatatccacatat

SEQ ID NO: 120362 - DNA, 20 bp, Artificial Sequence
  MKO10120362_B_Tbk1
  gRNA
tctaaacggcagcgaccccg

SEQ ID NO: 120363 - DNA, 20 bp, Artificial Sequence
  MKO10120363_B_Tbk1
  gRNA
cataagcttccttcgcccag

SEQ ID NO: 120364 - DNA, 20 bp, Artificial Sequence
  MKO10120364_B_Tbk1
  gRNA
tctcattgtcttacgagatg

SEQ ID NO: 120365 - DNA, 20 bp, Artificial Sequence
  MKO10120365_B_Tbkbp1
  gRNA
tcgctcacacttacactcgt

SEQ ID NO: 120366 - DNA, 20 bp, Artificial Sequence
  MKO10120366_B_Tbkbp1
  gRNA
cgcacagtttctcgtaagcc

SEQ ID NO: 120367 - DNA, 20 bp, Artificial Sequence
  MKO10120367_B_Tbkbp1
  gRNA
ccctggtagagactcatcta

SEQ ID NO: 120368 - DNA, 20 bp, Artificial Sequence
  MKO10120368_B_Tbl1xr1
  gRNA
gaaaaacctaccctgatgcc

SEQ ID NO: 120369 - DNA, 20 bp, Artificial Sequence
  MKO10120369_B_Tbl1xr1
  gRNA
gctgccgccactaaccagca

SEQ ID NO: 120370 - DNA, 20 bp, Artificial Sequence
  MKO10120370_B_Tbl1xr1
  gRNA
tatatggctctctataccaa

SEQ ID NO: 120371 - DNA, 20 bp, Artificial Sequence
  MKO10120371_B_Tbl1x
  gRNA
gatctggagactccactgcg

SEQ ID NO: 120372 - DNA, 20 bp, Artificial Sequence
  MKO10120372_B_Tbl1x
  gRNA
taggatggcacggtatttga

SEQ ID NO: 120373 - DNA, 20 bp, Artificial Sequence
  MKO10120373_B_Tbl1x
  gRNA
ccccgttgctgttctcatta

SEQ ID NO: 120374 - DNA, 20 bp, Artificial Sequence
  MKO10120374_B_Tbl2
  gRNA
cagttatctccccatgtagc

SEQ ID NO: 120375 - DNA, 20 bp, Artificial Sequence
  MKO10120375_B_Tbl2
  gRNA
agcaatgccgatgttgatga

SEQ ID NO: 120376 - DNA, 20 bp, Artificial Sequence
  MKO10120376_B_Tbl2
  gRNA
gtgacacaactgtcctcata

SEQ ID NO: 120377 - DNA, 20 bp, Artificial Sequence
  MKO10120377_B_Tbl3
  gRNA
cacatccaggatgttaactt

SEQ ID NO: 120378 - DNA, 20 bp, Artificial Sequence
  MKO10120378_B_Tbl3
  gRNA
acccatcatacttcatcatc

SEQ ID NO: 120379 - DNA, 20 bp, Artificial Sequence
  MKO10120379_B_Tbl3
  gRNA
cttcctttaggaggaccaag

SEQ ID NO: 120380 - DNA, 20 bp, Artificial Sequence
  MKO10120380_B_Tbpl1
  gRNA
agaacaatagacctcatgcc

SEQ ID NO: 120381 - DNA, 20 bp, Artificial Sequence
  MKO10120381_B_Tbpl1
  gRNA
aacctagtttctgcagacta

SEQ ID NO: 120382 - DNA, 20 bp, Artificial Sequence
  MKO10120382_B_Tbpl1
  gRNA
tcaggaaaaattatttgcac

SEQ ID NO: 120383 - DNA, 20 bp, Artificial Sequence
  MKO10120383_B_Tbpl2
  gRNA
aaactccaatgccttacctg

SEQ ID NO: 120384 - DNA, 20 bp, Artificial Sequence
  MKO10120384_B_Tbpl2
  gRNA
ggtttgctgcagtaataatg

SEQ ID NO: 120385 - DNA, 20 bp, Artificial Sequence
  MKO10120385_B_Tbpl2
  gRNA
atgccaatgaaccctgttcc

SEQ ID NO: 120386 - DNA, 20 bp, Artificial Sequence
  MKO10120386_B_Tbp
  gRNA
ctgaccactgcaccgttgcc

SEQ ID NO: 120387 - DNA, 20 bp, Artificial Sequence
  MKO10120387_B_Tbp
  gRNA
atttcttgcacgaagtgcaa

SEQ ID NO: 120388 - DNA, 20 bp, Artificial Sequence
  MKO10120388_B_Tbp
  gRNA
gtgatgtgaagttccctata

SEQ ID NO: 120389 - DNA, 20 bp, Artificial Sequence
  MKO10120389_B_Tbr1
  gRNA
aatccggatgcatatagacc

SEQ ID NO: 120390 - DNA, 20 bp, Artificial Sequence
  MKO10120390_B_Tbr1
  gRNA
aaagcggacaccaatgtgca

SEQ ID NO: 120391 - DNA, 20 bp, Artificial Sequence
  MKO10120391_B_Tbr1
  gRNA
gatcataacccctttgcaaa

SEQ ID NO: 120392 - DNA, 20 bp, Artificial Sequence
  MKO10120392_B_Tbrg1
  gRNA
tagatcatcaccaaccgacc

SEQ ID NO: 120393 - DNA, 20 bp, Artificial Sequence
  MKO10120393_B_Tbrg1
  gRNA
tgatgaaattgctcgtcttg

SEQ ID NO: 120394 - DNA, 20 bp, Artificial Sequence
  MKO10120394_B_Tbrg1
  gRNA
accataaggcaggggcaaac

SEQ ID NO: 120395 - DNA, 20 bp, Artificial Sequence
  MKO10120395_B_Tbrg4
  gRNA
ttcattcccagcatgacgcc

SEQ ID NO: 120396 - DNA, 20 bp, Artificial Sequence
  MKO10120396_B_Tbrg4
  gRNA
gcgcagcgggccacctctcc

SEQ ID NO: 120397 - DNA, 20 bp, Artificial Sequence
  MKO10120397_B_Tbrg4
  gRNA
gcaacactcgcaggaactgc

SEQ ID NO: 120398 - DNA, 20 bp, Artificial Sequence
  MKO10120398_B_Tbx10
  gRNA
gcacccttggctggcgagtc

SEQ ID NO: 120399 - DNA, 20 bp, Artificial Sequence
  MKO10120399_B_Tbx10
  gRNA
gctcatggactttatcccgt

SEQ ID NO: 120400 - DNA, 20 bp, Artificial Sequence
  MKO10120400_B_Tbx10
  gRNA
gaggatgttcccaacgttcc

SEQ ID NO: 120401 - DNA, 20 bp, Artificial Sequence
  MKO10120401_B_Tbx15
  gRNA
tcgaggctggtatttatgca

SEQ ID NO: 120402 - DNA, 20 bp, Artificial Sequence
  MKO10120402_B_Tbx15
  gRNA
atgtaaacccttggaggcac

SEQ ID NO: 120403 - DNA, 20 bp, Artificial Sequence
  MKO10120403_B_Tbx15
  gRNA
gctatatagtattgctgatg

SEQ ID NO: 120404 - DNA, 20 bp, Artificial Sequence
  MKO10120404_B_Tbx18
  gRNA
cggtggacaacaagagatac

SEQ ID NO: 120405 - DNA, 20 bp, Artificial Sequence
  MKO10120405_B_Tbx18
  gRNA
gatcatctccgcaatcttta

SEQ ID NO: 120406 - DNA, 20 bp, Artificial Sequence
  MKO10120406_B_Tbx18
  gRNA
catgtcatccgtaaagattg

SEQ ID NO: 120407 - DNA, 20 bp, Artificial Sequence
  MKO10120407_B_Tbx19
  gRNA
tgttggaggcgcccatcgaa

SEQ ID NO: 120408 - DNA, 20 bp, Artificial Sequence
  MKO10120408_B_Tbx19
  gRNA
agcagttcatgaccattcga

SEQ ID NO: 120409 - DNA, 20 bp, Artificial Sequence
  MKO10120409_B_Tbx19
  gRNA
ctctttcagaaaccacctca

SEQ ID NO: 120410 - DNA, 20 bp, Artificial Sequence
  MKO10120410_B_Tbx1
  gRNA
cttccgggattgcgacccgg

SEQ ID NO: 120411 - DNA, 20 bp, Artificial Sequence
  MKO10120411_B_Tbx1
  gRNA
atccactgtgcgcccttagc

SEQ ID NO: 120412 - DNA, 20 bp, Artificial Sequence
  MKO10120412_B_Tbx1
  gRNA
ccgattccatgttgtctatg

SEQ ID NO: 120413 - DNA, 20 bp, Artificial Sequence
  MKO10120413_B_Tbx20
  gRNA
gataccgctatgcctaccac

SEQ ID NO: 120414 - DNA, 20 bp, Artificial Sequence
  MKO10120414_B_Tbx20
  gRNA
agactcgtcagctcacccag

SEQ ID NO: 120415 - DNA, 20 bp, Artificial Sequence
  MKO10120415_B_Tbx20
  gRNA
tcgccagtaaagggggagtc

SEQ ID NO: 120416 - DNA, 20 bp, Artificial Sequence
  MKO10120416_B_Tbx21
  gRNA
catccagtgggctccggtgt

SEQ ID NO: 120417 - DNA, 20 bp, Artificial Sequence
  MKO10120417_B_Tbx21
  gRNA
cttacgactcaaagttctcc

SEQ ID NO: 120418 - DNA, 20 bp, Artificial Sequence
  MKO10120418_B_Tbx21
  gRNA
tggagcccacaagccattac

SEQ ID NO: 120419 - DNA, 20 bp, Artificial Sequence
  MKO10120419_B_Tbx22
  gRNA
gtccgggtggacatagaatc

SEQ ID NO: 120420 - DNA, 20 bp, Artificial Sequence
  MKO10120420_B_Tbx22
  gRNA
tcccagattctatgtccacc

SEQ ID NO: 120421 - DNA, 20 bp, Artificial Sequence
  MKO10120421_B_Tbx22
  gRNA
tcatctcagtgccaatgtcg

SEQ ID NO: 120422 - DNA, 20 bp, Artificial Sequence
  MKO10120422_B_Tbx2
  gRNA
gggacactgggaacggccgt

SEQ ID NO: 120423 - DNA, 20 bp, Artificial Sequence
  MKO10120423_B_Tbx2
  gRNA
gcacgatgtggaatcgcggc

SEQ ID NO: 120424 - DNA, 20 bp, Artificial Sequence
  MKO10120424_B_Tbx2
  gRNA
ataagtttcacaactcccgc

SEQ ID NO: 120425 - DNA, 20 bp, Artificial Sequence
  MKO10120425_B_Tbx3
  gRNA
gccggacttcgccatgagcg

SEQ ID NO: 120426 - DNA, 20 bp, Artificial Sequence
  MKO10120426_B_Tbx3
  gRNA
tatcgttggctctgacgatg

SEQ ID NO: 120427 - DNA, 20 bp, Artificial Sequence
  MKO10120427_B_Tbx3
  gRNA
acggcgatgaattctgtttc

SEQ ID NO: 120428 - DNA, 20 bp, Artificial Sequence
  MKO10120428_B_Tbx4
  gRNA
ggtcactgtcatcgctgccc

SEQ ID NO: 120429 - DNA, 20 bp, Artificial Sequence
  MKO10120429_B_Tbx4
  gRNA
ggctcactggatgcggcagt

SEQ ID NO: 120430 - DNA, 20 bp, Artificial Sequence
  MKO10120430_B_Tbx4
  gRNA
gtcgatgagaagtatgtact

SEQ ID NO: 120431 - DNA, 20 bp, Artificial Sequence
  MKO10120431_B_Tbx5
  gRNA
gacttcgtaccagaatcaca

SEQ ID NO: 120432 - DNA, 20 bp, Artificial Sequence
  MKO10120432_B_Tbx5
  gRNA
aacgaagtatattcttctca

SEQ ID NO: 120433 - DNA, 20 bp, Artificial Sequence
  MKO10120433_B_Tbx5
  gRNA
gagaagaatatacttcgttt

SEQ ID NO: 120434 - DNA, 20 bp, Artificial Sequence
  MKO10120434_B_Tbx6
  gRNA
ggccactcaccctagggttc

SEQ ID NO: 120435 - DNA, 20 bp, Artificial Sequence
  MKO10120435_B_Tbx6
  gRNA
aagcgagtgaagggcctctg

SEQ ID NO: 120436 - DNA, 20 bp, Artificial Sequence
  MKO10120436_B_Tbx6
  gRNA
agatttggatacttctaaac

SEQ ID NO: 120437 - DNA, 20 bp, Artificial Sequence
  MKO10120437_B_Tbxa2r
  gRNA
ctgggctggaggccggcgca

SEQ ID NO: 120438 - DNA, 20 bp, Artificial Sequence
  MKO10120438_B_Tbxa2r
  gRNA
ccgggtctaccacacgcgcg

SEQ ID NO: 120439 - DNA, 20 bp, Artificial Sequence
  MKO10120439_B_Tbxa2r
  gRNA
gtcgcaacacgctgccttgt

SEQ ID NO: 120440 - DNA, 20 bp, Artificial Sequence
  MKO10120440_B_Tbxas1
  gRNA
tcccctcctaggtactatct

SEQ ID NO: 120441 - DNA, 20 bp, Artificial Sequence
  MKO10120441_B_Tbxas1
  gRNA
aacacctgcttgatcatgtc

SEQ ID NO: 120442 - DNA, 20 bp, Artificial Sequence
  MKO10120442_B_Tbxas1
  gRNA
catgtcagctttctcaagac

SEQ ID NO: 120443 - DNA, 20 bp, Artificial Sequence
  MKO10120443_B_Tc2n
  gRNA
tcttcattacagccaacttg

SEQ ID NO: 120444 - DNA, 20 bp, Artificial Sequence
  MKO10120444_B_Tc2n
  gRNA
aagtgttgatacatatagca

SEQ ID NO: 120445 - DNA, 20 bp, Artificial Sequence
  MKO10120445_B_Tc2n
  gRNA
agtaaacttcctggttcctc

SEQ ID NO: 120446 - DNA, 20 bp, Artificial Sequence
  MKO10120446_B_Tcaim
  gRNA
tctctgataggttcggcctg

SEQ ID NO: 120447 - DNA, 20 bp, Artificial Sequence
  MKO10120447_B_Tcaim
  gRNA
aacgtaccggtagtactgat

SEQ ID NO: 120448 - DNA, 20 bp, Artificial Sequence
  MKO10120448_B_Tcaim
  gRNA
tttgggtctaggtcctggtt

SEQ ID NO: 120449 - DNA, 20 bp, Artificial Sequence
  MKO10120449_B_Tcam1
  gRNA
gatccctgaagccgaagagt

SEQ ID NO: 120450 - DNA, 20 bp, Artificial Sequence
  MKO10120450_B_Tcam1
  gRNA
tcatccacggccacccattc

SEQ ID NO: 120451 - DNA, 20 bp, Artificial Sequence
  MKO10120451_B_Tcam1
  gRNA
aactctaccagggcctcatt

SEQ ID NO: 120452 - DNA, 20 bp, Artificial Sequence
  MKO10120452_B_Tcap
  gRNA
aggaacgcagggaagccttc

SEQ ID NO: 120453 - DNA, 20 bp, Artificial Sequence
  MKO10120453_B_Tcap
  gRNA
ttgtgatctcagccacgtcc

SEQ ID NO: 120454 - DNA, 20 bp, Artificial Sequence
  MKO10120454_B_Tcap
  gRNA
caccttggtgggcgtgaaga

SEQ ID NO: 120455 - DNA, 20 bp, Artificial Sequence
  MKO10120455_B_Tcea1
  gRNA
cacatacctgtagcaattct

SEQ ID NO: 120456 - DNA, 20 bp, Artificial Sequence
  MKO10120456_B_Tcea1
  gRNA
attctgtgcgattaaaatgt

SEQ ID NO: 120457 - DNA, 20 bp, Artificial Sequence
  MKO10120457_B_Tcea1
  gRNA
tacctttcttctcttgcttc

SEQ ID NO: 120458 - DNA, 20 bp, Artificial Sequence
  MKO10120458_B_Tcea2
  gRNA
tggggaaatgtagtgatcct

SEQ ID NO: 120459 - DNA, 20 bp, Artificial Sequence
  MKO10120459_B_Tcea2
  gRNA
tggagcaagtgcaatgtaat

SEQ ID NO: 120460 - DNA, 20 bp, Artificial Sequence
  MKO10120460_B_Tcea2
  gRNA
tattacattgcacttgctcc

SEQ ID NO: 120461 - DNA, 20 bp, Artificial Sequence
  MKO10120461_B_Tcea3
  gRNA
ttccattacctttccagcga

SEQ ID NO: 120462 - DNA, 20 bp, Artificial Sequence
  MKO10120462_B_Tcea3
  gRNA
gcctcacagaccaccaggat

SEQ ID NO: 120463 - DNA, 20 bp, Artificial Sequence
  MKO10120463_B_Tcea3
  gRNA
ggagagactctgtagactcc

SEQ ID NO: 120464 - DNA, 20 bp, Artificial Sequence
  MKO10120464_B_Tceal1
  gRNA
agctcgggcaggagctcttc

SEQ ID NO: 120465 - DNA, 20 bp, Artificial Sequence
  MKO10120465_B_Tceal1
  gRNA
ctcctcggaggactgctcct

SEQ ID NO: 120466 - DNA, 20 bp, Artificial Sequence
  MKO10120466_B_Tceal1
  gRNA
cttgtgtttgcccaccccgc

SEQ ID NO: 120467 - DNA, 20 bp, Artificial Sequence
  MKO10120467_B_Tceal3
  gRNA
ggacaggcatgtaagcagtg

SEQ ID NO: 120468 - DNA, 20 bp, Artificial Sequence
  MKO10120468_B_Tceal3
  gRNA
agatgaagaaaagtcagacg

SEQ ID NO: 120469 - DNA, 20 bp, Artificial Sequence
  MKO10120469_B_Tceal3
  gRNA
ctcggggagtcaggggggtg

SEQ ID NO: 120470 - DNA, 20 bp, Artificial Sequence
  MKO10120470_B_Tceal5
  gRNA
tgaagacaagtcagatgcag

SEQ ID NO: 120471 - DNA, 20 bp, Artificial Sequence
  MKO10120471_B_Tceal5
  gRNA
cggcggaggcaggggccaga

SEQ ID NO: 120472 - DNA, 20 bp, Artificial Sequence
  MKO10120472_B_Tceal5
  gRNA
agacgaaggaagtacagaag

SEQ ID NO: 120473 - DNA, 20 bp, Artificial Sequence
  MKO10120473_B_Tceal6
  gRNA
agatgaagaaaagtcagatg

SEQ ID NO: 120474 - DNA, 20 bp, Artificial Sequence
  MKO10120474_B_Tceal6
  gRNA
ctcgggaagagttaaggaag

SEQ ID NO: 120475 - DNA, 20 bp, Artificial Sequence
  MKO10120475_B_Tceal6
  gRNA
ggccaaaggcattaaaggta

SEQ ID NO: 120476 - DNA, 20 bp, Artificial Sequence
  MKO10120476_B_Tceal7
  gRNA
ggccactgctttaaaaggga

SEQ ID NO: 120477 - DNA, 20 bp, Artificial Sequence
  MKO10120477_B_Tceal7
  gRNA
tggaaggcaatttcagacag

SEQ ID NO: 120478 - DNA, 20 bp, Artificial Sequence
  MKO10120478_B_Tceal7
  gRNA
cctctttgcctcactgccct

SEQ ID NO: 120479 - DNA, 20 bp, Artificial Sequence
  MKO10120479_B_Tceal8
  gRNA
aaccccgaagaagtgataag

SEQ ID NO: 120480 - DNA, 20 bp, Artificial Sequence
  MKO10120480_B_Tceal8
  gRNA
acaagttcgtgttgatgcat

SEQ ID NO: 120481 - DNA, 20 bp, Artificial Sequence
  MKO10120481_B_Tceal8
  gRNA
aagtcttgtgacgagaacga

SEQ ID NO: 120482 - DNA, 20 bp, Artificial Sequence
  MKO10120482_B_Tceanc2
  gRNA
gtctgtacaaacgtgccgac

SEQ ID NO: 120483 - DNA, 20 bp, Artificial Sequence
  MKO10120483_B_Tceanc2
  gRNA
caccttcaacgactcaatcg

SEQ ID NO: 120484 - DNA, 20 bp, Artificial Sequence
  MKO10120484_B_Tceanc2
  gRNA
gtgttgagatccacaaggat

SEQ ID NO: 120485 - DNA, 20 bp, Artificial Sequence
  MKO10120485_B_Tceanc
  gRNA
tttgaattctgcacccaact

SEQ ID NO: 120486 - DNA, 20 bp, Artificial Sequence
  MKO10120486_B_Tceanc
  gRNA
tgaaagtagcactgctcaaa

SEQ ID NO: 120487 - DNA, 20 bp, Artificial Sequence
  MKO10120487_B_Tceanc
  gRNA
acaagaaccaaatcattgcc

SEQ ID NO: 120488 - DNA, 20 bp, Artificial Sequence
  MKO10120488_B_Tceb1
  gRNA
agcagttccagtgcaatttc

SEQ ID NO: 120489 - DNA, 20 bp, Artificial Sequence
  MKO10120489_B_Tceb1
  gRNA
gtgaaattaatatcttctga

SEQ ID NO: 120490 - DNA, 20 bp, Artificial Sequence
  MKO10120490_B_Tceb1
  gRNA
aatttcacatacatagcatc

SEQ ID NO: 120491 - DNA, 20 bp, Artificial Sequence
  MKO10120491_B_Tceb2
  gRNA
aagctctggagggctggaaa

SEQ ID NO: 120492 - DNA, 20 bp, Artificial Sequence
  MKO10120492_B_Tceb2
  gRNA
gatgaccagctccttgatga

SEQ ID NO: 120493 - DNA, 20 bp, Artificial Sequence
  MKO10120493_B_Tceb2
  gRNA
tccagatgtgatgaagccac

SEQ ID NO: 120494 - DNA, 20 bp, Artificial Sequence
  MKO10120494_B_Tceb3
  gRNA
tttcggaagcatgagcaagt

SEQ ID NO: 120495 - DNA, 20 bp, Artificial Sequence
  MKO10120495_B_Tceb3
  gRNA
tcctttcagccaaagcgaaa

SEQ ID NO: 120496 - DNA, 20 bp, Artificial Sequence
  MKO10120496_B_Tceb3
  gRNA
ctggaaccagcttcttccac

SEQ ID NO: 120497 - DNA, 20 bp, Artificial Sequence
  MKO10120497_B_Tcerg1l
  gRNA
ttagcagctcaacccatacc

SEQ ID NO: 120498 - DNA, 20 bp, Artificial Sequence
  MKO10120498_B_Tcerg1l
  gRNA
taagaggatgcctaattaca

SEQ ID NO: 120499 - DNA, 20 bp, Artificial Sequence
  MKO10120499_B_Tcerg1l
  gRNA
cccccatcagaatccccttc

SEQ ID NO: 120500 - DNA, 20 bp, Artificial Sequence
  MKO10120500_B_Tcerg1
  gRNA
gccggctgaggtaccgagtg

SEQ ID NO: 120501 - DNA, 20 bp, Artificial Sequence
  MKO10120501_B_Tcerg1
  gRNA
atgcctccggggactgctcc

SEQ ID NO: 120502 - DNA, 20 bp, Artificial Sequence
  MKO10120502_B_Tcerg1
  gRNA
ccgggtatgatgttcccacc

SEQ ID NO: 120503 - DNA, 20 bp, Artificial Sequence
  MKO10120503_B_Tcf12
  gRNA
tctttaggtatggatgagcg

SEQ ID NO: 120504 - DNA, 20 bp, Artificial Sequence
  MKO10120504_B_Tcf12
  gRNA
gaaaacgagaccaacaacac

SEQ ID NO: 120505 - DNA, 20 bp, Artificial Sequence
  MKO10120505_B_Tcf12
  gRNA
acttactctagatgaatcat

SEQ ID NO: 120506 - DNA, 20 bp, Artificial Sequence
  MKO10120506_B_Tcf15
  gRNA
gggatccaggttcatcgccg

SEQ ID NO: 120507 - DNA, 20 bp, Artificial Sequence
  MKO10120507_B_Tcf15
  gRNA
cttcgcagcagccgaacgac

SEQ ID NO: 120508 - DNA, 20 bp, Artificial Sequence
  MKO10120508_B_Tcf15
  gRNA
gcgcagcagcgcgaacgcca

SEQ ID NO: 120509 - DNA, 20 bp, Artificial Sequence
  MKO10120509_B_Tcf19
  gRNA
ttgcgcttccccatgctgag

SEQ ID NO: 120510 - DNA, 20 bp, Artificial Sequence
  MKO10120510_B_Tcf19
  gRNA
ggccctgcagcccaatcgat

SEQ ID NO: 120511 - DNA, 20 bp, Artificial Sequence
  MKO10120511_B_Tcf19
  gRNA
tgaccctccagtcgtcccct

SEQ ID NO: 120512 - DNA, 20 bp, Artificial Sequence
  MKO10120512_B_Tcf20
  gRNA
tacccatgtgccattgacgc

SEQ ID NO: 120513 - DNA, 20 bp, Artificial Sequence
  MKO10120513_B_Tcf20
  gRNA
tcagcacagagcagtccgag

SEQ ID NO: 120514 - DNA, 20 bp, Artificial Sequence
  MKO10120514_B_Tcf20
  gRNA
ttgcagaacaagaccgcaaa

SEQ ID NO: 120515 - DNA, 20 bp, Artificial Sequence
  MKO10120515_B_Tcf21
  gRNA
tggtttgccggccaccataa

SEQ ID NO: 120516 - DNA, 20 bp, Artificial Sequence
  MKO10120516_B_Tcf21
  gRNA
gccaacgacaagtacgagaa

SEQ ID NO: 120517 - DNA, 20 bp, Artificial Sequence
  MKO10120517_B_Tcf21
  gRNA
accgttctcgtacttgtcgt

SEQ ID NO: 120518 - DNA, 20 bp, Artificial Sequence
  MKO10120518_B_Tcf23
  gRNA
tgcatagagacgagatcgca

SEQ ID NO: 120519 - DNA, 20 bp, Artificial Sequence
  MKO10120519_B_Tcf23
  gRNA
gcctagaagccaccgtgcct

SEQ ID NO: 120520 - DNA, 20 bp, Artificial Sequence
  MKO10120520_B_Tcf23
  gRNA
tgatagcggcatgtcacagg

SEQ ID NO: 120521 - DNA, 20 bp, Artificial Sequence
  MKO10120521_B_Tcf24
  gRNA
ctattcgcacagacatgatc

SEQ ID NO: 120522 - DNA, 20 bp, Artificial Sequence
  MKO10120522_B_Tcf24
  gRNA
ctgggcgccttgcgaggcga

SEQ ID NO: 120523 - DNA, 20 bp, Artificial Sequence
  MKO10120523_B_Tcf24
  gRNA
accggggtctccgggcgcgt

SEQ ID NO: 120524 - DNA, 20 bp, Artificial Sequence
  MKO10120524_B_Tcf25
  gRNA
caggaagcacgtcctatatg

SEQ ID NO: 120525 - DNA, 20 bp, Artificial Sequence
  MKO10120525_B_Tcf25
  gRNA
gaggatgaccttgtggtaaa

SEQ ID NO: 120526 - DNA, 20 bp, Artificial Sequence
  MKO10120526_B_Tcf25
  gRNA
ttccattagtctaatgcaag

SEQ ID NO: 120527 - DNA, 20 bp, Artificial Sequence
  MKO10120527_B_Tcf3
  gRNA
tcttacccggctagggtcaa

SEQ ID NO: 120528 - DNA, 20 bp, Artificial Sequence
  MKO10120528_B_Tcf3
  gRNA
ctcccccagacatacagcga

SEQ ID NO: 120529 - DNA, 20 bp, Artificial Sequence
  MKO10120529_B_Tcf3
  gRNA
ctggaggaccgacccagctc

SEQ ID NO: 120530 - DNA, 20 bp, Artificial Sequence
  MKO10120530_B_Tcf4
  gRNA
gaggccatccaagcccgtcc

SEQ ID NO: 120531 - DNA, 20 bp, Artificial Sequence
  MKO10120531_B_Tcf4
  gRNA
cagctctttgtccgtcccta

SEQ ID NO: 120532 - DNA, 20 bp, Artificial Sequence
  MKO10120532_B_Tcf4
  gRNA
caagatccctgctagtcatg

SEQ ID NO: 120533 - DNA, 20 bp, Artificial Sequence
  MKO10120533_B_Tcf7l1
  gRNA
gccgagcagcgacagcgctt

SEQ ID NO: 120534 - DNA, 20 bp, Artificial Sequence
  MKO10120534_B_Tcf7l1
  gRNA
ccttaaaaaaagcgccatcc

SEQ ID NO: 120535 - DNA, 20 bp, Artificial Sequence
  MKO10120535_B_Tcf7l1
  gRNA
cttacggtgcgcgctccacc

SEQ ID NO: 120536 - DNA, 20 bp, Artificial Sequence
  MKO10120536_B_Tcf7l2
  gRNA
tcagctcgtcgttagcgcct

SEQ ID NO: 120537 - DNA, 20 bp, Artificial Sequence
  MKO10120537_B_Tcf7l2
  gRNA
tttaaggggccaccgtatcc

SEQ ID NO: 120538 - DNA, 20 bp, Artificial Sequence
  MKO10120538_B_Tcf7l2
  gRNA
cctccgggaaggcggaaaga

SEQ ID NO: 120539 - DNA, 20 bp, Artificial Sequence
  MKO10120539_B_Tcf7
  gRNA
gaaagctgggggacgccatg

SEQ ID NO: 120540 - DNA, 20 bp, Artificial Sequence
  MKO10120540_B_Tcf7
  gRNA
acacttaccagctcacagta

SEQ ID NO: 120541 - DNA, 20 bp, Artificial Sequence
  MKO10120541_B_Tcf7
  gRNA
actcacaggtttctatcata

SEQ ID NO: 120542 - DNA, 20 bp, Artificial Sequence
  MKO10120542_B_Tcfl5
  gRNA
caggtttggattaaagtggg

SEQ ID NO: 120543 - DNA, 20 bp, Artificial Sequence
  MKO10120543_B_Tcfl5
  gRNA
actttaatccaaacctgctc

SEQ ID NO: 120544 - DNA, 20 bp, Artificial Sequence
  MKO10120544_B_Tcfl5
  gRNA
tgccagccttgcacagacgc

SEQ ID NO: 120545 - DNA, 20 bp, Artificial Sequence
  MKO10120545_B_Tchhl1
  gRNA
gaccggcttgtcctgaatcc

SEQ ID NO: 120546 - DNA, 20 bp, Artificial Sequence
  MKO10120546_B_Tchhl1
  gRNA
ctgtgcgggtcagtgttgcc

SEQ ID NO: 120547 - DNA, 20 bp, Artificial Sequence
  MKO10120547_B_Tchhl1
  gRNA
gatagtttagtatcatccat

SEQ ID NO: 120548 - DNA, 20 bp, Artificial Sequence
  MKO10120548_B_Tchh
  gRNA
tatgcatcacaaagttgtga

SEQ ID NO: 120549 - DNA, 20 bp, Artificial Sequence
  MKO10120549_B_Tchh
  gRNA
gcgcgaccgtcagatcctag

SEQ ID NO: 120550 - DNA, 20 bp, Artificial Sequence
  MKO10120550_B_Tchh
  gRNA
tgttcctcgcgttcctcgcg

SEQ ID NO: 120551 - DNA, 20 bp, Artificial Sequence
  MKO10120551_B_Tchp
  gRNA
ctcgactctcatcctcgcct

SEQ ID NO: 120552 - DNA, 20 bp, Artificial Sequence
  MKO10120552_B_Tchp
  gRNA
aaggctccgcgagcagcacc

SEQ ID NO: 120553 - DNA, 20 bp, Artificial Sequence
  MKO10120553_B_Tchp
  gRNA
ctaccattgtgagaagatga

SEQ ID NO: 120554 - DNA, 20 bp, Artificial Sequence
  MKO10120554_B_Tcirg1
  gRNA
ccgagacctgctgcgcatcc

SEQ ID NO: 120555 - DNA, 20 bp, Artificial Sequence
  MKO10120555_B_Tcirg1
  gRNA
gaatgtggcccccgggtgcc

SEQ ID NO: 120556 - DNA, 20 bp, Artificial Sequence
  MKO10120556_B_Tcirg1
  gRNA
cgcggcaagctctccacagc

SEQ ID NO: 120557 - DNA, 20 bp, Artificial Sequence
  MKO10120557_B_Tcl1b1
  gRNA
gtcaccctaacaccagcatc

SEQ ID NO: 120558 - DNA, 20 bp, Artificial Sequence
  MKO10120558_B_Tcl1b1
  gRNA
ctcatagatgcccagtctaa

SEQ ID NO: 120559 - DNA, 20 bp, Artificial Sequence
  MKO10120559_B_Tcl1b1
  gRNA
agagcaactgatcctgatgc

SEQ ID NO: 120560 - DNA, 20 bp, Artificial Sequence
  MKO10120560_B_Tcl1b2
  gRNA
aaactcaccttgttgcaata

SEQ ID NO: 120561 - DNA, 20 bp, Artificial Sequence
  MKO10120561_B_Tcl1b2
  gRNA
gtcacctttactccagcatc

SEQ ID NO: 120562 - DNA, 20 bp, Artificial Sequence
  MKO10120562_B_Tcl1b2
  gRNA
agtgcaactgatcctgatgc

SEQ ID NO: 120563 - DNA, 20 bp, Artificial Sequence
  MKO10120563_B_Tcl1b3
  gRNA
gcatatgaccacaatccccc

SEQ ID NO: 120564 - DNA, 20 bp, Artificial Sequence
  MKO10120564_B_Tcl1b3
  gRNA
gcgaggtgggaatggcatcc

SEQ ID NO: 120565 - DNA, 20 bp, Artificial Sequence
  MKO10120565_B_Tcl1b3
  gRNA
agtaggctcctgggggattg

SEQ ID NO: 120566 - DNA, 20 bp, Artificial Sequence
  MKO10120566_B_Tcl1b4
  gRNA
acagtgggtagctgcaaaag

SEQ ID NO: 120567 - DNA, 20 bp, Artificial Sequence
  MKO10120567_B_Tcl1b4
  gRNA
actaggctcctggaagagtg

SEQ ID NO: 120568 - DNA, 20 bp, Artificial Sequence
  MKO10120568_B_Tcl1b4
  gRNA
ccacaagtggacagttacac

SEQ ID NO: 120569 - DNA, 20 bp, Artificial Sequence
  MKO10120569_B_Tcl1b5
  gRNA
cctcctggtctctgttagcc

SEQ ID NO: 120570 - DNA, 20 bp, Artificial Sequence
  MKO10120570_B_Tcl1b5
  gRNA
ctgtgtctgttgatccccag

SEQ ID NO: 120571 - DNA, 20 bp, Artificial Sequence
  MKO10120571_B_Tcl1b5
  gRNA
tgttcccgtgtatgtgttcc

SEQ ID NO: 120572 - DNA, 20 bp, Artificial Sequence
  MKO10120572_B_Tcl1
  gRNA
gggtctgggttattcatcgt

SEQ ID NO: 120573 - DNA, 20 bp, Artificial Sequence
  MKO10120573_B_Tcl1
  gRNA
ccgccctcagtttagagacg

SEQ ID NO: 120574 - DNA, 20 bp, Artificial Sequence
  MKO10120574_B_Tcl1
  gRNA
cttacgagctgcctttaatg

SEQ ID NO: 120575 - DNA, 20 bp, Artificial Sequence
  MKO10120575_B_Tcn2
  gRNA
aataccgcaggaggcactgc

SEQ ID NO: 120576 - DNA, 20 bp, Artificial Sequence
  MKO10120576_B_Tcn2
  gRNA
tcgcaggccaacgaagacgc

SEQ ID NO: 120577 - DNA, 20 bp, Artificial Sequence
  MKO10120577_B_Tcn2
  gRNA
tctgagaccacgaatcacca

SEQ ID NO: 120578 - DNA, 20 bp, Artificial Sequence
  MKO10120578_B_Tcof1
  gRNA
gctgcggttgcagaattgac

SEQ ID NO: 120579 - DNA, 20 bp, Artificial Sequence
  MKO10120579_B_Tcof1
  gRNA
gactcagcccgtcacccttc

SEQ ID NO: 120580 - DNA, 20 bp, Artificial Sequence
  MKO10120580_B_Tcof1
  gRNA
aagaggaggcagcaaccgaa

SEQ ID NO: 120581 - DNA, 20 bp, Artificial Sequence
  MKO10120581_B_Tcp10a
  gRNA
agagtgttgcttgctcttgc

SEQ ID NO: 120582 - DNA, 20 bp, Artificial Sequence
  MKO10120582_B_Tcp10a
  gRNA
cagaagcagatctgtgacct

SEQ ID NO: 120583 - DNA, 20 bp, Artificial Sequence
  MKO10120583_B_Tcp10a
  gRNA
gccagtgtacataaagatag

SEQ ID NO: 120584 - DNA, 20 bp, Artificial Sequence
  MKO10120584_B_Tcp10b
  gRNA
agcaagagcaagcaacactc

SEQ ID NO: 120585 - DNA, 20 bp, Artificial Sequence
  MKO10120585_B_Tcp10b
  gRNA
cagccagtgactctgtgtcc

SEQ ID NO: 120586 - DNA, 20 bp, Artificial Sequence
  MKO10120586_B_Tcp10b
  gRNA
aaatttctgcaaagaagctt

SEQ ID NO: 120587 - DNA, 20 bp, Artificial Sequence
  MKO10120587_B_Tcp10c
  gRNA
gccagtgtacataaagatag

SEQ ID NO: 120588 - DNA, 20 bp, Artificial Sequence
  MKO10120588_B_Tcp10c
  gRNA
gtggccattgtgcttctgtt

SEQ ID NO: 120589 - DNA, 20 bp, Artificial Sequence
  MKO10120589_B_Tcp10c
  gRNA
attccgagaggacaacctca

SEQ ID NO: 120590 - DNA, 20 bp, Artificial Sequence
  MKO10120590_B_Tcp11l1
  gRNA
agcagtcagtcgagtatgag

SEQ ID NO: 120591 - DNA, 20 bp, Artificial Sequence
  MKO10120591_B_Tcp11l1
  gRNA
aatgctactgatggcgaagt

SEQ ID NO: 120592 - DNA, 20 bp, Artificial Sequence
  MKO10120592_B_Tcp11l1
  gRNA
ttgggggctcttcacttaac

SEQ ID NO: 120593 - DNA, 20 bp, Artificial Sequence
  MKO10120593_B_Tcp11l2
  gRNA
tagacaaatcttccgtgtct

SEQ ID NO: 120594 - DNA, 20 bp, Artificial Sequence
  MKO10120594_B_Tcp11l2
  gRNA
catcgacctcattagacagc

SEQ ID NO: 120595 - DNA, 20 bp, Artificial Sequence
  MKO10120595_B_Tcp11l2
  gRNA
gaaagctaccaccaacatcg

SEQ ID NO: 120596 - DNA, 20 bp, Artificial Sequence
  MKO10120596_B_Tcp11
  gRNA
ctccagcagcaagccgaccg

SEQ ID NO: 120597 - DNA, 20 bp, Artificial Sequence
  MKO10120597_B_Tcp11
  gRNA
acaccatgcccagcgacttc

SEQ ID NO: 120598 - DNA, 20 bp, Artificial Sequence
  MKO10120598_B_Tcp11
  gRNA
cagatgctcccagaagtcgc

SEQ ID NO: 120599 - DNA, 20 bp, Artificial Sequence
  MKO10120599_B_Tcp1
  gRNA
tcaacaggtaatcattgcag

SEQ ID NO: 120600 - DNA, 20 bp, Artificial Sequence
  MKO10120600_B_Tcp1
  gRNA
gttcgtctgtgttaataatc

SEQ ID NO: 120601 - DNA, 20 bp, Artificial Sequence
  MKO10120601_B_Tcp1
  gRNA
catccaacatcagttattag

SEQ ID NO: 120602 - DNA, 20 bp, Artificial Sequence
  MKO10120602_B_Tcstv1
  gRNA
aattagaacaccttgtactc

SEQ ID NO: 120603 - DNA, 20 bp, Artificial Sequence
  MKO10120603_B_Tcstv1
  gRNA
gcctttctcacttcttctta

SEQ ID NO: 120604 - DNA, 20 bp, Artificial Sequence
  MKO10120604_B_Tcstv1
  gRNA
tcaatcttcggtaggatctc

SEQ ID NO: 120605 - DNA, 20 bp, Artificial Sequence
  MKO10120605_B_Tcstv3
  gRNA
ctccctgagcaagcttagtg

SEQ ID NO: 120606 - DNA, 20 bp, Artificial Sequence
  MKO10120606_B_Tcstv3
  gRNA
aaccctcactaagcttgctc

SEQ ID NO: 120607 - DNA, 20 bp, Artificial Sequence
  MKO10120607_B_Tcstv3
  gRNA
gaaacaaagtgtctcagaat

SEQ ID NO: 120608 - DNA, 20 bp, Artificial Sequence
  MKO10120608_B_Tcta
  gRNA
ctcaaaacgcacagagaata

SEQ ID NO: 120609 - DNA, 20 bp, Artificial Sequence
  MKO10120609_B_Tcta
  gRNA
cagaatggatccacacctga

SEQ ID NO: 120610 - DNA, 20 bp, Artificial Sequence
  MKO10120610_B_Tcta
  gRNA
tgtgttcccgtagaaccccc

SEQ ID NO: 120611 - DNA, 20 bp, Artificial Sequence
  MKO10120611_B_Tcte1
  gRNA
cacggaccccaacgtgatcc

SEQ ID NO: 120612 - DNA, 20 bp, Artificial Sequence
  MKO10120612_B_Tcte1
  gRNA
ccaagcaatcgcccacgccc

SEQ ID NO: 120613 - DNA, 20 bp, Artificial Sequence
  MKO10120613_B_Tcte1
  gRNA
cctccgcctcaactgtatcg

SEQ ID NO: 120614 - DNA, 20 bp, Artificial Sequence
  MKO10120614_B_Tcte2
  gRNA
gagatagcagctactgtgat

SEQ ID NO: 120615 - DNA, 20 bp, Artificial Sequence
  MKO10120615_B_Tcte2
  gRNA
aagcctccgagtggccttct

SEQ ID NO: 120616 - DNA, 20 bp, Artificial Sequence
  MKO10120616_B_Tcte2
  gRNA
taatttaggggatcccgaga

SEQ ID NO: 120617 - DNA, 20 bp, Artificial Sequence
  MKO10120617_B_Tcte3
  gRNA
gatgactcaattgctgatgt

SEQ ID NO: 120618 - DNA, 20 bp, Artificial Sequence
  MKO10120618_B_Tcte3
  gRNA
ccctcatttgtcacttgaat

SEQ ID NO: 120619 - DNA, 20 bp, Artificial Sequence
  MKO10120619_B_Tcte3
  gRNA
gtataatgaatttataacga

SEQ ID NO: 120620 - DNA, 20 bp, Artificial Sequence
  MKO10120620_B_Tctex1d1
  gRNA
ggtgctgaaagcttacgtca

SEQ ID NO: 120621 - DNA, 20 bp, Artificial Sequence
  MKO10120621_B_Tctex1d1
  gRNA
ctaattgtcatcgtttacat

SEQ ID NO: 120622 - DNA, 20 bp, Artificial Sequence
  MKO10120622_B_Tctex1d1
  gRNA
tcccaccaaacctttccccg

SEQ ID NO: 120623 - DNA, 20 bp, Artificial Sequence
  MKO10120623_B_Tctex1d2
  gRNA
atgattaaagataagctaaa

SEQ ID NO: 120624 - DNA, 20 bp, Artificial Sequence
  MKO10120624_B_Tctex1d2
  gRNA
gcatggctgctcgctgtttc

SEQ ID NO: 120625 - DNA, 20 bp, Artificial Sequence
  MKO10120625_B_Tctex1d2
  gRNA
atggtggtgcaagtggtgat

SEQ ID NO: 120626 - DNA, 20 bp, Artificial Sequence
  MKO10120626_B_Tctex1d4
  gRNA
attgatgagacccgacctat

SEQ ID NO: 120627 - DNA, 20 bp, Artificial Sequence
  MKO10120627_B_Tctex1d4
  gRNA
agggatggtcgtcgacctcc

SEQ ID NO: 120628 - DNA, 20 bp, Artificial Sequence
  MKO10120628_B_Tctex1d4
  gRNA
cgttgcacacgagtttgtag

SEQ ID NO: 120629 - DNA, 20 bp, Artificial Sequence
  MKO10120629_B_Tctn1
  gRNA
cccacagcccactaaatacg

SEQ ID NO: 120630 - DNA, 20 bp, Artificial Sequence
  MKO10120630_B_Tctn1
  gRNA
cagttgacatcacactgtgc

SEQ ID NO: 120631 - DNA, 20 bp, Artificial Sequence
  MKO10120631_B_Tctn1
  gRNA
gcacacagagatgacgtgag

SEQ ID NO: 120632 - DNA, 20 bp, Artificial Sequence
  MKO10120632_B_Tctn2
  gRNA
ccctgaggtccgagcgaccc

SEQ ID NO: 120633 - DNA, 20 bp, Artificial Sequence
  MKO10120633_B_Tctn2
  gRNA
gaatgaggctgtctcgtctg

SEQ ID NO: 120634 - DNA, 20 bp, Artificial Sequence
  MKO10120634_B_Tctn2
  gRNA
catcctcgctgcctccgacc

SEQ ID NO: 120635 - DNA, 20 bp, Artificial Sequence
  MKO10120635_B_Tctn3
  gRNA
acaaaactgtgtcgttccac

SEQ ID NO: 120636 - DNA, 20 bp, Artificial Sequence
  MKO10120636_B_Tctn3
  gRNA
ctcaccctatagaatagtac

SEQ ID NO: 120637 - DNA, 20 bp, Artificial Sequence
  MKO10120637_B_Tctn3
  gRNA
tgtgccgagagcaaccctgc

SEQ ID NO: 120638 - DNA, 20 bp, Artificial Sequence
  MKO10120638_B_Tdgf1
  gRNA
tttccagtttgtgccttccg

SEQ ID NO: 120639 - DNA, 20 bp, Artificial Sequence
  MKO10120639_B_Tdgf1
  gRNA
ccatcagagataacagcatt

SEQ ID NO: 120640 - DNA, 20 bp, Artificial Sequence
  MKO10120640_B_Tdgf1
  gRNA
aataaaacttgctgtctgaa

SEQ ID NO: 120641 - DNA, 20 bp, Artificial Sequence
  MKO10120641_B_Tdg
  gRNA
agggaagtgtctgttcatgt

SEQ ID NO: 120642 - DNA, 20 bp, Artificial Sequence
  MKO10120642_B_Tdg
  gRNA
tttcagaagctccaaagaga

SEQ ID NO: 120643 - DNA, 20 bp, Artificial Sequence
  MKO10120643_B_Tdg
  gRNA
cacttacagaagtgatttcc

SEQ ID NO: 120644 - DNA, 20 bp, Artificial Sequence
  MKO10120644_B_Tdh
  gRNA
cagtgccctgctgagtgccg

SEQ ID NO: 120645 - DNA, 20 bp, Artificial Sequence
  MKO10120645_B_Tdh
  gRNA
accagttatattcacatctc

SEQ ID NO: 120646 - DNA, 20 bp, Artificial Sequence
  MKO10120646_B_Tdh
  gRNA
cctagggggtcttggccagc

SEQ ID NO: 120647 - DNA, 20 bp, Artificial Sequence
  MKO10120647_B_Tdo2
  gRNA
gaaccgagaactgctgtacc

SEQ ID NO: 120648 - DNA, 20 bp, Artificial Sequence
  MKO10120648_B_Tdo2
  gRNA
ctattcatcataactcatca

SEQ ID NO: 120649 - DNA, 20 bp, Artificial Sequence
  MKO10120649_B_Tdo2
  gRNA
gttcgtgaaatcttccaaaa

SEQ ID NO: 120650 - DNA, 20 bp, Artificial Sequence
  MKO10120650_B_Tdp1
  gRNA
aacccgatcctgcttgtgca

SEQ ID NO: 120651 - DNA, 20 bp, Artificial Sequence
  MKO10120651_B_Tdp1
  gRNA
gcaaagttggatattgcatt

SEQ ID NO: 120652 - DNA, 20 bp, Artificial Sequence
  MKO10120652_B_Tdp1
  gRNA
gagacaagtgtcccaaacag

SEQ ID NO: 120653 - DNA, 20 bp, Artificial Sequence
  MKO10120653_B_Tdp2
  gRNA
aattaggtatagtccagatg

SEQ ID NO: 120654 - DNA, 20 bp, Artificial Sequence
  MKO10120654_B_Tdp2
  gRNA
gttctctggcagctcgaagt

SEQ ID NO: 120655 - DNA, 20 bp, Artificial Sequence
  MKO10120655_B_Tdp2
  gRNA
tcccacgtccttcaagtccg

SEQ ID NO: 120656 - DNA, 20 bp, Artificial Sequence
  MKO10120656_B_Tdpoz1
  gRNA
attcaggttatgaatcttaa

SEQ ID NO: 120657 - DNA, 20 bp, Artificial Sequence
  MKO10120657_B_Tdpoz1
  gRNA
caatatcgacttccactctg

SEQ ID NO: 120658 - DNA, 20 bp, Artificial Sequence
  MKO10120658_B_Tdpoz1
  gRNA
gccatctgcagatcccagtt

SEQ ID NO: 120659 - DNA, 20 bp, Artificial Sequence
  MKO10120659_B_Tdpoz2
  gRNA
gtcatcattcaaacgcctta

SEQ ID NO: 120660 - DNA, 20 bp, Artificial Sequence
  MKO10120660_B_Tdpoz2
  gRNA
cctctgcaggaacgtctctg

SEQ ID NO: 120661 - DNA, 20 bp, Artificial Sequence
  MKO10120661_B_Tdpoz2
  gRNA
ttccttaacactgatctgtg

SEQ ID NO: 120662 - DNA, 20 bp, Artificial Sequence
  MKO10120662_B_Tdpoz3
  gRNA
ttcaaaaagtttctccttcg

SEQ ID NO: 120663 - DNA, 20 bp, Artificial Sequence
  MKO10120663_B_Tdpoz3
  gRNA
ttctcctttcccatatgaat

SEQ ID NO: 120664 - DNA, 20 bp, Artificial Sequence
  MKO10120664_B_Tdpoz3
  gRNA
gtgcagcagtcttcacagag

SEQ ID NO: 120665 - DNA, 20 bp, Artificial Sequence
  MKO10120665_B_Tdpoz4
  gRNA
ggacttgatggtcatgtgtg

SEQ ID NO: 120666 - DNA, 20 bp, Artificial Sequence
  MKO10120666_B_Tdpoz4
  gRNA
cattatagtttatgcttctg

SEQ ID NO: 120667 - DNA, 20 bp, Artificial Sequence
  MKO10120667_B_Tdpoz4
  gRNA
ggagtcacatccccgcttgg

SEQ ID NO: 120668 - DNA, 20 bp, Artificial Sequence
  MKO10120668_B_Tdpoz5
  gRNA
ggattcaaaaagttcatcct

SEQ ID NO: 120669 - DNA, 20 bp, Artificial Sequence
  MKO10120669_B_Tdpoz5
  gRNA
ctccatttcatgttcaaaca

SEQ ID NO: 120670 - DNA, 20 bp, Artificial Sequence
  MKO10120670_B_Tdpoz5
  gRNA
tcctcatctctcatccacgt

SEQ ID NO: 120671 - DNA, 20 bp, Artificial Sequence
  MKO10120671_B_Tdrd12
  gRNA
ctcttctgcagaccattacc

SEQ ID NO: 120672 - DNA, 20 bp, Artificial Sequence
  MKO10120672_B_Tdrd12
  gRNA
ttattacagattgaagatcc

SEQ ID NO: 120673 - DNA, 20 bp, Artificial Sequence
  MKO10120673_B_Tdrd12
  gRNA
gctgttatagaagtcattca

SEQ ID NO: 120674 - DNA, 20 bp, Artificial Sequence
  MKO10120674_B_Tdrd1
  gRNA
agtgctgacctttgctgtac

SEQ ID NO: 120675 - DNA, 20 bp, Artificial Sequence
  MKO10120675_B_Tdrd1
  gRNA
aacctcactcttcacttcaa

SEQ ID NO: 120676 - DNA, 20 bp, Artificial Sequence
  MKO10120676_B_Tdrd1
  gRNA
ccagtgtcaccattaagtct

SEQ ID NO: 120677 - DNA, 20 bp, Artificial Sequence
  MKO10120677_B_Tdrd3
  gRNA
caacgcggcgccggacacct

SEQ ID NO: 120678 - DNA, 20 bp, Artificial Sequence
  MKO10120678_B_Tdrd3
  gRNA
aacctacattgagagcaatc

SEQ ID NO: 120679 - DNA, 20 bp, Artificial Sequence
  MKO10120679_B_Tdrd3
  gRNA
ctttccaccgttgatgtcac

SEQ ID NO: 120680 - DNA, 20 bp, Artificial Sequence
  MKO10120680_B_Tdrd5
  gRNA
gtcgtgtctaagtttccaca

SEQ ID NO: 120681 - DNA, 20 bp, Artificial Sequence
  MKO10120681_B_Tdrd5
  gRNA
aggtccaatctgtgcaatca

SEQ ID NO: 120682 - DNA, 20 bp, Artificial Sequence
  MKO10120682_B_Tdrd5
  gRNA
cgccatgctcagtacttgtt

SEQ ID NO: 120683 - DNA, 20 bp, Artificial Sequence
  MKO10120683_B_Tdrd6
  gRNA
attctcgaactagccgaaga

SEQ ID NO: 120684 - DNA, 20 bp, Artificial Sequence
  MKO10120684_B_Tdrd6
  gRNA
acgcgggttacctttggtgg

SEQ ID NO: 120685 - DNA, 20 bp, Artificial Sequence
  MKO10120685_B_Tdrd6
  gRNA
cagtaagccccgagaatgtc

SEQ ID NO: 120686 - DNA, 20 bp, Artificial Sequence
  MKO10120686_B_Tdrd7
  gRNA
atgctcgcgtgcctctgcac

SEQ ID NO: 120687 - DNA, 20 bp, Artificial Sequence
  MKO10120687_B_Tdrd7
  gRNA
gcctgccctacggaagtcaa

SEQ ID NO: 120688 - DNA, 20 bp, Artificial Sequence
  MKO10120688_B_Tdrd7
  gRNA
ctcagcttgtggctcgtcag

SEQ ID NO: 120689 - DNA, 20 bp, Artificial Sequence
  MKO10120689_B_Tdrd9
  gRNA
aacctgcgtacctggtccac

SEQ ID NO: 120690 - DNA, 20 bp, Artificial Sequence
  MKO10120690_B_Tdrd9
  gRNA
tcttctttacaccgatttat

SEQ ID NO: 120691 - DNA, 20 bp, Artificial Sequence
  MKO10120691_B_Tdrd9
  gRNA
cacgcacatcttcattgacg

SEQ ID NO: 120692 - DNA, 20 bp, Artificial Sequence
  MKO10120692_B_Tdrkh
  gRNA
ctggaagttcctctccgcaa

SEQ ID NO: 120693 - DNA, 20 bp, Artificial Sequence
  MKO10120693_B_Tdrkh
  gRNA
gagcgagtgctgcttatcag

SEQ ID NO: 120694 - DNA, 20 bp, Artificial Sequence
  MKO10120694_B_Tdrkh
  gRNA
ggaacttccaggggtgtagc

SEQ ID NO: 120695 - DNA, 20 bp, Artificial Sequence
  MKO10120695_B_Tdrp
  gRNA
cctccggtcagcgggaaagc

SEQ ID NO: 120696 - DNA, 20 bp, Artificial Sequence
  MKO10120696_B_Tdrp
  gRNA
tccagatctcctaagtccaa

SEQ ID NO: 120697 - DNA, 20 bp, Artificial Sequence
  MKO10120697_B_Tdrp
  gRNA
ctgactcaccctttggactt

SEQ ID NO: 120698 - DNA, 20 bp, Artificial Sequence
  MKO10120698_B_Tead1
  gRNA
cgtcctgagtttgatgtatc

SEQ ID NO: 120699 - DNA, 20 bp, Artificial Sequence
  MKO10120699_B_Tead1
  gRNA
gcaggtgtctagtcacattc

SEQ ID NO: 120700 - DNA, 20 bp, Artificial Sequence
  MKO10120700_B_Tead1
  gRNA
gtcatcagcccagatcgtct

SEQ ID NO: 120701 - DNA, 20 bp, Artificial Sequence
  MKO10120701_B_Tead2
  gRNA
gatgagctgtgccgaagaca

SEQ ID NO: 120702 - DNA, 20 bp, Artificial Sequence
  MKO10120702_B_Tead2
  gRNA
cagagctccctgaccagaac

SEQ ID NO: 120703 - DNA, 20 bp, Artificial Sequence
  MKO10120703_B_Tead2
  gRNA
ccaggtctccagccatattc

SEQ ID NO: 120704 - DNA, 20 bp, Artificial Sequence
  MKO10120704_B_Tead3
  gRNA
tccgagctagaacctgtatg

SEQ ID NO: 120705 - DNA, 20 bp, Artificial Sequence
  MKO10120705_B_Tead3
  gRNA
tccttcacaggctatgaacc

SEQ ID NO: 120706 - DNA, 20 bp, Artificial Sequence
  MKO10120706_B_Tead3
  gRNA
cagtcctcagcttgatgtag

SEQ ID NO: 120707 - DNA, 20 bp, Artificial Sequence
  MKO10120707_B_Tead4
  gRNA
tcgcacgccatatcaagctc

SEQ ID NO: 120708 - DNA, 20 bp, Artificial Sequence
  MKO10120708_B_Tead4
  gRNA
gaagacgcgcacaaggaagc

SEQ ID NO: 120709 - DNA, 20 bp, Artificial Sequence
  MKO10120709_B_Tead4
  gRNA
actcactcgtgggatgttcc

SEQ ID NO: 120710 - DNA, 20 bp, Artificial Sequence
  MKO10120710_B_Tecpr1
  gRNA
ttcacctacccctttctcgg

SEQ ID NO: 120711 - DNA, 20 bp, Artificial Sequence
  MKO10120711_B_Tecpr1
  gRNA
accttatatgggccaccctc

SEQ ID NO: 120712 - DNA, 20 bp, Artificial Sequence
  MKO10120712_B_Tecpr1
  gRNA
ggtataggcgatacaaatcc

SEQ ID NO: 120713 - DNA, 20 bp, Artificial Sequence
  MKO10120713_B_Tecpr2
  gRNA
agacgagggtagagctcaaa

SEQ ID NO: 120714 - DNA, 20 bp, Artificial Sequence
  MKO10120714_B_Tecpr2
  gRNA
gtagtccagctgcacaatgg

SEQ ID NO: 120715 - DNA, 20 bp, Artificial Sequence
  MKO10120715_B_Tecpr2
  gRNA
caagaccagcatcacagcgc

SEQ ID NO: 120716 - DNA, 20 bp, Artificial Sequence
  MKO10120716_B_Tecrl
  gRNA
tagatggccccggcaccctg

SEQ ID NO: 120717 - DNA, 20 bp, Artificial Sequence
  MKO10120717_B_Tecrl
  gRNA
gtgatgtagtccctcaaata

SEQ ID NO: 120718 - DNA, 20 bp, Artificial Sequence
  MKO10120718_B_Tecrl
  gRNA
agctcctcaagtaaaaaaga

SEQ ID NO: 120719 - DNA, 20 bp, Artificial Sequence
  MKO10120719_B_Tecr
  gRNA
tcttctttgaggtggagatt

SEQ ID NO: 120720 - DNA, 20 bp, Artificial Sequence
  MKO10120720_B_Tecr
  gRNA
tcaccgtcacccagctgatc

SEQ ID NO: 120721 - DNA, 20 bp, Artificial Sequence
  MKO10120721_B_Tecr
  gRNA
acctcggggcccagatcagc

SEQ ID NO: 120722 - DNA, 20 bp, Artificial Sequence
  MKO10120722_B_Tecta
  gRNA
cgtcggataccagcacagcc

SEQ ID NO: 120723 - DNA, 20 bp, Artificial Sequence
  MKO10120723_B_Tecta
  gRNA
agggacttacatagacggtg

SEQ ID NO: 120724 - DNA, 20 bp, Artificial Sequence
  MKO10120724_B_Tecta
  gRNA
actttaaatgcccagcgtcc

SEQ ID NO: 120725 - DNA, 20 bp, Artificial Sequence
  MKO10120725_B_Tectb
  gRNA
cacgatcactgtgctgtcgt

SEQ ID NO: 120726 - DNA, 20 bp, Artificial Sequence
  MKO10120726_B_Tectb
  gRNA
cctaagaacaagtcctactg

SEQ ID NO: 120727 - DNA, 20 bp, Artificial Sequence
  MKO10120727_B_Tectb
  gRNA
tgttacaacggggtccatga

SEQ ID NO: 120728 - DNA, 20 bp, Artificial Sequence
  MKO10120728_B_Tec
  gRNA
accctcatagtagctcaaca

SEQ ID NO: 120729 - DNA, 20 bp, Artificial Sequence
  MKO10120729_B_Tec
  gRNA
ttaaataccatcctaaattc

SEQ ID NO: 120730 - DNA, 20 bp, Artificial Sequence
  MKO10120730_B_Tec
  gRNA
tgggtgaagaagttaaaaga

SEQ ID NO: 120731 - DNA, 20 bp, Artificial Sequence
  MKO10120731_B_Teddm1
  gRNA
cacgtagacacccaggaccg

SEQ ID NO: 120732 - DNA, 20 bp, Artificial Sequence
  MKO10120732_B_Teddm1
  gRNA
ggcccatttccccttattct

SEQ ID NO: 120733 - DNA, 20 bp, Artificial Sequence
  MKO10120733_B_Teddm1
  gRNA
ctgtggaaaatagcccatgc

SEQ ID NO: 120734 - DNA, 20 bp, Artificial Sequence
  MKO10120734_B_Tefm
  gRNA
ctgagaaagttcatcaagcc

SEQ ID NO: 120735 - DNA, 20 bp, Artificial Sequence
  MKO10120735_B_Tefm
  gRNA
aaaggagcccgggaatccat

SEQ ID NO: 120736 - DNA, 20 bp, Artificial Sequence
  MKO10120736_B_Tefm
  gRNA
ccctacctccggccttgatg

SEQ ID NO: 120737 - DNA, 20 bp, Artificial Sequence
  MKO10120737_B_Tef
  gRNA
cccccgcgcgagacgcgcct

SEQ ID NO: 120738 - DNA, 20 bp, Artificial Sequence
  MKO10120738_B_Tef
  gRNA
aggttacaagggcccgtact

SEQ ID NO: 120739 - DNA, 20 bp, Artificial Sequence
  MKO10120739_B_Tef
  gRNA
catccaggtccatgtactcg

SEQ ID NO: 120740 - DNA, 20 bp, Artificial Sequence
  MKO10120740_B_Tekt1
  gRNA
taagcaggttcatgactccg

SEQ ID NO: 120741 - DNA, 20 bp, Artificial Sequence
  MKO10120741_B_Tekt1
  gRNA
gcttacgtacaagacccgcc

SEQ ID NO: 120742 - DNA, 20 bp, Artificial Sequence
  MKO10120742_B_Tekt1
  gRNA
acgtaagcaggtcatccgtc

SEQ ID NO: 120743 - DNA, 20 bp, Artificial Sequence
  MKO10120743_B_Tekt2
  gRNA
ttactcgattcaacaagaac

SEQ ID NO: 120744 - DNA, 20 bp, Artificial Sequence
  MKO10120744_B_Tekt2
  gRNA
tgaaagcgtccatagagttg

SEQ ID NO: 120745 - DNA, 20 bp, Artificial Sequence
  MKO10120745_B_Tekt2
  gRNA
gttgctgccgaatttcctgc

SEQ ID NO: 120746 - DNA, 20 bp, Artificial Sequence
  MKO10120746_B_Tekt3
  gRNA
cgtcagctacttccggggcg

SEQ ID NO: 120747 - DNA, 20 bp, Artificial Sequence
  MKO10120747_B_Tekt3
  gRNA
taccgccagtagttctttct

SEQ ID NO: 120748 - DNA, 20 bp, Artificial Sequence
  MKO10120748_B_Tekt3
  gRNA
cgattcccattctcttctcg

SEQ ID NO: 120749 - DNA, 20 bp, Artificial Sequence
  MKO10120749_B_Tekt4
  gRNA
ctcattggtgtagcgggagc

SEQ ID NO: 120750 - DNA, 20 bp, Artificial Sequence
  MKO10120750_B_Tekt4
  gRNA
cgagtctgggccacacgcag

SEQ ID NO: 120751 - DNA, 20 bp, Artificial Sequence
  MKO10120751_B_Tekt4
  gRNA
gacccaccgtatctggtcca

SEQ ID NO: 120752 - DNA, 20 bp, Artificial Sequence
  MKO10120752_B_Tekt5
  gRNA
tgtcttcaatatcccgctct

SEQ ID NO: 120753 - DNA, 20 bp, Artificial Sequence
  MKO10120753_B_Tekt5
  gRNA
acgtggagaaaaaccttatc

SEQ ID NO: 120754 - DNA, 20 bp, Artificial Sequence
  MKO10120754_B_Tekt5
  gRNA
ccctggagtgtctgtacaat

SEQ ID NO: 120755 - DNA, 20 bp, Artificial Sequence
  MKO10120755_B_Tek
  gRNA
atcttggtgctggttcatta

SEQ ID NO: 120756 - DNA, 20 bp, Artificial Sequence
  MKO10120756_B_Tek
  gRNA
accatgaagatgcgtcaaca

SEQ ID NO: 120757 - DNA, 20 bp, Artificial Sequence
  MKO10120757_B_Tek
  gRNA
catttgccctcctgggttta

SEQ ID NO: 120758 - DNA, 20 bp, Artificial Sequence
  MKO10120758_B_Telo2
  gRNA
actgggtcaggttgtcccgc

SEQ ID NO: 120759 - DNA, 20 bp, Artificial Sequence
  MKO10120759_B_Telo2
  gRNA
gacgctgctcagcaaggttg

SEQ ID NO: 120760 - DNA, 20 bp, Artificial Sequence
  MKO10120760_B_Telo2
  gRNA
gtctgtggcagcgggtgtgc

SEQ ID NO: 120761 - DNA, 20 bp, Artificial Sequence
  MKO10120761_B_Ten1
  gRNA
actgcttgtctgcaccaact

SEQ ID NO: 120762 - DNA, 20 bp, Artificial Sequence
  MKO10120762_B_Ten1
  gRNA
ccttaccctccattcgctcc

SEQ ID NO: 120763 - DNA, 20 bp, Artificial Sequence
  MKO10120763_B_Ten1
  gRNA
tcccagtgacagccttagtc

SEQ ID NO: 120764 - DNA, 20 bp, Artificial Sequence
  MKO10120764_B_Tenc1
  gRNA
tcttccggaaaaccttctcc

SEQ ID NO: 120765 - DNA, 20 bp, Artificial Sequence
  MKO10120765_B_Tenc1
  gRNA
tctctctctagtctgcaagg

SEQ ID NO: 120766 - DNA, 20 bp, Artificial Sequence
  MKO10120766_B_Tenc1
  gRNA
ccaggtgacttcatcctgtc

SEQ ID NO: 120767 - DNA, 20 bp, Artificial Sequence
  MKO10120767_B_Tenm1
  gRNA
aaagggcttaccaattacat

SEQ ID NO: 120768 - DNA, 20 bp, Artificial Sequence
  MKO10120768_B_Tenm1
  gRNA
ttgttactagcctatgtaat

SEQ ID NO: 120769 - DNA, 20 bp, Artificial Sequence
  MKO10120769_B_Tenm1
  gRNA
cttccgttcatgatcagtgt

SEQ ID NO: 120770 - DNA, 20 bp, Artificial Sequence
  MKO10120770_B_Tenm2
  gRNA
ttccagacgacgtcttgaaa

SEQ ID NO: 120771 - DNA, 20 bp, Artificial Sequence
  MKO10120771_B_Tenm2
  gRNA
tggtgtataaacggtccctg

SEQ ID NO: 120772 - DNA, 20 bp, Artificial Sequence
  MKO10120772_B_Tenm2
  gRNA
gagccctccccacaccgaag

SEQ ID NO: 120773 - DNA, 20 bp, Artificial Sequence
  MKO10120773_B_Tenm3
  gRNA
aacactgtatcgttaccttc

SEQ ID NO: 120774 - DNA, 20 bp, Artificial Sequence
  MKO10120774_B_Tenm3
  gRNA
acccgagtccgtccagctgc

SEQ ID NO: 120775 - DNA, 20 bp, Artificial Sequence
  MKO10120775_B_Tenm3
  gRNA
gacgacgccactgttcagta

SEQ ID NO: 120776 - DNA, 20 bp, Artificial Sequence
  MKO10120776_B_Tenm4
  gRNA
tgcgccctgaccgtgtgctc

SEQ ID NO: 120777 - DNA, 20 bp, Artificial Sequence
  MKO10120777_B_Tenm4
  gRNA
cgtcactgtaagccccatca

SEQ ID NO: 120778 - DNA, 20 bp, Artificial Sequence
  MKO10120778_B_Tenm4
  gRNA
ctcagcgcctcccgccatga

SEQ ID NO: 120779 - DNA, 20 bp, Artificial Sequence
  MKO10120779_B_Tep1
  gRNA
tggctggcgggaccgcctct

SEQ ID NO: 120780 - DNA, 20 bp, Artificial Sequence
  MKO10120780_B_Tep1
  gRNA
ggaaccggagttcatcctta

SEQ ID NO: 120781 - DNA, 20 bp, Artificial Sequence
  MKO10120781_B_Tep1
  gRNA
aataccttaaggatgaactc

SEQ ID NO: 120782 - DNA, 20 bp, Artificial Sequence
  MKO10120782_B_Tepp
  gRNA
gtcacttacagcgagtcgaa

SEQ ID NO: 120783 - DNA, 20 bp, Artificial Sequence
  MKO10120783_B_Tepp
  gRNA
gcttctgtccgtagcggtcc

SEQ ID NO: 120784 - DNA, 20 bp, Artificial Sequence
  MKO10120784_B_Tepp
  gRNA
ctttccctacccgccagttc

SEQ ID NO: 120785 - DNA, 20 bp, Artificial Sequence
  MKO10120785_B_Terf1
  gRNA
tgcagctatagctgaagtgt

SEQ ID NO: 120786 - DNA, 20 bp, Artificial Sequence
  MKO10120786_B_Terf1
  gRNA
ataattaccgtgtaaaattc

SEQ ID NO: 120787 - DNA, 20 bp, Artificial Sequence
  MKO10120787_B_Terf1
  gRNA
taaggctgtagctgtttgta

SEQ ID NO: 120788 - DNA, 20 bp, Artificial Sequence
  MKO10120788_B_Terf2ip
  gRNA
tccggagttcggagaagccg

SEQ ID NO: 120789 - DNA, 20 bp, Artificial Sequence
  MKO10120789_B_Terf2ip
  gRNA
accacggcttctccgaactc

SEQ ID NO: 120790 - DNA, 20 bp, Artificial Sequence
  MKO10120790_B_Terf2ip
  gRNA
tgacgacacgaaaaatgcac

SEQ ID NO: 120791 - DNA, 20 bp, Artificial Sequence
  MKO10120791_B_Terf2
  gRNA
actgcataacccgcagcaac

SEQ ID NO: 120792 - DNA, 20 bp, Artificial Sequence
  MKO10120792_B_Terf2
  gRNA
gagctcagcctccatatcaa

SEQ ID NO: 120793 - DNA, 20 bp, Artificial Sequence
  MKO10120793_B_Terf2
  gRNA
ggaatcagctatcaatgtgc

SEQ ID NO: 120794 - DNA, 20 bp, Artificial Sequence
  MKO10120794_B_Tert
  gRNA
cccgtagccgcactctctca

SEQ ID NO: 120795 - DNA, 20 bp, Artificial Sequence
  MKO10120795_B_Tert
  gRNA
catacgtggtacagctgctt

SEQ ID NO: 120796 - DNA, 20 bp, Artificial Sequence
  MKO10120796_B_Tert
  gRNA
tgaagagagtcttgagacgc

SEQ ID NO: 120797 - DNA, 20 bp, Artificial Sequence
  MKO10120797_B_Tescl
  gRNA
caggttccggttgtcgaaga

SEQ ID NO: 120798 - DNA, 20 bp, Artificial Sequence
  MKO10120798_B_Tescl
  gRNA
cggtcactggcataagaccg

SEQ ID NO: 120799 - DNA, 20 bp, Artificial Sequence
  MKO10120799_B_Tescl
  gRNA
tgaacaagtgcgacttcagc

SEQ ID NO: 120800 - DNA, 20 bp, Artificial Sequence
  MKO10120800_B_Tesc
  gRNA
cgtcttaccgaatggtgggc

SEQ ID NO: 120801 - DNA, 20 bp, Artificial Sequence
  MKO10120801_B_Tesc
  gRNA
cagtgacggccgcatcaccc

SEQ ID NO: 120802 - DNA, 20 bp, Artificial Sequence
  MKO10120802_B_Tesc
  gRNA
tccgatgcagctgctctatc

SEQ ID NO: 120803 - DNA, 20 bp, Artificial Sequence
  MKO10120803_B_Tesk1
  gRNA
ccatgacttgtcccgactgt

SEQ ID NO: 120804 - DNA, 20 bp, Artificial Sequence
  MKO10120804_B_Tesk1
  gRNA
gcagctgcacgcgcttacag

SEQ ID NO: 120805 - DNA, 20 bp, Artificial Sequence
  MKO10120805_B_Tesk1
  gRNA
taagcgcgtgcagctgccct

SEQ ID NO: 120806 - DNA, 20 bp, Artificial Sequence
  MKO10120806_B_Tesk2
  gRNA
acagttgcatgcacttacag

SEQ ID NO: 120807 - DNA, 20 bp, Artificial Sequence
  MKO10120807_B_Tesk2
  gRNA
taggtgcgacacagagcttc

SEQ ID NO: 120808 - DNA, 20 bp, Artificial Sequence
  MKO10120808_B_Tesk2
  gRNA
aacccattacctgaggatgt

SEQ ID NO: 120809 - DNA, 20 bp, Artificial Sequence
  MKO10120809_B_Tespa1
  gRNA
ttggtaggatattctagcca

SEQ ID NO: 120810 - DNA, 20 bp, Artificial Sequence
  MKO10120810_B_Tespa1
  gRNA
ttcatacttacctagagaag

SEQ ID NO: 120811 - DNA, 20 bp, Artificial Sequence
  MKO10120811_B_Tespa1
  gRNA
gccacattactgtctaccaa

SEQ ID NO: 120812 - DNA, 20 bp, Artificial Sequence
  MKO10120812_B_Tes
  gRNA
tgcaaacacaccatgaacga

SEQ ID NO: 120813 - DNA, 20 bp, Artificial Sequence
  MKO10120813_B_Tes
  gRNA
acagctcccggctcatgacc

SEQ ID NO: 120814 - DNA, 20 bp, Artificial Sequence
  MKO10120814_B_Tes
  gRNA
agccggccatctatgctgaa

SEQ ID NO: 120815 - DNA, 20 bp, Artificial Sequence
  MKO10120815_B_Tet1
  gRNA
gattaatcacatcaacgccg

SEQ ID NO: 120816 - DNA, 20 bp, Artificial Sequence
  MKO10120816_B_Tet1
  gRNA
cccatattatacacaccttg

SEQ ID NO: 120817 - DNA, 20 bp, Artificial Sequence
  MKO10120817_B_Tet1
  gRNA
gccccaaggtgtgtataata

SEQ ID NO: 120818 - DNA, 20 bp, Artificial Sequence
  MKO10120818_B_Tet2
  gRNA
gctccttattatacccatct

SEQ ID NO: 120819 - DNA, 20 bp, Artificial Sequence
  MKO10120819_B_Tet2
  gRNA
ccatgtagcctaaatttcct

SEQ ID NO: 120820 - DNA, 20 bp, Artificial Sequence
  MKO10120820_B_Tet2
  gRNA
acatggagctgagccaaaag

SEQ ID NO: 120821 - DNA, 20 bp, Artificial Sequence
  MKO10120821_B_Tet3
  gRNA
tcatctacacgggcaaggag

SEQ ID NO: 120822 - DNA, 20 bp, Artificial Sequence
  MKO10120822_B_Tet3
  gRNA
aggcccatattacactcacc

SEQ ID NO: 120823 - DNA, 20 bp, Artificial Sequence
  MKO10120823_B_Tet3
  gRNA
agtatggcaaccctaccagc

SEQ ID NO: 120824 - DNA, 20 bp, Artificial Sequence
  MKO10120824_B_Tex101
  gRNA
ggtccaaaatacctactgcc

SEQ ID NO: 120825 - DNA, 20 bp, Artificial Sequence
  MKO10120825_B_Tex101
  gRNA
atccagtatactgcacctcc

SEQ ID NO: 120826 - DNA, 20 bp, Artificial Sequence
  MKO10120826_B_Tex101
  gRNA
gtggcgggttcctgacatgt

SEQ ID NO: 120827 - DNA, 20 bp, Artificial Sequence
  MKO10120827_B_Tex10
  gRNA
acttgctgcataacctgcag

SEQ ID NO: 120828 - DNA, 20 bp, Artificial Sequence
  MKO10120828_B_Tex10
  gRNA
ggttgagcgagagcctctgc

SEQ ID NO: 120829 - DNA, 20 bp, Artificial Sequence
  MKO10120829_B_Tex10
  gRNA
tcaatctagtgccaccttta

SEQ ID NO: 120830 - DNA, 20 bp, Artificial Sequence
  MKO10120830_B_Tex11
  gRNA
atgaattaccagttatgatc

SEQ ID NO: 120831 - DNA, 20 bp, Artificial Sequence
  MKO10120831_B_Tex11
  gRNA
tagtaactgcccagttccac

SEQ ID NO: 120832 - DNA, 20 bp, Artificial Sequence
  MKO10120832_B_Tex11
  gRNA
agaagtaaaagtcagtaatg

SEQ ID NO: 120833 - DNA, 20 bp, Artificial Sequence
  MKO10120833_B_Tex12
  gRNA
ccgactctagaaactgcaag

SEQ ID NO: 120834 - DNA, 20 bp, Artificial Sequence
  MKO10120834_B_Tex12
  gRNA
cctcttgcagtttctagagt

SEQ ID NO: 120835 - DNA, 20 bp, Artificial Sequence
  MKO10120835_B_Tex12
  gRNA
gctctggagaaggatttgag

SEQ ID NO: 120836 - DNA, 20 bp, Artificial Sequence
  MKO10120836_B_Tex13a
  gRNA
attagatctcagacccaaga

SEQ ID NO: 120837 - DNA, 20 bp, Artificial Sequence
  MKO10120837_B_Tex13a
  gRNA
gtgagcgaagcgcacaccca

SEQ ID NO: 120838 - DNA, 20 bp, Artificial Sequence
  MKO10120838_B_Tex13a
  gRNA
aacccactaccaagatcctc

SEQ ID NO: 120839 - DNA, 20 bp, Artificial Sequence
  MKO10120839_B_Tex13
  gRNA
agagttgtgcgagactacag

SEQ ID NO: 120840 - DNA, 20 bp, Artificial Sequence
  MKO10120840_B_Tex13
  gRNA
gcactctgcgcccctgcaac

SEQ ID NO: 120841 - DNA, 20 bp, Artificial Sequence
  MKO10120841_B_Tex13
  gRNA
ctcagccatcatgaattgcg

SEQ ID NO: 120842 - DNA, 20 bp, Artificial Sequence
  MKO10120842_B_Tex14
  gRNA
gggctgccgatgagtcgctg

SEQ ID NO: 120843 - DNA, 20 bp, Artificial Sequence
  MKO10120843_B_Tex14
  gRNA
cctgcgactccatgatgaga

SEQ ID NO: 120844 - DNA, 20 bp, Artificial Sequence
  MKO10120844_B_Tex14
  gRNA
gagtgctcccgtcaaagcag

SEQ ID NO: 120845 - DNA, 20 bp, Artificial Sequence
  MKO10120845_B_Tex15
  gRNA
gatggaaaatacccgtttcc

SEQ ID NO: 120846 - DNA, 20 bp, Artificial Sequence
  MKO10120846_B_Tex15
  gRNA
aacagaatccgtttctacga

SEQ ID NO: 120847 - DNA, 20 bp, Artificial Sequence
  MKO10120847_B_Tex15
  gRNA
taggttaccatgaaagatgt

SEQ ID NO: 120848 - DNA, 20 bp, Artificial Sequence
  MKO10120848_B_Tex16
  gRNA
tgctatgctgaaacgtttga

SEQ ID NO: 120849 - DNA, 20 bp, Artificial Sequence
  MKO10120849_B_Tex16
  gRNA
ttgcagctcagactccaaac

SEQ ID NO: 120850 - DNA, 20 bp, Artificial Sequence
  MKO10120850_B_Tex16
  gRNA
aagcttaggaggcaggataa

SEQ ID NO: 120851 - DNA, 20 bp, Artificial Sequence
  MKO10120851_B_Tex19.1
  gRNA
agggatgagctggtgcgagc

SEQ ID NO: 120852 - DNA, 20 bp, Artificial Sequence
  MKO10120852_B_Tex19.1
  gRNA
gcccaacttctttccgaaaa

SEQ ID NO: 120853 - DNA, 20 bp, Artificial Sequence
  MKO10120853_B_Tex19.1
  gRNA
ctctggcatgttaatgtgcc

SEQ ID NO: 120854 - DNA, 20 bp, Artificial Sequence
  MKO10120854_B_Tex19.2
  gRNA
tgagaacccgtgtccagcgc

SEQ ID NO: 120855 - DNA, 20 bp, Artificial Sequence
  MKO10120855_B_Tex19.2
  gRNA
gggctcaactccaacaatac

SEQ ID NO: 120856 - DNA, 20 bp, Artificial Sequence
  MKO10120856_B_Tex19.2
  gRNA
cctcgtcgttaagaacatgc

SEQ ID NO: 120857 - DNA, 20 bp, Artificial Sequence
  MKO10120857_B_Tex21
  gRNA
cggtcctttcagattcatat

SEQ ID NO: 120858 - DNA, 20 bp, Artificial Sequence
  MKO10120858_B_Tex21
  gRNA
agaaaagctaacgtctgagt

SEQ ID NO: 120859 - DNA, 20 bp, Artificial Sequence
  MKO10120859_B_Tex21
  gRNA
atattatctgtagctcctgc

SEQ ID NO: 120860 - DNA, 20 bp, Artificial Sequence
  MKO10120860_B_Tex22
  gRNA
gccactgtagcgtcttcctc

SEQ ID NO: 120861 - DNA, 20 bp, Artificial Sequence
  MKO10120861_B_Tex22
  gRNA
gctggccttgcagcgtatgc

SEQ ID NO: 120862 - DNA, 20 bp, Artificial Sequence
  MKO10120862_B_Tex22
  gRNA
cctctcctgcatacgctgca

SEQ ID NO: 120863 - DNA, 20 bp, Artificial Sequence
  MKO10120863_B_Tex24
  gRNA
taaagtacatcgcccatctc

SEQ ID NO: 120864 - DNA, 20 bp, Artificial Sequence
  MKO10120864_B_Tex24
  gRNA
ctcctgtagtgcttacagtt

SEQ ID NO: 120865 - DNA, 20 bp, Artificial Sequence
  MKO10120865_B_Tex24
  gRNA
tgaccgagtcctctgtcctg

SEQ ID NO: 120866 - DNA, 20 bp, Artificial Sequence
  MKO10120866_B_Tex261
  gRNA
ccgcaaaaaactgaaatgcc

SEQ ID NO: 120867 - DNA, 20 bp, Artificial Sequence
  MKO10120867_B_Tex261
  gRNA
catccccacagggctagtgg

SEQ ID NO: 120868 - DNA, 20 bp, Artificial Sequence
  MKO10120868_B_Tex261
  gRNA
ttcctcaccgcctggctgca

SEQ ID NO: 120869 - DNA, 20 bp, Artificial Sequence
  MKO10120869_B_Tex264
  gRNA
gttcagtcggggttctccca

SEQ ID NO: 120870 - DNA, 20 bp, Artificial Sequence
  MKO10120870_B_Tex264
  gRNA
ggcaaccgtggctgggacga

SEQ ID NO: 120871 - DNA, 20 bp, Artificial Sequence
  MKO10120871_B_Tex264
  gRNA
gctgtgtgctcaccctcgcc

SEQ ID NO: 120872 - DNA, 20 bp, Artificial Sequence
  MKO10120872_B_Tex26
  gRNA
caggtctacgaagtccctct

SEQ ID NO: 120873 - DNA, 20 bp, Artificial Sequence
  MKO10120873_B_Tex26
  gRNA
tatcgaaattcagtgtccag

SEQ ID NO: 120874 - DNA, 20 bp, Artificial Sequence
  MKO10120874_B_Tex26
  gRNA
agtaccacgatgagtatacc

SEQ ID NO: 120875 - DNA, 20 bp, Artificial Sequence
  MKO10120875_B_Tex28
  gRNA
tctacagcaagctacccaac

SEQ ID NO: 120876 - DNA, 20 bp, Artificial Sequence
  MKO10120876_B_Tex28
  gRNA
tgatcacttgcagagatacc

SEQ ID NO: 120877 - DNA, 20 bp, Artificial Sequence
  MKO10120877_B_Tex28
  gRNA
ttgccacctcaaacagcatc

SEQ ID NO: 120878 - DNA, 20 bp, Artificial Sequence
  MKO10120878_B_Tex29
  gRNA
ggaggttctcgaatgggttc

SEQ ID NO: 120879 - DNA, 20 bp, Artificial Sequence
  MKO10120879_B_Tex29
  gRNA
gagactcctgcagcgctccc

SEQ ID NO: 120880 - DNA, 20 bp, Artificial Sequence
  MKO10120880_B_Tex29
  gRNA
atttcaacctgtgagtcctc

SEQ ID NO: 120881 - DNA, 20 bp, Artificial Sequence
  MKO10120881_B_Tex2
  gRNA
gtggttcaggcggttcatcc

SEQ ID NO: 120882 - DNA, 20 bp, Artificial Sequence
  MKO10120882_B_Tex2
  gRNA
ctagacttcgtcccctcttg

SEQ ID NO: 120883 - DNA, 20 bp, Artificial Sequence
  MKO10120883_B_Tex2
  gRNA
ctcattgtagcttgccctcc

SEQ ID NO: 120884 - DNA, 20 bp, Artificial Sequence
  MKO10120884_B_Tex30
  gRNA
gagcccgacacaaacagtac

SEQ ID NO: 120885 - DNA, 20 bp, Artificial Sequence
  MKO10120885_B_Tex30
  gRNA
tgcctgagatttacttgcaa

SEQ ID NO: 120886 - DNA, 20 bp, Artificial Sequence
  MKO10120886_B_Tex30
  gRNA
tagaattacctgaagacctc

SEQ ID NO: 120887 - DNA, 20 bp, Artificial Sequence
  MKO10120887_B_Tex33
  gRNA
tcctttcaactacttggcct

SEQ ID NO: 120888 - DNA, 20 bp, Artificial Sequence
  MKO10120888_B_Tex33
  gRNA
catcaggctcgacaggccat

SEQ ID NO: 120889 - DNA, 20 bp, Artificial Sequence
  MKO10120889_B_Tex33
  gRNA
catgaacttgcagaaagcgc

SEQ ID NO: 120890 - DNA, 20 bp, Artificial Sequence
  MKO10120890_B_Tex35
  gRNA
gaagggctactcatcagaaa

SEQ ID NO: 120891 - DNA, 20 bp, Artificial Sequence
  MKO10120891_B_Tex35
  gRNA
tcattagataaaggatataa

SEQ ID NO: 120892 - DNA, 20 bp, Artificial Sequence
  MKO10120892_B_Tex35
  gRNA
cgataaactttatgagtttg

SEQ ID NO: 120893 - DNA, 20 bp, Artificial Sequence
  MKO10120893_B_Tex36
  gRNA
aacccgtctttgaataatga

SEQ ID NO: 120894 - DNA, 20 bp, Artificial Sequence
  MKO10120894_B_Tex36
  gRNA
ctacgtacctaagaaagctg

SEQ ID NO: 120895 - DNA, 20 bp, Artificial Sequence
  MKO10120895_B_Tex36
  gRNA
cttccgtcattattcaaaga

SEQ ID NO: 120896 - DNA, 20 bp, Artificial Sequence
  MKO10120896_B_Tex37
  gRNA
agtccaccatgtatgagctt

SEQ ID NO: 120897 - DNA, 20 bp, Artificial Sequence
  MKO10120897_B_Tex37
  gRNA
gtccttggccatggcacgtg

SEQ ID NO: 120898 - DNA, 20 bp, Artificial Sequence
  MKO10120898_B_Tex37
  gRNA
ttctagagtcacgccacaag

SEQ ID NO: 120899 - DNA, 20 bp, Artificial Sequence
  MKO10120899_B_Tex38
  gRNA
tgctgtcaccaagaccgagc

SEQ ID NO: 120900 - DNA, 20 bp, Artificial Sequence
  MKO10120900_B_Tex38
  gRNA
gggaatggggagtcagtccg

SEQ ID NO: 120901 - DNA, 20 bp, Artificial Sequence
  MKO10120901_B_Tex38
  gRNA
cctacagcccactgttgtac

SEQ ID NO: 120902 - DNA, 20 bp, Artificial Sequence
  MKO10120902_B_Tex40
  gRNA
tcgaagggatcaggaagcgc

SEQ ID NO: 120903 - DNA, 20 bp, Artificial Sequence
  MKO10120903_B_Tex40
  gRNA
aatcactaatattcagccta

SEQ ID NO: 120904 - DNA, 20 bp, Artificial Sequence
  MKO10120904_B_Tex40
  gRNA
gttctgctgctctgtccagt

SEQ ID NO: 120905 - DNA, 20 bp, Artificial Sequence
  MKO10120905_B_Tex9
  gRNA
actaactacatcatgcaaag

SEQ ID NO: 120906 - DNA, 20 bp, Artificial Sequence
  MKO10120906_B_Tex9
  gRNA
agcagcaagaagtgcgagcc

SEQ ID NO: 120907 - DNA, 20 bp, Artificial Sequence
  MKO10120907_B_Tex9
  gRNA
taggcgtttaaatgaagaat

SEQ ID NO: 120908 - DNA, 20 bp, Artificial Sequence
  MKO10120908_B_Tfam
  gRNA
tatgaactcataggtttctt

SEQ ID NO: 120909 - DNA, 20 bp, Artificial Sequence
  MKO10120909_B_Tfam
  gRNA
gctaactccaagtcagctga

SEQ ID NO: 120910 - DNA, 20 bp, Artificial Sequence
  MKO10120910_B_Tfam
  gRNA
agatgcaaaactttcagaat

SEQ ID NO: 120911 - DNA, 20 bp, Artificial Sequence
  MKO10120911_B_Tfap2a
  gRNA
agcgacgcgttaagacactc

SEQ ID NO: 120912 - DNA, 20 bp, Artificial Sequence
  MKO10120912_B_Tfap2a
  gRNA
taccctcctcacgtcactag

SEQ ID NO: 120913 - DNA, 20 bp, Artificial Sequence
  MKO10120913_B_Tfap2a
  gRNA
taccttccactagtgacgtg

SEQ ID NO: 120914 - DNA, 20 bp, Artificial Sequence
  MKO10120914_B_Tfap2b
  gRNA
accttctgaggacgccgccc

SEQ ID NO: 120915 - DNA, 20 bp, Artificial Sequence
  MKO10120915_B_Tfap2b
  gRNA
tgcagagccaaatcgaaaaa

SEQ ID NO: 120916 - DNA, 20 bp, Artificial Sequence
  MKO10120916_B_Tfap2b
  gRNA
gactgagcaaaatacctcgc

SEQ ID NO: 120917 - DNA, 20 bp, Artificial Sequence
  MKO10120917_B_Tfap2c
  gRNA
gaccttccacgagagacgtg

SEQ ID NO: 120918 - DNA, 20 bp, Artificial Sequence
  MKO10120918_B_Tfap2c
  gRNA
agttactttgtacttcgacg

SEQ ID NO: 120919 - DNA, 20 bp, Artificial Sequence
  MKO10120919_B_Tfap2c
  gRNA
gaatgacagtctgatcgtgt

SEQ ID NO: 120920 - DNA, 20 bp, Artificial Sequence
  MKO10120920_B_Tfap2d
  gRNA
ctcttctgatcaccccccct

SEQ ID NO: 120921 - DNA, 20 bp, Artificial Sequence
  MKO10120921_B_Tfap2d
  gRNA
gtgcctcaatgcttcacttc

SEQ ID NO: 120922 - DNA, 20 bp, Artificial Sequence
  MKO10120922_B_Tfap2d
  gRNA
tgactatcgctgaggtaaag

SEQ ID NO: 120923 - DNA, 20 bp, Artificial Sequence
  MKO10120923_B_Tfap2e
  gRNA
ttgcaggcgatagatgaccc

SEQ ID NO: 120924 - DNA, 20 bp, Artificial Sequence
  MKO10120924_B_Tfap2e
  gRNA
gctgccttccgacgaccagc

SEQ ID NO: 120925 - DNA, 20 bp, Artificial Sequence
  MKO10120925_B_Tfap2e
  gRNA
accttcggaggacacccccc

SEQ ID NO: 120926 - DNA, 20 bp, Artificial Sequence
  MKO10120926_B_Tfap4
  gRNA
gcattggctcacccgacatc

SEQ ID NO: 120927 - DNA, 20 bp, Artificial Sequence
  MKO10120927_B_Tfap4
  gRNA
cctgcaggtgcgctccctcg

SEQ ID NO: 120928 - DNA, 20 bp, Artificial Sequence
  MKO10120928_B_Tfap4
  gRNA
ccccgctcacctgggtccgt

SEQ ID NO: 120929 - DNA, 20 bp, Artificial Sequence
  MKO10120929_B_Tfb1m
  gRNA
caactccactgattatcaag

SEQ ID NO: 120930 - DNA, 20 bp, Artificial Sequence
  MKO10120930_B_Tfb1m
  gRNA
gcacagtcgcctttccatta

SEQ ID NO: 120931 - DNA, 20 bp, Artificial Sequence
  MKO10120931_B_Tfb1m
  gRNA
gcacatctccatgaacaatt

SEQ ID NO: 120932 - DNA, 20 bp, Artificial Sequence
  MKO10120932_B_Tfb2m
  gRNA
ccaggtcctggaatcctgac

SEQ ID NO: 120933 - DNA, 20 bp, Artificial Sequence
  MKO10120933_B_Tfb2m
  gRNA
ggtgttcctataaaagtatt

SEQ ID NO: 120934 - DNA, 20 bp, Artificial Sequence
  MKO10120934_B_Tfb2m
  gRNA
atatctgtatatagattcgc

SEQ ID NO: 120935 - DNA, 20 bp, Artificial Sequence
  MKO10120935_B_Tfcp2l1
  gRNA
ggcaagcgggccccattctc

SEQ ID NO: 120936 - DNA, 20 bp, Artificial Sequence
  MKO10120936_B_Tfcp2l1
  gRNA
accgccaaccctccaactgt

SEQ ID NO: 120937 - DNA, 20 bp, Artificial Sequence
  MKO10120937_B_Tfcp2l1
  gRNA
catatttcgtgttcagatct

SEQ ID NO: 120938 - DNA, 20 bp, Artificial Sequence
  MKO10120938_B_Tfcp2
  gRNA
gaccttgattgaggtacgtc

SEQ ID NO: 120939 - DNA, 20 bp, Artificial Sequence
  MKO10120939_B_Tfcp2
  gRNA
tccagaactcaacggcaagc

SEQ ID NO: 120940 - DNA, 20 bp, Artificial Sequence
  MKO10120940_B_Tfcp2
  gRNA
accagcttgccgttgagttc

SEQ ID NO: 120941 - DNA, 20 bp, Artificial Sequence
  MKO10120941_B_Tfdp1
  gRNA
ttgctgtgtgatattgacat

SEQ ID NO: 120942 - DNA, 20 bp, Artificial Sequence
  MKO10120942_B_Tfdp1
  gRNA
tgtcaatatcacacagcaag

SEQ ID NO: 120943 - DNA, 20 bp, Artificial Sequence
  MKO10120943_B_Tfdp1
  gRNA
ctttcccaggactaagattc

SEQ ID NO: 120944 - DNA, 20 bp, Artificial Sequence
  MKO10120944_B_Tfdp2
  gRNA
tttgtcgatttctctgtacc

SEQ ID NO: 120945 - DNA, 20 bp, Artificial Sequence
  MKO10120945_B_Tfdp2
  gRNA
cctgcctaccaattctgctc

SEQ ID NO: 120946 - DNA, 20 bp, Artificial Sequence
  MKO10120946_B_Tfdp2
  gRNA
cattcctgagcagaattggt

SEQ ID NO: 120947 - DNA, 20 bp, Artificial Sequence
  MKO10120947_B_Tfe3
  gRNA
ctcgatatcagcaacaatcc

SEQ ID NO: 120948 - DNA, 20 bp, Artificial Sequence
  MKO10120948_B_Tfe3
  gRNA
gacgacgcagagagtgtagc

SEQ ID NO: 120949 - DNA, 20 bp, Artificial Sequence
  MKO10120949_B_Tfe3
  gRNA
accacctgcagcaagctcgc

SEQ ID NO: 120950 - DNA, 20 bp, Artificial Sequence
  MKO10120950_B_Tfeb
  gRNA
acgtgtccagcccgcacccc

SEQ ID NO: 120951 - DNA, 20 bp, Artificial Sequence
  MKO10120951_B_Tfeb
  gRNA
ggtcaccgctgtacacgttc

SEQ ID NO: 120952 - DNA, 20 bp, Artificial Sequence
  MKO10120952_B_Tfeb
  gRNA
tggacacgtactgtccacct

SEQ ID NO: 120953 - DNA, 20 bp, Artificial Sequence
  MKO10120953_B_Tfec
  gRNA
ggcatttcttcagctaatgc

SEQ ID NO: 120954 - DNA, 20 bp, Artificial Sequence
  MKO10120954_B_Tfec
  gRNA
aagtattctacccatgagaa

SEQ ID NO: 120955 - DNA, 20 bp, Artificial Sequence
  MKO10120955_B_Tfec
  gRNA
actcacggatcattagactt

SEQ ID NO: 120956 - DNA, 20 bp, Artificial Sequence
  MKO10120956_B_Tff1
  gRNA
acagatcaccttgtgctcca

SEQ ID NO: 120957 - DNA, 20 bp, Artificial Sequence
  MKO10120957_B_Tff1
  gRNA
ttagaagaatgtcccttcta

SEQ ID NO: 120958 - DNA, 20 bp, Artificial Sequence
  MKO10120958_B_Tff1
  gRNA
cccgtggtgcttccacccca

SEQ ID NO: 120959 - DNA, 20 bp, Artificial Sequence
  MKO10120959_B_Tff2
  gRNA
gtgtcagctcgcaagaattg

SEQ ID NO: 120960 - DNA, 20 bp, Artificial Sequence
  MKO10120960_B_Tff2
  gRNA
gccagcaggggggcacctcg

SEQ ID NO: 120961 - DNA, 20 bp, Artificial Sequence
  MKO10120961_B_Tff2
  gRNA
cagccccctgtcggtgctcc

SEQ ID NO: 120962 - DNA, 20 bp, Artificial Sequence
  MKO10120962_B_Tff3
  gRNA
acactgctccgatgtgacag

SEQ ID NO: 120963 - DNA, 20 bp, Artificial Sequence
  MKO10120963_B_Tff3
  gRNA
gtaatctgcagctatcccag

SEQ ID NO: 120964 - DNA, 20 bp, Artificial Sequence
  MKO10120964_B_Tff3
  gRNA
gacagctccaagccaatgta

SEQ ID NO: 120965 - DNA, 20 bp, Artificial Sequence
  MKO10120965_B_Tfg
  gRNA
aaataaagtgaatcgcttat

SEQ ID NO: 120966 - DNA, 20 bp, Artificial Sequence
  MKO10120966_B_Tfg
  gRNA
aaaaacgtcatgtcagcatt

SEQ ID NO: 120967 - DNA, 20 bp, Artificial Sequence
  MKO10120967_B_Tfg
  gRNA
tctactacactgaattgcaa

SEQ ID NO: 120968 - DNA, 20 bp, Artificial Sequence
  MKO10120968_B_Tfip11
  gRNA
gggaagtcctcctgcttaac

SEQ ID NO: 120969 - DNA, 20 bp, Artificial Sequence
  MKO10120969_B_Tfip11
  gRNA
acagtcttgtaagagtactt

SEQ ID NO: 120970 - DNA, 20 bp, Artificial Sequence
  MKO10120970_B_Tfip11
  gRNA
ctacgtccctgggcgtggcc

SEQ ID NO: 120971 - DNA, 20 bp, Artificial Sequence
  MKO10120971_B_Tfpi2
  gRNA
aagtgccgcagattcaacta

SEQ ID NO: 120972 - DNA, 20 bp, Artificial Sequence
  MKO10120972_B_Tfpi2
  gRNA
tttagctctgatcgacaaac

SEQ ID NO: 120973 - DNA, 20 bp, Artificial Sequence
  MKO10120973_B_Tfpi2
  gRNA
tgccaccgtgcctgcgttaa

SEQ ID NO: 120974 - DNA, 20 bp, Artificial Sequence
  MKO10120974_B_Tfpi
  gRNA
ttaccttgtagattctgagc

SEQ ID NO: 120975 - DNA, 20 bp, Artificial Sequence
  MKO10120975_B_Tfpi
  gRNA
ttatgagaagacagctgtga

SEQ ID NO: 120976 - DNA, 20 bp, Artificial Sequence
  MKO10120976_B_Tfpi
  gRNA
tgaagaaagaatatgccttt

SEQ ID NO: 120977 - DNA, 20 bp, Artificial Sequence
  MKO10120977_B_Tfpt
  gRNA
gtcaatgaagcccccacccg

SEQ ID NO: 120978 - DNA, 20 bp, Artificial Sequence
  MKO10120978_B_Tfpt
  gRNA
aatggtacctgcgctcctgc

SEQ ID NO: 120979 - DNA, 20 bp, Artificial Sequence
  MKO10120979_B_Tfpt
  gRNA
tagccagttcaccattgtgt

SEQ ID NO: 120980 - DNA, 20 bp, Artificial Sequence
  MKO10120980_B_Tfr2
  gRNA
gtggactgacacgcactacg

SEQ ID NO: 120981 - DNA, 20 bp, Artificial Sequence
  MKO10120981_B_Tfr2
  gRNA
ccggccggaccacgttgtac

SEQ ID NO: 120982 - DNA, 20 bp, Artificial Sequence
  MKO10120982_B_Tfr2
  gRNA
tcgaaaggctgccccctatc

SEQ ID NO: 120983 - DNA, 20 bp, Artificial Sequence
  MKO10120983_B_Tfrc
  gRNA
ctccatctacttgccgagca

SEQ ID NO: 120984 - DNA, 20 bp, Artificial Sequence
  MKO10120984_B_Tfrc
  gRNA
gttaccatttgactgcacta

SEQ ID NO: 120985 - DNA, 20 bp, Artificial Sequence
  MKO10120985_B_Tfrc
  gRNA
ctacatcatctcgcttatat

SEQ ID NO: 120986 - DNA, 20 bp, Artificial Sequence
  MKO10120986_B_Tgds
  gRNA
gcaaaactacaagtttatac

SEQ ID NO: 120987 - DNA, 20 bp, Artificial Sequence
  MKO10120987_B_Tgds
  gRNA
tatgatcgtaaatctagaca

SEQ ID NO: 120988 - DNA, 20 bp, Artificial Sequence
  MKO10120988_B_Tgds
  gRNA
ctgtgcaagcttgaagaatc

SEQ ID NO: 120989 - DNA, 20 bp, Artificial Sequence
  MKO10120989_B_Tgfa
  gRNA
gcttctcatgtctgcagacg

SEQ ID NO: 120990 - DNA, 20 bp, Artificial Sequence
  MKO10120990_B_Tgfa
  gRNA
tgccccagcagactcacccg

SEQ ID NO: 120991 - DNA, 20 bp, Artificial Sequence
  MKO10120991_B_Tgfa
  gRNA
gaagcaagccatcactgccc

SEQ ID NO: 120992 - DNA, 20 bp, Artificial Sequence
  MKO10120992_B_Tgfb1i1
  gRNA
ttcagccacctccgccactc

SEQ ID NO: 120993 - DNA, 20 bp, Artificial Sequence
  MKO10120993_B_Tgfb1i1
  gRNA
tagatgatccttgtccccag

SEQ ID NO: 120994 - DNA, 20 bp, Artificial Sequence
  MKO10120994_B_Tgfb1i1
  gRNA
gtgagctcttgtcttcagat

SEQ ID NO: 120995 - DNA, 20 bp, Artificial Sequence
  MKO10120995_B_Tgfb1
  gRNA
cagggatcagccccaaacgt

SEQ ID NO: 120996 - DNA, 20 bp, Artificial Sequence
  MKO10120996_B_Tgfb1
  gRNA
ttgacgtcactggagttgta

SEQ ID NO: 120997 - DNA, 20 bp, Artificial Sequence
  MKO10120997_B_Tgfb1
  gRNA
tccggtgccgtgagctgtgc

SEQ ID NO: 120998 - DNA, 20 bp, Artificial Sequence
  MKO10120998_B_Tgfb2
  gRNA
gtaattattagacggcacga

SEQ ID NO: 120999 - DNA, 20 bp, Artificial Sequence
  MKO10120999_B_Tgfb2
  gRNA
gcagcggattgaactgtatc

SEQ ID NO: 121000 - DNA, 20 bp, Artificial Sequence
  MKO10121000_B_Tgfb2
  gRNA
cgacgtgacagacgctgtgc

SEQ ID NO: 121001 - DNA, 20 bp, Artificial Sequence
  MKO10121001_B_Tgfb3
  gRNA
gatgatccccccacaccgac

SEQ ID NO: 121002 - DNA, 20 bp, Artificial Sequence
  MKO10121002_B_Tgfb3
  gRNA
ggttgggcacccgcaagacc

SEQ ID NO: 121003 - DNA, 20 bp, Artificial Sequence
  MKO10121003_B_Tgfb3
  gRNA
gaactggccgtctgccccaa

SEQ ID NO: 121004 - DNA, 20 bp, Artificial Sequence
  MKO10121004_B_Tgfbi
  gRNA
acttgccgcagatcttcctc

SEQ ID NO: 121005 - DNA, 20 bp, Artificial Sequence
  MKO10121005_B_Tgfbi
  gRNA
atcagttatgagtgctgtcc

SEQ ID NO: 121006 - DNA, 20 bp, Artificial Sequence
  MKO10121006_B_Tgfbi
  gRNA
ctcattgctaggagcaaaga

SEQ ID NO: 121007 - DNA, 20 bp, Artificial Sequence
  MKO10121007_B_Tgfbr1
  gRNA
catacaaatggcctgtctcg

SEQ ID NO: 121008 - DNA, 20 bp, Artificial Sequence
  MKO10121008_B_Tgfbr1
  gRNA
ttgacctaattcctcgagac

SEQ ID NO: 121009 - DNA, 20 bp, Artificial Sequence
  MKO10121009_B_Tgfbr1
  gRNA
gttacgccatgaaaatatcc

SEQ ID NO: 121010 - DNA, 20 bp, Artificial Sequence
  MKO10121010_B_Tgfbr2
  gRNA
acggccacgcagacttcatg

SEQ ID NO: 121011 - DNA, 20 bp, Artificial Sequence
  MKO10121011_B_Tgfbr2
  gRNA
tgctggcgatgcgcgtccac

SEQ ID NO: 121012 - DNA, 20 bp, Artificial Sequence
  MKO10121012_B_Tgfbr2
  gRNA
ggccgctgcatatcgtcctg

SEQ ID NO: 121013 - DNA, 20 bp, Artificial Sequence
  MKO10121013_B_Tgfbr3
  gRNA
ttccctcccacgtgtaacat

SEQ ID NO: 121014 - DNA, 20 bp, Artificial Sequence
  MKO10121014_B_Tgfbr3
  gRNA
cttgtggtgagtgtgcacgg

SEQ ID NO: 121015 - DNA, 20 bp, Artificial Sequence
  MKO10121015_B_Tgfbr3
  gRNA
ctgtcttcacatgccacacc

SEQ ID NO: 121016 - DNA, 20 bp, Artificial Sequence
  MKO10121016_B_Tgfbrap1
  gRNA
gaatgaaatccgcagcacag

SEQ ID NO: 121017 - DNA, 20 bp, Artificial Sequence
  MKO10121017_B_Tgfbrap1
  gRNA
agcccggaggaacattccaa

SEQ ID NO: 121018 - DNA, 20 bp, Artificial Sequence
  MKO10121018_B_Tgfbrap1
  gRNA
gatgtaaactcctttacttg

SEQ ID NO: 121019 - DNA, 20 bp, Artificial Sequence
  MKO10121019_B_Tgif1
  gRNA
cagttcacgatttcccgccg

SEQ ID NO: 121020 - DNA, 20 bp, Artificial Sequence
  MKO10121020_B_Tgif1
  gRNA
tccgccagcgcgtagaggga

SEQ ID NO: 121021 - DNA, 20 bp, Artificial Sequence
  MKO10121021_B_Tgif1
  gRNA
tccttacctgtagtgtggac

SEQ ID NO: 121022 - DNA, 20 bp, Artificial Sequence
  MKO10121022_B_Tgif2lx1
  gRNA
ccttcgtgactcaagctgta

SEQ ID NO: 121023 - DNA, 20 bp, Artificial Sequence
  MKO10121023_B_Tgif2lx1
  gRNA
agatttcaatcactgagcct

SEQ ID NO: 121024 - DNA, 20 bp, Artificial Sequence
  MKO10121024_B_Tgif2lx1
  gRNA
tgtaacgaatttcccagcga

SEQ ID NO: 121025 - DNA, 20 bp, Artificial Sequence
  MKO10121025_B_Tgif2lx2
  gRNA
cgaagagaaagtgccatatc

SEQ ID NO: 121026 - DNA, 20 bp, Artificial Sequence
  MKO10121026_B_Tgif2lx2
  gRNA
tgtaacgaatttcccagcga

SEQ ID NO: 121027 - DNA, 20 bp, Artificial Sequence
  MKO10121027_B_Tgif2lx2
  gRNA
agatttcaatcactgagcct

SEQ ID NO: 121028 - DNA, 20 bp, Artificial Sequence
  MKO10121028_B_Tgif2
  gRNA
atcatgtcggacagcgatct

SEQ ID NO: 121029 - DNA, 20 bp, Artificial Sequence
  MKO10121029_B_Tgif2
  gRNA
caacgcctacccctcagagc

SEQ ID NO: 121030 - DNA, 20 bp, Artificial Sequence
  MKO10121030_B_Tgif2
  gRNA
cctctgatgtggctctcccc

SEQ ID NO: 121031 - DNA, 20 bp, Artificial Sequence
  MKO10121031_B_Tgm1
  gRNA
acgaacctggaactatggtc

SEQ ID NO: 121032 - DNA, 20 bp, Artificial Sequence
  MKO10121032_B_Tgm1
  gRNA
atggcatccccctccgatcc

SEQ ID NO: 121033 - DNA, 20 bp, Artificial Sequence
  MKO10121033_B_Tgm1
  gRNA
gatgagctgattgtgcgccg

SEQ ID NO: 121034 - DNA, 20 bp, Artificial Sequence
  MKO10121034_B_Tgm2
  gRNA
agtcccgactacggttcttc

SEQ ID NO: 121035 - DNA, 20 bp, Artificial Sequence
  MKO10121035_B_Tgm2
  gRNA
agttcctgaagaaccgtagt

SEQ ID NO: 121036 - DNA, 20 bp, Artificial Sequence
  MKO10121036_B_Tgm2
  gRNA
agatgaagccctgttgcgta

SEQ ID NO: 121037 - DNA, 20 bp, Artificial Sequence
  MKO10121037_B_Tgm3
  gRNA
ttataatgctcttcaacccg

SEQ ID NO: 121038 - DNA, 20 bp, Artificial Sequence
  MKO10121038_B_Tgm3
  gRNA
gtgggcagcacaaatcgaat

SEQ ID NO: 121039 - DNA, 20 bp, Artificial Sequence
  MKO10121039_B_Tgm3
  gRNA
ctgcgagccacatcagtcac

SEQ ID NO: 121040 - DNA, 20 bp, Artificial Sequence
  MKO10121040_B_Tgm4
  gRNA
agaccaagaagctcgtgctg

SEQ ID NO: 121041 - DNA, 20 bp, Artificial Sequence
  MKO10121041_B_Tgm4
  gRNA
cagtgctgctgacgccgtag

SEQ ID NO: 121042 - DNA, 20 bp, Artificial Sequence
  MKO10121042_B_Tgm4
  gRNA
agggtgaacgagtataaagc

SEQ ID NO: 121043 - DNA, 20 bp, Artificial Sequence
  MKO10121043_B_Tgm5
  gRNA
gagtatgttgtgaacgatta

SEQ ID NO: 121044 - DNA, 20 bp, Artificial Sequence
  MKO10121044_B_Tgm5
  gRNA
agccccgattcttaaagtac

SEQ ID NO: 121045 - DNA, 20 bp, Artificial Sequence
  MKO10121045_B_Tgm5
  gRNA
gaatatcatagatatctgct

SEQ ID NO: 121046 - DNA, 20 bp, Artificial Sequence
  MKO10121046_B_Tgm6
  gRNA
actaggacttcggtccagaa

SEQ ID NO: 121047 - DNA, 20 bp, Artificial Sequence
  MKO10121047_B_Tgm6
  gRNA
gactggcagcattcgaaaaa

SEQ ID NO: 121048 - DNA, 20 bp, Artificial Sequence
  MKO10121048_B_Tgm6
  gRNA
gtgtcaggccctcttcccgc

SEQ ID NO: 121049 - DNA, 20 bp, Artificial Sequence
  MKO10121049_B_Tgm7
  gRNA
acgctgccgttccattccag

SEQ ID NO: 121050 - DNA, 20 bp, Artificial Sequence
  MKO10121050_B_Tgm7
  gRNA
gtgcagggtggtaagcgcca

SEQ ID NO: 121051 - DNA, 20 bp, Artificial Sequence
  MKO10121051_B_Tgm7
  gRNA
gagtatatcatgagtgacta

SEQ ID NO: 121052 - DNA, 20 bp, Artificial Sequence
  MKO10121052_B_Tgoln1
  gRNA
ctaccaacgtttgaacctaa

SEQ ID NO: 121053 - DNA, 20 bp, Artificial Sequence
  MKO10121053_B_Tgoln1
  gRNA
agactgcaggatgcggttcc

SEQ ID NO: 121054 - DNA, 20 bp, Artificial Sequence
  MKO10121054_B_Tgoln1
  gRNA
ttacctttaggttcaaacgt

SEQ ID NO: 121055 - DNA, 20 bp, Artificial Sequence
  MKO10121055_B_Tgoln2
  gRNA
ctaccaacgtttgaacctaa

SEQ ID NO: 121056 - DNA, 20 bp, Artificial Sequence
  MKO10121056_B_Tgoln2
  gRNA
gctagttgtactagcataaa

SEQ ID NO: 121057 - DNA, 20 bp, Artificial Sequence
  MKO10121057_B_Tgoln2
  gRNA
agggcggaagcgcagactgc

SEQ ID NO: 121058 - DNA, 20 bp, Artificial Sequence
  MKO10121058_B_Tgs1
  gRNA
gaatcaaggtcactttcatt

SEQ ID NO: 121059 - DNA, 20 bp, Artificial Sequence
  MKO10121059_B_Tgs1
  gRNA
tgaaagtgaccttgattctg

SEQ ID NO: 121060 - DNA, 20 bp, Artificial Sequence
  MKO10121060_B_Tgs1
  gRNA
catgtccatcagccccatta

SEQ ID NO: 121061 - DNA, 20 bp, Artificial Sequence
  MKO10121061_B_Tgtp1
  gRNA
atctctcttgtagttaatgg

SEQ ID NO: 121062 - DNA, 20 bp, Artificial Sequence
  MKO10121062_B_Tgtp1
  gRNA
taagcctaagagtttcaata

SEQ ID NO: 121063 - DNA, 20 bp, Artificial Sequence
  MKO10121063_B_Tgtp1
  gRNA
ggaagtcctcaagaatatta

SEQ ID NO: 121064 - DNA, 20 bp, Artificial Sequence
  MKO10121064_B_Tgtp2
  gRNA
atctctcttgtagttaatgg

SEQ ID NO: 121065 - DNA, 20 bp, Artificial Sequence
  MKO10121065_B_Tgtp2
  gRNA
taagcctaagagtttcaata

SEQ ID NO: 121066 - DNA, 20 bp, Artificial Sequence
  MKO10121066_B_Tgtp2
  gRNA
ggaagtcctcaagaatatta

SEQ ID NO: 121067 - DNA, 20 bp, Artificial Sequence
  MKO10121067_B_Tg
  gRNA
actccccatctgcagtgcac

SEQ ID NO: 121068 - DNA, 20 bp, Artificial Sequence
  MKO10121068_B_Tg
  gRNA
ggagtggctgtgcatctacc

SEQ ID NO: 121069 - DNA, 20 bp, Artificial Sequence
  MKO10121069_B_Tg
  gRNA
agcaagattgaccatcattt

SEQ ID NO: 121070 - DNA, 20 bp, Artificial Sequence
  MKO10121070_B_Tha1
  gRNA
ttgctccgtgggcgtgggcc

SEQ ID NO: 121071 - DNA, 20 bp, Artificial Sequence
  MKO10121071_B_Tha1
  gRNA
tcaaccgagctccatccatg

SEQ ID NO: 121072 - DNA, 20 bp, Artificial Sequence
  MKO10121072_B_Tha1
  gRNA
ccacctccacgtctatgagc

SEQ ID NO: 121073 - DNA, 20 bp, Artificial Sequence
  MKO10121073_B_Thada
  gRNA
ctgcatggagaactttaacc

SEQ ID NO: 121074 - DNA, 20 bp, Artificial Sequence
  MKO10121074_B_Thada
  gRNA
gaaccccttgaagaaagttt

SEQ ID NO: 121075 - DNA, 20 bp, Artificial Sequence
  MKO10121075_B_Thada
  gRNA
acctgcaggtagagcaagtg

SEQ ID NO: 121076 - DNA, 20 bp, Artificial Sequence
  MKO10121076_B_Thap11
  gRNA
cacccagttgcagccgaacc

SEQ ID NO: 121077 - DNA, 20 bp, Artificial Sequence
  MKO10121077_B_Thap11
  gRNA
tcttgcggccgccctgaaag

SEQ ID NO: 121078 - DNA, 20 bp, Artificial Sequence
  MKO10121078_B_Thap11
  gRNA
ggtgggaacgcgcaccgtgt

SEQ ID NO: 121079 - DNA, 20 bp, Artificial Sequence
  MKO10121079_B_Thap1
  gRNA
taggatcacgtagcccctct

SEQ ID NO: 121080 - DNA, 20 bp, Artificial Sequence
  MKO10121080_B_Thap1
  gRNA
tcaccccggactgctttaag

SEQ ID NO: 121081 - DNA, 20 bp, Artificial Sequence
  MKO10121081_B_Thap1
  gRNA
cagaaaaccgacaggttatc

SEQ ID NO: 121082 - DNA, 20 bp, Artificial Sequence
  MKO10121082_B_Thap2
  gRNA
taagctcttcacaaagcacg

SEQ ID NO: 121083 - DNA, 20 bp, Artificial Sequence
  MKO10121083_B_Thap2
  gRNA
gagaacgcagagcaactcga

SEQ ID NO: 121084 - DNA, 20 bp, Artificial Sequence
  MKO10121084_B_Thap2
  gRNA
ttgtacccatataaagtctc

SEQ ID NO: 121085 - DNA, 20 bp, Artificial Sequence
  MKO10121085_B_Thap3
  gRNA
gttctgaaaagcgaacaccg

SEQ ID NO: 121086 - DNA, 20 bp, Artificial Sequence
  MKO10121086_B_Thap3
  gRNA
cttaccagatcgagaagcaa

SEQ ID NO: 121087 - DNA, 20 bp, Artificial Sequence
  MKO10121087_B_Thap3
  gRNA
agccgggacctcgggccaga

SEQ ID NO: 121088 - DNA, 20 bp, Artificial Sequence
  MKO10121088_B_Thap4
  gRNA
acttacgagaagttgagcat

SEQ ID NO: 121089 - DNA, 20 bp, Artificial Sequence
  MKO10121089_B_Thap4
  gRNA
ctttgccaaggagccccatg

SEQ ID NO: 121090 - DNA, 20 bp, Artificial Sequence
  MKO10121090_B_Thap4
  gRNA
actgacaaaggccactttgt

SEQ ID NO: 121091 - DNA, 20 bp, Artificial Sequence
  MKO10121091_B_Thap7
  gRNA
ccgcgacactgctccgccgc

SEQ ID NO: 121092 - DNA, 20 bp, Artificial Sequence
  MKO10121092_B_Thap7
  gRNA
ccgctgctcccgccgcttgc

SEQ ID NO: 121093 - DNA, 20 bp, Artificial Sequence
  MKO10121093_B_Thap7
  gRNA
gcgtcgaacagccaagacca

SEQ ID NO: 121094 - DNA, 20 bp, Artificial Sequence
  MKO10121094_B_Thbd
  gRNA
ggtgaatactcgcgatcctg

SEQ ID NO: 121095 - DNA, 20 bp, Artificial Sequence
  MKO10121095_B_Thbd
  gRNA
tcgcgagtattcaccgtcag

SEQ ID NO: 121096 - DNA, 20 bp, Artificial Sequence
  MKO10121096_B_Thbd
  gRNA
tgtgacgacccggtgcatct

SEQ ID NO: 121097 - DNA, 20 bp, Artificial Sequence
  MKO10121097_B_Thbs1
  gRNA
caccatcgtgaccactctgc

SEQ ID NO: 121098 - DNA, 20 bp, Artificial Sequence
  MKO10121098_B_Thbs1
  gRNA
actcctcgttgttcttgtac

SEQ ID NO: 121099 - DNA, 20 bp, Artificial Sequence
  MKO10121099_B_Thbs1
  gRNA
agtccagtacaagaacaacg

SEQ ID NO: 121100 - DNA, 20 bp, Artificial Sequence
  MKO10121100_B_Thbs2
  gRNA
tcacatcaccacagatctcg

SEQ ID NO: 121101 - DNA, 20 bp, Artificial Sequence
  MKO10121101_B_Thbs2
  gRNA
ttgtaccacatgcacctgca

SEQ ID NO: 121102 - DNA, 20 bp, Artificial Sequence
  MKO10121102_B_Thbs2
  gRNA
actcaccttgcaggtgcatg

SEQ ID NO: 121103 - DNA, 20 bp, Artificial Sequence
  MKO10121103_B_Thbs3
  gRNA
ggaatcgatgaaaattattc

SEQ ID NO: 121104 - DNA, 20 bp, Artificial Sequence
  MKO10121104_B_Thbs3
  gRNA
cttggaatggacattcactc

SEQ ID NO: 121105 - DNA, 20 bp, Artificial Sequence
  MKO10121105_B_Thbs3
  gRNA
tagaatggattgcagtgcgc

SEQ ID NO: 121106 - DNA, 20 bp, Artificial Sequence
  MKO10121106_B_Thbs4
  gRNA
agactttaatcgacagttct

SEQ ID NO: 121107 - DNA, 20 bp, Artificial Sequence
  MKO10121107_B_Thbs4
  gRNA
ttctaccgtcctccagccag

SEQ ID NO: 121108 - DNA, 20 bp, Artificial Sequence
  MKO10121108_B_Thbs4
  gRNA
ggtgcggggctcgctgttcc

SEQ ID NO: 121109 - DNA, 20 bp, Artificial Sequence
  MKO10121109_B_Theg
  gRNA
gaacctaccagggaccgtga

SEQ ID NO: 121110 - DNA, 20 bp, Artificial Sequence
  MKO10121110_B_Theg
  gRNA
ttgaagaggaccatccagat

SEQ ID NO: 121111 - DNA, 20 bp, Artificial Sequence
  MKO10121111_B_Theg
  gRNA
gctcccggagacctccaatc

SEQ ID NO: 121112 - DNA, 20 bp, Artificial Sequence
  MKO10121112_B_Them4
  gRNA
tagcccttcctcgaaacttc

SEQ ID NO: 121113 - DNA, 20 bp, Artificial Sequence
  MKO10121113_B_Them4
  gRNA
cttacccaggtactccttgc

SEQ ID NO: 121114 - DNA, 20 bp, Artificial Sequence
  MKO10121114_B_Them4
  gRNA
gttgtgactagatttgttca

SEQ ID NO: 121115 - DNA, 20 bp, Artificial Sequence
  MKO10121115_B_Them5
  gRNA
ctttaccaggtccatacaac

SEQ ID NO: 121116 - DNA, 20 bp, Artificial Sequence
  MKO10121116_B_Them5
  gRNA
gatttctttaccggaggact

SEQ ID NO: 121117 - DNA, 20 bp, Artificial Sequence
  MKO10121117_B_Them5
  gRNA
accgtctatgccaagtcctc

SEQ ID NO: 121118 - DNA, 20 bp, Artificial Sequence
  MKO10121118_B_Them6
  gRNA
tgccagaagacttgaaacat

SEQ ID NO: 121119 - DNA, 20 bp, Artificial Sequence
  MKO10121119_B_Them6
  gRNA
gcgcctgtttgagccgttcg

SEQ ID NO: 121120 - DNA, 20 bp, Artificial Sequence
  MKO10121120_B_Them6
  gRNA
aagtgctgtactactcgatc

SEQ ID NO: 121121 - DNA, 20 bp, Artificial Sequence
  MKO10121121_B_Themis2
  gRNA
ccgctatgcgcgctgcgtcc

SEQ ID NO: 121122 - DNA, 20 bp, Artificial Sequence
  MKO10121122_B_Themis2
  gRNA
agcgcgcatagcggatccca

SEQ ID NO: 121123 - DNA, 20 bp, Artificial Sequence
  MKO10121123_B_Themis2
  gRNA
ggttccgtctacgagctctt

SEQ ID NO: 121124 - DNA, 20 bp, Artificial Sequence
  MKO10121124_B_Themis3
  gRNA
agttctgctctgacgaaaac

SEQ ID NO: 121125 - DNA, 20 bp, Artificial Sequence
  MKO10121125_B_Themis3
  gRNA
tggagtagaacctgtcgtcc

SEQ ID NO: 121126 - DNA, 20 bp, Artificial Sequence
  MKO10121126_B_Themis3
  gRNA
aagcatcttccacctcacga

SEQ ID NO: 121127 - DNA, 20 bp, Artificial Sequence
  MKO10121127_B_Themis
  gRNA
gaaatttgtgagggcgctat

SEQ ID NO: 121128 - DNA, 20 bp, Artificial Sequence
  MKO10121128_B_Themis
  gRNA
atcacaagaaccgttaatat

SEQ ID NO: 121129 - DNA, 20 bp, Artificial Sequence
  MKO10121129_B_Themis
  gRNA
tgtagtcacagtggtgcttg

SEQ ID NO: 121130 - DNA, 20 bp, Artificial Sequence
  MKO10121130_B_Thg1l
  gRNA
acgactctcccatcaaatcc

SEQ ID NO: 121131 - DNA, 20 bp, Artificial Sequence
  MKO10121131_B_Thg1l
  gRNA
ctggtgttagtccagactgc

SEQ ID NO: 121132 - DNA, 20 bp, Artificial Sequence
  MKO10121132_B_Thg1l
  gRNA
acaatgagccacacatgtac

SEQ ID NO: 121133 - DNA, 20 bp, Artificial Sequence
  MKO10121133_B_Thnsl1
  gRNA
ttatgaagtcagtcaaaacg

SEQ ID NO: 121134 - DNA, 20 bp, Artificial Sequence
  MKO10121134_B_Thnsl1
  gRNA
tgcattgccccctcctcacg

SEQ ID NO: 121135 - DNA, 20 bp, Artificial Sequence
  MKO10121135_B_Thnsl1
  gRNA
gtttgcccctgctatcatgc

SEQ ID NO: 121136 - DNA, 20 bp, Artificial Sequence
  MKO10121136_B_Thnsl2
  gRNA
accgcaacgacatcattcac

SEQ ID NO: 121137 - DNA, 20 bp, Artificial Sequence
  MKO10121137_B_Thnsl2
  gRNA
tcctgtgaatgatgtcgttg

SEQ ID NO: 121138 - DNA, 20 bp, Artificial Sequence
  MKO10121138_B_Thnsl2
  gRNA
cagattccgccacagaaatg

SEQ ID NO: 121139 - DNA, 20 bp, Artificial Sequence
  MKO10121139_B_Thoc1
  gRNA
acatctcccaatagcacaaa

SEQ ID NO: 121140 - DNA, 20 bp, Artificial Sequence
  MKO10121140_B_Thoc1
  gRNA
gtccacaccatttgtgctat

SEQ ID NO: 121141 - DNA, 20 bp, Artificial Sequence
  MKO10121141_B_Thoc1
  gRNA
actgccttcagtcagttacc

SEQ ID NO: 121142 - DNA, 20 bp, Artificial Sequence
  MKO10121142_B_Thoc2
  gRNA
ctctgtaggtcgaactgtca

SEQ ID NO: 121143 - DNA, 20 bp, Artificial Sequence
  MKO10121143_B_Thoc2
  gRNA
ttaaattccctttaatgaca

SEQ ID NO: 121144 - DNA, 20 bp, Artificial Sequence
  MKO10121144_B_Thoc2
  gRNA
ttgtcataccatgtcattaa

SEQ ID NO: 121145 - DNA, 20 bp, Artificial Sequence
  MKO10121145_B_Thoc3
  gRNA
cgacgggcagaccatcgctg

SEQ ID NO: 121146 - DNA, 20 bp, Artificial Sequence
  MKO10121146_B_Thoc3
  gRNA
caagacacaccgctccaaag

SEQ ID NO: 121147 - DNA, 20 bp, Artificial Sequence
  MKO10121147_B_Thoc3
  gRNA
tgcttgggtgccaacaaagc

SEQ ID NO: 121148 - DNA, 20 bp, Artificial Sequence
  MKO10121148_B_Thoc5
  gRNA
gttgtacaaatacacttgcc

SEQ ID NO: 121149 - DNA, 20 bp, Artificial Sequence
  MKO10121149_B_Thoc5
  gRNA
tcaactctacctcgtgggtc

SEQ ID NO: 121150 - DNA, 20 bp, Artificial Sequence
  MKO10121150_B_Thoc5
  gRNA
gaagttgacctgcgggaccc

SEQ ID NO: 121151 - DNA, 20 bp, Artificial Sequence
  MKO10121151_B_Thoc6
  gRNA
gatcgacacctactcagtgc

SEQ ID NO: 121152 - DNA, 20 bp, Artificial Sequence
  MKO10121152_B_Thoc6
  gRNA
agctgccagaaacttcccgc

SEQ ID NO: 121153 - DNA, 20 bp, Artificial Sequence
  MKO10121153_B_Thoc6
  gRNA
gtctgctgccttaagttcag

SEQ ID NO: 121154 - DNA, 20 bp, Artificial Sequence
  MKO10121154_B_Thoc7
  gRNA
cgtcttctgattgatggaga

SEQ ID NO: 121155 - DNA, 20 bp, Artificial Sequence
  MKO10121155_B_Thoc7
  gRNA
tgcccattgaaaattcacac

SEQ ID NO: 121156 - DNA, 20 bp, Artificial Sequence
  MKO10121156_B_Thoc7
  gRNA
tctttcagaatatgacgctt

SEQ ID NO: 121157 - DNA, 20 bp, Artificial Sequence
  MKO10121157_B_Thop1
  gRNA
ccagcttgatgagccgctcc

SEQ ID NO: 121158 - DNA, 20 bp, Artificial Sequence
  MKO10121158_B_Thop1
  gRNA
acgtgtaccagagggtcgtg

SEQ ID NO: 121159 - DNA, 20 bp, Artificial Sequence
  MKO10121159_B_Thop1
  gRNA
gcctgaagcagctcgctacc

SEQ ID NO: 121160 - DNA, 20 bp, Artificial Sequence
  MKO10121160_B_Thpo
  gRNA
ccacctccttcacagccgac

SEQ ID NO: 121161 - DNA, 20 bp, Artificial Sequence
  MKO10121161_B_Thpo
  gRNA
aggggcagtgtcccttctac

SEQ ID NO: 121162 - DNA, 20 bp, Artificial Sequence
  MKO10121162_B_Thpo
  gRNA
gcagggtccgtctgacacag

SEQ ID NO: 121163 - DNA, 20 bp, Artificial Sequence
  MKO10121163_B_Thrap3
  gRNA
tttcagacctagtggtttat

SEQ ID NO: 121164 - DNA, 20 bp, Artificial Sequence
  MKO10121164_B_Thrap3
  gRNA
ttcttaacagagcatcactt

SEQ ID NO: 121165 - DNA, 20 bp, Artificial Sequence
  MKO10121165_B_Thrap3
  gRNA
gtgcccactttcactcctct

SEQ ID NO: 121166 - DNA, 20 bp, Artificial Sequence
  MKO10121166_B_Thra
  gRNA
agggtatatccctagttacc

SEQ ID NO: 121167 - DNA, 20 bp, Artificial Sequence
  MKO10121167_B_Thra
  gRNA
gtgtcatcgacaagatcacc

SEQ ID NO: 121168 - DNA, 20 bp, Artificial Sequence
  MKO10121168_B_Thra
  gRNA
tgcagtgccaggtcaccaga

SEQ ID NO: 121169 - DNA, 20 bp, Artificial Sequence
  MKO10121169_B_Thrb
  gRNA
ctcctctataagcttccgct

SEQ ID NO: 121170 - DNA, 20 bp, Artificial Sequence
  MKO10121170_B_Thrb
  gRNA
ccacgtggccaccaatgccc

SEQ ID NO: 121171 - DNA, 20 bp, Artificial Sequence
  MKO10121171_B_Thrb
  gRNA
atttcttaaagcgacattcc

SEQ ID NO: 121172 - DNA, 20 bp, Artificial Sequence
  MKO10121172_B_Thrsp
  gRNA
gcgtttcgttagcacttgca

SEQ ID NO: 121173 - DNA, 20 bp, Artificial Sequence
  MKO10121173_B_Thrsp
  gRNA
ggaggtgacgcggaaatacc

SEQ ID NO: 121174 - DNA, 20 bp, Artificial Sequence
  MKO10121174_B_Thrsp
  gRNA
ccgtcctggaccgagccccc

SEQ ID NO: 121175 - DNA, 20 bp, Artificial Sequence
  MKO10121175_B_Thsd1
  gRNA
agtcctctcctccgggcgtt

SEQ ID NO: 121176 - DNA, 20 bp, Artificial Sequence
  MKO10121176_B_Thsd1
  gRNA
tcggacagcatccccgcacg

SEQ ID NO: 121177 - DNA, 20 bp, Artificial Sequence
  MKO10121177_B_Thsd1
  gRNA
agcccgtgtagcaccacgtg

SEQ ID NO: 121178 - DNA, 20 bp, Artificial Sequence
  MKO10121178_B_Thsd4
  gRNA
attctgacgtgaatacctca

SEQ ID NO: 121179 - DNA, 20 bp, Artificial Sequence
  MKO10121179_B_Thsd4
  gRNA
tgaacactcccgacaccacc

SEQ ID NO: 121180 - DNA, 20 bp, Artificial Sequence
  MKO10121180_B_Thsd4
  gRNA
ctacaacccggtggtagccc

SEQ ID NO: 121181 - DNA, 20 bp, Artificial Sequence
  MKO10121181_B_Thsd7a
  gRNA
ggcgaaacctcacattcaat

SEQ ID NO: 121182 - DNA, 20 bp, Artificial Sequence
  MKO10121182_B_Thsd7a
  gRNA
gtccttactcgagtgcctgt

SEQ ID NO: 121183 - DNA, 20 bp, Artificial Sequence
  MKO10121183_B_Thsd7a
  gRNA
tccttgtccaattgaatgtg

SEQ ID NO: 121184 - DNA, 20 bp, Artificial Sequence
  MKO10121184_B_Thsd7b
  gRNA
ttgcaatgtcccttgctcga

SEQ ID NO: 121185 - DNA, 20 bp, Artificial Sequence
  MKO10121185_B_Thsd7b
  gRNA
tgttccaagacctgccgttc

SEQ ID NO: 121186 - DNA, 20 bp, Artificial Sequence
  MKO10121186_B_Thsd7b
  gRNA
gatccactttggcatgagac

SEQ ID NO: 121187 - DNA, 20 bp, Artificial Sequence
  MKO10121187_B_Thtpa
  gRNA
ccagaggcctgaagcgctgt

SEQ ID NO: 121188 - DNA, 20 bp, Artificial Sequence
  MKO10121188_B_Thtpa
  gRNA
cacatcggaagctgcgattg

SEQ ID NO: 121189 - DNA, 20 bp, Artificial Sequence
  MKO10121189_B_Thtpa
  gRNA
atcaccgtcagtagcatgct

SEQ ID NO: 121190 - DNA, 20 bp, Artificial Sequence
  MKO10121190_B_Thumpd1
  gRNA
ccgagctcctcgatactctc

SEQ ID NO: 121191 - DNA, 20 bp, Artificial Sequence
  MKO10121191_B_Thumpd1
  gRNA
atatgatgcactaatttctc

SEQ ID NO: 121192 - DNA, 20 bp, Artificial Sequence
  MKO10121192_B_Thumpd1
  gRNA
ctacgaatgctgcccatctc

SEQ ID NO: 121193 - DNA, 20 bp, Artificial Sequence
  MKO10121193_B_Thumpd2
  gRNA
gatgacctttctgacattcc

SEQ ID NO: 121194 - DNA, 20 bp, Artificial Sequence
  MKO10121194_B_Thumpd2
  gRNA
atattcattacctctatatt

SEQ ID NO: 121195 - DNA, 20 bp, Artificial Sequence
  MKO10121195_B_Thumpd2
  gRNA
gagcagaggaatccccacca

SEQ ID NO: 121196 - DNA, 20 bp, Artificial Sequence
  MKO10121196_B_Thumpd3
  gRNA
agagttgacctaagagttgt

SEQ ID NO: 121197 - DNA, 20 bp, Artificial Sequence
  MKO10121197_B_Thumpd3
  gRNA
actattacatcagtaggctt

SEQ ID NO: 121198 - DNA, 20 bp, Artificial Sequence
  MKO10121198_B_Thumpd3
  gRNA
aacaggggcaataccaatag

SEQ ID NO: 121199 - DNA, 20 bp, Artificial Sequence
  MKO10121199_B_Thy1
  gRNA
acagacaagctggtcaagtg

SEQ ID NO: 121200 - DNA, 20 bp, Artificial Sequence
  MKO10121200_B_Thy1
  gRNA
tgctggttcagaacacatcc

SEQ ID NO: 121201 - DNA, 20 bp, Artificial Sequence
  MKO10121201_B_Thy1
  gRNA
gagcaggagagcgacgctga

SEQ ID NO: 121202 - DNA, 20 bp, Artificial Sequence
  MKO10121202_B_Thyn1
  gRNA
gcaagaatttaagcaactac

SEQ ID NO: 121203 - DNA, 20 bp, Artificial Sequence
  MKO10121203_B_Thyn1
  gRNA
agcccaagcagacagcttgc

SEQ ID NO: 121204 - DNA, 20 bp, Artificial Sequence
  MKO10121204_B_Thyn1
  gRNA
atcccagcaagctgtctgct

SEQ ID NO: 121205 - DNA, 20 bp, Artificial Sequence
  MKO10121205_B_Th
  gRNA
acaagctcaccggatggtcc

SEQ ID NO: 121206 - DNA, 20 bp, Artificial Sequence
  MKO10121206_B_Th
  gRNA
acacccgacgcacagaactg

SEQ ID NO: 121207 - DNA, 20 bp, Artificial Sequence
  MKO10121207_B_Th
  gRNA
cagggtcaaacttggtgacc

SEQ ID NO: 121208 - DNA, 20 bp, Artificial Sequence
  MKO10121208_B_Tia1
  gRNA
cttgggcatctcgtcctcca

SEQ ID NO: 121209 - DNA, 20 bp, Artificial Sequence
  MKO10121209_B_Tia1
  gRNA
catgaatgggcggaagataa

SEQ ID NO: 121210 - DNA, 20 bp, Artificial Sequence
  MKO10121210_B_Tia1
  gRNA
aacccctagcagtcaaaaga

SEQ ID NO: 121211 - DNA, 20 bp, Artificial Sequence
  MKO10121211_B_Tial1
  gRNA
tttaggaggtcaaagtaaac

SEQ ID NO: 121212 - DNA, 20 bp, Artificial Sequence
  MKO10121212_B_Tial1
  gRNA
cttcagttattcagtcagat

SEQ ID NO: 121213 - DNA, 20 bp, Artificial Sequence
  MKO10121213_B_Tial1
  gRNA
aagctgtaaaatgataacag

SEQ ID NO: 121214 - DNA, 20 bp, Artificial Sequence
  MKO10121214_B_Tiam1
  gRNA
agtaagactggtccctgact

SEQ ID NO: 121215 - DNA, 20 bp, Artificial Sequence
  MKO10121215_B_Tiam1
  gRNA
ggcaaccacacgacagctgt

SEQ ID NO: 121216 - DNA, 20 bp, Artificial Sequence
  MKO10121216_B_Tiam1
  gRNA
gacttgaaactccaccattt

SEQ ID NO: 121217 - DNA, 20 bp, Artificial Sequence
  MKO10121217_B_Tiam2
  gRNA
ccctgtttaagatccggcaa

SEQ ID NO: 121218 - DNA, 20 bp, Artificial Sequence
  MKO10121218_B_Tiam2
  gRNA
tgcgagagctcgaaatgagc

SEQ ID NO: 121219 - DNA, 20 bp, Artificial Sequence
  MKO10121219_B_Tiam2
  gRNA
caatggtacctgattctcga

SEQ ID NO: 121220 - DNA, 20 bp, Artificial Sequence
  MKO10121220_B_Ticam1
  gRNA
atctgaactgcaccgatccc

SEQ ID NO: 121221 - DNA, 20 bp, Artificial Sequence
  MKO10121221_B_Ticam1
  gRNA
tctggaacgctaatttcgtg

SEQ ID NO: 121222 - DNA, 20 bp, Artificial Sequence
  MKO10121222_B_Ticam1
  gRNA
cgtgaaccccgagtgatcga

SEQ ID NO: 121223 - DNA, 20 bp, Artificial Sequence
  MKO10121223_B_Ticam2
  gRNA
acaactccgtcatacccatg

SEQ ID NO: 121224 - DNA, 20 bp, Artificial Sequence
  MKO10121224_B_Ticam2
  gRNA
tttgcagaatctagacgatg

SEQ ID NO: 121225 - DNA, 20 bp, Artificial Sequence
  MKO10121225_B_Ticam2
  gRNA
ctccacaaaaccacgcaagc

SEQ ID NO: 121226 - DNA, 20 bp, Artificial Sequence
  MKO10121226_B_Ticrr
  gRNA
tttgaagaccctgcgtcttc

SEQ ID NO: 121227 - DNA, 20 bp, Artificial Sequence
  MKO10121227_B_Ticrr
  gRNA
caagtctgaagtagcaccac

SEQ ID NO: 121228 - DNA, 20 bp, Artificial Sequence
  MKO10121228_B_Ticrr
  gRNA
ccctggctttagtaaatccc

SEQ ID NO: 121229 - DNA, 20 bp, Artificial Sequence
  MKO10121229_B_Tie1
  gRNA
gaagacgcctaccaaatccg

SEQ ID NO: 121230 - DNA, 20 bp, Artificial Sequence
  MKO10121230_B_Tie1
  gRNA
gggcaatccttgacacatcc

SEQ ID NO: 121231 - DNA, 20 bp, Artificial Sequence
  MKO10121231_B_Tie1
  gRNA
ggcgaatgtgtgtgtccccc

SEQ ID NO: 121232 - DNA, 20 bp, Artificial Sequence
  MKO10121232_B_Tifab
  gRNA
agctgcaacatgacgccagc

SEQ ID NO: 121233 - DNA, 20 bp, Artificial Sequence
  MKO10121233_B_Tifab
  gRNA
gagcctgtaccaccctacac

SEQ ID NO: 121234 - DNA, 20 bp, Artificial Sequence
  MKO10121234_B_Tifab
  gRNA
aaggcgaccgggccctgtgt

SEQ ID NO: 121235 - DNA, 20 bp, Artificial Sequence
  MKO10121235_B_Tifa
  gRNA
catgtgccagtatacgtttc

SEQ ID NO: 121236 - DNA, 20 bp, Artificial Sequence
  MKO10121236_B_Tifa
  gRNA
caggatggtaaatggtcatc

SEQ ID NO: 121237 - DNA, 20 bp, Artificial Sequence
  MKO10121237_B_Tifa
  gRNA
tgccttacaagtgtatgctc

SEQ ID NO: 121238 - DNA, 20 bp, Artificial Sequence
  MKO10121238_B_Tigd2
  gRNA
catgaagtcgtcaacgtatg

SEQ ID NO: 121239 - DNA, 20 bp, Artificial Sequence
  MKO10121239_B_Tigd2
  gRNA
actaggtttaagcagcgcca

SEQ ID NO: 121240 - DNA, 20 bp, Artificial Sequence
  MKO10121240_B_Tigd2
  gRNA
taggttcttcttcgatgcat

SEQ ID NO: 121241 - DNA, 20 bp, Artificial Sequence
  MKO10121241_B_Tigd3
  gRNA
tcgatgaggctctactgtgc

SEQ ID NO: 121242 - DNA, 20 bp, Artificial Sequence
  MKO10121242_B_Tigd3
  gRNA
agtacccttgttgtatcgcg

SEQ ID NO: 121243 - DNA, 20 bp, Artificial Sequence
  MKO10121243_B_Tigd3
  gRNA
cacgcttccgcttccgctcg

SEQ ID NO: 121244 - DNA, 20 bp, Artificial Sequence
  MKO10121244_B_Tigd4
  gRNA
agctgagagcgcgtccttct

SEQ ID NO: 121245 - DNA, 20 bp, Artificial Sequence
  MKO10121245_B_Tigd4
  gRNA
catagaggaatacgctgccc

SEQ ID NO: 121246 - DNA, 20 bp, Artificial Sequence
  MKO10121246_B_Tigd4
  gRNA
tctgccgtcaccatccaaga

SEQ ID NO: 121247 - DNA, 20 bp, Artificial Sequence
  MKO10121247_B_Tigd5
  gRNA
gctcgcggggtacatggcgt

SEQ ID NO: 121248 - DNA, 20 bp, Artificial Sequence
  MKO10121248_B_Tigd5
  gRNA
tcgaccgcgccgtctactcg

SEQ ID NO: 121249 - DNA, 20 bp, Artificial Sequence
  MKO10121249_B_Tigd5
  gRNA
ggcgcagttctcgtacctga

SEQ ID NO: 121250 - DNA, 20 bp, Artificial Sequence
  MKO10121250_B_Tigit
  gRNA
caggctgccttcctcgctac

SEQ ID NO: 121251 - DNA, 20 bp, Artificial Sequence
  MKO10121251_B_Tigit
  gRNA
ttcctccaagcggggcagtc

SEQ ID NO: 121252 - DNA, 20 bp, Artificial Sequence
  MKO10121252_B_Tigit
  gRNA
cagttccagactgccccgct

SEQ ID NO: 121253 - DNA, 20 bp, Artificial Sequence
  MKO10121253_B_Timd2
  gRNA
atagttacctgcaggagtag

SEQ ID NO: 121254 - DNA, 20 bp, Artificial Sequence
  MKO10121254_B_Timd2
  gRNA
acctcagctgtagtctgatc

SEQ ID NO: 121255 - DNA, 20 bp, Artificial Sequence
  MKO10121255_B_Timd2
  gRNA
tgacatcctcagatgaccct

SEQ ID NO: 121256 - DNA, 20 bp, Artificial Sequence
  MKO10121256_B_Timd4
  gRNA
cataaggggtggtggttggc

SEQ ID NO: 121257 - DNA, 20 bp, Artificial Sequence
  MKO10121257_B_Timd4
  gRNA
acaatcctcacctgtagtga

SEQ ID NO: 121258 - DNA, 20 bp, Artificial Sequence
  MKO10121258_B_Timd4
  gRNA
catgcttctttgagagtgat

SEQ ID NO: 121259 - DNA, 20 bp, Artificial Sequence
  MKO10121259_B_Timeless
  gRNA
cttgtatgaattgctacagc

SEQ ID NO: 121260 - DNA, 20 bp, Artificial Sequence
  MKO10121260_B_Timeless
  gRNA
tcacctctttgtaggcttgc

SEQ ID NO: 121261 - DNA, 20 bp, Artificial Sequence
  MKO10121261_B_Timeless
  gRNA
cagctgtagcaattcataca

SEQ ID NO: 121262 - DNA, 20 bp, Artificial Sequence
  MKO10121262_B_Timm10b
  gRNA
tcagttgcgagacttcctgt

SEQ ID NO: 121263 - DNA, 20 bp, Artificial Sequence
  MKO10121263_B_Timm10b
  gRNA
cgtgcacctcatgcccgccc

SEQ ID NO: 121264 - DNA, 20 bp, Artificial Sequence
  MKO10121264_B_Timm10b
  gRNA
ccattctaaccaccgcctca

SEQ ID NO: 121265 - DNA, 20 bp, Artificial Sequence
  MKO10121265_B_Timm10
  gRNA
tccgctcagagcccagcagc

SEQ ID NO: 121266 - DNA, 20 bp, Artificial Sequence
  MKO10121266_B_Timm10
  gRNA
gtgcgtgcctccccactaca

SEQ ID NO: 121267 - DNA, 20 bp, Artificial Sequence
  MKO10121267_B_Timm10
  gRNA
gttgacagagctgtcaatgc

SEQ ID NO: 121268 - DNA, 20 bp, Artificial Sequence
  MKO10121268_B_Timm13
  gRNA
ccgctgcagtcgagagttgt

SEQ ID NO: 121269 - DNA, 20 bp, Artificial Sequence
  MKO10121269_B_Timm13
  gRNA
gctggacccgggggccatta

SEQ ID NO: 121270 - DNA, 20 bp, Artificial Sequence
  MKO10121270_B_Timm13
  gRNA
cacctgctccgagttatcca

SEQ ID NO: 121271 - DNA, 20 bp, Artificial Sequence
  MKO10121271_B_Timm17a
  gRNA
tccctcttacctcccaactg

SEQ ID NO: 121272 - DNA, 20 bp, Artificial Sequence
  MKO10121272_B_Timm17a
  gRNA
taatagctgtcaaacttcct

SEQ ID NO: 121273 - DNA, 20 bp, Artificial Sequence
  MKO10121273_B_Timm17a
  gRNA
aaacaggtagctttgcagtt

SEQ ID NO: 121274 - DNA, 20 bp, Artificial Sequence
  MKO10121274_B_Timm17b
  gRNA
agtcaacgctccactgctga

SEQ ID NO: 121275 - DNA, 20 bp, Artificial Sequence
  MKO10121275_B_Timm17b
  gRNA
atcagcagtggagcgttgac

SEQ ID NO: 121276 - DNA, 20 bp, Artificial Sequence
  MKO10121276_B_Timm17b
  gRNA
ttctccagggaattcgacac

SEQ ID NO: 121277 - DNA, 20 bp, Artificial Sequence
  MKO10121277_B_Timm21
  gRNA
tgtaccgttccttgcttccc

SEQ ID NO: 121278 - DNA, 20 bp, Artificial Sequence
  MKO10121278_B_Timm21
  gRNA
ctctttgcagtgagagaagc

SEQ ID NO: 121279 - DNA, 20 bp, Artificial Sequence
  MKO10121279_B_Timm21
  gRNA
tccagccctaatatcatata

SEQ ID NO: 121280 - DNA, 20 bp, Artificial Sequence
  MKO10121280_B_Timm22
  gRNA
tgcatcactggcggagccat

SEQ ID NO: 121281 - DNA, 20 bp, Artificial Sequence
  MKO10121281_B_Timm22
  gRNA
ccggggccataggttgtgga

SEQ ID NO: 121282 - DNA, 20 bp, Artificial Sequence
  MKO10121282_B_Timm22
  gRNA
agctgaacccccggccttgg

SEQ ID NO: 121283 - DNA, 20 bp, Artificial Sequence
  MKO10121283_B_Timm23
  gRNA
tagacttactgtacatttct

SEQ ID NO: 121284 - DNA, 20 bp, Artificial Sequence
  MKO10121284_B_Timm23
  gRNA
cctgtctccttatttaaatg

SEQ ID NO: 121285 - DNA, 20 bp, Artificial Sequence
  MKO10121285_B_Timm23
  gRNA
tgtcatgcaacatcctccaa

SEQ ID NO: 121286 - DNA, 20 bp, Artificial Sequence
  MKO10121286_B_Timm44
  gRNA
agaagagtcggatgctctcc

SEQ ID NO: 121287 - DNA, 20 bp, Artificial Sequence
  MKO10121287_B_Timm44
  gRNA
cactgactccgctgactgct

SEQ ID NO: 121288 - DNA, 20 bp, Artificial Sequence
  MKO10121288_B_Timm44
  gRNA
tccagccacaacctacccca

SEQ ID NO: 121289 - DNA, 20 bp, Artificial Sequence
  MKO10121289_B_Timm50
  gRNA
cgcaactgctgaaccagaat

SEQ ID NO: 121290 - DNA, 20 bp, Artificial Sequence
  MKO10121290_B_Timm50
  gRNA
cctggcaggaaacaaccctg

SEQ ID NO: 121291 - DNA, 20 bp, Artificial Sequence
  MKO10121291_B_Timm50
  gRNA
attcctgatgaattcgacag

SEQ ID NO: 121292 - DNA, 20 bp, Artificial Sequence
  MKO10121292_B_Timm8a1
  gRNA
aatgctgagatcagtcagaa

SEQ ID NO: 121293 - DNA, 20 bp, Artificial Sequence
  MKO10121293_B_Timm8a1
  gRNA
tcagttgcagcatttcatcg

SEQ ID NO: 121294 - DNA, 20 bp, Artificial Sequence
  MKO10121294_B_Timm8a1
  gRNA
tcgatgaaatgctgcaactg

SEQ ID NO: 121295 - DNA, 20 bp, Artificial Sequence
  MKO10121295_B_Timm8a2
  gRNA
accacatgacagagctctgc

SEQ ID NO: 121296 - DNA, 20 bp, Artificial Sequence
  MKO10121296_B_Timm8a2
  gRNA
aagatcccaggctggtcccc

SEQ ID NO: 121297 - DNA, 20 bp, Artificial Sequence
  MKO10121297_B_Timm8a2
  gRNA
ccagttcatcttgaatcgac

SEQ ID NO: 121298 - DNA, 20 bp, Artificial Sequence
  MKO10121298_B_Timm8b
  gRNA
cgggagtctagccgacttcc

SEQ ID NO: 121299 - DNA, 20 bp, Artificial Sequence
  MKO10121299_B_Timm8b
  gRNA
gaaggcgcaattcactgcgc

SEQ ID NO: 121300 - DNA, 20 bp, Artificial Sequence
  MKO10121300_B_Timm8b
  gRNA
ttcgtccgcttcaccaagct

SEQ ID NO: 121301 - DNA, 20 bp, Artificial Sequence
  MKO10121301_B_Timm9
  gRNA
gtgatattcctgaaatctca

SEQ ID NO: 121302 - DNA, 20 bp, Artificial Sequence
  MKO10121302_B_Timm9
  gRNA
gaatatggctgcacagatac

SEQ ID NO: 121303 - DNA, 20 bp, Artificial Sequence
  MKO10121303_B_Timm9
  gRNA
taagtttattgtaggttccc

SEQ ID NO: 121304 - DNA, 20 bp, Artificial Sequence
  MKO10121304_B_Timmdc1
  gRNA
agaataaacttaggtgttcg

SEQ ID NO: 121305 - DNA, 20 bp, Artificial Sequence
  MKO10121305_B_Timmdc1
  gRNA
tcataaccgatttgatgctg

SEQ ID NO: 121306 - DNA, 20 bp, Artificial Sequence
  MKO10121306_B_Timmdc1
  gRNA
atcattggctgggcatatgg

SEQ ID NO: 121307 - DNA, 20 bp, Artificial Sequence
  MKO10121307_B_Timp1
  gRNA
tttatctatcccttgcaaac

SEQ ID NO: 121308 - DNA, 20 bp, Artificial Sequence
  MKO10121308_B_Timp1
  gRNA
tgggaaatgccgcagatatc

SEQ ID NO: 121309 - DNA, 20 bp, Artificial Sequence
  MKO10121309_B_Timp1
  gRNA
tgtgcaaatttccgttcctt

SEQ ID NO: 121310 - DNA, 20 bp, Artificial Sequence
  MKO10121310_B_Timp2
  gRNA
gtgatgctaagcgtgtccca

SEQ ID NO: 121311 - DNA, 20 bp, Artificial Sequence
  MKO10121311_B_Timp2
  gRNA
gttgccatagatgtcattcc

SEQ ID NO: 121312 - DNA, 20 bp, Artificial Sequence
  MKO10121312_B_Timp2
  gRNA
gaccccgcacactgctgaag

SEQ ID NO: 121313 - DNA, 20 bp, Artificial Sequence
  MKO10121313_B_Timp3
  gRNA
tagtgtttggactgatagcc

SEQ ID NO: 121314 - DNA, 20 bp, Artificial Sequence
  MKO10121314_B_Timp3
  gRNA
cctcaattaccgctaccacc

SEQ ID NO: 121315 - DNA, 20 bp, Artificial Sequence
  MKO10121315_B_Timp3
  gRNA
ccaaacactacgcctgcatc

SEQ ID NO: 121316 - DNA, 20 bp, Artificial Sequence
  MKO10121316_B_Timp4
  gRNA
ctgacactcaaaaactgatc

SEQ ID NO: 121317 - DNA, 20 bp, Artificial Sequence
  MKO10121317_B_Timp4
  gRNA
tgtgcaactacattgagccc

SEQ ID NO: 121318 - DNA, 20 bp, Artificial Sequence
  MKO10121318_B_Timp4
  gRNA
ggccaaaatatccagtgaga

SEQ ID NO: 121319 - DNA, 20 bp, Artificial Sequence
  MKO10121319_B_Tinagl1
  gRNA
ggtagcgaatgccctcatcc

SEQ ID NO: 121320 - DNA, 20 bp, Artificial Sequence
  MKO10121320_B_Tinagl1
  gRNA
gcacaattgccctggtccaa

SEQ ID NO: 121321 - DNA, 20 bp, Artificial Sequence
  MKO10121321_B_Tinagl1
  gRNA
atgattaaagccatcaaccg

SEQ ID NO: 121322 - DNA, 20 bp, Artificial Sequence
  MKO10121322_B_Tinag
  gRNA
ttaattgaccacatcaataa

SEQ ID NO: 121323 - DNA, 20 bp, Artificial Sequence
  MKO10121323_B_Tinag
  gRNA
ttaaagaaaactgcaactcc

SEQ ID NO: 121324 - DNA, 20 bp, Artificial Sequence
  MKO10121324_B_Tinag
  gRNA
aaaaaaactgtgctgcatcc

SEQ ID NO: 121325 - DNA, 20 bp, Artificial Sequence
  MKO10121325_B_Tinf2
  gRNA
accccatgtccataccatac

SEQ ID NO: 121326 - DNA, 20 bp, Artificial Sequence
  MKO10121326_B_Tinf2
  gRNA
gcttgtgaagcacctgtcag

SEQ ID NO: 121327 - DNA, 20 bp, Artificial Sequence
  MKO10121327_B_Tinf2
  gRNA
agtgatgcttcagggcattc

SEQ ID NO: 121328 - DNA, 20 bp, Artificial Sequence
  MKO10121328_B_Tiparp
  gRNA
ttctttcagaccccgagagt

SEQ ID NO: 121329 - DNA, 20 bp, Artificial Sequence
  MKO10121329_B_Tiparp
  gRNA
acactgccagggttgaccgg

SEQ ID NO: 121330 - DNA, 20 bp, Artificial Sequence
  MKO10121330_B_Tiparp
  gRNA
ttggctgaagttactccatc

SEQ ID NO: 121331 - DNA, 20 bp, Artificial Sequence
  MKO10121331_B_Tipin
  gRNA
gaaaacgctaatcagacaca

SEQ ID NO: 121332 - DNA, 20 bp, Artificial Sequence
  MKO10121332_B_Tipin
  gRNA
attgacagagtcgaaaacct

SEQ ID NO: 121333 - DNA, 20 bp, Artificial Sequence
  MKO10121333_B_Tipin
  gRNA
cttatcaaacacatgcctta

SEQ ID NO: 121334 - DNA, 20 bp, Artificial Sequence
  MKO10121334_B_Tiprl
  gRNA
gagatgtgtgaacaactatc

SEQ ID NO: 121335 - DNA, 20 bp, Artificial Sequence
  MKO10121335_B_Tiprl
  gRNA
aagttattaaaccatatgac

SEQ ID NO: 121336 - DNA, 20 bp, Artificial Sequence
  MKO10121336_B_Tiprl
  gRNA
acctatacaacagattataa

SEQ ID NO: 121337 - DNA, 20 bp, Artificial Sequence
  MKO10121337_B_Tirap
  gRNA
aagcctcgagacaagatagc

SEQ ID NO: 121338 - DNA, 20 bp, Artificial Sequence
  MKO10121338_B_Tirap
  gRNA
ttccggcggataggcggctc

SEQ ID NO: 121339 - DNA, 20 bp, Artificial Sequence
  MKO10121339_B_Tirap
  gRNA
gtataacagcctccttgact

SEQ ID NO: 121340 - DNA, 20 bp, Artificial Sequence
  MKO10121340_B_Tjap1
  gRNA
ccagcggaccaaccaggaac

SEQ ID NO: 121341 - DNA, 20 bp, Artificial Sequence
  MKO10121341_B_Tjap1
  gRNA
agtccctgactgacgcagag

SEQ ID NO: 121342 - DNA, 20 bp, Artificial Sequence
  MKO10121342_B_Tjap1
  gRNA
cctggcatccagtagcttgt

SEQ ID NO: 121343 - DNA, 20 bp, Artificial Sequence
  MKO10121343_B_Tjp1
  gRNA
agcacacagtgacgcttcac

SEQ ID NO: 121344 - DNA, 20 bp, Artificial Sequence
  MKO10121344_B_Tjp1
  gRNA
ctccgttaaccattgcaact

SEQ ID NO: 121345 - DNA, 20 bp, Artificial Sequence
  MKO10121345_B_Tjp1
  gRNA
tactgtagctgtccttcagc

SEQ ID NO: 121346 - DNA, 20 bp, Artificial Sequence
  MKO10121346_B_Tjp2
  gRNA
cgaatggagcacatcttcca

SEQ ID NO: 121347 - DNA, 20 bp, Artificial Sequence
  MKO10121347_B_Tjp2
  gRNA
gaattatgtccccctcatga

SEQ ID NO: 121348 - DNA, 20 bp, Artificial Sequence
  MKO10121348_B_Tjp2
  gRNA
cgtttgccgttcagcagctt

SEQ ID NO: 121349 - DNA, 20 bp, Artificial Sequence
  MKO10121349_B_Tjp3
  gRNA
cagatccgccacccgaactc

SEQ ID NO: 121350 - DNA, 20 bp, Artificial Sequence
  MKO10121350_B_Tjp3
  gRNA
gaccggggaccacatcgtca

SEQ ID NO: 121351 - DNA, 20 bp, Artificial Sequence
  MKO10121351_B_Tjp3
  gRNA
acttacaacgttggctgttt

SEQ ID NO: 121352 - DNA, 20 bp, Artificial Sequence
  MKO10121352_B_Tk1
  gRNA
gacagtaattgtggcagcgc

SEQ ID NO: 121353 - DNA, 20 bp, Artificial Sequence
  MKO10121353_B_Tk1
  gRNA
tccttgggtgtggccgtcat

SEQ ID NO: 121354 - DNA, 20 bp, Artificial Sequence
  MKO10121354_B_Tk1
  gRNA
ttctcttctaggtgattctc

SEQ ID NO: 121355 - DNA, 20 bp, Artificial Sequence
  MKO10121355_B_Tk2
  gRNA
tgtccatggccataaccctc

SEQ ID NO: 121356 - DNA, 20 bp, Artificial Sequence
  MKO10121356_B_Tk2
  gRNA
tacctcgacgtctgttgtat

SEQ ID NO: 121357 - DNA, 20 bp, Artificial Sequence
  MKO10121357_B_Tk2
  gRNA
acatttctccacttgagcac

SEQ ID NO: 121358 - DNA, 20 bp, Artificial Sequence
  MKO10121358_B_Tktl1
  gRNA
atctttgatgtgaaccgcat

SEQ ID NO: 121359 - DNA, 20 bp, Artificial Sequence
  MKO10121359_B_Tktl1
  gRNA
gccagtatatgccatcccac

SEQ ID NO: 121360 - DNA, 20 bp, Artificial Sequence
  MKO10121360_B_Tktl1
  gRNA
cctgtgccatgtattctcac

SEQ ID NO: 121361 - DNA, 20 bp, Artificial Sequence
  MKO10121361_B_Tktl2
  gRNA
agttgacgaacgactatgtc

SEQ ID NO: 121362 - DNA, 20 bp, Artificial Sequence
  MKO10121362_B_Tktl2
  gRNA
tgccacactacagcacgacg

SEQ ID NO: 121363 - DNA, 20 bp, Artificial Sequence
  MKO10121363_B_Tktl2
  gRNA
agcaatagttcgtcctcgtg

SEQ ID NO: 121364 - DNA, 20 bp, Artificial Sequence
  MKO10121364_B_Tkt
  gRNA
aggtctccgagggctccgtc

SEQ ID NO: 121365 - DNA, 20 bp, Artificial Sequence
  MKO10121365_B_Tkt
  gRNA
tgatcgatttgtgctctcta

SEQ ID NO: 121366 - DNA, 20 bp, Artificial Sequence
  MKO10121366_B_Tkt
  gRNA
gaaacaagccttcaccgatg

SEQ ID NO: 121367 - DNA, 20 bp, Artificial Sequence
  MKO10121367_B_Tlcd1
  gRNA
atactttatccacgacacag

SEQ ID NO: 121368 - DNA, 20 bp, Artificial Sequence
  MKO10121368_B_Tlcd1
  gRNA
tctgccctgaacgtgcaccc

SEQ ID NO: 121369 - DNA, 20 bp, Artificial Sequence
  MKO10121369_B_Tlcd1
  gRNA
gcaagcaaactcgagcttct

SEQ ID NO: 121370 - DNA, 20 bp, Artificial Sequence
  MKO10121370_B_Tlcd2
  gRNA
cttccgtagatgcaaacaga

SEQ ID NO: 121371 - DNA, 20 bp, Artificial Sequence
  MKO10121371_B_Tlcd2
  gRNA
agacacgtgagcctgttgcc

SEQ ID NO: 121372 - DNA, 20 bp, Artificial Sequence
  MKO10121372_B_Tlcd2
  gRNA
cccaggcctgggccaatgtc

SEQ ID NO: 121373 - DNA, 20 bp, Artificial Sequence
  MKO10121373_B_Tldc1
  gRNA
atcctttgatccgtccacgc

SEQ ID NO: 121374 - DNA, 20 bp, Artificial Sequence
  MKO10121374_B_Tldc1
  gRNA
ggtgccccctgacagtatgc

SEQ ID NO: 121375 - DNA, 20 bp, Artificial Sequence
  MKO10121375_B_Tldc1
  gRNA
gtagcccgtgtgcaggtgcg

SEQ ID NO: 121376 - DNA, 20 bp, Artificial Sequence
  MKO10121376_B_Tldc2
  gRNA
gtctggtcttctgcacatca

SEQ ID NO: 121377 - DNA, 20 bp, Artificial Sequence
  MKO10121377_B_Tldc2
  gRNA
tggctagcttctgtaagctg

SEQ ID NO: 121378 - DNA, 20 bp, Artificial Sequence
  MKO10121378_B_Tldc2
  gRNA
cgtagaagcctttgctgagt

SEQ ID NO: 121379 - DNA, 20 bp, Artificial Sequence
  MKO10121379_B_Tle1
  gRNA
acaaatggtgttcaatctct

SEQ ID NO: 121380 - DNA, 20 bp, Artificial Sequence
  MKO10121380_B_Tle1
  gRNA
agtcatcccatttctgtctc

SEQ ID NO: 121381 - DNA, 20 bp, Artificial Sequence
  MKO10121381_B_Tle1
  gRNA
cagtattatgaaatgtcata

SEQ ID NO: 121382 - DNA, 20 bp, Artificial Sequence
  MKO10121382_B_Tle2
  gRNA
gcttctcacattctagcttg

SEQ ID NO: 121383 - DNA, 20 bp, Artificial Sequence
  MKO10121383_B_Tle2
  gRNA
tccagtactgagaacttgaa

SEQ ID NO: 121384 - DNA, 20 bp, Artificial Sequence
  MKO10121384_B_Tle2
  gRNA
caacattgagatgcataaac

SEQ ID NO: 121385 - DNA, 20 bp, Artificial Sequence
  MKO10121385_B_Tle3
  gRNA
catttcaatattcaagccat

SEQ ID NO: 121386 - DNA, 20 bp, Artificial Sequence
  MKO10121386_B_Tle3
  gRNA
gatgcagcgccattatgtga

SEQ ID NO: 121387 - DNA, 20 bp, Artificial Sequence
  MKO10121387_B_Tle3
  gRNA
acctgtgatactgagcttgc

SEQ ID NO: 121388 - DNA, 20 bp, Artificial Sequence
  MKO10121388_B_Tle4
  gRNA
caatttcagaatcctgtgat

SEQ ID NO: 121389 - DNA, 20 bp, Artificial Sequence
  MKO10121389_B_Tle4
  gRNA
actaaatgctatctgtgcac

SEQ ID NO: 121390 - DNA, 20 bp, Artificial Sequence
  MKO10121390_B_Tle4
  gRNA
gaacatagaaatgcacaagc

SEQ ID NO: 121391 - DNA, 20 bp, Artificial Sequence
  MKO10121391_B_Tle6
  gRNA
gtccatcgtgaaccagcttc

SEQ ID NO: 121392 - DNA, 20 bp, Artificial Sequence
  MKO10121392_B_Tle6
  gRNA
ccctctcaccagagtcactc

SEQ ID NO: 121393 - DNA, 20 bp, Artificial Sequence
  MKO10121393_B_Tle6
  gRNA
cagcgtcgtctctgaaatga

SEQ ID NO: 121394 - DNA, 20 bp, Artificial Sequence
  MKO10121394_B_Tlk1
  gRNA
aatggatgagcttcacagtc

SEQ ID NO: 121395 - DNA, 20 bp, Artificial Sequence
  MKO10121395_B_Tlk1
  gRNA
tctaagtgacaaagaatcag

SEQ ID NO: 121396 - DNA, 20 bp, Artificial Sequence
  MKO10121396_B_Tlk1
  gRNA
gaaagttctaatcacagttt

SEQ ID NO: 121397 - DNA, 20 bp, Artificial Sequence
  MKO10121397_B_Tlk2
  gRNA
taaaattagtgattactttg

SEQ ID NO: 121398 - DNA, 20 bp, Artificial Sequence
  MKO10121398_B_Tlk2
  gRNA
accccacgctgcacagactc

SEQ ID NO: 121399 - DNA, 20 bp, Artificial Sequence
  MKO10121399_B_Tlk2
  gRNA
tacaccaactccagtgaacc

SEQ ID NO: 121400 - DNA, 20 bp, Artificial Sequence
  MKO10121400_B_Tll1
  gRNA
tagagtgcccctcgcttctt

SEQ ID NO: 121401 - DNA, 20 bp, Artificial Sequence
  MKO10121401_B_Tll1
  gRNA
tctctcagtgaacgtcacac

SEQ ID NO: 121402 - DNA, 20 bp, Artificial Sequence
  MKO10121402_B_Tll1
  gRNA
ccatatcctttccgttcttg

SEQ ID NO: 121403 - DNA, 20 bp, Artificial Sequence
  MKO10121403_B_Tll2
  gRNA
acagagcggatttggcctgg

SEQ ID NO: 121404 - DNA, 20 bp, Artificial Sequence
  MKO10121404_B_Tll2
  gRNA
tacttgccagtgtcatgtcc

SEQ ID NO: 121405 - DNA, 20 bp, Artificial Sequence
  MKO10121405_B_Tll2
  gRNA
accacatttctgcctaaccc

SEQ ID NO: 121406 - DNA, 20 bp, Artificial Sequence
  MKO10121406_B_Tln1
  gRNA
cagaaagagcccaaagtcgt

SEQ ID NO: 121407 - DNA, 20 bp, Artificial Sequence
  MKO10121407_B_Tln1
  gRNA
gctgaaccttctctatgtgc

SEQ ID NO: 121408 - DNA, 20 bp, Artificial Sequence
  MKO10121408_B_Tln1
  gRNA
ggtctcgggaatccacattc

SEQ ID NO: 121409 - DNA, 20 bp, Artificial Sequence
  MKO10121409_B_Tln2
  gRNA
cactggattactacatgttg

SEQ ID NO: 121410 - DNA, 20 bp, Artificial Sequence
  MKO10121410_B_Tln2
  gRNA
aaagggatttggctagaagc

SEQ ID NO: 121411 - DNA, 20 bp, Artificial Sequence
  MKO10121411_B_Tln2
  gRNA
caggcacactaaaaaaagat

SEQ ID NO: 121412 - DNA, 20 bp, Artificial Sequence
  MKO10121412_B_Tlr11
  gRNA
cagcagagcagccaccattg

SEQ ID NO: 121413 - DNA, 20 bp, Artificial Sequence
  MKO10121413_B_Tlr11
  gRNA
taccatccaatattagggaa

SEQ ID NO: 121414 - DNA, 20 bp, Artificial Sequence
  MKO10121414_B_Tlr11
  gRNA
ctgcgtcgcctcaccttgcg

SEQ ID NO: 121415 - DNA, 20 bp, Artificial Sequence
  MKO10121415_B_Tlr12
  gRNA
ggcctaaccaagcttccacc

SEQ ID NO: 121416 - DNA, 20 bp, Artificial Sequence
  MKO10121416_B_Tlr12
  gRNA
gctcctccagctgcaccgaa

SEQ ID NO: 121417 - DNA, 20 bp, Artificial Sequence
  MKO10121417_B_Tlr12
  gRNA
acgccagcttcagctcccgt

SEQ ID NO: 121418 - DNA, 20 bp, Artificial Sequence
  MKO10121418_B_Tlr13
  gRNA
cactcacttccagctggacc

SEQ ID NO: 121419 - DNA, 20 bp, Artificial Sequence
  MKO10121419_B_Tlr13
  gRNA
gctcgcatcagaaatgcgtt

SEQ ID NO: 121420 - DNA, 20 bp, Artificial Sequence
  MKO10121420_B_Tlr13
  gRNA
gtggttactgactacgcaca

SEQ ID NO: 121421 - DNA, 20 bp, Artificial Sequence
  MKO10121421_B_Tlr1
  gRNA
cgctgtaccttagagaattc

SEQ ID NO: 121422 - DNA, 20 bp, Artificial Sequence
  MKO10121422_B_Tlr1
  gRNA
atgggggaatcccatgcgcc

SEQ ID NO: 121423 - DNA, 20 bp, Artificial Sequence
  MKO10121423_B_Tlr1
  gRNA
tcaaaactctcatgtcacga

SEQ ID NO: 121424 - DNA, 20 bp, Artificial Sequence
  MKO10121424_B_Tlr2
  gRNA
ctttgacgagaacaacgacg

SEQ ID NO: 121425 - DNA, 20 bp, Artificial Sequence
  MKO10121425_B_Tlr2
  gRNA
cacctacgagcaagatcaac

SEQ ID NO: 121426 - DNA, 20 bp, Artificial Sequence
  MKO10121426_B_Tlr2
  gRNA
gctcactacgtctgactccg

SEQ ID NO: 121427 - DNA, 20 bp, Artificial Sequence
  MKO10121427_B_Tlr3
  gRNA
caattcttctttacgaaagt

SEQ ID NO: 121428 - DNA, 20 bp, Artificial Sequence
  MKO10121428_B_Tlr3
  gRNA
catgcactctgtttgcgaag

SEQ ID NO: 121429 - DNA, 20 bp, Artificial Sequence
  MKO10121429_B_Tlr3
  gRNA
acattagatcgagttctgtc

SEQ ID NO: 121430 - DNA, 20 bp, Artificial Sequence
  MKO10121430_B_Tlr4
  gRNA
aagcttgaatccctgcatag

SEQ ID NO: 121431 - DNA, 20 bp, Artificial Sequence
  MKO10121431_B_Tlr4
  gRNA
ccatgatcagagtcctagcc

SEQ ID NO: 121432 - DNA, 20 bp, Artificial Sequence
  MKO10121432_B_Tlr4
  gRNA
ccactgaagttctgaaaaat

SEQ ID NO: 121433 - DNA, 20 bp, Artificial Sequence
  MKO10121433_B_Tlr5
  gRNA
cccacgcaccacacttcagc

SEQ ID NO: 121434 - DNA, 20 bp, Artificial Sequence
  MKO10121434_B_Tlr5
  gRNA
agcaaaatttacgtcgctta

SEQ ID NO: 121435 - DNA, 20 bp, Artificial Sequence
  MKO10121435_B_Tlr5
  gRNA
ttaacgacctggttgcatta

SEQ ID NO: 121436 - DNA, 20 bp, Artificial Sequence
  MKO10121436_B_Tlr6
  gRNA
tgctgcaaagttccgacaac

SEQ ID NO: 121437 - DNA, 20 bp, Artificial Sequence
  MKO10121437_B_Tlr6
  gRNA
cgataactgagagaatcgac

SEQ ID NO: 121438 - DNA, 20 bp, Artificial Sequence
  MKO10121438_B_Tlr6
  gRNA
accgattgtgtgagacatcc

SEQ ID NO: 121439 - DNA, 20 bp, Artificial Sequence
  MKO10121439_B_Tlr7
  gRNA
tccgatacgatgaatatgca

SEQ ID NO: 121440 - DNA, 20 bp, Artificial Sequence
  MKO10121440_B_Tlr7
  gRNA
aagtaccgcaactctctcaa

SEQ ID NO: 121441 - DNA, 20 bp, Artificial Sequence
  MKO10121441_B_Tlr7
  gRNA
ttcagcatgtgcccccaaca

SEQ ID NO: 121442 - DNA, 20 bp, Artificial Sequence
  MKO10121442_B_Tlr8
  gRNA
agatctcacgacttgtgtat

SEQ ID NO: 121443 - DNA, 20 bp, Artificial Sequence
  MKO10121443_B_Tlr8
  gRNA
ccatcactagtattgcctaa

SEQ ID NO: 121444 - DNA, 20 bp, Artificial Sequence
  MKO10121444_B_Tlr8
  gRNA
ccgaagacgatttcgccaag

SEQ ID NO: 121445 - DNA, 20 bp, Artificial Sequence
  MKO10121445_B_Tlr9
  gRNA
gtccttcaattaccgcaaga

SEQ ID NO: 121446 - DNA, 20 bp, Artificial Sequence
  MKO10121446_B_Tlr9
  gRNA
ccgagccctacgcttgtgtc

SEQ ID NO: 121447 - DNA, 20 bp, Artificial Sequence
  MKO10121447_B_Tlr9
  gRNA
ctcccttcgagtacttgatg

SEQ ID NO: 121448 - DNA, 20 bp, Artificial Sequence
  MKO10121448_B_Tlx1
  gRNA
gccgtaagcgccagtgcccc

SEQ ID NO: 121449 - DNA, 20 bp, Artificial Sequence
  MKO10121449_B_Tlx1
  gRNA
gccgggggcactggcgctta

SEQ ID NO: 121450 - DNA, 20 bp, Artificial Sequence
  MKO10121450_B_Tlx1
  gRNA
agtcgtcagaccacggctgc

SEQ ID NO: 121451 - DNA, 20 bp, Artificial Sequence
  MKO10121451_B_Tlx2
  gRNA
ctcgcccaggcgccagaccg

SEQ ID NO: 121452 - DNA, 20 bp, Artificial Sequence
  MKO10121452_B_Tlx2
  gRNA
aaaacgccgcactttctccg

SEQ ID NO: 121453 - DNA, 20 bp, Artificial Sequence
  MKO10121453_B_Tlx2
  gRNA
cacggcgggggccgcacccg

SEQ ID NO: 121454 - DNA, 20 bp, Artificial Sequence
  MKO10121454_B_Tlx3
  gRNA
tcacgcccttcaccgtgacc

SEQ ID NO: 121455 - DNA, 20 bp, Artificial Sequence
  MKO10121455_B_Tlx3
  gRNA
cgggctggatggaatcgttg

SEQ ID NO: 121456 - DNA, 20 bp, Artificial Sequence
  MKO10121456_B_Tlx3
  gRNA
gttgcagctgtagcatgagc

SEQ ID NO: 121457 - DNA, 20 bp, Artificial Sequence
  MKO10121457_B_Tm2d1
  gRNA
agcacccaaaataacttgta

SEQ ID NO: 121458 - DNA, 20 bp, Artificial Sequence
  MKO10121458_B_Tm2d1
  gRNA
tttcattcttatttcaatgc

SEQ ID NO: 121459 - DNA, 20 bp, Artificial Sequence
  MKO10121459_B_Tm2d1
  gRNA
gtgtagtttgtacaattaac

SEQ ID NO: 121460 - DNA, 20 bp, Artificial Sequence
  MKO10121460_B_Tm2d2
  gRNA
ggtcgactccgaagcatccc

SEQ ID NO: 121461 - DNA, 20 bp, Artificial Sequence
  MKO10121461_B_Tm2d2
  gRNA
cggagtcgaccgcttctgcc

SEQ ID NO: 121462 - DNA, 20 bp, Artificial Sequence
  MKO10121462_B_Tm2d2
  gRNA
gcttggttatggttgtctca

SEQ ID NO: 121463 - DNA, 20 bp, Artificial Sequence
  MKO10121463_B_Tm2d3
  gRNA
ggaaaagcagcacgcgggac

SEQ ID NO: 121464 - DNA, 20 bp, Artificial Sequence
  MKO10121464_B_Tm2d3
  gRNA
ctacaagtggtcgacagccc

SEQ ID NO: 121465 - DNA, 20 bp, Artificial Sequence
  MKO10121465_B_Tm2d3
  gRNA
ctcccgacagaatgtagcac

SEQ ID NO: 121466 - DNA, 20 bp, Artificial Sequence
  MKO10121466_B_Tm4sf19
  gRNA
tcgcgctcctctttcctaac

SEQ ID NO: 121467 - DNA, 20 bp, Artificial Sequence
  MKO10121467_B_Tm4sf19
  gRNA
cctttaaagatctacacaac

SEQ ID NO: 121468 - DNA, 20 bp, Artificial Sequence
  MKO10121468_B_Tm4sf19
  gRNA
accttgcttacctgcaggca

SEQ ID NO: 121469 - DNA, 20 bp, Artificial Sequence
  MKO10121469_B_Tm4sf1
  gRNA
ccaaagtgcagcgatgccca

SEQ ID NO: 121470 - DNA, 20 bp, Artificial Sequence
  MKO10121470_B_Tm4sf1
  gRNA
ctgccagcgtttgtgttcat

SEQ ID NO: 121471 - DNA, 20 bp, Artificial Sequence
  MKO10121471_B_Tm4sf1
  gRNA
aggtgtagttccatactcca

SEQ ID NO: 121472 - DNA, 20 bp, Artificial Sequence
  MKO10121472_B_Tm4sf20
  gRNA
gctccaggattccaacaagc

SEQ ID NO: 121473 - DNA, 20 bp, Artificial Sequence
  MKO10121473_B_Tm4sf20
  gRNA
tgtgtggcgtctctcagcga

SEQ ID NO: 121474 - DNA, 20 bp, Artificial Sequence
  MKO10121474_B_Tm4sf20
  gRNA
ttgcatgttggtatcactcc

SEQ ID NO: 121475 - DNA, 20 bp, Artificial Sequence
  MKO10121475_B_Tm4sf4
  gRNA
gtgcaaagagccccgtgatg

SEQ ID NO: 121476 - DNA, 20 bp, Artificial Sequence
  MKO10121476_B_Tm4sf4
  gRNA
cgcagcagtcgttgttctgc

SEQ ID NO: 121477 - DNA, 20 bp, Artificial Sequence
  MKO10121477_B_Tm4sf4
  gRNA
ctgcagaacaacgactgctg

SEQ ID NO: 121478 - DNA, 20 bp, Artificial Sequence
  MKO10121478_B_Tm4sf5
  gRNA
gatggcgccaagcaccccaa

SEQ ID NO: 121479 - DNA, 20 bp, Artificial Sequence
  MKO10121479_B_Tm4sf5
  gRNA
gcccagctcccgccactgac

SEQ ID NO: 121480 - DNA, 20 bp, Artificial Sequence
  MKO10121480_B_Tm4sf5
  gRNA
tgctgcggtgcaggttgctg

SEQ ID NO: 121481 - DNA, 20 bp, Artificial Sequence
  MKO10121481_B_Tm6sf1
  gRNA
ccaccatcactaggtacatc

SEQ ID NO: 121482 - DNA, 20 bp, Artificial Sequence
  MKO10121482_B_Tm6sf1
  gRNA
cttgctccaagcctatgata

SEQ ID NO: 121483 - DNA, 20 bp, Artificial Sequence
  MKO10121483_B_Tm6sf1
  gRNA
agtgtggtgaaccttatcat

SEQ ID NO: 121484 - DNA, 20 bp, Artificial Sequence
  MKO10121484_B_Tm6sf2
  gRNA
acctacgaccctctctatgc

SEQ ID NO: 121485 - DNA, 20 bp, Artificial Sequence
  MKO10121485_B_Tm6sf2
  gRNA
cttcatggatttctacacca

SEQ ID NO: 121486 - DNA, 20 bp, Artificial Sequence
  MKO10121486_B_Tm6sf2
  gRNA
ccctacctacgcacagcaca

SEQ ID NO: 121487 - DNA, 20 bp, Artificial Sequence
  MKO10121487_B_Tm7sf2
  gRNA
ctatttgctgcctgcacgca

SEQ ID NO: 121488 - DNA, 20 bp, Artificial Sequence
  MKO10121488_B_Tm7sf2
  gRNA
ctaccaaagccttcgcatag

SEQ ID NO: 121489 - DNA, 20 bp, Artificial Sequence
  MKO10121489_B_Tm7sf2
  gRNA
agatcacacaccttgcgtgc

SEQ ID NO: 121490 - DNA, 20 bp, Artificial Sequence
  MKO10121490_B_Tm7sf3
  gRNA
actctccttcccagcacgtc

SEQ ID NO: 121491 - DNA, 20 bp, Artificial Sequence
  MKO10121491_B_Tm7sf3
  gRNA
caccaagcctgtccaaagcg

SEQ ID NO: 121492 - DNA, 20 bp, Artificial Sequence
  MKO10121492_B_Tm7sf3
  gRNA
ttccatgcagatcccattcc

SEQ ID NO: 121493 - DNA, 20 bp, Artificial Sequence
  MKO10121493_B_Tm9sf1
  gRNA
cagagctcgtctcttcgtct

SEQ ID NO: 121494 - DNA, 20 bp, Artificial Sequence
  MKO10121494_B_Tm9sf1
  gRNA
cccctgacatgttagagcgc

SEQ ID NO: 121495 - DNA, 20 bp, Artificial Sequence
  MKO10121495_B_Tm9sf1
  gRNA
tggcgatccgtgctgagcgt

SEQ ID NO: 121496 - DNA, 20 bp, Artificial Sequence
  MKO10121496_B_Tm9sf2
  gRNA
tttcgtacaaacgagcttac

SEQ ID NO: 121497 - DNA, 20 bp, Artificial Sequence
  MKO10121497_B_Tm9sf2
  gRNA
acttacgctgtatattcata

SEQ ID NO: 121498 - DNA, 20 bp, Artificial Sequence
  MKO10121498_B_Tm9sf2
  gRNA
cagattccaccgaatcaagc

SEQ ID NO: 121499 - DNA, 20 bp, Artificial Sequence
  MKO10121499_B_Tm9sf3
  gRNA
acctaccctatgctgaaaaa

SEQ ID NO: 121500 - DNA, 20 bp, Artificial Sequence
  MKO10121500_B_Tm9sf3
  gRNA
ggagttgaattagaatttag

SEQ ID NO: 121501 - DNA, 20 bp, Artificial Sequence
  MKO10121501_B_Tm9sf3
  gRNA
tacctttaaatttaatgtcc

SEQ ID NO: 121502 - DNA, 20 bp, Artificial Sequence
  MKO10121502_B_Tm9sf4
  gRNA
gattgtcaacacccctttcc

SEQ ID NO: 121503 - DNA, 20 bp, Artificial Sequence
  MKO10121503_B_Tm9sf4
  gRNA
gcccatcaagataacctaca

SEQ ID NO: 121504 - DNA, 20 bp, Artificial Sequence
  MKO10121504_B_Tm9sf4
  gRNA
aaacgacccagtagagatca

SEQ ID NO: 121505 - DNA, 20 bp, Artificial Sequence
  MKO10121505_B_Tma16
  gRNA
ttacctttcaactaattcac

SEQ ID NO: 121506 - DNA, 20 bp, Artificial Sequence
  MKO10121506_B_Tma16
  gRNA
ttcaagattgaagactgaga

SEQ ID NO: 121507 - DNA, 20 bp, Artificial Sequence
  MKO10121507_B_Tma16
  gRNA
gtctcacaaacaagacaaga

SEQ ID NO: 121508 - DNA, 20 bp, Artificial Sequence
  MKO10121508_B_Tma7
  gRNA
actcgaagagctaaaagcca

SEQ ID NO: 121509 - DNA, 20 bp, Artificial Sequence
  MKO10121509_B_Tma7
  gRNA
ctggaggcgccatgtcgggc

SEQ ID NO: 121510 - DNA, 20 bp, Artificial Sequence
  MKO10121510_B_Tma7
  gRNA
cctgaaacagcccaagaagc

SEQ ID NO: 121511 - DNA, 20 bp, Artificial Sequence
  MKO10121511_B_Tmbim1
  gRNA
caaatacgtgaggaacaatg

SEQ ID NO: 121512 - DNA, 20 bp, Artificial Sequence
  MKO10121512_B_Tmbim1
  gRNA
tgtccagctgctcatcactg

SEQ ID NO: 121513 - DNA, 20 bp, Artificial Sequence
  MKO10121513_B_Tmbim1
  gRNA
ccaacactcacctgggtccc

SEQ ID NO: 121514 - DNA, 20 bp, Artificial Sequence
  MKO10121514_B_Tmbim4
  gRNA
gggcagaggtcactgtagtc

SEQ ID NO: 121515 - DNA, 20 bp, Artificial Sequence
  MKO10121515_B_Tmbim4
  gRNA
caaatgcaaagagtagatag

SEQ ID NO: 121516 - DNA, 20 bp, Artificial Sequence
  MKO10121516_B_Tmbim4
  gRNA
cagagcaaacaccacaatta

SEQ ID NO: 121517 - DNA, 20 bp, Artificial Sequence
  MKO10121517_B_Tmbim6
  gRNA
agctccggcgccgggcatac

SEQ ID NO: 121518 - DNA, 20 bp, Artificial Sequence
  MKO10121518_B_Tmbim6
  gRNA
ccgtgcccatgaaggccgtg

SEQ ID NO: 121519 - DNA, 20 bp, Artificial Sequence
  MKO10121519_B_Tmbim6
  gRNA
agcaggggcctatgtccatg

SEQ ID NO: 121520 - DNA, 20 bp, Artificial Sequence
  MKO10121520_B_Tmbim7
  gRNA
gaatgtagtttgcgggcact

SEQ ID NO: 121521 - DNA, 20 bp, Artificial Sequence
  MKO10121521_B_Tmbim7
  gRNA
gttcatacagcagccattaa

SEQ ID NO: 121522 - DNA, 20 bp, Artificial Sequence
  MKO10121522_B_Tmbim7
  gRNA
atagcgaacctgtaagaaag

SEQ ID NO: 121523 - DNA, 20 bp, Artificial Sequence
  MKO10121523_B_Tmc1
  gRNA
ctactgtcaaatgtaaacct

SEQ ID NO: 121524 - DNA, 20 bp, Artificial Sequence
  MKO10121524_B_Tmc1
  gRNA
aaatttgtgagtgagaatga

SEQ ID NO: 121525 - DNA, 20 bp, Artificial Sequence
  MKO10121525_B_Tmc1
  gRNA
atttaagatgatgatggcca

SEQ ID NO: 121526 - DNA, 20 bp, Artificial Sequence
  MKO10121526_B_Tmc2
  gRNA
agaagctcatcactaccgtg

SEQ ID NO: 121527 - DNA, 20 bp, Artificial Sequence
  MKO10121527_B_Tmc2
  gRNA
tcaagactcaatgtattccc

SEQ ID NO: 121528 - DNA, 20 bp, Artificial Sequence
  MKO10121528_B_Tmc2
  gRNA
cagggaagcccaagcctttg

SEQ ID NO: 121529 - DNA, 20 bp, Artificial Sequence
  MKO10121529_B_Tmc3
  gRNA
caaatatccgctgcagaccc

SEQ ID NO: 121530 - DNA, 20 bp, Artificial Sequence
  MKO10121530_B_Tmc3
  gRNA
taatcccaaatagccacctc

SEQ ID NO: 121531 - DNA, 20 bp, Artificial Sequence
  MKO10121531_B_Tmc3
  gRNA
ggcagaaactgcgggcactg

SEQ ID NO: 121532 - DNA, 20 bp, Artificial Sequence
  MKO10121532_B_Tmc4
  gRNA
acttgctgtgcatcctacga

SEQ ID NO: 121533 - DNA, 20 bp, Artificial Sequence
  MKO10121533_B_Tmc4
  gRNA
gcgaccaggccatgagtgtg

SEQ ID NO: 121534 - DNA, 20 bp, Artificial Sequence
  MKO10121534_B_Tmc4
  gRNA
ggaaagctgtcgggtccagt

SEQ ID NO: 121535 - DNA, 20 bp, Artificial Sequence
  MKO10121535_B_Tmc5
  gRNA
ctccaacctagacttaccgc

SEQ ID NO: 121536 - DNA, 20 bp, Artificial Sequence
  MKO10121536_B_Tmc5
  gRNA
gattctgtctctagttgtca

SEQ ID NO: 121537 - DNA, 20 bp, Artificial Sequence
  MKO10121537_B_Tmc5
  gRNA
caactgctgtgctcagtgtc

SEQ ID NO: 121538 - DNA, 20 bp, Artificial Sequence
  MKO10121538_B_Tmc6
  gRNA
gatttccaaggtcgcagccg

SEQ ID NO: 121539 - DNA, 20 bp, Artificial Sequence
  MKO10121539_B_Tmc6
  gRNA
cctcgatgtcccggagacca

SEQ ID NO: 121540 - DNA, 20 bp, Artificial Sequence
  MKO10121540_B_Tmc6
  gRNA
aatactacaaccgcacagtg

SEQ ID NO: 121541 - DNA, 20 bp, Artificial Sequence
  MKO10121541_B_Tmc7
  gRNA
tgctgctgtaccgtttccac

SEQ ID NO: 121542 - DNA, 20 bp, Artificial Sequence
  MKO10121542_B_Tmc7
  gRNA
gatgagcacaaaagtgctgt

SEQ ID NO: 121543 - DNA, 20 bp, Artificial Sequence
  MKO10121543_B_Tmc7
  gRNA
tacatcatagacctgctgtc

SEQ ID NO: 121544 - DNA, 20 bp, Artificial Sequence
  MKO10121544_B_Tmc8
  gRNA
gcagagcaacggctggcccg

SEQ ID NO: 121545 - DNA, 20 bp, Artificial Sequence
  MKO10121545_B_Tmc8
  gRNA
tggcagacaagcgcttcatc

SEQ ID NO: 121546 - DNA, 20 bp, Artificial Sequence
  MKO10121546_B_Tmc8
  gRNA
cccgttaaaatattccaaag

SEQ ID NO: 121547 - DNA, 20 bp, Artificial Sequence
  MKO10121547_B_Tmcc1
  gRNA
aaaatgttagatcgagcgtt

SEQ ID NO: 121548 - DNA, 20 bp, Artificial Sequence
  MKO10121548_B_Tmcc1
  gRNA
ttaccaccgaaagctccgtg

SEQ ID NO: 121549 - DNA, 20 bp, Artificial Sequence
  MKO10121549_B_Tmcc1
  gRNA
ctttcttagatgtgagcgac

SEQ ID NO: 121550 - DNA, 20 bp, Artificial Sequence
  MKO10121550_B_Tmcc2
  gRNA
accggacccccagcgaacta

SEQ ID NO: 121551 - DNA, 20 bp, Artificial Sequence
  MKO10121551_B_Tmcc2
  gRNA
tccggaggcgcgtcttcatg

SEQ ID NO: 121552 - DNA, 20 bp, Artificial Sequence
  MKO10121552_B_Tmcc2
  gRNA
cagtcctcacctgcttcgta

SEQ ID NO: 121553 - DNA, 20 bp, Artificial Sequence
  MKO10121553_B_Tmcc3
  gRNA
atccccctcggcgtatgttc

SEQ ID NO: 121554 - DNA, 20 bp, Artificial Sequence
  MKO10121554_B_Tmcc3
  gRNA
gtgagcgccgtgtcgctgcc

SEQ ID NO: 121555 - DNA, 20 bp, Artificial Sequence
  MKO10121555_B_Tmcc3
  gRNA
gatgtcccttgagcgctcat

SEQ ID NO: 121556 - DNA, 20 bp, Artificial Sequence
  MKO10121556_B_Tmco1
  gRNA
caacaatagagacctgtcaa

SEQ ID NO: 121557 - DNA, 20 bp, Artificial Sequence
  MKO10121557_B_Tmco1
  gRNA
atttgtctgtcctgtaaacc

SEQ ID NO: 121558 - DNA, 20 bp, Artificial Sequence
  MKO10121558_B_Tmco1
  gRNA
cgacaacagaagaagaagat

SEQ ID NO: 121559 - DNA, 20 bp, Artificial Sequence
  MKO10121559_B_Tmco2
  gRNA
tgcgcctcagccaacaaact

SEQ ID NO: 121560 - DNA, 20 bp, Artificial Sequence
  MKO10121560_B_Tmco2
  gRNA
gagcagtcccgcttcgaagc

SEQ ID NO: 121561 - DNA, 20 bp, Artificial Sequence
  MKO10121561_B_Tmco2
  gRNA
tctcttgcagacccaacgac

SEQ ID NO: 121562 - DNA, 20 bp, Artificial Sequence
  MKO10121562_B_Tmco3
  gRNA
ataggtctgcctacgatgtt

SEQ ID NO: 121563 - DNA, 20 bp, Artificial Sequence
  MKO10121563_B_Tmco3
  gRNA
cgcagaccaccacttcataa

SEQ ID NO: 121564 - DNA, 20 bp, Artificial Sequence
  MKO10121564_B_Tmco3
  gRNA
tataatttgtggcgtgcttc

SEQ ID NO: 121565 - DNA, 20 bp, Artificial Sequence
  MKO10121565_B_Tmco4
  gRNA
gggaggtcacatgacaaacg

SEQ ID NO: 121566 - DNA, 20 bp, Artificial Sequence
  MKO10121566_B_Tmco4
  gRNA
cgtcacaaattctgtgcaga

SEQ ID NO: 121567 - DNA, 20 bp, Artificial Sequence
  MKO10121567_B_Tmco4
  gRNA
ttgaaggacactatgatgcc

SEQ ID NO: 121568 - DNA, 20 bp, Artificial Sequence
  MKO10121568_B_Tmco5b
  gRNA
cctgaactcagaccttgaaa

SEQ ID NO: 121569 - DNA, 20 bp, Artificial Sequence
  MKO10121569_B_Tmco5b
  gRNA
gaccctaagcaagaatgtga

SEQ ID NO: 121570 - DNA, 20 bp, Artificial Sequence
  MKO10121570_B_Tmco5b
  gRNA
agaaagaagaatctatacaa

SEQ ID NO: 121571 - DNA, 20 bp, Artificial Sequence
  MKO10121571_B_Tmco5
  gRNA
gaacatgagatcacccagac

SEQ ID NO: 121572 - DNA, 20 bp, Artificial Sequence
  MKO10121572_B_Tmco5
  gRNA
tcccactcctcgtcttctgc

SEQ ID NO: 121573 - DNA, 20 bp, Artificial Sequence
  MKO10121573_B_Tmco5
  gRNA
aacaaccccagaagagtcca

SEQ ID NO: 121574 - DNA, 20 bp, Artificial Sequence
  MKO10121574_B_Tmco6
  gRNA
agccgcctcaagctgcaaca

SEQ ID NO: 121575 - DNA, 20 bp, Artificial Sequence
  MKO10121575_B_Tmco6
  gRNA
gaagacgccccggaagaagt

SEQ ID NO: 121576 - DNA, 20 bp, Artificial Sequence
  MKO10121576_B_Tmco6
  gRNA
tgttgcagcttgaggcggct

SEQ ID NO: 121577 - DNA, 20 bp, Artificial Sequence
  MKO10121577_B_Tmed10
  gRNA
tcattactctatcaacttct

SEQ ID NO: 121578 - DNA, 20 bp, Artificial Sequence
  MKO10121578_B_Tmed10
  gRNA
gaggagatgagggacactaa

SEQ ID NO: 121579 - DNA, 20 bp, Artificial Sequence
  MKO10121579_B_Tmed10
  gRNA
aaacatgtcatagtcttccg

SEQ ID NO: 121580 - DNA, 20 bp, Artificial Sequence
  MKO10121580_B_Tmed11
  gRNA
gtcacaaacattcctaagcc

SEQ ID NO: 121581 - DNA, 20 bp, Artificial Sequence
  MKO10121581_B_Tmed11
  gRNA
tccttgtgcaccatataact

SEQ ID NO: 121582 - DNA, 20 bp, Artificial Sequence
  MKO10121582_B_Tmed11
  gRNA
gacttccttgaatctgctcc

SEQ ID NO: 121583 - DNA, 20 bp, Artificial Sequence
  MKO10121583_B_Tmed1
  gRNA
accagaagttgacccgctcc

SEQ ID NO: 121584 - DNA, 20 bp, Artificial Sequence
  MKO10121584_B_Tmed1
  gRNA
gagccctcagggtgtgctgt

SEQ ID NO: 121585 - DNA, 20 bp, Artificial Sequence
  MKO10121585_B_Tmed1
  gRNA
gctggacgtggacttcacct

SEQ ID NO: 121586 - DNA, 20 bp, Artificial Sequence
  MKO10121586_B_Tmed2
  gRNA
atcacaggaccagataataa

SEQ ID NO: 121587 - DNA, 20 bp, Artificial Sequence
  MKO10121587_B_Tmed2
  gRNA
tggctctgtgtattctctcc

SEQ ID NO: 121588 - DNA, 20 bp, Artificial Sequence
  MKO10121588_B_Tmed2
  gRNA
agaagaaatgattaatgagc

SEQ ID NO: 121589 - DNA, 20 bp, Artificial Sequence
  MKO10121589_B_Tmed3
  gRNA
gcagggcgtgaagttctctc

SEQ ID NO: 121590 - DNA, 20 bp, Artificial Sequence
  MKO10121590_B_Tmed3
  gRNA
atgaagcgtgcggagcctcg

SEQ ID NO: 121591 - DNA, 20 bp, Artificial Sequence
  MKO10121591_B_Tmed3
  gRNA
ccaggggcaacgtcatctac

SEQ ID NO: 121592 - DNA, 20 bp, Artificial Sequence
  MKO10121592_B_Tmed4
  gRNA
tgggggtttaccttgccgtc

SEQ ID NO: 121593 - DNA, 20 bp, Artificial Sequence
  MKO10121593_B_Tmed4
  gRNA
gaggataacggtctgggcga

SEQ ID NO: 121594 - DNA, 20 bp, Artificial Sequence
  MKO10121594_B_Tmed4
  gRNA
tccagcgaagagagccattc

SEQ ID NO: 121595 - DNA, 20 bp, Artificial Sequence
  MKO10121595_B_Tmed5
  gRNA
tgtggttaacttgatggtca

SEQ ID NO: 121596 - DNA, 20 bp, Artificial Sequence
  MKO10121596_B_Tmed5
  gRNA
tattactaatacagatgtcc

SEQ ID NO: 121597 - DNA, 20 bp, Artificial Sequence
  MKO10121597_B_Tmed5
  gRNA
ctctaagtagagtttgtatg

SEQ ID NO: 121598 - DNA, 20 bp, Artificial Sequence
  MKO10121598_B_Tmed6
  gRNA
gcacctcgtagctgaagtag

SEQ ID NO: 121599 - DNA, 20 bp, Artificial Sequence
  MKO10121599_B_Tmed6
  gRNA
agtcttctatgaggggcccg

SEQ ID NO: 121600 - DNA, 20 bp, Artificial Sequence
  MKO10121600_B_Tmed6
  gRNA
accctgcggggtatgtgccg

SEQ ID NO: 121601 - DNA, 20 bp, Artificial Sequence
  MKO10121601_B_Tmed7
  gRNA
agccgccgctcggagccggc

SEQ ID NO: 121602 - DNA, 20 bp, Artificial Sequence
  MKO10121602_B_Tmed7
  gRNA
gggcagctcgaaggtgatct

SEQ ID NO: 121603 - DNA, 20 bp, Artificial Sequence
  MKO10121603_B_Tmed7
  gRNA
aaacttgtacgtcccatttc

SEQ ID NO: 121604 - DNA, 20 bp, Artificial Sequence
  MKO10121604_B_Tmed8
  gRNA
acagccgtctggtagtgaag

SEQ ID NO: 121605 - DNA, 20 bp, Artificial Sequence
  MKO10121605_B_Tmed8
  gRNA
ccaagctccacagcgacctg

SEQ ID NO: 121606 - DNA, 20 bp, Artificial Sequence
  MKO10121606_B_Tmed8
  gRNA
caccaacgtcagctctccac

SEQ ID NO: 121607 - DNA, 20 bp, Artificial Sequence
  MKO10121607_B_Tmed9
  gRNA
atctataggtcatcctggcc

SEQ ID NO: 121608 - DNA, 20 bp, Artificial Sequence
  MKO10121608_B_Tmed9
  gRNA
ggccagcttaccttgtcctc

SEQ ID NO: 121609 - DNA, 20 bp, Artificial Sequence
  MKO10121609_B_Tmed9
  gRNA
gtttgtcatacagctgcgtc

SEQ ID NO: 121610 - DNA, 20 bp, Artificial Sequence
  MKO10121610_B_Tmeff1
  gRNA
gtacaaggccgagtgtgacg

SEQ ID NO: 121611 - DNA, 20 bp, Artificial Sequence
  MKO10121611_B_Tmeff1
  gRNA
gtacttgcacggtccacact

SEQ ID NO: 121612 - DNA, 20 bp, Artificial Sequence
  MKO10121612_B_Tmeff1
  gRNA
tccccgtttgacccacagac

SEQ ID NO: 121613 - DNA, 20 bp, Artificial Sequence
  MKO10121613_B_Tmeff2
  gRNA
gcctcaggtagcactcattc

SEQ ID NO: 121614 - DNA, 20 bp, Artificial Sequence
  MKO10121614_B_Tmeff2
  gRNA
cccacagtccatgaaggctc

SEQ ID NO: 121615 - DNA, 20 bp, Artificial Sequence
  MKO10121615_B_Tmeff2
  gRNA
acctgtgacatttgccagtt

SEQ ID NO: 121616 - DNA, 20 bp, Artificial Sequence
  MKO10121616_B_Tmem100
  gRNA
ggggatgatgcagcggtagc

SEQ ID NO: 121617 - DNA, 20 bp, Artificial Sequence
  MKO10121617_B_Tmem100
  gRNA
ctgcatcatcccctttgccg

SEQ ID NO: 121618 - DNA, 20 bp, Artificial Sequence
  MKO10121618_B_Tmem100
  gRNA
cacgggacccttggtcagcg

SEQ ID NO: 121619 - DNA, 20 bp, Artificial Sequence
  MKO10121619_B_Tmem101
  gRNA
gctatgtccactacggggac

SEQ ID NO: 121620 - DNA, 20 bp, Artificial Sequence
  MKO10121620_B_Tmem101
  gRNA
ccaacgccgcttcactccga

SEQ ID NO: 121621 - DNA, 20 bp, Artificial Sequence
  MKO10121621_B_Tmem101
  gRNA
tgctcacgcgctgccccttt

SEQ ID NO: 121622 - DNA, 20 bp, Artificial Sequence
  MKO10121622_B_Tmem102
  gRNA
gaagcatggcttccaccgtc

SEQ ID NO: 121623 - DNA, 20 bp, Artificial Sequence
  MKO10121623_B_Tmem102
  gRNA
tgctctactgggcgtgcgag

SEQ ID NO: 121624 - DNA, 20 bp, Artificial Sequence
  MKO10121624_B_Tmem102
  gRNA
gttcatgcagctcgtcacgc

SEQ ID NO: 121625 - DNA, 20 bp, Artificial Sequence
  MKO10121625_B_Tmem104
  gRNA
tgtgacaaccacctttgcga

SEQ ID NO: 121626 - DNA, 20 bp, Artificial Sequence
  MKO10121626_B_Tmem104
  gRNA
ctgccctctcgtagttgtct

SEQ ID NO: 121627 - DNA, 20 bp, Artificial Sequence
  MKO10121627_B_Tmem104
  gRNA
cagccaatgcccagctccgc

SEQ ID NO: 121628 - DNA, 20 bp, Artificial Sequence
  MKO10121628_B_Tmem106a
  gRNA
tcatcccttatggagaccaa

SEQ ID NO: 121629 - DNA, 20 bp, Artificial Sequence
  MKO10121629_B_Tmem106a
  gRNA
agcagcctccgcctgcacat

SEQ ID NO: 121630 - DNA, 20 bp, Artificial Sequence
  MKO10121630_B_Tmem106a
  gRNA
gttacctgctcactggccaa

SEQ ID NO: 121631 - DNA, 20 bp, Artificial Sequence
  MKO10121631_B_Tmem106b
  gRNA
ttcagcgtcgtagctgacat

SEQ ID NO: 121632 - DNA, 20 bp, Artificial Sequence
  MKO10121632_B_Tmem106b
  gRNA
cttacctgcttcatatcaag

SEQ ID NO: 121633 - DNA, 20 bp, Artificial Sequence
  MKO10121633_B_Tmem106b
  gRNA
tgattccatatagtgatcag

SEQ ID NO: 121634 - DNA, 20 bp, Artificial Sequence
  MKO10121634_B_Tmem106c
  gRNA
ttcatcttaccgtgacatca

SEQ ID NO: 121635 - DNA, 20 bp, Artificial Sequence
  MKO10121635_B_Tmem106c
  gRNA
tgatcccccacagtgaccag

SEQ ID NO: 121636 - DNA, 20 bp, Artificial Sequence
  MKO10121636_B_Tmem106c
  gRNA
ccttactacacataggaaga

SEQ ID NO: 121637 - DNA, 20 bp, Artificial Sequence
  MKO10121637_B_Tmem107
  gRNA
agccgcgctctgtctcaccc

SEQ ID NO: 121638 - DNA, 20 bp, Artificial Sequence
  MKO10121638_B_Tmem107
  gRNA
tggttgtcatcacgttgttc

SEQ ID NO: 121639 - DNA, 20 bp, Artificial Sequence
  MKO10121639_B_Tmem107
  gRNA
tcgccaggaaagcaacatcc

SEQ ID NO: 121640 - DNA, 20 bp, Artificial Sequence
  MKO10121640_B_Tmem108
  gRNA
ggactacttcaacagacacg

SEQ ID NO: 121641 - DNA, 20 bp, Artificial Sequence
  MKO10121641_B_Tmem108
  gRNA
cgactatcgagacactggga

SEQ ID NO: 121642 - DNA, 20 bp, Artificial Sequence
  MKO10121642_B_Tmem108
  gRNA
tcatgcagcacactgtcaac

SEQ ID NO: 121643 - DNA, 20 bp, Artificial Sequence
  MKO10121643_B_Tmem109
  gRNA
gctactcaccatccagcccc

SEQ ID NO: 121644 - DNA, 20 bp, Artificial Sequence
  MKO10121644_B_Tmem109
  gRNA
actgggcagcaatcccagac

SEQ ID NO: 121645 - DNA, 20 bp, Artificial Sequence
  MKO10121645_B_Tmem109
  gRNA
ggacgaggaaaagggccacg

SEQ ID NO: 121646 - DNA, 20 bp, Artificial Sequence
  MKO10121646_B_Tmem110
  gRNA
agatcatgatcacgatgtag

SEQ ID NO: 121647 - DNA, 20 bp, Artificial Sequence
  MKO10121647_B_Tmem110
  gRNA
catgatctttgaaaagtccg

SEQ ID NO: 121648 - DNA, 20 bp, Artificial Sequence
  MKO10121648_B_Tmem110
  gRNA
gacacttccaaacaagccat

SEQ ID NO: 121649 - DNA, 20 bp, Artificial Sequence
  MKO10121649_B_Tmem115
  gRNA
gaagaagcttccacgccccc

SEQ ID NO: 121650 - DNA, 20 bp, Artificial Sequence
  MKO10121650_B_Tmem115
  gRNA
cttctgcgctccgcatcttg

SEQ ID NO: 121651 - DNA, 20 bp, Artificial Sequence
  MKO10121651_B_Tmem115
  gRNA
ctgttcactattcgtatcca

SEQ ID NO: 121652 - DNA, 20 bp, Artificial Sequence
  MKO10121652_B_Tmem116
  gRNA
gcgagtgcgtttcttcccag

SEQ ID NO: 121653 - DNA, 20 bp, Artificial Sequence
  MKO10121653_B_Tmem116
  gRNA
attcattgacattgcccaaa

SEQ ID NO: 121654 - DNA, 20 bp, Artificial Sequence
  MKO10121654_B_Tmem116
  gRNA
tgtgctgcagacagatgtat

SEQ ID NO: 121655 - DNA, 20 bp, Artificial Sequence
  MKO10121655_B_Tmem117
  gRNA
ggaaatccgcaagagctttc

SEQ ID NO: 121656 - DNA, 20 bp, Artificial Sequence
  MKO10121656_B_Tmem117
  gRNA
atatttcaggccagttgctc

SEQ ID NO: 121657 - DNA, 20 bp, Artificial Sequence
  MKO10121657_B_Tmem117
  gRNA
tttcatgaaactagctgctg

SEQ ID NO: 121658 - DNA, 20 bp, Artificial Sequence
  MKO10121658_B_Tmem119
  gRNA
tccccgagcctgccgccgcc

SEQ ID NO: 121659 - DNA, 20 bp, Artificial Sequence
  MKO10121659_B_Tmem119
  gRNA
catcacgcgccagaagcaca

SEQ ID NO: 121660 - DNA, 20 bp, Artificial Sequence
  MKO10121660_B_Tmem119
  gRNA
gggctctagctggagaccgg

SEQ ID NO: 121661 - DNA, 20 bp, Artificial Sequence
  MKO10121661_B_Tmem11
  gRNA
cagacgcctccttccccacg

SEQ ID NO: 121662 - DNA, 20 bp, Artificial Sequence
  MKO10121662_B_Tmem11
  gRNA
tactcacattccaacactca

SEQ ID NO: 121663 - DNA, 20 bp, Artificial Sequence
  MKO10121663_B_Tmem11
  gRNA
gtgctgtctcgtctccaatt

SEQ ID NO: 121664 - DNA, 20 bp, Artificial Sequence
  MKO10121664_B_Tmem120a
  gRNA
accctcacctggagttgagc

SEQ ID NO: 121665 - DNA, 20 bp, Artificial Sequence
  MKO10121665_B_Tmem120a
  gRNA
cgtgacacttctgagcaagc

SEQ ID NO: 121666 - DNA, 20 bp, Artificial Sequence
  MKO10121666_B_Tmem120a
  gRNA
cctctagcttgaggcgatac

SEQ ID NO: 121667 - DNA, 20 bp, Artificial Sequence
  MKO10121667_B_Tmem120b
  gRNA
cgtgaccctcctcagcaatc

SEQ ID NO: 121668 - DNA, 20 bp, Artificial Sequence
  MKO10121668_B_Tmem120b
  gRNA
aggtgctgcacagcgtctgc

SEQ ID NO: 121669 - DNA, 20 bp, Artificial Sequence
  MKO10121669_B_Tmem120b
  gRNA
tcatggcaggtttgcttaca

SEQ ID NO: 121670 - DNA, 20 bp, Artificial Sequence
  MKO10121670_B_Tmem121
  gRNA
gcgcaccttccgaaagcgcg

SEQ ID NO: 121671 - DNA, 20 bp, Artificial Sequence
  MKO10121671_B_Tmem121
  gRNA
ccacgtgtgcctgaccacgc

SEQ ID NO: 121672 - DNA, 20 bp, Artificial Sequence
  MKO10121672_B_Tmem121
  gRNA
ctctgggagccgccacgcac

SEQ ID NO: 121673 - DNA, 20 bp, Artificial Sequence
  MKO10121673_B_Tmem123
  gRNA
tataccaccaacaaagctgc

SEQ ID NO: 121674 - DNA, 20 bp, Artificial Sequence
  MKO10121674_B_Tmem123
  gRNA
tttacctgttatgttaatat

SEQ ID NO: 121675 - DNA, 20 bp, Artificial Sequence
  MKO10121675_B_Tmem123
  gRNA
acctccaatattaacataac

SEQ ID NO: 121676 - DNA, 20 bp, Artificial Sequence
  MKO10121676_B_Tmem125
  gRNA
tcctccaccagcagccgatc

SEQ ID NO: 121677 - DNA, 20 bp, Artificial Sequence
  MKO10121677_B_Tmem125
  gRNA
agatgctactgttatcaccg

SEQ ID NO: 121678 - DNA, 20 bp, Artificial Sequence
  MKO10121678_B_Tmem125
  gRNA
tggaggtggtctcatgacgc

SEQ ID NO: 121679 - DNA, 20 bp, Artificial Sequence
  MKO10121679_B_Tmem126a
  gRNA
taaacttacaagactttggt

SEQ ID NO: 121680 - DNA, 20 bp, Artificial Sequence
  MKO10121680_B_Tmem126a
  gRNA
gaaatagactgtttgctatt

SEQ ID NO: 121681 - DNA, 20 bp, Artificial Sequence
  MKO10121681_B_Tmem126a
  gRNA
actgtgtttgcatcctatct

SEQ ID NO: 121682 - DNA, 20 bp, Artificial Sequence
  MKO10121682_B_Tmem126b
  gRNA
gtaacagatgctttgcaatc

SEQ ID NO: 121683 - DNA, 20 bp, Artificial Sequence
  MKO10121683_B_Tmem126b
  gRNA
ggagtctttggttaatcatc

SEQ ID NO: 121684 - DNA, 20 bp, Artificial Sequence
  MKO10121684_B_Tmem126b
  gRNA
ggaacaagtagtagtttgtc

SEQ ID NO: 121685 - DNA, 20 bp, Artificial Sequence
  MKO10121685_B_Tmem127
  gRNA
cggctggcattagggtgtat

SEQ ID NO: 121686 - DNA, 20 bp, Artificial Sequence
  MKO10121686_B_Tmem127
  gRNA
cgacgagtaatcttcagagc

SEQ ID NO: 121687 - DNA, 20 bp, Artificial Sequence
  MKO10121687_B_Tmem127
  gRNA
cccggcagcccggcacctcc

SEQ ID NO: 121688 - DNA, 20 bp, Artificial Sequence
  MKO10121688_B_Tmem128
  gRNA
cacaactgcaactttcattg

SEQ ID NO: 121689 - DNA, 20 bp, Artificial Sequence
  MKO10121689_B_Tmem128
  gRNA
gtgatgttcatctcactcct

SEQ ID NO: 121690 - DNA, 20 bp, Artificial Sequence
  MKO10121690_B_Tmem128
  gRNA
catcatattcttcaatccca

SEQ ID NO: 121691 - DNA, 20 bp, Artificial Sequence
  MKO10121691_B_Tmem129
  gRNA
gcagcttcttactatacgtg

SEQ ID NO: 121692 - DNA, 20 bp, Artificial Sequence
  MKO10121692_B_Tmem129
  gRNA
gaccttcacgttggcctacc

SEQ ID NO: 121693 - DNA, 20 bp, Artificial Sequence
  MKO10121693_B_Tmem129
  gRNA
ctgcacttcggattggggcg

SEQ ID NO: 121694 - DNA, 20 bp, Artificial Sequence
  MKO10121694_B_Tmem130
  gRNA
gcggacttgaagaagtcgct

SEQ ID NO: 121695 - DNA, 20 bp, Artificial Sequence
  MKO10121695_B_Tmem130
  gRNA
gagtagttgtaatacaccac

SEQ ID NO: 121696 - DNA, 20 bp, Artificial Sequence
  MKO10121696_B_Tmem130
  gRNA
tgtaggagttcggccaagac

SEQ ID NO: 121697 - DNA, 20 bp, Artificial Sequence
  MKO10121697_B_Tmem131
  gRNA
gaagtcctgcgctttgacga

SEQ ID NO: 121698 - DNA, 20 bp, Artificial Sequence
  MKO10121698_B_Tmem131
  gRNA
gccagttggaatgccaaaaa

SEQ ID NO: 121699 - DNA, 20 bp, Artificial Sequence
  MKO10121699_B_Tmem131
  gRNA
tcggttcatatcaacagaaa

SEQ ID NO: 121700 - DNA, 20 bp, Artificial Sequence
  MKO10121700_B_Tmem132a
  gRNA
aaacagcccgcacatcccaa

SEQ ID NO: 121701 - DNA, 20 bp, Artificial Sequence
  MKO10121701_B_Tmem132a
  gRNA
ctccagcgtgtaggccagtt

SEQ ID NO: 121702 - DNA, 20 bp, Artificial Sequence
  MKO10121702_B_Tmem132a
  gRNA
ccaccgagcctgccgcttcc

SEQ ID NO: 121703 - DNA, 20 bp, Artificial Sequence
  MKO10121703_B_Tmem132b
  gRNA
ggtgaccctcgatgacaatg

SEQ ID NO: 121704 - DNA, 20 bp, Artificial Sequence
  MKO10121704_B_Tmem132b
  gRNA
ctgccgatcctttcccgagc

SEQ ID NO: 121705 - DNA, 20 bp, Artificial Sequence
  MKO10121705_B_Tmem132b
  gRNA
catcagccagacgacctttg

SEQ ID NO: 121706 - DNA, 20 bp, Artificial Sequence
  MKO10121706_B_Tmem132c
  gRNA
actcacctatttcgtgcccc

SEQ ID NO: 121707 - DNA, 20 bp, Artificial Sequence
  MKO10121707_B_Tmem132c
  gRNA
ctccgacacagcaatgtccg

SEQ ID NO: 121708 - DNA, 20 bp, Artificial Sequence
  MKO10121708_B_Tmem132c
  gRNA
ccgtgcagaccagcgagcct

SEQ ID NO: 121709 - DNA, 20 bp, Artificial Sequence
  MKO10121709_B_Tmem132d
  gRNA
acgtggcaggttgaataccc

SEQ ID NO: 121710 - DNA, 20 bp, Artificial Sequence
  MKO10121710_B_Tmem132d
  gRNA
agtcatgaagattgatatcg

SEQ ID NO: 121711 - DNA, 20 bp, Artificial Sequence
  MKO10121711_B_Tmem132d
  gRNA
tttcttctgacaaacgatga

SEQ ID NO: 121712 - DNA, 20 bp, Artificial Sequence
  MKO10121712_B_Tmem132e
  gRNA
atgctgccgatgcgcagcag

SEQ ID NO: 121713 - DNA, 20 bp, Artificial Sequence
  MKO10121713_B_Tmem132e
  gRNA
ttaggcaccaagtctcgaag

SEQ ID NO: 121714 - DNA, 20 bp, Artificial Sequence
  MKO10121714_B_Tmem132e
  gRNA
ccacatgatcctccgcttca

SEQ ID NO: 121715 - DNA, 20 bp, Artificial Sequence
  MKO10121715_B_Tmem134
  gRNA
cgttcacctggtagcgtagc

SEQ ID NO: 121716 - DNA, 20 bp, Artificial Sequence
  MKO10121716_B_Tmem134
  gRNA
tgtctgtccgcagctcgcag

SEQ ID NO: 121717 - DNA, 20 bp, Artificial Sequence
  MKO10121717_B_Tmem134
  gRNA
ctggtgctgactcccccatc

SEQ ID NO: 121718 - DNA, 20 bp, Artificial Sequence
  MKO10121718_B_Tmem135
  gRNA
aatactccagcttgcgcttc

SEQ ID NO: 121719 - DNA, 20 bp, Artificial Sequence
  MKO10121719_B_Tmem135
  gRNA
tgctctgccagcctcatatg

SEQ ID NO: 121720 - DNA, 20 bp, Artificial Sequence
  MKO10121720_B_Tmem135
  gRNA
aaattctactcatggactcc

SEQ ID NO: 121721 - DNA, 20 bp, Artificial Sequence
  MKO10121721_B_Tmem136
  gRNA
tacctacctgggtgggtaaa

SEQ ID NO: 121722 - DNA, 20 bp, Artificial Sequence
  MKO10121722_B_Tmem136
  gRNA
tgcatctatttccagtccga

SEQ ID NO: 121723 - DNA, 20 bp, Artificial Sequence
  MKO10121723_B_Tmem136
  gRNA
cccccgtgaaactgtgatag

SEQ ID NO: 121724 - DNA, 20 bp, Artificial Sequence
  MKO10121724_B_Tmem138
  gRNA
aggagttcatgcaagtccga

SEQ ID NO: 121725 - DNA, 20 bp, Artificial Sequence
  MKO10121725_B_Tmem138
  gRNA
cattcggagtagctctgaga

SEQ ID NO: 121726 - DNA, 20 bp, Artificial Sequence
  MKO10121726_B_Tmem138
  gRNA
tcagcatctccctacatgtc

SEQ ID NO: 121727 - DNA, 20 bp, Artificial Sequence
  MKO10121727_B_Tmem139
  gRNA
acttaggggtccacgagttg

SEQ ID NO: 121728 - DNA, 20 bp, Artificial Sequence
  MKO10121728_B_Tmem139
  gRNA
ctaagtcgaagaattcttcc

SEQ ID NO: 121729 - DNA, 20 bp, Artificial Sequence
  MKO10121729_B_Tmem139
  gRNA
gatattatgatactgctgta

SEQ ID NO: 121730 - DNA, 20 bp, Artificial Sequence
  MKO10121730_B_Tmem140
  gRNA
acagaatggaggatgccgcc

SEQ ID NO: 121731 - DNA, 20 bp, Artificial Sequence
  MKO10121731_B_Tmem140
  gRNA
gtggttgttccgccacagcc

SEQ ID NO: 121732 - DNA, 20 bp, Artificial Sequence
  MKO10121732_B_Tmem140
  gRNA
atgttacaactttcccgagc

SEQ ID NO: 121733 - DNA, 20 bp, Artificial Sequence
  MKO10121733_B_Tmem141
  gRNA
gcaggcactggtgcgacttt

SEQ ID NO: 121734 - DNA, 20 bp, Artificial Sequence
  MKO10121734_B_Tmem141
  gRNA
gtcagaaatgcagcaatctc

SEQ ID NO: 121735 - DNA, 20 bp, Artificial Sequence
  MKO10121735_B_Tmem141
  gRNA
tcctcttaatgaacatcagc

SEQ ID NO: 121736 - DNA, 20 bp, Artificial Sequence
  MKO10121736_B_Tmem143
  gRNA
caaggtccgactatggtccc

SEQ ID NO: 121737 - DNA, 20 bp, Artificial Sequence
  MKO10121737_B_Tmem143
  gRNA
ctttctgaagaagccacgct

SEQ ID NO: 121738 - DNA, 20 bp, Artificial Sequence
  MKO10121738_B_Tmem143
  gRNA
tccaaagctgctctctccgc

SEQ ID NO: 121739 - DNA, 20 bp, Artificial Sequence
  MKO10121739_B_Tmem144
  gRNA
cagccgccaagcatcgcaaa

SEQ ID NO: 121740 - DNA, 20 bp, Artificial Sequence
  MKO10121740_B_Tmem144
  gRNA
tgttaaatgatccccagatt

SEQ ID NO: 121741 - DNA, 20 bp, Artificial Sequence
  MKO10121741_B_Tmem144
  gRNA
tccgagctgcctgggttatt

SEQ ID NO: 121742 - DNA, 20 bp, Artificial Sequence
  MKO10121742_B_Tmem145
  gRNA
tggcctgatcaccgactcct

SEQ ID NO: 121743 - DNA, 20 bp, Artificial Sequence
  MKO10121743_B_Tmem145
  gRNA
tccgttctgtgcgtgaaaga

SEQ ID NO: 121744 - DNA, 20 bp, Artificial Sequence
  MKO10121744_B_Tmem145
  gRNA
tatatcgcactcagcaagtg

SEQ ID NO: 121745 - DNA, 20 bp, Artificial Sequence
  MKO10121745_B_Tmem147
  gRNA
cccgaggcattgaatttgac

SEQ ID NO: 121746 - DNA, 20 bp, Artificial Sequence
  MKO10121746_B_Tmem147
  gRNA
ctgctgaactcattatgtcc

SEQ ID NO: 121747 - DNA, 20 bp, Artificial Sequence
  MKO10121747_B_Tmem147
  gRNA
actgcataccagactgatgt

SEQ ID NO: 121748 - DNA, 20 bp, Artificial Sequence
  MKO10121748_B_Tmem14a
  gRNA
ggagttccatctctgattgc

SEQ ID NO: 121749 - DNA, 20 bp, Artificial Sequence
  MKO10121749_B_Tmem14a
  gRNA
taatgggtgtgagatttaag

SEQ ID NO: 121750 - DNA, 20 bp, Artificial Sequence
  MKO10121750_B_Tmem14a
  gRNA
tccttaccaatggacctgat

SEQ ID NO: 121751 - DNA, 20 bp, Artificial Sequence
  MKO10121751_B_Tmem14c
  gRNA
cccaggtagtgtgccgtccc

SEQ ID NO: 121752 - DNA, 20 bp, Artificial Sequence
  MKO10121752_B_Tmem14c
  gRNA
gctcctgcgattaaccctgc

SEQ ID NO: 121753 - DNA, 20 bp, Artificial Sequence
  MKO10121753_B_Tmem14c
  gRNA
attattggctatgccaaagc

SEQ ID NO: 121754 - DNA, 20 bp, Artificial Sequence
  MKO10121754_B_Tmem150a
  gRNA
cgtaccgaaggaggcagatg

SEQ ID NO: 121755 - DNA, 20 bp, Artificial Sequence
  MKO10121755_B_Tmem150a
  gRNA
gctccataccagttctccac

SEQ ID NO: 121756 - DNA, 20 bp, Artificial Sequence
  MKO10121756_B_Tmem150a
  gRNA
cagcacccatgttgccaatg

SEQ ID NO: 121757 - DNA, 20 bp, Artificial Sequence
  MKO10121757_B_Tmem150b
  gRNA
ttagagcagctcctatattg

SEQ ID NO: 121758 - DNA, 20 bp, Artificial Sequence
  MKO10121758_B_Tmem150b
  gRNA
gccataacaacctgataaaa

SEQ ID NO: 121759 - DNA, 20 bp, Artificial Sequence
  MKO10121759_B_Tmem150b
  gRNA
gcccacagaaataagatgac

SEQ ID NO: 121760 - DNA, 20 bp, Artificial Sequence
  MKO10121760_B_Tmem150c
  gRNA
cgaagcatgctccatacatc

SEQ ID NO: 121761 - DNA, 20 bp, Artificial Sequence
  MKO10121761_B_Tmem150c
  gRNA
gttcagtcaagtaatgaaca

SEQ ID NO: 121762 - DNA, 20 bp, Artificial Sequence
  MKO10121762_B_Tmem150c
  gRNA
tgactgaacacacagctcgc

SEQ ID NO: 121763 - DNA, 20 bp, Artificial Sequence
  MKO10121763_B_Tmem151a
  gRNA
gcgagagagtggtggtccgc

SEQ ID NO: 121764 - DNA, 20 bp, Artificial Sequence
  MKO10121764_B_Tmem151a
  gRNA
tgcgactgtccgccctctca

SEQ ID NO: 121765 - DNA, 20 bp, Artificial Sequence
  MKO10121765_B_Tmem151a
  gRNA
aggcctcgtacctcacgcag

SEQ ID NO: 121766 - DNA, 20 bp, Artificial Sequence
  MKO10121766_B_Tmem151b
  gRNA
cgacagacgcgtctgctccg

SEQ ID NO: 121767 - DNA, 20 bp, Artificial Sequence
  MKO10121767_B_Tmem151b
  gRNA
gccctcgtccgccgatgcca

SEQ ID NO: 121768 - DNA, 20 bp, Artificial Sequence
  MKO10121768_B_Tmem151b
  gRNA
ctctacgccatgtccccccc

SEQ ID NO: 121769 - DNA, 20 bp, Artificial Sequence
  MKO10121769_B_Tmem154
  gRNA
ctttgagatccttggctaga

SEQ ID NO: 121770 - DNA, 20 bp, Artificial Sequence
  MKO10121770_B_Tmem154
  gRNA
catctctatttccataacag

SEQ ID NO: 121771 - DNA, 20 bp, Artificial Sequence
  MKO10121771_B_Tmem154
  gRNA
tctctttcagatgaacttgg

SEQ ID NO: 121772 - DNA, 20 bp, Artificial Sequence
  MKO10121772_B_Tmem158
  gRNA
tgcaaggccgggcgcatccg

SEQ ID NO: 121773 - DNA, 20 bp, Artificial Sequence
  MKO10121773_B_Tmem158
  gRNA
gcaagacctgcgcctgtgcg

SEQ ID NO: 121774 - DNA, 20 bp, Artificial Sequence
  MKO10121774_B_Tmem158
  gRNA
ctcttctctaccaacgcgca

SEQ ID NO: 121775 - DNA, 20 bp, Artificial Sequence
  MKO10121775_B_Tmem159
  gRNA
tctcatgggggccatattat

SEQ ID NO: 121776 - DNA, 20 bp, Artificial Sequence
  MKO10121776_B_Tmem159
  gRNA
tgccaacgtcgactgtcagc

SEQ ID NO: 121777 - DNA, 20 bp, Artificial Sequence
  MKO10121777_B_Tmem159
  gRNA
tccccgacaaggcaagtgac

SEQ ID NO: 121778 - DNA, 20 bp, Artificial Sequence
  MKO10121778_B_Tmem160
  gRNA
cgctgccagacccaccgcat

SEQ ID NO: 121779 - DNA, 20 bp, Artificial Sequence
  MKO10121779_B_Tmem160
  gRNA
cgaaatggacttctgtcatc

SEQ ID NO: 121780 - DNA, 20 bp, Artificial Sequence
  MKO10121780_B_Tmem160
  gRNA
gaaggagatgaccccaatgc

SEQ ID NO: 121781 - DNA, 20 bp, Artificial Sequence
  MKO10121781_B_Tmem161a
  gRNA
aggaacttcgggcgctgtca

SEQ ID NO: 121782 - DNA, 20 bp, Artificial Sequence
  MKO10121782_B_Tmem161a
  gRNA
gcagagcagccagcgtgcga

SEQ ID NO: 121783 - DNA, 20 bp, Artificial Sequence
  MKO10121783_B_Tmem161a
  gRNA
cacactgttccttcgcacgc

SEQ ID NO: 121784 - DNA, 20 bp, Artificial Sequence
  MKO10121784_B_Tmem161b
  gRNA
ccgtgaagtccaccagccac

SEQ ID NO: 121785 - DNA, 20 bp, Artificial Sequence
  MKO10121785_B_Tmem161b
  gRNA
cattgtctatttagtaactg

SEQ ID NO: 121786 - DNA, 20 bp, Artificial Sequence
  MKO10121786_B_Tmem161b
  gRNA
gtccacttctgtaacagact

SEQ ID NO: 121787 - DNA, 20 bp, Artificial Sequence
  MKO10121787_B_Tmem163
  gRNA
ggtgacaataatggacagcc

SEQ ID NO: 121788 - DNA, 20 bp, Artificial Sequence
  MKO10121788_B_Tmem163
  gRNA
cagggagcagcctagttgag

SEQ ID NO: 121789 - DNA, 20 bp, Artificial Sequence
  MKO10121789_B_Tmem163
  gRNA
ccatccatgacctctcaact

SEQ ID NO: 121790 - DNA, 20 bp, Artificial Sequence
  MKO10121790_B_Tmem164
  gRNA
ttaccaggccgaggatctgc

SEQ ID NO: 121791 - DNA, 20 bp, Artificial Sequence
  MKO10121791_B_Tmem164
  gRNA
ccagcatgctatgctctacg

SEQ ID NO: 121792 - DNA, 20 bp, Artificial Sequence
  MKO10121792_B_Tmem164
  gRNA
ccacgtagagcatagcatgc

SEQ ID NO: 121793 - DNA, 20 bp, Artificial Sequence
  MKO10121793_B_Tmem165
  gRNA
caaaagatctctgtccgaac

SEQ ID NO: 121794 - DNA, 20 bp, Artificial Sequence
  MKO10121794_B_Tmem165
  gRNA
catttaagagtttggttcgt

SEQ ID NO: 121795 - DNA, 20 bp, Artificial Sequence
  MKO10121795_B_Tmem165
  gRNA
atgccacaacagtcatcccc

SEQ ID NO: 121796 - DNA, 20 bp, Artificial Sequence
  MKO10121796_B_Tmem167b
  gRNA
tgcaattgcctgcattgtaa

SEQ ID NO: 121797 - DNA, 20 bp, Artificial Sequence
  MKO10121797_B_Tmem167b
  gRNA
ttgcaacagcagcatgcagc

SEQ ID NO: 121798 - DNA, 20 bp, Artificial Sequence
  MKO10121798_B_Tmem167b
  gRNA
ctttgtgacagtgtactcct

SEQ ID NO: 121799 - DNA, 20 bp, Artificial Sequence
  MKO10121799_B_Tmem167
  gRNA
tccaaagctactgtatgaag

SEQ ID NO: 121800 - DNA, 20 bp, Artificial Sequence
  MKO10121800_B_Tmem167
  gRNA
cgccatatgctgtatagtga

SEQ ID NO: 121801 - DNA, 20 bp, Artificial Sequence
  MKO10121801_B_Tmem167
  gRNA
atcctggacagaaataaaac

SEQ ID NO: 121802 - DNA, 20 bp, Artificial Sequence
  MKO10121802_B_Tmem168
  gRNA
ttagtaaagtaggccgatgg

SEQ ID NO: 121803 - DNA, 20 bp, Artificial Sequence
  MKO10121803_B_Tmem168
  gRNA
gcttccgccagaacatgtac

SEQ ID NO: 121804 - DNA, 20 bp, Artificial Sequence
  MKO10121804_B_Tmem168
  gRNA
tgcttagggggaacctctgt

SEQ ID NO: 121805 - DNA, 20 bp, Artificial Sequence
  MKO10121805_B_Tmem169
  gRNA
ccgtcttctcattatctgac

SEQ ID NO: 121806 - DNA, 20 bp, Artificial Sequence
  MKO10121806_B_Tmem169
  gRNA
agctcgccaccacgctgccc

SEQ ID NO: 121807 - DNA, 20 bp, Artificial Sequence
  MKO10121807_B_Tmem169
  gRNA
ctggtccgccccgacctggc

SEQ ID NO: 121808 - DNA, 20 bp, Artificial Sequence
  MKO10121808_B_Tmem170b
  gRNA
ccggcatctacagagtggct

SEQ ID NO: 121809 - DNA, 20 bp, Artificial Sequence
  MKO10121809_B_Tmem170b
  gRNA
tcagcacgcctgcagcaccg

SEQ ID NO: 121810 - DNA, 20 bp, Artificial Sequence
  MKO10121810_B_Tmem170b
  gRNA
catggccccgctggaagccc

SEQ ID NO: 121811 - DNA, 20 bp, Artificial Sequence
  MKO10121811_B_Tmem170
  gRNA
agggtcccgttgcccacccg

SEQ ID NO: 121812 - DNA, 20 bp, Artificial Sequence
  MKO10121812_B_Tmem170
  gRNA
acatgaacctaccatatttg

SEQ ID NO: 121813 - DNA, 20 bp, Artificial Sequence
  MKO10121813_B_Tmem170
  gRNA
accctcagacaccacaaata

SEQ ID NO: 121814 - DNA, 20 bp, Artificial Sequence
  MKO10121814_B_Tmem171
  gRNA
gctgtcgctcccgtagatgc

SEQ ID NO: 121815 - DNA, 20 bp, Artificial Sequence
  MKO10121815_B_Tmem171
  gRNA
tccagtgtatgatctctccg

SEQ ID NO: 121816 - DNA, 20 bp, Artificial Sequence
  MKO10121816_B_Tmem171
  gRNA
aggctgttagccccagggga

SEQ ID NO: 121817 - DNA, 20 bp, Artificial Sequence
  MKO10121817_B_Tmem173
  gRNA
gtacccaatgtagtatgacc

SEQ ID NO: 121818 - DNA, 20 bp, Artificial Sequence
  MKO10121818_B_Tmem173
  gRNA
gcatgcttagggacttatag

SEQ ID NO: 121819 - DNA, 20 bp, Artificial Sequence
  MKO10121819_B_Tmem173
  gRNA
tgttggggtcaactacactc

SEQ ID NO: 121820 - DNA, 20 bp, Artificial Sequence
  MKO10121820_B_Tmem174
  gRNA
tttctctcctccaccgtatg

SEQ ID NO: 121821 - DNA, 20 bp, Artificial Sequence
  MKO10121821_B_Tmem174
  gRNA
ccggactcggaccagacttc

SEQ ID NO: 121822 - DNA, 20 bp, Artificial Sequence
  MKO10121822_B_Tmem174
  gRNA
gcacagcagtaatcgcccag

SEQ ID NO: 121823 - DNA, 20 bp, Artificial Sequence
  MKO10121823_B_Tmem175
  gRNA
tttagattgttccaggttgt

SEQ ID NO: 121824 - DNA, 20 bp, Artificial Sequence
  MKO10121824_B_Tmem175
  gRNA
cacagagatctcaccagaac

SEQ ID NO: 121825 - DNA, 20 bp, Artificial Sequence
  MKO10121825_B_Tmem175
  gRNA
gttctggtgagatctctgtg

SEQ ID NO: 121826 - DNA, 20 bp, Artificial Sequence
  MKO10121826_B_Tmem176a
  gRNA
gctctacctaggccctgatg

SEQ ID NO: 121827 - DNA, 20 bp, Artificial Sequence
  MKO10121827_B_Tmem176a
  gRNA
ccccttctggactgggatcg

SEQ ID NO: 121828 - DNA, 20 bp, Artificial Sequence
  MKO10121828_B_Tmem176a
  gRNA
gagcctccaagctatgctct

SEQ ID NO: 121829 - DNA, 20 bp, Artificial Sequence
  MKO10121829_B_Tmem176b
  gRNA
gtactattgtccatgagaag

SEQ ID NO: 121830 - DNA, 20 bp, Artificial Sequence
  MKO10121830_B_Tmem176b
  gRNA
tgctttctggtcggggtctg

SEQ ID NO: 121831 - DNA, 20 bp, Artificial Sequence
  MKO10121831_B_Tmem176b
  gRNA
ctaagtctccgaagtatgta

SEQ ID NO: 121832 - DNA, 20 bp, Artificial Sequence
  MKO10121832_B_Tmem177
  gRNA
cttagccctacgcagtcttt

SEQ ID NO: 121833 - DNA, 20 bp, Artificial Sequence
  MKO10121833_B_Tmem177
  gRNA
tgaaaagtgaaggcggtaaa

SEQ ID NO: 121834 - DNA, 20 bp, Artificial Sequence
  MKO10121834_B_Tmem177
  gRNA
ctggattctcagaagcggcc

SEQ ID NO: 121835 - DNA, 20 bp, Artificial Sequence
  MKO10121835_B_Tmem178b
  gRNA
gatggtccatgttctgtgca

SEQ ID NO: 121836 - DNA, 20 bp, Artificial Sequence
  MKO10121836_B_Tmem178b
  gRNA
aggggacttacccttgtatt

SEQ ID NO: 121837 - DNA, 20 bp, Artificial Sequence
  MKO10121837_B_Tmem178b
  gRNA
aaaagatggaggggtttctt

SEQ ID NO: 121838 - DNA, 20 bp, Artificial Sequence
  MKO10121838_B_Tmem178
  gRNA
gtccggccacgtgctgggtc

SEQ ID NO: 121839 - DNA, 20 bp, Artificial Sequence
  MKO10121839_B_Tmem178
  gRNA
ggactcctattcctcatgac

SEQ ID NO: 121840 - DNA, 20 bp, Artificial Sequence
  MKO10121840_B_Tmem178
  gRNA
tgtaaattagcttcgggacc

SEQ ID NO: 121841 - DNA, 20 bp, Artificial Sequence
  MKO10121841_B_Tmem179b
  gRNA
taactgtcccttgtatggtg

SEQ ID NO: 121842 - DNA, 20 bp, Artificial Sequence
  MKO10121842_B_Tmem179b
  gRNA
taaacttgcactgcatggcc

SEQ ID NO: 121843 - DNA, 20 bp, Artificial Sequence
  MKO10121843_B_Tmem179b
  gRNA
gtattcttcaggagtgagac

SEQ ID NO: 121844 - DNA, 20 bp, Artificial Sequence
  MKO10121844_B_Tmem179
  gRNA
ccatcagtttgctatcgccc

SEQ ID NO: 121845 - DNA, 20 bp, Artificial Sequence
  MKO10121845_B_Tmem179
  gRNA
gcccacactcacgatggtgc

SEQ ID NO: 121846 - DNA, 20 bp, Artificial Sequence
  MKO10121846_B_Tmem179
  gRNA
tcagctccaagtccgtttcc

SEQ ID NO: 121847 - DNA, 20 bp, Artificial Sequence
  MKO10121847_B_Tmem17
  gRNA
tcgcttcaatcaaggttatg

SEQ ID NO: 121848 - DNA, 20 bp, Artificial Sequence
  MKO10121848_B_Tmem17
  gRNA
ggtggaaacgggctgccagc

SEQ ID NO: 121849 - DNA, 20 bp, Artificial Sequence
  MKO10121849_B_Tmem17
  gRNA
aagacagctgatcaaagtcc

SEQ ID NO: 121850 - DNA, 20 bp, Artificial Sequence
  MKO10121850_B_Tmem180
  gRNA
tttggtggcgtgccagttgc

SEQ ID NO: 121851 - DNA, 20 bp, Artificial Sequence
  MKO10121851_B_Tmem180
  gRNA
gatcactgagccagccgaag

SEQ ID NO: 121852 - DNA, 20 bp, Artificial Sequence
  MKO10121852_B_Tmem180
  gRNA
gcactactcacccaacagga

SEQ ID NO: 121853 - DNA, 20 bp, Artificial Sequence
  MKO10121853_B_Tmem181a
  gRNA
ctattgagtgaataattagc

SEQ ID NO: 121854 - DNA, 20 bp, Artificial Sequence
  MKO10121854_B_Tmem181a
  gRNA
ttcactcaatagtagcaaaa

SEQ ID NO: 121855 - DNA, 20 bp, Artificial Sequence
  MKO10121855_B_Tmem181a
  gRNA
ccacatataaccaacaacta

SEQ ID NO: 121856 - DNA, 20 bp, Artificial Sequence
  MKO10121856_B_Tmem182
  gRNA
tgacatacagtatcaccacc

SEQ ID NO: 121857 - DNA, 20 bp, Artificial Sequence
  MKO10121857_B_Tmem182
  gRNA
ttctagtttaccgtggcttc

SEQ ID NO: 121858 - DNA, 20 bp, Artificial Sequence
  MKO10121858_B_Tmem182
  gRNA
ggaggctcatacattgcctc

SEQ ID NO: 121859 - DNA, 20 bp, Artificial Sequence
  MKO10121859_B_Tmem183a
  gRNA
accttcctgctgaatagcgt

SEQ ID NO: 121860 - DNA, 20 bp, Artificial Sequence
  MKO10121860_B_Tmem183a
  gRNA
ctatgccaactcggatccgg

SEQ ID NO: 121861 - DNA, 20 bp, Artificial Sequence
  MKO10121861_B_Tmem183a
  gRNA
gcggctgcgaccagaatcca

SEQ ID NO: 121862 - DNA, 20 bp, Artificial Sequence
  MKO10121862_B_Tmem184a
  gRNA
gcgtttcaggcgtgtttgta

SEQ ID NO: 121863 - DNA, 20 bp, Artificial Sequence
  MKO10121863_B_Tmem184a
  gRNA
gttcttacgcttctgcaaac

SEQ ID NO: 121864 - DNA, 20 bp, Artificial Sequence
  MKO10121864_B_Tmem184a
  gRNA
cgctctcgccccccagatat

SEQ ID NO: 121865 - DNA, 20 bp, Artificial Sequence
  MKO10121865_B_Tmem184b
  gRNA
gcacgtgccgtacatacagc

SEQ ID NO: 121866 - DNA, 20 bp, Artificial Sequence
  MKO10121866_B_Tmem184b
  gRNA
acacctgtttacagaaccgc

SEQ ID NO: 121867 - DNA, 20 bp, Artificial Sequence
  MKO10121867_B_Tmem184b
  gRNA
ggtactcatagcacaagctc

SEQ ID NO: 121868 - DNA, 20 bp, Artificial Sequence
  MKO10121868_B_Tmem184c
  gRNA
taaccatacccgtgtcattg

SEQ ID NO: 121869 - DNA, 20 bp, Artificial Sequence
  MKO10121869_B_Tmem184c
  gRNA
ctactctttcgttgcaagct

SEQ ID NO: 121870 - DNA, 20 bp, Artificial Sequence
  MKO10121870_B_Tmem184c
  gRNA
tttccataggatcctatgga

SEQ ID NO: 121871 - DNA, 20 bp, Artificial Sequence
  MKO10121871_B_Tmem185b
  gRNA
cgccgcgttgcgtgcggagt

SEQ ID NO: 121872 - DNA, 20 bp, Artificial Sequence
  MKO10121872_B_Tmem185b
  gRNA
ttgagatactagtctgcgac

SEQ ID NO: 121873 - DNA, 20 bp, Artificial Sequence
  MKO10121873_B_Tmem185b
  gRNA
atccgactccgcacgcaacg

SEQ ID NO: 121874 - DNA, 20 bp, Artificial Sequence
  MKO10121874_B_Tmem186
  gRNA
tgcccgactcgttcacatac

SEQ ID NO: 121875 - DNA, 20 bp, Artificial Sequence
  MKO10121875_B_Tmem186
  gRNA
ttccgagccatccgagcaat

SEQ ID NO: 121876 - DNA, 20 bp, Artificial Sequence
  MKO10121876_B_Tmem186
  gRNA
ctcggaaccggtagattgta

SEQ ID NO: 121877 - DNA, 20 bp, Artificial Sequence
  MKO10121877_B_Tmem189
  gRNA
tgcccacctaggccttcatc

SEQ ID NO: 121878 - DNA, 20 bp, Artificial Sequence
  MKO10121878_B_Tmem189
  gRNA
gcgccacgtggtggatgcga

SEQ ID NO: 121879 - DNA, 20 bp, Artificial Sequence
  MKO10121879_B_Tmem189
  gRNA
acaccatcgcatccaccacg

SEQ ID NO: 121880 - DNA, 20 bp, Artificial Sequence
  MKO10121880_B_Tmem18
  gRNA
cttcaacgccatgctcattg

SEQ ID NO: 121881 - DNA, 20 bp, Artificial Sequence
  MKO10121881_B_Tmem18
  gRNA
agtaccagtactttgactcc

SEQ ID NO: 121882 - DNA, 20 bp, Artificial Sequence
  MKO10121882_B_Tmem18
  gRNA
ctgtagcttatacctctgtg

SEQ ID NO: 121883 - DNA, 20 bp, Artificial Sequence
  MKO10121883_B_Tmem190
  gRNA
agcaccgcaggcgtaggcag

SEQ ID NO: 121884 - DNA, 20 bp, Artificial Sequence
  MKO10121884_B_Tmem190
  gRNA
caggaagagtaggctgccac

SEQ ID NO: 121885 - DNA, 20 bp, Artificial Sequence
  MKO10121885_B_Tmem190
  gRNA
cacagatgcgaatggaatcc

SEQ ID NO: 121886 - DNA, 20 bp, Artificial Sequence
  MKO10121886_B_Tmem191c
  gRNA
gttcgcaggagcaacacaat

SEQ ID NO: 121887 - DNA, 20 bp, Artificial Sequence
  MKO10121887_B_Tmem191c
  gRNA
gcagctaagtcaacagcgag

SEQ ID NO: 121888 - DNA, 20 bp, Artificial Sequence
  MKO10121888_B_Tmem191c
  gRNA
ctctgcctgcatgctgaatt

SEQ ID NO: 121889 - DNA, 20 bp, Artificial Sequence
  MKO10121889_B_Tmem192
  gRNA
agcaatactgcctcagagac

SEQ ID NO: 121890 - DNA, 20 bp, Artificial Sequence
  MKO10121890_B_Tmem192
  gRNA
cttggatatcctacaaagta

SEQ ID NO: 121891 - DNA, 20 bp, Artificial Sequence
  MKO10121891_B_Tmem192
  gRNA
ttatttcagtgaagattagg

SEQ ID NO: 121892 - DNA, 20 bp, Artificial Sequence
  MKO10121892_B_Tmem194b
  gRNA
ccggaagagtaatagaaaac

SEQ ID NO: 121893 - DNA, 20 bp, Artificial Sequence
  MKO10121893_B_Tmem194b
  gRNA
atatatgtggtcaactgtgc

SEQ ID NO: 121894 - DNA, 20 bp, Artificial Sequence
  MKO10121894_B_Tmem194b
  gRNA
aggtctttgcatacaagaaa

SEQ ID NO: 121895 - DNA, 20 bp, Artificial Sequence
  MKO10121895_B_Tmem194
  gRNA
gaatgacacctatgttaacg

SEQ ID NO: 121896 - DNA, 20 bp, Artificial Sequence
  MKO10121896_B_Tmem194
  gRNA
agctagagcagtttagtatc

SEQ ID NO: 121897 - DNA, 20 bp, Artificial Sequence
  MKO10121897_B_Tmem194
  gRNA
gcctaaagctgatgtaaatg

SEQ ID NO: 121898 - DNA, 20 bp, Artificial Sequence
  MKO10121898_B_Tmem196
  gRNA
cttccattaaacatcagttg

SEQ ID NO: 121899 - DNA, 20 bp, Artificial Sequence
  MKO10121899_B_Tmem196
  gRNA
catcctcctttgctcatagc

SEQ ID NO: 121900 - DNA, 20 bp, Artificial Sequence
  MKO10121900_B_Tmem196
  gRNA
ctgtgcgccaaaaaaaagtc

SEQ ID NO: 121901 - DNA, 20 bp, Artificial Sequence
  MKO10121901_B_Tmem198b
  gRNA
gctcatactctcgaagactc

SEQ ID NO: 121902 - DNA, 20 bp, Artificial Sequence
  MKO10121902_B_Tmem198b
  gRNA
accagcttacccccaatatc

SEQ ID NO: 121903 - DNA, 20 bp, Artificial Sequence
  MKO10121903_B_Tmem198b
  gRNA
gagtcttcgagagtatgagc

SEQ ID NO: 121904 - DNA, 20 bp, Artificial Sequence
  MKO10121904_B_Tmem198
  gRNA
acttagcctgatgggcgtcc

SEQ ID NO: 121905 - DNA, 20 bp, Artificial Sequence
  MKO10121905_B_Tmem198
  gRNA
atctccattgaagcgtttga

SEQ ID NO: 121906 - DNA, 20 bp, Artificial Sequence
  MKO10121906_B_Tmem198
  gRNA
ctgaccctgcttatagacgc

SEQ ID NO: 121907 - DNA, 20 bp, Artificial Sequence
  MKO10121907_B_Tmem199
  gRNA
gcctttgtctgcacttacct

SEQ ID NO: 121908 - DNA, 20 bp, Artificial Sequence
  MKO10121908_B_Tmem199
  gRNA
agtagatgtcactgccttct

SEQ ID NO: 121909 - DNA, 20 bp, Artificial Sequence
  MKO10121909_B_Tmem199
  gRNA
tcctaggtaagtgcagacaa

SEQ ID NO: 121910 - DNA, 20 bp, Artificial Sequence
  MKO10121910_B_Tmem19
  gRNA
actttcggcctgtttctccg

SEQ ID NO: 121911 - DNA, 20 bp, Artificial Sequence
  MKO10121911_B_Tmem19
  gRNA
cggcgccattacagaacacc

SEQ ID NO: 121912 - DNA, 20 bp, Artificial Sequence
  MKO10121912_B_Tmem19
  gRNA
tttgtctctcttggctgcgc

SEQ ID NO: 121913 - DNA, 20 bp, Artificial Sequence
  MKO10121913_B_Tmem200a
  gRNA
tgctgttgctccgatccaac

SEQ ID NO: 121914 - DNA, 20 bp, Artificial Sequence
  MKO10121914_B_Tmem200a
  gRNA
ccgaaccacttgggtctcat

SEQ ID NO: 121915 - DNA, 20 bp, Artificial Sequence
  MKO10121915_B_Tmem200a
  gRNA
ggatgacgacacaatcgatt

SEQ ID NO: 121916 - DNA, 20 bp, Artificial Sequence
  MKO10121916_B_Tmem200b
  gRNA
cgagggccgcgtttcgcgcc

SEQ ID NO: 121917 - DNA, 20 bp, Artificial Sequence
  MKO10121917_B_Tmem200b
  gRNA
acgaccgcgcgatgacggcc

SEQ ID NO: 121918 - DNA, 20 bp, Artificial Sequence
  MKO10121918_B_Tmem200b
  gRNA
gctgcggctgcgttcgccgt

SEQ ID NO: 121919 - DNA, 20 bp, Artificial Sequence
  MKO10121919_B_Tmem200c
  gRNA
gaagaagcccaccgacgtgg

SEQ ID NO: 121920 - DNA, 20 bp, Artificial Sequence
  MKO10121920_B_Tmem200c
  gRNA
gacggtggagcccgatagtc

SEQ ID NO: 121921 - DNA, 20 bp, Artificial Sequence
  MKO10121921_B_Tmem200c
  gRNA
aggactcgccccgcgtccgg

SEQ ID NO: 121922 - DNA, 20 bp, Artificial Sequence
  MKO10121922_B_Tmem201
  gRNA
cgctgctcaccacgtggttc

SEQ ID NO: 121923 - DNA, 20 bp, Artificial Sequence
  MKO10121923_B_Tmem201
  gRNA
cctatgggaatcgcaactgt

SEQ ID NO: 121924 - DNA, 20 bp, Artificial Sequence
  MKO10121924_B_Tmem201
  gRNA
tgctttcacaccacgggagg

SEQ ID NO: 121925 - DNA, 20 bp, Artificial Sequence
  MKO10121925_B_Tmem202
  gRNA
tccgcgctgacaccctcatc

SEQ ID NO: 121926 - DNA, 20 bp, Artificial Sequence
  MKO10121926_B_Tmem202
  gRNA
cggatctatggcagaagtcc

SEQ ID NO: 121927 - DNA, 20 bp, Artificial Sequence
  MKO10121927_B_Tmem202
  gRNA
attcaacctgcgccagaaac

SEQ ID NO: 121928 - DNA, 20 bp, Artificial Sequence
  MKO10121928_B_Tmem203
  gRNA
cactcgcagtgccaacagta

SEQ ID NO: 121929 - DNA, 20 bp, Artificial Sequence
  MKO10121929_B_Tmem203
  gRNA
gcgagtggatggcttgactc

SEQ ID NO: 121930 - DNA, 20 bp, Artificial Sequence
  MKO10121930_B_Tmem203
  gRNA
gggcacaaagacgttccacc

SEQ ID NO: 121931 - DNA, 20 bp, Artificial Sequence
  MKO10121931_B_Tmem204
  gRNA
agatgagcattgcagccgcc

SEQ ID NO: 121932 - DNA, 20 bp, Artificial Sequence
  MKO10121932_B_Tmem204
  gRNA
gtgccatgcagtcctccctc

SEQ ID NO: 121933 - DNA, 20 bp, Artificial Sequence
  MKO10121933_B_Tmem204
  gRNA
gtcagatcaccttcatcctt

SEQ ID NO: 121934 - DNA, 20 bp, Artificial Sequence
  MKO10121934_B_Tmem205
  gRNA
agcctcccgcggcacacatt

SEQ ID NO: 121935 - DNA, 20 bp, Artificial Sequence
  MKO10121935_B_Tmem205
  gRNA
gattaaagtcatccacttgc

SEQ ID NO: 121936 - DNA, 20 bp, Artificial Sequence
  MKO10121936_B_Tmem205
  gRNA
agggtccctacctgagataa

SEQ ID NO: 121937 - DNA, 20 bp, Artificial Sequence
  MKO10121937_B_Tmem206
  gRNA
ccgtgatggtctggtagacc

SEQ ID NO: 121938 - DNA, 20 bp, Artificial Sequence
  MKO10121938_B_Tmem206
  gRNA
ggtggttgagaactcggagc

SEQ ID NO: 121939 - DNA, 20 bp, Artificial Sequence
  MKO10121939_B_Tmem206
  gRNA
tgcagttcctgtctcccggc

SEQ ID NO: 121940 - DNA, 20 bp, Artificial Sequence
  MKO10121940_B_Tmem207
  gRNA
taccagatataccagccatc

SEQ ID NO: 121941 - DNA, 20 bp, Artificial Sequence
  MKO10121941_B_Tmem207
  gRNA
tgtgtttcagcgagtgctct

SEQ ID NO: 121942 - DNA, 20 bp, Artificial Sequence
  MKO10121942_B_Tmem207
  gRNA
agaaaagcactactccacaa

SEQ ID NO: 121943 - DNA, 20 bp, Artificial Sequence
  MKO10121943_B_Tmem208
  gRNA
tcagtaggatcacatcctta

SEQ ID NO: 121944 - DNA, 20 bp, Artificial Sequence
  MKO10121944_B_Tmem208
  gRNA
cccacgtaccagaagccaga

SEQ ID NO: 121945 - DNA, 20 bp, Artificial Sequence
  MKO10121945_B_Tmem208
  gRNA
catctactgccttgtaacct

SEQ ID NO: 121946 - DNA, 20 bp, Artificial Sequence
  MKO10121946_B_Tmem209
  gRNA
gacgacaggccttgcagttg

SEQ ID NO: 121947 - DNA, 20 bp, Artificial Sequence
  MKO10121947_B_Tmem209
  gRNA
taccagacttgttggtgcta

SEQ ID NO: 121948 - DNA, 20 bp, Artificial Sequence
  MKO10121948_B_Tmem209
  gRNA
gggactcctaaatgtatcca

SEQ ID NO: 121949 - DNA, 20 bp, Artificial Sequence
  MKO10121949_B_Tmem210
  gRNA
cgtatccatgatgccgtcct

SEQ ID NO: 121950 - DNA, 20 bp, Artificial Sequence
  MKO10121950_B_Tmem210
  gRNA
cccctcagtgacacgtgccc

SEQ ID NO: 121951 - DNA, 20 bp, Artificial Sequence
  MKO10121951_B_Tmem210
  gRNA
gacagacatatcaggccaag

SEQ ID NO: 121952 - DNA, 20 bp, Artificial Sequence
  MKO10121952_B_Tmem211
  gRNA
aaccagcagacctacaagca

SEQ ID NO: 121953 - DNA, 20 bp, Artificial Sequence
  MKO10121953_B_Tmem211
  gRNA
gtaggtaaagataccataag

SEQ ID NO: 121954 - DNA, 20 bp, Artificial Sequence
  MKO10121954_B_Tmem211
  gRNA
tcagcctcatctcccccgcc

SEQ ID NO: 121955 - DNA, 20 bp, Artificial Sequence
  MKO10121955_B_Tmem212
  gRNA
taccaaagccccgttccaga

SEQ ID NO: 121956 - DNA, 20 bp, Artificial Sequence
  MKO10121956_B_Tmem212
  gRNA
ttgtatttaccaagtgtctc

SEQ ID NO: 121957 - DNA, 20 bp, Artificial Sequence
  MKO10121957_B_Tmem212
  gRNA
caaatttattgtggattctc

SEQ ID NO: 121958 - DNA, 20 bp, Artificial Sequence
  MKO10121958_B_Tmem213
  gRNA
tgcagcaacatggcccagtc

SEQ ID NO: 121959 - DNA, 20 bp, Artificial Sequence
  MKO10121959_B_Tmem213
  gRNA
acttactggcacactgctcc

SEQ ID NO: 121960 - DNA, 20 bp, Artificial Sequence
  MKO10121960_B_Tmem213
  gRNA
ggtctgggtggtgtgcactc

SEQ ID NO: 121961 - DNA, 20 bp, Artificial Sequence
  MKO10121961_B_Tmem214
  gRNA
gagcttgtagttgagatagc

SEQ ID NO: 121962 - DNA, 20 bp, Artificial Sequence
  MKO10121962_B_Tmem214
  gRNA
ccgctttcagtgcgtcctcc

SEQ ID NO: 121963 - DNA, 20 bp, Artificial Sequence
  MKO10121963_B_Tmem214
  gRNA
acaagcactctttatgagcg

SEQ ID NO: 121964 - DNA, 20 bp, Artificial Sequence
  MKO10121964_B_Tmem215
  gRNA
agcaaacgatgatactgtcc

SEQ ID NO: 121965 - DNA, 20 bp, Artificial Sequence
  MKO10121965_B_Tmem215
  gRNA
tcgccgccattgctctggcc

SEQ ID NO: 121966 - DNA, 20 bp, Artificial Sequence
  MKO10121966_B_Tmem215
  gRNA
gtagcaacagtatctgtcat

SEQ ID NO: 121967 - DNA, 20 bp, Artificial Sequence
  MKO10121967_B_Tmem216
  gRNA
taggaagccatcatagcgga

SEQ ID NO: 121968 - DNA, 20 bp, Artificial Sequence
  MKO10121968_B_Tmem216
  gRNA
tcaaggccacactaatgcca

SEQ ID NO: 121969 - DNA, 20 bp, Artificial Sequence
  MKO10121969_B_Tmem216
  gRNA
gctgcttgagatgctcacgc

SEQ ID NO: 121970 - DNA, 20 bp, Artificial Sequence
  MKO10121970_B_Tmem217
  gRNA
ataatctttgatttccgccg

SEQ ID NO: 121971 - DNA, 20 bp, Artificial Sequence
  MKO10121971_B_Tmem217
  gRNA
ccctggtcagagccatgcga

SEQ ID NO: 121972 - DNA, 20 bp, Artificial Sequence
  MKO10121972_B_Tmem217
  gRNA
cagggccacactgaactcgt

SEQ ID NO: 121973 - DNA, 20 bp, Artificial Sequence
  MKO10121973_B_Tmem218
  gRNA
gtcccctaggatggctggca

SEQ ID NO: 121974 - DNA, 20 bp, Artificial Sequence
  MKO10121974_B_Tmem218
  gRNA
gacatagcggccgatgaaaa

SEQ ID NO: 121975 - DNA, 20 bp, Artificial Sequence
  MKO10121975_B_Tmem218
  gRNA
gcttcttactcatcatttgc

SEQ ID NO: 121976 - DNA, 20 bp, Artificial Sequence
  MKO10121976_B_Tmem219
  gRNA
gctacggaggccagttgtgt

SEQ ID NO: 121977 - DNA, 20 bp, Artificial Sequence
  MKO10121977_B_Tmem219
  gRNA
acttactgaagtaaggagct

SEQ ID NO: 121978 - DNA, 20 bp, Artificial Sequence
  MKO10121978_B_Tmem219
  gRNA
agtccttcctgacgccactc

SEQ ID NO: 121979 - DNA, 20 bp, Artificial Sequence
  MKO10121979_B_Tmem220
  gRNA
acaagcagggtaagcactgc

SEQ ID NO: 121980 - DNA, 20 bp, Artificial Sequence
  MKO10121980_B_Tmem220
  gRNA
ggagctcttactgtcatgcc

SEQ ID NO: 121981 - DNA, 20 bp, Artificial Sequence
  MKO10121981_B_Tmem220
  gRNA
gcagtgcttaccctgcttgt

SEQ ID NO: 121982 - DNA, 20 bp, Artificial Sequence
  MKO10121982_B_Tmem221
  gRNA
cctgctgctgttcgagatcg

SEQ ID NO: 121983 - DNA, 20 bp, Artificial Sequence
  MKO10121983_B_Tmem221
  gRNA
gcgcttggcctgttctgctg

SEQ ID NO: 121984 - DNA, 20 bp, Artificial Sequence
  MKO10121984_B_Tmem221
  gRNA
cacactacctgctaagtaga

SEQ ID NO: 121985 - DNA, 20 bp, Artificial Sequence
  MKO10121985_B_Tmem222
  gRNA
tgacaactgccactcccacg

SEQ ID NO: 121986 - DNA, 20 bp, Artificial Sequence
  MKO10121986_B_Tmem222
  gRNA
ttacttggcaggctttccga

SEQ ID NO: 121987 - DNA, 20 bp, Artificial Sequence
  MKO10121987_B_Tmem222
  gRNA
tgctgttgttgtaacgcatc

SEQ ID NO: 121988 - DNA, 20 bp, Artificial Sequence
  MKO10121988_B_Tmem223
  gRNA
ccggcgcttctacttccttt

SEQ ID NO: 121989 - DNA, 20 bp, Artificial Sequence
  MKO10121989_B_Tmem223
  gRNA
ggctccgaaccggagctacc

SEQ ID NO: 121990 - DNA, 20 bp, Artificial Sequence
  MKO10121990_B_Tmem223
  gRNA
gacccgcacaaaacagtcca

SEQ ID NO: 121991 - DNA, 20 bp, Artificial Sequence
  MKO10121991_B_Tmem225
  gRNA
tcgttaattacaagaccaag

SEQ ID NO: 121992 - DNA, 20 bp, Artificial Sequence
  MKO10121992_B_Tmem225
  gRNA
ttctgaccttcgggccaaaa

SEQ ID NO: 121993 - DNA, 20 bp, Artificial Sequence
  MKO10121993_B_Tmem225
  gRNA
tcctactatcaacagaagta

SEQ ID NO: 121994 - DNA, 20 bp, Artificial Sequence
  MKO10121994_B_Tmem229a
  gRNA
tacgtgctcgcgctctacca

SEQ ID NO: 121995 - DNA, 20 bp, Artificial Sequence
  MKO10121995_B_Tmem229a
  gRNA
cgtgcatcccgtagaagtag

SEQ ID NO: 121996 - DNA, 20 bp, Artificial Sequence
  MKO10121996_B_Tmem229a
  gRNA
ctaggctgagccgtagcgcc

SEQ ID NO: 121997 - DNA, 20 bp, Artificial Sequence
  MKO10121997_B_Tmem229b
  gRNA
accaacgagacagcgctgtc

SEQ ID NO: 121998 - DNA, 20 bp, Artificial Sequence
  MKO10121998_B_Tmem229b
  gRNA
gccagttcaacgcctgtccc

SEQ ID NO: 121999 - DNA, 20 bp, Artificial Sequence
  MKO10121999_B_Tmem229b
  gRNA
ccctgacagcgctgtctcgt

SEQ ID NO: 122000 - DNA, 20 bp, Artificial Sequence
  MKO10122000_B_Tmem230
  gRNA
ccctcctaagatcccttata

SEQ ID NO: 122001 - DNA, 20 bp, Artificial Sequence
  MKO10122001_B_Tmem230
  gRNA
gccgttcctgtcctcatcat

SEQ ID NO: 122002 - DNA, 20 bp, Artificial Sequence
  MKO10122002_B_Tmem230
  gRNA
gaaggctagtcatcaaagtc

SEQ ID NO: 122003 - DNA, 20 bp, Artificial Sequence
  MKO10122003_B_Tmem231
  gRNA
ccccaggtgtccgtgatcaa

SEQ ID NO: 122004 - DNA, 20 bp, Artificial Sequence
  MKO10122004_B_Tmem231
  gRNA
tcaggattagctgcacaccg

SEQ ID NO: 122005 - DNA, 20 bp, Artificial Sequence
  MKO10122005_B_Tmem231
  gRNA
aagcagccactgagctaccg

SEQ ID NO: 122006 - DNA, 20 bp, Artificial Sequence
  MKO10122006_B_Tmem232
  gRNA
atctatctggctcagtgcaa

SEQ ID NO: 122007 - DNA, 20 bp, Artificial Sequence
  MKO10122007_B_Tmem232
  gRNA
agacctgacgatgagtctcc

SEQ ID NO: 122008 - DNA, 20 bp, Artificial Sequence
  MKO10122008_B_Tmem232
  gRNA
aatactctaccgtataaata

SEQ ID NO: 122009 - DNA, 20 bp, Artificial Sequence
  MKO10122009_B_Tmem233
  gRNA
catcatcggcgtctcctgtg

SEQ ID NO: 122010 - DNA, 20 bp, Artificial Sequence
  MKO10122010_B_Tmem233
  gRNA
tactgagacatgggcgaagt

SEQ ID NO: 122011 - DNA, 20 bp, Artificial Sequence
  MKO10122011_B_Tmem233
  gRNA
tgggcagaaacacgagataa

SEQ ID NO: 122012 - DNA, 20 bp, Artificial Sequence
  MKO10122012_B_Tmem234
  gRNA
aacaatcagtgtaaagacga

SEQ ID NO: 122013 - DNA, 20 bp, Artificial Sequence
  MKO10122013_B_Tmem234
  gRNA
caccgagcttgtgatgcaca

SEQ ID NO: 122014 - DNA, 20 bp, Artificial Sequence
  MKO10122014_B_Tmem234
  gRNA
tcccaccaatatcttctcca

SEQ ID NO: 122015 - DNA, 20 bp, Artificial Sequence
  MKO10122015_B_Tmem235
  gRNA
agacccaaccacatacgatg

SEQ ID NO: 122016 - DNA, 20 bp, Artificial Sequence
  MKO10122016_B_Tmem235
  gRNA
cttactcagcttcgcgctgc

SEQ ID NO: 122017 - DNA, 20 bp, Artificial Sequence
  MKO10122017_B_Tmem235
  gRNA
cgccagcgtccgccacctcc

SEQ ID NO: 122018 - DNA, 20 bp, Artificial Sequence
  MKO10122018_B_Tmem236
  gRNA
ctttgctaggcgacctgttc

SEQ ID NO: 122019 - DNA, 20 bp, Artificial Sequence
  MKO10122019_B_Tmem236
  gRNA
ttcagactttgttcgctgat

SEQ ID NO: 122020 - DNA, 20 bp, Artificial Sequence
  MKO10122020_B_Tmem236
  gRNA
atcagcgaacaaagtctgaa

SEQ ID NO: 122021 - DNA, 20 bp, Artificial Sequence
  MKO10122021_B_Tmem237
  gRNA
tccggtagctaccgcttctt

SEQ ID NO: 122022 - DNA, 20 bp, Artificial Sequence
  MKO10122022_B_Tmem237
  gRNA
gagcactcccacctgtgcca

SEQ ID NO: 122023 - DNA, 20 bp, Artificial Sequence
  MKO10122023_B_Tmem237
  gRNA
agcatggccttccgaagaag

SEQ ID NO: 122024 - DNA, 20 bp, Artificial Sequence
  MKO10122024_B_Tmem238
  gRNA
gtgcggctcgcaggcgtccg

SEQ ID NO: 122025 - DNA, 20 bp, Artificial Sequence
  MKO10122025_B_Tmem238
  gRNA
accggctgtggtccggggac

SEQ ID NO: 122026 - DNA, 20 bp, Artificial Sequence
  MKO10122026_B_Tmem238
  gRNA
cgccaggcgggcaatcgccg

SEQ ID NO: 122027 - DNA, 20 bp, Artificial Sequence
  MKO10122027_B_Tmem239
  gRNA
ccccacagcatccgctgtag

SEQ ID NO: 122028 - DNA, 20 bp, Artificial Sequence
  MKO10122028_B_Tmem239
  gRNA
cgtgatgcagcagccacgag

SEQ ID NO: 122029 - DNA, 20 bp, Artificial Sequence
  MKO10122029_B_Tmem239
  gRNA
ggatatcatcggggctggcg

SEQ ID NO: 122030 - DNA, 20 bp, Artificial Sequence
  MKO10122030_B_Tmem240
  gRNA
acgtgcaccatgttccccgt

SEQ ID NO: 122031 - DNA, 20 bp, Artificial Sequence
  MKO10122031_B_Tmem240
  gRNA
ccaggccatcgcgtgcttga

SEQ ID NO: 122032 - DNA, 20 bp, Artificial Sequence
  MKO10122032_B_Tmem240
  gRNA
cgaagggcctgtgtggccgc

SEQ ID NO: 122033 - DNA, 20 bp, Artificial Sequence
  MKO10122033_B_Tmem241
  gRNA
cgttcatctgtcagctctcc

SEQ ID NO: 122034 - DNA, 20 bp, Artificial Sequence
  MKO10122034_B_Tmem241
  gRNA
tccaggtggcagacattcat

SEQ ID NO: 122035 - DNA, 20 bp, Artificial Sequence
  MKO10122035_B_Tmem241
  gRNA
tggagctccacagcagtcca

SEQ ID NO: 122036 - DNA, 20 bp, Artificial Sequence
  MKO10122036_B_Tmem242
  gRNA
acttacgctgtgaactccta

SEQ ID NO: 122037 - DNA, 20 bp, Artificial Sequence
  MKO10122037_B_Tmem242
  gRNA
tccagctagcattcccgctg

SEQ ID NO: 122038 - DNA, 20 bp, Artificial Sequence
  MKO10122038_B_Tmem242
  gRNA
attccagggcactatggcca

SEQ ID NO: 122039 - DNA, 20 bp, Artificial Sequence
  MKO10122039_B_Tmem243
  gRNA
atccaggccgctggtcccgt

SEQ ID NO: 122040 - DNA, 20 bp, Artificial Sequence
  MKO10122040_B_Tmem243
  gRNA
ggtacttactagaatcaaca

SEQ ID NO: 122041 - DNA, 20 bp, Artificial Sequence
  MKO10122041_B_Tmem243
  gRNA
aaacttgtacttccatgatg

SEQ ID NO: 122042 - DNA, 20 bp, Artificial Sequence
  MKO10122042_B_Tmem245
  gRNA
tctacttcgtgtctcttgtg

SEQ ID NO: 122043 - DNA, 20 bp, Artificial Sequence
  MKO10122043_B_Tmem245
  gRNA
gctggactcatacccagtga

SEQ ID NO: 122044 - DNA, 20 bp, Artificial Sequence
  MKO10122044_B_Tmem245
  gRNA
ccgagatgggaacatttctc

SEQ ID NO: 122045 - DNA, 20 bp, Artificial Sequence
  MKO10122045_B_Tmem246
  gRNA
cgcactgctgcagaagccga

SEQ ID NO: 122046 - DNA, 20 bp, Artificial Sequence
  MKO10122046_B_Tmem246
  gRNA
agccggggtacaacactgag

SEQ ID NO: 122047 - DNA, 20 bp, Artificial Sequence
  MKO10122047_B_Tmem246
  gRNA
gctctctaagtacgtccctg

SEQ ID NO: 122048 - DNA, 20 bp, Artificial Sequence
  MKO10122048_B_Tmem247
  gRNA
ccacatcatctacgttgcca

SEQ ID NO: 122049 - DNA, 20 bp, Artificial Sequence
  MKO10122049_B_Tmem247
  gRNA
cacaatccctatcctcataa

SEQ ID NO: 122050 - DNA, 20 bp, Artificial Sequence
  MKO10122050_B_Tmem247
  gRNA
gagaaagaagaccgtctcct

SEQ ID NO: 122051 - DNA, 20 bp, Artificial Sequence
  MKO10122051_B_Tmem248
  gRNA
agacgatctggcctgcccga

SEQ ID NO: 122052 - DNA, 20 bp, Artificial Sequence
  MKO10122052_B_Tmem248
  gRNA
tcgttatcaccatcacgaaa

SEQ ID NO: 122053 - DNA, 20 bp, Artificial Sequence
  MKO10122053_B_Tmem248
  gRNA
attgctctgccgcagtttgc

SEQ ID NO: 122054 - DNA, 20 bp, Artificial Sequence
  MKO10122054_B_Tmem251
  gRNA
tcactcagttctgaacagtc

SEQ ID NO: 122055 - DNA, 20 bp, Artificial Sequence
  MKO10122055_B_Tmem251
  gRNA
agttatctgcaatcgtcatc

SEQ ID NO: 122056 - DNA, 20 bp, Artificial Sequence
  MKO10122056_B_Tmem251
  gRNA
caatccatcccatccgctga

SEQ ID NO: 122057 - DNA, 20 bp, Artificial Sequence
  MKO10122057_B_Tmem252
  gRNA
tcagcatcctgtgccttcgc

SEQ ID NO: 122058 - DNA, 20 bp, Artificial Sequence
  MKO10122058_B_Tmem252
  gRNA
cagacagcacctcgctttcc

SEQ ID NO: 122059 - DNA, 20 bp, Artificial Sequence
  MKO10122059_B_Tmem252
  gRNA
tgcccctggccactgtagac

SEQ ID NO: 122060 - DNA, 20 bp, Artificial Sequence
  MKO10122060_B_Tmem253
  gRNA
tagctattgccagccacact

SEQ ID NO: 122061 - DNA, 20 bp, Artificial Sequence
  MKO10122061_B_Tmem253
  gRNA
gtgggtcttaccgaggctcc

SEQ ID NO: 122062 - DNA, 20 bp, Artificial Sequence
  MKO10122062_B_Tmem253
  gRNA
tccgaagagcaccttgcatc

SEQ ID NO: 122063 - DNA, 20 bp, Artificial Sequence
  MKO10122063_B_Tmem254a
  gRNA
gctttccttacccattcctt

SEQ ID NO: 122064 - DNA, 20 bp, Artificial Sequence
  MKO10122064_B_Tmem254a
  gRNA
gtttcaggtattggcttgct

SEQ ID NO: 122065 - DNA, 20 bp, Artificial Sequence
  MKO10122065_B_Tmem254a
  gRNA
gacttacttgcataaaacca

SEQ ID NO: 122066 - DNA, 20 bp, Artificial Sequence
  MKO10122066_B_Tmem254b
  gRNA
gctttccttacccattcctt

SEQ ID NO: 122067 - DNA, 20 bp, Artificial Sequence
  MKO10122067_B_Tmem254b
  gRNA
gtttcaggtattggcttgct

SEQ ID NO: 122068 - DNA, 20 bp, Artificial Sequence
  MKO10122068_B_Tmem254b
  gRNA
gacttacttgcataaaacca

SEQ ID NO: 122069 - DNA, 20 bp, Artificial Sequence
  MKO10122069_B_Tmem254c
  gRNA
gctttccttacccattcctt

SEQ ID NO: 122070 - DNA, 20 bp, Artificial Sequence
  MKO10122070_B_Tmem254c
  gRNA
gtttcaggtattggcttgct

SEQ ID NO: 122071 - DNA, 20 bp, Artificial Sequence
  MKO10122071_B_Tmem254c
  gRNA
gacttacttgcataaaacca

SEQ ID NO: 122072 - DNA, 20 bp, Artificial Sequence
  MKO10122072_B_Tmem255a
  gRNA
tgaaaccactctatgctaac

SEQ ID NO: 122073 - DNA, 20 bp, Artificial Sequence
  MKO10122073_B_Tmem255a
  gRNA
tggcaccggttagcatagag

SEQ ID NO: 122074 - DNA, 20 bp, Artificial Sequence
  MKO10122074_B_Tmem255a
  gRNA
tctatcgtgtttatcagctt

SEQ ID NO: 122075 - DNA, 20 bp, Artificial Sequence
  MKO10122075_B_Tmem255b
  gRNA
gtatgacgtctatcagacag

SEQ ID NO: 122076 - DNA, 20 bp, Artificial Sequence
  MKO10122076_B_Tmem255b
  gRNA
tctactctcatcctgaccat

SEQ ID NO: 122077 - DNA, 20 bp, Artificial Sequence
  MKO10122077_B_Tmem255b
  gRNA
ttgcagcaaggccaatggtc

SEQ ID NO: 122078 - DNA, 20 bp, Artificial Sequence
  MKO10122078_B_Tmem256
  gRNA
ttacttcacctccttcccgt

SEQ ID NO: 122079 - DNA, 20 bp, Artificial Sequence
  MKO10122079_B_Tmem256
  gRNA
gggagggagcctgctaatct

SEQ ID NO: 122080 - DNA, 20 bp, Artificial Sequence
  MKO10122080_B_Tmem256
  gRNA
gcaggattactgttagcttc

SEQ ID NO: 122081 - DNA, 20 bp, Artificial Sequence
  MKO10122081_B_Tmem258
  gRNA
cgtagatgccaacccagagc

SEQ ID NO: 122082 - DNA, 20 bp, Artificial Sequence
  MKO10122082_B_Tmem258
  gRNA
taaaggatacacgaagaacc

SEQ ID NO: 122083 - DNA, 20 bp, Artificial Sequence
  MKO10122083_B_Tmem258
  gRNA
tggccagaagtaccacagtc

SEQ ID NO: 122084 - DNA, 20 bp, Artificial Sequence
  MKO10122084_B_Tmem259
  gRNA
gtacattgtggagtactcac

SEQ ID NO: 122085 - DNA, 20 bp, Artificial Sequence
  MKO10122085_B_Tmem259
  gRNA
ccgcttcagccgcctattgc

SEQ ID NO: 122086 - DNA, 20 bp, Artificial Sequence
  MKO10122086_B_Tmem259
  gRNA
cctagggtgaccaccatgac

SEQ ID NO: 122087 - DNA, 20 bp, Artificial Sequence
  MKO10122087_B_Tmem25
  gRNA
gccactgctgggcatcgttg

SEQ ID NO: 122088 - DNA, 20 bp, Artificial Sequence
  MKO10122088_B_Tmem25
  gRNA
caggtgggttggcccgcacc

SEQ ID NO: 122089 - DNA, 20 bp, Artificial Sequence
  MKO10122089_B_Tmem25
  gRNA
acttgccttgggcactctag

SEQ ID NO: 122090 - DNA, 20 bp, Artificial Sequence
  MKO10122090_B_Tmem260
  gRNA
tagcttaaacaatctgttcg

SEQ ID NO: 122091 - DNA, 20 bp, Artificial Sequence
  MKO10122091_B_Tmem260
  gRNA
tgtgctgattacacaagctg

SEQ ID NO: 122092 - DNA, 20 bp, Artificial Sequence
  MKO10122092_B_Tmem260
  gRNA
atcacagccgcacatgagct

SEQ ID NO: 122093 - DNA, 20 bp, Artificial Sequence
  MKO10122093_B_Tmem261
  gRNA
cagaacaactacaccccaac

SEQ ID NO: 122094 - DNA, 20 bp, Artificial Sequence
  MKO10122094_B_Tmem261
  gRNA
acccgcgaaatccgccgtgc

SEQ ID NO: 122095 - DNA, 20 bp, Artificial Sequence
  MKO10122095_B_Tmem261
  gRNA
cagcacgcgacaactccagc

SEQ ID NO: 122096 - DNA, 20 bp, Artificial Sequence
  MKO10122096_B_Tmem26
  gRNA
ttctagaaccaaccctactc

SEQ ID NO: 122097 - DNA, 20 bp, Artificial Sequence
  MKO10122097_B_Tmem26
  gRNA
gctgcagttcccccttgatc

SEQ ID NO: 122098 - DNA, 20 bp, Artificial Sequence
  MKO10122098_B_Tmem26
  gRNA
aatggggaatatccttgagc

SEQ ID NO: 122099 - DNA, 20 bp, Artificial Sequence
  MKO10122099_B_Tmem27
  gRNA
caaaccagaacgacaccctc

SEQ ID NO: 122100 - DNA, 20 bp, Artificial Sequence
  MKO10122100_B_Tmem27
  gRNA
gatgctaagtcttactttaa

SEQ ID NO: 122101 - DNA, 20 bp, Artificial Sequence
  MKO10122101_B_Tmem27
  gRNA
cttagcatcagagcagctct

SEQ ID NO: 122102 - DNA, 20 bp, Artificial Sequence
  MKO10122102_B_Tmem28
  gRNA
tgatggatacttcaccaaag

SEQ ID NO: 122103 - DNA, 20 bp, Artificial Sequence
  MKO10122103_B_Tmem28
  gRNA
ggcaccgggtctgcacctcc

SEQ ID NO: 122104 - DNA, 20 bp, Artificial Sequence
  MKO10122104_B_Tmem28
  gRNA
gcctccacaggctgtctaca

SEQ ID NO: 122105 - DNA, 20 bp, Artificial Sequence
  MKO10122105_B_Tmem29
  gRNA
ttctggtactctctcacgat

SEQ ID NO: 122106 - DNA, 20 bp, Artificial Sequence
  MKO10122106_B_Tmem29
  gRNA
tcctgaggcattcgagacgc

SEQ ID NO: 122107 - DNA, 20 bp, Artificial Sequence
  MKO10122107_B_Tmem29
  gRNA
gatggatgatcctccgaaga

SEQ ID NO: 122108 - DNA, 20 bp, Artificial Sequence
  MKO10122108_B_Tmem2
  gRNA
ttggggagtaaactgatcca

SEQ ID NO: 122109 - DNA, 20 bp, Artificial Sequence
  MKO10122109_B_Tmem2
  gRNA
cagatcaaaaccctcgtctc

SEQ ID NO: 122110 - DNA, 20 bp, Artificial Sequence
  MKO10122110_B_Tmem2
  gRNA
tgcttcgcagaatcttgtcc

SEQ ID NO: 122111 - DNA, 20 bp, Artificial Sequence
  MKO10122111_B_Tmem30a
  gRNA
cgagatgatagccagttaaa

SEQ ID NO: 122112 - DNA, 20 bp, Artificial Sequence
  MKO10122112_B_Tmem30a
  gRNA
agatacgttagaattgtatc

SEQ ID NO: 122113 - DNA, 20 bp, Artificial Sequence
  MKO10122113_B_Tmem30a
  gRNA
caagcacaagatgtcacatt

SEQ ID NO: 122114 - DNA, 20 bp, Artificial Sequence
  MKO10122114_B_Tmem30b
  gRNA
cgccgtagcgccggttgttc

SEQ ID NO: 122115 - DNA, 20 bp, Artificial Sequence
  MKO10122115_B_Tmem30b
  gRNA
gcgatggcggtgcgatcgag

SEQ ID NO: 122116 - DNA, 20 bp, Artificial Sequence
  MKO10122116_B_Tmem30b
  gRNA
caagttccgcaacccgccgc

SEQ ID NO: 122117 - DNA, 20 bp, Artificial Sequence
  MKO10122117_B_Tmem30c
  gRNA
aaatatccttacccaccaat

SEQ ID NO: 122118 - DNA, 20 bp, Artificial Sequence
  MKO10122118_B_Tmem30c
  gRNA
gagtgtcattgtgggacact

SEQ ID NO: 122119 - DNA, 20 bp, Artificial Sequence
  MKO10122119_B_Tmem30c
  gRNA
attgccaacagcatattcaa

SEQ ID NO: 122120 - DNA, 20 bp, Artificial Sequence
  MKO10122120_B_Tmem33
  gRNA
ccagttgagcagagcgttcc

SEQ ID NO: 122121 - DNA, 20 bp, Artificial Sequence
  MKO10122121_B_Tmem33
  gRNA
attcatgatgaccaataaat

SEQ ID NO: 122122 - DNA, 20 bp, Artificial Sequence
  MKO10122122_B_Tmem33
  gRNA
cattgctgtgtccaatttat

SEQ ID NO: 122123 - DNA, 20 bp, Artificial Sequence
  MKO10122123_B_Tmem35
  gRNA
ggggccttctcatacaagga

SEQ ID NO: 122124 - DNA, 20 bp, Artificial Sequence
  MKO10122124_B_Tmem35
  gRNA
caaacgctacgcccatgctc

SEQ ID NO: 122125 - DNA, 20 bp, Artificial Sequence
  MKO10122125_B_Tmem35
  gRNA
tgagagggccatgatagtta

SEQ ID NO: 122126 - DNA, 20 bp, Artificial Sequence
  MKO10122126_B_Tmem37
  gRNA
catgggcctagcacgcagtg

SEQ ID NO: 122127 - DNA, 20 bp, Artificial Sequence
  MKO10122127_B_Tmem37
  gRNA
ttcttcctcaatgccgccag

SEQ ID NO: 122128 - DNA, 20 bp, Artificial Sequence
  MKO10122128_B_Tmem37
  gRNA
ctagtggaggatcatctctt

SEQ ID NO: 122129 - DNA, 20 bp, Artificial Sequence
  MKO10122129_B_Tmem38a
  gRNA
tgttgccctcctgtccaacg

SEQ ID NO: 122130 - DNA, 20 bp, Artificial Sequence
  MKO10122130_B_Tmem38a
  gRNA
tcaccttgcagcagactcgc

SEQ ID NO: 122131 - DNA, 20 bp, Artificial Sequence
  MKO10122131_B_Tmem38a
  gRNA
ccccaagaagcaggtcggcc

SEQ ID NO: 122132 - DNA, 20 bp, Artificial Sequence
  MKO10122132_B_Tmem38b
  gRNA
ggaataaccccctggctagc

SEQ ID NO: 122133 - DNA, 20 bp, Artificial Sequence
  MKO10122133_B_Tmem38b
  gRNA
ccctcgtgacctagtttccc

SEQ ID NO: 122134 - DNA, 20 bp, Artificial Sequence
  MKO10122134_B_Tmem38b
  gRNA
agactctgcaagcagcatac

SEQ ID NO: 122135 - DNA, 20 bp, Artificial Sequence
  MKO10122135_B_Tmem39a
  gRNA
tgtatgggccctcatttccg

SEQ ID NO: 122136 - DNA, 20 bp, Artificial Sequence
  MKO10122136_B_Tmem39a
  gRNA
tcggcggcggctgtggcaat

SEQ ID NO: 122137 - DNA, 20 bp, Artificial Sequence
  MKO10122137_B_Tmem39a
  gRNA
accacagccttaattacccc

SEQ ID NO: 122138 - DNA, 20 bp, Artificial Sequence
  MKO10122138_B_Tmem39b
  gRNA
acaacggtctgcgcggccag

SEQ ID NO: 122139 - DNA, 20 bp, Artificial Sequence
  MKO10122139_B_Tmem39b
  gRNA
ccagcctgtcgccgtgagaa

SEQ ID NO: 122140 - DNA, 20 bp, Artificial Sequence
  MKO10122140_B_Tmem39b
  gRNA
cacccgcttcaccgttctca

SEQ ID NO: 122141 - DNA, 20 bp, Artificial Sequence
  MKO10122141_B_Tmem40
  gRNA
tttctaggactccgaaggag

SEQ ID NO: 122142 - DNA, 20 bp, Artificial Sequence
  MKO10122142_B_Tmem40
  gRNA
gctggggaaatggtgcctac

SEQ ID NO: 122143 - DNA, 20 bp, Artificial Sequence
  MKO10122143_B_Tmem40
  gRNA
tactcacctgactccccagt

SEQ ID NO: 122144 - DNA, 20 bp, Artificial Sequence
  MKO10122144_B_Tmem41a
  gRNA
gctgtggttcccctccgatc

SEQ ID NO: 122145 - DNA, 20 bp, Artificial Sequence
  MKO10122145_B_Tmem41a
  gRNA
cagctgtttgccgaaaagac

SEQ ID NO: 122146 - DNA, 20 bp, Artificial Sequence
  MKO10122146_B_Tmem41a
  gRNA
tgccttgttcgggccatggc

SEQ ID NO: 122147 - DNA, 20 bp, Artificial Sequence
  MKO10122147_B_Tmem41b
  gRNA
acatacttaccaaacaaaca

SEQ ID NO: 122148 - DNA, 20 bp, Artificial Sequence
  MKO10122148_B_Tmem41b
  gRNA
gaaaagccttgtgcagaagc

SEQ ID NO: 122149 - DNA, 20 bp, Artificial Sequence
  MKO10122149_B_Tmem41b
  gRNA
ggaagagagggtgaatatga

SEQ ID NO: 122150 - DNA, 20 bp, Artificial Sequence
  MKO10122150_B_Tmem42
  gRNA
atcttaggctacctgctgta

SEQ ID NO: 122151 - DNA, 20 bp, Artificial Sequence
  MKO10122151_B_Tmem42
  gRNA
gaaggtccacatcagagaat

SEQ ID NO: 122152 - DNA, 20 bp, Artificial Sequence
  MKO10122152_B_Tmem42
  gRNA
tttctcgaacatactttgct

SEQ ID NO: 122153 - DNA, 20 bp, Artificial Sequence
  MKO10122153_B_Tmem43
  gRNA
tgccgtcgcagtttcacagc

SEQ ID NO: 122154 - DNA, 20 bp, Artificial Sequence
  MKO10122154_B_Tmem43
  gRNA
aagtctcactcagccgctcc

SEQ ID NO: 122155 - DNA, 20 bp, Artificial Sequence
  MKO10122155_B_Tmem43
  gRNA
tttctgcagtgagtacacgg

SEQ ID NO: 122156 - DNA, 20 bp, Artificial Sequence
  MKO10122156_B_Tmem44
  gRNA
aatctggaccgctatcccca

SEQ ID NO: 122157 - DNA, 20 bp, Artificial Sequence
  MKO10122157_B_Tmem44
  gRNA
acactcaccggacttggact

SEQ ID NO: 122158 - DNA, 20 bp, Artificial Sequence
  MKO10122158_B_Tmem44
  gRNA
agcaggtagccgaagacttc

SEQ ID NO: 122159 - DNA, 20 bp, Artificial Sequence
  MKO10122159_B_Tmem45a
  gRNA
ctcctaggttagtcaagtct

SEQ ID NO: 122160 - DNA, 20 bp, Artificial Sequence
  MKO10122160_B_Tmem45a
  gRNA
gcatcaatccttatcctcat

SEQ ID NO: 122161 - DNA, 20 bp, Artificial Sequence
  MKO10122161_B_Tmem45a
  gRNA
tagtagtgaaacatatgatt

SEQ ID NO: 122162 - DNA, 20 bp, Artificial Sequence
  MKO10122162_B_Tmem45b
  gRNA
cctcatccgagccactcaaa

SEQ ID NO: 122163 - DNA, 20 bp, Artificial Sequence
  MKO10122163_B_Tmem45b
  gRNA
tttgtcctgttcccgccatt

SEQ ID NO: 122164 - DNA, 20 bp, Artificial Sequence
  MKO10122164_B_Tmem45b
  gRNA
cgttcacaaccgccctcccc

SEQ ID NO: 122165 - DNA, 20 bp, Artificial Sequence
  MKO10122165_B_Tmem47
  gRNA
attcgcaatgccagatatcc

SEQ ID NO: 122166 - DNA, 20 bp, Artificial Sequence
  MKO10122166_B_Tmem47
  gRNA
agattggcagattgctactc

SEQ ID NO: 122167 - DNA, 20 bp, Artificial Sequence
  MKO10122167_B_Tmem47
  gRNA
gaatgatggcagcaccgccc

SEQ ID NO: 122168 - DNA, 20 bp, Artificial Sequence
  MKO10122168_B_Tmem50a
  gRNA
gaaaaggacgtagtgtatcc

SEQ ID NO: 122169 - DNA, 20 bp, Artificial Sequence
  MKO10122169_B_Tmem50a
  gRNA
ttgctatgacgccacaggta

SEQ ID NO: 122170 - DNA, 20 bp, Artificial Sequence
  MKO10122170_B_Tmem50a
  gRNA
tggaaaaatacagcaatccc

SEQ ID NO: 122171 - DNA, 20 bp, Artificial Sequence
  MKO10122171_B_Tmem50b
  gRNA
gagtaacatatgcaccaaaa

SEQ ID NO: 122172 - DNA, 20 bp, Artificial Sequence
  MKO10122172_B_Tmem50b
  gRNA
catagctgtcacctcgcacc

SEQ ID NO: 122173 - DNA, 20 bp, Artificial Sequence
  MKO10122173_B_Tmem50b
  gRNA
aaatgctgtatccaatgccc

SEQ ID NO: 122174 - DNA, 20 bp, Artificial Sequence
  MKO10122174_B_Tmem51
  gRNA
cactacgcactgacggccat

SEQ ID NO: 122175 - DNA, 20 bp, Artificial Sequence
  MKO10122175_B_Tmem51
  gRNA
cagccccgttagcgactcat

SEQ ID NO: 122176 - DNA, 20 bp, Artificial Sequence
  MKO10122176_B_Tmem51
  gRNA
cccctcctatgagtcgctaa

SEQ ID NO: 122177 - DNA, 20 bp, Artificial Sequence
  MKO10122177_B_Tmem52b
  gRNA
actcacatgtaatggtgctc

SEQ ID NO: 122178 - DNA, 20 bp, Artificial Sequence
  MKO10122178_B_Tmem52b
  gRNA
gacacagttctcctcactcc

SEQ ID NO: 122179 - DNA, 20 bp, Artificial Sequence
  MKO10122179_B_Tmem52b
  gRNA
agcggaagcatactgaagtc

SEQ ID NO: 122180 - DNA, 20 bp, Artificial Sequence
  MKO10122180_B_Tmem52
  gRNA
acgccgctggcgtgtgtgac

SEQ ID NO: 122181 - DNA, 20 bp, Artificial Sequence
  MKO10122181_B_Tmem52
  gRNA
catcttcacaacttcatcgt

SEQ ID NO: 122182 - DNA, 20 bp, Artificial Sequence
  MKO10122182_B_Tmem52
  gRNA
gtctaaggaacatggccccg

SEQ ID NO: 122183 - DNA, 20 bp, Artificial Sequence
  MKO10122183_B_Tmem53
  gRNA
ctcgatgctgtaatccagct

SEQ ID NO: 122184 - DNA, 20 bp, Artificial Sequence
  MKO10122184_B_Tmem53
  gRNA
gtggtagatagcactatact

SEQ ID NO: 122185 - DNA, 20 bp, Artificial Sequence
  MKO10122185_B_Tmem53
  gRNA
cagcccaagagaatcaccac

SEQ ID NO: 122186 - DNA, 20 bp, Artificial Sequence
  MKO10122186_B_Tmem54
  gRNA
cgctgcgcccagctcatgca

SEQ ID NO: 122187 - DNA, 20 bp, Artificial Sequence
  MKO10122187_B_Tmem54
  gRNA
ctgtagaaccacagcgtcac

SEQ ID NO: 122188 - DNA, 20 bp, Artificial Sequence
  MKO10122188_B_Tmem54
  gRNA
atcaacatgtgtctgcgcat

SEQ ID NO: 122189 - DNA, 20 bp, Artificial Sequence
  MKO10122189_B_Tmem55a
  gRNA
cgatggctgtatacggaggt

SEQ ID NO: 122190 - DNA, 20 bp, Artificial Sequence
  MKO10122190_B_Tmem55a
  gRNA
taggatgtccgagacccaac

SEQ ID NO: 122191 - DNA, 20 bp, Artificial Sequence
  MKO10122191_B_Tmem55a
  gRNA
ccaatcaaaacccccccaac

SEQ ID NO: 122192 - DNA, 20 bp, Artificial Sequence
  MKO10122192_B_Tmem55b
  gRNA
catcggacatacttctttcc

SEQ ID NO: 122193 - DNA, 20 bp, Artificial Sequence
  MKO10122193_B_Tmem55b
  gRNA
acattgcaagaacacgtttc

SEQ ID NO: 122194 - DNA, 20 bp, Artificial Sequence
  MKO10122194_B_Tmem55b
  gRNA
agaattcacagaccgaacct

SEQ ID NO: 122195 - DNA, 20 bp, Artificial Sequence
  MKO10122195_B_Tmem56
  gRNA
tttataattcaccattgcgc

SEQ ID NO: 122196 - DNA, 20 bp, Artificial Sequence
  MKO10122196_B_Tmem56
  gRNA
ccagagcggatcagttatag

SEQ ID NO: 122197 - DNA, 20 bp, Artificial Sequence
  MKO10122197_B_Tmem56
  gRNA
ataaatattgcaactgcttc

SEQ ID NO: 122198 - DNA, 20 bp, Artificial Sequence
  MKO10122198_B_Tmem57
  gRNA
ttctagcattggataccctg

SEQ ID NO: 122199 - DNA, 20 bp, Artificial Sequence
  MKO10122199_B_Tmem57
  gRNA
taccagtccttggtatctga

SEQ ID NO: 122200 - DNA, 20 bp, Artificial Sequence
  MKO10122200_B_Tmem57
  gRNA
ggacaagtgcccacactacc

SEQ ID NO: 122201 - DNA, 20 bp, Artificial Sequence
  MKO10122201_B_Tmem59l
  gRNA
cttgttattcggggactctg

SEQ ID NO: 122202 - DNA, 20 bp, Artificial Sequence
  MKO10122202_B_Tmem59l
  gRNA
ctcagagtccccgaataaca

SEQ ID NO: 122203 - DNA, 20 bp, Artificial Sequence
  MKO10122203_B_Tmem59l
  gRNA
gagccatctgcagcgagtgg

SEQ ID NO: 122204 - DNA, 20 bp, Artificial Sequence
  MKO10122204_B_Tmem59
  gRNA
gagttatacgcatgccagag

SEQ ID NO: 122205 - DNA, 20 bp, Artificial Sequence
  MKO10122205_B_Tmem59
  gRNA
gtcgttctggagtgacatga

SEQ ID NO: 122206 - DNA, 20 bp, Artificial Sequence
  MKO10122206_B_Tmem59
  gRNA
tgcggtgcatactgaatttc

SEQ ID NO: 122207 - DNA, 20 bp, Artificial Sequence
  MKO10122207_B_Tmem5
  gRNA
gattgccaggtctgtatctc

SEQ ID NO: 122208 - DNA, 20 bp, Artificial Sequence
  MKO10122208_B_Tmem5
  gRNA
ccctacatatgtaatttctt

SEQ ID NO: 122209 - DNA, 20 bp, Artificial Sequence
  MKO10122209_B_Tmem5
  gRNA
atcatgcagcattgtccagc

SEQ ID NO: 122210 - DNA, 20 bp, Artificial Sequence
  MKO10122210_B_Tmem60
  gRNA
tgttagagcgccagccagta

SEQ ID NO: 122211 - DNA, 20 bp, Artificial Sequence
  MKO10122211_B_Tmem60
  gRNA
ctcagagagtactcctcacc

SEQ ID NO: 122212 - DNA, 20 bp, Artificial Sequence
  MKO10122212_B_Tmem60
  gRNA
atagtgtcaaatatccagac

SEQ ID NO: 122213 - DNA, 20 bp, Artificial Sequence
  MKO10122213_B_Tmem62
  gRNA
accaagtggctggatatcaa

SEQ ID NO: 122214 - DNA, 20 bp, Artificial Sequence
  MKO10122214_B_Tmem62
  gRNA
aactattgacatcattcaac

SEQ ID NO: 122215 - DNA, 20 bp, Artificial Sequence
  MKO10122215_B_Tmem62
  gRNA
ccattctacttcatgttgtc

SEQ ID NO: 122216 - DNA, 20 bp, Artificial Sequence
  MKO10122216_B_Tmem63a
  gRNA
cgtcctctccgcaccactcc

SEQ ID NO: 122217 - DNA, 20 bp, Artificial Sequence
  MKO10122217_B_Tmem63a
  gRNA
ccagaatcttctccttatga

SEQ ID NO: 122218 - DNA, 20 bp, Artificial Sequence
  MKO10122218_B_Tmem63a
  gRNA
atagccctggtatcagaagc

SEQ ID NO: 122219 - DNA, 20 bp, Artificial Sequence
  MKO10122219_B_Tmem63b
  gRNA
cgtagtcccaggccaccttc

SEQ ID NO: 122220 - DNA, 20 bp, Artificial Sequence
  MKO10122220_B_Tmem63b
  gRNA
ggacactcacattgtccctt

SEQ ID NO: 122221 - DNA, 20 bp, Artificial Sequence
  MKO10122221_B_Tmem63b
  gRNA
cacttactttatcctgaaga

SEQ ID NO: 122222 - DNA, 20 bp, Artificial Sequence
  MKO10122222_B_Tmem63c
  gRNA
catccccgcatttgttgatc

SEQ ID NO: 122223 - DNA, 20 bp, Artificial Sequence
  MKO10122223_B_Tmem63c
  gRNA
cactgctgatacacaacgac

SEQ ID NO: 122224 - DNA, 20 bp, Artificial Sequence
  MKO10122224_B_Tmem63c
  gRNA
tgagaagtcatctccgtcag

SEQ ID NO: 122225 - DNA, 20 bp, Artificial Sequence
  MKO10122225_B_Tmem64
  gRNA
tcaattccacttgagcgcga

SEQ ID NO: 122226 - DNA, 20 bp, Artificial Sequence
  MKO10122226_B_Tmem64
  gRNA
atcttccatagtccgtagtg

SEQ ID NO: 122227 - DNA, 20 bp, Artificial Sequence
  MKO10122227_B_Tmem64
  gRNA
gcccagctgaagacgccatc

SEQ ID NO: 122228 - DNA, 20 bp, Artificial Sequence
  MKO10122228_B_Tmem65
  gRNA
ttccaatagacaattcaatt

SEQ ID NO: 122229 - DNA, 20 bp, Artificial Sequence
  MKO10122229_B_Tmem65
  gRNA
acccaaattgaattgtctat

SEQ ID NO: 122230 - DNA, 20 bp, Artificial Sequence
  MKO10122230_B_Tmem65
  gRNA
gaagctctaccacccactcc

SEQ ID NO: 122231 - DNA, 20 bp, Artificial Sequence
  MKO10122231_B_Tmem66
  gRNA
taagttgtactccaagccgc

SEQ ID NO: 122232 - DNA, 20 bp, Artificial Sequence
  MKO10122232_B_Tmem66
  gRNA
cgacgcctttctcagactcg

SEQ ID NO: 122233 - DNA, 20 bp, Artificial Sequence
  MKO10122233_B_Tmem66
  gRNA
cagtcgggcctactcacccc

SEQ ID NO: 122234 - DNA, 20 bp, Artificial Sequence
  MKO10122234_B_Tmem67
  gRNA
gactgcatttcttgtcctag

SEQ ID NO: 122235 - DNA, 20 bp, Artificial Sequence
  MKO10122235_B_Tmem67
  gRNA
tagaaaggcgttactaaaga

SEQ ID NO: 122236 - DNA, 20 bp, Artificial Sequence
  MKO10122236_B_Tmem67
  gRNA
acttcctgtgtatgtctacc

SEQ ID NO: 122237 - DNA, 20 bp, Artificial Sequence
  MKO10122237_B_Tmem68
  gRNA
taatcgtaaaggctttgctc

SEQ ID NO: 122238 - DNA, 20 bp, Artificial Sequence
  MKO10122238_B_Tmem68
  gRNA
tttacacaaaatattcgaga

SEQ ID NO: 122239 - DNA, 20 bp, Artificial Sequence
  MKO10122239_B_Tmem68
  gRNA
ctcggcaagttctgcctttc

SEQ ID NO: 122240 - DNA, 20 bp, Artificial Sequence
  MKO10122240_B_Tmem69
  gRNA
cacttcatccagaaagtttc

SEQ ID NO: 122241 - DNA, 20 bp, Artificial Sequence
  MKO10122241_B_Tmem69
  gRNA
cgtcctagctttcactcaga

SEQ ID NO: 122242 - DNA, 20 bp, Artificial Sequence
  MKO10122242_B_Tmem69
  gRNA
tcttaccacattatcccaac

SEQ ID NO: 122243 - DNA, 20 bp, Artificial Sequence
  MKO10122243_B_Tmem70
  gRNA
actactcaccaaatatcgtt

SEQ ID NO: 122244 - DNA, 20 bp, Artificial Sequence
  MKO10122244_B_Tmem70
  gRNA
ccgtaaaataagacttgcaa

SEQ ID NO: 122245 - DNA, 20 bp, Artificial Sequence
  MKO10122245_B_Tmem70
  gRNA
gctgatttatactggaaacc

SEQ ID NO: 122246 - DNA, 20 bp, Artificial Sequence
  MKO10122246_B_Tmem71
  gRNA
agcccccgactcctcaccaa

SEQ ID NO: 122247 - DNA, 20 bp, Artificial Sequence
  MKO10122247_B_Tmem71
  gRNA
agttgactcactcccaagtg

SEQ ID NO: 122248 - DNA, 20 bp, Artificial Sequence
  MKO10122248_B_Tmem71
  gRNA
gcacttcgaaaagaacagtt

SEQ ID NO: 122249 - DNA, 20 bp, Artificial Sequence
  MKO10122249_B_Tmem72
  gRNA
gcaccgagaccttcctccgg

SEQ ID NO: 122250 - DNA, 20 bp, Artificial Sequence
  MKO10122250_B_Tmem72
  gRNA
cgcctacatgctgctgtcag

SEQ ID NO: 122251 - DNA, 20 bp, Artificial Sequence
  MKO10122251_B_Tmem72
  gRNA
ctactttgtggctcaactct

SEQ ID NO: 122252 - DNA, 20 bp, Artificial Sequence
  MKO10122252_B_Tmem74b
  gRNA
agcatacgccatcccccgag

SEQ ID NO: 122253 - DNA, 20 bp, Artificial Sequence
  MKO10122253_B_Tmem74b
  gRNA
agggccccgtggcgccaccc

SEQ ID NO: 122254 - DNA, 20 bp, Artificial Sequence
  MKO10122254_B_Tmem74b
  gRNA
ggtaacgcccccagtccccc

SEQ ID NO: 122255 - DNA, 20 bp, Artificial Sequence
  MKO10122255_B_Tmem74
  gRNA
gaacaactcccccgagagtg

SEQ ID NO: 122256 - DNA, 20 bp, Artificial Sequence
  MKO10122256_B_Tmem74
  gRNA
gatccactgtcacctcccga

SEQ ID NO: 122257 - DNA, 20 bp, Artificial Sequence
  MKO10122257_B_Tmem74
  gRNA
caaacaagcttctccctatc

SEQ ID NO: 122258 - DNA, 20 bp, Artificial Sequence
  MKO10122258_B_Tmem79
  gRNA
agggtagtccaagcggctct

SEQ ID NO: 122259 - DNA, 20 bp, Artificial Sequence
  MKO10122259_B_Tmem79
  gRNA
tggatctccacttcccgcct

SEQ ID NO: 122260 - DNA, 20 bp, Artificial Sequence
  MKO10122260_B_Tmem79
  gRNA
ccgagatatggcaaagagac

SEQ ID NO: 122261 - DNA, 20 bp, Artificial Sequence
  MKO10122261_B_Tmem80
  gRNA
cagatgctgtttcacctcag

SEQ ID NO: 122262 - DNA, 20 bp, Artificial Sequence
  MKO10122262_B_Tmem80
  gRNA
aaagtagctcagctctacct

SEQ ID NO: 122263 - DNA, 20 bp, Artificial Sequence
  MKO10122263_B_Tmem80
  gRNA
gggcagagtacagcccactg

SEQ ID NO: 122264 - DNA, 20 bp, Artificial Sequence
  MKO10122264_B_Tmem81
  gRNA
aagcctccaggtgaagcgga

SEQ ID NO: 122265 - DNA, 20 bp, Artificial Sequence
  MKO10122265_B_Tmem81
  gRNA
aggaagccttccgcttcacc

SEQ ID NO: 122266 - DNA, 20 bp, Artificial Sequence
  MKO10122266_B_Tmem81
  gRNA
cgagccaattccccctttat

SEQ ID NO: 122267 - DNA, 20 bp, Artificial Sequence
  MKO10122267_B_Tmem82
  gRNA
ccatgcgcaccagcaccgtc

SEQ ID NO: 122268 - DNA, 20 bp, Artificial Sequence
  MKO10122268_B_Tmem82
  gRNA
ccagacggtgctggtgcgca

SEQ ID NO: 122269 - DNA, 20 bp, Artificial Sequence
  MKO10122269_B_Tmem82
  gRNA
gtctggctcaggcttgatcg

SEQ ID NO: 122270 - DNA, 20 bp, Artificial Sequence
  MKO10122270_B_Tmem86a
  gRNA
agacaagtcccacgaagatg

SEQ ID NO: 122271 - DNA, 20 bp, Artificial Sequence
  MKO10122271_B_Tmem86a
  gRNA
cgcgcactcaccacagtgac

SEQ ID NO: 122272 - DNA, 20 bp, Artificial Sequence
  MKO10122272_B_Tmem86a
  gRNA
cgccgccgccatggtgtctc

SEQ ID NO: 122273 - DNA, 20 bp, Artificial Sequence
  MKO10122273_B_Tmem86b
  gRNA
gtcttgcccgtgatggccta

SEQ ID NO: 122274 - DNA, 20 bp, Artificial Sequence
  MKO10122274_B_Tmem86b
  gRNA
ggtctgaaaagagtgtctcc

SEQ ID NO: 122275 - DNA, 20 bp, Artificial Sequence
  MKO10122275_B_Tmem86b
  gRNA
cagcatggatgctagaaaag

SEQ ID NO: 122276 - DNA, 20 bp, Artificial Sequence
  MKO10122276_B_Tmem87a
  gRNA
accagtctttaaatataacc

SEQ ID NO: 122277 - DNA, 20 bp, Artificial Sequence
  MKO10122277_B_Tmem87a
  gRNA
agatgaaatagagtcatact

SEQ ID NO: 122278 - DNA, 20 bp, Artificial Sequence
  MKO10122278_B_Tmem87a
  gRNA
atatttaaagactggtcaca

SEQ ID NO: 122279 - DNA, 20 bp, Artificial Sequence
  MKO10122279_B_Tmem87b
  gRNA
tcacttacctcctccagatc

SEQ ID NO: 122280 - DNA, 20 bp, Artificial Sequence
  MKO10122280_B_Tmem87b
  gRNA
cagatactcacattcaatga

SEQ ID NO: 122281 - DNA, 20 bp, Artificial Sequence
  MKO10122281_B_Tmem87b
  gRNA
ttccagaataaagaactaac

SEQ ID NO: 122282 - DNA, 20 bp, Artificial Sequence
  MKO10122282_B_Tmem88b
  gRNA
tgctcacccttgagtgacac

SEQ ID NO: 122283 - DNA, 20 bp, Artificial Sequence
  MKO10122283_B_Tmem88b
  gRNA
tccgaacacaatgagcgccg

SEQ ID NO: 122284 - DNA, 20 bp, Artificial Sequence
  MKO10122284_B_Tmem88b
  gRNA
agcagcggagatctggccga

SEQ ID NO: 122285 - DNA, 20 bp, Artificial Sequence
  MKO10122285_B_Tmem88
  gRNA
cccgcagatgcgaggtgcaa

SEQ ID NO: 122286 - DNA, 20 bp, Artificial Sequence
  MKO10122286_B_Tmem88
  gRNA
ctcgggatcccctagattgc

SEQ ID NO: 122287 - DNA, 20 bp, Artificial Sequence
  MKO10122287_B_Tmem88
  gRNA
ctctgggccgccagcgagaa

SEQ ID NO: 122288 - DNA, 20 bp, Artificial Sequence
  MKO10122288_B_Tmem89
  gRNA
ggatggcgtccagcatgtga

SEQ ID NO: 122289 - DNA, 20 bp, Artificial Sequence
  MKO10122289_B_Tmem89
  gRNA
agctaaggttgctaagggtc

SEQ ID NO: 122290 - DNA, 20 bp, Artificial Sequence
  MKO10122290_B_Tmem89
  gRNA
agccaaacagcccagatatc

SEQ ID NO: 122291 - DNA, 20 bp, Artificial Sequence
  MKO10122291_B_Tmem8b
  gRNA
tgtgcggtgccgcaatgcaa

SEQ ID NO: 122292 - DNA, 20 bp, Artificial Sequence
  MKO10122292_B_Tmem8b
  gRNA
aggaaccaggtccccgtctg

SEQ ID NO: 122293 - DNA, 20 bp, Artificial Sequence
  MKO10122293_B_Tmem8b
  gRNA
tcgaatcccattcccacaga

SEQ ID NO: 122294 - DNA, 20 bp, Artificial Sequence
  MKO10122294_B_Tmem8c
  gRNA
cggcctgtgctttggggccc

SEQ ID NO: 122295 - DNA, 20 bp, Artificial Sequence
  MKO10122295_B_Tmem8c
  gRNA
gtggagaaggtcagcttggc

SEQ ID NO: 122296 - DNA, 20 bp, Artificial Sequence
  MKO10122296_B_Tmem8c
  gRNA
caaagaagaatcgaagcatc

SEQ ID NO: 122297 - DNA, 20 bp, Artificial Sequence
  MKO10122297_B_Tmem8
  gRNA
accctcattaccagcatatc

SEQ ID NO: 122298 - DNA, 20 bp, Artificial Sequence
  MKO10122298_B_Tmem8
  gRNA
cttccacttccgcgtgcccc

SEQ ID NO: 122299 - DNA, 20 bp, Artificial Sequence
  MKO10122299_B_Tmem8
  gRNA
gccacgcctccttccatatc

SEQ ID NO: 122300 - DNA, 20 bp, Artificial Sequence
  MKO10122300_B_Tmem91
  gRNA
catggacaactccagcatac

SEQ ID NO: 122301 - DNA, 20 bp, Artificial Sequence
  MKO10122301_B_Tmem91
  gRNA
gggcatcgctgccttctgtc

SEQ ID NO: 122302 - DNA, 20 bp, Artificial Sequence
  MKO10122302_B_Tmem91
  gRNA
gatgctcctacctcaaagtc

SEQ ID NO: 122303 - DNA, 20 bp, Artificial Sequence
  MKO10122303_B_Tmem92
  gRNA
ccctaggttcttggtcatcc

SEQ ID NO: 122304 - DNA, 20 bp, Artificial Sequence
  MKO10122304_B_Tmem92
  gRNA
ttgacaggatgctggacacc

SEQ ID NO: 122305 - DNA, 20 bp, Artificial Sequence
  MKO10122305_B_Tmem92
  gRNA
cctcattgaagcttactcct

SEQ ID NO: 122306 - DNA, 20 bp, Artificial Sequence
  MKO10122306_B_Tmem95
  gRNA
agacctcacctatgactctc

SEQ ID NO: 122307 - DNA, 20 bp, Artificial Sequence
  MKO10122307_B_Tmem95
  gRNA
cctccttgattccattatac

SEQ ID NO: 122308 - DNA, 20 bp, Artificial Sequence
  MKO10122308_B_Tmem95
  gRNA
caccgagtcctgagagtcat

SEQ ID NO: 122309 - DNA, 20 bp, Artificial Sequence
  MKO10122309_B_Tmem97
  gRNA
gccgcccgaactatacccgc

SEQ ID NO: 122310 - DNA, 20 bp, Artificial Sequence
  MKO10122310_B_Tmem97
  gRNA
cgtgaacgactgaccctcgt

SEQ ID NO: 122311 - DNA, 20 bp, Artificial Sequence
  MKO10122311_B_Tmem97
  gRNA
cagtcgttcacggaaactct

SEQ ID NO: 122312 - DNA, 20 bp, Artificial Sequence
  MKO10122312_B_Tmem98
  gRNA
ccttcaagatggcgatgcag

SEQ ID NO: 122313 - DNA, 20 bp, Artificial Sequence
  MKO10122313_B_Tmem98
  gRNA
aggcccatcgtggacctcat

SEQ ID NO: 122314 - DNA, 20 bp, Artificial Sequence
  MKO10122314_B_Tmem98
  gRNA
ctccctctcaccgtgcatcc

SEQ ID NO: 122315 - DNA, 20 bp, Artificial Sequence
  MKO10122315_B_Tmem9b
  gRNA
tggagtacgctcagcagcgc

SEQ ID NO: 122316 - DNA, 20 bp, Artificial Sequence
  MKO10122316_B_Tmem9b
  gRNA
ttgcagagcgatgatgacgt

SEQ ID NO: 122317 - DNA, 20 bp, Artificial Sequence
  MKO10122317_B_Tmem9b
  gRNA
ctccaccttgtttagaacat

SEQ ID NO: 122318 - DNA, 20 bp, Artificial Sequence
  MKO10122318_B_Tmem9
  gRNA
acagccgctgcgtccattgg

SEQ ID NO: 122319 - DNA, 20 bp, Artificial Sequence
  MKO10122319_B_Tmem9
  gRNA
taggcttccacatcgtggcc

SEQ ID NO: 122320 - DNA, 20 bp, Artificial Sequence
  MKO10122320_B_Tmem9
  gRNA
attgtgcagctgctcagtat

SEQ ID NO: 122321 - DNA, 20 bp, Artificial Sequence
  MKO10122321_B_Tmf1
  gRNA
ttgactactatttaatctag

SEQ ID NO: 122322 - DNA, 20 bp, Artificial Sequence
  MKO10122322_B_Tmf1
  gRNA
gaaagttcaactagcctgca

SEQ ID NO: 122323 - DNA, 20 bp, Artificial Sequence
  MKO10122323_B_Tmf1
  gRNA
agcagcatctctctccttgc

SEQ ID NO: 122324 - DNA, 20 bp, Artificial Sequence
  MKO10122324_B_Tmie
  gRNA
agcatggctcggggcggctc

SEQ ID NO: 122325 - DNA, 20 bp, Artificial Sequence
  MKO10122325_B_Tmie
  gRNA
agatgcccaccacgtgccac

SEQ ID NO: 122326 - DNA, 20 bp, Artificial Sequence
  MKO10122326_B_Tmie
  gRNA
tgttctgggacatgcgcctg

SEQ ID NO: 122327 - DNA, 20 bp, Artificial Sequence
  MKO10122327_B_Tmigd1
  gRNA
caatggcttccaaaccgtgg

SEQ ID NO: 122328 - DNA, 20 bp, Artificial Sequence
  MKO10122328_B_Tmigd1
  gRNA
catcattgctgcttgtgtcg

SEQ ID NO: 122329 - DNA, 20 bp, Artificial Sequence
  MKO10122329_B_Tmigd1
  gRNA
cacgacacaagcagcaatga

SEQ ID NO: 122330 - DNA, 20 bp, Artificial Sequence
  MKO10122330_B_Tmlhe
  gRNA
agttgttgcaccaacaaagc

SEQ ID NO: 122331 - DNA, 20 bp, Artificial Sequence
  MKO10122331_B_Tmlhe
  gRNA
tatctagtcacatgaccatc

SEQ ID NO: 122332 - DNA, 20 bp, Artificial Sequence
  MKO10122332_B_Tmlhe
  gRNA
atgccggtctagagctagct

SEQ ID NO: 122333 - DNA, 20 bp, Artificial Sequence
  MKO10122333_B_Tmod1
  gRNA
ccaaggcttggtagtactgc

SEQ ID NO: 122334 - DNA, 20 bp, Artificial Sequence
  MKO10122334_B_Tmod1
  gRNA
ccacttggaaaagcaagcga

SEQ ID NO: 122335 - DNA, 20 bp, Artificial Sequence
  MKO10122335_B_Tmod1
  gRNA
accaaattcaacagacgtag

SEQ ID NO: 122336 - DNA, 20 bp, Artificial Sequence
  MKO10122336_B_Tmod2
  gRNA
gccaccgaaccccacaaatg

SEQ ID NO: 122337 - DNA, 20 bp, Artificial Sequence
  MKO10122337_B_Tmod2
  gRNA
cagagtgcaacgctacctgc

SEQ ID NO: 122338 - DNA, 20 bp, Artificial Sequence
  MKO10122338_B_Tmod2
  gRNA
tttgatgaagagacgaccaa

SEQ ID NO: 122339 - DNA, 20 bp, Artificial Sequence
  MKO10122339_B_Tmod3
  gRNA
gacgattatgtgccctacac

SEQ ID NO: 122340 - DNA, 20 bp, Artificial Sequence
  MKO10122340_B_Tmod3
  gRNA
aaggagccgttctctatcaa

SEQ ID NO: 122341 - DNA, 20 bp, Artificial Sequence
  MKO10122341_B_Tmod3
  gRNA
tcttctgtaagagtctgcgc

SEQ ID NO: 122342 - DNA, 20 bp, Artificial Sequence
  MKO10122342_B_Tmod4
  gRNA
agtcaaagagcgtgatgact

SEQ ID NO: 122343 - DNA, 20 bp, Artificial Sequence
  MKO10122343_B_Tmod4
  gRNA
tttggaggttcatctggtac

SEQ ID NO: 122344 - DNA, 20 bp, Artificial Sequence
  MKO10122344_B_Tmod4
  gRNA
gattacgctggagcctgagc

SEQ ID NO: 122345 - DNA, 20 bp, Artificial Sequence
  MKO10122345_B_Tmpo
  gRNA
atacacctggatccgaacat

SEQ ID NO: 122346 - DNA, 20 bp, Artificial Sequence
  MKO10122346_B_Tmpo
  gRNA
gtaagatatggagtgaatcc

SEQ ID NO: 122347 - DNA, 20 bp, Artificial Sequence
  MKO10122347_B_Tmpo
  gRNA
cccttacccacaatgggacc

SEQ ID NO: 122348 - DNA, 20 bp, Artificial Sequence
  MKO10122348_B_Tmppe
  gRNA
ggtactgagcaccgccgtca

SEQ ID NO: 122349 - DNA, 20 bp, Artificial Sequence
  MKO10122349_B_Tmppe
  gRNA
cagaggcttccgagtcggag

SEQ ID NO: 122350 - DNA, 20 bp, Artificial Sequence
  MKO10122350_B_Tmppe
  gRNA
aaggagccactgccgtccgc

SEQ ID NO: 122351 - DNA, 20 bp, Artificial Sequence
  MKO10122351_B_Tmprss11a
  gRNA
tgttccagcctcccgctaca

SEQ ID NO: 122352 - DNA, 20 bp, Artificial Sequence
  MKO10122352_B_Tmprss11a
  gRNA
attcaagtcaatagcaactc

SEQ ID NO: 122353 - DNA, 20 bp, Artificial Sequence
  MKO10122353_B_Tmprss11a
  gRNA
aaagagctcaaatcaactga

SEQ ID NO: 122354 - DNA, 20 bp, Artificial Sequence
  MKO10122354_B_Tmprss11bnl
  gRNA
cccgcaaatctatcccacca

SEQ ID NO: 122355 - DNA, 20 bp, Artificial Sequence
  MKO10122355_B_Tmprss11bnl
  gRNA
gcagcccttgggataattat

SEQ ID NO: 122356 - DNA, 20 bp, Artificial Sequence
  MKO10122356_B_Tmprss11bnl
  gRNA
caaacaatatatcaactctc

SEQ ID NO: 122357 - DNA, 20 bp, Artificial Sequence
  MKO10122357_B_Tmprss11c
  gRNA
aagctcacactgtgcaagta

SEQ ID NO: 122358 - DNA, 20 bp, Artificial Sequence
  MKO10122358_B_Tmprss11c
  gRNA
tgttaaccttaaagctgaca

SEQ ID NO: 122359 - DNA, 20 bp, Artificial Sequence
  MKO10122359_B_Tmprss11c
  gRNA
ctactaccatgtcagcttta

SEQ ID NO: 122360 - DNA, 20 bp, Artificial Sequence
  MKO10122360_B_Tmprss11d
  gRNA
aataagtagacctgccatca

SEQ ID NO: 122361 - DNA, 20 bp, Artificial Sequence
  MKO10122361_B_Tmprss11d
  gRNA
ttacatgttatctcattcga

SEQ ID NO: 122362 - DNA, 20 bp, Artificial Sequence
  MKO10122362_B_Tmprss11d
  gRNA
gacaacgaaagctactgcaa

SEQ ID NO: 122363 - DNA, 20 bp, Artificial Sequence
  MKO10122363_B_Tmprss11e
  gRNA
tgaaaagctgaagtatgcta

SEQ ID NO: 122364 - DNA, 20 bp, Artificial Sequence
  MKO10122364_B_Tmprss11e
  gRNA
ctccacacacgttctcttcc

SEQ ID NO: 122365 - DNA, 20 bp, Artificial Sequence
  MKO10122365_B_Tmprss11e
  gRNA
catttcataaatctccacta

SEQ ID NO: 122366 - DNA, 20 bp, Artificial Sequence
  MKO10122366_B_Tmprss11f
  gRNA
agtcccatgttatcaagata

SEQ ID NO: 122367 - DNA, 20 bp, Artificial Sequence
  MKO10122367_B_Tmprss11f
  gRNA
aagtcatcagatcgagagaa

SEQ ID NO: 122368 - DNA, 20 bp, Artificial Sequence
  MKO10122368_B_Tmprss11f
  gRNA
tgctccagtccagatgaaca

SEQ ID NO: 122369 - DNA, 20 bp, Artificial Sequence
  MKO10122369_B_Tmprss11g
  gRNA
ccaaagagcagtcgaaattt

SEQ ID NO: 122370 - DNA, 20 bp, Artificial Sequence
  MKO10122370_B_Tmprss11g
  gRNA
gacataatgatgctttaaac

SEQ ID NO: 122371 - DNA, 20 bp, Artificial Sequence
  MKO10122371_B_Tmprss11g
  gRNA
tttcttctaaccagtattcc

SEQ ID NO: 122372 - DNA, 20 bp, Artificial Sequence
  MKO10122372_B_Tmprss12
  gRNA
cccacagccatgtccgtaac

SEQ ID NO: 122373 - DNA, 20 bp, Artificial Sequence
  MKO10122373_B_Tmprss12
  gRNA
atgggacctttgactcatgc

SEQ ID NO: 122374 - DNA, 20 bp, Artificial Sequence
  MKO10122374_B_Tmprss12
  gRNA
tgattcgtatattcctgctg

SEQ ID NO: 122375 - DNA, 20 bp, Artificial Sequence
  MKO10122375_B_Tmprss13
  gRNA
ctccatcacagcgaactgcg

SEQ ID NO: 122376 - DNA, 20 bp, Artificial Sequence
  MKO10122376_B_Tmprss13
  gRNA
atccacgcagttcgctgtga

SEQ ID NO: 122377 - DNA, 20 bp, Artificial Sequence
  MKO10122377_B_Tmprss13
  gRNA
cgggcagatcatcatctgcc

SEQ ID NO: 122378 - DNA, 20 bp, Artificial Sequence
  MKO10122378_B_Tmprss15
  gRNA
ttgaacagcattgatatcac

SEQ ID NO: 122379 - DNA, 20 bp, Artificial Sequence
  MKO10122379_B_Tmprss15
  gRNA
agtctcctaccatttgctga

SEQ ID NO: 122380 - DNA, 20 bp, Artificial Sequence
  MKO10122380_B_Tmprss15
  gRNA
acacccactgagcaaaaaag

SEQ ID NO: 122381 - DNA, 20 bp, Artificial Sequence
  MKO10122381_B_Tmprss2
  gRNA
tgtgctcagactgatacccg

SEQ ID NO: 122382 - DNA, 20 bp, Artificial Sequence
  MKO10122382_B_Tmprss2
  gRNA
caactgttctacgtctgaga

SEQ ID NO: 122383 - DNA, 20 bp, Artificial Sequence
  MKO10122383_B_Tmprss2
  gRNA
acggttctcatcttctccgt

SEQ ID NO: 122384 - DNA, 20 bp, Artificial Sequence
  MKO10122384_B_Tmprss3
  gRNA
gtactcactgcccagaccga

SEQ ID NO: 122385 - DNA, 20 bp, Artificial Sequence
  MKO10122385_B_Tmprss3
  gRNA
ggaccatgtgctccgatgac

SEQ ID NO: 122386 - DNA, 20 bp, Artificial Sequence
  MKO10122386_B_Tmprss3
  gRNA
catgggggagaatgaccctc

SEQ ID NO: 122387 - DNA, 20 bp, Artificial Sequence
  MKO10122387_B_Tmprss4
  gRNA
gaagttgtcgaaacagactg

SEQ ID NO: 122388 - DNA, 20 bp, Artificial Sequence
  MKO10122388_B_Tmprss4
  gRNA
tgaacttaccacggttgttg

SEQ ID NO: 122389 - DNA, 20 bp, Artificial Sequence
  MKO10122389_B_Tmprss4
  gRNA
cttccctgaaaagcccggag

SEQ ID NO: 122390 - DNA, 20 bp, Artificial Sequence
  MKO10122390_B_Tmprss5
  gRNA
ctggctcctggtctgccacg

SEQ ID NO: 122391 - DNA, 20 bp, Artificial Sequence
  MKO10122391_B_Tmprss5
  gRNA
tgctcaactctctgctagac

SEQ ID NO: 122392 - DNA, 20 bp, Artificial Sequence
  MKO10122392_B_Tmprss5
  gRNA
cttgatgtcagacagattca

SEQ ID NO: 122393 - DNA, 20 bp, Artificial Sequence
  MKO10122393_B_Tmprss6
  gRNA
accgtaagccaggtgtactc

SEQ ID NO: 122394 - DNA, 20 bp, Artificial Sequence
  MKO10122394_B_Tmprss6
  gRNA
tacgactatgtcgttcacac

SEQ ID NO: 122395 - DNA, 20 bp, Artificial Sequence
  MKO10122395_B_Tmprss6
  gRNA
tagagttgtagtaagtaccc

SEQ ID NO: 122396 - DNA, 20 bp, Artificial Sequence
  MKO10122396_B_Tmprss7
  gRNA
gcaagctccccacagaagtg

SEQ ID NO: 122397 - DNA, 20 bp, Artificial Sequence
  MKO10122397_B_Tmprss7
  gRNA
gtctagggaatttctctcca

SEQ ID NO: 122398 - DNA, 20 bp, Artificial Sequence
  MKO10122398_B_Tmprss7
  gRNA
cacagactgcttataaaatt

SEQ ID NO: 122399 - DNA, 20 bp, Artificial Sequence
  MKO10122399_B_Tmprss9
  gRNA
tctgcagagcatgcgtgagt

SEQ ID NO: 122400 - DNA, 20 bp, Artificial Sequence
  MKO10122400_B_Tmprss9
  gRNA
gctctgctatgtgctccacg

SEQ ID NO: 122401 - DNA, 20 bp, Artificial Sequence
  MKO10122401_B_Tmprss9
  gRNA
agctcacctgtaactaagca

SEQ ID NO: 122402 - DNA, 20 bp, Artificial Sequence
  MKO10122402_B_Tmsb10
  gRNA
ggaaatcgccagcttcgata

SEQ ID NO: 122403 - DNA, 20 bp, Artificial Sequence
  MKO10122403_B_Tmsb10
  gRNA
ggtgttcttctcctgcgtct

SEQ ID NO: 122404 - DNA, 20 bp, Artificial Sequence
  MKO10122404_B_Tmsb10
  gRNA
gctgaagaaaaccgagacgc

SEQ ID NO: 122405 - DNA, 20 bp, Artificial Sequence
  MKO10122405_B_Tmsb15a
  gRNA
cctagccatcgagcaagaga

SEQ ID NO: 122406 - DNA, 20 bp, Artificial Sequence
  MKO10122406_B_Tmsb15a
  gRNA
ctctccacttccgacaagtc

SEQ ID NO: 122407 - DNA, 20 bp, Artificial Sequence
  MKO10122407_B_Tmsb15a
  gRNA
ccactacttactttccttcg

SEQ ID NO: 122408 - DNA, 20 bp, Artificial Sequence
  MKO10122408_B_Tmsb15b1
  gRNA
gtttcaacttctgacaagtc

SEQ ID NO: 122409 - DNA, 20 bp, Artificial Sequence
  MKO10122409_B_Tmsb15b2
  gRNA
cattgtgttctttctcttgc

SEQ ID NO: 122410 - DNA, 20 bp, Artificial Sequence
  MKO10122410_B_Tmsb15b2
  gRNA
gtttcaacttctgacaagtc

SEQ ID NO: 122411 - DNA, 20 bp, Artificial Sequence
  MKO10122411_B_Tmsb15l
  gRNA
cattgtgttctttctcttgc

SEQ ID NO: 122412 - DNA, 20 bp, Artificial Sequence
  MKO10122412_B_Tmsb15l
  gRNA
gtttcaacttctgacaagtc

SEQ ID NO: 122413 - DNA, 20 bp, Artificial Sequence
  MKO10122413_B_Tmsb4x
  gRNA
attgaacaagagaagcaagc

SEQ ID NO: 122414 - DNA, 20 bp, Artificial Sequence
  MKO10122414_B_Tmtc1
  gRNA
tttctaggtggctggcatcg

SEQ ID NO: 122415 - DNA, 20 bp, Artificial Sequence
  MKO10122415_B_Tmtc1
  gRNA
aagaagggggaagccgttgt

SEQ ID NO: 122416 - DNA, 20 bp, Artificial Sequence
  MKO10122416_B_Tmtc1
  gRNA
aaccaagcacactccaaaca

SEQ ID NO: 122417 - DNA, 20 bp, Artificial Sequence
  MKO10122417_B_Tmtc2
  gRNA
gagaactcagctcccgtcca

SEQ ID NO: 122418 - DNA, 20 bp, Artificial Sequence
  MKO10122418_B_Tmtc2
  gRNA
cattgggagcaggcctaccc

SEQ ID NO: 122419 - DNA, 20 bp, Artificial Sequence
  MKO10122419_B_Tmtc2
  gRNA
tctgttctaccgcagcaaca

SEQ ID NO: 122420 - DNA, 20 bp, Artificial Sequence
  MKO10122420_B_Tmtc3
  gRNA
tatgtacctatggaattatc

SEQ ID NO: 122421 - DNA, 20 bp, Artificial Sequence
  MKO10122421_B_Tmtc3
  gRNA
taattatttacctcagacat

SEQ ID NO: 122422 - DNA, 20 bp, Artificial Sequence
  MKO10122422_B_Tmtc3
  gRNA
ttccaggtcacaggtgttgt

SEQ ID NO: 122423 - DNA, 20 bp, Artificial Sequence
  MKO10122423_B_Tmtc4
  gRNA
ctccagtcagacacgcccct

SEQ ID NO: 122424 - DNA, 20 bp, Artificial Sequence
  MKO10122424_B_Tmtc4
  gRNA
gatactcagcaatacccaga

SEQ ID NO: 122425 - DNA, 20 bp, Artificial Sequence
  MKO10122425_B_Tmtc4
  gRNA
ttacttaccagcaggtaaca

SEQ ID NO: 122426 - DNA, 20 bp, Artificial Sequence
  MKO10122426_B_Tmub1
  gRNA
atcgcctacgccttcaatca

SEQ ID NO: 122427 - DNA, 20 bp, Artificial Sequence
  MKO10122427_B_Tmub1
  gRNA
ggggaaagaagggccggtac

SEQ ID NO: 122428 - DNA, 20 bp, Artificial Sequence
  MKO10122428_B_Tmub1
  gRNA
atgtgggggaccgactctcg

SEQ ID NO: 122429 - DNA, 20 bp, Artificial Sequence
  MKO10122429_B_Tmub2
  gRNA
gcagtggatcacgcagttgt

SEQ ID NO: 122430 - DNA, 20 bp, Artificial Sequence
  MKO10122430_B_Tmub2
  gRNA
ttcttcaaaacaaccttatg

SEQ ID NO: 122431 - DNA, 20 bp, Artificial Sequence
  MKO10122431_B_Tmub2
  gRNA
gtggaccagctggtaaacca

SEQ ID NO: 122432 - DNA, 20 bp, Artificial Sequence
  MKO10122432_B_Tmx1
  gRNA
cgagtggggagaagatcttg

SEQ ID NO: 122433 - DNA, 20 bp, Artificial Sequence
  MKO10122433_B_Tmx1
  gRNA
atattgaacctatatcatca

SEQ ID NO: 122434 - DNA, 20 bp, Artificial Sequence
  MKO10122434_B_Tmx1
  gRNA
aatacttactgataaataga

SEQ ID NO: 122435 - DNA, 20 bp, Artificial Sequence
  MKO10122435_B_Tmx2
  gRNA
atcctttgctcccatctatg

SEQ ID NO: 122436 - DNA, 20 bp, Artificial Sequence
  MKO10122436_B_Tmx2
  gRNA
gcggttcttcatcatcacaa

SEQ ID NO: 122437 - DNA, 20 bp, Artificial Sequence
  MKO10122437_B_Tmx2
  gRNA
ctgcaagcccccgctgtaca

SEQ ID NO: 122438 - DNA, 20 bp, Artificial Sequence
  MKO10122438_B_Tmx3
  gRNA
ttgacttacagcttaattgt

SEQ ID NO: 122439 - DNA, 20 bp, Artificial Sequence
  MKO10122439_B_Tmx3
  gRNA
caaggcattgcttcagagtt

SEQ ID NO: 122440 - DNA, 20 bp, Artificial Sequence
  MKO10122440_B_Tmx3
  gRNA
gtaaaaagttggaaccaatt

SEQ ID NO: 122441 - DNA, 20 bp, Artificial Sequence
  MKO10122441_B_Tmx4
  gRNA
ttagcatctctggcaagatt

SEQ ID NO: 122442 - DNA, 20 bp, Artificial Sequence
  MKO10122442_B_Tmx4
  gRNA
gtggatgtcattcaagagcc

SEQ ID NO: 122443 - DNA, 20 bp, Artificial Sequence
  MKO10122443_B_Tmx4
  gRNA
aaaacttactgaaaaaatgc

SEQ ID NO: 122444 - DNA, 20 bp, Artificial Sequence
  MKO10122444_B_Tnc
  gRNA
gagatgcagttccgtgtgcc

SEQ ID NO: 122445 - DNA, 20 bp, Artificial Sequence
  MKO10122445_B_Tnc
  gRNA
cattcgtgtgttcgccatct

SEQ ID NO: 122446 - DNA, 20 bp, Artificial Sequence
  MKO10122446_B_Tnc
  gRNA
tagacattgctttcgaaaca

SEQ ID NO: 122447 - DNA, 20 bp, Artificial Sequence
  MKO10122447_B_Tnfaip1
  gRNA
ttgtacagcagcttcaccac

SEQ ID NO: 122448 - DNA, 20 bp, Artificial Sequence
  MKO10122448_B_Tnfaip1
  gRNA
acagttcaatgttctttagc

SEQ ID NO: 122449 - DNA, 20 bp, Artificial Sequence
  MKO10122449_B_Tnfaip1
  gRNA
atgatggggatgttgcacac

SEQ ID NO: 122450 - DNA, 20 bp, Artificial Sequence
  MKO10122450_B_Tnfaip2
  gRNA
ggccatgttcttgtccaatg

SEQ ID NO: 122451 - DNA, 20 bp, Artificial Sequence
  MKO10122451_B_Tnfaip2
  gRNA
tattctcaacagcccgaagt

SEQ ID NO: 122452 - DNA, 20 bp, Artificial Sequence
  MKO10122452_B_Tnfaip2
  gRNA
tccctgcagatcatttcaca

SEQ ID NO: 122453 - DNA, 20 bp, Artificial Sequence
  MKO10122453_B_Tnfaip3
  gRNA
ctcggaactttaaattccgc

SEQ ID NO: 122454 - DNA, 20 bp, Artificial Sequence
  MKO10122454_B_Tnfaip3
  gRNA
caggactttgctacgacact

SEQ ID NO: 122455 - DNA, 20 bp, Artificial Sequence
  MKO10122455_B_Tnfaip3
  gRNA
cttactttgcagcgttgatc

SEQ ID NO: 122456 - DNA, 20 bp, Artificial Sequence
  MKO10122456_B_Tnfaip6
  gRNA
tggcacattcggctcaagta

SEQ ID NO: 122457 - DNA, 20 bp, Artificial Sequence
  MKO10122457_B_Tnfaip6
  gRNA
cgcaacctacaagcagctag

SEQ ID NO: 122458 - DNA, 20 bp, Artificial Sequence
  MKO10122458_B_Tnfaip6
  gRNA
gacagttatgatgacgtcca

SEQ ID NO: 122459 - DNA, 20 bp, Artificial Sequence
  MKO10122459_B_Tnfaip8l1
  gRNA
gttcacgcgcagccggaagg

SEQ ID NO: 122460 - DNA, 20 bp, Artificial Sequence
  MKO10122460_B_Tnfaip8l1
  gRNA
tgaactgtaccaggccacga

SEQ ID NO: 122461 - DNA, 20 bp, Artificial Sequence
  MKO10122461_B_Tnfaip8l1
  gRNA
ctctgctgggctgtacagcg

SEQ ID NO: 122462 - DNA, 20 bp, Artificial Sequence
  MKO10122462_B_Tnfaip8l2
  gRNA
cacgatttcgtcagaagcta

SEQ ID NO: 122463 - DNA, 20 bp, Artificial Sequence
  MKO10122463_B_Tnfaip8l2
  gRNA
ccaaagaatacacgcacagc

SEQ ID NO: 122464 - DNA, 20 bp, Artificial Sequence
  MKO10122464_B_Tnfaip8l2
  gRNA
gatcaaacacgtgcctgatg

SEQ ID NO: 122465 - DNA, 20 bp, Artificial Sequence
  MKO10122465_B_Tnfaip8l3
  gRNA
cacagtatggattcagattc

SEQ ID NO: 122466 - DNA, 20 bp, Artificial Sequence
  MKO10122466_B_Tnfaip8l3
  gRNA
tccatgcggaccatagagag

SEQ ID NO: 122467 - DNA, 20 bp, Artificial Sequence
  MKO10122467_B_Tnfaip8l3
  gRNA
gaaccagactgcgatgacca

SEQ ID NO: 122468 - DNA, 20 bp, Artificial Sequence
  MKO10122468_B_Tnfaip8
  gRNA
cctcacgtccatgtccgtgg

SEQ ID NO: 122469 - DNA, 20 bp, Artificial Sequence
  MKO10122469_B_Tnfaip8
  gRNA
ggcagtcaaaccgaatgctc

SEQ ID NO: 122470 - DNA, 20 bp, Artificial Sequence
  MKO10122470_B_Tnfaip8
  gRNA
acagatcgtcattgaccttc

SEQ ID NO: 122471 - DNA, 20 bp, Artificial Sequence
  MKO10122471_B_Tnfrsf10b
  gRNA
agtgtgtctccaaaacggct

SEQ ID NO: 122472 - DNA, 20 bp, Artificial Sequence
  MKO10122472_B_Tnfrsf10b
  gRNA
ccaagatgcccaagccgttt

SEQ ID NO: 122473 - DNA, 20 bp, Artificial Sequence
  MKO10122473_B_Tnfrsf10b
  gRNA
agttcccttctgacaggtac

SEQ ID NO: 122474 - DNA, 20 bp, Artificial Sequence
  MKO10122474_B_Tnfrsf11a
  gRNA
cagactgcgagtgctgccgc

SEQ ID NO: 122475 - DNA, 20 bp, Artificial Sequence
  MKO10122475_B_Tnfrsf11a
  gRNA
tgttgcagcagatgcgaacc

SEQ ID NO: 122476 - DNA, 20 bp, Artificial Sequence
  MKO10122476_B_Tnfrsf11a
  gRNA
gttgacagtgcagctcaaca

SEQ ID NO: 122477 - DNA, 20 bp, Artificial Sequence
  MKO10122477_B_Tnfrsf11b
  gRNA
ctaccaagattataccaaat

SEQ ID NO: 122478 - DNA, 20 bp, Artificial Sequence
  MKO10122478_B_Tnfrsf11b
  gRNA
ttgcaaactgtgtttcgctc

SEQ ID NO: 122479 - DNA, 20 bp, Artificial Sequence
  MKO10122479_B_Tnfrsf11b
  gRNA
tccataaactgagtagcttc

SEQ ID NO: 122480 - DNA, 20 bp, Artificial Sequence
  MKO10122480_B_Tnfrsf12a
  gRNA
actaagagcgccccccagaa

SEQ ID NO: 122481 - DNA, 20 bp, Artificial Sequence
  MKO10122481_B_Tnfrsf12a
  gRNA
cgcggacctcgacaagtgca

SEQ ID NO: 122482 - DNA, 20 bp, Artificial Sequence
  MKO10122482_B_Tnfrsf12a
  gRNA
tagaaaccagcgccaaaacc

SEQ ID NO: 122483 - DNA, 20 bp, Artificial Sequence
  MKO10122483_B_Tnfrsf13b
  gRNA
caggtactacgaccatctcc

SEQ ID NO: 122484 - DNA, 20 bp, Artificial Sequence
  MKO10122484_B_Tnfrsf13b
  gRNA
atcaattgccgaaaagagca

SEQ ID NO: 122485 - DNA, 20 bp, Artificial Sequence
  MKO10122485_B_Tnfrsf13b
  gRNA
tctgccccaaagatcagtac

SEQ ID NO: 122486 - DNA, 20 bp, Artificial Sequence
  MKO10122486_B_Tnfrsf13c
  gRNA
gactccgggtccgaagccag

SEQ ID NO: 122487 - DNA, 20 bp, Artificial Sequence
  MKO10122487_B_Tnfrsf13c
  gRNA
cctgccacgccacagcgtcc

SEQ ID NO: 122488 - DNA, 20 bp, Artificial Sequence
  MKO10122488_B_Tnfrsf13c
  gRNA
cccagttctgtggcgggcac

SEQ ID NO: 122489 - DNA, 20 bp, Artificial Sequence
  MKO10122489_B_Tnfrsf14
  gRNA
tcacctacttggtccagggc

SEQ ID NO: 122490 - DNA, 20 bp, Artificial Sequence
  MKO10122490_B_Tnfrsf14
  gRNA
actcccacctgggttgcaca

SEQ ID NO: 122491 - DNA, 20 bp, Artificial Sequence
  MKO10122491_B_Tnfrsf14
  gRNA
acttgctcaggccatttgca

SEQ ID NO: 122492 - DNA, 20 bp, Artificial Sequence
  MKO10122492_B_Tnfrsf17
  gRNA
gctttgaggctcgtccttca

SEQ ID NO: 122493 - DNA, 20 bp, Artificial Sequence
  MKO10122493_B_Tnfrsf17
  gRNA
cacttacttggatcacagta

SEQ ID NO: 122494 - DNA, 20 bp, Artificial Sequence
  MKO10122494_B_Tnfrsf17
  gRNA
gactgtcaaaatattcactg

SEQ ID NO: 122495 - DNA, 20 bp, Artificial Sequence
  MKO10122495_B_Tnfrsf18
  gRNA
catcgagactccatacagca

SEQ ID NO: 122496 - DNA, 20 bp, Artificial Sequence
  MKO10122496_B_Tnfrsf18
  gRNA
taccttgagactccaccctc

SEQ ID NO: 122497 - DNA, 20 bp, Artificial Sequence
  MKO10122497_B_Tnfrsf18
  gRNA
aggtcagccgagtgtagttg

SEQ ID NO: 122498 - DNA, 20 bp, Artificial Sequence
  MKO10122498_B_Tnfrsf19
  gRNA
tcactcacagtgtggttcgt

SEQ ID NO: 122499 - DNA, 20 bp, Artificial Sequence
  MKO10122499_B_Tnfrsf19
  gRNA
gcagccagcgccgtgtcccg

SEQ ID NO: 122500 - DNA, 20 bp, Artificial Sequence
  MKO10122500_B_Tnfrsf19
  gRNA
gtaactctcaggtaccagca

SEQ ID NO: 122501 - DNA, 20 bp, Artificial Sequence
  MKO10122501_B_Tnfrsf1a
  gRNA
tgctgcaccaagtgccacaa

SEQ ID NO: 122502 - DNA, 20 bp, Artificial Sequence
  MKO10122502_B_Tnfrsf1a
  gRNA
aggggctgcagtccacgcac

SEQ ID NO: 122503 - DNA, 20 bp, Artificial Sequence
  MKO10122503_B_Tnfrsf1a
  gRNA
cggacagtcactcaccaagt

SEQ ID NO: 122504 - DNA, 20 bp, Artificial Sequence
  MKO10122504_B_Tnfrsf1b
  gRNA
agctcaaacatgtacgaaac

SEQ ID NO: 122505 - DNA, 20 bp, Artificial Sequence
  MKO10122505_B_Tnfrsf1b
  gRNA
tctcttcaaggagccccaaa

SEQ ID NO: 122506 - DNA, 20 bp, Artificial Sequence
  MKO10122506_B_Tnfrsf1b
  gRNA
gaactggccactccgaagcc

SEQ ID NO: 122507 - DNA, 20 bp, Artificial Sequence
  MKO10122507_B_Tnfrsf21
  gRNA
ttctttgcaacgccagcgag

SEQ ID NO: 122508 - DNA, 20 bp, Artificial Sequence
  MKO10122508_B_Tnfrsf21
  gRNA
gacaatacgagctcaaccag

SEQ ID NO: 122509 - DNA, 20 bp, Artificial Sequence
  MKO10122509_B_Tnfrsf21
  gRNA
aaatggatctactaccgcaa

SEQ ID NO: 122510 - DNA, 20 bp, Artificial Sequence
  MKO10122510_B_Tnfrsf22
  gRNA
agcaaagtatacaagcatcc

SEQ ID NO: 122511 - DNA, 20 bp, Artificial Sequence
  MKO10122511_B_Tnfrsf22
  gRNA
tgttgcaagaactgttctgc

SEQ ID NO: 122512 - DNA, 20 bp, Artificial Sequence
  MKO10122512_B_Tnfrsf22
  gRNA
cacagagaaagataattacc

SEQ ID NO: 122513 - DNA, 20 bp, Artificial Sequence
  MKO10122513_B_Tnfrsf23
  gRNA
aacagtcagccaccatattc

SEQ ID NO: 122514 - DNA, 20 bp, Artificial Sequence
  MKO10122514_B_Tnfrsf23
  gRNA
agcaaagttcacaatcatgc

SEQ ID NO: 122515 - DNA, 20 bp, Artificial Sequence
  MKO10122515_B_Tnfrsf23
  gRNA
acattcacagggaaagataa

SEQ ID NO: 122516 - DNA, 20 bp, Artificial Sequence
  MKO10122516_B_Tnfrsf25
  gRNA
tctggtcaagaaggtgtccg

SEQ ID NO: 122517 - DNA, 20 bp, Artificial Sequence
  MKO10122517_B_Tnfrsf25
  gRNA
gactgctccaccgagccatg

SEQ ID NO: 122518 - DNA, 20 bp, Artificial Sequence
  MKO10122518_B_Tnfrsf25
  gRNA
taattacctgtggtgaggcc

SEQ ID NO: 122519 - DNA, 20 bp, Artificial Sequence
  MKO10122519_B_Tnfrsf26
  gRNA
accgtcccggcacacagagc

SEQ ID NO: 122520 - DNA, 20 bp, Artificial Sequence
  MKO10122520_B_Tnfrsf26
  gRNA
actataaccctgtgtaagat

SEQ ID NO: 122521 - DNA, 20 bp, Artificial Sequence
  MKO10122521_B_Tnfrsf26
  gRNA
ctcacataggcacttacctc

SEQ ID NO: 122522 - DNA, 20 bp, Artificial Sequence
  MKO10122522_B_Tnfrsf4
  gRNA
ttgtagccgctgtcctgccg

SEQ ID NO: 122523 - DNA, 20 bp, Artificial Sequence
  MKO10122523_B_Tnfrsf4
  gRNA
tgagccgctgtgatcatacc

SEQ ID NO: 122524 - DNA, 20 bp, Artificial Sequence
  MKO10122524_B_Tnfrsf4
  gRNA
ctgcagacagtatcctgagt

SEQ ID NO: 122525 - DNA, 20 bp, Artificial Sequence
  MKO10122525_B_Tnfrsf8
  gRNA
gtggctgaggtctccggcac

SEQ ID NO: 122526 - DNA, 20 bp, Artificial Sequence
  MKO10122526_B_Tnfrsf8
  gRNA
cgggcgcaggaattgactgc

SEQ ID NO: 122527 - DNA, 20 bp, Artificial Sequence
  MKO10122527_B_Tnfrsf8
  gRNA
gcctgcgtgacctgtttgcc

SEQ ID NO: 122528 - DNA, 20 bp, Artificial Sequence
  MKO10122528_B_Tnfrsf9
  gRNA
aggttgcaaaacctgtagct

SEQ ID NO: 122529 - DNA, 20 bp, Artificial Sequence
  MKO10122529_B_Tnfrsf9
  gRNA
tggccaggagctaacgaagc

SEQ ID NO: 122530 - DNA, 20 bp, Artificial Sequence
  MKO10122530_B_Tnfrsf9
  gRNA
gggaaacaactgttacaacg

SEQ ID NO: 122531 - DNA, 20 bp, Artificial Sequence
  MKO10122531_B_Tnfsf10
  gRNA
gaagcaagctagtccaattt

SEQ ID NO: 122532 - DNA, 20 bp, Artificial Sequence
  MKO10122532_B_Tnfsf10
  gRNA
agtactcctcccttgcccag

SEQ ID NO: 122533 - DNA, 20 bp, Artificial Sequence
  MKO10122533_B_Tnfsf10
  gRNA
ggtgactttgagaacctttc

SEQ ID NO: 122534 - DNA, 20 bp, Artificial Sequence
  MKO10122534_B_Tnfsf11
  gRNA
cttctgcacggccccctgaa

SEQ ID NO: 122535 - DNA, 20 bp, Artificial Sequence
  MKO10122535_B_Tnfsf11
  gRNA
tggttggatgtggcccagcg

SEQ ID NO: 122536 - DNA, 20 bp, Artificial Sequence
  MKO10122536_B_Tnfsf11
  gRNA
ggagctcctgagaagcgctg

SEQ ID NO: 122537 - DNA, 20 bp, Artificial Sequence
  MKO10122537_B_Tnfsf12Tnfsf13
  gRNA
agatgctcaccacttcttcg

SEQ ID NO: 122538 - DNA, 20 bp, Artificial Sequence
  MKO10122538_B_Tnfsf12Tnfsf13
  gRNA
agctattgcagcccattatg

SEQ ID NO: 122539 - DNA, 20 bp, Artificial Sequence
  MKO10122539_B_Tnfsf12Tnfsf13
  gRNA
acctactcacagggggctcc

SEQ ID NO: 122540 - DNA, 20 bp, Artificial Sequence
  MKO10122540_B_Tnfsf12
  gRNA
agatgctcaccacttcttcg

SEQ ID NO: 122541 - DNA, 20 bp, Artificial Sequence
  MKO10122541_B_Tnfsf12
  gRNA
agctattgcagcccattatg

SEQ ID NO: 122542 - DNA, 20 bp, Artificial Sequence
  MKO10122542_B_Tnfsf12
  gRNA
acctactcacagggggctcc

SEQ ID NO: 122543 - DNA, 20 bp, Artificial Sequence
  MKO10122543_B_Tnfsf13b
  gRNA
gaacttacacatttgttcca

SEQ ID NO: 122544 - DNA, 20 bp, Artificial Sequence
  MKO10122544_B_Tnfsf13b
  gRNA
ctatttcttcatctacagcc

SEQ ID NO: 122545 - DNA, 20 bp, Artificial Sequence
  MKO10122545_B_Tnfsf13b
  gRNA
cattatcatcatgttgagaa

SEQ ID NO: 122546 - DNA, 20 bp, Artificial Sequence
  MKO10122546_B_Tnfsf13
  gRNA
tgcactgtagcagctattgt

SEQ ID NO: 122547 - DNA, 20 bp, Artificial Sequence
  MKO10122547_B_Tnfsf13
  gRNA
agatttcgccccatccttcc

SEQ ID NO: 122548 - DNA, 20 bp, Artificial Sequence
  MKO10122548_B_Tnfsf13
  gRNA
ggaaggatggggcgaaatct

SEQ ID NO: 122549 - DNA, 20 bp, Artificial Sequence
  MKO10122549_B_Tnfsf14
  gRNA
caagacgttgatgcagtctc

SEQ ID NO: 122550 - DNA, 20 bp, Artificial Sequence
  MKO10122550_B_Tnfsf14
  gRNA
ctcagatcaacgatctcacc

SEQ ID NO: 122551 - DNA, 20 bp, Artificial Sequence
  MKO10122551_B_Tnfsf14
  gRNA
aacccagcagcacatcttac

SEQ ID NO: 122552 - DNA, 20 bp, Artificial Sequence
  MKO10122552_B_Tnfsf15
  gRNA
ttgtcatttcccatcctcgc

SEQ ID NO: 122553 - DNA, 20 bp, Artificial Sequence
  MKO10122553_B_Tnfsf15
  gRNA
gttacagactcacctcccag

SEQ ID NO: 122554 - DNA, 20 bp, Artificial Sequence
  MKO10122554_B_Tnfsf15
  gRNA
gaacacttacaaacttgctg

SEQ ID NO: 122555 - DNA, 20 bp, Artificial Sequence
  MKO10122555_B_Tnfsf18
  gRNA
aactgccatcgagtcctgca

SEQ ID NO: 122556 - DNA, 20 bp, Artificial Sequence
  MKO10122556_B_Tnfsf18
  gRNA
actgatctatacttcactca

SEQ ID NO: 122557 - DNA, 20 bp, Artificial Sequence
  MKO10122557_B_Tnfsf18
  gRNA
tgagagaatcaagtcctcaa

SEQ ID NO: 122558 - DNA, 20 bp, Artificial Sequence
  MKO10122558_B_Tnfsf4
  gRNA
gatcaaggccaagattcaag

SEQ ID NO: 122559 - DNA, 20 bp, Artificial Sequence
  MKO10122559_B_Tnfsf4
  gRNA
taactgctcctctgagtctt

SEQ ID NO: 122560 - DNA, 20 bp, Artificial Sequence
  MKO10122560_B_Tnfsf4
  gRNA
cctccaatccaaagactcag

SEQ ID NO: 122561 - DNA, 20 bp, Artificial Sequence
  MKO10122561_B_Tnfsf8
  gRNA
tgatcgccactgccacaaca

SEQ ID NO: 122562 - DNA, 20 bp, Artificial Sequence
  MKO10122562_B_Tnfsf8
  gRNA
tgagctcttacctcctttaa

SEQ ID NO: 122563 - DNA, 20 bp, Artificial Sequence
  MKO10122563_B_Tnfsf8
  gRNA
cttctcagttgtatttggag

SEQ ID NO: 122564 - DNA, 20 bp, Artificial Sequence
  MKO10122564_B_Tnfsf9
  gRNA
ttgtgaaacccgacaaccca

SEQ ID NO: 122565 - DNA, 20 bp, Artificial Sequence
  MKO10122565_B_Tnfsf9
  gRNA
tcctgtgttcgccaagctac

SEQ ID NO: 122566 - DNA, 20 bp, Artificial Sequence
  MKO10122566_B_Tnfsf9
  gRNA
tcttcacccgcaccgagcct

SEQ ID NO: 122567 - DNA, 20 bp, Artificial Sequence
  MKO10122567_B_Tnf
  gRNA
ccagcgcgccaacgccctcc

SEQ ID NO: 122568 - DNA, 20 bp, Artificial Sequence
  MKO10122568_B_Tnf
  gRNA
gtagacaaggtacaacccat

SEQ ID NO: 122569 - DNA, 20 bp, Artificial Sequence
  MKO10122569_B_Tnf
  gRNA
tgggccatagaactgatgag

SEQ ID NO: 122570 - DNA, 20 bp, Artificial Sequence
  MKO10122570_B_Tnik
  gRNA
cacgtatggtcaagtttata

SEQ ID NO: 122571 - DNA, 20 bp, Artificial Sequence
  MKO10122571_B_Tnik
  gRNA
tttatcaaaaagaaccctcc

SEQ ID NO: 122572 - DNA, 20 bp, Artificial Sequence
  MKO10122572_B_Tnik
  gRNA
accaactcaaagatccctgc

SEQ ID NO: 122573 - DNA, 20 bp, Artificial Sequence
  MKO10122573_B_Tnip1
  gRNA
gcatggccctcgagttcaac

SEQ ID NO: 122574 - DNA, 20 bp, Artificial Sequence
  MKO10122574_B_Tnip1
  gRNA
gtggcggcagtgctggtagc

SEQ ID NO: 122575 - DNA, 20 bp, Artificial Sequence
  MKO10122575_B_Tnip1
  gRNA
agatggaagcgtccagactc

SEQ ID NO: 122576 - DNA, 20 bp, Artificial Sequence
  MKO10122576_B_Tnip2
  gRNA
cctccaactgtctgttaagt

SEQ ID NO: 122577 - DNA, 20 bp, Artificial Sequence
  MKO10122577_B_Tnip2
  gRNA
caaacaagcagcgatgcttc

SEQ ID NO: 122578 - DNA, 20 bp, Artificial Sequence
  MKO10122578_B_Tnip2
  gRNA
gtaacttcttaataacactc

SEQ ID NO: 122579 - DNA, 20 bp, Artificial Sequence
  MKO10122579_B_Tnip3
  gRNA
cccattgttgattgacatcc

SEQ ID NO: 122580 - DNA, 20 bp, Artificial Sequence
  MKO10122580_B_Tnip3
  gRNA
gtgtgctccaccaagaagaa

SEQ ID NO: 122581 - DNA, 20 bp, Artificial Sequence
  MKO10122581_B_Tnip3
  gRNA
cctggagctgaaaactaaac

SEQ ID NO: 122582 - DNA, 20 bp, Artificial Sequence
  MKO10122582_B_Tnk1
  gRNA
tcatgacagatacttcccgc

SEQ ID NO: 122583 - DNA, 20 bp, Artificial Sequence
  MKO10122583_B_Tnk1
  gRNA
gggctttgctcccgaacaga

SEQ ID NO: 122584 - DNA, 20 bp, Artificial Sequence
  MKO10122584_B_Tnk1
  gRNA
tgctttggtgttgtacatcg

SEQ ID NO: 122585 - DNA, 20 bp, Artificial Sequence
  MKO10122585_B_Tnk2
  gRNA
ctcccggatgaagtcgtcca

SEQ ID NO: 122586 - DNA, 20 bp, Artificial Sequence
  MKO10122586_B_Tnk2
  gRNA
tgaggtcatctcgaagcctc

SEQ ID NO: 122587 - DNA, 20 bp, Artificial Sequence
  MKO10122587_B_Tnk2
  gRNA
ccatgacttgcgtttgcaca

SEQ ID NO: 122588 - DNA, 20 bp, Artificial Sequence
  MKO10122588_B_Tnks1bp1
  gRNA
gcgaagtgcctgtccgtgag

SEQ ID NO: 122589 - DNA, 20 bp, Artificial Sequence
  MKO10122589_B_Tnks1bp1
  gRNA
attacacgaacgttcccctg

SEQ ID NO: 122590 - DNA, 20 bp, Artificial Sequence
  MKO10122590_B_Tnks1bp1
  gRNA
ggagacgttacccaagagtc

SEQ ID NO: 122591 - DNA, 20 bp, Artificial Sequence
  MKO10122591_B_Tnks2
  gRNA
ccaaccatccgaaatacaga

SEQ ID NO: 122592 - DNA, 20 bp, Artificial Sequence
  MKO10122592_B_Tnks2
  gRNA
catttctaggagtggcaatg

SEQ ID NO: 122593 - DNA, 20 bp, Artificial Sequence
  MKO10122593_B_Tnks2
  gRNA
tctgccaaagctgttctgac

SEQ ID NO: 122594 - DNA, 20 bp, Artificial Sequence
  MKO10122594_B_Tnks
  gRNA
tcacttacctagcagcttct

SEQ ID NO: 122595 - DNA, 20 bp, Artificial Sequence
  MKO10122595_B_Tnks
  gRNA
acgaactcctagaagctgct

SEQ ID NO: 122596 - DNA, 20 bp, Artificial Sequence
  MKO10122596_B_Tnks
  gRNA
cctttcgtccatcacttgca

SEQ ID NO: 122597 - DNA, 20 bp, Artificial Sequence
  MKO10122597_B_Tnmd
  gRNA
gagcaaacacttctggcccg

SEQ ID NO: 122598 - DNA, 20 bp, Artificial Sequence
  MKO10122598_B_Tnmd
  gRNA
tacactggcatctactttgt

SEQ ID NO: 122599 - DNA, 20 bp, Artificial Sequence
  MKO10122599_B_Tnmd
  gRNA
cgagaagaagaagatttaca

SEQ ID NO: 122600 - DNA, 20 bp, Artificial Sequence
  MKO10122600_B_Tnnc1
  gRNA
gatggccgaattgactatga

SEQ ID NO: 122601 - DNA, 20 bp, Artificial Sequence
  MKO10122601_B_Tnnc1
  gRNA
ctaggtagaacagttgacag

SEQ ID NO: 122602 - DNA, 20 bp, Artificial Sequence
  MKO10122602_B_Tnnc1
  gRNA
tgcatgaaggacgacagcaa

SEQ ID NO: 122603 - DNA, 20 bp, Artificial Sequence
  MKO10122603_B_Tnnc2
  gRNA
atcagcatcgaacatgtcaa

SEQ ID NO: 122604 - DNA, 20 bp, Artificial Sequence
  MKO10122604_B_Tnnc2
  gRNA
ggacatcagcgttaaagagt

SEQ ID NO: 122605 - DNA, 20 bp, Artificial Sequence
  MKO10122605_B_Tnnc2
  gRNA
agtgcttccgcatctttgac

SEQ ID NO: 122606 - DNA, 20 bp, Artificial Sequence
  MKO10122606_B_Tnni1
  gRNA
ctcccgtaaactcatgctga

SEQ ID NO: 122607 - DNA, 20 bp, Artificial Sequence
  MKO10122607_B_Tnni1
  gRNA
atgcctccacaacaccagag

SEQ ID NO: 122608 - DNA, 20 bp, Artificial Sequence
  MKO10122608_B_Tnni1
  gRNA
tcaccttcagcatgagttta

SEQ ID NO: 122609 - DNA, 20 bp, Artificial Sequence
  MKO10122609_B_Tnni2
  gRNA
aagccgccgagaatctgaga

SEQ ID NO: 122610 - DNA, 20 bp, Artificial Sequence
  MKO10122610_B_Tnni2
  gRNA
ggcccggagacagcacctga

SEQ ID NO: 122611 - DNA, 20 bp, Artificial Sequence
  MKO10122611_B_Tnni2
  gRNA
tgaagaggagaaatatgaca

SEQ ID NO: 122612 - DNA, 20 bp, Artificial Sequence
  MKO10122612_B_Tnni3k
  gRNA
gggacaggccacgctctgtg

SEQ ID NO: 122613 - DNA, 20 bp, Artificial Sequence
  MKO10122613_B_Tnni3k
  gRNA
atccgtgcccttatgttaaa

SEQ ID NO: 122614 - DNA, 20 bp, Artificial Sequence
  MKO10122614_B_Tnni3k
  gRNA
caagaactaagacacatctt

SEQ ID NO: 122615 - DNA, 20 bp, Artificial Sequence
  MKO10122615_B_Tnni3
  gRNA
ccccgccccaccttggcgtg

SEQ ID NO: 122616 - DNA, 20 bp, Artificial Sequence
  MKO10122616_B_Tnni3
  gRNA
tctcttcaggagcagcgatg

SEQ ID NO: 122617 - DNA, 20 bp, Artificial Sequence
  MKO10122617_B_Tnni3
  gRNA
ctccagaaaacttcagttga

SEQ ID NO: 122618 - DNA, 20 bp, Artificial Sequence
  MKO10122618_B_Tnnt1
  gRNA
cctcccagcccccgaggagc

SEQ ID NO: 122619 - DNA, 20 bp, Artificial Sequence
  MKO10122619_B_Tnnt1
  gRNA
gtctctagggagcaggcaga

SEQ ID NO: 122620 - DNA, 20 bp, Artificial Sequence
  MKO10122620_B_Tnnt1
  gRNA
ctcctttccagatgaggaag

SEQ ID NO: 122621 - DNA, 20 bp, Artificial Sequence
  MKO10122621_B_Tnnt2
  gRNA
ttcatatctagggaacagga

SEQ ID NO: 122622 - DNA, 20 bp, Artificial Sequence
  MKO10122622_B_Tnnt2
  gRNA
gtactcctccaccacctcct

SEQ ID NO: 122623 - DNA, 20 bp, Artificial Sequence
  MKO10122623_B_Tnnt2
  gRNA
tcacttaccttcagcatctt

SEQ ID NO: 122624 - DNA, 20 bp, Artificial Sequence
  MKO10122624_B_Tnnt3
  gRNA
agccaactcaccttcctctt

SEQ ID NO: 122625 - DNA, 20 bp, Artificial Sequence
  MKO10122625_B_Tnnt3
  gRNA
tccacagaggaagtccaaga

SEQ ID NO: 122626 - DNA, 20 bp, Artificial Sequence
  MKO10122626_B_Tnn
  gRNA
ggaaagccgattctcctgaa

SEQ ID NO: 122627 - DNA, 20 bp, Artificial Sequence
  MKO10122627_B_Tnn
  gRNA
ccgtgctcttgagcaactgc

SEQ ID NO: 122628 - DNA, 20 bp, Artificial Sequence
  MKO10122628_B_Tnn
  gRNA
atcacagttgtgcccatccg

SEQ ID NO: 122629 - DNA, 20 bp, Artificial Sequence
  MKO10122629_B_Tnp1
  gRNA
agccgcaagctaaagactca

SEQ ID NO: 122630 - DNA, 20 bp, Artificial Sequence
  MKO10122630_B_Tnp1
  gRNA
tgccatgagtctttagcttg

SEQ ID NO: 122631 - DNA, 20 bp, Artificial Sequence
  MKO10122631_B_Tnp1
  gRNA
gcgtcctgaaaagtaggaaa

SEQ ID NO: 122632 - DNA, 20 bp, Artificial Sequence
  MKO10122632_B_Tnp2
  gRNA
tgcaggtgcactgattgcac

SEQ ID NO: 122633 - DNA, 20 bp, Artificial Sequence
  MKO10122633_B_Tnp2
  gRNA
tgagcaagagaaaggccgtc

SEQ ID NO: 122634 - DNA, 20 bp, Artificial Sequence
  MKO10122634_B_Tnp2
  gRNA
cctggctgcagctccggcag

SEQ ID NO: 122635 - DNA, 20 bp, Artificial Sequence
  MKO10122635_B_Tnpo1
  gRNA
ttcttccagatgagcccaca

SEQ ID NO: 122636 - DNA, 20 bp, Artificial Sequence
  MKO10122636_B_Tnpo1
  gRNA
accaaaactctgtagcctgc

SEQ ID NO: 122637 - DNA, 20 bp, Artificial Sequence
  MKO10122637_B_Tnpo1
  gRNA
cttacaaaattaaaatctga

SEQ ID NO: 122638 - DNA, 20 bp, Artificial Sequence
  MKO10122638_B_Tnpo2
  gRNA
tggatagtgatgctctcaac

SEQ ID NO: 122639 - DNA, 20 bp, Artificial Sequence
  MKO10122639_B_Tnpo2
  gRNA
gcgccttcacattgttcttg

SEQ ID NO: 122640 - DNA, 20 bp, Artificial Sequence
  MKO10122640_B_Tnpo2
  gRNA
tataatcctctgagttgagc

SEQ ID NO: 122641 - DNA, 20 bp, Artificial Sequence
  MKO10122641_B_Tnpo3
  gRNA
gtcgcctgtcattgtaacac

SEQ ID NO: 122642 - DNA, 20 bp, Artificial Sequence
  MKO10122642_B_Tnpo3
  gRNA
tcgccctacagatgccttct

SEQ ID NO: 122643 - DNA, 20 bp, Artificial Sequence
  MKO10122643_B_Tnpo3
  gRNA
tgtacgcatcctttccaaga

SEQ ID NO: 122644 - DNA, 20 bp, Artificial Sequence
  MKO10122644_B_Tnrc18
  gRNA
catcgggaggatcggctgct

SEQ ID NO: 122645 - DNA, 20 bp, Artificial Sequence
  MKO10122645_B_Tnrc18
  gRNA
gacacggctggaccgggacc

SEQ ID NO: 122646 - DNA, 20 bp, Artificial Sequence
  MKO10122646_B_Tnrc18
  gRNA
cgtcccgagcctgccagcgt

SEQ ID NO: 122647 - DNA, 20 bp, Artificial Sequence
  MKO10122647_B_Tnrc6a
  gRNA
acgtagagagaaatcttagc

SEQ ID NO: 122648 - DNA, 20 bp, Artificial Sequence
  MKO10122648_B_Tnrc6a
  gRNA
gccactgaacaaaaaatcaa

SEQ ID NO: 122649 - DNA, 20 bp, Artificial Sequence
  MKO10122649_B_Tnrc6a
  gRNA
gcaagaagaagaacagttga

SEQ ID NO: 122650 - DNA, 20 bp, Artificial Sequence
  MKO10122650_B_Tnrc6b
  gRNA
catggcaagactccacctcc

SEQ ID NO: 122651 - DNA, 20 bp, Artificial Sequence
  MKO10122651_B_Tnrc6b
  gRNA
gcctttgcaggtggaacagg

SEQ ID NO: 122652 - DNA, 20 bp, Artificial Sequence
  MKO10122652_B_Tnrc6b
  gRNA
gaaaaaagaagccacccaga

SEQ ID NO: 122653 - DNA, 20 bp, Artificial Sequence
  MKO10122653_B_Tnrc6c
  gRNA
aagcgtggaggcacctcccg

SEQ ID NO: 122654 - DNA, 20 bp, Artificial Sequence
  MKO10122654_B_Tnrc6c
  gRNA
aatggcaccaccggctcagc

SEQ ID NO: 122655 - DNA, 20 bp, Artificial Sequence
  MKO10122655_B_Tnrc6c
  gRNA
gctgccgctagaaatagtgc

SEQ ID NO: 122656 - DNA, 20 bp, Artificial Sequence
  MKO10122656_B_Tnr
  gRNA
agcgtagacgctgatgttgt

SEQ ID NO: 122657 - DNA, 20 bp, Artificial Sequence
  MKO10122657_B_Tnr
  gRNA
gtacgtacgagtggccacct

SEQ ID NO: 122658 - DNA, 20 bp, Artificial Sequence
  MKO10122658_B_Tnr
  gRNA
aactttagcttcgagtcctg

SEQ ID NO: 122659 - DNA, 20 bp, Artificial Sequence
  MKO10122659_B_Tns1
  gRNA
ggcctggcatttccgatgac

SEQ ID NO: 122660 - DNA, 20 bp, Artificial Sequence
  MKO10122660_B_Tns1
  gRNA
tcctccgtccagccatgaac

SEQ ID NO: 122661 - DNA, 20 bp, Artificial Sequence
  MKO10122661_B_Tns1
  gRNA
aacacagccttcccgagtga

SEQ ID NO: 122662 - DNA, 20 bp, Artificial Sequence
  MKO10122662_B_Tns3
  gRNA
gaacaacgacccccagcatg

SEQ ID NO: 122663 - DNA, 20 bp, Artificial Sequence
  MKO10122663_B_Tns3
  gRNA
acttcaccaacgtctcagcc

SEQ ID NO: 122664 - DNA, 20 bp, Artificial Sequence
  MKO10122664_B_Tns3
  gRNA
ccttacaaagcttaatccaa

SEQ ID NO: 122665 - DNA, 20 bp, Artificial Sequence
  MKO10122665_B_Tns4
  gRNA
gcccaccatgaagttcgtga

SEQ ID NO: 122666 - DNA, 20 bp, Artificial Sequence
  MKO10122666_B_Tns4
  gRNA
ccactgcgcggggagccaaa

SEQ ID NO: 122667 - DNA, 20 bp, Artificial Sequence
  MKO10122667_B_Tns4
  gRNA
agccgggtgcctttgtcatc

SEQ ID NO: 122668 - DNA, 20 bp, Artificial Sequence
  MKO10122668_B_Tnxb
  gRNA
cagctaaccgatctgatgcc

SEQ ID NO: 122669 - DNA, 20 bp, Artificial Sequence
  MKO10122669_B_Tnxb
  gRNA
actagtgatcgatggtcctc

SEQ ID NO: 122670 - DNA, 20 bp, Artificial Sequence
  MKO10122670_B_Tnxb
  gRNA
ggcgcctggacaggactacc

SEQ ID NO: 122671 - DNA, 20 bp, Artificial Sequence
  MKO10122671_B_Tob1
  gRNA
ttggacattgacgatgttcg

SEQ ID NO: 122672 - DNA, 20 bp, Artificial Sequence
  MKO10122672_B_Tob1
  gRNA
tagtgaaaccggctgtgagc

SEQ ID NO: 122673 - DNA, 20 bp, Artificial Sequence
  MKO10122673_B_Tob1
  gRNA
ctacaaaagacttctcgttg

SEQ ID NO: 122674 - DNA, 20 bp, Artificial Sequence
  MKO10122674_B_Tob2
  gRNA
accgctgccgaagggggccg

SEQ ID NO: 122675 - DNA, 20 bp, Artificial Sequence
  MKO10122675_B_Tob2
  gRNA
agctctccctcgccgtcctt

SEQ ID NO: 122676 - DNA, 20 bp, Artificial Sequence
  MKO10122676_B_Tob2
  gRNA
tagcaccgcctccgaacacc

SEQ ID NO: 122677 - DNA, 20 bp, Artificial Sequence
  MKO10122677_B_Toe1
  gRNA
tcactctgcacgtctaccac

SEQ ID NO: 122678 - DNA, 20 bp, Artificial Sequence
  MKO10122678_B_Toe1
  gRNA
cgtgcagagtgacaacttca

SEQ ID NO: 122679 - DNA, 20 bp, Artificial Sequence
  MKO10122679_B_Toe1
  gRNA
gacccgttctgtcctgtccc

SEQ ID NO: 122680 - DNA, 20 bp, Artificial Sequence
  MKO10122680_B_Tollip
  gRNA
tagaacgagtccacacctgg

SEQ ID NO: 122681 - DNA, 20 bp, Artificial Sequence
  MKO10122681_B_Tollip
  gRNA
tataccactcgtcctccact

SEQ ID NO: 122682 - DNA, 20 bp, Artificial Sequence
  MKO10122682_B_Tollip
  gRNA
gacgagtggtatagcctgag

SEQ ID NO: 122683 - DNA, 20 bp, Artificial Sequence
  MKO10122683_B_Tom1l1
  gRNA
ctgaatttagacctggtccc

SEQ ID NO: 122684 - DNA, 20 bp, Artificial Sequence
  MKO10122684_B_Tom1l1
  gRNA
atgaagacatcgagctcctg

SEQ ID NO: 122685 - DNA, 20 bp, Artificial Sequence
  MKO10122685_B_Tom1l1
  gRNA
agtgatgacagccatattga

SEQ ID NO: 122686 - DNA, 20 bp, Artificial Sequence
  MKO10122686_B_Tom1l2
  gRNA
taagccgcttctttagagcc

SEQ ID NO: 122687 - DNA, 20 bp, Artificial Sequence
  MKO10122687_B_Tom1l2
  gRNA
tgctgaacggattccccagc

SEQ ID NO: 122688 - DNA, 20 bp, Artificial Sequence
  MKO10122688_B_Tom1l2
  gRNA
aatccgttcagcacccctgt

SEQ ID NO: 122689 - DNA, 20 bp, Artificial Sequence
  MKO10122689_B_Tom1
  gRNA
tgtcacagatttccatgttg

SEQ ID NO: 122690 - DNA, 20 bp, Artificial Sequence
  MKO10122690_B_Tom1
  gRNA
taagggccagcatgacctca

SEQ ID NO: 122691 - DNA, 20 bp, Artificial Sequence
  MKO10122691_B_Tom1
  gRNA
agcagtgaagaagcgaatta

SEQ ID NO: 122692 - DNA, 20 bp, Artificial Sequence
  MKO10122692_B_Tomm20l
  gRNA
caagattcccctcatttgcc

SEQ ID NO: 122693 - DNA, 20 bp, Artificial Sequence
  MKO10122693_B_Tomm20l
  gRNA
ggaaaactttgtttaattag

SEQ ID NO: 122694 - DNA, 20 bp, Artificial Sequence
  MKO10122694_B_Tomm20l
  gRNA
ccaaggcccaggcgcccgcc

SEQ ID NO: 122695 - DNA, 20 bp, Artificial Sequence
  MKO10122695_B_Tomm20
  gRNA
ttccttgaagagatacagct

SEQ ID NO: 122696 - DNA, 20 bp, Artificial Sequence
  MKO10122696_B_Tomm20
  gRNA
caccaagctgtatctcttca

SEQ ID NO: 122697 - DNA, 20 bp, Artificial Sequence
  MKO10122697_B_Tomm20
  gRNA
aattgtaagtgctcagagct

SEQ ID NO: 122698 - DNA, 20 bp, Artificial Sequence
  MKO10122698_B_Tomm22
  gRNA
ggggctctacctccacttcc

SEQ ID NO: 122699 - DNA, 20 bp, Artificial Sequence
  MKO10122699_B_Tomm22
  gRNA
gtcttcttccagctcctcct

SEQ ID NO: 122700 - DNA, 20 bp, Artificial Sequence
  MKO10122700_B_Tomm22
  gRNA
aacagcagcaactgcagcaa

SEQ ID NO: 122701 - DNA, 20 bp, Artificial Sequence
  MKO10122701_B_Tomm34
  gRNA
ccgccctggaaggcatcaac

SEQ ID NO: 122702 - DNA, 20 bp, Artificial Sequence
  MKO10122702_B_Tomm34
  gRNA
acctctgctcttcgtagctg

SEQ ID NO: 122703 - DNA, 20 bp, Artificial Sequence
  MKO10122703_B_Tomm34
  gRNA
gagcctcttgtgtagtagcc

SEQ ID NO: 122704 - DNA, 20 bp, Artificial Sequence
  MKO10122704_B_Tomm40l
  gRNA
gcgagctaaggctgtcttcc

SEQ ID NO: 122705 - DNA, 20 bp, Artificial Sequence
  MKO10122705_B_Tomm40l
  gRNA
ttcacgccttccatctgtgc

SEQ ID NO: 122706 - DNA, 20 bp, Artificial Sequence
  MKO10122706_B_Tomm40l
  gRNA
ctggcagcttagccccacag

SEQ ID NO: 122707 - DNA, 20 bp, Artificial Sequence
  MKO10122707_B_Tomm40
  gRNA
actcacctggatggccattt

SEQ ID NO: 122708 - DNA, 20 bp, Artificial Sequence
  MKO10122708_B_Tomm40
  gRNA
cctgaacccaccaagacatc

SEQ ID NO: 122709 - DNA, 20 bp, Artificial Sequence
  MKO10122709_B_Tomm40
  gRNA
ttgacaccttccatctgaac

SEQ ID NO: 122710 - DNA, 20 bp, Artificial Sequence
  MKO10122710_B_Tomm5
  gRNA
aaagtgtgtgctaccatgcc

SEQ ID NO: 122711 - DNA, 20 bp, Artificial Sequence
  MKO10122711_B_Tomm5
  gRNA
tccagcttctttaagatata

SEQ ID NO: 122712 - DNA, 20 bp, Artificial Sequence
  MKO10122712_B_Tomm5
  gRNA
atcttccgcttcatctcctc

SEQ ID NO: 122713 - DNA, 20 bp, Artificial Sequence
  MKO10122713_B_Tomm6
  gRNA
caggaacttgatcctcaatt

SEQ ID NO: 122714 - DNA, 20 bp, Artificial Sequence
  MKO10122714_B_Tomm6
  gRNA
ggcgctcaccgtcactccgc

SEQ ID NO: 122715 - DNA, 20 bp, Artificial Sequence
  MKO10122715_B_Tomm6
  gRNA
agccagtctcccacgttgtc

SEQ ID NO: 122716 - DNA, 20 bp, Artificial Sequence
  MKO10122716_B_Tomm70a
  gRNA
caacagcctttgtacaatct

SEQ ID NO: 122717 - DNA, 20 bp, Artificial Sequence
  MKO10122717_B_Tomm70a
  gRNA
gcgcaagcagccaaaaacaa

SEQ ID NO: 122718 - DNA, 20 bp, Artificial Sequence
  MKO10122718_B_Tomm70a
  gRNA
gacttctctcccttaagcat

SEQ ID NO: 122719 - DNA, 20 bp, Artificial Sequence
  MKO10122719_B_Tomm7
  gRNA
tgagcaaagaagccaaacag

SEQ ID NO: 122720 - DNA, 20 bp, Artificial Sequence
  MKO10122720_B_Tomm7
  gRNA
cagtcctttatccccaaagt

SEQ ID NO: 122721 - DNA, 20 bp, Artificial Sequence
  MKO10122721_B_Tomm7
  gRNA
ctgcagcagctcttcaaggg

SEQ ID NO: 122722 - DNA, 20 bp, Artificial Sequence
  MKO10122722_B_Tomt
  gRNA
cacctttaacagggcccatg

SEQ ID NO: 122723 - DNA, 20 bp, Artificial Sequence
  MKO10122723_B_Tomt
  gRNA
attgcgcgagccttgccccc

SEQ ID NO: 122724 - DNA, 20 bp, Artificial Sequence
  MKO10122724_B_Tomt
  gRNA
tcctcaccacgcttgaccat

SEQ ID NO: 122725 - DNA, 20 bp, Artificial Sequence
  MKO10122725_B_Tonsl
  gRNA
caccattggccgcacccatc

SEQ ID NO: 122726 - DNA, 20 bp, Artificial Sequence
  MKO10122726_B_Tonsl
  gRNA
atcaagagattccttgttgc

SEQ ID NO: 122727 - DNA, 20 bp, Artificial Sequence
  MKO10122727_B_Tonsl
  gRNA
tcatctcactcagttcccgc

SEQ ID NO: 122728 - DNA, 20 bp, Artificial Sequence
  MKO10122728_B_Top1mt
  gRNA
aatttcaagacggaaccacc

SEQ ID NO: 122729 - DNA, 20 bp, Artificial Sequence
  MKO10122729_B_Top1mt
  gRNA
acctcggccacggaacaagc

SEQ ID NO: 122730 - DNA, 20 bp, Artificial Sequence
  MKO10122730_B_Top1mt
  gRNA
gcctacgagccccttcctga

SEQ ID NO: 122731 - DNA, 20 bp, Artificial Sequence
  MKO10122731_B_Top1
  gRNA
aacacaaagatcgagaacac

SEQ ID NO: 122732 - DNA, 20 bp, Artificial Sequence
  MKO10122732_B_Top1
  gRNA
tgagctgccatctttgtgtt

SEQ ID NO: 122733 - DNA, 20 bp, Artificial Sequence
  MKO10122733_B_Top1
  gRNA
gagaaaaccaaacacaaaga

SEQ ID NO: 122734 - DNA, 20 bp, Artificial Sequence
  MKO10122734_B_Top2a
  gRNA
agttgtccaaatatgagagc

SEQ ID NO: 122735 - DNA, 20 bp, Artificial Sequence
  MKO10122735_B_Top2a
  gRNA
ctctgtggagttagtgaccc

SEQ ID NO: 122736 - DNA, 20 bp, Artificial Sequence
  MKO10122736_B_Top2a
  gRNA
aaaatctttgatgagattct

SEQ ID NO: 122737 - DNA, 20 bp, Artificial Sequence
  MKO10122737_B_Top2b
  gRNA
tcaaagatcttgtataagcc

SEQ ID NO: 122738 - DNA, 20 bp, Artificial Sequence
  MKO10122738_B_Top2b
  gRNA
agctgtccaaaaattaaagc

SEQ ID NO: 122739 - DNA, 20 bp, Artificial Sequence
  MKO10122739_B_Top2b
  gRNA
atgctgctgacaacaagcag

SEQ ID NO: 122740 - DNA, 20 bp, Artificial Sequence
  MKO10122740_B_Top3a
  gRNA
gaatttgactatcatctgta

SEQ ID NO: 122741 - DNA, 20 bp, Artificial Sequence
  MKO10122741_B_Top3a
  gRNA
atgataatgacttcagtctc

SEQ ID NO: 122742 - DNA, 20 bp, Artificial Sequence
  MKO10122742_B_Top3a
  gRNA
aaatcttgttgaatttagaa

SEQ ID NO: 122743 - DNA, 20 bp, Artificial Sequence
  MKO10122743_B_Top3b
  gRNA
gaacttgaccatgttcagct

SEQ ID NO: 122744 - DNA, 20 bp, Artificial Sequence
  MKO10122744_B_Top3b
  gRNA
tgactatgttgtgctgtggc

SEQ ID NO: 122745 - DNA, 20 bp, Artificial Sequence
  MKO10122745_B_Top3b
  gRNA
ttcaagatgacgtctgtctg

SEQ ID NO: 122746 - DNA, 20 bp, Artificial Sequence
  MKO10122746_B_Topaz1
  gRNA
gttgtaagtggaagcctaga

SEQ ID NO: 122747 - DNA, 20 bp, Artificial Sequence
  MKO10122747_B_Topaz1
  gRNA
acagtgcataagttcagaca

SEQ ID NO: 122748 - DNA, 20 bp, Artificial Sequence
  MKO10122748_B_Topaz1
  gRNA
ctctccagtttcagcaatcc

SEQ ID NO: 122749 - DNA, 20 bp, Artificial Sequence
  MKO10122749_B_Topbp1
  gRNA
ctcattgtgcaagaaccaaa

SEQ ID NO: 122750 - DNA, 20 bp, Artificial Sequence
  MKO10122750_B_Topbp1
  gRNA
tcataaatacgtacaaatga

SEQ ID NO: 122751 - DNA, 20 bp, Artificial Sequence
  MKO10122751_B_Topbp1
  gRNA
ttacccgtttgtctttatcc

SEQ ID NO: 122752 - DNA, 20 bp, Artificial Sequence
  MKO10122752_B_Topors
  gRNA
tcccgccggctcagtaagct

SEQ ID NO: 122753 - DNA, 20 bp, Artificial Sequence
  MKO10122753_B_Topors
  gRNA
gctacgagacctcgatctac

SEQ ID NO: 122754 - DNA, 20 bp, Artificial Sequence
  MKO10122754_B_Topors
  gRNA
tgtagtcctcgacctgttac

SEQ ID NO: 122755 - DNA, 20 bp, Artificial Sequence
  MKO10122755_B_Tor1aip1
  gRNA
agaagctaccattgtccagc

SEQ ID NO: 122756 - DNA, 20 bp, Artificial Sequence
  MKO10122756_B_Tor1aip1
  gRNA
ccattaagaagcccaagact

SEQ ID NO: 122757 - DNA, 20 bp, Artificial Sequence
  MKO10122757_B_Tor1aip1
  gRNA
aatactaaaacgaatgaaag

SEQ ID NO: 122758 - DNA, 20 bp, Artificial Sequence
  MKO10122758_B_Tor1aip2
  gRNA
agcgttagagaaacctccac

SEQ ID NO: 122759 - DNA, 20 bp, Artificial Sequence
  MKO10122759_B_Tor1aip2
  gRNA
tgtcgctcatgtttgtgttc

SEQ ID NO: 122760 - DNA, 20 bp, Artificial Sequence
  MKO10122760_B_Tor1aip2
  gRNA
aacacaaacatgagcgacag

SEQ ID NO: 122761 - DNA, 20 bp, Artificial Sequence
  MKO10122761_B_Tor1a
  gRNA
cttgttattgaagaccgaca

SEQ ID NO: 122762 - DNA, 20 bp, Artificial Sequence
  MKO10122762_B_Tor1a
  gRNA
ctaccacatcgtaatagtct

SEQ ID NO: 122763 - DNA, 20 bp, Artificial Sequence
  MKO10122763_B_Tor1a
  gRNA
gcagccggcctcagtcatcc

SEQ ID NO: 122764 - DNA, 20 bp, Artificial Sequence
  MKO10122764_B_Tor1b
  gRNA
actactatgagcaggtggat

SEQ ID NO: 122765 - DNA, 20 bp, Artificial Sequence
  MKO10122765_B_Tor1b
  gRNA
tgccaccgaagtgattctca

SEQ ID NO: 122766 - DNA, 20 bp, Artificial Sequence
  MKO10122766_B_Tor1b
  gRNA
agtgcaaagtagagacgaac

SEQ ID NO: 122767 - DNA, 20 bp, Artificial Sequence
  MKO10122767_B_Tor2a
  gRNA
gcttgtccatctcatcgaag

SEQ ID NO: 122768 - DNA, 20 bp, Artificial Sequence
  MKO10122768_B_Tor2a
  gRNA
agggctgcaggacttccatc

SEQ ID NO: 122769 - DNA, 20 bp, Artificial Sequence
  MKO10122769_B_Tor2a
  gRNA
gaaaggaccaacggcttgct

SEQ ID NO: 122770 - DNA, 20 bp, Artificial Sequence
  MKO10122770_B_Tor3a
  gRNA
tactgatggacaacctgtat

SEQ ID NO: 122771 - DNA, 20 bp, Artificial Sequence
  MKO10122771_B_Tor3a
  gRNA
cacgttcgtctttgacgaag

SEQ ID NO: 122772 - DNA, 20 bp, Artificial Sequence
  MKO10122772_B_Tor3a
  gRNA
gtttctttcagcaacctcgg

SEQ ID NO: 122773 - DNA, 20 bp, Artificial Sequence
  MKO10122773_B_Tor4a
  gRNA
cttccagcactgcgcgaaag

SEQ ID NO: 122774 - DNA, 20 bp, Artificial Sequence
  MKO10122774_B_Tor4a
  gRNA
cgcagactcggcggcgcaga

SEQ ID NO: 122775 - DNA, 20 bp, Artificial Sequence
  MKO10122775_B_Tor4a
  gRNA
gcaagaggcgcaggcgtagt

SEQ ID NO: 122776 - DNA, 20 bp, Artificial Sequence
  MKO10122776_B_Tox2
  gRNA
ccacatggacgccactattt

SEQ ID NO: 122777 - DNA, 20 bp, Artificial Sequence
  MKO10122777_B_Tox2
  gRNA
catatgccgccacctccgag

SEQ ID NO: 122778 - DNA, 20 bp, Artificial Sequence
  MKO10122778_B_Tox2
  gRNA
tgatggtgacagtgcctacg

SEQ ID NO: 122779 - DNA, 20 bp, Artificial Sequence
  MKO10122779_B_Tox3
  gRNA
cagcgatccgttgccttccc

SEQ ID NO: 122780 - DNA, 20 bp, Artificial Sequence
  MKO10122780_B_Tox3
  gRNA
gcagtgcatcaggcataccc

SEQ ID NO: 122781 - DNA, 20 bp, Artificial Sequence
  MKO10122781_B_Tox3
  gRNA
ttgggcttcttgccagaatc

SEQ ID NO: 122782 - DNA, 20 bp, Artificial Sequence
  MKO10122782_B_Tox4
  gRNA
caggacctggaccattctat

SEQ ID NO: 122783 - DNA, 20 bp, Artificial Sequence
  MKO10122783_B_Tox4
  gRNA
cagttctgactgatcaatag

SEQ ID NO: 122784 - DNA, 20 bp, Artificial Sequence
  MKO10122784_B_Tox4
  gRNA
aacaatgcatacgcagagac

SEQ ID NO: 122785 - DNA, 20 bp, Artificial Sequence
  MKO10122785_B_Tox
  gRNA
gtcgcagctgagcgcacagt

SEQ ID NO: 122786 - DNA, 20 bp, Artificial Sequence
  MKO10122786_B_Tox
  gRNA
actgtgcgctcagctgcgac

SEQ ID NO: 122787 - DNA, 20 bp, Artificial Sequence
  MKO10122787_B_Tox
  gRNA
cgaagattgtggcatcaatg

SEQ ID NO: 122788 - DNA, 20 bp, Artificial Sequence
  MKO10122788_B_Tpbg
  gRNA
gtgcgtgaaccgcaacctgc

SEQ ID NO: 122789 - DNA, 20 bp, Artificial Sequence
  MKO10122789_B_Tpbg
  gRNA
cgctcaggccttgcactccg

SEQ ID NO: 122790 - DNA, 20 bp, Artificial Sequence
  MKO10122790_B_Tpbg
  gRNA
cgcgtcggcccccagctctt

SEQ ID NO: 122791 - DNA, 20 bp, Artificial Sequence
  MKO10122791_B_Tpbpa
  gRNA
tcagcatccaactgcgcttc

SEQ ID NO: 122792 - DNA, 20 bp, Artificial Sequence
  MKO10122792_B_Tpbpa
  gRNA
tttacacccaatgtttgaag

SEQ ID NO: 122793 - DNA, 20 bp, Artificial Sequence
  MKO10122793_B_Tpbpa
  gRNA
tctgtgtaatcctcaaattc

SEQ ID NO: 122794 - DNA, 20 bp, Artificial Sequence
  MKO10122794_B_Tpbpb
  gRNA
tgtcgatgccatccttctcc

SEQ ID NO: 122795 - DNA, 20 bp, Artificial Sequence
  MKO10122795_B_Tpbpb
  gRNA
tctgtgtaatcctcaaattc

SEQ ID NO: 122796 - DNA, 20 bp, Artificial Sequence
  MKO10122796_B_Tpbpb
  gRNA
tgttgatgaccctgaatttg

SEQ ID NO: 122797 - DNA, 20 bp, Artificial Sequence
  MKO10122797_B_Tpcn1
  gRNA
tctccagacgtccgtcctcg

SEQ ID NO: 122798 - DNA, 20 bp, Artificial Sequence
  MKO10122798_B_Tpcn1
  gRNA
gaggtaggccgccagcgctc

SEQ ID NO: 122799 - DNA, 20 bp, Artificial Sequence
  MKO10122799_B_Tpcn1
  gRNA
caaccacttcttctacatga

SEQ ID NO: 122800 - DNA, 20 bp, Artificial Sequence
  MKO10122800_B_Tpcn2
  gRNA
ccgctccatctaccaccgca

SEQ ID NO: 122801 - DNA, 20 bp, Artificial Sequence
  MKO10122801_B_Tpcn2
  gRNA
tgcaggtgctgcagccgatc

SEQ ID NO: 122802 - DNA, 20 bp, Artificial Sequence
  MKO10122802_B_Tpcn2
  gRNA
cttcattgaagacgccataa

SEQ ID NO: 122803 - DNA, 20 bp, Artificial Sequence
  MKO10122803_B_Tpd52l1
  gRNA
ccataagtatgcctgccatg

SEQ ID NO: 122804 - DNA, 20 bp, Artificial Sequence
  MKO10122804_B_Tpd52l1
  gRNA
gctaaaggcagagttaattc

SEQ ID NO: 122805 - DNA, 20 bp, Artificial Sequence
  MKO10122805_B_Tpd52l1
  gRNA
cttctctagcatgctctctg

SEQ ID NO: 122806 - DNA, 20 bp, Artificial Sequence
  MKO10122806_B_Tpd52l2
  gRNA
ctgcttcagctcccctaatg

SEQ ID NO: 122807 - DNA, 20 bp, Artificial Sequence
  MKO10122807_B_Tpd52l2
  gRNA
atcagctgccctgtccacca

SEQ ID NO: 122808 - DNA, 20 bp, Artificial Sequence
  MKO10122808_B_Tpd52l2
  gRNA
gtctccaagcttcctgctga

SEQ ID NO: 122809 - DNA, 20 bp, Artificial Sequence
  MKO10122809_B_Tpd52
  gRNA
agcttgcgatagagtttcag

SEQ ID NO: 122810 - DNA, 20 bp, Artificial Sequence
  MKO10122810_B_Tpd52
  gRNA
tcctcttccgtcagcgcctc

SEQ ID NO: 122811 - DNA, 20 bp, Artificial Sequence
  MKO10122811_B_Tpd52
  gRNA
ctcagtcatcaccaaaaagc

SEQ ID NO: 122812 - DNA, 20 bp, Artificial Sequence
  MKO10122812_B_Tpgs1
  gRNA
cgatcggccaccgcttgacc

SEQ ID NO: 122813 - DNA, 20 bp, Artificial Sequence
  MKO10122813_B_Tpgs1
  gRNA
ctgtccgggaaattggccgc

SEQ ID NO: 122814 - DNA, 20 bp, Artificial Sequence
  MKO10122814_B_Tpgs1
  gRNA
ctcgaagtagtgcgccaaga

SEQ ID NO: 122815 - DNA, 20 bp, Artificial Sequence
  MKO10122815_B_Tpgs2
  gRNA
cttcttgagtatcgtcctct

SEQ ID NO: 122816 - DNA, 20 bp, Artificial Sequence
  MKO10122816_B_Tpgs2
  gRNA
agcgtcatatgatttcttca

SEQ ID NO: 122817 - DNA, 20 bp, Artificial Sequence
  MKO10122817_B_Tpgs2
  gRNA
ctagaggacgatactcaaga

SEQ ID NO: 122818 - DNA, 20 bp, Artificial Sequence
  MKO10122818_B_Tph1
  gRNA
tctacccgacccacgcctgc

SEQ ID NO: 122819 - DNA, 20 bp, Artificial Sequence
  MKO10122819_B_Tph1
  gRNA
ttcttccgtgaattcaatct

SEQ ID NO: 122820 - DNA, 20 bp, Artificial Sequence
  MKO10122820_B_Tph1
  gRNA
cagttatggagactgtccct

SEQ ID NO: 122821 - DNA, 20 bp, Artificial Sequence
  MKO10122821_B_Tph2
  gRNA
gaaagcacttagactattcc

SEQ ID NO: 122822 - DNA, 20 bp, Artificial Sequence
  MKO10122822_B_Tph2
  gRNA
aggacaatgtctatcgacag

SEQ ID NO: 122823 - DNA, 20 bp, Artificial Sequence
  MKO10122823_B_Tph2
  gRNA
tggatggtcggcatcaagct

SEQ ID NO: 122824 - DNA, 20 bp, Artificial Sequence
  MKO10122824_B_Tpi1
  gRNA
cgactttgccagacagaagc

SEQ ID NO: 122825 - DNA, 20 bp, Artificial Sequence
  MKO10122825_B_Tpi1
  gRNA
tcctggcctatgaacctgtg

SEQ ID NO: 122826 - DNA, 20 bp, Artificial Sequence
  MKO10122826_B_Tpi1
  gRNA
ccacagataatgtgaaagac

SEQ ID NO: 122827 - DNA, 20 bp, Artificial Sequence
  MKO10122827_B_Tpk1
  gRNA
agtgtcttcaagtgctccaa

SEQ ID NO: 122828 - DNA, 20 bp, Artificial Sequence
  MKO10122828_B_Tpk1
  gRNA
cacttatatgatctcactga

SEQ ID NO: 122829 - DNA, 20 bp, Artificial Sequence
  MKO10122829_B_Tpk1
  gRNA
aaggctgattaagaaccaca

SEQ ID NO: 122830 - DNA, 20 bp, Artificial Sequence
  MKO10122830_B_Tpm1
  gRNA
tctgaacagacgcatccagc

SEQ ID NO: 122831 - DNA, 20 bp, Artificial Sequence
  MKO10122831_B_Tpm1
  gRNA
gactgacctcttcatacttc

SEQ ID NO: 122832 - DNA, 20 bp, Artificial Sequence
  MKO10122832_B_Tpm1
  gRNA
ataattacagtactctcaga

SEQ ID NO: 122833 - DNA, 20 bp, Artificial Sequence
  MKO10122833_B_Tpm2
  gRNA
ggactcagaccgcaaatatg

SEQ ID NO: 122834 - DNA, 20 bp, Artificial Sequence
  MKO10122834_B_Tpm2
  gRNA
ccggcacctcctcatatttg

SEQ ID NO: 122835 - DNA, 20 bp, Artificial Sequence
  MKO10122835_B_Tpm2
  gRNA
agcgctccagctccccttcc

SEQ ID NO: 122836 - DNA, 20 bp, Artificial Sequence
  MKO10122836_B_Tpm3
  gRNA
ttgattgaaggctgaagctg

SEQ ID NO: 122837 - DNA, 20 bp, Artificial Sequence
  MKO10122837_B_Tpm3
  gRNA
ctccagcttctgcaaagcag

SEQ ID NO: 122838 - DNA, 20 bp, Artificial Sequence
  MKO10122838_B_Tpm3
  gRNA
cacctcttcatacttcctat

SEQ ID NO: 122839 - DNA, 20 bp, Artificial Sequence
  MKO10122839_B_Tpm4
  gRNA
gtgcagaaagtgtggtgacc

SEQ ID NO: 122840 - DNA, 20 bp, Artificial Sequence
  MKO10122840_B_Tpm4
  gRNA
ggcttcgtcagtgatgtgct

SEQ ID NO: 122841 - DNA, 20 bp, Artificial Sequence
  MKO10122841_B_Tpm4
  gRNA
caaccgccgcatccaactgc

SEQ ID NO: 122842 - DNA, 20 bp, Artificial Sequence
  MKO10122842_B_Tpmt
  gRNA
ggcgagcggttcttctgtgt

SEQ ID NO: 122843 - DNA, 20 bp, Artificial Sequence
  MKO10122843_B_Tpmt
  gRNA
caggctgttgaagaagcatt

SEQ ID NO: 122844 - DNA, 20 bp, Artificial Sequence
  MKO10122844_B_Tpmt
  gRNA
gcagcatatttgatcttcct

SEQ ID NO: 122845 - DNA, 20 bp, Artificial Sequence
  MKO10122845_B_Tpo
  gRNA
aatagccccactggtggact

SEQ ID NO: 122846 - DNA, 20 bp, Artificial Sequence
  MKO10122846_B_Tpo
  gRNA
aagccgtggtataagaaatt

SEQ ID NO: 122847 - DNA, 20 bp, Artificial Sequence
  MKO10122847_B_Tpo
  gRNA
tcatggtgttgtagactgca

SEQ ID NO: 122848 - DNA, 20 bp, Artificial Sequence
  MKO10122848_B_Tpp1
  gRNA
gctgagtttcatcgctatgt

SEQ ID NO: 122849 - DNA, 20 bp, Artificial Sequence
  MKO10122849_B_Tpp1
  gRNA
tggtcactgaatcgcagttc

SEQ ID NO: 122850 - DNA, 20 bp, Artificial Sequence
  MKO10122850_B_Tpp1
  gRNA
tgcaggaaagtacctaaccc

SEQ ID NO: 122851 - DNA, 20 bp, Artificial Sequence
  MKO10122851_B_Tpp2
  gRNA
tggttatgacttctatccaa

SEQ ID NO: 122852 - DNA, 20 bp, Artificial Sequence
  MKO10122852_B_Tpp2
  gRNA
gaatttgatattgccaacaa

SEQ ID NO: 122853 - DNA, 20 bp, Artificial Sequence
  MKO10122853_B_Tpp2
  gRNA
acctacagattcctgcaaac

SEQ ID NO: 122854 - DNA, 20 bp, Artificial Sequence
  MKO10122854_B_Tppp2
  gRNA
cacgtagcctgagttgtcag

SEQ ID NO: 122855 - DNA, 20 bp, Artificial Sequence
  MKO10122855_B_Tppp2
  gRNA
ttccatcgattcgctgtctt

SEQ ID NO: 122856 - DNA, 20 bp, Artificial Sequence
  MKO10122856_B_Tppp2
  gRNA
ctacgtgagtggctacaagg

SEQ ID NO: 122857 - DNA, 20 bp, Artificial Sequence
  MKO10122857_B_Tppp3
  gRNA
gttccttgcccgctatcagc

SEQ ID NO: 122858 - DNA, 20 bp, Artificial Sequence
  MKO10122858_B_Tppp3
  gRNA
acttacggtgacgccaatgt

SEQ ID NO: 122859 - DNA, 20 bp, Artificial Sequence
  MKO10122859_B_Tppp3
  gRNA
gtgagtgcctacaaaaacgc

SEQ ID NO: 122860 - DNA, 20 bp, Artificial Sequence
  MKO10122860_B_Tppp
  gRNA
accgtgacgccagagatgac

SEQ ID NO: 122861 - DNA, 20 bp, Artificial Sequence
  MKO10122861_B_Tppp
  gRNA
gtctgtgagccgtgacaccg

SEQ ID NO: 122862 - DNA, 20 bp, Artificial Sequence
  MKO10122862_B_Tppp
  gRNA
cttatccttgaaccgcttct

SEQ ID NO: 122863 - DNA, 20 bp, Artificial Sequence
  MKO10122863_B_Tpra1
  gRNA
agaagcgggtgatttcccac

SEQ ID NO: 122864 - DNA, 20 bp, Artificial Sequence
  MKO10122864_B_Tpra1
  gRNA
tgagctgagtgtgatcatcc

SEQ ID NO: 122865 - DNA, 20 bp, Artificial Sequence
  MKO10122865_B_Tpra1
  gRNA
tgctgcgacagttgctgaca

SEQ ID NO: 122866 - DNA, 20 bp, Artificial Sequence
  MKO10122866_B_Tprgl
  gRNA
ggcgaataccgtgctggtgc

SEQ ID NO: 122867 - DNA, 20 bp, Artificial Sequence
  MKO10122867_B_Tprgl
  gRNA
gctccttctcgttgttccag

SEQ ID NO: 122868 - DNA, 20 bp, Artificial Sequence
  MKO10122868_B_Tprgl
  gRNA
ttctcgtccatgccagccat

SEQ ID NO: 122869 - DNA, 20 bp, Artificial Sequence
  MKO10122869_B_Tprg
  gRNA
gctcctacaggattgatcac

SEQ ID NO: 122870 - DNA, 20 bp, Artificial Sequence
  MKO10122870_B_Tprg
  gRNA
ggtggtctctactgtctcgt

SEQ ID NO: 122871 - DNA, 20 bp, Artificial Sequence
  MKO10122871_B_Tprg
  gRNA
ggccacatagcacagacttc

SEQ ID NO: 122872 - DNA, 20 bp, Artificial Sequence
  MKO10122872_B_Tprkb
  gRNA
gctgccacaagtatctgaaa

SEQ ID NO: 122873 - DNA, 20 bp, Artificial Sequence
  MKO10122873_B_Tprkb
  gRNA
accatcaatagatccttcca

SEQ ID NO: 122874 - DNA, 20 bp, Artificial Sequence
  MKO10122874_B_Tprkb
  gRNA
gactttccaaaggcacctgc

SEQ ID NO: 122875 - DNA, 20 bp, Artificial Sequence
  MKO10122875_B_Tprn
  gRNA
gctcgctgcggaagtccgag

SEQ ID NO: 122876 - DNA, 20 bp, Artificial Sequence
  MKO10122876_B_Tprn
  gRNA
atgcaggctcttgtcattga

SEQ ID NO: 122877 - DNA, 20 bp, Artificial Sequence
  MKO10122877_B_Tprn
  gRNA
tggcttaccatgacctcctt

SEQ ID NO: 122878 - DNA, 20 bp, Artificial Sequence
  MKO10122878_B_Tpr
  gRNA
gcctcaagttctgacactcc

SEQ ID NO: 122879 - DNA, 20 bp, Artificial Sequence
  MKO10122879_B_Tpr
  gRNA
caggaagttgaatatttaac

SEQ ID NO: 122880 - DNA, 20 bp, Artificial Sequence
  MKO10122880_B_Tpr
  gRNA
agaggcttgtcactgaaacc

SEQ ID NO: 122881 - DNA, 20 bp, Artificial Sequence
  MKO10122881_B_Tpsab1
  gRNA
agtcggggtgtgtgatgatc

SEQ ID NO: 122882 - DNA, 20 bp, Artificial Sequence
  MKO10122882_B_Tpsab1
  gRNA
tgcgtgccaatgacacctac

SEQ ID NO: 122883 - DNA, 20 bp, Artificial Sequence
  MKO10122883_B_Tpsab1
  gRNA
ggtccagctatgacacgaga

SEQ ID NO: 122884 - DNA, 20 bp, Artificial Sequence
  MKO10122884_B_Tpsb2
  gRNA
gaaaatcatctcccgtgtag

SEQ ID NO: 122885 - DNA, 20 bp, Artificial Sequence
  MKO10122885_B_Tpsb2
  gRNA
gtcttcttcagggcgattca

SEQ ID NO: 122886 - DNA, 20 bp, Artificial Sequence
  MKO10122886_B_Tpsb2
  gRNA
tggggcgacattgataatga

SEQ ID NO: 122887 - DNA, 20 bp, Artificial Sequence
  MKO10122887_B_Tpsg1
  gRNA
gtaacccgggcatagacgcc

SEQ ID NO: 122888 - DNA, 20 bp, Artificial Sequence
  MKO10122888_B_Tpsg1
  gRNA
ccccgggcgcatagcatgtc

SEQ ID NO: 122889 - DNA, 20 bp, Artificial Sequence
  MKO10122889_B_Tpsg1
  gRNA
tgtgaactcgtctgattatc

SEQ ID NO: 122890 - DNA, 20 bp, Artificial Sequence
  MKO10122890_B_Tpst1
  gRNA
gggcgctatcgaagtgggtt

SEQ ID NO: 122891 - DNA, 20 bp, Artificial Sequence
  MKO10122891_B_Tpst1
  gRNA
ccttcaacagacggagcaag

SEQ ID NO: 122892 - DNA, 20 bp, Artificial Sequence
  MKO10122892_B_Tpst1
  gRNA
ctttctgaaagaaaaacccc

SEQ ID NO: 122893 - DNA, 20 bp, Artificial Sequence
  MKO10122893_B_Tpst2
  gRNA
tatgcgaatccacccaacta

SEQ ID NO: 122894 - DNA, 20 bp, Artificial Sequence
  MKO10122894_B_Tpst2
  gRNA
aaaacgccagccaatctgaa

SEQ ID NO: 122895 - DNA, 20 bp, Artificial Sequence
  MKO10122895_B_Tpst2
  gRNA
ctggaaatcacgaacttcct

SEQ ID NO: 122896 - DNA, 20 bp, Artificial Sequence
  MKO10122896_B_Tpt1
  gRNA
tctccgacatctacaagatc

SEQ ID NO: 122897 - DNA, 20 bp, Artificial Sequence
  MKO10122897_B_Tpt1
  gRNA
gttcatgacaatgtcaacac

SEQ ID NO: 122898 - DNA, 20 bp, Artificial Sequence
  MKO10122898_B_Tpt1
  gRNA
ggtagttattgaaattagca

SEQ ID NO: 122899 - DNA, 20 bp, Artificial Sequence
  MKO10122899_B_Tpte
  gRNA
tttaactcactttgtactga

SEQ ID NO: 122900 - DNA, 20 bp, Artificial Sequence
  MKO10122900_B_Tpte
  gRNA
tacatcttgtaaatatttgc

SEQ ID NO: 122901 - DNA, 20 bp, Artificial Sequence
  MKO10122901_B_Tpte
  gRNA
cagataacactaatcactaa

SEQ ID NO: 122902 - DNA, 20 bp, Artificial Sequence
  MKO10122902_B_Tpx2
  gRNA
agccaagagatgtgttgctc

SEQ ID NO: 122903 - DNA, 20 bp, Artificial Sequence
  MKO10122903_B_Tpx2
  gRNA
atacagctctcttagcatcc

SEQ ID NO: 122904 - DNA, 20 bp, Artificial Sequence
  MKO10122904_B_Tpx2
  gRNA
ggccggagcaacacatctct

SEQ ID NO: 122905 - DNA, 20 bp, Artificial Sequence
  MKO10122905_B_Tra2a
  gRNA
ggtctgcccatgtaaatgcc

SEQ ID NO: 122906 - DNA, 20 bp, Artificial Sequence
  MKO10122906_B_Tra2a
  gRNA
gaatgtttggacacccgtga

SEQ ID NO: 122907 - DNA, 20 bp, Artificial Sequence
  MKO10122907_B_Tra2a
  gRNA
actacattaacaccactcag

SEQ ID NO: 122908 - DNA, 20 bp, Artificial Sequence
  MKO10122908_B_Tra2b
  gRNA
tcccgttctgcttcccgaag

SEQ ID NO: 122909 - DNA, 20 bp, Artificial Sequence
  MKO10122909_B_Tra2b
  gRNA
gatccagaagaagttctaga

SEQ ID NO: 122910 - DNA, 20 bp, Artificial Sequence
  MKO10122910_B_Tra2b
  gRNA
atgacgccttcgagtagaca

SEQ ID NO: 122911 - DNA, 20 bp, Artificial Sequence
  MKO10122911_B_Trabd2b
  gRNA
cgcagttgtagtgtttgatg

SEQ ID NO: 122912 - DNA, 20 bp, Artificial Sequence
  MKO10122912_B_Trabd2b
  gRNA
tgtcatcgatgtcctaagac

SEQ ID NO: 122913 - DNA, 20 bp, Artificial Sequence
  MKO10122913_B_Trabd2b
  gRNA
tcttgtagatgagctcctgc

SEQ ID NO: 122914 - DNA, 20 bp, Artificial Sequence
  MKO10122914_B_Trabd
  gRNA
gcctccctgaactcgccacc

SEQ ID NO: 122915 - DNA, 20 bp, Artificial Sequence
  MKO10122915_B_Trabd
  gRNA
gcaaccggatgtggtcgtgg

SEQ ID NO: 122916 - DNA, 20 bp, Artificial Sequence
  MKO10122916_B_Trabd
  gRNA
acgtacagtgacccagctag

SEQ ID NO: 122917 - DNA, 20 bp, Artificial Sequence
  MKO10122917_B_Tradd
  gRNA
tcgtgcagcccgaccggctc

SEQ ID NO: 122918 - DNA, 20 bp, Artificial Sequence
  MKO10122918_B_Tradd
  gRNA
cgcgcccgcagaaccgcaac

SEQ ID NO: 122919 - DNA, 20 bp, Artificial Sequence
  MKO10122919_B_Tradd
  gRNA
cccggtttcctctccgaccg

SEQ ID NO: 122920 - DNA, 20 bp, Artificial Sequence
  MKO10122920_B_Traf1
  gRNA
tccggccacacactgactcg

SEQ ID NO: 122921 - DNA, 20 bp, Artificial Sequence
  MKO10122921_B_Traf1
  gRNA
gaaatcatgtgcccctttgc

SEQ ID NO: 122922 - DNA, 20 bp, Artificial Sequence
  MKO10122922_B_Traf1
  gRNA
ggaacagccaacacctgcaa

SEQ ID NO: 122923 - DNA, 20 bp, Artificial Sequence
  MKO10122923_B_Traf2
  gRNA
ccttctcgctgaggcggacc

SEQ ID NO: 122924 - DNA, 20 bp, Artificial Sequence
  MKO10122924_B_Traf2
  gRNA
ggggaccttgaaagaatacg

SEQ ID NO: 122925 - DNA, 20 bp, Artificial Sequence
  MKO10122925_B_Traf2
  gRNA
aagtttcccttaacctgtga

SEQ ID NO: 122926 - DNA, 20 bp, Artificial Sequence
  MKO10122926_B_Traf3ip1
  gRNA
tgcccggccacaattctagc

SEQ ID NO: 122927 - DNA, 20 bp, Artificial Sequence
  MKO10122927_B_Traf3ip1
  gRNA
aatgagctgcttcaattgat

SEQ ID NO: 122928 - DNA, 20 bp, Artificial Sequence
  MKO10122928_B_Traf3ip1
  gRNA
tggcaggtgattaggataac

SEQ ID NO: 122929 - DNA, 20 bp, Artificial Sequence
  MKO10122929_B_Traf3ip2
  gRNA
tacccatacctcgggagcct

SEQ ID NO: 122930 - DNA, 20 bp, Artificial Sequence
  MKO10122930_B_Traf3ip2
  gRNA
ggggtattgatatcattaaa

SEQ ID NO: 122931 - DNA, 20 bp, Artificial Sequence
  MKO10122931_B_Traf3ip2
  gRNA
aggcccacgccctgtgcaga

SEQ ID NO: 122932 - DNA, 20 bp, Artificial Sequence
  MKO10122932_B_Traf3ip3
  gRNA
tggagttgctgtcctagaca

SEQ ID NO: 122933 - DNA, 20 bp, Artificial Sequence
  MKO10122933_B_Traf3ip3
  gRNA
tcaccccggtgctgtctgtg

SEQ ID NO: 122934 - DNA, 20 bp, Artificial Sequence
  MKO10122934_B_Traf3ip3
  gRNA
tctctcaggcactcagacaa

SEQ ID NO: 122935 - DNA, 20 bp, Artificial Sequence
  MKO10122935_B_Traf3
  gRNA
acgcacctgcagtttgatca

SEQ ID NO: 122936 - DNA, 20 bp, Artificial Sequence
  MKO10122936_B_Traf3
  gRNA
cattccgacagtagacctga

SEQ ID NO: 122937 - DNA, 20 bp, Artificial Sequence
  MKO10122937_B_Traf3
  gRNA
ttgtgcggagcagctgactc

SEQ ID NO: 122938 - DNA, 20 bp, Artificial Sequence
  MKO10122938_B_Traf4
  gRNA
cgggccacttcgtcatctac

SEQ ID NO: 122939 - DNA, 20 bp, Artificial Sequence
  MKO10122939_B_Traf4
  gRNA
atttgtttatgacaccatcc

SEQ ID NO: 122940 - DNA, 20 bp, Artificial Sequence
  MKO10122940_B_Traf4
  gRNA
ggcactcagacgtggcatgc

SEQ ID NO: 122941 - DNA, 20 bp, Artificial Sequence
  MKO10122941_B_Traf5
  gRNA
cgacaccgagtaccagtttg

SEQ ID NO: 122942 - DNA, 20 bp, Artificial Sequence
  MKO10122942_B_Traf5
  gRNA
ggaaccggcagtatgcgctc

SEQ ID NO: 122943 - DNA, 20 bp, Artificial Sequence
  MKO10122943_B_Traf5
  gRNA
gaatcgtcccagaataatcc

SEQ ID NO: 122944 - DNA, 20 bp, Artificial Sequence
  MKO10122944_B_Traf6
  gRNA
gatgcctaatcattatgatc

SEQ ID NO: 122945 - DNA, 20 bp, Artificial Sequence
  MKO10122945_B_Traf6
  gRNA
ctctcgctttgcaaaattgt

SEQ ID NO: 122946 - DNA, 20 bp, Artificial Sequence
  MKO10122946_B_Traf6
  gRNA
cagtccagatcataatgatt

SEQ ID NO: 122947 - DNA, 20 bp, Artificial Sequence
  MKO10122947_B_Traf7
  gRNA
cgaataggcaagggtgctag

SEQ ID NO: 122948 - DNA, 20 bp, Artificial Sequence
  MKO10122948_B_Traf7
  gRNA
atgccgtcctcctcatcccg

SEQ ID NO: 122949 - DNA, 20 bp, Artificial Sequence
  MKO10122949_B_Traf7
  gRNA
cagctttaccgagggctgct

SEQ ID NO: 122950 - DNA, 20 bp, Artificial Sequence
  MKO10122950_B_Trafd1
  gRNA
gtgaatgtccatgtcagatt

SEQ ID NO: 122951 - DNA, 20 bp, Artificial Sequence
  MKO10122951_B_Trafd1
  gRNA
caacttcttgttgcatttac

SEQ ID NO: 122952 - DNA, 20 bp, Artificial Sequence
  MKO10122952_B_Trafd1
  gRNA
accgttccccaaatctgaca

SEQ ID NO: 122953 - DNA, 20 bp, Artificial Sequence
  MKO10122953_B_Traip
  gRNA
cggtagcattgcgttcttcc

SEQ ID NO: 122954 - DNA, 20 bp, Artificial Sequence
  MKO10122954_B_Traip
  gRNA
cttggatgcagaattcttaa

SEQ ID NO: 122955 - DNA, 20 bp, Artificial Sequence
  MKO10122955_B_Traip
  gRNA
aaagctcagctttcccagaa

SEQ ID NO: 122956 - DNA, 20 bp, Artificial Sequence
  MKO10122956_B_Trak1
  gRNA
attctacaccagtgccgctg

SEQ ID NO: 122957 - DNA, 20 bp, Artificial Sequence
  MKO10122957_B_Trak1
  gRNA
gacttacggggttgagcaga

SEQ ID NO: 122958 - DNA, 20 bp, Artificial Sequence
  MKO10122958_B_Trak1
  gRNA
ttcatagaaagagcgggatt

SEQ ID NO: 122959 - DNA, 20 bp, Artificial Sequence
  MKO10122959_B_Trak2
  gRNA
cgaactgcaccttggatcgt

SEQ ID NO: 122960 - DNA, 20 bp, Artificial Sequence
  MKO10122960_B_Trak2
  gRNA
agcggaacgtctcttcagca

SEQ ID NO: 122961 - DNA, 20 bp, Artificial Sequence
  MKO10122961_B_Trak2
  gRNA
ttaaaagagcttgcccaatt

SEQ ID NO: 122962 - DNA, 20 bp, Artificial Sequence
  MKO10122962_B_Tram1l1
  gRNA
ggtgttgagccacgaattca

SEQ ID NO: 122963 - DNA, 20 bp, Artificial Sequence
  MKO10122963_B_Tram1l1
  gRNA
gtcctcgagttgcagtatcc

SEQ ID NO: 122964 - DNA, 20 bp, Artificial Sequence
  MKO10122964_B_Tram1l1
  gRNA
tacagggtcctggacccgga

SEQ ID NO: 122965 - DNA, 20 bp, Artificial Sequence
  MKO10122965_B_Tram1
  gRNA
tctcagacccaactatcctg

SEQ ID NO: 122966 - DNA, 20 bp, Artificial Sequence
  MKO10122966_B_Tram1
  gRNA
taggctctccacaggatagt

SEQ ID NO: 122967 - DNA, 20 bp, Artificial Sequence
  MKO10122967_B_Tram1
  gRNA
aacacctacctgttgcaggg

SEQ ID NO: 122968 - DNA, 20 bp, Artificial Sequence
  MKO10122968_B_Tram2
  gRNA
gatgacgacgtagaacaaga

SEQ ID NO: 122969 - DNA, 20 bp, Artificial Sequence
  MKO10122969_B_Tram2
  gRNA
actcacgagaggtacacatg

SEQ ID NO: 122970 - DNA, 20 bp, Artificial Sequence
  MKO10122970_B_Tram2
  gRNA
cacagcaagttcaatgaatc

SEQ ID NO: 122971 - DNA, 20 bp, Artificial Sequence
  MKO10122971_B_Trank1
  gRNA
aacatccgagcagcttcata

SEQ ID NO: 122972 - DNA, 20 bp, Artificial Sequence
  MKO10122972_B_Trank1
  gRNA
agtgaaaatatgatcaaagc

SEQ ID NO: 122973 - DNA, 20 bp, Artificial Sequence
  MKO10122973_B_Trank1
  gRNA
gcaatatgtaatacagaagt

SEQ ID NO: 122974 - DNA, 20 bp, Artificial Sequence
  MKO10122974_B_Trap1a
  gRNA
gtctataccagtgaacccta

SEQ ID NO: 122975 - DNA, 20 bp, Artificial Sequence
  MKO10122975_B_Trap1a
  gRNA
gttcatagacgccctttatg

SEQ ID NO: 122976 - DNA, 20 bp, Artificial Sequence
  MKO10122976_B_Trap1a
  gRNA
gtcttcatcctcatcgacag

SEQ ID NO: 122977 - DNA, 20 bp, Artificial Sequence
  MKO10122977_B_Trap1
  gRNA
aggacagttatacagcacac

SEQ ID NO: 122978 - DNA, 20 bp, Artificial Sequence
  MKO10122978_B_Trap1
  gRNA
cccacacaaagtctggcttc

SEQ ID NO: 122979 - DNA, 20 bp, Artificial Sequence
  MKO10122979_B_Trap1
  gRNA
ctccaatgccagtgatgcct

SEQ ID NO: 122980 - DNA, 20 bp, Artificial Sequence
  MKO10122980_B_Trappc10
  gRNA
atccaactttgttcagttca

SEQ ID NO: 122981 - DNA, 20 bp, Artificial Sequence
  MKO10122981_B_Trappc10
  gRNA
agctccaaaaatgattcacc

SEQ ID NO: 122982 - DNA, 20 bp, Artificial Sequence
  MKO10122982_B_Trappc10
  gRNA
ctgtaccttctccattccat

SEQ ID NO: 122983 - DNA, 20 bp, Artificial Sequence
  MKO10122983_B_Trappc11
  gRNA
tctgatctccgtgtagtaat

SEQ ID NO: 122984 - DNA, 20 bp, Artificial Sequence
  MKO10122984_B_Trappc11
  gRNA
accttataatgtagcccaca

SEQ ID NO: 122985 - DNA, 20 bp, Artificial Sequence
  MKO10122985_B_Trappc11
  gRNA
gagctcacacacattgcata

SEQ ID NO: 122986 - DNA, 20 bp, Artificial Sequence
  MKO10122986_B_Trappc12
  gRNA
agacttgatgcttcgcttcc

SEQ ID NO: 122987 - DNA, 20 bp, Artificial Sequence
  MKO10122987_B_Trappc12
  gRNA
ttggcgctgctggtgaagtt

SEQ ID NO: 122988 - DNA, 20 bp, Artificial Sequence
  MKO10122988_B_Trappc12
  gRNA
ctgtgagcaggcgtccacac

SEQ ID NO: 122989 - DNA, 20 bp, Artificial Sequence
  MKO10122989_B_Trappc13
  gRNA
attgtgaacactgatataac

SEQ ID NO: 122990 - DNA, 20 bp, Artificial Sequence
  MKO10122990_B_Trappc13
  gRNA
ggaagtgaatccccccaaac

SEQ ID NO: 122991 - DNA, 20 bp, Artificial Sequence
  MKO10122991_B_Trappc13
  gRNA
tcctgtaacgtgtgaagaga

SEQ ID NO: 122992 - DNA, 20 bp, Artificial Sequence
  MKO10122992_B_Trappc1
  gRNA
aaccaccgtacatgtctagc

SEQ ID NO: 122993 - DNA, 20 bp, Artificial Sequence
  MKO10122993_B_Trappc1
  gRNA
aaagtgagctctttcgatcc

SEQ ID NO: 122994 - DNA, 20 bp, Artificial Sequence
  MKO10122994_B_Trappc1
  gRNA
tgtgtctacactacagcgag

SEQ ID NO: 122995 - DNA, 20 bp, Artificial Sequence
  MKO10122995_B_Trappc2l
  gRNA
ggtcccaccttgactggatg

SEQ ID NO: 122996 - DNA, 20 bp, Artificial Sequence
  MKO10122996_B_Trappc2l
  gRNA
tggatacaccttgtagtcct

SEQ ID NO: 122997 - DNA, 20 bp, Artificial Sequence
  MKO10122997_B_Trappc2l
  gRNA
gaccatgacaaatttcacct

SEQ ID NO: 122998 - DNA, 20 bp, Artificial Sequence
  MKO10122998_B_Trappc2
  gRNA
actttggattctgctttccc

SEQ ID NO: 122999 - DNA, 20 bp, Artificial Sequence
  MKO10122999_B_Trappc2
  gRNA
agcttctacttcgtaattgt

SEQ ID NO: 123000 - DNA, 20 bp, Artificial Sequence
  MKO10123000_B_Trappc2
  gRNA
ttattatgcttcatgatgtg

SEQ ID NO: 123001 - DNA, 20 bp, Artificial Sequence
  MKO10123001_B_Trappc3l
  gRNA
aattatcaacataatcgccc

SEQ ID NO: 123002 - DNA, 20 bp, Artificial Sequence
  MKO10123002_B_Trappc3l
  gRNA
tctggttgcccagctatgca

SEQ ID NO: 123003 - DNA, 20 bp, Artificial Sequence
  MKO10123003_B_Trappc3l
  gRNA
ttcttgcaagacagactaaa

SEQ ID NO: 123004 - DNA, 20 bp, Artificial Sequence
  MKO10123004_B_Trappc3
  gRNA
gagatggcgtgacagaaatc

SEQ ID NO: 123005 - DNA, 20 bp, Artificial Sequence
  MKO10123005_B_Trappc3
  gRNA
cttccaaggggctacaacat

SEQ ID NO: 123006 - DNA, 20 bp, Artificial Sequence
  MKO10123006_B_Trappc3
  gRNA
tggagtaaatgagggccgag

SEQ ID NO: 123007 - DNA, 20 bp, Artificial Sequence
  MKO10123007_B_Trappc4
  gRNA
atgcctgaactgccctgttc

SEQ ID NO: 123008 - DNA, 20 bp, Artificial Sequence
  MKO10123008_B_Trappc4
  gRNA
ccaggttcatcctatgaccc

SEQ ID NO: 123009 - DNA, 20 bp, Artificial Sequence
  MKO10123009_B_Trappc4
  gRNA
caagaatccattctactcct

SEQ ID NO: 123010 - DNA, 20 bp, Artificial Sequence
  MKO10123010_B_Trappc5
  gRNA
cgcccgagtcctagatgccc

SEQ ID NO: 123011 - DNA, 20 bp, Artificial Sequence
  MKO10123011_B_Trappc5
  gRNA
gattgcccgagatcgggccc

SEQ ID NO: 123012 - DNA, 20 bp, Artificial Sequence
  MKO10123012_B_Trappc5
  gRNA
ggactcgggcgcccacctgt

SEQ ID NO: 123013 - DNA, 20 bp, Artificial Sequence
  MKO10123013_B_Trappc6a
  gRNA
ctcggggccacagtatctag

SEQ ID NO: 123014 - DNA, 20 bp, Artificial Sequence
  MKO10123014_B_Trappc6a
  gRNA
ggcatctaactcctccctaa

SEQ ID NO: 123015 - DNA, 20 bp, Artificial Sequence
  MKO10123015_B_Trappc6a
  gRNA
ccgagcccatggtgacaagg

SEQ ID NO: 123016 - DNA, 20 bp, Artificial Sequence
  MKO10123016_B_Trappc6b
  gRNA
ctatcagtccttgccccact

SEQ ID NO: 123017 - DNA, 20 bp, Artificial Sequence
  MKO10123017_B_Trappc6b
  gRNA
tgttactaagctggagagca

SEQ ID NO: 123018 - DNA, 20 bp, Artificial Sequence
  MKO10123018_B_Trappc6b
  gRNA
tagtatctagcattcacatg

SEQ ID NO: 123019 - DNA, 20 bp, Artificial Sequence
  MKO10123019_B_Trappc8
  gRNA
gtggttataaggtatgctgg

SEQ ID NO: 123020 - DNA, 20 bp, Artificial Sequence
  MKO10123020_B_Trappc8
  gRNA
gattatgaccttaacataag

SEQ ID NO: 123021 - DNA, 20 bp, Artificial Sequence
  MKO10123021_B_Trappc8
  gRNA
agaaactcatgatctgatgc

SEQ ID NO: 123022 - DNA, 20 bp, Artificial Sequence
  MKO10123022_B_Trappc9
  gRNA
tgccacgcttctgaatcgct

SEQ ID NO: 123023 - DNA, 20 bp, Artificial Sequence
  MKO10123023_B_Trappc9
  gRNA
gtcaggatttatgccgttgg

SEQ ID NO: 123024 - DNA, 20 bp, Artificial Sequence
  MKO10123024_B_Trappc9
  gRNA
aagccgagcacaacccctcc

SEQ ID NO: 123025 - DNA, 20 bp, Artificial Sequence
  MKO10123025_B_Trat1
  gRNA
acttctagccttcttgggct

SEQ ID NO: 123026 - DNA, 20 bp, Artificial Sequence
  MKO10123026_B_Trat1
  gRNA
gtctctgcttctctacatag

SEQ ID NO: 123027 - DNA, 20 bp, Artificial Sequence
  MKO10123027_B_Trat1
  gRNA
gttgaagatgctccaattta

SEQ ID NO: 123028 - DNA, 20 bp, Artificial Sequence
  MKO10123028_B_Trcg1
  gRNA
gcgctgacattcctgaagtt

SEQ ID NO: 123029 - DNA, 20 bp, Artificial Sequence
  MKO10123029_B_Trcg1
  gRNA
accgggaccaggattgaggc

SEQ ID NO: 123030 - DNA, 20 bp, Artificial Sequence
  MKO10123030_B_Trcg1
  gRNA
cagcatgactgaccttaccc

SEQ ID NO: 123031 - DNA, 20 bp, Artificial Sequence
  MKO10123031_B_Trdmt1
  gRNA
acacataccttgtgaatggc

SEQ ID NO: 123032 - DNA, 20 bp, Artificial Sequence
  MKO10123032_B_Trdmt1
  gRNA
ctccatgccagccattcaca

SEQ ID NO: 123033 - DNA, 20 bp, Artificial Sequence
  MKO10123033_B_Trdmt1
  gRNA
atattctagatattctccca

SEQ ID NO: 123034 - DNA, 20 bp, Artificial Sequence
  MKO10123034_B_Trdn
  gRNA
atctgagccaatcttggcaa

SEQ ID NO: 123035 - DNA, 20 bp, Artificial Sequence
  MKO10123035_B_Trdn
  gRNA
catagaaatacaccaagaaa

SEQ ID NO: 123036 - DNA, 20 bp, Artificial Sequence
  MKO10123036_B_Trdn
  gRNA
gaacctcccttaaaaagaaa

SEQ ID NO: 123037 - DNA, 20 bp, Artificial Sequence
  MKO10123037_B_Treh
  gRNA
tacagccagatctactgcca

SEQ ID NO: 123038 - DNA, 20 bp, Artificial Sequence
  MKO10123038_B_Treh
  gRNA
gctcctgcaccaagttcaga

SEQ ID NO: 123039 - DNA, 20 bp, Artificial Sequence
  MKO10123039_B_Treh
  gRNA
ccagagtcacttccagcccg

SEQ ID NO: 123040 - DNA, 20 bp, Artificial Sequence
  MKO10123040_B_Trem1
  gRNA
ctgtgcgtgttctttgtctc

SEQ ID NO: 123041 - DNA, 20 bp, Artificial Sequence
  MKO10123041_B_Trem1
  gRNA
cgctctgtcagccttgtaat

SEQ ID NO: 123042 - DNA, 20 bp, Artificial Sequence
  MKO10123042_B_Trem1
  gRNA
gatgactgaaatagtaacac

SEQ ID NO: 123043 - DNA, 20 bp, Artificial Sequence
  MKO10123043_B_Trem2
  gRNA
ctcgaaactcgatgactcct

SEQ ID NO: 123044 - DNA, 20 bp, Artificial Sequence
  MKO10123044_B_Trem2
  gRNA
ccttcctgaagaagcggaat

SEQ ID NO: 123045 - DNA, 20 bp, Artificial Sequence
  MKO10123045_B_Trem2
  gRNA
cagtccagccctctgaccac

SEQ ID NO: 123046 - DNA, 20 bp, Artificial Sequence
  MKO10123046_B_Trem3
  gRNA
gtgtggcttcatactaaaca

SEQ ID NO: 123047 - DNA, 20 bp, Artificial Sequence
  MKO10123047_B_Trem3
  gRNA
ggatgtcaccgctgctgcta

SEQ ID NO: 123048 - DNA, 20 bp, Artificial Sequence
  MKO10123048_B_Trem3
  gRNA
ttccaagacatccaaagtac

SEQ ID NO: 123049 - DNA, 20 bp, Artificial Sequence
  MKO10123049_B_Treml1
  gRNA
agcactcgcggaagggtcca

SEQ ID NO: 123050 - DNA, 20 bp, Artificial Sequence
  MKO10123050_B_Treml1
  gRNA
ctctcagtatccccctgatc

SEQ ID NO: 123051 - DNA, 20 bp, Artificial Sequence
  MKO10123051_B_Treml1
  gRNA
tgctgtgctcctgttggccc

SEQ ID NO: 123052 - DNA, 20 bp, Artificial Sequence
  MKO10123052_B_Treml2
  gRNA
taagttccggcggttcttgt

SEQ ID NO: 123053 - DNA, 20 bp, Artificial Sequence
  MKO10123053_B_Treml2
  gRNA
tctcttcttccaaaacccgt

SEQ ID NO: 123054 - DNA, 20 bp, Artificial Sequence
  MKO10123054_B_Treml2
  gRNA
gagggtctgaaatatggact

SEQ ID NO: 123055 - DNA, 20 bp, Artificial Sequence
  MKO10123055_B_Treml4
  gRNA
gtcagtggtctcctcgggag

SEQ ID NO: 123056 - DNA, 20 bp, Artificial Sequence
  MKO10123056_B_Treml4
  gRNA
gagcagttgtgagtacctcc

SEQ ID NO: 123057 - DNA, 20 bp, Artificial Sequence
  MKO10123057_B_Treml4
  gRNA
tctggactggtatggcctgg

SEQ ID NO: 123058 - DNA, 20 bp, Artificial Sequence
  MKO10123058_B_Trerf1
  gRNA
agaccgctggtgagcccttc

SEQ ID NO: 123059 - DNA, 20 bp, Artificial Sequence
  MKO10123059_B_Trerf1
  gRNA
gagagcccagtccggatccc

SEQ ID NO: 123060 - DNA, 20 bp, Artificial Sequence
  MKO10123060_B_Trerf1
  gRNA
ctttgatcataccttgattc

SEQ ID NO: 123061 - DNA, 20 bp, Artificial Sequence
  MKO10123061_B_Trex1
  gRNA
agtgcccagaccgccccgtg

SEQ ID NO: 123062 - DNA, 20 bp, Artificial Sequence
  MKO10123062_B_Trex1
  gRNA
ccactggaacaaccaaccta

SEQ ID NO: 123063 - DNA, 20 bp, Artificial Sequence
  MKO10123063_B_Trex1
  gRNA
gttcgtccacccactgcagt

SEQ ID NO: 123064 - DNA, 20 bp, Artificial Sequence
  MKO10123064_B_Trex2
  gRNA
accatcaggtggcacgtaca

SEQ ID NO: 123065 - DNA, 20 bp, Artificial Sequence
  MKO10123065_B_Trex2
  gRNA
actgcctgcattgcggggcc

SEQ ID NO: 123066 - DNA, 20 bp, Artificial Sequence
  MKO10123066_B_Trex2
  gRNA
gctcaatatgagcccagctg

SEQ ID NO: 123067 - DNA, 20 bp, Artificial Sequence
  MKO10123067_B_Trf
  gRNA
gcgcctacgtagccaaagaa

SEQ ID NO: 123068 - DNA, 20 bp, Artificial Sequence
  MKO10123068_B_Trf
  gRNA
cacagccacagcgtagtagt

SEQ ID NO: 123069 - DNA, 20 bp, Artificial Sequence
  MKO10123069_B_Trf
  gRNA
aagaccgtccttccgcctga

SEQ ID NO: 123070 - DNA, 20 bp, Artificial Sequence
  MKO10123070_B_Trhde
  gRNA
acttactacaaccccactct

SEQ ID NO: 123071 - DNA, 20 bp, Artificial Sequence
  MKO10123071_B_Trhde
  gRNA
taagcatccttatgctgcta

SEQ ID NO: 123072 - DNA, 20 bp, Artificial Sequence
  MKO10123072_B_Trhde
  gRNA
cagactacctctaccctgcc

SEQ ID NO: 123073 - DNA, 20 bp, Artificial Sequence
  MKO10123073_B_Trhr2
  gRNA
gtgaacgagtgagacattgc

SEQ ID NO: 123074 - DNA, 20 bp, Artificial Sequence
  MKO10123074_B_Trhr2
  gRNA
cccggaatttctgcgacatg

SEQ ID NO: 123075 - DNA, 20 bp, Artificial Sequence
  MKO10123075_B_Trhr2
  gRNA
tgtccgtgacaaccagcgcc

SEQ ID NO: 123076 - DNA, 20 bp, Artificial Sequence
  MKO10123076_B_Trhr
  gRNA
ttatgttgtgccaatgatcc

SEQ ID NO: 123077 - DNA, 20 bp, Artificial Sequence
  MKO10123077_B_Trhr
  gRNA
tacaaccactgcgagcatct

SEQ ID NO: 123078 - DNA, 20 bp, Artificial Sequence
  MKO10123078_B_Trhr
  gRNA
agaaatttcgtgcagccttc

SEQ ID NO: 123079 - DNA, 20 bp, Artificial Sequence
  MKO10123079_B_Trh
  gRNA
aagacgttgaagccgaagag

SEQ ID NO: 123080 - DNA, 20 bp, Artificial Sequence
  MKO10123080_B_Trh
  gRNA
ttcctcaagaatcgacgttc

SEQ ID NO: 123081 - DNA, 20 bp, Artificial Sequence
  MKO10123081_B_Trh
  gRNA
ccgacgtgccaaccaagaca

SEQ ID NO: 123082 - DNA, 20 bp, Artificial Sequence
  MKO10123082_B_Triap1
  gRNA
tgccatggcccatgaactcc

SEQ ID NO: 123083 - DNA, 20 bp, Artificial Sequence
  MKO10123083_B_Triap1
  gRNA
acgaccagtgcttcaaccgc

SEQ ID NO: 123084 - DNA, 20 bp, Artificial Sequence
  MKO10123084_B_Triap1
  gRNA
cgtttgaagaggtcggtgca

SEQ ID NO: 123085 - DNA, 20 bp, Artificial Sequence
  MKO10123085_B_Trib1
  gRNA
gaactgtccacggcggattt

SEQ ID NO: 123086 - DNA, 20 bp, Artificial Sequence
  MKO10123086_B_Trib1
  gRNA
cctatgtgcggagccgaaaa

SEQ ID NO: 123087 - DNA, 20 bp, Artificial Sequence
  MKO10123087_B_Trib1
  gRNA
cccccagcacgatggccgac

SEQ ID NO: 123088 - DNA, 20 bp, Artificial Sequence
  MKO10123088_B_Trib2
  gRNA
gagatcgcggaacaaaaccc

SEQ ID NO: 123089 - DNA, 20 bp, Artificial Sequence
  MKO10123089_B_Trib2
  gRNA
agataaatttccgcagcttg

SEQ ID NO: 123090 - DNA, 20 bp, Artificial Sequence
  MKO10123090_B_Trib2
  gRNA
gtgttctttgagcgaagcta

SEQ ID NO: 123091 - DNA, 20 bp, Artificial Sequence
  MKO10123091_B_Trib3
  gRNA
ctggggagtggtccgggctc

SEQ ID NO: 123092 - DNA, 20 bp, Artificial Sequence
  MKO10123092_B_Trib3
  gRNA
gaagatgcctgcgtgatgac

SEQ ID NO: 123093 - DNA, 20 bp, Artificial Sequence
  MKO10123093_B_Trib3
  gRNA
atctgatccagtcatcacgc

SEQ ID NO: 123094 - DNA, 20 bp, Artificial Sequence
  MKO10123094_B_Tril
  gRNA
tcttgcccaaaaaacggatc

SEQ ID NO: 123095 - DNA, 20 bp, Artificial Sequence
  MKO10123095_B_Tril
  gRNA
caccccctacctagtatgcg

SEQ ID NO: 123096 - DNA, 20 bp, Artificial Sequence
  MKO10123096_B_Tril
  gRNA
cgagaagctctcacgactag

SEQ ID NO: 123097 - DNA, 20 bp, Artificial Sequence
  MKO10123097_B_Trim10
  gRNA
atatcagaagcactctaata

SEQ ID NO: 123098 - DNA, 20 bp, Artificial Sequence
  MKO10123098_B_Trim10
  gRNA
gtcttcatctcctgccgcag

SEQ ID NO: 123099 - DNA, 20 bp, Artificial Sequence
  MKO10123099_B_Trim10
  gRNA
agaagtgtctcgtgtgtcta

SEQ ID NO: 123100 - DNA, 20 bp, Artificial Sequence
  MKO10123100_B_Trim11
  gRNA
gcacctacggaaacaaatgg

SEQ ID NO: 123101 - DNA, 20 bp, Artificial Sequence
  MKO10123101_B_Trim11
  gRNA
acccacctcggaacctccgc

SEQ ID NO: 123102 - DNA, 20 bp, Artificial Sequence
  MKO10123102_B_Trim11
  gRNA
cgcaatgctgttccaagccc

SEQ ID NO: 123103 - DNA, 20 bp, Artificial Sequence
  MKO10123103_B_Trim12a
  gRNA
tttcttacaggagcagctgc

SEQ ID NO: 123104 - DNA, 20 bp, Artificial Sequence
  MKO10123104_B_Trim12a
  gRNA
gctcactttcagactctgcc

SEQ ID NO: 123105 - DNA, 20 bp, Artificial Sequence
  MKO10123105_B_Trim12a
  gRNA
agaagcccaaagccatcgcc

SEQ ID NO: 123106 - DNA, 20 bp, Artificial Sequence
  MKO10123106_B_Trim12c
  gRNA
tttcttacaggagcagctgc

SEQ ID NO: 123107 - DNA, 20 bp, Artificial Sequence
  MKO10123107_B_Trim12c
  gRNA
gtgtggagaacatcataaaa

SEQ ID NO: 123108 - DNA, 20 bp, Artificial Sequence
  MKO10123108_B_Trim12c
  gRNA
agaagcccaaagccatcgcc

SEQ ID NO: 123109 - DNA, 20 bp, Artificial Sequence
  MKO10123109_B_Trim13
  gRNA
agttatgcaaacctatgacc

SEQ ID NO: 123110 - DNA, 20 bp, Artificial Sequence
  MKO10123110_B_Trim13
  gRNA
taaaatcagcagacttagtc

SEQ ID NO: 123111 - DNA, 20 bp, Artificial Sequence
  MKO10123111_B_Trim13
  gRNA
agccctccagttactcacga

SEQ ID NO: 123112 - DNA, 20 bp, Artificial Sequence
  MKO10123112_B_Trim14
  gRNA
tccttcaggcgagtgtccat

SEQ ID NO: 123113 - DNA, 20 bp, Artificial Sequence
  MKO10123113_B_Trim14
  gRNA
tgtctgcaacgtgttcccga

SEQ ID NO: 123114 - DNA, 20 bp, Artificial Sequence
  MKO10123114_B_Trim14
  gRNA
agacgccggggaaaggctca

SEQ ID NO: 123115 - DNA, 20 bp, Artificial Sequence
  MKO10123115_B_Trim15
  gRNA
actagaacggcagatctgca

SEQ ID NO: 123116 - DNA, 20 bp, Artificial Sequence
  MKO10123116_B_Trim15
  gRNA
ttacctgctctgattgagtc

SEQ ID NO: 123117 - DNA, 20 bp, Artificial Sequence
  MKO10123117_B_Trim15
  gRNA
tgatctttaccagaacctcc

SEQ ID NO: 123118 - DNA, 20 bp, Artificial Sequence
  MKO10123118_B_Trim16
  gRNA
actcctcgcagctgtacgga

SEQ ID NO: 123119 - DNA, 20 bp, Artificial Sequence
  MKO10123119_B_Trim16
  gRNA
agctaaccataagtctgttt

SEQ ID NO: 123120 - DNA, 20 bp, Artificial Sequence
  MKO10123120_B_Trim16
  gRNA
ccttatagctttctagcaat

SEQ ID NO: 123121 - DNA, 20 bp, Artificial Sequence
  MKO10123121_B_Trim17
  gRNA
cttcagcgtgcagtacccag

SEQ ID NO: 123122 - DNA, 20 bp, Artificial Sequence
  MKO10123122_B_Trim17
  gRNA
gcacaaggtcttgatagccg

SEQ ID NO: 123123 - DNA, 20 bp, Artificial Sequence
  MKO10123123_B_Trim17
  gRNA
tcaggtccagggagcggctt

SEQ ID NO: 123124 - DNA, 20 bp, Artificial Sequence
  MKO10123124_B_Trim21
  gRNA
cgtcaatatctaacgtgtcc

SEQ ID NO: 123125 - DNA, 20 bp, Artificial Sequence
  MKO10123125_B_Trim21
  gRNA
tctacaggagaagatccacg

SEQ ID NO: 123126 - DNA, 20 bp, Artificial Sequence
  MKO10123126_B_Trim21
  gRNA
gttggccgagaagatggaaa

SEQ ID NO: 123127 - DNA, 20 bp, Artificial Sequence
  MKO10123127_B_Trim23
  gRNA
aagctcgtaccttgtgacct

SEQ ID NO: 123128 - DNA, 20 bp, Artificial Sequence
  MKO10123128_B_Trim23
  gRNA
aataagctctgacacatgat

SEQ ID NO: 123129 - DNA, 20 bp, Artificial Sequence
  MKO10123129_B_Trim23
  gRNA
tcatgaggtttatcagctag

SEQ ID NO: 123130 - DNA, 20 bp, Artificial Sequence
  MKO10123130_B_Trim24
  gRNA
gcacactcttgactgcaaac

SEQ ID NO: 123131 - DNA, 20 bp, Artificial Sequence
  MKO10123131_B_Trim24
  gRNA
tactctaatcaccaaactga

SEQ ID NO: 123132 - DNA, 20 bp, Artificial Sequence
  MKO10123132_B_Trim24
  gRNA
cagaaagaagaagtatctcc

SEQ ID NO: 123133 - DNA, 20 bp, Artificial Sequence
  MKO10123133_B_Trim25
  gRNA
ctacatccctaagatagatc

SEQ ID NO: 123134 - DNA, 20 bp, Artificial Sequence
  MKO10123134_B_Trim25
  gRNA
tctcacatcctccaatgctt

SEQ ID NO: 123135 - DNA, 20 bp, Artificial Sequence
  MKO10123135_B_Trim25
  gRNA
ttgataatgggaatctacca

SEQ ID NO: 123136 - DNA, 20 bp, Artificial Sequence
  MKO10123136_B_Trim26
  gRNA
ttacttgttggcgaagtcct

SEQ ID NO: 123137 - DNA, 20 bp, Artificial Sequence
  MKO10123137_B_Trim26
  gRNA
ctaggatgtctgcactacac

SEQ ID NO: 123138 - DNA, 20 bp, Artificial Sequence
  MKO10123138_B_Trim26
  gRNA
caagggagaagctgatattc

SEQ ID NO: 123139 - DNA, 20 bp, Artificial Sequence
  MKO10123139_B_Trim27
  gRNA
gaaagtctaaaacagttcac

SEQ ID NO: 123140 - DNA, 20 bp, Artificial Sequence
  MKO10123140_B_Trim27
  gRNA
acattggagacacactgagc

SEQ ID NO: 123141 - DNA, 20 bp, Artificial Sequence
  MKO10123141_B_Trim27
  gRNA
gcaggcccgagctgagcttt

SEQ ID NO: 123142 - DNA, 20 bp, Artificial Sequence
  MKO10123142_B_Trim28
  gRNA
tctccatctcgagtcttagc

SEQ ID NO: 123143 - DNA, 20 bp, Artificial Sequence
  MKO10123143_B_Trim28
  gRNA
gaggaaccaacgtaaactct

SEQ ID NO: 123144 - DNA, 20 bp, Artificial Sequence
  MKO10123144_B_Trim28
  gRNA
ccttggtgtatttcacccgc

SEQ ID NO: 123145 - DNA, 20 bp, Artificial Sequence
  MKO10123145_B_Trim29
  gRNA
gaccgagctgtcactgcaaa

SEQ ID NO: 123146 - DNA, 20 bp, Artificial Sequence
  MKO10123146_B_Trim29
  gRNA
ccactcgttcccatagctgc

SEQ ID NO: 123147 - DNA, 20 bp, Artificial Sequence
  MKO10123147_B_Trim29
  gRNA
cgatcctggagcagaacttc

SEQ ID NO: 123148 - DNA, 20 bp, Artificial Sequence
  MKO10123148_B_Trim2
  gRNA
agctggacgcagtcaacaaa

SEQ ID NO: 123149 - DNA, 20 bp, Artificial Sequence
  MKO10123149_B_Trim2
  gRNA
gagtcctcgccgttgctgcc

SEQ ID NO: 123150 - DNA, 20 bp, Artificial Sequence
  MKO10123150_B_Trim2
  gRNA
gcagcacaaggcctcgctcc

SEQ ID NO: 123151 - DNA, 20 bp, Artificial Sequence
  MKO10123151_B_Trim30a
  gRNA
tgcagcatgcctttcagatc

SEQ ID NO: 123152 - DNA, 20 bp, Artificial Sequence
  MKO10123152_B_Trim30a
  gRNA
ctcaaccttagaaatgctgc

SEQ ID NO: 123153 - DNA, 20 bp, Artificial Sequence
  MKO10123153_B_Trim30a
  gRNA
gtgcaaattgtgtcctgaga

SEQ ID NO: 123154 - DNA, 20 bp, Artificial Sequence
  MKO10123154_B_Trim30b
  gRNA
gtatcatgaaatttgacatt

SEQ ID NO: 123155 - DNA, 20 bp, Artificial Sequence
  MKO10123155_B_Trim30b
  gRNA
tcacctacaattcagtgtct

SEQ ID NO: 123156 - DNA, 20 bp, Artificial Sequence
  MKO10123156_B_Trim30b
  gRNA
ttctagacatgtctacttcc

SEQ ID NO: 123157 - DNA, 20 bp, Artificial Sequence
  MKO10123157_B_Trim30d
  gRNA
gtgtaaattatgtcctgaca

SEQ ID NO: 123158 - DNA, 20 bp, Artificial Sequence
  MKO10123158_B_Trim30d
  gRNA
tccaaagctccacatttgaa

SEQ ID NO: 123159 - DNA, 20 bp, Artificial Sequence
  MKO10123159_B_Trim30d
  gRNA
atgagaaaagatgtgatgaa

SEQ ID NO: 123160 - DNA, 20 bp, Artificial Sequence
  MKO10123160_B_Trim31
  gRNA
actcacctttagtagctcca

SEQ ID NO: 123161 - DNA, 20 bp, Artificial Sequence
  MKO10123161_B_Trim31
  gRNA
cctcacctttgagttctgtc

SEQ ID NO: 123162 - DNA, 20 bp, Artificial Sequence
  MKO10123162_B_Trim31
  gRNA
acaggtgcagattgagtcac

SEQ ID NO: 123163 - DNA, 20 bp, Artificial Sequence
  MKO10123163_B_Trim32
  gRNA
cctaccatctggccagtttg

SEQ ID NO: 123164 - DNA, 20 bp, Artificial Sequence
  MKO10123164_B_Trim32
  gRNA
gggagaagttgactcgtcta

SEQ ID NO: 123165 - DNA, 20 bp, Artificial Sequence
  MKO10123165_B_Trim32
  gRNA
gggcttcccccgcgaaacag

SEQ ID NO: 123166 - DNA, 20 bp, Artificial Sequence
  MKO10123166_B_Trim33
  gRNA
tcactaaagaccacctgatc

SEQ ID NO: 123167 - DNA, 20 bp, Artificial Sequence
  MKO10123167_B_Trim33
  gRNA
gaagataatgcaagtgcagt

SEQ ID NO: 123168 - DNA, 20 bp, Artificial Sequence
  MKO10123168_B_Trim33
  gRNA
gtgtagagactgtcaacttt

SEQ ID NO: 123169 - DNA, 20 bp, Artificial Sequence
  MKO10123169_B_Trim34a
  gRNA
gctcagcctctgcccccgcc

SEQ ID NO: 123170 - DNA, 20 bp, Artificial Sequence
  MKO10123170_B_Trim34a
  gRNA
tgtagcatgccactcagatc

SEQ ID NO: 123171 - DNA, 20 bp, Artificial Sequence
  MKO10123171_B_Trim34a
  gRNA
ccatccctaggagtcagatc

SEQ ID NO: 123172 - DNA, 20 bp, Artificial Sequence
  MKO10123172_B_Trim34b
  gRNA
gctcagcctctgcccccgcc

SEQ ID NO: 123173 - DNA, 20 bp, Artificial Sequence
  MKO10123173_B_Trim34b
  gRNA
tgtagcatgccactcagatc

SEQ ID NO: 123174 - DNA, 20 bp, Artificial Sequence
  MKO10123174_B_Trim34b
  gRNA
ccatccctaggagtcagatc

SEQ ID NO: 123175 - DNA, 20 bp, Artificial Sequence
  MKO10123175_B_Trim35
  gRNA
agtccctgcagtaccgagtc

SEQ ID NO: 123176 - DNA, 20 bp, Artificial Sequence
  MKO10123176_B_Trim35
  gRNA
acaagctccgtgatttcctg

SEQ ID NO: 123177 - DNA, 20 bp, Artificial Sequence
  MKO10123177_B_Trim35
  gRNA
ggccctgaggcgcacctatg

SEQ ID NO: 123178 - DNA, 20 bp, Artificial Sequence
  MKO10123178_B_Trim36
  gRNA
gcttcaaaatttatcatccc

SEQ ID NO: 123179 - DNA, 20 bp, Artificial Sequence
  MKO10123179_B_Trim36
  gRNA
cactgctcatggtggttacc

SEQ ID NO: 123180 - DNA, 20 bp, Artificial Sequence
  MKO10123180_B_Trim36
  gRNA
gtgggaatcattccaatcac

SEQ ID NO: 123181 - DNA, 20 bp, Artificial Sequence
  MKO10123181_B_Trim37
  gRNA
ctccccaaagtgcacactga

SEQ ID NO: 123182 - DNA, 20 bp, Artificial Sequence
  MKO10123182_B_Trim37
  gRNA
tttccgatgtttcatttgta

SEQ ID NO: 123183 - DNA, 20 bp, Artificial Sequence
  MKO10123183_B_Trim37
  gRNA
tctccatacaaatgaaacat

SEQ ID NO: 123184 - DNA, 20 bp, Artificial Sequence
  MKO10123184_B_Trim38
  gRNA
gcctcacctgtagcaatttc

SEQ ID NO: 123185 - DNA, 20 bp, Artificial Sequence
  MKO10123185_B_Trim38
  gRNA
acgtgaaaaacactttgagc

SEQ ID NO: 123186 - DNA, 20 bp, Artificial Sequence
  MKO10123186_B_Trim38
  gRNA
ttaccttccaggcatttatt

SEQ ID NO: 123187 - DNA, 20 bp, Artificial Sequence
  MKO10123187_B_Trim39
  gRNA
agctttaccttgagctcccc

SEQ ID NO: 123188 - DNA, 20 bp, Artificial Sequence
  MKO10123188_B_Trim39
  gRNA
ctcttcggaggctttgcagc

SEQ ID NO: 123189 - DNA, 20 bp, Artificial Sequence
  MKO10123189_B_Trim39
  gRNA
agaacttcagcaatttcccc

SEQ ID NO: 123190 - DNA, 20 bp, Artificial Sequence
  MKO10123190_B_Trim3
  gRNA
tgcgcggcactcaccacaca

SEQ ID NO: 123191 - DNA, 20 bp, Artificial Sequence
  MKO10123191_B_Trim3
  gRNA
gctgtctgcagctatcgcct

SEQ ID NO: 123192 - DNA, 20 bp, Artificial Sequence
  MKO10123192_B_Trim3
  gRNA
atggatgtctgccggcacac

SEQ ID NO: 123193 - DNA, 20 bp, Artificial Sequence
  MKO10123193_B_Trim40
  gRNA
ccaggatgccagtgacttac

SEQ ID NO: 123194 - DNA, 20 bp, Artificial Sequence
  MKO10123194_B_Trim40
  gRNA
ggaccaagaggacttaccag

SEQ ID NO: 123195 - DNA, 20 bp, Artificial Sequence
  MKO10123195_B_Trim40
  gRNA
ccttcaacagctgaaggctc

SEQ ID NO: 123196 - DNA, 20 bp, Artificial Sequence
  MKO10123196_B_Trim41
  gRNA
tcctcacgatggcgtctgtc

SEQ ID NO: 123197 - DNA, 20 bp, Artificial Sequence
  MKO10123197_B_Trim41
  gRNA
atccctcaggccaagctaca

SEQ ID NO: 123198 - DNA, 20 bp, Artificial Sequence
  MKO10123198_B_Trim41
  gRNA
ttccacatgcccttgtagct

SEQ ID NO: 123199 - DNA, 20 bp, Artificial Sequence
  MKO10123199_B_Trim42
  gRNA
gtaaaggccgtcagtcgtct

SEQ ID NO: 123200 - DNA, 20 bp, Artificial Sequence
  MKO10123200_B_Trim42
  gRNA
gacgtgcccaacagaagacg

SEQ ID NO: 123201 - DNA, 20 bp, Artificial Sequence
  MKO10123201_B_Trim42
  gRNA
gtgggaagaaccgggctaag

SEQ ID NO: 123202 - DNA, 20 bp, Artificial Sequence
  MKO10123202_B_Trim43a
  gRNA
tctttgcaggagtaagctag

SEQ ID NO: 123203 - DNA, 20 bp, Artificial Sequence
  MKO10123203_B_Trim43a
  gRNA
agaattatgtagaaatagag

SEQ ID NO: 123204 - DNA, 20 bp, Artificial Sequence
  MKO10123204_B_Trim43a
  gRNA
ctatttctacataattctgc

SEQ ID NO: 123205 - DNA, 20 bp, Artificial Sequence
  MKO10123205_B_Trim43b
  gRNA
tcacctgcaccagcagctcc

SEQ ID NO: 123206 - DNA, 20 bp, Artificial Sequence
  MKO10123206_B_Trim43b
  gRNA
acttggatgacttgttcaga

SEQ ID NO: 123207 - DNA, 20 bp, Artificial Sequence
  MKO10123207_B_Trim43b
  gRNA
tccttgcaggagtaagctag

SEQ ID NO: 123208 - DNA, 20 bp, Artificial Sequence
  MKO10123208_B_Trim43c
  gRNA
ttcagaagtccgtgaagcta

SEQ ID NO: 123209 - DNA, 20 bp, Artificial Sequence
  MKO10123209_B_Trim43c
  gRNA
acttggatgacttgttcaga

SEQ ID NO: 123210 - DNA, 20 bp, Artificial Sequence
  MKO10123210_B_Trim43c
  gRNA
ttgagccttgcagtcagccc

SEQ ID NO: 123211 - DNA, 20 bp, Artificial Sequence
  MKO10123211_B_Trim44
  gRNA
ttcttctagagcaaagattc

SEQ ID NO: 123212 - DNA, 20 bp, Artificial Sequence
  MKO10123212_B_Trim44
  gRNA
cattgctgccttcagtccac

SEQ ID NO: 123213 - DNA, 20 bp, Artificial Sequence
  MKO10123213_B_Trim44
  gRNA
tcatgtgtcctcttcttcac

SEQ ID NO: 123214 - DNA, 20 bp, Artificial Sequence
  MKO10123214_B_Trim45
  gRNA
aatctctaagtccgagccgc

SEQ ID NO: 123215 - DNA, 20 bp, Artificial Sequence
  MKO10123215_B_Trim45
  gRNA
ccgcgtttcctacaccccca

SEQ ID NO: 123216 - DNA, 20 bp, Artificial Sequence
  MKO10123216_B_Trim45
  gRNA
cctcgggacagagcatgggc

SEQ ID NO: 123217 - DNA, 20 bp, Artificial Sequence
  MKO10123217_B_Trim46
  gRNA
ttgtacccacaacgtgtgcc

SEQ ID NO: 123218 - DNA, 20 bp, Artificial Sequence
  MKO10123218_B_Trim46
  gRNA
tacgccgtactctgcagagt

SEQ ID NO: 123219 - DNA, 20 bp, Artificial Sequence
  MKO10123219_B_Trim46
  gRNA
ctgtaagacatgtcaacgac

SEQ ID NO: 123220 - DNA, 20 bp, Artificial Sequence
  MKO10123220_B_Trim47
  gRNA
ctgggaccggcccaacattg

SEQ ID NO: 123221 - DNA, 20 bp, Artificial Sequence
  MKO10123221_B_Trim47
  gRNA
acagcgcagccgcctaagca

SEQ ID NO: 123222 - DNA, 20 bp, Artificial Sequence
  MKO10123222_B_Trim47
  gRNA
ctctcaccgctttgaccacc

SEQ ID NO: 123223 - DNA, 20 bp, Artificial Sequence
  MKO10123223_B_Trim50
  gRNA
cctcacctggcagaaccttc

SEQ ID NO: 123224 - DNA, 20 bp, Artificial Sequence
  MKO10123224_B_Trim50
  gRNA
ccgcatatctgagctgaagg

SEQ ID NO: 123225 - DNA, 20 bp, Artificial Sequence
  MKO10123225_B_Trim50
  gRNA
aggaacgtggaggagcacat

SEQ ID NO: 123226 - DNA, 20 bp, Artificial Sequence
  MKO10123226_B_Trim52
  gRNA
tcagctgcccgcaatgccga

SEQ ID NO: 123227 - DNA, 20 bp, Artificial Sequence
  MKO10123227_B_Trim52
  gRNA
ccccacatccgcctgtgcgt

SEQ ID NO: 123228 - DNA, 20 bp, Artificial Sequence
  MKO10123228_B_Trim52
  gRNA
tttaaggaccccgtgtccat

SEQ ID NO: 123229 - DNA, 20 bp, Artificial Sequence
  MKO10123229_B_Trim54
  gRNA
gtttccgatgcccatcttgt

SEQ ID NO: 123230 - DNA, 20 bp, Artificial Sequence
  MKO10123230_B_Trim54
  gRNA
ggcgggcaatgaccgtgtgc

SEQ ID NO: 123231 - DNA, 20 bp, Artificial Sequence
  MKO10123231_B_Trim54
  gRNA
acaacctcgtgcctacaaga

SEQ ID NO: 123232 - DNA, 20 bp, Artificial Sequence
  MKO10123232_B_Trim55
  gRNA
taacaccacctcatgtctgc

SEQ ID NO: 123233 - DNA, 20 bp, Artificial Sequence
  MKO10123233_B_Trim55
  gRNA
cctggagaacgtatccaagt

SEQ ID NO: 123234 - DNA, 20 bp, Artificial Sequence
  MKO10123234_B_Trim55
  gRNA
ggcgccaaaaaccttgcaca

SEQ ID NO: 123235 - DNA, 20 bp, Artificial Sequence
  MKO10123235_B_Trim56
  gRNA
ctgtgccgacgacttatgcc

SEQ ID NO: 123236 - DNA, 20 bp, Artificial Sequence
  MKO10123236_B_Trim56
  gRNA
attgtgcctgtacccgccga

SEQ ID NO: 123237 - DNA, 20 bp, Artificial Sequence
  MKO10123237_B_Trim56
  gRNA
gcaagcaggggtgatcgata

SEQ ID NO: 123238 - DNA, 20 bp, Artificial Sequence
  MKO10123238_B_Trim58
  gRNA
gagcgagaggagtcttgaca

SEQ ID NO: 123239 - DNA, 20 bp, Artificial Sequence
  MKO10123239_B_Trim58
  gRNA
caggctggcccaacagaaca

SEQ ID NO: 123240 - DNA, 20 bp, Artificial Sequence
  MKO10123240_B_Trim58
  gRNA
ccagatgtgaggctatcaca

SEQ ID NO: 123241 - DNA, 20 bp, Artificial Sequence
  MKO10123241_B_Trim59
  gRNA
tgagtctccacttaaatttc

SEQ ID NO: 123242 - DNA, 20 bp, Artificial Sequence
  MKO10123242_B_Trim59
  gRNA
ttcaaagatgctgtaacaga

SEQ ID NO: 123243 - DNA, 20 bp, Artificial Sequence
  MKO10123243_B_Trim59
  gRNA
caattagctccttaaaatac

SEQ ID NO: 123244 - DNA, 20 bp, Artificial Sequence
  MKO10123244_B_Trim60
  gRNA
ctcaagccagaatactgcgc

SEQ ID NO: 123245 - DNA, 20 bp, Artificial Sequence
  MKO10123245_B_Trim60
  gRNA
caaaaatatgccgaccttgc

SEQ ID NO: 123246 - DNA, 20 bp, Artificial Sequence
  MKO10123246_B_Trim60
  gRNA
gccattgcaacgttaaagtt

SEQ ID NO: 123247 - DNA, 20 bp, Artificial Sequence
  MKO10123247_B_Trim61
  gRNA
acttacctcggggcacattt

SEQ ID NO: 123248 - DNA, 20 bp, Artificial Sequence
  MKO10123248_B_Trim61
  gRNA
cacccaatgcaacataagtt

SEQ ID NO: 123249 - DNA, 20 bp, Artificial Sequence
  MKO10123249_B_Trim61
  gRNA
cgtgatctgataatttcgct

SEQ ID NO: 123250 - DNA, 20 bp, Artificial Sequence
  MKO10123250_B_Trim62
  gRNA
accaaagcgctttgacgtag

SEQ ID NO: 123251 - DNA, 20 bp, Artificial Sequence
  MKO10123251_B_Trim62
  gRNA
gcagctcctcaagcgacagt

SEQ ID NO: 123252 - DNA, 20 bp, Artificial Sequence
  MKO10123252_B_Trim62
  gRNA
gaagtcttcgtacgttaggt

SEQ ID NO: 123253 - DNA, 20 bp, Artificial Sequence
  MKO10123253_B_Trim63
  gRNA
tcttcaggagaatagccacc

SEQ ID NO: 123254 - DNA, 20 bp, Artificial Sequence
  MKO10123254_B_Trim63
  gRNA
gcagacgatcatctctcagc

SEQ ID NO: 123255 - DNA, 20 bp, Artificial Sequence
  MKO10123255_B_Trim63
  gRNA
catctactgtctcacgtgtg

SEQ ID NO: 123256 - DNA, 20 bp, Artificial Sequence
  MKO10123256_B_Trim65
  gRNA
tggggaggctcttctcttca

SEQ ID NO: 123257 - DNA, 20 bp, Artificial Sequence
  MKO10123257_B_Trim65
  gRNA
ccagtaccctcgctctcagc

SEQ ID NO: 123258 - DNA, 20 bp, Artificial Sequence
  MKO10123258_B_Trim65
  gRNA
ttaagagaccctgggtcccc

SEQ ID NO: 123259 - DNA, 20 bp, Artificial Sequence
  MKO10123259_B_Trim66
  gRNA
gctctttgtgctccaccatc

SEQ ID NO: 123260 - DNA, 20 bp, Artificial Sequence
  MKO10123260_B_Trim66
  gRNA
ctctcttagatgcaggcacg

SEQ ID NO: 123261 - DNA, 20 bp, Artificial Sequence
  MKO10123261_B_Trim66
  gRNA
tctctggcaggggtgaatgg

SEQ ID NO: 123262 - DNA, 20 bp, Artificial Sequence
  MKO10123262_B_Trim67
  gRNA
tcatctggacgaaatccagc

SEQ ID NO: 123263 - DNA, 20 bp, Artificial Sequence
  MKO10123263_B_Trim67
  gRNA
gggcgtcacactgagccacc

SEQ ID NO: 123264 - DNA, 20 bp, Artificial Sequence
  MKO10123264_B_Trim67
  gRNA
ggtggctcagtgtgacgccc

SEQ ID NO: 123265 - DNA, 20 bp, Artificial Sequence
  MKO10123265_B_Trim68
  gRNA
aagacagattgccgtgtgct

SEQ ID NO: 123266 - DNA, 20 bp, Artificial Sequence
  MKO10123266_B_Trim68
  gRNA
gtattcaggaagccttgaac

SEQ ID NO: 123267 - DNA, 20 bp, Artificial Sequence
  MKO10123267_B_Trim68
  gRNA
cttgcagtggaaactccagc

SEQ ID NO: 123268 - DNA, 20 bp, Artificial Sequence
  MKO10123268_B_Trim69
  gRNA
ggtgaatctgaaccagattc

SEQ ID NO: 123269 - DNA, 20 bp, Artificial Sequence
  MKO10123269_B_Trim69
  gRNA
acatcacaaagctcatagag

SEQ ID NO: 123270 - DNA, 20 bp, Artificial Sequence
  MKO10123270_B_Trim69
  gRNA
agatgctatttctgcttaca

SEQ ID NO: 123271 - DNA, 20 bp, Artificial Sequence
  MKO10123271_B_Trim6
  gRNA
tcctcactaggagtgagttc

SEQ ID NO: 123272 - DNA, 20 bp, Artificial Sequence
  MKO10123272_B_Trim6
  gRNA
gaagctaaaagctcttatcc

SEQ ID NO: 123273 - DNA, 20 bp, Artificial Sequence
  MKO10123273_B_Trim6
  gRNA
atgtgggtgatgttacaaaa

SEQ ID NO: 123274 - DNA, 20 bp, Artificial Sequence
  MKO10123274_B_Trim71
  gRNA
cctcgaagccgtacttgttc

SEQ ID NO: 123275 - DNA, 20 bp, Artificial Sequence
  MKO10123275_B_Trim71
  gRNA
ggcgaaggtggtccagtctg

SEQ ID NO: 123276 - DNA, 20 bp, Artificial Sequence
  MKO10123276_B_Trim71
  gRNA
cgtcacagctcgccacaaga

SEQ ID NO: 123277 - DNA, 20 bp, Artificial Sequence
  MKO10123277_B_Trim72
  gRNA
gcgcaaggagaagactgtag

SEQ ID NO: 123278 - DNA, 20 bp, Artificial Sequence
  MKO10123278_B_Trim72
  gRNA
cctgtcagagtcaccaccac

SEQ ID NO: 123279 - DNA, 20 bp, Artificial Sequence
  MKO10123279_B_Trim72
  gRNA
ttgctcacctgctggttacc

SEQ ID NO: 123280 - DNA, 20 bp, Artificial Sequence
  MKO10123280_B_Trim75
  gRNA
tgagagccacgggcgccacc

SEQ ID NO: 123281 - DNA, 20 bp, Artificial Sequence
  MKO10123281_B_Trim75
  gRNA
agagcagcaccagttgcgag

SEQ ID NO: 123282 - DNA, 20 bp, Artificial Sequence
  MKO10123282_B_Trim75
  gRNA
gccgcaagagctacaagcat

SEQ ID NO: 123283 - DNA, 20 bp, Artificial Sequence
  MKO10123283_B_Trim7
  gRNA
tgtctctgtagaggatctcc

SEQ ID NO: 123284 - DNA, 20 bp, Artificial Sequence
  MKO10123284_B_Trim7
  gRNA
cttcatctcagatgagactg

SEQ ID NO: 123285 - DNA, 20 bp, Artificial Sequence
  MKO10123285_B_Trim7
  gRNA
cttctttctccagctctccc

SEQ ID NO: 123286 - DNA, 20 bp, Artificial Sequence
  MKO10123286_B_Trim8
  gRNA
ctccaagctgttcctgaacg

SEQ ID NO: 123287 - DNA, 20 bp, Artificial Sequence
  MKO10123287_B_Trim8
  gRNA
gctcgagtcagacaagcgcc

SEQ ID NO: 123288 - DNA, 20 bp, Artificial Sequence
  MKO10123288_B_Trim8
  gRNA
ctgactcgagcttgtacagc

SEQ ID NO: 123289 - DNA, 20 bp, Artificial Sequence
  MKO10123289_B_Trim9
  gRNA
tcatcgatgccctaaaccga

SEQ ID NO: 123290 - DNA, 20 bp, Artificial Sequence
  MKO10123290_B_Trim9
  gRNA
ccctgtccgacaatccattc

SEQ ID NO: 123291 - DNA, 20 bp, Artificial Sequence
  MKO10123291_B_Trim9
  gRNA
catcgatgagcgcatcacac

SEQ ID NO: 123292 - DNA, 20 bp, Artificial Sequence
  MKO10123292_B_Triml1
  gRNA
acatcactcgttccttctca

SEQ ID NO: 123293 - DNA, 20 bp, Artificial Sequence
  MKO10123293_B_Triml1
  gRNA
ggccatcctgaaccatgaga

SEQ ID NO: 123294 - DNA, 20 bp, Artificial Sequence
  MKO10123294_B_Triml1
  gRNA
ctgagcctgtgtcacatcac

SEQ ID NO: 123295 - DNA, 20 bp, Artificial Sequence
  MKO10123295_B_Triml2
  gRNA
gaagtcccaagaaatgctac

SEQ ID NO: 123296 - DNA, 20 bp, Artificial Sequence
  MKO10123296_B_Triml2
  gRNA
gattaggtccatttaagttc

SEQ ID NO: 123297 - DNA, 20 bp, Artificial Sequence
  MKO10123297_B_Triml2
  gRNA
atctgccgttgcactgctcc

SEQ ID NO: 123298 - DNA, 20 bp, Artificial Sequence
  MKO10123298_B_Triobp
  gRNA
tactgacgtcacagagtatg

SEQ ID NO: 123299 - DNA, 20 bp, Artificial Sequence
  MKO10123299_B_Triobp
  gRNA
gcaccttacctcctcagccg

SEQ ID NO: 123300 - DNA, 20 bp, Artificial Sequence
  MKO10123300_B_Triobp
  gRNA
atgtcaatcttggatgagcc

SEQ ID NO: 123301 - DNA, 20 bp, Artificial Sequence
  MKO10123301_B_Trio
  gRNA
acagtgattgtggacatgcg

SEQ ID NO: 123302 - DNA, 20 bp, Artificial Sequence
  MKO10123302_B_Trio
  gRNA
cagaaacagaggacgaattt

SEQ ID NO: 123303 - DNA, 20 bp, Artificial Sequence
  MKO10123303_B_Trio
  gRNA
gaaaaagtcgcctatctttc

SEQ ID NO: 123304 - DNA, 20 bp, Artificial Sequence
  MKO10123304_B_Trip10
  gRNA
tcgtcgggcccagcagcagc

SEQ ID NO: 123305 - DNA, 20 bp, Artificial Sequence
  MKO10123305_B_Trip10
  gRNA
ctgcgaagtcattgacctcc

SEQ ID NO: 123306 - DNA, 20 bp, Artificial Sequence
  MKO10123306_B_Trip10
  gRNA
tcatctttggtaggtctctt

SEQ ID NO: 123307 - DNA, 20 bp, Artificial Sequence
  MKO10123307_B_Trip11
  gRNA
gtagcagatttccctaattc

SEQ ID NO: 123308 - DNA, 20 bp, Artificial Sequence
  MKO10123308_B_Trip11
  gRNA
ttctcctctctcccggaatt

SEQ ID NO: 123309 - DNA, 20 bp, Artificial Sequence
  MKO10123309_B_Trip11
  gRNA
ctttctgctgtaactgactt

SEQ ID NO: 123310 - DNA, 20 bp, Artificial Sequence
  MKO10123310_B_Trip12
  gRNA
acaattgccgtcaacaagca

SEQ ID NO: 123311 - DNA, 20 bp, Artificial Sequence
  MKO10123311_B_Trip12
  gRNA
gtgctagtccagactacaac

SEQ ID NO: 123312 - DNA, 20 bp, Artificial Sequence
  MKO10123312_B_Trip12
  gRNA
gctgttggcatgaccacctc

SEQ ID NO: 123313 - DNA, 20 bp, Artificial Sequence
  MKO10123313_B_Trip13
  gRNA
tgacctccacatcatacacg

SEQ ID NO: 123314 - DNA, 20 bp, Artificial Sequence
  MKO10123314_B_Trip13
  gRNA
caccgtgcagcagcaccacc

SEQ ID NO: 123315 - DNA, 20 bp, Artificial Sequence
  MKO10123315_B_Trip13
  gRNA
actcttctcagacaagaacg

SEQ ID NO: 123316 - DNA, 20 bp, Artificial Sequence
  MKO10123316_B_Trip4
  gRNA
accgggagccgctagtacac

SEQ ID NO: 123317 - DNA, 20 bp, Artificial Sequence
  MKO10123317_B_Trip4
  gRNA
tcctcctactccgctttagc

SEQ ID NO: 123318 - DNA, 20 bp, Artificial Sequence
  MKO10123318_B_Trip4
  gRNA
ttgacctccacagctacgtc

SEQ ID NO: 123319 - DNA, 20 bp, Artificial Sequence
  MKO10123319_B_Trip6
  gRNA
ctggggtaggtccaccatag

SEQ ID NO: 123320 - DNA, 20 bp, Artificial Sequence
  MKO10123320_B_Trip6
  gRNA
gatcatccgccctggcagtc

SEQ ID NO: 123321 - DNA, 20 bp, Artificial Sequence
  MKO10123321_B_Trip6
  gRNA
tggaacaccccagcgcctgc

SEQ ID NO: 123322 - DNA, 20 bp, Artificial Sequence
  MKO10123322_B_Triqk
  gRNA
caccttacgctgtgtccttg

SEQ ID NO: 123323 - DNA, 20 bp, Artificial Sequence
  MKO10123323_B_Triqk
  gRNA
tgctttctgtactgatcaac

SEQ ID NO: 123324 - DNA, 20 bp, Artificial Sequence
  MKO10123324_B_Triqk
  gRNA
gatcagtacagaaagcaaat

SEQ ID NO: 123325 - DNA, 20 bp, Artificial Sequence
  MKO10123325_B_Trit1
  gRNA
cctctgcgtgctgacgatga

SEQ ID NO: 123326 - DNA, 20 bp, Artificial Sequence
  MKO10123326_B_Trit1
  gRNA
gtcctcttggaggccctctc

SEQ ID NO: 123327 - DNA, 20 bp, Artificial Sequence
  MKO10123327_B_Trit1
  gRNA
gcaccacatgatcagctttg

SEQ ID NO: 123328 - DNA, 20 bp, Artificial Sequence
  MKO10123328_B_Trmt10a
  gRNA
ccgagcctctcatccagtgc

SEQ ID NO: 123329 - DNA, 20 bp, Artificial Sequence
  MKO10123329_B_Trmt10a
  gRNA
cactagccctccaatcacgt

SEQ ID NO: 123330 - DNA, 20 bp, Artificial Sequence
  MKO10123330_B_Trmt10a
  gRNA
acacacctgcactggatgag

SEQ ID NO: 123331 - DNA, 20 bp, Artificial Sequence
  MKO10123331_B_Trmt10b
  gRNA
ctcaagtcaacacatagtct

SEQ ID NO: 123332 - DNA, 20 bp, Artificial Sequence
  MKO10123332_B_Trmt10b
  gRNA
ctaccttctttgacatgtgc

SEQ ID NO: 123333 - DNA, 20 bp, Artificial Sequence
  MKO10123333_B_Trmt10b
  gRNA
aggtacacaagggtttccag

SEQ ID NO: 123334 - DNA, 20 bp, Artificial Sequence
  MKO10123334_B_Trmt10c
  gRNA
taaatgtgcgcacgtggaaa

SEQ ID NO: 123335 - DNA, 20 bp, Artificial Sequence
  MKO10123335_B_Trmt10c
  gRNA
tgttgctatgtttaaccgtt

SEQ ID NO: 123336 - DNA, 20 bp, Artificial Sequence
  MKO10123336_B_Trmt10c
  gRNA
ccatccaattctagctgctc

SEQ ID NO: 123337 - DNA, 20 bp, Artificial Sequence
  MKO10123337_B_Trmt112
  gRNA
tcccctgcaggttgatgtac

SEQ ID NO: 123338 - DNA, 20 bp, Artificial Sequence
  MKO10123338_B_Trmt112
  gRNA
atctcctaagctcccatgtg

SEQ ID NO: 123339 - DNA, 20 bp, Artificial Sequence
  MKO10123339_B_Trmt112
  gRNA
aagcgccgcccactccactt

SEQ ID NO: 123340 - DNA, 20 bp, Artificial Sequence
  MKO10123340_B_Trmt11
  gRNA
gtcgaatctgaatgcagata

SEQ ID NO: 123341 - DNA, 20 bp, Artificial Sequence
  MKO10123341_B_Trmt11
  gRNA
ggaaataaagtctttactat

SEQ ID NO: 123342 - DNA, 20 bp, Artificial Sequence
  MKO10123342_B_Trmt11
  gRNA
gtttcttgcaatatcttcag

SEQ ID NO: 123343 - DNA, 20 bp, Artificial Sequence
  MKO10123343_B_Trmt12
  gRNA
gttcaacgtttggcaaaacg

SEQ ID NO: 123344 - DNA, 20 bp, Artificial Sequence
  MKO10123344_B_Trmt12
  gRNA
caacgtccttccgaagcact

SEQ ID NO: 123345 - DNA, 20 bp, Artificial Sequence
  MKO10123345_B_Trmt12
  gRNA
caccatgccgttgccaagac

SEQ ID NO: 123346 - DNA, 20 bp, Artificial Sequence
  MKO10123346_B_Trmt13
  gRNA
tttattaggaagaaaatact

SEQ ID NO: 123347 - DNA, 20 bp, Artificial Sequence
  MKO10123347_B_Trmt13
  gRNA
aaattgagaaaagcaagtga

SEQ ID NO: 123348 - DNA, 20 bp, Artificial Sequence
  MKO10123348_B_Trmt13
  gRNA
tcttcagatagagaagaaaa

SEQ ID NO: 123349 - DNA, 20 bp, Artificial Sequence
  MKO10123349_B_Trmt1l
  gRNA
gttaagcgccatgtcaacaa

SEQ ID NO: 123350 - DNA, 20 bp, Artificial Sequence
  MKO10123350_B_Trmt1l
  gRNA
aacttgcccgctgtgtccta

SEQ ID NO: 123351 - DNA, 20 bp, Artificial Sequence
  MKO10123351_B_Trmt1l
  gRNA
gacaccttcagaatttacac

SEQ ID NO: 123352 - DNA, 20 bp, Artificial Sequence
  MKO10123352_B_Trmt1
  gRNA
caacctaccgggcatctgcc

SEQ ID NO: 123353 - DNA, 20 bp, Artificial Sequence
  MKO10123353_B_Trmt1
  gRNA
gagtttgctcgaattcatct

SEQ ID NO: 123354 - DNA, 20 bp, Artificial Sequence
  MKO10123354_B_Trmt1
  gRNA
ccactcactctggattccct

SEQ ID NO: 123355 - DNA, 20 bp, Artificial Sequence
  MKO10123355_B_Trmt2a
  gRNA
gtccccaccggatgaattcc

SEQ ID NO: 123356 - DNA, 20 bp, Artificial Sequence
  MKO10123356_B_Trmt2a
  gRNA
cgtctaccccaactccgacc

SEQ ID NO: 123357 - DNA, 20 bp, Artificial Sequence
  MKO10123357_B_Trmt2a
  gRNA
caataaagcttgttgccccc

SEQ ID NO: 123358 - DNA, 20 bp, Artificial Sequence
  MKO10123358_B_Trmt2b
  gRNA
ctgatgttgtgactccactc

SEQ ID NO: 123359 - DNA, 20 bp, Artificial Sequence
  MKO10123359_B_Trmt2b
  gRNA
acagtctttggattgccatc

SEQ ID NO: 123360 - DNA, 20 bp, Artificial Sequence
  MKO10123360_B_Trmt2b
  gRNA
cttgttccggtagccagtgg

SEQ ID NO: 123361 - DNA, 20 bp, Artificial Sequence
  MKO10123361_B_Trmt44
  gRNA
taccagcagatacgtagcaa

SEQ ID NO: 123362 - DNA, 20 bp, Artificial Sequence
  MKO10123362_B_Trmt44
  gRNA
tccacatcttgagcaacgag

SEQ ID NO: 123363 - DNA, 20 bp, Artificial Sequence
  MKO10123363_B_Trmt44
  gRNA
accattctccttcgttgtga

SEQ ID NO: 123364 - DNA, 20 bp, Artificial Sequence
  MKO10123364_B_Trmt5
  gRNA
tcaccaccctctgacgttcg

SEQ ID NO: 123365 - DNA, 20 bp, Artificial Sequence
  MKO10123365_B_Trmt5
  gRNA
tacgtaccgaaatttccaaa

SEQ ID NO: 123366 - DNA, 20 bp, Artificial Sequence
  MKO10123366_B_Trmt5
  gRNA
gtacgtattgtcaatgttgc

SEQ ID NO: 123367 - DNA, 20 bp, Artificial Sequence
  MKO10123367_B_Trmt61a
  gRNA
ctcgtatgccacgaaactca

SEQ ID NO: 123368 - DNA, 20 bp, Artificial Sequence
  MKO10123368_B_Trmt61a
  gRNA
gatgccagccccttccgtag

SEQ ID NO: 123369 - DNA, 20 bp, Artificial Sequence
  MKO10123369_B_Trmt61a
  gRNA
tctctaagttgttggccccc

SEQ ID NO: 123370 - DNA, 20 bp, Artificial Sequence
  MKO10123370_B_Trmt6
  gRNA
aatcgaaatatagttgatga

SEQ ID NO: 123371 - DNA, 20 bp, Artificial Sequence
  MKO10123371_B_Trmt6
  gRNA
atgtattatgcaagagaacc

SEQ ID NO: 123372 - DNA, 20 bp, Artificial Sequence
  MKO10123372_B_Trmt6
  gRNA
tatcatcttgagtaagtttc

SEQ ID NO: 123373 - DNA, 20 bp, Artificial Sequence
  MKO10123373_B_Trmu
  gRNA
tgtcctatgtgaaggagtat

SEQ ID NO: 123374 - DNA, 20 bp, Artificial Sequence
  MKO10123374_B_Trmu
  gRNA
atgcttattgcagttgatgt

SEQ ID NO: 123375 - DNA, 20 bp, Artificial Sequence
  MKO10123375_B_Trmu
  gRNA
ctctcttctgaagcacgtga

SEQ ID NO: 123376 - DNA, 20 bp, Artificial Sequence
  MKO10123376_B_Trnau1ap
  gRNA
ctttgtggaattcgcagatt

SEQ ID NO: 123377 - DNA, 20 bp, Artificial Sequence
  MKO10123377_B_Trnau1ap
  gRNA
gtctggctgtttcccataag

SEQ ID NO: 123378 - DNA, 20 bp, Artificial Sequence
  MKO10123378_B_Trnau1ap
  gRNA
tatgcagctggaaccctaca

SEQ ID NO: 123379 - DNA, 20 bp, Artificial Sequence
  MKO10123379_B_Trnp1
  gRNA
gggccgccggcgcctggtgt

SEQ ID NO: 123380 - DNA, 20 bp, Artificial Sequence
  MKO10123380_B_Trnp1
  gRNA
taagtcaccgcccttacccg

SEQ ID NO: 123381 - DNA, 20 bp, Artificial Sequence
  MKO10123381_B_Trnp1
  gRNA
cggccgagacacccgtggaa

SEQ ID NO: 123382 - DNA, 20 bp, Artificial Sequence
  MKO10123382_B_Trnt1
  gRNA
atctactccaactacacctc

SEQ ID NO: 123383 - DNA, 20 bp, Artificial Sequence
  MKO10123383_B_Trnt1
  gRNA
tgtcaggctcttcaatcctt

SEQ ID NO: 123384 - DNA, 20 bp, Artificial Sequence
  MKO10123384_B_Trnt1
  gRNA
acactgtttgattacttcaa

SEQ ID NO: 123385 - DNA, 20 bp, Artificial Sequence
  MKO10123385_B_Troap
  gRNA
ctccactcgacccagcttac

SEQ ID NO: 123386 - DNA, 20 bp, Artificial Sequence
  MKO10123386_B_Troap
  gRNA
cacaaactctatagccccta

SEQ ID NO: 123387 - DNA, 20 bp, Artificial Sequence
  MKO10123387_B_Troap
  gRNA
cactccctcacctgacaaga

SEQ ID NO: 123388 - DNA, 20 bp, Artificial Sequence
  MKO10123388_B_Trove2
  gRNA
gctaattcagtgcttgaacc

SEQ ID NO: 123389 - DNA, 20 bp, Artificial Sequence
  MKO10123389_B_Trove2
  gRNA
agcaagaagcgcttcccagt

SEQ ID NO: 123390 - DNA, 20 bp, Artificial Sequence
  MKO10123390_B_Trove2
  gRNA
tgttgccgcagcaatgtgca

SEQ ID NO: 123391 - DNA, 20 bp, Artificial Sequence
  MKO10123391_B_Tro
  gRNA
tcatcgggtgcccacattcc

SEQ ID NO: 123392 - DNA, 20 bp, Artificial Sequence
  MKO10123392_B_Tro
  gRNA
ggtggaagccgcctgcccca

SEQ ID NO: 123393 - DNA, 20 bp, Artificial Sequence
  MKO10123393_B_Tro
  gRNA
aggctacctgagcgcttgat

SEQ ID NO: 123394 - DNA, 20 bp, Artificial Sequence
  MKO10123394_B_Trp53bp1
  gRNA
ggggtgggagcaaacgctcc

SEQ ID NO: 123395 - DNA, 20 bp, Artificial Sequence
  MKO10123395_B_Trp53bp1
  gRNA
ccgttcaatgacctgactga

SEQ ID NO: 123396 - DNA, 20 bp, Artificial Sequence
  MKO10123396_B_Trp53bp1
  gRNA
ctaggatattgtatcaaatc

SEQ ID NO: 123397 - DNA, 20 bp, Artificial Sequence
  MKO10123397_B_Trp53bp2
  gRNA
ctccttcctccgatgctcgc

SEQ ID NO: 123398 - DNA, 20 bp, Artificial Sequence
  MKO10123398_B_Trp53bp2
  gRNA
actgccatttagccgaagtg

SEQ ID NO: 123399 - DNA, 20 bp, Artificial Sequence
  MKO10123399_B_Trp53bp2
  gRNA
gtttgcaggttaacagtcct

SEQ ID NO: 123400 - DNA, 20 bp, Artificial Sequence
  MKO10123400_B_Trp53i11
  gRNA
ggactgcaccccgaagtagc

SEQ ID NO: 123401 - DNA, 20 bp, Artificial Sequence
  MKO10123401_B_Trp53i11
  gRNA
ttatctcgttgcccaaaacc

SEQ ID NO: 123402 - DNA, 20 bp, Artificial Sequence
  MKO10123402_B_Trp53i11
  gRNA
acgagataaagtttgctgtg

SEQ ID NO: 123403 - DNA, 20 bp, Artificial Sequence
  MKO10123403_B_Trp53i13
  gRNA
acctgtgtgtaagtcactct

SEQ ID NO: 123404 - DNA, 20 bp, Artificial Sequence
  MKO10123404_B_Trp53i13
  gRNA
ccacaggccttcaggacaag

SEQ ID NO: 123405 - DNA, 20 bp, Artificial Sequence
  MKO10123405_B_Trp53i13
  gRNA
gtgtgggagacggtgtgtac

SEQ ID NO: 123406 - DNA, 20 bp, Artificial Sequence
  MKO10123406_B_Trp53inp1
  gRNA
aatccacctgctgtaaaaca

SEQ ID NO: 123407 - DNA, 20 bp, Artificial Sequence
  MKO10123407_B_Trp53inp1
  gRNA
agactgaataaaatgtttgt

SEQ ID NO: 123408 - DNA, 20 bp, Artificial Sequence
  MKO10123408_B_Trp53inp1
  gRNA
tcttctttctcactgaattc

SEQ ID NO: 123409 - DNA, 20 bp, Artificial Sequence
  MKO10123409_B_Trp53inp2
  gRNA
tccacccgcgccctccttga

SEQ ID NO: 123410 - DNA, 20 bp, Artificial Sequence
  MKO10123410_B_Trp53inp2
  gRNA
ctggctcatcatcgacctac

SEQ ID NO: 123411 - DNA, 20 bp, Artificial Sequence
  MKO10123411_B_Trp53inp2
  gRNA
cccggacagttggagtcttc

SEQ ID NO: 123412 - DNA, 20 bp, Artificial Sequence
  MKO10123412_B_Trp53rk
  gRNA
acagctccactacccgacca

SEQ ID NO: 123413 - DNA, 20 bp, Artificial Sequence
  MKO10123413_B_Trp53rk
  gRNA
accgcttcccgaagagttac

SEQ ID NO: 123414 - DNA, 20 bp, Artificial Sequence
  MKO10123414_B_Trp53rk
  gRNA
gcggctccgctcgcgcgccg

SEQ ID NO: 123415 - DNA, 20 bp, Artificial Sequence
  MKO10123415_B_Trp53tg5
  gRNA
tacaattcaagttcccgtct

SEQ ID NO: 123416 - DNA, 20 bp, Artificial Sequence
  MKO10123416_B_Trp53tg5
  gRNA
agctcttgaatagcttcaag

SEQ ID NO: 123417 - DNA, 20 bp, Artificial Sequence
  MKO10123417_B_Trp53tg5
  gRNA
aactccataagctggccaga

SEQ ID NO: 123418 - DNA, 20 bp, Artificial Sequence
  MKO10123418_B_Trp53
  gRNA
ggccttaccaggatatcttc

SEQ ID NO: 123419 - DNA, 20 bp, Artificial Sequence
  MKO10123419_B_Trp53
  gRNA
ataagcctgaaaatgtctcc

SEQ ID NO: 123420 - DNA, 20 bp, Artificial Sequence
  MKO10123420_B_Trp53
  gRNA
gtgctgtgacttcttgtaga

SEQ ID NO: 123421 - DNA, 20 bp, Artificial Sequence
  MKO10123421_B_Trp63
  gRNA
gtggggtcatcaccttgatc

SEQ ID NO: 123422 - DNA, 20 bp, Artificial Sequence
  MKO10123422_B_Trp63
  gRNA
agtcatctgattcgagtaga

SEQ ID NO: 123423 - DNA, 20 bp, Artificial Sequence
  MKO10123423_B_Trp63
  gRNA
ttctactcgaatcagatgac

SEQ ID NO: 123424 - DNA, 20 bp, Artificial Sequence
  MKO10123424_B_Trp73
  gRNA
tgacagggtcatccacgtac

SEQ ID NO: 123425 - DNA, 20 bp, Artificial Sequence
  MKO10123425_B_Trp73
  gRNA
ggggcagcgcttaacaatgt

SEQ ID NO: 123426 - DNA, 20 bp, Artificial Sequence
  MKO10123426_B_Trp73
  gRNA
tccggggtgtaggggctcgc

SEQ ID NO: 123427 - DNA, 20 bp, Artificial Sequence
  MKO10123427_B_Trpa1
  gRNA
tgccatgcacagctatgtga

SEQ ID NO: 123428 - DNA, 20 bp, Artificial Sequence
  MKO10123428_B_Trpa1
  gRNA
agctgtgtaaatcaaataag

SEQ ID NO: 123429 - DNA, 20 bp, Artificial Sequence
  MKO10123429_B_Trpa1
  gRNA
atggaattaatcttagcata

SEQ ID NO: 123430 - DNA, 20 bp, Artificial Sequence
  MKO10123430_B_Trpc1
  gRNA
ggcaatcgactctgaagtag

SEQ ID NO: 123431 - DNA, 20 bp, Artificial Sequence
  MKO10123431_B_Trpc1
  gRNA
aaagtccgcagatgcacttt

SEQ ID NO: 123432 - DNA, 20 bp, Artificial Sequence
  MKO10123432_B_Trpc1
  gRNA
aactattgaaaacgaaagct

SEQ ID NO: 123433 - DNA, 20 bp, Artificial Sequence
  MKO10123433_B_Trpc2
  gRNA
gcaactcgaagccatagtcc

SEQ ID NO: 123434 - DNA, 20 bp, Artificial Sequence
  MKO10123434_B_Trpc2
  gRNA
agacttcactacatatgatc

SEQ ID NO: 123435 - DNA, 20 bp, Artificial Sequence
  MKO10123435_B_Trpc2
  gRNA
acccagctgagcaccttcaa

SEQ ID NO: 123436 - DNA, 20 bp, Artificial Sequence
  MKO10123436_B_Trpc3
  gRNA
caatccaatagccgatggcg

SEQ ID NO: 123437 - DNA, 20 bp, Artificial Sequence
  MKO10123437_B_Trpc3
  gRNA
cctcctccgagtcccgacac

SEQ ID NO: 123438 - DNA, 20 bp, Artificial Sequence
  MKO10123438_B_Trpc3
  gRNA
gcaatgcaaagacttcgtag

SEQ ID NO: 123439 - DNA, 20 bp, Artificial Sequence
  MKO10123439_B_Trpc4ap
  gRNA
gacaaattgtccaaatggag

SEQ ID NO: 123440 - DNA, 20 bp, Artificial Sequence
  MKO10123440_B_Trpc4ap
  gRNA
cagttaccttgagaatgctt

SEQ ID NO: 123441 - DNA, 20 bp, Artificial Sequence
  MKO10123441_B_Trpc4ap
  gRNA
atagcctccatagagagaag

SEQ ID NO: 123442 - DNA, 20 bp, Artificial Sequence
  MKO10123442_B_Trpc4
  gRNA
aggtccaccaccaaccatcg

SEQ ID NO: 123443 - DNA, 20 bp, Artificial Sequence
  MKO10123443_B_Trpc4
  gRNA
gcctggaccgtgaatgcctg

SEQ ID NO: 123444 - DNA, 20 bp, Artificial Sequence
  MKO10123444_B_Trpc4
  gRNA
gaagattgtcgcgtttgtaa

SEQ ID NO: 123445 - DNA, 20 bp, Artificial Sequence
  MKO10123445_B_Trpc5
  gRNA
agtataatggttctcgtcca

SEQ ID NO: 123446 - DNA, 20 bp, Artificial Sequence
  MKO10123446_B_Trpc5
  gRNA
tcacggaatacatccatgat

SEQ ID NO: 123447 - DNA, 20 bp, Artificial Sequence
  MKO10123447_B_Trpc5
  gRNA
gacataggccacgatcttca

SEQ ID NO: 123448 - DNA, 20 bp, Artificial Sequence
  MKO10123448_B_Trpc6
  gRNA
gcagacgattcttcgtgaga

SEQ ID NO: 123449 - DNA, 20 bp, Artificial Sequence
  MKO10123449_B_Trpc6
  gRNA
cacaccagtatatgagagcc

SEQ ID NO: 123450 - DNA, 20 bp, Artificial Sequence
  MKO10123450_B_Trpc6
  gRNA
cattcatgacgagcagcccc

SEQ ID NO: 123451 - DNA, 20 bp, Artificial Sequence
  MKO10123451_B_Trpc7
  gRNA
ccttcagtcactcgcgctcc

SEQ ID NO: 123452 - DNA, 20 bp, Artificial Sequence
  MKO10123452_B_Trpc7
  gRNA
gcgatgtgaacttgcaagtc

SEQ ID NO: 123453 - DNA, 20 bp, Artificial Sequence
  MKO10123453_B_Trpc7
  gRNA
agtttgattcggctcagact

SEQ ID NO: 123454 - DNA, 20 bp, Artificial Sequence
  MKO10123454_B_Trpd52l3
  gRNA
gataggactcgaggtgagac

SEQ ID NO: 123455 - DNA, 20 bp, Artificial Sequence
  MKO10123455_B_Trpd52l3
  gRNA
ttcgccacaccgcttctctt

SEQ ID NO: 123456 - DNA, 20 bp, Artificial Sequence
  MKO10123456_B_Trpd52l3
  gRNA
ggctggtggagctgacggct

SEQ ID NO: 123457 - DNA, 20 bp, Artificial Sequence
  MKO10123457_B_Trpm1
  gRNA
cctcagcaccatacttgccc

SEQ ID NO: 123458 - DNA, 20 bp, Artificial Sequence
  MKO10123458_B_Trpm1
  gRNA
aacggcaccctgggcaagta

SEQ ID NO: 123459 - DNA, 20 bp, Artificial Sequence
  MKO10123459_B_Trpm1
  gRNA
cacaggtgtcgtcagccatg

SEQ ID NO: 123460 - DNA, 20 bp, Artificial Sequence
  MKO10123460_B_Trpm2
  gRNA
ttaccctgcgtccgagagtt

SEQ ID NO: 123461 - DNA, 20 bp, Artificial Sequence
  MKO10123461_B_Trpm2
  gRNA
gcagtatgtccgggtctccc

SEQ ID NO: 123462 - DNA, 20 bp, Artificial Sequence
  MKO10123462_B_Trpm2
  gRNA
ttatacccacgagcaacact

SEQ ID NO: 123463 - DNA, 20 bp, Artificial Sequence
  MKO10123463_B_Trpm3
  gRNA
cccgaagacttgcttgagtt

SEQ ID NO: 123464 - DNA, 20 bp, Artificial Sequence
  MKO10123464_B_Trpm3
  gRNA
gacccctccagtgaagatcc

SEQ ID NO: 123465 - DNA, 20 bp, Artificial Sequence
  MKO10123465_B_Trpm3
  gRNA
agaacggtgagcttgctcat

SEQ ID NO: 123466 - DNA, 20 bp, Artificial Sequence
  MKO10123466_B_Trpm4
  gRNA
cagtcccccagtgacgatcc

SEQ ID NO: 123467 - DNA, 20 bp, Artificial Sequence
  MKO10123467_B_Trpm4
  gRNA
gggcagccgtagttaccgag

SEQ ID NO: 123468 - DNA, 20 bp, Artificial Sequence
  MKO10123468_B_Trpm4
  gRNA
aactgctcaccccgcatcat

SEQ ID NO: 123469 - DNA, 20 bp, Artificial Sequence
  MKO10123469_B_Trpm5
  gRNA
ggtgggtgaggaacgacctt

SEQ ID NO: 123470 - DNA, 20 bp, Artificial Sequence
  MKO10123470_B_Trpm5
  gRNA
gcccgtcgttcccactccca

SEQ ID NO: 123471 - DNA, 20 bp, Artificial Sequence
  MKO10123471_B_Trpm5
  gRNA
tggtgaccccaacaccctag

SEQ ID NO: 123472 - DNA, 20 bp, Artificial Sequence
  MKO10123472_B_Trpm6
  gRNA
tgaagttctgaagaccccca

SEQ ID NO: 123473 - DNA, 20 bp, Artificial Sequence
  MKO10123473_B_Trpm6
  gRNA
aaaagccctacagatacctt

SEQ ID NO: 123474 - DNA, 20 bp, Artificial Sequence
  MKO10123474_B_Trpm6
  gRNA
tttcagaaatcctggatcga

SEQ ID NO: 123475 - DNA, 20 bp, Artificial Sequence
  MKO10123475_B_Trpm7
  gRNA
tgctctctatccaggatttc

SEQ ID NO: 123476 - DNA, 20 bp, Artificial Sequence
  MKO10123476_B_Trpm7
  gRNA
agatttgtcagcaacttgtc

SEQ ID NO: 123477 - DNA, 20 bp, Artificial Sequence
  MKO10123477_B_Trpm7
  gRNA
tgctgacaaatctgacatcc

SEQ ID NO: 123478 - DNA, 20 bp, Artificial Sequence
  MKO10123478_B_Trpm8
  gRNA
tacggcctgatgaagtacat

SEQ ID NO: 123479 - DNA, 20 bp, Artificial Sequence
  MKO10123479_B_Trpm8
  gRNA
tctgggtgccttcgatgtgc

SEQ ID NO: 123480 - DNA, 20 bp, Artificial Sequence
  MKO10123480_B_Trpm8
  gRNA
cacccgtcactgaaatgacc

SEQ ID NO: 123481 - DNA, 20 bp, Artificial Sequence
  MKO10123481_B_Trps1
  gRNA
ttcctacccgtaacagcgac

SEQ ID NO: 123482 - DNA, 20 bp, Artificial Sequence
  MKO10123482_B_Trps1
  gRNA
ggcacatgactcaagtagtg

SEQ ID NO: 123483 - DNA, 20 bp, Artificial Sequence
  MKO10123483_B_Trps1
  gRNA
tctactgccaagccatacat

SEQ ID NO: 123484 - DNA, 20 bp, Artificial Sequence
  MKO10123484_B_Trpt1
  gRNA
ctgggacttcccatgcgagc

SEQ ID NO: 123485 - DNA, 20 bp, Artificial Sequence
  MKO10123485_B_Trpt1
  gRNA
aggcattcgtccaaattgtg

SEQ ID NO: 123486 - DNA, 20 bp, Artificial Sequence
  MKO10123486_B_Trpt1
  gRNA
aggggcgtcagttccaactc

SEQ ID NO: 123487 - DNA, 20 bp, Artificial Sequence
  MKO10123487_B_Trpv1
  gRNA
ctcctgcgatcatagagcct

SEQ ID NO: 123488 - DNA, 20 bp, Artificial Sequence
  MKO10123488_B_Trpv1
  gRNA
tgccatgttccgcctttcaa

SEQ ID NO: 123489 - DNA, 20 bp, Artificial Sequence
  MKO10123489_B_Trpv1
  gRNA
agacaggtctttcccgtctc

SEQ ID NO: 123490 - DNA, 20 bp, Artificial Sequence
  MKO10123490_B_Trpv2
  gRNA
acaggtcgtacagtgacact

SEQ ID NO: 123491 - DNA, 20 bp, Artificial Sequence
  MKO10123491_B_Trpv2
  gRNA
ccgtgaccgactcttcagtg

SEQ ID NO: 123492 - DNA, 20 bp, Artificial Sequence
  MKO10123492_B_Trpv2
  gRNA
caaaccgatttgggtcctgt

SEQ ID NO: 123493 - DNA, 20 bp, Artificial Sequence
  MKO10123493_B_Trpv3
  gRNA
tactcaccactgccggatgt

SEQ ID NO: 123494 - DNA, 20 bp, Artificial Sequence
  MKO10123494_B_Trpv3
  gRNA
ccaacaccaaagagatcgtg

SEQ ID NO: 123495 - DNA, 20 bp, Artificial Sequence
  MKO10123495_B_Trpv3
  gRNA
acccatcttctccaagccga

SEQ ID NO: 123496 - DNA, 20 bp, Artificial Sequence
  MKO10123496_B_Trpv4
  gRNA
gggagccgacgtgcacgccc

SEQ ID NO: 123497 - DNA, 20 bp, Artificial Sequence
  MKO10123497_B_Trpv4
  gRNA
cagtccatctaggtccgcag

SEQ ID NO: 123498 - DNA, 20 bp, Artificial Sequence
  MKO10123498_B_Trpv4
  gRNA
cgacaccatcccggtgttgc

SEQ ID NO: 123499 - DNA, 20 bp, Artificial Sequence
  MKO10123499_B_Trpv5
  gRNA
tgctgctataatgctgatgg

SEQ ID NO: 123500 - DNA, 20 bp, Artificial Sequence
  MKO10123500_B_Trpv5
  gRNA
acactgtgtgagccatttgt

SEQ ID NO: 123501 - DNA, 20 bp, Artificial Sequence
  MKO10123501_B_Trpv5
  gRNA
gttaggttgctcattgagca

SEQ ID NO: 123502 - DNA, 20 bp, Artificial Sequence
  MKO10123502_B_Trpv6
  gRNA
gttagactgctcattgagca

SEQ ID NO: 123503 - DNA, 20 bp, Artificial Sequence
  MKO10123503_B_Trpv6
  gRNA
gtgaagtgcagtttccccca

SEQ ID NO: 123504 - DNA, 20 bp, Artificial Sequence
  MKO10123504_B_Trpv6
  gRNA
cccctcgggcaagcagagca

SEQ ID NO: 123505 - DNA, 20 bp, Artificial Sequence
  MKO10123505_B_Trrap
  gRNA
aacgaagttgaaaatgatgc

SEQ ID NO: 123506 - DNA, 20 bp, Artificial Sequence
  MKO10123506_B_Trrap
  gRNA
ttgagctgcacaaacagttc

SEQ ID NO: 123507 - DNA, 20 bp, Artificial Sequence
  MKO10123507_B_Trrap
  gRNA
tccaggaatgtagaatactg

SEQ ID NO: 123508 - DNA, 20 bp, Artificial Sequence
  MKO10123508_B_Trub1
  gRNA
ggtggtttcacctctgattg

SEQ ID NO: 123509 - DNA, 20 bp, Artificial Sequence
  MKO10123509_B_Trub1
  gRNA
acgctggacagtgcagcgca

SEQ ID NO: 123510 - DNA, 20 bp, Artificial Sequence
  MKO10123510_B_Trub1
  gRNA
tcctagaggtatatcaccat

SEQ ID NO: 123511 - DNA, 20 bp, Artificial Sequence
  MKO10123511_B_Trub2
  gRNA
cagcgtgttcgcttcttgct

SEQ ID NO: 123512 - DNA, 20 bp, Artificial Sequence
  MKO10123512_B_Trub2
  gRNA
gggacatcgcttggatgtcc

SEQ ID NO: 123513 - DNA, 20 bp, Artificial Sequence
  MKO10123513_B_Trub2
  gRNA
gtatgatgctcatctcacca

SEQ ID NO: 123514 - DNA, 20 bp, Artificial Sequence
  MKO10123514_B_Try10
  gRNA
agagcacaacatcaacgtcc

SEQ ID NO: 123515 - DNA, 20 bp, Artificial Sequence
  MKO10123515_B_Try10
  gRNA
accaagaacatgatctgtgt

SEQ ID NO: 123516 - DNA, 20 bp, Artificial Sequence
  MKO10123516_B_Try10
  gRNA
gagctgcagacaccacccac

SEQ ID NO: 123517 - DNA, 20 bp, Artificial Sequence
  MKO10123517_B_Try4
  gRNA
ctactcaccaccaaagctca

SEQ ID NO: 123518 - DNA, 20 bp, Artificial Sequence
  MKO10123518_B_Try4
  gRNA
cagccgcatccaagtgagac

SEQ ID NO: 123519 - DNA, 20 bp, Artificial Sequence
  MKO10123519_B_Try4
  gRNA
cccagacctgctccagtgcc

SEQ ID NO: 123520 - DNA, 20 bp, Artificial Sequence
  MKO10123520_B_Try5
  gRNA
agagaattctatcccctacc

SEQ ID NO: 123521 - DNA, 20 bp, Artificial Sequence
  MKO10123521_B_Try5
  gRNA
ggggatagaattctctcggc

SEQ ID NO: 123522 - DNA, 20 bp, Artificial Sequence
  MKO10123522_B_Try5
  gRNA
agctgtccattgcaaaccac

SEQ ID NO: 123523 - DNA, 20 bp, Artificial Sequence
  MKO10123523_B_Tsacc
  gRNA
tcaacgacagatagctattt

SEQ ID NO: 123524 - DNA, 20 bp, Artificial Sequence
  MKO10123524_B_Tsacc
  gRNA
ttagctggcgtgaaatttgc

SEQ ID NO: 123525 - DNA, 20 bp, Artificial Sequence
  MKO10123525_B_Tsacc
  gRNA
ccacagctcatttatggaat

SEQ ID NO: 123526 - DNA, 20 bp, Artificial Sequence
  MKO10123526_B_Tsc1
  gRNA
ccagtactcaccttatcgtg

SEQ ID NO: 123527 - DNA, 20 bp, Artificial Sequence
  MKO10123527_B_Tsc1
  gRNA
tcatactgtagtgagagcgc

SEQ ID NO: 123528 - DNA, 20 bp, Artificial Sequence
  MKO10123528_B_Tsc1
  gRNA
ttccctgactgcgggatcat

SEQ ID NO: 123529 - DNA, 20 bp, Artificial Sequence
  MKO10123529_B_Tsc22d1
  gRNA
ccctcaccgcatacatcaaa

SEQ ID NO: 123530 - DNA, 20 bp, Artificial Sequence
  MKO10123530_B_Tsc22d1
  gRNA
ttccagctctggtgcaagtg

SEQ ID NO: 123531 - DNA, 20 bp, Artificial Sequence
  MKO10123531_B_Tsc22d1
  gRNA
caacaaaatagagcaagcta

SEQ ID NO: 123532 - DNA, 20 bp, Artificial Sequence
  MKO10123532_B_Tsc22d2
  gRNA
tgttgttgagaagtgctacc

SEQ ID NO: 123533 - DNA, 20 bp, Artificial Sequence
  MKO10123533_B_Tsc22d2
  gRNA
agtaatcatacctatcccag

SEQ ID NO: 123534 - DNA, 20 bp, Artificial Sequence
  MKO10123534_B_Tsc22d2
  gRNA
gtcccaactcccagcccaac

SEQ ID NO: 123535 - DNA, 20 bp, Artificial Sequence
  MKO10123535_B_Tsc22d3
  gRNA
ggatgtggtttccgttaaac

SEQ ID NO: 123536 - DNA, 20 bp, Artificial Sequence
  MKO10123536_B_Tsc22d3
  gRNA
gctcacgaatctgctccttt

SEQ ID NO: 123537 - DNA, 20 bp, Artificial Sequence
  MKO10123537_B_Tsc22d3
  gRNA
ctgatagaccgccacctcca

SEQ ID NO: 123538 - DNA, 20 bp, Artificial Sequence
  MKO10123538_B_Tsc22d4
  gRNA
cggaatggctctccgccacc

SEQ ID NO: 123539 - DNA, 20 bp, Artificial Sequence
  MKO10123539_B_Tsc22d4
  gRNA
catgtttgccgtgcgagaag

SEQ ID NO: 123540 - DNA, 20 bp, Artificial Sequence
  MKO10123540_B_Tsc22d4
  gRNA
acctggacagcgatgacgat

SEQ ID NO: 123541 - DNA, 20 bp, Artificial Sequence
  MKO10123541_B_Tsc2
  gRNA
tgacgaatacattgcatcaa

SEQ ID NO: 123542 - DNA, 20 bp, Artificial Sequence
  MKO10123542_B_Tsc2
  gRNA
ttgtctttagggtgatcgtt

SEQ ID NO: 123543 - DNA, 20 bp, Artificial Sequence
  MKO10123543_B_Tsc2
  gRNA
ataaggtgagaactgcatgc

SEQ ID NO: 123544 - DNA, 20 bp, Artificial Sequence
  MKO10123544_B_Tsen15
  gRNA
tcaaaactgacctgagggtc

SEQ ID NO: 123545 - DNA, 20 bp, Artificial Sequence
  MKO10123545_B_Tsen15
  gRNA
ccaagtttatatagcattct

SEQ ID NO: 123546 - DNA, 20 bp, Artificial Sequence
  MKO10123546_B_Tsen15
  gRNA
tggcatgaagtaaactgtgt

SEQ ID NO: 123547 - DNA, 20 bp, Artificial Sequence
  MKO10123547_B_Tsen2
  gRNA
gggttggcgattgtgaagtt

SEQ ID NO: 123548 - DNA, 20 bp, Artificial Sequence
  MKO10123548_B_Tsen2
  gRNA
tacttctctgaggtgattat

SEQ ID NO: 123549 - DNA, 20 bp, Artificial Sequence
  MKO10123549_B_Tsen2
  gRNA
tgtgcagaagaaatccatac

SEQ ID NO: 123550 - DNA, 20 bp, Artificial Sequence
  MKO10123550_B_Tsen34
  gRNA
gattcttcatctccccaacc

SEQ ID NO: 123551 - DNA, 20 bp, Artificial Sequence
  MKO10123551_B_Tsen34
  gRNA
caaactcaccaggatagacc

SEQ ID NO: 123552 - DNA, 20 bp, Artificial Sequence
  MKO10123552_B_Tsen34
  gRNA
catcactggtctcactccct

SEQ ID NO: 123553 - DNA, 20 bp, Artificial Sequence
  MKO10123553_B_Tsen54
  gRNA
aggcagatacctggtactgc

SEQ ID NO: 123554 - DNA, 20 bp, Artificial Sequence
  MKO10123554_B_Tsen54
  gRNA
ctgccgcacaggggaaattc

SEQ ID NO: 123555 - DNA, 20 bp, Artificial Sequence
  MKO10123555_B_Tsen54
  gRNA
tatgcctcttggatagacag

SEQ ID NO: 123556 - DNA, 20 bp, Artificial Sequence
  MKO10123556_B_Tsfm
  gRNA
actgtcagaacctgacggat

SEQ ID NO: 123557 - DNA, 20 bp, Artificial Sequence
  MKO10123557_B_Tsfm
  gRNA
ttgtggcggtgacctcaagc

SEQ ID NO: 123558 - DNA, 20 bp, Artificial Sequence
  MKO10123558_B_Tsfm
  gRNA
agcaaagccgccaagctcca

SEQ ID NO: 123559 - DNA, 20 bp, Artificial Sequence
  MKO10123559_B_Tsg101
  gRNA
aaacagataggggggttata

SEQ ID NO: 123560 - DNA, 20 bp, Artificial Sequence
  MKO10123560_B_Tsg101
  gRNA
acaatcccagtgcgttatcg

SEQ ID NO: 123561 - DNA, 20 bp, Artificial Sequence
  MKO10123561_B_Tsg101
  gRNA
agctccagcaactctgaccg

SEQ ID NO: 123562 - DNA, 20 bp, Artificial Sequence
  MKO10123562_B_Tsga10
  gRNA
cagcacatgctattcttcgt

SEQ ID NO: 123563 - DNA, 20 bp, Artificial Sequence
  MKO10123563_B_Tsga10
  gRNA
cattcttcgtaggtcagtga

SEQ ID NO: 123564 - DNA, 20 bp, Artificial Sequence
  MKO10123564_B_Tsga10
  gRNA
atggacaccgagagtgagct

SEQ ID NO: 123565 - DNA, 20 bp, Artificial Sequence
  MKO10123565_B_Tsga13
  gRNA
tgcagtttagtgggcttcaa

SEQ ID NO: 123566 - DNA, 20 bp, Artificial Sequence
  MKO10123566_B_Tsga13
  gRNA
gatgcactgtgtagtgtctg

SEQ ID NO: 123567 - DNA, 20 bp, Artificial Sequence
  MKO10123567_B_Tsga13
  gRNA
ctacacagtgcatccaaaca

SEQ ID NO: 123568 - DNA, 20 bp, Artificial Sequence
  MKO10123568_B_Tsga8
  gRNA
tgaagcctataatgccaatt

SEQ ID NO: 123569 - DNA, 20 bp, Artificial Sequence
  MKO10123569_B_Tsga8
  gRNA
agtagcgactgcttctccgc

SEQ ID NO: 123570 - DNA, 20 bp, Artificial Sequence
  MKO10123570_B_Tsga8
  gRNA
accgcgtttcccacgcttgt

SEQ ID NO: 123571 - DNA, 20 bp, Artificial Sequence
  MKO10123571_B_Tshb
  gRNA
cacgtacattgtatactcag

SEQ ID NO: 123572 - DNA, 20 bp, Artificial Sequence
  MKO10123572_B_Tshb
  gRNA
atcctgagagagtgcatatt

SEQ ID NO: 123573 - DNA, 20 bp, Artificial Sequence
  MKO10123573_B_Tshb
  gRNA
gtcgccataagctgcaagtg

SEQ ID NO: 123574 - DNA, 20 bp, Artificial Sequence
  MKO10123574_B_Tshr
  gRNA
ctatagatgcaactctgcag

SEQ ID NO: 123575 - DNA, 20 bp, Artificial Sequence
  MKO10123575_B_Tshr
  gRNA
gcggcaggctggggattcgg

SEQ ID NO: 123576 - DNA, 20 bp, Artificial Sequence
  MKO10123576_B_Tshr
  gRNA
ggagctctgtcaaggcatca

SEQ ID NO: 123577 - DNA, 20 bp, Artificial Sequence
  MKO10123577_B_Tshz1
  gRNA
gcccgagcagcatgccgagg

SEQ ID NO: 123578 - DNA, 20 bp, Artificial Sequence
  MKO10123578_B_Tshz1
  gRNA
tctcgtagcttacgttcccg

SEQ ID NO: 123579 - DNA, 20 bp, Artificial Sequence
  MKO10123579_B_Tshz1
  gRNA
tccgtagccagcgtcttgat

SEQ ID NO: 123580 - DNA, 20 bp, Artificial Sequence
  MKO10123580_B_Tshz2
  gRNA
taagtagagcgatgccaagg

SEQ ID NO: 123581 - DNA, 20 bp, Artificial Sequence
  MKO10123581_B_Tshz2
  gRNA
gacatcgaaaacacgcttct

SEQ ID NO: 123582 - DNA, 20 bp, Artificial Sequence
  MKO10123582_B_Tshz2
  gRNA
ggagatctcccgagtgtcgt

SEQ ID NO: 123583 - DNA, 20 bp, Artificial Sequence
  MKO10123583_B_Tshz3
  gRNA
cgctcgtacctgctgcgcgc

SEQ ID NO: 123584 - DNA, 20 bp, Artificial Sequence
  MKO10123584_B_Tshz3
  gRNA
gcctcgcaaacggtctttgt

SEQ ID NO: 123585 - DNA, 20 bp, Artificial Sequence
  MKO10123585_B_Tshz3
  gRNA
tagctgcaaactgcgcctgc

SEQ ID NO: 123586 - DNA, 20 bp, Artificial Sequence
  MKO10123586_B_Tsks
  gRNA
tgccgtggagcccgactcct

SEQ ID NO: 123587 - DNA, 20 bp, Artificial Sequence
  MKO10123587_B_Tsks
  gRNA
ggtagaaagccgtgcccagc

SEQ ID NO: 123588 - DNA, 20 bp, Artificial Sequence
  MKO10123588_B_Tsks
  gRNA
tcagcacgttcagactctgc

SEQ ID NO: 123589 - DNA, 20 bp, Artificial Sequence
  MKO10123589_B_Tsku
  gRNA
ggtaacgcaggggtaggtct

SEQ ID NO: 123590 - DNA, 20 bp, Artificial Sequence
  MKO10123590_B_Tsku
  gRNA
gctttacaaagtgtcagcgt

SEQ ID NO: 123591 - DNA, 20 bp, Artificial Sequence
  MKO10123591_B_Tsku
  gRNA
gtgactccaggtagcgcagt

SEQ ID NO: 123592 - DNA, 20 bp, Artificial Sequence
  MKO10123592_B_Tslp
  gRNA
acagagaaatgacggtactc

SEQ ID NO: 123593 - DNA, 20 bp, Artificial Sequence
  MKO10123593_B_Tslp
  gRNA
tccccgacaaaacatttgcc

SEQ ID NO: 123594 - DNA, 20 bp, Artificial Sequence
  MKO10123594_B_Tslp
  gRNA
gccctcaatgaccactgccc

SEQ ID NO: 123595 - DNA, 20 bp, Artificial Sequence
  MKO10123595_B_Tsnaxip1
  gRNA
gcaggaggagttccttgcgc

SEQ ID NO: 123596 - DNA, 20 bp, Artificial Sequence
  MKO10123596_B_Tsnaxip1
  gRNA
ttcgattatgtagaactgtc

SEQ ID NO: 123597 - DNA, 20 bp, Artificial Sequence
  MKO10123597_B_Tsnaxip1
  gRNA
actagaaaactacctgcgca

SEQ ID NO: 123598 - DNA, 20 bp, Artificial Sequence
  MKO10123598_B_Tsnax
  gRNA
cctaaggaccaggagggttc

SEQ ID NO: 123599 - DNA, 20 bp, Artificial Sequence
  MKO10123599_B_Tsnax
  gRNA
atgtgttctagcatttcagc

SEQ ID NO: 123600 - DNA, 20 bp, Artificial Sequence
  MKO10123600_B_Tsnax
  gRNA
gtcagtatctcctccatatc

SEQ ID NO: 123601 - DNA, 20 bp, Artificial Sequence
  MKO10123601_B_Tsn
  gRNA
gaatctctgtaacagcctct

SEQ ID NO: 123602 - DNA, 20 bp, Artificial Sequence
  MKO10123602_B_Tsn
  gRNA
aaaagggtttcatctggatg

SEQ ID NO: 123603 - DNA, 20 bp, Artificial Sequence
  MKO10123603_B_Tsn
  gRNA
tttaattcttgccagtgaac

SEQ ID NO: 123604 - DNA, 20 bp, Artificial Sequence
  MKO10123604_B_Tspan10
  gRNA
atgcagccatcattcactac

SEQ ID NO: 123605 - DNA, 20 bp, Artificial Sequence
  MKO10123605_B_Tspan10
  gRNA
tcggctcacctgagacagca

SEQ ID NO: 123606 - DNA, 20 bp, Artificial Sequence
  MKO10123606_B_Tspan10
  gRNA
atgcagccccttgctgtctc

SEQ ID NO: 123607 - DNA, 20 bp, Artificial Sequence
  MKO10123607_B_Tspan11
  gRNA
ggtaggtggggcagccgtca

SEQ ID NO: 123608 - DNA, 20 bp, Artificial Sequence
  MKO10123608_B_Tspan11
  gRNA
tggcacatgtgtactaccag

SEQ ID NO: 123609 - DNA, 20 bp, Artificial Sequence
  MKO10123609_B_Tspan11
  gRNA
cagcgcgtacatcttgtctc

SEQ ID NO: 123610 - DNA, 20 bp, Artificial Sequence
  MKO10123610_B_Tspan12
  gRNA
ccagcattcccacgatgata

SEQ ID NO: 123611 - DNA, 20 bp, Artificial Sequence
  MKO10123611_B_Tspan12
  gRNA
accatatctgaccactgtac

SEQ ID NO: 123612 - DNA, 20 bp, Artificial Sequence
  MKO10123612_B_Tspan12
  gRNA
cgtcatcttctgtgtagaac

SEQ ID NO: 123613 - DNA, 20 bp, Artificial Sequence
  MKO10123613_B_Tspan13
  gRNA
gctgatctccagtctccgag

SEQ ID NO: 123614 - DNA, 20 bp, Artificial Sequence
  MKO10123614_B_Tspan13
  gRNA
gctgcctggggcatcggctt

SEQ ID NO: 123615 - DNA, 20 bp, Artificial Sequence
  MKO10123615_B_Tspan13
  gRNA
cacagcagttcaaattcctc

SEQ ID NO: 123616 - DNA, 20 bp, Artificial Sequence
  MKO10123616_B_Tspan14
  gRNA
atgcccacagcccgactcca

SEQ ID NO: 123617 - DNA, 20 bp, Artificial Sequence
  MKO10123617_B_Tspan14
  gRNA
gctgtgggcatggagcgaaa

SEQ ID NO: 123618 - DNA, 20 bp, Artificial Sequence
  MKO10123618_B_Tspan14
  gRNA
agagcaacatcaagtcctat

SEQ ID NO: 123619 - DNA, 20 bp, Artificial Sequence
  MKO10123619_B_Tspan15
  gRNA
agtaattctcgattcctctc

SEQ ID NO: 123620 - DNA, 20 bp, Artificial Sequence
  MKO10123620_B_Tspan15
  gRNA
caccaataagctccatgacc

SEQ ID NO: 123621 - DNA, 20 bp, Artificial Sequence
  MKO10123621_B_Tspan15
  gRNA
cgatgaacatgaccaccccc

SEQ ID NO: 123622 - DNA, 20 bp, Artificial Sequence
  MKO10123622_B_Tspan17
  gRNA
gaaccttatcgactttgctc

SEQ ID NO: 123623 - DNA, 20 bp, Artificial Sequence
  MKO10123623_B_Tspan17
  gRNA
agggcaccccacagcgctca

SEQ ID NO: 123624 - DNA, 20 bp, Artificial Sequence
  MKO10123624_B_Tspan17
  gRNA
aacccaagccgtgagcgctg

SEQ ID NO: 123625 - DNA, 20 bp, Artificial Sequence
  MKO10123625_B_Tspan18
  gRNA
caccggcttccgagaaatcg

SEQ ID NO: 123626 - DNA, 20 bp, Artificial Sequence
  MKO10123626_B_Tspan18
  gRNA
cagtacgatgtaggcaccgg

SEQ ID NO: 123627 - DNA, 20 bp, Artificial Sequence
  MKO10123627_B_Tspan18
  gRNA
cagcgtcagcagccgaaaca

SEQ ID NO: 123628 - DNA, 20 bp, Artificial Sequence
  MKO10123628_B_Tspan1
  gRNA
cctgctatcgaaaaagacta

SEQ ID NO: 123629 - DNA, 20 bp, Artificial Sequence
  MKO10123629_B_Tspan1
  gRNA
ccattgtagtgttccatact

SEQ ID NO: 123630 - DNA, 20 bp, Artificial Sequence
  MKO10123630_B_Tspan1
  gRNA
ccaccctgttgtgccaaccc

SEQ ID NO: 123631 - DNA, 20 bp, Artificial Sequence
  MKO10123631_B_Tspan2
  gRNA
acagcgactaccttaaagac

SEQ ID NO: 123632 - DNA, 20 bp, Artificial Sequence
  MKO10123632_B_Tspan2
  gRNA
agaaacccacagtcatcatc

SEQ ID NO: 123633 - DNA, 20 bp, Artificial Sequence
  MKO10123633_B_Tspan2
  gRNA
gttactcactgctgagtgga

SEQ ID NO: 123634 - DNA, 20 bp, Artificial Sequence
  MKO10123634_B_Tspan31
  gRNA
cggtcttgagcaacagtacc

SEQ ID NO: 123635 - DNA, 20 bp, Artificial Sequence
  MKO10123635_B_Tspan31
  gRNA
gaatgctagacaccacaccg

SEQ ID NO: 123636 - DNA, 20 bp, Artificial Sequence
  MKO10123636_B_Tspan31
  gRNA
gacaaagccctcaagatcct

SEQ ID NO: 123637 - DNA, 20 bp, Artificial Sequence
  MKO10123637_B_Tspan32
  gRNA
cactggagccatcatgtgtc

SEQ ID NO: 123638 - DNA, 20 bp, Artificial Sequence
  MKO10123638_B_Tspan32
  gRNA
gagattctacaaccccaccc

SEQ ID NO: 123639 - DNA, 20 bp, Artificial Sequence
  MKO10123639_B_Tspan32
  gRNA
cctagcggggctcctgagcc

SEQ ID NO: 123640 - DNA, 20 bp, Artificial Sequence
  MKO10123640_B_Tspan33
  gRNA
ggatccgatacagccgcaga

SEQ ID NO: 123641 - DNA, 20 bp, Artificial Sequence
  MKO10123641_B_Tspan33
  gRNA
tggccgtgggtgtctatgcc

SEQ ID NO: 123642 - DNA, 20 bp, Artificial Sequence
  MKO10123642_B_Tspan33
  gRNA
ggacgcccaccacgatcagc

SEQ ID NO: 123643 - DNA, 20 bp, Artificial Sequence
  MKO10123643_B_Tspan3
  gRNA
ttgtagcacagcagccgatc

SEQ ID NO: 123644 - DNA, 20 bp, Artificial Sequence
  MKO10123644_B_Tspan3
  gRNA
cccctctgacctctacgccg

SEQ ID NO: 123645 - DNA, 20 bp, Artificial Sequence
  MKO10123645_B_Tspan3
  gRNA
gggatacgtgtacagagcaa

SEQ ID NO: 123646 - DNA, 20 bp, Artificial Sequence
  MKO10123646_B_Tspan4
  gRNA
agctcttaccgacttccacc

SEQ ID NO: 123647 - DNA, 20 bp, Artificial Sequence
  MKO10123647_B_Tspan4
  gRNA
cctgcatctgtatggcacac

SEQ ID NO: 123648 - DNA, 20 bp, Artificial Sequence
  MKO10123648_B_Tspan4
  gRNA
gcaacataccttgtcactgt

SEQ ID NO: 123649 - DNA, 20 bp, Artificial Sequence
  MKO10123649_B_Tspan5
  gRNA
gaacctcatagacttcaccc

SEQ ID NO: 123650 - DNA, 20 bp, Artificial Sequence
  MKO10123650_B_Tspan5
  gRNA
acactgggtcaaagccaccg

SEQ ID NO: 123651 - DNA, 20 bp, Artificial Sequence
  MKO10123651_B_Tspan5
  gRNA
attcctgggtgaagtctatg

SEQ ID NO: 123652 - DNA, 20 bp, Artificial Sequence
  MKO10123652_B_Tspan6
  gRNA
gaactagttgccgccattgt

SEQ ID NO: 123653 - DNA, 20 bp, Artificial Sequence
  MKO10123653_B_Tspan6
  gRNA
acaggtagcgaaacaaccaa

SEQ ID NO: 123654 - DNA, 20 bp, Artificial Sequence
  MKO10123654_B_Tspan6
  gRNA
taactatgaaaacgctctga

SEQ ID NO: 123655 - DNA, 20 bp, Artificial Sequence
  MKO10123655_B_Tspan7
  gRNA
aacttacgctgcgctgcaca

SEQ ID NO: 123656 - DNA, 20 bp, Artificial Sequence
  MKO10123656_B_Tspan7
  gRNA
attgccattgtagttctgca

SEQ ID NO: 123657 - DNA, 20 bp, Artificial Sequence
  MKO10123657_B_Tspan7
  gRNA
gatcactggggtgatcctgt

SEQ ID NO: 123658 - DNA, 20 bp, Artificial Sequence
  MKO10123658_B_Tspan8
  gRNA
atagcgtttcattcagaatt

SEQ ID NO: 123659 - DNA, 20 bp, Artificial Sequence
  MKO10123659_B_Tspan8
  gRNA
aggagccgctttcaaacctg

SEQ ID NO: 123660 - DNA, 20 bp, Artificial Sequence
  MKO10123660_B_Tspan8
  gRNA
catcatggttctaggtttcc

SEQ ID NO: 123661 - DNA, 20 bp, Artificial Sequence
  MKO10123661_B_Tspan9
  gRNA
tgactacacagactggtatc

SEQ ID NO: 123662 - DNA, 20 bp, Artificial Sequence
  MKO10123662_B_Tspan9
  gRNA
gaacgcctggaacatcatcc

SEQ ID NO: 123663 - DNA, 20 bp, Artificial Sequence
  MKO10123663_B_Tspan9
  gRNA
ggtgaacgagaatgccaagc

SEQ ID NO: 123664 - DNA, 20 bp, Artificial Sequence
  MKO10123664_B_Tspear
  gRNA
ccacccaccctatcagtaag

SEQ ID NO: 123665 - DNA, 20 bp, Artificial Sequence
  MKO10123665_B_Tspear
  gRNA
tgtggggtggcatctgatcc

SEQ ID NO: 123666 - DNA, 20 bp, Artificial Sequence
  MKO10123666_B_Tspear
  gRNA
gctcctcttactgatagggt

SEQ ID NO: 123667 - DNA, 20 bp, Artificial Sequence
  MKO10123667_B_Tspo2
  gRNA
aggaactcggagggggcttc

SEQ ID NO: 123668 - DNA, 20 bp, Artificial Sequence
  MKO10123668_B_Tspo2
  gRNA
ccgccatcacctaccgcctg

SEQ ID NO: 123669 - DNA, 20 bp, Artificial Sequence
  MKO10123669_B_Tspo2
  gRNA
tcattcatcagccatccagt

SEQ ID NO: 123670 - DNA, 20 bp, Artificial Sequence
  MKO10123670_B_Tspo
  gRNA
cgtgataactctggccggcg

SEQ ID NO: 123671 - DNA, 20 bp, Artificial Sequence
  MKO10123671_B_Tspo
  gRNA
ggtatggctcctacatagtc

SEQ ID NO: 123672 - DNA, 20 bp, Artificial Sequence
  MKO10123672_B_Tspo
  gRNA
gttcccttgggtctctacac

SEQ ID NO: 123673 - DNA, 20 bp, Artificial Sequence
  MKO10123673_B_Tspyl1
  gRNA
ctcccttattgggcgacgtc

SEQ ID NO: 123674 - DNA, 20 bp, Artificial Sequence
  MKO10123674_B_Tspyl1
  gRNA
gcgaatgcgacgacactacc

SEQ ID NO: 123675 - DNA, 20 bp, Artificial Sequence
  MKO10123675_B_Tspyl1
  gRNA
ccccgcgccccgagatgtcg

SEQ ID NO: 123676 - DNA, 20 bp, Artificial Sequence
  MKO10123676_B_Tspyl2
  gRNA
acttacctgagcggttgcgc

SEQ ID NO: 123677 - DNA, 20 bp, Artificial Sequence
  MKO10123677_B_Tspyl2
  gRNA
gtcatggctcctgcgattat

SEQ ID NO: 123678 - DNA, 20 bp, Artificial Sequence
  MKO10123678_B_Tspyl2
  gRNA
gtacgctactatatgagacg

SEQ ID NO: 123679 - DNA, 20 bp, Artificial Sequence
  MKO10123679_B_Tspyl3
  gRNA
gtgtgcatcccgctcttgta

SEQ ID NO: 123680 - DNA, 20 bp, Artificial Sequence
  MKO10123680_B_Tspyl3
  gRNA
tgaggaagactctgtagccg

SEQ ID NO: 123681 - DNA, 20 bp, Artificial Sequence
  MKO10123681_B_Tspyl3
  gRNA
tgcctcccgcgttctgaacc

SEQ ID NO: 123682 - DNA, 20 bp, Artificial Sequence
  MKO10123682_B_Tspyl4
  gRNA
agacgcgcctccatccgcac

SEQ ID NO: 123683 - DNA, 20 bp, Artificial Sequence
  MKO10123683_B_Tspyl4
  gRNA
agttgtgctgcggcagcgag

SEQ ID NO: 123684 - DNA, 20 bp, Artificial Sequence
  MKO10123684_B_Tspyl4
  gRNA
gagtgacaccactcgacctg

SEQ ID NO: 123685 - DNA, 20 bp, Artificial Sequence
  MKO10123685_B_Tspyl5
  gRNA
acccctactccgtccgctca

SEQ ID NO: 123686 - DNA, 20 bp, Artificial Sequence
  MKO10123686_B_Tspyl5
  gRNA
cgaaagtcttcccgcgccaa

SEQ ID NO: 123687 - DNA, 20 bp, Artificial Sequence
  MKO10123687_B_Tspyl5
  gRNA
ctaagtggtgaagtcgcaac

SEQ ID NO: 123688 - DNA, 20 bp, Artificial Sequence
  MKO10123688_B_Tsr1
  gRNA
tttaaagggaacggatccac

SEQ ID NO: 123689 - DNA, 20 bp, Artificial Sequence
  MKO10123689_B_Tsr1
  gRNA
cacacttactataggtggga

SEQ ID NO: 123690 - DNA, 20 bp, Artificial Sequence
  MKO10123690_B_Tsr1
  gRNA
gctggctggcgcgatgcctc

SEQ ID NO: 123691 - DNA, 20 bp, Artificial Sequence
  MKO10123691_B_Tsr2
  gRNA
agctgcagtccgagctgcgc

SEQ ID NO: 123692 - DNA, 20 bp, Artificial Sequence
  MKO10123692_B_Tsr2
  gRNA
gagcagccccatcacccttc

SEQ ID NO: 123693 - DNA, 20 bp, Artificial Sequence
  MKO10123693_B_Tsr2
  gRNA
ggaacatggtctgtagctgt

SEQ ID NO: 123694 - DNA, 20 bp, Artificial Sequence
  MKO10123694_B_Tsr3
  gRNA
gggagtttgtgaatctcaac

SEQ ID NO: 123695 - DNA, 20 bp, Artificial Sequence
  MKO10123695_B_Tsr3
  gRNA
tcgcagtcatagactgctcc

SEQ ID NO: 123696 - DNA, 20 bp, Artificial Sequence
  MKO10123696_B_Tsr3
  gRNA
caccagggacacgcctgaag

SEQ ID NO: 123697 - DNA, 20 bp, Artificial Sequence
  MKO10123697_B_Tssc1
  gRNA
cgtcccaaccaagaagcgaa

SEQ ID NO: 123698 - DNA, 20 bp, Artificial Sequence
  MKO10123698_B_Tssc1
  gRNA
ccgatagccacatcctgctg

SEQ ID NO: 123699 - DNA, 20 bp, Artificial Sequence
  MKO10123699_B_Tssc1
  gRNA
tagtgtcgtgtgggaaccga

SEQ ID NO: 123700 - DNA, 20 bp, Artificial Sequence
  MKO10123700_B_Tssc4
  gRNA
aggtcgtatggcggagacag

SEQ ID NO: 123701 - DNA, 20 bp, Artificial Sequence
  MKO10123701_B_Tssc4
  gRNA
ggaccctccatcgcccccca

SEQ ID NO: 123702 - DNA, 20 bp, Artificial Sequence
  MKO10123702_B_Tssc4
  gRNA
ggaggctgatgaacccaccg

SEQ ID NO: 123703 - DNA, 20 bp, Artificial Sequence
  MKO10123703_B_Tssk1
  gRNA
tgagcgcctaaagttcaacg

SEQ ID NO: 123704 - DNA, 20 bp, Artificial Sequence
  MKO10123704_B_Tssk1
  gRNA
tgaccgccacgttgaacttt

SEQ ID NO: 123705 - DNA, 20 bp, Artificial Sequence
  MKO10123705_B_Tssk1
  gRNA
ccctgttcagttcgctgctg

SEQ ID NO: 123706 - DNA, 20 bp, Artificial Sequence
  MKO10123706_B_Tssk2
  gRNA
gatctcgtaggtcttaatga

SEQ ID NO: 123707 - DNA, 20 bp, Artificial Sequence
  MKO10123707_B_Tssk2
  gRNA
tgcgcccactcccgtcccgc

SEQ ID NO: 123708 - DNA, 20 bp, Artificial Sequence
  MKO10123708_B_Tssk2
  gRNA
gtatcgagctgattgcaagt

SEQ ID NO: 123709 - DNA, 20 bp, Artificial Sequence
  MKO10123709_B_Tssk3
  gRNA
tatcagctgggcaagaccat

SEQ ID NO: 123710 - DNA, 20 bp, Artificial Sequence
  MKO10123710_B_Tssk3
  gRNA
cttcaatcgaagaagttagt

SEQ ID NO: 123711 - DNA, 20 bp, Artificial Sequence
  MKO10123711_B_Tssk3
  gRNA
aggtgctacccaagtcacgc

SEQ ID NO: 123712 - DNA, 20 bp, Artificial Sequence
  MKO10123712_B_Tssk4
  gRNA
cccagcctatcgctctgtca

SEQ ID NO: 123713 - DNA, 20 bp, Artificial Sequence
  MKO10123713_B_Tssk4
  gRNA
taagaagggctactatgcac

SEQ ID NO: 123714 - DNA, 20 bp, Artificial Sequence
  MKO10123714_B_Tssk4
  gRNA
atcccgagtatacatcattt

SEQ ID NO: 123715 - DNA, 20 bp, Artificial Sequence
  MKO10123715_B_Tssk5
  gRNA
cgttgtacttcttgctcatg

SEQ ID NO: 123716 - DNA, 20 bp, Artificial Sequence
  MKO10123716_B_Tssk5
  gRNA
ggctatcaagattgtgtcca

SEQ ID NO: 123717 - DNA, 20 bp, Artificial Sequence
  MKO10123717_B_Tssk5
  gRNA
ctgtcagctttatgaagccc

SEQ ID NO: 123718 - DNA, 20 bp, Artificial Sequence
  MKO10123718_B_Tssk6
  gRNA
agcaatgtccgagtcgtcga

SEQ ID NO: 123719 - DNA, 20 bp, Artificial Sequence
  MKO10123719_B_Tssk6
  gRNA
tcgaaaacgtgtacgatgtg

SEQ ID NO: 123720 - DNA, 20 bp, Artificial Sequence
  MKO10123720_B_Tssk6
  gRNA
ggtagagcacgccgcgcttc

SEQ ID NO: 123721 - DNA, 20 bp, Artificial Sequence
  MKO10123721_B_Tsta3
  gRNA
ctatcctattgacgagacaa

SEQ ID NO: 123722 - DNA, 20 bp, Artificial Sequence
  MKO10123722_B_Tsta3
  gRNA
cgtcatccatctcgctgcaa

SEQ ID NO: 123723 - DNA, 20 bp, Artificial Sequence
  MKO10123723_B_Tsta3
  gRNA
ggatgattgacgtgcagaac

SEQ ID NO: 123724 - DNA, 20 bp, Artificial Sequence
  MKO10123724_B_Tstd1
  gRNA
gggtctccaggccacacaac

SEQ ID NO: 123725 - DNA, 20 bp, Artificial Sequence
  MKO10123725_B_Tstd1
  gRNA
tcccctctcagtgtctgaat

SEQ ID NO: 123726 - DNA, 20 bp, Artificial Sequence
  MKO10123726_B_Tstd1
  gRNA
gcgtcacagtcacacaagtg

SEQ ID NO: 123727 - DNA, 20 bp, Artificial Sequence
  MKO10123727_B_Tstd2
  gRNA
tgccatcacctgcaccttac

SEQ ID NO: 123728 - DNA, 20 bp, Artificial Sequence
  MKO10123728_B_Tstd2
  gRNA
ccttaaaatcatcctcgctc

SEQ ID NO: 123729 - DNA, 20 bp, Artificial Sequence
  MKO10123729_B_Tstd2
  gRNA
gggctaacatggctcacatc

SEQ ID NO: 123730 - DNA, 20 bp, Artificial Sequence
  MKO10123730_B_Tstd3
  gRNA
tccctataagtcacaccctt

SEQ ID NO: 123731 - DNA, 20 bp, Artificial Sequence
  MKO10123731_B_Tstd3
  gRNA
ggatcagtggagcctgcgct

SEQ ID NO: 123732 - DNA, 20 bp, Artificial Sequence
  MKO10123732_B_Tstd3
  gRNA
tatggacacagcaatatcac

SEQ ID NO: 123733 - DNA, 20 bp, Artificial Sequence
  MKO10123733_B_Tst
  gRNA
tctcgaagccatctttcgtc

SEQ ID NO: 123734 - DNA, 20 bp, Artificial Sequence
  MKO10123734_B_Tst
  gRNA
cgccaggcacgtgtcgctcc

SEQ ID NO: 123735 - DNA, 20 bp, Artificial Sequence
  MKO10123735_B_Tst
  gRNA
tttgcgtgcctggcgggtcc

SEQ ID NO: 123736 - DNA, 20 bp, Artificial Sequence
  MKO10123736_B_Tsx
  gRNA
aataatgtgaaagtcatcac

SEQ ID NO: 123737 - DNA, 20 bp, Artificial Sequence
  MKO10123737_B_Tsx
  gRNA
ttggcaagtgtcctcatcat

SEQ ID NO: 123738 - DNA, 20 bp, Artificial Sequence
  MKO10123738_B_Tsx
  gRNA
gcaatacttgcccagagcag

SEQ ID NO: 123739 - DNA, 20 bp, Artificial Sequence
  MKO10123739_B_Ttbk1
  gRNA
cacaggccggacgtccccag

SEQ ID NO: 123740 - DNA, 20 bp, Artificial Sequence
  MKO10123740_B_Ttbk1
  gRNA
gggcttcggtgagatctatg

SEQ ID NO: 123741 - DNA, 20 bp, Artificial Sequence
  MKO10123741_B_Ttbk1
  gRNA
catagttaaacttctcgtta

SEQ ID NO: 123742 - DNA, 20 bp, Artificial Sequence
  MKO10123742_B_Ttbk2
  gRNA
tggagaaatttacgatgcct

SEQ ID NO: 123743 - DNA, 20 bp, Artificial Sequence
  MKO10123743_B_Ttbk2
  gRNA
tctgtgcagttaagaaagat

SEQ ID NO: 123744 - DNA, 20 bp, Artificial Sequence
  MKO10123744_B_Ttbk2
  gRNA
gaccatgtttgtagatttat

SEQ ID NO: 123745 - DNA, 20 bp, Artificial Sequence
  MKO10123745_B_Ttc12
  gRNA
cagtcctccacaaactcccg

SEQ ID NO: 123746 - DNA, 20 bp, Artificial Sequence
  MKO10123746_B_Ttc12
  gRNA
agggaaacctcgggagtttg

SEQ ID NO: 123747 - DNA, 20 bp, Artificial Sequence
  MKO10123747_B_Ttc12
  gRNA
tctgctgtcagatgccttct

SEQ ID NO: 123748 - DNA, 20 bp, Artificial Sequence
  MKO10123748_B_Ttc13
  gRNA
gagtctgactgcgaactgag

SEQ ID NO: 123749 - DNA, 20 bp, Artificial Sequence
  MKO10123749_B_Ttc13
  gRNA
cgtagagaccgctgcccacc

SEQ ID NO: 123750 - DNA, 20 bp, Artificial Sequence
  MKO10123750_B_Ttc13
  gRNA
ctttccataggaagccatcg

SEQ ID NO: 123751 - DNA, 20 bp, Artificial Sequence
  MKO10123751_B_Ttc14
  gRNA
tatcaccacgttcaatatct

SEQ ID NO: 123752 - DNA, 20 bp, Artificial Sequence
  MKO10123752_B_Ttc14
  gRNA
attgtcgtcatgcacttcag

SEQ ID NO: 123753 - DNA, 20 bp, Artificial Sequence
  MKO10123753_B_Ttc14
  gRNA
cctttatcatattatcaaac

SEQ ID NO: 123754 - DNA, 20 bp, Artificial Sequence
  MKO10123754_B_Ttc16
  gRNA
ttctgggaacgggcactgtg

SEQ ID NO: 123755 - DNA, 20 bp, Artificial Sequence
  MKO10123755_B_Ttc16
  gRNA
ggaataacaagtacctgaac

SEQ ID NO: 123756 - DNA, 20 bp, Artificial Sequence
  MKO10123756_B_Ttc16
  gRNA
ctcttaccagtttggggtcc

SEQ ID NO: 123757 - DNA, 20 bp, Artificial Sequence
  MKO10123757_B_Ttc17
  gRNA
agaagaccccgactgtatca

SEQ ID NO: 123758 - DNA, 20 bp, Artificial Sequence
  MKO10123758_B_Ttc17
  gRNA
tggggatgcttcaagttcat

SEQ ID NO: 123759 - DNA, 20 bp, Artificial Sequence
  MKO10123759_B_Ttc17
  gRNA
atcttctttaggtaagagag

SEQ ID NO: 123760 - DNA, 20 bp, Artificial Sequence
  MKO10123760_B_Ttc18
  gRNA
aaagtcactgtctctcccga

SEQ ID NO: 123761 - DNA, 20 bp, Artificial Sequence
  MKO10123761_B_Ttc18
  gRNA
tacctctgaccttctagtaa

SEQ ID NO: 123762 - DNA, 20 bp, Artificial Sequence
  MKO10123762_B_Ttc18
  gRNA
gatcttcttcctttactaga

SEQ ID NO: 123763 - DNA, 20 bp, Artificial Sequence
  MKO10123763_B_Ttc19
  gRNA
gcatgttccggttgcttcgc

SEQ ID NO: 123764 - DNA, 20 bp, Artificial Sequence
  MKO10123764_B_Ttc19
  gRNA
tgttgtcactctcatacgca

SEQ ID NO: 123765 - DNA, 20 bp, Artificial Sequence
  MKO10123765_B_Ttc19
  gRNA
tcgtctgacgcgtcctctcc

SEQ ID NO: 123766 - DNA, 20 bp, Artificial Sequence
  MKO10123766_B_Ttc1
  gRNA
gagcgctaaactaaaggagg

SEQ ID NO: 123767 - DNA, 20 bp, Artificial Sequence
  MKO10123767_B_Ttc1
  gRNA
aacaggctgggcacatctga

SEQ ID NO: 123768 - DNA, 20 bp, Artificial Sequence
  MKO10123768_B_Ttc1
  gRNA
aatgagcggtttaagagagg

SEQ ID NO: 123769 - DNA, 20 bp, Artificial Sequence
  MKO10123769_B_Ttc21a
  gRNA
ttcgatcatttactacagcc

SEQ ID NO: 123770 - DNA, 20 bp, Artificial Sequence
  MKO10123770_B_Ttc21a
  gRNA
gcagcttgaaggaaattcgc

SEQ ID NO: 123771 - DNA, 20 bp, Artificial Sequence
  MKO10123771_B_Ttc21a
  gRNA
tgatggatttcttcacaacg

SEQ ID NO: 123772 - DNA, 20 bp, Artificial Sequence
  MKO10123772_B_Ttc21b
  gRNA
cgtggtaaaatcggaagact

SEQ ID NO: 123773 - DNA, 20 bp, Artificial Sequence
  MKO10123773_B_Ttc21b
  gRNA
accctccatcagtgtgccgt

SEQ ID NO: 123774 - DNA, 20 bp, Artificial Sequence
  MKO10123774_B_Ttc21b
  gRNA
cttatgctaaaaaagccctg

SEQ ID NO: 123775 - DNA, 20 bp, Artificial Sequence
  MKO10123775_B_Ttc22
  gRNA
gccagccttcaaccgtactc

SEQ ID NO: 123776 - DNA, 20 bp, Artificial Sequence
  MKO10123776_B_Ttc22
  gRNA
ccatggcaacactctttatc

SEQ ID NO: 123777 - DNA, 20 bp, Artificial Sequence
  MKO10123777_B_Ttc22
  gRNA
cttgaggacctctccgagca

SEQ ID NO: 123778 - DNA, 20 bp, Artificial Sequence
  MKO10123778_B_Ttc23l
  gRNA
tcagactctactatactctg

SEQ ID NO: 123779 - DNA, 20 bp, Artificial Sequence
  MKO10123779_B_Ttc23l
  gRNA
tatggttacctgacactgag

SEQ ID NO: 123780 - DNA, 20 bp, Artificial Sequence
  MKO10123780_B_Ttc23l
  gRNA
gttctctacttgttactgtg

SEQ ID NO: 123781 - DNA, 20 bp, Artificial Sequence
  MKO10123781_B_Ttc23
  gRNA
cagcagcaacgacttcgtct

SEQ ID NO: 123782 - DNA, 20 bp, Artificial Sequence
  MKO10123782_B_Ttc23
  gRNA
acgacagcttgattcgagac

SEQ ID NO: 123783 - DNA, 20 bp, Artificial Sequence
  MKO10123783_B_Ttc23
  gRNA
ggagtttctctcgagggggc

SEQ ID NO: 123784 - DNA, 20 bp, Artificial Sequence
  MKO10123784_B_Ttc24
  gRNA
gaaatactataaggaagcgc

SEQ ID NO: 123785 - DNA, 20 bp, Artificial Sequence
  MKO10123785_B_Ttc24
  gRNA
atactaccaagaaacgagcc

SEQ ID NO: 123786 - DNA, 20 bp, Artificial Sequence
  MKO10123786_B_Ttc24
  gRNA
gggccattctacaatgatct

SEQ ID NO: 123787 - DNA, 20 bp, Artificial Sequence
  MKO10123787_B_Ttc25
  gRNA
ctccccgagcagctgccgca

SEQ ID NO: 123788 - DNA, 20 bp, Artificial Sequence
  MKO10123788_B_Ttc25
  gRNA
cctactttgaattcccgatc

SEQ ID NO: 123789 - DNA, 20 bp, Artificial Sequence
  MKO10123789_B_Ttc25
  gRNA
agcctcgatgatagaacacc

SEQ ID NO: 123790 - DNA, 20 bp, Artificial Sequence
  MKO10123790_B_Ttc26
  gRNA
aaaccgcctactgttccatc

SEQ ID NO: 123791 - DNA, 20 bp, Artificial Sequence
  MKO10123791_B_Ttc26
  gRNA
ggaatatgaaaatgcaacga

SEQ ID NO: 123792 - DNA, 20 bp, Artificial Sequence
  MKO10123792_B_Ttc26
  gRNA
ctttcgcagagagatttcac

SEQ ID NO: 123793 - DNA, 20 bp, Artificial Sequence
  MKO10123793_B_Ttc27
  gRNA
tgaggatgcaagtccacaag

SEQ ID NO: 123794 - DNA, 20 bp, Artificial Sequence
  MKO10123794_B_Ttc27
  gRNA
ctgattcaccatctagaatg

SEQ ID NO: 123795 - DNA, 20 bp, Artificial Sequence
  MKO10123795_B_Ttc27
  gRNA
cagcagctggtattcctact

SEQ ID NO: 123796 - DNA, 20 bp, Artificial Sequence
  MKO10123796_B_Ttc28
  gRNA
ccagcgccttgtggtactgc

SEQ ID NO: 123797 - DNA, 20 bp, Artificial Sequence
  MKO10123797_B_Ttc28
  gRNA
ttccaaggggaattaccgag

SEQ ID NO: 123798 - DNA, 20 bp, Artificial Sequence
  MKO10123798_B_Ttc28
  gRNA
ggcctctcggtaattcccct

SEQ ID NO: 123799 - DNA, 20 bp, Artificial Sequence
  MKO10123799_B_Ttc29
  gRNA
atataacaacctgtatgctc

SEQ ID NO: 123800 - DNA, 20 bp, Artificial Sequence
  MKO10123800_B_Ttc29
  gRNA
tggcctgtgaaagtctcgtg

SEQ ID NO: 123801 - DNA, 20 bp, Artificial Sequence
  MKO10123801_B_Ttc29
  gRNA
gccgtccgtgtgtcagttca

SEQ ID NO: 123802 - DNA, 20 bp, Artificial Sequence
  MKO10123802_B_Ttc30a1
  gRNA
aatcaaagctttcaacagtc

SEQ ID NO: 123803 - DNA, 20 bp, Artificial Sequence
  MKO10123803_B_Ttc30a1
  gRNA
tgacatgcctcctagagcag

SEQ ID NO: 123804 - DNA, 20 bp, Artificial Sequence
  MKO10123804_B_Ttc30a1
  gRNA
gcctgtatccagaagccacc

SEQ ID NO: 123805 - DNA, 20 bp, Artificial Sequence
  MKO10123805_B_Ttc30a2
  gRNA
gatgccacgctcaatgatat

SEQ ID NO: 123806 - DNA, 20 bp, Artificial Sequence
  MKO10123806_B_Ttc30a2
  gRNA
tgctgtaacaagctaaagct

SEQ ID NO: 123807 - DNA, 20 bp, Artificial Sequence
  MKO10123807_B_Ttc30a2
  gRNA
ctttagcttgttacagcaac

SEQ ID NO: 123808 - DNA, 20 bp, Artificial Sequence
  MKO10123808_B_Ttc30b
  gRNA
agatgatgaatctgccaaaa

SEQ ID NO: 123809 - DNA, 20 bp, Artificial Sequence
  MKO10123809_B_Ttc30b
  gRNA
ctttgtagagcagacaacct

SEQ ID NO: 123810 - DNA, 20 bp, Artificial Sequence
  MKO10123810_B_Ttc30b
  gRNA
agcagctcacagatccccga

SEQ ID NO: 123811 - DNA, 20 bp, Artificial Sequence
  MKO10123811_B_Ttc32
  gRNA
ggcagatgtgtagtcgtcca

SEQ ID NO: 123812 - DNA, 20 bp, Artificial Sequence
  MKO10123812_B_Ttc32
  gRNA
aaggcactagacctcaatcc

SEQ ID NO: 123813 - DNA, 20 bp, Artificial Sequence
  MKO10123813_B_Ttc32
  gRNA
aaaacagcatcttgaaatcc

SEQ ID NO: 123814 - DNA, 20 bp, Artificial Sequence
  MKO10123814_B_Ttc33
  gRNA
tgccacgcctcccacgagtg

SEQ ID NO: 123815 - DNA, 20 bp, Artificial Sequence
  MKO10123815_B_Ttc33
  gRNA
atgcagctgagaacgaggat

SEQ ID NO: 123816 - DNA, 20 bp, Artificial Sequence
  MKO10123816_B_Ttc33
  gRNA
gaagcactacagctaacccc

SEQ ID NO: 123817 - DNA, 20 bp, Artificial Sequence
  MKO10123817_B_Ttc34
  gRNA
ttgatttcaacgccatactt

SEQ ID NO: 123818 - DNA, 20 bp, Artificial Sequence
  MKO10123818_B_Ttc34
  gRNA
cattaagcattctgcgggct

SEQ ID NO: 123819 - DNA, 20 bp, Artificial Sequence
  MKO10123819_B_Ttc34
  gRNA
ggctgatgccctgtaccgct

SEQ ID NO: 123820 - DNA, 20 bp, Artificial Sequence
  MKO10123820_B_Ttc36
  gRNA
cggctccagggggatgtagc

SEQ ID NO: 123821 - DNA, 20 bp, Artificial Sequence
  MKO10123821_B_Ttc36
  gRNA
catggggactccaaatgatc

SEQ ID NO: 123822 - DNA, 20 bp, Artificial Sequence
  MKO10123822_B_Ttc36
  gRNA
ttcaaccctgataccccctt

SEQ ID NO: 123823 - DNA, 20 bp, Artificial Sequence
  MKO10123823_B_Ttc37
  gRNA
agccagaacagctgctcgcc

SEQ ID NO: 123824 - DNA, 20 bp, Artificial Sequence
  MKO10123824_B_Ttc37
  gRNA
tgccaggcgagcagctgttc

SEQ ID NO: 123825 - DNA, 20 bp, Artificial Sequence
  MKO10123825_B_Ttc37
  gRNA
ttcaccaggtggctcggaca

SEQ ID NO: 123826 - DNA, 20 bp, Artificial Sequence
  MKO10123826_B_Ttc38
  gRNA
tttccttccagtacgtcaag

SEQ ID NO: 123827 - DNA, 20 bp, Artificial Sequence
  MKO10123827_B_Ttc38
  gRNA
ttcccgtgccaacgagcaca

SEQ ID NO: 123828 - DNA, 20 bp, Artificial Sequence
  MKO10123828_B_Ttc38
  gRNA
gccaccaagactcttgtcat

SEQ ID NO: 123829 - DNA, 20 bp, Artificial Sequence
  MKO10123829_B_Ttc39a
  gRNA
ggaccagtgcatgacagccc

SEQ ID NO: 123830 - DNA, 20 bp, Artificial Sequence
  MKO10123830_B_Ttc39a
  gRNA
ggtccagggctgtcatgcac

SEQ ID NO: 123831 - DNA, 20 bp, Artificial Sequence
  MKO10123831_B_Ttc39a
  gRNA
agaatgcctactacagagag

SEQ ID NO: 123832 - DNA, 20 bp, Artificial Sequence
  MKO10123832_B_Ttc39b
  gRNA
ttgtaccatgcgagaccaaa

SEQ ID NO: 123833 - DNA, 20 bp, Artificial Sequence
  MKO10123833_B_Ttc39b
  gRNA
ggagagcatgtaccacgcct

SEQ ID NO: 123834 - DNA, 20 bp, Artificial Sequence
  MKO10123834_B_Ttc39b
  gRNA
ggatctcaagagcggcctgg

SEQ ID NO: 123835 - DNA, 20 bp, Artificial Sequence
  MKO10123835_B_Ttc39c
  gRNA
gatcatcatcgctgactgcc

SEQ ID NO: 123836 - DNA, 20 bp, Artificial Sequence
  MKO10123836_B_Ttc39c
  gRNA
taccaaaaagctgacgaagc

SEQ ID NO: 123837 - DNA, 20 bp, Artificial Sequence
  MKO10123837_B_Ttc39c
  gRNA
ctcctcctcgaatgtcatca

SEQ ID NO: 123838 - DNA, 20 bp, Artificial Sequence
  MKO10123838_B_Ttc39d
  gRNA
ttgcggcgttcattccgatc

SEQ ID NO: 123839 - DNA, 20 bp, Artificial Sequence
  MKO10123839_B_Ttc39d
  gRNA
cgagataaagtcactatcct

SEQ ID NO: 123840 - DNA, 20 bp, Artificial Sequence
  MKO10123840_B_Ttc39d
  gRNA
gcataagttctaagacctgt

SEQ ID NO: 123841 - DNA, 20 bp, Artificial Sequence
  MKO10123841_B_Ttc3
  gRNA
ttatctcagcagcacgagaa

SEQ ID NO: 123842 - DNA, 20 bp, Artificial Sequence
  MKO10123842_B_Ttc3
  gRNA
attacaacatcttgagttga

SEQ ID NO: 123843 - DNA, 20 bp, Artificial Sequence
  MKO10123843_B_Ttc3
  gRNA
aatgattcattccttattga

SEQ ID NO: 123844 - DNA, 20 bp, Artificial Sequence
  MKO10123844_B_Ttc4
  gRNA
gatgatgatcgatatccaga

SEQ ID NO: 123845 - DNA, 20 bp, Artificial Sequence
  MKO10123845_B_Ttc4
  gRNA
ttcttccctcaatgatgtgc

SEQ ID NO: 123846 - DNA, 20 bp, Artificial Sequence
  MKO10123846_B_Ttc4
  gRNA
gtcattgccctcatctttat

SEQ ID NO: 123847 - DNA, 20 bp, Artificial Sequence
  MKO10123847_B_Ttc5
  gRNA
tttgctagggactggtggat

SEQ ID NO: 123848 - DNA, 20 bp, Artificial Sequence
  MKO10123848_B_Ttc5
  gRNA
acacatagtgtcgaagatgc

SEQ ID NO: 123849 - DNA, 20 bp, Artificial Sequence
  MKO10123849_B_Ttc5
  gRNA
cacaccaggagcggccatca

SEQ ID NO: 123850 - DNA, 20 bp, Artificial Sequence
  MKO10123850_B_Ttc7b
  gRNA
cgtcctgctcccggtccaca

SEQ ID NO: 123851 - DNA, 20 bp, Artificial Sequence
  MKO10123851_B_Ttc7b
  gRNA
gcttgcgcacttcagtcagc

SEQ ID NO: 123852 - DNA, 20 bp, Artificial Sequence
  MKO10123852_B_Ttc7b
  gRNA
ttactggtagaggacgaaac

SEQ ID NO: 123853 - DNA, 20 bp, Artificial Sequence
  MKO10123853_B_Ttc7
  gRNA
aagtaggacagctcatagtc

SEQ ID NO: 123854 - DNA, 20 bp, Artificial Sequence
  MKO10123854_B_Ttc7
  gRNA
cccacatccgcctgactgag

SEQ ID NO: 123855 - DNA, 20 bp, Artificial Sequence
  MKO10123855_B_Ttc7
  gRNA
tcttcacatatgcgctctgg

SEQ ID NO: 123856 - DNA, 20 bp, Artificial Sequence
  MKO10123856_B_Ttc8
  gRNA
cttccagatgagctagtgat

SEQ ID NO: 123857 - DNA, 20 bp, Artificial Sequence
  MKO10123857_B_Ttc8
  gRNA
cctcctgtttggttagtgcc

SEQ ID NO: 123858 - DNA, 20 bp, Artificial Sequence
  MKO10123858_B_Ttc8
  gRNA
gaggaccgactcaagctgtc

SEQ ID NO: 123859 - DNA, 20 bp, Artificial Sequence
  MKO10123859_B_Ttc9b
  gRNA
acgtgcgctgcgctacctac

SEQ ID NO: 123860 - DNA, 20 bp, Artificial Sequence
  MKO10123860_B_Ttc9b
  gRNA
aggcccagctcggaatgtcg

SEQ ID NO: 123861 - DNA, 20 bp, Artificial Sequence
  MKO10123861_B_Ttc9b
  gRNA
cagcccacgacattccgagc

SEQ ID NO: 123862 - DNA, 20 bp, Artificial Sequence
  MKO10123862_B_Ttc9c
  gRNA
cactgctacaacaacctagc

SEQ ID NO: 123863 - DNA, 20 bp, Artificial Sequence
  MKO10123863_B_Ttc9c
  gRNA
agtaccgagatgctgtgagt

SEQ ID NO: 123864 - DNA, 20 bp, Artificial Sequence
  MKO10123864_B_Ttc9c
  gRNA
ttcattaaccaaacatgccc

SEQ ID NO: 123865 - DNA, 20 bp, Artificial Sequence
  MKO10123865_B_Ttc9
  gRNA
tgagcttcatctccgtcagc

SEQ ID NO: 123866 - DNA, 20 bp, Artificial Sequence
  MKO10123866_B_Ttc9
  gRNA
tcgcagacaccaatgtgatt

SEQ ID NO: 123867 - DNA, 20 bp, Artificial Sequence
  MKO10123867_B_Ttc9
  gRNA
atagtccccaagatgataga

SEQ ID NO: 123868 - DNA, 20 bp, Artificial Sequence
  MKO10123868_B_Ttf1
  gRNA
attccctccatggaaacgac

SEQ ID NO: 123869 - DNA, 20 bp, Artificial Sequence
  MKO10123869_B_Ttf1
  gRNA
catcaaagatcttctttgca

SEQ ID NO: 123870 - DNA, 20 bp, Artificial Sequence
  MKO10123870_B_Ttf1
  gRNA
cttaccaatgtgcagtctga

SEQ ID NO: 123871 - DNA, 20 bp, Artificial Sequence
  MKO10123871_B_Ttf2
  gRNA
agtggtgtggaaacgtccca

SEQ ID NO: 123872 - DNA, 20 bp, Artificial Sequence
  MKO10123872_B_Ttf2
  gRNA
gctcgctcaggggcctctcc

SEQ ID NO: 123873 - DNA, 20 bp, Artificial Sequence
  MKO10123873_B_Ttf2
  gRNA
gcaatgcctacctgccgcca

SEQ ID NO: 123874 - DNA, 20 bp, Artificial Sequence
  MKO10123874_B_Tti1
  gRNA
acttacaagtgatgaccccc

SEQ ID NO: 123875 - DNA, 20 bp, Artificial Sequence
  MKO10123875_B_Tti1
  gRNA
gggccccctctgtgaaaatc

SEQ ID NO: 123876 - DNA, 20 bp, Artificial Sequence
  MKO10123876_B_Tti1
  gRNA
aaatctgaaaatccgcctga

SEQ ID NO: 123877 - DNA, 20 bp, Artificial Sequence
  MKO10123877_B_Tti2
  gRNA
aacttgtcatgcagtatact

SEQ ID NO: 123878 - DNA, 20 bp, Artificial Sequence
  MKO10123878_B_Tti2
  gRNA
tactgcagcaagtccgcagc

SEQ ID NO: 123879 - DNA, 20 bp, Artificial Sequence
  MKO10123879_B_Tti2
  gRNA
ccacagtaaccacaatgtga

SEQ ID NO: 123880 - DNA, 20 bp, Artificial Sequence
  MKO10123880_B_Ttk
  gRNA
ttcgagcaaagctctcattc

SEQ ID NO: 123881 - DNA, 20 bp, Artificial Sequence
  MKO10123881_B_Ttk
  gRNA
tgttcccaaccctcataatt

SEQ ID NO: 123882 - DNA, 20 bp, Artificial Sequence
  MKO10123882_B_Ttk
  gRNA
ttcttacccatataaaaccc

SEQ ID NO: 123883 - DNA, 20 bp, Artificial Sequence
  MKO10123883_B_Ttll10
  gRNA
aactactgcagctttcggga

SEQ ID NO: 123884 - DNA, 20 bp, Artificial Sequence
  MKO10123884_B_Ttll10
  gRNA
agtcagctggaccaagatgc

SEQ ID NO: 123885 - DNA, 20 bp, Artificial Sequence
  MKO10123885_B_Ttll10
  gRNA
agcccgtccggggaggtcac

SEQ ID NO: 123886 - DNA, 20 bp, Artificial Sequence
  MKO10123886_B_Ttll11
  gRNA
acaacttctaccctcgctcc

SEQ ID NO: 123887 - DNA, 20 bp, Artificial Sequence
  MKO10123887_B_Ttll11
  gRNA
tcaccttgagccgagcactg

SEQ ID NO: 123888 - DNA, 20 bp, Artificial Sequence
  MKO10123888_B_Ttll11
  gRNA
cgtgacagtgacatactctc

SEQ ID NO: 123889 - DNA, 20 bp, Artificial Sequence
  MKO10123889_B_Ttll12
  gRNA
ctgggcccccgccgacatgc

SEQ ID NO: 123890 - DNA, 20 bp, Artificial Sequence
  MKO10123890_B_Ttll12
  gRNA
cctctccgtaggcaaagtcc

SEQ ID NO: 123891 - DNA, 20 bp, Artificial Sequence
  MKO10123891_B_Ttll12
  gRNA
ccgacttaccgcctgtgtct

SEQ ID NO: 123892 - DNA, 20 bp, Artificial Sequence
  MKO10123892_B_Ttll13
  gRNA
cgcccctgacagccgctatc

SEQ ID NO: 123893 - DNA, 20 bp, Artificial Sequence
  MKO10123893_B_Ttll13
  gRNA
acgtagctatggggacttcc

SEQ ID NO: 123894 - DNA, 20 bp, Artificial Sequence
  MKO10123894_B_Ttll13
  gRNA
aacgagtcatggacatgaag

SEQ ID NO: 123895 - DNA, 20 bp, Artificial Sequence
  MKO10123895_B_Ttll1
  gRNA
gtttgtccaccttaccaacg

SEQ ID NO: 123896 - DNA, 20 bp, Artificial Sequence
  MKO10123896_B_Ttll1
  gRNA
tctgcgaaagcttattgatg

SEQ ID NO: 123897 - DNA, 20 bp, Artificial Sequence
  MKO10123897_B_Ttll1
  gRNA
aaacatgttgtcgagctcac

SEQ ID NO: 123898 - DNA, 20 bp, Artificial Sequence
  MKO10123898_B_Ttll2
  gRNA
tgtacagaatgtccctctag

SEQ ID NO: 123899 - DNA, 20 bp, Artificial Sequence
  MKO10123899_B_Ttll2
  gRNA
cacaaacttggtgtagtcag

SEQ ID NO: 123900 - DNA, 20 bp, Artificial Sequence
  MKO10123900_B_Ttll2
  gRNA
aaactctatgagagatgcat

SEQ ID NO: 123901 - DNA, 20 bp, Artificial Sequence
  MKO10123901_B_Ttll3
  gRNA
ccacgtagagagagccgtca

SEQ ID NO: 123902 - DNA, 20 bp, Artificial Sequence
  MKO10123902_B_Ttll3
  gRNA
gctgggtgatagcgatgcca

SEQ ID NO: 123903 - DNA, 20 bp, Artificial Sequence
  MKO10123903_B_Ttll3
  gRNA
gggtctcatttcgaaccatg

SEQ ID NO: 123904 - DNA, 20 bp, Artificial Sequence
  MKO10123904_B_Ttll4
  gRNA
ccgtacaactttctcatgat

SEQ ID NO: 123905 - DNA, 20 bp, Artificial Sequence
  MKO10123905_B_Ttll4
  gRNA
gtaacccctaccatctattt

SEQ ID NO: 123906 - DNA, 20 bp, Artificial Sequence
  MKO10123906_B_Ttll4
  gRNA
aacagaggaggctgcttcgg

SEQ ID NO: 123907 - DNA, 20 bp, Artificial Sequence
  MKO10123907_B_Ttll5
  gRNA
cctccagtccacataataca

SEQ ID NO: 123908 - DNA, 20 bp, Artificial Sequence
  MKO10123908_B_Ttll5
  gRNA
gtcttataagattgtgagaa

SEQ ID NO: 123909 - DNA, 20 bp, Artificial Sequence
  MKO10123909_B_Ttll5
  gRNA
gactgtacaaaaacatcatt

SEQ ID NO: 123910 - DNA, 20 bp, Artificial Sequence
  MKO10123910_B_Ttll6
  gRNA
gatacttaccgctgtcatac

SEQ ID NO: 123911 - DNA, 20 bp, Artificial Sequence
  MKO10123911_B_Ttll6
  gRNA
tgatcaatctatctaactgc

SEQ ID NO: 123912 - DNA, 20 bp, Artificial Sequence
  MKO10123912_B_Ttll6
  gRNA
gcttgatttctttcaccgac

SEQ ID NO: 123913 - DNA, 20 bp, Artificial Sequence
  MKO10123913_B_Ttll7
  gRNA
attattacagctaatgttgc

SEQ ID NO: 123914 - DNA, 20 bp, Artificial Sequence
  MKO10123914_B_Ttll7
  gRNA
tccccacctggtagttctgc

SEQ ID NO: 123915 - DNA, 20 bp, Artificial Sequence
  MKO10123915_B_Ttll7
  gRNA
tattcagggatcatctcctg

SEQ ID NO: 123916 - DNA, 20 bp, Artificial Sequence
  MKO10123916_B_Ttll8
  gRNA
tcccgtagtgatttagcatc

SEQ ID NO: 123917 - DNA, 20 bp, Artificial Sequence
  MKO10123917_B_Ttll8
  gRNA
cgatgatatccacgatgtga

SEQ ID NO: 123918 - DNA, 20 bp, Artificial Sequence
  MKO10123918_B_Ttll8
  gRNA
gacagggtagtgtccataga

SEQ ID NO: 123919 - DNA, 20 bp, Artificial Sequence
  MKO10123919_B_Ttll9
  gRNA
gactcacctcgtagtggttc

SEQ ID NO: 123920 - DNA, 20 bp, Artificial Sequence
  MKO10123920_B_Ttll9
  gRNA
ctctttgacttccacccatc

SEQ ID NO: 123921 - DNA, 20 bp, Artificial Sequence
  MKO10123921_B_Ttll9
  gRNA
cctacagaatcaaaattcca

SEQ ID NO: 123922 - DNA, 20 bp, Artificial Sequence
  MKO10123922_B_Ttl
  gRNA
tgatgttcagagcgctggtt

SEQ ID NO: 123923 - DNA, 20 bp, Artificial Sequence
  MKO10123923_B_Ttl
  gRNA
atttctggatcacgtgcact

SEQ ID NO: 123924 - DNA, 20 bp, Artificial Sequence
  MKO10123924_B_Ttl
  gRNA
tgttatactgatggtcaacc

SEQ ID NO: 123925 - DNA, 20 bp, Artificial Sequence
  MKO10123925_B_Ttn
  gRNA
ggtgcccgcacgtgtctgac

SEQ ID NO: 123926 - DNA, 20 bp, Artificial Sequence
  MKO10123926_B_Ttn
  gRNA
agtagctcttccaacgctgt

SEQ ID NO: 123927 - DNA, 20 bp, Artificial Sequence
  MKO10123927_B_Ttn
  gRNA
ttgaaccaccaattctgcag

SEQ ID NO: 123928 - DNA, 20 bp, Artificial Sequence
  MKO10123928_B_Ttpal
  gRNA
cccgaaagtttgattatgac

SEQ ID NO: 123929 - DNA, 20 bp, Artificial Sequence
  MKO10123929_B_Ttpal
  gRNA
cagcagcacggcgttccagg

SEQ ID NO: 123930 - DNA, 20 bp, Artificial Sequence
  MKO10123930_B_Ttpal
  gRNA
ctggcccaggaggttgtcgc

SEQ ID NO: 123931 - DNA, 20 bp, Artificial Sequence
  MKO10123931_B_Ttpa
  gRNA
ctctactgccagtagaatcc

SEQ ID NO: 123932 - DNA, 20 bp, Artificial Sequence
  MKO10123932_B_Ttpa
  gRNA
cacatcagagctcattgtac

SEQ ID NO: 123933 - DNA, 20 bp, Artificial Sequence
  MKO10123933_B_Ttpa
  gRNA
tcctttccactgaaagttcg

SEQ ID NO: 123934 - DNA, 20 bp, Artificial Sequence
  MKO10123934_B_Ttr
  gRNA
tttacagccacgtctacagc

SEQ ID NO: 123935 - DNA, 20 bp, Artificial Sequence
  MKO10123935_B_Ttr
  gRNA
gacgacagccgtggtgctgt

SEQ ID NO: 123936 - DNA, 20 bp, Artificial Sequence
  MKO10123936_B_Ttr
  gRNA
acacaaataccagtccagcg

SEQ ID NO: 123937 - DNA, 20 bp, Artificial Sequence
  MKO10123937_B_Ttyh1
  gRNA
ccaggtgacgcaacctcctc

SEQ ID NO: 123938 - DNA, 20 bp, Artificial Sequence
  MKO10123938_B_Ttyh1
  gRNA
tttcccttcagtgccggcat

SEQ ID NO: 123939 - DNA, 20 bp, Artificial Sequence
  MKO10123939_B_Ttyh1
  gRNA
ggaagtgctgtcagtccgca

SEQ ID NO: 123940 - DNA, 20 bp, Artificial Sequence
  MKO10123940_B_Ttyh2
  gRNA
aacgcgaaccacaccttctc

SEQ ID NO: 123941 - DNA, 20 bp, Artificial Sequence
  MKO10123941_B_Ttyh2
  gRNA
tcagcgagatcattgctgcc

SEQ ID NO: 123942 - DNA, 20 bp, Artificial Sequence
  MKO10123942_B_Ttyh2
  gRNA
tctgcaccgtgtggtcccgc

SEQ ID NO: 123943 - DNA, 20 bp, Artificial Sequence
  MKO10123943_B_Ttyh3
  gRNA
ggcatggcgtagtgagtagg

SEQ ID NO: 123944 - DNA, 20 bp, Artificial Sequence
  MKO10123944_B_Ttyh3
  gRNA
gggcctcatccgaagctcca

SEQ ID NO: 123945 - DNA, 20 bp, Artificial Sequence
  MKO10123945_B_Ttyh3
  gRNA
tgataacatcaagcaagagc

SEQ ID NO: 123946 - DNA, 20 bp, Artificial Sequence
  MKO10123946_B_Tuba1a
  gRNA
gtggccacgagcatagttat

SEQ ID NO: 123947 - DNA, 20 bp, Artificial Sequence
  MKO10123947_B_Tuba1a
  gRNA
agccagcttaccgatgaccg

SEQ ID NO: 123948 - DNA, 20 bp, Artificial Sequence
  MKO10123948_B_Tuba1a
  gRNA
ccacaggctgaccagtgcac

SEQ ID NO: 123949 - DNA, 20 bp, Artificial Sequence
  MKO10123949_B_Tuba1b
  gRNA
agccagcttaccgatgaccg

SEQ ID NO: 123950 - DNA, 20 bp, Artificial Sequence
  MKO10123950_B_Tuba1b
  gRNA
tttgcagatgaagttcgcac

SEQ ID NO: 123951 - DNA, 20 bp, Artificial Sequence
  MKO10123951_B_Tuba1b
  gRNA
ccagcttgcgaatcctgtcc

SEQ ID NO: 123952 - DNA, 20 bp, Artificial Sequence
  MKO10123952_B_Tuba1c
  gRNA
ccagcttgcgaatcctgtcc

SEQ ID NO: 123953 - DNA, 20 bp, Artificial Sequence
  MKO10123953_B_Tuba1c
  gRNA
tttgcagatgaagttcgcac

SEQ ID NO: 123954 - DNA, 20 bp, Artificial Sequence
  MKO10123954_B_Tuba1c
  gRNA
cctcctcataatccttctct

SEQ ID NO: 123955 - DNA, 20 bp, Artificial Sequence
  MKO10123955_B_Tuba3a
  gRNA
ggttcccaaagatgtcaacg

SEQ ID NO: 123956 - DNA, 20 bp, Artificial Sequence
  MKO10123956_B_Tuba3a
  gRNA
gagacctggccaaagtgcag

SEQ ID NO: 123957 - DNA, 20 bp, Artificial Sequence
  MKO10123957_B_Tuba3a
  gRNA
caagcacctacccaccacag

SEQ ID NO: 123958 - DNA, 20 bp, Artificial Sequence
  MKO10123958_B_Tuba3b
  gRNA
catccatcacagcctcccta

SEQ ID NO: 123959 - DNA, 20 bp, Artificial Sequence
  MKO10123959_B_Tuba3b
  gRNA
ggttcccaaagatgtcaatg

SEQ ID NO: 123960 - DNA, 20 bp, Artificial Sequence
  MKO10123960_B_Tuba3b
  gRNA
taactaccagcctcctactg

SEQ ID NO: 123961 - DNA, 20 bp, Artificial Sequence
  MKO10123961_B_Tuba4a
  gRNA
ccttgctcaccgattacagt

SEQ ID NO: 123962 - DNA, 20 bp, Artificial Sequence
  MKO10123962_B_Tuba4a
  gRNA
gacctggagcctactgtaat

SEQ ID NO: 123963 - DNA, 20 bp, Artificial Sequence
  MKO10123963_B_Tuba4a
  gRNA
gctgacggtatgggccattt

SEQ ID NO: 123964 - DNA, 20 bp, Artificial Sequence
  MKO10123964_B_Tuba8
  gRNA
gtcgtcatcgttgatcttgc

SEQ ID NO: 123965 - DNA, 20 bp, Artificial Sequence
  MKO10123965_B_Tuba8
  gRNA
caacgggaaacacgtgcccc

SEQ ID NO: 123966 - DNA, 20 bp, Artificial Sequence
  MKO10123966_B_Tuba8
  gRNA
ccatctacgacatctgccgc

SEQ ID NO: 123967 - DNA, 20 bp, Artificial Sequence
  MKO10123967_B_Tubal3
  gRNA
ccccatcatctccgctgaaa

SEQ ID NO: 123968 - DNA, 20 bp, Artificial Sequence
  MKO10123968_B_Tubal3
  gRNA
cccagcaagcatccccgatc

SEQ ID NO: 123969 - DNA, 20 bp, Artificial Sequence
  MKO10123969_B_Tubal3
  gRNA
ttgctgggaactgtattgcc

SEQ ID NO: 123970 - DNA, 20 bp, Artificial Sequence
  MKO10123970_B_Tubb1
  gRNA
gtaccgagccctctcagtag

SEQ ID NO: 123971 - DNA, 20 bp, Artificial Sequence
  MKO10123971_B_Tubb1
  gRNA
aggtccacaaggacggctcg

SEQ ID NO: 123972 - DNA, 20 bp, Artificial Sequence
  MKO10123972_B_Tubb1
  gRNA
gtttactacaacgaagccta

SEQ ID NO: 123973 - DNA, 20 bp, Artificial Sequence
  MKO10123973_B_Tubb2a
  gRNA
atacagagcctcattgtcaa

SEQ ID NO: 123974 - DNA, 20 bp, Artificial Sequence
  MKO10123974_B_Tubb2a
  gRNA
catcctagtggacctggagc

SEQ ID NO: 123975 - DNA, 20 bp, Artificial Sequence
  MKO10123975_B_Tubb2a
  gRNA
gaggtgataagcgatgagca

SEQ ID NO: 123976 - DNA, 20 bp, Artificial Sequence
  MKO10123976_B_Tubb2b
  gRNA
gtatactacaatgaagcaac

SEQ ID NO: 123977 - DNA, 20 bp, Artificial Sequence
  MKO10123977_B_Tubb2b
  gRNA
tcaccgaacacgaagttgtc

SEQ ID NO: 123978 - DNA, 20 bp, Artificial Sequence
  MKO10123978_B_Tubb2b
  gRNA
caggtaataaatatgtgcct

SEQ ID NO: 123979 - DNA, 20 bp, Artificial Sequence
  MKO10123979_B_Tubb3
  gRNA
ctcataggtcagagtggtgc

SEQ ID NO: 123980 - DNA, 20 bp, Artificial Sequence
  MKO10123980_B_Tubb3
  gRNA
cagctcacaagtatgtgccc

SEQ ID NO: 123981 - DNA, 20 bp, Artificial Sequence
  MKO10123981_B_Tubb3
  gRNA
ccacggtcaggtagcgaccg

SEQ ID NO: 123982 - DNA, 20 bp, Artificial Sequence
  MKO10123982_B_Tubb4a
  gRNA
gacgcaccttggccccgatc

SEQ ID NO: 123983 - DNA, 20 bp, Artificial Sequence
  MKO10123983_B_Tubb4a
  gRNA
caggtcgaccagcacggctc

SEQ ID NO: 123984 - DNA, 20 bp, Artificial Sequence
  MKO10123984_B_Tubb4a
  gRNA
tccccaggtcaatccggagc

SEQ ID NO: 123985 - DNA, 20 bp, Artificial Sequence
  MKO10123985_B_Tubb4b
  gRNA
gaggtaatcagcgacgagca

SEQ ID NO: 123986 - DNA, 20 bp, Artificial Sequence
  MKO10123986_B_Tubb4b
  gRNA
tcaccaaagacgaagttatc

SEQ ID NO: 123987 - DNA, 20 bp, Artificial Sequence
  MKO10123987_B_Tubb4b
  gRNA
ccctgaacgcaccgagtcca

SEQ ID NO: 123988 - DNA, 20 bp, Artificial Sequence
  MKO10123988_B_Tubb5
  gRNA
gtatgtccctcgagctatct

SEQ ID NO: 123989 - DNA, 20 bp, Artificial Sequence
  MKO10123989_B_Tubb5
  gRNA
gccaaaaggacctgagcgaa

SEQ ID NO: 123990 - DNA, 20 bp, Artificial Sequence
  MKO10123990_B_Tubb5
  gRNA
gaccccaccggtacctacca

SEQ ID NO: 123991 - DNA, 20 bp, Artificial Sequence
  MKO10123991_B_Tubb6
  gRNA
gtcgatgcagtaggtctcgt

SEQ ID NO: 123992 - DNA, 20 bp, Artificial Sequence
  MKO10123992_B_Tubb6
  gRNA
cttgcaggacagacgggtgc

SEQ ID NO: 123993 - DNA, 20 bp, Artificial Sequence
  MKO10123993_B_Tubb6
  gRNA
gacccaccttggtaccgatc

SEQ ID NO: 123994 - DNA, 20 bp, Artificial Sequence
  MKO10123994_B_Tubd1
  gRNA
ttgtagcttctgtgtaacga

SEQ ID NO: 123995 - DNA, 20 bp, Artificial Sequence
  MKO10123995_B_Tubd1
  gRNA
gtcgatagtgacagtacagc

SEQ ID NO: 123996 - DNA, 20 bp, Artificial Sequence
  MKO10123996_B_Tubd1
  gRNA
ctgttctaagagggacaacg

SEQ ID NO: 123997 - DNA, 20 bp, Artificial Sequence
  MKO10123997_B_Tube1
  gRNA
ctatcaaacacgtctctcag

SEQ ID NO: 123998 - DNA, 20 bp, Artificial Sequence
  MKO10123998_B_Tube1
  gRNA
acgctataagcagcttcttc

SEQ ID NO: 123999 - DNA, 20 bp, Artificial Sequence
  MKO10123999_B_Tube1
  gRNA
tctttcagagctgttgggga

SEQ ID NO: 124000 - DNA, 20 bp, Artificial Sequence
  MKO10124000_B_Tubg1
  gRNA
tcttagttgggttcgagttc

SEQ ID NO: 124001 - DNA, 20 bp, Artificial Sequence
  MKO10124001_B_Tubg1
  gRNA
tgatgtcaaaaatgtcctcg

SEQ ID NO: 124002 - DNA, 20 bp, Artificial Sequence
  MKO10124002_B_Tubg1
  gRNA
gtactgtgtcattccattgc

SEQ ID NO: 124003 - DNA, 20 bp, Artificial Sequence
  MKO10124003_B_Tubg2
  gRNA
cagccccgagggcatcgtag

SEQ ID NO: 124004 - DNA, 20 bp, Artificial Sequence
  MKO10124004_B_Tubg2
  gRNA
acagggtgagaaaattcacg

SEQ ID NO: 124005 - DNA, 20 bp, Artificial Sequence
  MKO10124005_B_Tubg2
  gRNA
attatagaccgagaagcaga

SEQ ID NO: 124006 - DNA, 20 bp, Artificial Sequence
  MKO10124006_B_Tubgcp2
  gRNA
acatcttagaggctgcaaca

SEQ ID NO: 124007 - DNA, 20 bp, Artificial Sequence
  MKO10124007_B_Tubgcp2
  gRNA
gatgtccacacaagagctag

SEQ ID NO: 124008 - DNA, 20 bp, Artificial Sequence
  MKO10124008_B_Tubgcp2
  gRNA
tatgagagaccaacattggc

SEQ ID NO: 124009 - DNA, 20 bp, Artificial Sequence
  MKO10124009_B_Tubgcp3
  gRNA
cgataactctcacagcaaac

SEQ ID NO: 124010 - DNA, 20 bp, Artificial Sequence
  MKO10124010_B_Tubgcp3
  gRNA
cctcctgctgaaccttagtg

SEQ ID NO: 124011 - DNA, 20 bp, Artificial Sequence
  MKO10124011_B_Tubgcp3
  gRNA
ccctcgcaagcaggccagca

SEQ ID NO: 124012 - DNA, 20 bp, Artificial Sequence
  MKO10124012_B_Tubgcp4
  gRNA
attcaggacactagtctcac

SEQ ID NO: 124013 - DNA, 20 bp, Artificial Sequence
  MKO10124013_B_Tubgcp4
  gRNA
tgtcaattactccttagatc

SEQ ID NO: 124014 - DNA, 20 bp, Artificial Sequence
  MKO10124014_B_Tubgcp4
  gRNA
agatcccatgcagtccccct

SEQ ID NO: 124015 - DNA, 20 bp, Artificial Sequence
  MKO10124015_B_Tubgcp5
  gRNA
atctcaacaaagctgctagt

SEQ ID NO: 124016 - DNA, 20 bp, Artificial Sequence
  MKO10124016_B_Tubgcp5
  gRNA
tccacataattgctgtttga

SEQ ID NO: 124017 - DNA, 20 bp, Artificial Sequence
  MKO10124017_B_Tubgcp5
  gRNA
tccttcaaacagcaattatg

SEQ ID NO: 124018 - DNA, 20 bp, Artificial Sequence
  MKO10124018_B_Tubgcp6
  gRNA
ggtgctgggagcgtattgga

SEQ ID NO: 124019 - DNA, 20 bp, Artificial Sequence
  MKO10124019_B_Tubgcp6
  gRNA
cagcccccctggtcaccgag

SEQ ID NO: 124020 - DNA, 20 bp, Artificial Sequence
  MKO10124020_B_Tubgcp6
  gRNA
atggctcagccgtgtgtaac

SEQ ID NO: 124021 - DNA, 20 bp, Artificial Sequence
  MKO10124021_B_Tub
  gRNA
actgggctgtgcgcccccgc

SEQ ID NO: 124022 - DNA, 20 bp, Artificial Sequence
  MKO10124022_B_Tub
  gRNA
ccggggccgtccatctgcat

SEQ ID NO: 124023 - DNA, 20 bp, Artificial Sequence
  MKO10124023_B_Tub
  gRNA
agcctcagccaagaaatcca

SEQ ID NO: 124024 - DNA, 20 bp, Artificial Sequence
  MKO10124024_B_Tufm
  gRNA
tccacccagaatatgatcac

SEQ ID NO: 124025 - DNA, 20 bp, Artificial Sequence
  MKO10124025_B_Tufm
  gRNA
cgagcgacgccccgcttcag

SEQ ID NO: 124026 - DNA, 20 bp, Artificial Sequence
  MKO10124026_B_Tufm
  gRNA
agcccgaccccatttctgca

SEQ ID NO: 124027 - DNA, 20 bp, Artificial Sequence
  MKO10124027_B_Tuft1
  gRNA
acgctccagagtgaactgac

SEQ ID NO: 124028 - DNA, 20 bp, Artificial Sequence
  MKO10124028_B_Tuft1
  gRNA
atataagtagcaagcttgac

SEQ ID NO: 124029 - DNA, 20 bp, Artificial Sequence
  MKO10124029_B_Tuft1
  gRNA
tcaccttaatgatctcttca

SEQ ID NO: 124030 - DNA, 20 bp, Artificial Sequence
  MKO10124030_B_Tulp1
  gRNA
agttgcccgcgccccagacc

SEQ ID NO: 124031 - DNA, 20 bp, Artificial Sequence
  MKO10124031_B_Tulp1
  gRNA
gcccccgctgcgccccaaac

SEQ ID NO: 124032 - DNA, 20 bp, Artificial Sequence
  MKO10124032_B_Tulp1
  gRNA
taccctcagcggccatgaag

SEQ ID NO: 124033 - DNA, 20 bp, Artificial Sequence
  MKO10124033_B_Tulp2
  gRNA
cgccagagaattcatcctcc

SEQ ID NO: 124034 - DNA, 20 bp, Artificial Sequence
  MKO10124034_B_Tulp2
  gRNA
accctggaggatgaattctc

SEQ ID NO: 124035 - DNA, 20 bp, Artificial Sequence
  MKO10124035_B_Tulp2
  gRNA
cgtctcaggagaatgaacag

SEQ ID NO: 124036 - DNA, 20 bp, Artificial Sequence
  MKO10124036_B_Tulp3
  gRNA
ctctcctctgagcgagccga

SEQ ID NO: 124037 - DNA, 20 bp, Artificial Sequence
  MKO10124037_B_Tulp3
  gRNA
agcccccaagccagaccttc

SEQ ID NO: 124038 - DNA, 20 bp, Artificial Sequence
  MKO10124038_B_Tulp3
  gRNA
gcttcagctgccgaagcctc

SEQ ID NO: 124039 - DNA, 20 bp, Artificial Sequence
  MKO10124039_B_Tulp4
  gRNA
taagcagcctagagtcccga

SEQ ID NO: 124040 - DNA, 20 bp, Artificial Sequence
  MKO10124040_B_Tulp4
  gRNA
cagctcagcgaactgcccaa

SEQ ID NO: 124041 - DNA, 20 bp, Artificial Sequence
  MKO10124041_B_Tulp4
  gRNA
tgtttccacagatgggcccg

SEQ ID NO: 124042 - DNA, 20 bp, Artificial Sequence
  MKO10124042_B_Tusc1
  gRNA
cccatgatccggacgttccg

SEQ ID NO: 124043 - DNA, 20 bp, Artificial Sequence
  MKO10124043_B_Tusc1
  gRNA
agcgctcctccagctgtcgc

SEQ ID NO: 124044 - DNA, 20 bp, Artificial Sequence
  MKO10124044_B_Tusc1
  gRNA
cgccgtcgagaccctcgccc

SEQ ID NO: 124045 - DNA, 20 bp, Artificial Sequence
  MKO10124045_B_Tusc2
  gRNA
tccatgttctacgatgaaga

SEQ ID NO: 124046 - DNA, 20 bp, Artificial Sequence
  MKO10124046_B_Tusc2
  gRNA
cggggaaatccacgtggatt

SEQ ID NO: 124047 - DNA, 20 bp, Artificial Sequence
  MKO10124047_B_Tusc2
  gRNA
tccatcttcatcgtagaaca

SEQ ID NO: 124048 - DNA, 20 bp, Artificial Sequence
  MKO10124048_B_Tusc3
  gRNA
aaaagcagatgaataacgcc

SEQ ID NO: 124049 - DNA, 20 bp, Artificial Sequence
  MKO10124049_B_Tusc3
  gRNA
cattctgaagatcgagcgcc

SEQ ID NO: 124050 - DNA, 20 bp, Artificial Sequence
  MKO10124050_B_Tusc3
  gRNA
taacgaagaatatcaaatcc

SEQ ID NO: 124051 - DNA, 20 bp, Artificial Sequence
  MKO10124051_B_Tusc5
  gRNA
cctcttgcttctgccccgtc

SEQ ID NO: 124052 - DNA, 20 bp, Artificial Sequence
  MKO10124052_B_Tusc5
  gRNA
cccctcggagatgaccttga

SEQ ID NO: 124053 - DNA, 20 bp, Artificial Sequence
  MKO10124053_B_Tusc5
  gRNA
cccagcgcagcctccgcttc

SEQ ID NO: 124054 - DNA, 20 bp, Artificial Sequence
  MKO10124054_B_Tut1
  gRNA
tttcaagtgggcatcgaggc

SEQ ID NO: 124055 - DNA, 20 bp, Artificial Sequence
  MKO10124055_B_Tut1
  gRNA
cacaaaagtaccggttactg

SEQ ID NO: 124056 - DNA, 20 bp, Artificial Sequence
  MKO10124056_B_Tut1
  gRNA
gagatgtatccctcagtaac

SEQ ID NO: 124057 - DNA, 20 bp, Artificial Sequence
  MKO10124057_B_Tvp23a
  gRNA
gaatgtaactggaagactca

SEQ ID NO: 124058 - DNA, 20 bp, Artificial Sequence
  MKO10124058_B_Tvp23a
  gRNA
acaggtctctgcaaaccaca

SEQ ID NO: 124059 - DNA, 20 bp, Artificial Sequence
  MKO10124059_B_Tvp23a
  gRNA
aggcagaggcacgcatcttc

SEQ ID NO: 124060 - DNA, 20 bp, Artificial Sequence
  MKO10124060_B_Tvp23b
  gRNA
tgctgctgtcatgcgacttt

SEQ ID NO: 124061 - DNA, 20 bp, Artificial Sequence
  MKO10124061_B_Tvp23b
  gRNA
gaatgtcacaggtagactaa

SEQ ID NO: 124062 - DNA, 20 bp, Artificial Sequence
  MKO10124062_B_Tvp23b
  gRNA
tagccaaaagattcttgact

SEQ ID NO: 124063 - DNA, 20 bp, Artificial Sequence
  MKO10124063_B_Twf1
  gRNA
acgtcagaaaatgctgtatg

SEQ ID NO: 124064 - DNA, 20 bp, Artificial Sequence
  MKO10124064_B_Twf1
  gRNA
ctgaaaatatctatcgaaaa

SEQ ID NO: 124065 - DNA, 20 bp, Artificial Sequence
  MKO10124065_B_Twf1
  gRNA
gtagtccaccttcagactcc

SEQ ID NO: 124066 - DNA, 20 bp, Artificial Sequence
  MKO10124066_B_Twf2
  gRNA
gggcacgcacctcattgatt

SEQ ID NO: 124067 - DNA, 20 bp, Artificial Sequence
  MKO10124067_B_Twf2
  gRNA
gcccccagaacagctcgtgc

SEQ ID NO: 124068 - DNA, 20 bp, Artificial Sequence
  MKO10124068_B_Twf2
  gRNA
tgagctcttcgggacagtaa

SEQ ID NO: 124069 - DNA, 20 bp, Artificial Sequence
  MKO10124069_B_Twist1
  gRNA
gctccgctgctagtgggacg

SEQ ID NO: 124070 - DNA, 20 bp, Artificial Sequence
  MKO10124070_B_Twist1
  gRNA
tgcagctcctcgtacgactg

SEQ ID NO: 124071 - DNA, 20 bp, Artificial Sequence
  MKO10124071_B_Twist1
  gRNA
gcgcacgcagtcgctgaacg

SEQ ID NO: 124072 - DNA, 20 bp, Artificial Sequence
  MKO10124072_B_Twist2
  gRNA
cgcgccctccatgcgccaca

SEQ ID NO: 124073 - DNA, 20 bp, Artificial Sequence
  MKO10124073_B_Twist2
  gRNA
cccttcttgccgcgcttacc

SEQ ID NO: 124074 - DNA, 20 bp, Artificial Sequence
  MKO10124074_B_Twist2
  gRNA
tcttgctgtagcgccgcttc

SEQ ID NO: 124075 - DNA, 20 bp, Artificial Sequence
  MKO10124075_B_Twistnb
  gRNA
agcagaaactgtcgttgaag

SEQ ID NO: 124076 - DNA, 20 bp, Artificial Sequence
  MKO10124076_B_Twistnb
  gRNA
ctgatgttatcatatgcaat

SEQ ID NO: 124077 - DNA, 20 bp, Artificial Sequence
  MKO10124077_B_Twistnb
  gRNA
aacagttgatagtgttacag

SEQ ID NO: 124078 - DNA, 20 bp, Artificial Sequence
  MKO10124078_B_Twsg1
  gRNA
gttgtgaaaccagcgatact

SEQ ID NO: 124079 - DNA, 20 bp, Artificial Sequence
  MKO10124079_B_Twsg1
  gRNA
cctccgtcagcgccctgaac

SEQ ID NO: 124080 - DNA, 20 bp, Artificial Sequence
  MKO10124080_B_Twsg1
  gRNA
gaggcatttgctcacatcgc

SEQ ID NO: 124081 - DNA, 20 bp, Artificial Sequence
  MKO10124081_B_Txk
  gRNA
cgaaccacggcctctgacgc

SEQ ID NO: 124082 - DNA, 20 bp, Artificial Sequence
  MKO10124082_B_Txk
  gRNA
gccgctgctcagtacagaag

SEQ ID NO: 124083 - DNA, 20 bp, Artificial Sequence
  MKO10124083_B_Txk
  gRNA
acctcttctgtactgagcag

SEQ ID NO: 124084 - DNA, 20 bp, Artificial Sequence
  MKO10124084_B_Txlna
  gRNA
cgagcaatacgagcttcgtg

SEQ ID NO: 124085 - DNA, 20 bp, Artificial Sequence
  MKO10124085_B_Txlna
  gRNA
atccgagcgagtgatgaagt

SEQ ID NO: 124086 - DNA, 20 bp, Artificial Sequence
  MKO10124086_B_Txlna
  gRNA
tgctgtgttcccctcgcaga

SEQ ID NO: 124087 - DNA, 20 bp, Artificial Sequence
  MKO10124087_B_Txlnb
  gRNA
gaagctcctactgaaacagc

SEQ ID NO: 124088 - DNA, 20 bp, Artificial Sequence
  MKO10124088_B_Txlnb
  gRNA
tcgagaactgcagcagaagc

SEQ ID NO: 124089 - DNA, 20 bp, Artificial Sequence
  MKO10124089_B_Txlnb
  gRNA
agaggctcaagaactgatgc

SEQ ID NO: 124090 - DNA, 20 bp, Artificial Sequence
  MKO10124090_B_Txlng
  gRNA
aaatgaaatccaagctcagt

SEQ ID NO: 124091 - DNA, 20 bp, Artificial Sequence
  MKO10124091_B_Txlng
  gRNA
ccttgctgtgttcactctga

SEQ ID NO: 124092 - DNA, 20 bp, Artificial Sequence
  MKO10124092_B_Txlng
  gRNA
aaacaccctttcaaccccag

SEQ ID NO: 124093 - DNA, 20 bp, Artificial Sequence
  MKO10124093_B_Txn1
  gRNA
agtcatccacatccacttca

SEQ ID NO: 124094 - DNA, 20 bp, Artificial Sequence
  MKO10124094_B_Txn1
  gRNA
caacaggtgggggagttctc

SEQ ID NO: 124095 - DNA, 20 bp, Artificial Sequence
  MKO10124095_B_Txn1
  gRNA
agtggatgtggatgactgcc

SEQ ID NO: 124096 - DNA, 20 bp, Artificial Sequence
  MKO10124096_B_Txn2
  gRNA
tggtgtgtactgtccgggct

SEQ ID NO: 124097 - DNA, 20 bp, Artificial Sequence
  MKO10124097_B_Txn2
  gRNA
caccacgtccccgttcttga

SEQ ID NO: 124098 - DNA, 20 bp, Artificial Sequence
  MKO10124098_B_Txn2
  gRNA
ggacgtggtggacaagtttg

SEQ ID NO: 124099 - DNA, 20 bp, Artificial Sequence
  MKO10124099_B_Txndc11
  gRNA
tcaaagtatccgagtactcc

SEQ ID NO: 124100 - DNA, 20 bp, Artificial Sequence
  MKO10124100_B_Txndc11
  gRNA
tttggaccaatcgaatacaa

SEQ ID NO: 124101 - DNA, 20 bp, Artificial Sequence
  MKO10124101_B_Txndc11
  gRNA
cgatgatacagatgtatcac

SEQ ID NO: 124102 - DNA, 20 bp, Artificial Sequence
  MKO10124102_B_Txndc12
  gRNA
gatgaagacttcagccctga

SEQ ID NO: 124103 - DNA, 20 bp, Artificial Sequence
  MKO10124103_B_Txndc12
  gRNA
gactctggaagatggcaaga

SEQ ID NO: 124104 - DNA, 20 bp, Artificial Sequence
  MKO10124104_B_Txndc12
  gRNA
ttctgtagattctgcaaatt

SEQ ID NO: 124105 - DNA, 20 bp, Artificial Sequence
  MKO10124105_B_Txndc15
  gRNA
tggtcctcttctacaccccg

SEQ ID NO: 124106 - DNA, 20 bp, Artificial Sequence
  MKO10124106_B_Txndc15
  gRNA
tacagcctttctaccagatt

SEQ ID NO: 124107 - DNA, 20 bp, Artificial Sequence
  MKO10124107_B_Txndc15
  gRNA
ctggcagaaaaccggcacca

SEQ ID NO: 124108 - DNA, 20 bp, Artificial Sequence
  MKO10124108_B_Txndc16
  gRNA
cacatcaaacaagatgtccg

SEQ ID NO: 124109 - DNA, 20 bp, Artificial Sequence
  MKO10124109_B_Txndc16
  gRNA
ttctcatacgtagaagccat

SEQ ID NO: 124110 - DNA, 20 bp, Artificial Sequence
  MKO10124110_B_Txndc16
  gRNA
caactgaaatcccatagtcc

SEQ ID NO: 124111 - DNA, 20 bp, Artificial Sequence
  MKO10124111_B_Txndc17
  gRNA
gcctcaccttccacgcagtc

SEQ ID NO: 124112 - DNA, 20 bp, Artificial Sequence
  MKO10124112_B_Txndc17
  gRNA
tttacagcctcaaaaacttg

SEQ ID NO: 124113 - DNA, 20 bp, Artificial Sequence
  MKO10124113_B_Txndc17
  gRNA
cagagaagatcatctccaca

SEQ ID NO: 124114 - DNA, 20 bp, Artificial Sequence
  MKO10124114_B_Txndc2
  gRNA
gacatgaacagtgttcaagc

SEQ ID NO: 124115 - DNA, 20 bp, Artificial Sequence
  MKO10124115_B_Txndc2
  gRNA
gaggaggtgctcaaagacgc

SEQ ID NO: 124116 - DNA, 20 bp, Artificial Sequence
  MKO10124116_B_Txndc2
  gRNA
gaatgtcatcctccctgtaa

SEQ ID NO: 124117 - DNA, 20 bp, Artificial Sequence
  MKO10124117_B_Txndc5
  gRNA
gctctgggtggttccgcttc

SEQ ID NO: 124118 - DNA, 20 bp, Artificial Sequence
  MKO10124118_B_Txndc5
  gRNA
caaggtctacgtggccaaag

SEQ ID NO: 124119 - DNA, 20 bp, Artificial Sequence
  MKO10124119_B_Txndc5
  gRNA
acttaccttgccaatcttga

SEQ ID NO: 124120 - DNA, 20 bp, Artificial Sequence
  MKO10124120_B_Txndc8
  gRNA
cctgagcaaacgtgacattt

SEQ ID NO: 124121 - DNA, 20 bp, Artificial Sequence
  MKO10124121_B_Txndc8
  gRNA
gatgttcaagtacacccaaa

SEQ ID NO: 124122 - DNA, 20 bp, Artificial Sequence
  MKO10124122_B_Txndc8
  gRNA
gaaatccttacctggaaaac

SEQ ID NO: 124123 - DNA, 20 bp, Artificial Sequence
  MKO10124123_B_Txndc9
  gRNA
cctggaggaactggttctcc

SEQ ID NO: 124124 - DNA, 20 bp, Artificial Sequence
  MKO10124124_B_Txndc9
  gRNA
aagacgcaagattatgttgt

SEQ ID NO: 124125 - DNA, 20 bp, Artificial Sequence
  MKO10124125_B_Txndc9
  gRNA
atgtggtgtctctgtagaaa

SEQ ID NO: 124126 - DNA, 20 bp, Artificial Sequence
  MKO10124126_B_Txnip
  gRNA
aaaatcctcaccattaggtc

SEQ ID NO: 124127 - DNA, 20 bp, Artificial Sequence
  MKO10124127_B_Txnip
  gRNA
cccagcaggtgagaacgaga

SEQ ID NO: 124128 - DNA, 20 bp, Artificial Sequence
  MKO10124128_B_Txnip
  gRNA
gagactgacacacgtccatc

SEQ ID NO: 124129 - DNA, 20 bp, Artificial Sequence
  MKO10124129_B_Txnl1
  gRNA
cagcacttagaaaatgatcc

SEQ ID NO: 124130 - DNA, 20 bp, Artificial Sequence
  MKO10124130_B_Txnl1
  gRNA
cctacagctccttattactg

SEQ ID NO: 124131 - DNA, 20 bp, Artificial Sequence
  MKO10124131_B_Txnl1
  gRNA
caaccagctttgttaataaa

SEQ ID NO: 124132 - DNA, 20 bp, Artificial Sequence
  MKO10124132_B_Txnl4a
  gRNA
cgcccgcaaaggccggggtc

SEQ ID NO: 124133 - DNA, 20 bp, Artificial Sequence
  MKO10124133_B_Txnl4a
  gRNA
gcactgtcatgttcttcttc

SEQ ID NO: 124134 - DNA, 20 bp, Artificial Sequence
  MKO10124134_B_Txnl4a
  gRNA
tcgtacatcttgttgaagtc

SEQ ID NO: 124135 - DNA, 20 bp, Artificial Sequence
  MKO10124135_B_Txnl4b
  gRNA
tgttggttctcaggtttggg

SEQ ID NO: 124136 - DNA, 20 bp, Artificial Sequence
  MKO10124136_B_Txnl4b
  gRNA
ctgcccattgaagaaaaata

SEQ ID NO: 124137 - DNA, 20 bp, Artificial Sequence
  MKO10124137_B_Txnl4b
  gRNA
tgtgttaaatgtcttgatag

SEQ ID NO: 124138 - DNA, 20 bp, Artificial Sequence
  MKO10124138_B_Txnrd1
  gRNA
cattggtcctcacaggattg

SEQ ID NO: 124139 - DNA, 20 bp, Artificial Sequence
  MKO10124139_B_Txnrd1
  gRNA
tcaccccatctggtcccaag

SEQ ID NO: 124140 - DNA, 20 bp, Artificial Sequence
  MKO10124140_B_Txnrd1
  gRNA
ccccgctacctgggcatccc

SEQ ID NO: 124141 - DNA, 20 bp, Artificial Sequence
  MKO10124141_B_Txnrd2
  gRNA
taccttccttggcacaagct

SEQ ID NO: 124142 - DNA, 20 bp, Artificial Sequence
  MKO10124142_B_Txnrd2
  gRNA
gattgcctacctcggggaga

SEQ ID NO: 124143 - DNA, 20 bp, Artificial Sequence
  MKO10124143_B_Txnrd2
  gRNA
cccagttcaaggatttcaca

SEQ ID NO: 124144 - DNA, 20 bp, Artificial Sequence
  MKO10124144_B_Txnrd3
  gRNA
gattacgacctcatcatcat

SEQ ID NO: 124145 - DNA, 20 bp, Artificial Sequence
  MKO10124145_B_Txnrd3
  gRNA
tggatgtgaccgaactttcc

SEQ ID NO: 124146 - DNA, 20 bp, Artificial Sequence
  MKO10124146_B_Txnrd3
  gRNA
agatgacggggccagtgttc

SEQ ID NO: 124147 - DNA, 20 bp, Artificial Sequence
  MKO10124147_B_Tyk2
  gRNA
gtataccggtgtggtttccc

SEQ ID NO: 124148 - DNA, 20 bp, Artificial Sequence
  MKO10124148_B_Tyk2
  gRNA
cagcggtctgcccactgttc

SEQ ID NO: 124149 - DNA, 20 bp, Artificial Sequence
  MKO10124149_B_Tyk2
  gRNA
gagtgcgaagagattcaagc

SEQ ID NO: 124150 - DNA, 20 bp, Artificial Sequence
  MKO10124150_B_Tymp
  gRNA
caccaggtgccaatgatcag

SEQ ID NO: 124151 - DNA, 20 bp, Artificial Sequence
  MKO10124151_B_Tymp
  gRNA
atacttaggggccatgctaa

SEQ ID NO: 124152 - DNA, 20 bp, Artificial Sequence
  MKO10124152_B_Tymp
  gRNA
ttcaggtcacctgtaatgag

SEQ ID NO: 124153 - DNA, 20 bp, Artificial Sequence
  MKO10124153_B_Tyms
  gRNA
gaagaatcatcatgtgtgcc

SEQ ID NO: 124154 - DNA, 20 bp, Artificial Sequence
  MKO10124154_B_Tyms
  gRNA
ctcctcagatcttcccctga

SEQ ID NO: 124155 - DNA, 20 bp, Artificial Sequence
  MKO10124155_B_Tyms
  gRNA
ggcaaggaggcagtgccatc

SEQ ID NO: 124156 - DNA, 20 bp, Artificial Sequence
  MKO10124156_B_Tyro3
  gRNA
cagaccgttccactgacttt

SEQ ID NO: 124157 - DNA, 20 bp, Artificial Sequence
  MKO10124157_B_Tyro3
  gRNA
cagaacccgtaaccatttac

SEQ ID NO: 124158 - DNA, 20 bp, Artificial Sequence
  MKO10124158_B_Tyro3
  gRNA
agtgaagatgaccgtgtctc

SEQ ID NO: 124159 - DNA, 20 bp, Artificial Sequence
  MKO10124159_B_Tyrobp
  gRNA
tgagactgagtcgccttatc

SEQ ID NO: 124160 - DNA, 20 bp, Artificial Sequence
  MKO10124160_B_Tyrobp
  gRNA
cttaccactctgggcctgta

SEQ ID NO: 124161 - DNA, 20 bp, Artificial Sequence
  MKO10124161_B_Tyrobp
  gRNA
tctcagcaatgtgttgtttc

SEQ ID NO: 124162 - DNA, 20 bp, Artificial Sequence
  MKO10124162_B_Tyrp1
  gRNA
cttggaagagtacgataccc

SEQ ID NO: 124163 - DNA, 20 bp, Artificial Sequence
  MKO10124163_B_Tyrp1
  gRNA
agtagaatcgaagttgcttc

SEQ ID NO: 124164 - DNA, 20 bp, Artificial Sequence
  MKO10124164_B_Tyrp1
  gRNA
tcaggaagacgctgcactgc

SEQ ID NO: 124165 - DNA, 20 bp, Artificial Sequence
  MKO10124165_B_Tyr
  gRNA
aaattatattgagccttact

SEQ ID NO: 124166 - DNA, 20 bp, Artificial Sequence
  MKO10124166_B_Tyr
  gRNA
tcgtctttgtccatgaggag

SEQ ID NO: 124167 - DNA, 20 bp, Artificial Sequence
  MKO10124167_B_Tyr
  gRNA
ccattgatccagattcatac

SEQ ID NO: 124168 - DNA, 20 bp, Artificial Sequence
  MKO10124168_B_Tysnd1
  gRNA
gttgttgtctcgagtgttgc

SEQ ID NO: 124169 - DNA, 20 bp, Artificial Sequence
  MKO10124169_B_Tysnd1
  gRNA
accacaccactgagccggtc

SEQ ID NO: 124170 - DNA, 20 bp, Artificial Sequence
  MKO10124170_B_Tysnd1
  gRNA
tgcgggccctcggtgacctc

SEQ ID NO: 124171 - DNA, 20 bp, Artificial Sequence
  MKO10124171_B_Tyw1
  gRNA
ttacctgcttcttgatgatc

SEQ ID NO: 124172 - DNA, 20 bp, Artificial Sequence
  MKO10124172_B_Tyw1
  gRNA
aagaagcagacacacgtttc

SEQ ID NO: 124173 - DNA, 20 bp, Artificial Sequence
  MKO10124173_B_Tyw1
  gRNA
tctcctatcagactgtcatc

SEQ ID NO: 124174 - DNA, 20 bp, Artificial Sequence
  MKO10124174_B_Tyw3
  gRNA
accacatcgtctctcgcaca

SEQ ID NO: 124175 - DNA, 20 bp, Artificial Sequence
  MKO10124175_B_Tyw3
  gRNA
aaacttcaaaacagcttcgc

SEQ ID NO: 124176 - DNA, 20 bp, Artificial Sequence
  MKO10124176_B_Tyw3
  gRNA
ttatcctccatgtgcaatgc

SEQ ID NO: 124177 - DNA, 20 bp, Artificial Sequence
  MKO10124177_B_Tyw5
  gRNA
ctctggaccaacttgttaaa

SEQ ID NO: 124178 - DNA, 20 bp, Artificial Sequence
  MKO10124178_B_Tyw5
  gRNA
tcgagtccttccaacacaag

SEQ ID NO: 124179 - DNA, 20 bp, Artificial Sequence
  MKO10124179_B_Tyw5
  gRNA
aggatgagaaatactactta

SEQ ID NO: 124180 - DNA, 20 bp, Artificial Sequence
  MKO10124180_B_T
  gRNA
tgacggctgacaaccaccgc

SEQ ID NO: 124181 - DNA, 20 bp, Artificial Sequence
  MKO10124181_B_T
  gRNA
accgtacattgggaataccc

SEQ ID NO: 124182 - DNA, 20 bp, Artificial Sequence
  MKO10124182_B_T
  gRNA
accgggggactgccagcagc

SEQ ID NO: 124183 - DNA, 20 bp, Artificial Sequence
  MKO10124183_B_U2af1l4
  gRNA
tgttgtgaagtcgggagcac

SEQ ID NO: 124184 - DNA, 20 bp, Artificial Sequence
  MKO10124184_B_U2af1l4
  gRNA
taacgtagacattgcccacg

SEQ ID NO: 124185 - DNA, 20 bp, Artificial Sequence
  MKO10124185_B_U2af1l4
  gRNA
acactatgataacttctttg

SEQ ID NO: 124186 - DNA, 20 bp, Artificial Sequence
  MKO10124186_B_U2af1
  gRNA
caataaaccaacctttagcc

SEQ ID NO: 124187 - DNA, 20 bp, Artificial Sequence
  MKO10124187_B_U2af1
  gRNA
tcaggaagtcttcactgaga

SEQ ID NO: 124188 - DNA, 20 bp, Artificial Sequence
  MKO10124188_B_U2af1
  gRNA
ctcgaaaatggcggaatact

SEQ ID NO: 124189 - DNA, 20 bp, Artificial Sequence
  MKO10124189_B_U2af2
  gRNA
tactgggacgtgccaccgcc

SEQ ID NO: 124190 - DNA, 20 bp, Artificial Sequence
  MKO10124190_B_U2af2
  gRNA
ctcagcaaacctttgaccag

SEQ ID NO: 124191 - DNA, 20 bp, Artificial Sequence
  MKO10124191_B_U2af2
  gRNA
tacgtgggcaacatcccttt

SEQ ID NO: 124192 - DNA, 20 bp, Artificial Sequence
  MKO10124192_B_U2surp
  gRNA
ctggccttctgagatccgcc

SEQ ID NO: 124193 - DNA, 20 bp, Artificial Sequence
  MKO10124193_B_U2surp
  gRNA
aagcttaaagcattcagtat

SEQ ID NO: 124194 - DNA, 20 bp, Artificial Sequence
  MKO10124194_B_U2surp
  gRNA
atgaatgaacatctgatgat

SEQ ID NO: 124195 - DNA, 20 bp, Artificial Sequence
  MKO10124195_B_Uaca
  gRNA
agggaggaatgcgcttcacc

SEQ ID NO: 124196 - DNA, 20 bp, Artificial Sequence
  MKO10124196_B_Uaca
  gRNA
caacatcaatgccatgcgta

SEQ ID NO: 124197 - DNA, 20 bp, Artificial Sequence
  MKO10124197_B_Uaca
  gRNA
cgtgtccgtacttagctgcc

SEQ ID NO: 124198 - DNA, 20 bp, Artificial Sequence
  MKO10124198_B_Uap1l1
  gRNA
ctcctttatagatggcaacg

SEQ ID NO: 124199 - DNA, 20 bp, Artificial Sequence
  MKO10124199_B_Uap1l1
  gRNA
ggaggcttgctctacaacgc

SEQ ID NO: 124200 - DNA, 20 bp, Artificial Sequence
  MKO10124200_B_Uap1l1
  gRNA
catgaccagtgagtttaccc

SEQ ID NO: 124201 - DNA, 20 bp, Artificial Sequence
  MKO10124201_B_Uap1
  gRNA
atgcagaatccaatgaaccg

SEQ ID NO: 124202 - DNA, 20 bp, Artificial Sequence
  MKO10124202_B_Uap1
  gRNA
gctcaaaggcgaagttcaga

SEQ ID NO: 124203 - DNA, 20 bp, Artificial Sequence
  MKO10124203_B_Uap1
  gRNA
cagaacaatggaatcaacga

SEQ ID NO: 124204 - DNA, 20 bp, Artificial Sequence
  MKO10124204_B_Uba1y
  gRNA
ggctgtcactctccatgatc

SEQ ID NO: 124205 - DNA, 20 bp, Artificial Sequence
  MKO10124205_B_Uba1y
  gRNA
ggtgaattctgccatagcca

SEQ ID NO: 124206 - DNA, 20 bp, Artificial Sequence
  MKO10124206_B_Uba1y
  gRNA
ttaggaaatgtcaaaaaata

SEQ ID NO: 124207 - DNA, 20 bp, Artificial Sequence
  MKO10124207_B_Uba1
  gRNA
acatccagcgtccttgtctc

SEQ ID NO: 124208 - DNA, 20 bp, Artificial Sequence
  MKO10124208_B_Uba1
  gRNA
ctctagggaatggcgaagaa

SEQ ID NO: 124209 - DNA, 20 bp, Artificial Sequence
  MKO10124209_B_Uba1
  gRNA
tagacgagagcctttactcc

SEQ ID NO: 124210 - DNA, 20 bp, Artificial Sequence
  MKO10124210_B_Uba2
  gRNA
ccacccccaagccaacattg

SEQ ID NO: 124211 - DNA, 20 bp, Artificial Sequence
  MKO10124211_B_Uba2
  gRNA
cgtacttcatgatgctgtca

SEQ ID NO: 124212 - DNA, 20 bp, Artificial Sequence
  MKO10124212_B_Uba2
  gRNA
aaaaactccacattatagtc

SEQ ID NO: 124213 - DNA, 20 bp, Artificial Sequence
  MKO10124213_B_Uba3
  gRNA
atgtgagcttctgaaaaatc

SEQ ID NO: 124214 - DNA, 20 bp, Artificial Sequence
  MKO10124214_B_Uba3
  gRNA
tacatgtatctaacaagaac

SEQ ID NO: 124215 - DNA, 20 bp, Artificial Sequence
  MKO10124215_B_Uba3
  gRNA
taaaaactgtctatttaaat

SEQ ID NO: 124216 - DNA, 20 bp, Artificial Sequence
  MKO10124216_B_Uba52
  gRNA
acctttctggatgttgtagt

SEQ ID NO: 124217 - DNA, 20 bp, Artificial Sequence
  MKO10124217_B_Uba52
  gRNA
gatcttcgtgaagaccctga

SEQ ID NO: 124218 - DNA, 20 bp, Artificial Sequence
  MKO10124218_B_Uba52
  gRNA
gctttatttgaccttcttct

SEQ ID NO: 124219 - DNA, 20 bp, Artificial Sequence
  MKO10124219_B_Uba5
  gRNA
acgcagcagaacacaccctg

SEQ ID NO: 124220 - DNA, 20 bp, Artificial Sequence
  MKO10124220_B_Uba5
  gRNA
tccgtttcaatgccatcaga

SEQ ID NO: 124221 - DNA, 20 bp, Artificial Sequence
  MKO10124221_B_Uba5
  gRNA
gccgtctgatggcattgaaa

SEQ ID NO: 124222 - DNA, 20 bp, Artificial Sequence
  MKO10124222_B_Uba6
  gRNA
gcaaagaatcttgttcttgc

SEQ ID NO: 124223 - DNA, 20 bp, Artificial Sequence
  MKO10124223_B_Uba6
  gRNA
taacaacatcatcttcacac

SEQ ID NO: 124224 - DNA, 20 bp, Artificial Sequence
  MKO10124224_B_Uba6
  gRNA
taccatgacaacagaatctt

SEQ ID NO: 124225 - DNA, 20 bp, Artificial Sequence
  MKO10124225_B_Uba7
  gRNA
agtcttgctatgtggcctgc

SEQ ID NO: 124226 - DNA, 20 bp, Artificial Sequence
  MKO10124226_B_Uba7
  gRNA
gtccagatctccgtccacag

SEQ ID NO: 124227 - DNA, 20 bp, Artificial Sequence
  MKO10124227_B_Uba7
  gRNA
acccatgacagctgccatcc

SEQ ID NO: 124228 - DNA, 20 bp, Artificial Sequence
  MKO10124228_B_Ubac1
  gRNA
agcagtccggtcagtgctgc

SEQ ID NO: 124229 - DNA, 20 bp, Artificial Sequence
  MKO10124229_B_Ubac1
  gRNA
tgacgtctcagcagaagaaa

SEQ ID NO: 124230 - DNA, 20 bp, Artificial Sequence
  MKO10124230_B_Ubac1
  gRNA
ccacctcaatgagagacacg

SEQ ID NO: 124231 - DNA, 20 bp, Artificial Sequence
  MKO10124231_B_Ubac2
  gRNA
agcagaagactcttcgacag

SEQ ID NO: 124232 - DNA, 20 bp, Artificial Sequence
  MKO10124232_B_Ubac2
  gRNA
ggcccaggatctgcgccacc

SEQ ID NO: 124233 - DNA, 20 bp, Artificial Sequence
  MKO10124233_B_Ubac2
  gRNA
ttgaaagacgctttctgtag

SEQ ID NO: 124234 - DNA, 20 bp, Artificial Sequence
  MKO10124234_B_Ubald1
  gRNA
caccatgttctcccgtctca

SEQ ID NO: 124235 - DNA, 20 bp, Artificial Sequence
  MKO10124235_B_Ubald1
  gRNA
cagcagcccaatggccacgt

SEQ ID NO: 124236 - DNA, 20 bp, Artificial Sequence
  MKO10124236_B_Ubald1
  gRNA
ctacagccaccaccaccaga

SEQ ID NO: 124237 - DNA, 20 bp, Artificial Sequence
  MKO10124237_B_Ubald2
  gRNA
cagcagctgctgcgcctgat

SEQ ID NO: 124238 - DNA, 20 bp, Artificial Sequence
  MKO10124238_B_Ubald2
  gRNA
cagcgccatgtcggtgaaca

SEQ ID NO: 124239 - DNA, 20 bp, Artificial Sequence
  MKO10124239_B_Ubald2
  gRNA
gtctcatctctggccatcca

SEQ ID NO: 124240 - DNA, 20 bp, Artificial Sequence
  MKO10124240_B_Ubap1
  gRNA
ataggcagacccactttcgc

SEQ ID NO: 124241 - DNA, 20 bp, Artificial Sequence
  MKO10124241_B_Ubap1
  gRNA
cagtgcctgcagttccaaat

SEQ ID NO: 124242 - DNA, 20 bp, Artificial Sequence
  MKO10124242_B_Ubap1
  gRNA
ctcgactatctctttgcaca

SEQ ID NO: 124243 - DNA, 20 bp, Artificial Sequence
  MKO10124243_B_Ubap2l
  gRNA
tatactgtaaatgatgacgt

SEQ ID NO: 124244 - DNA, 20 bp, Artificial Sequence
  MKO10124244_B_Ubap2l
  gRNA
tttcagttgattgatatcac

SEQ ID NO: 124245 - DNA, 20 bp, Artificial Sequence
  MKO10124245_B_Ubap2l
  gRNA
ccataatgatgctgactttg

SEQ ID NO: 124246 - DNA, 20 bp, Artificial Sequence
  MKO10124246_B_Ubap2
  gRNA
ggcaagcgggcccgaggcag

SEQ ID NO: 124247 - DNA, 20 bp, Artificial Sequence
  MKO10124247_B_Ubap2
  gRNA
catcaccattacagtcatgt

SEQ ID NO: 124248 - DNA, 20 bp, Artificial Sequence
  MKO10124248_B_Ubap2
  gRNA
aggcaacagctgagcagatg

SEQ ID NO: 124249 - DNA, 20 bp, Artificial Sequence
  MKO10124249_B_Ubash3a
  gRNA
agtgcacaaaacgcatgtct

SEQ ID NO: 124250 - DNA, 20 bp, Artificial Sequence
  MKO10124250_B_Ubash3a
  gRNA
aagtcacagagtgtcacgtg

SEQ ID NO: 124251 - DNA, 20 bp, Artificial Sequence
  MKO10124251_B_Ubash3a
  gRNA
agggtagaacttatgggcca

SEQ ID NO: 124252 - DNA, 20 bp, Artificial Sequence
  MKO10124252_B_Ubash3b
  gRNA
gtcctctacctccgcccgac

SEQ ID NO: 124253 - DNA, 20 bp, Artificial Sequence
  MKO10124253_B_Ubash3b
  gRNA
ctaatggccctgtcgggcgg

SEQ ID NO: 124254 - DNA, 20 bp, Artificial Sequence
  MKO10124254_B_Ubash3b
  gRNA
cagaacattgacgtcaagct

SEQ ID NO: 124255 - DNA, 20 bp, Artificial Sequence
  MKO10124255_B_Ubb
  gRNA
atcttcgtgaagaccctgac

SEQ ID NO: 124256 - DNA, 20 bp, Artificial Sequence
  MKO10124256_B_Ubb
  gRNA
tgttgtaatcagagagggtg

SEQ ID NO: 124257 - DNA, 20 bp, Artificial Sequence
  MKO10124257_B_Ubb
  gRNA
tgacaccatcgagaacgtga

SEQ ID NO: 124258 - DNA, 20 bp, Artificial Sequence
  MKO10124258_B_Ubc
  gRNA
taacactgggctcgacgtcc

SEQ ID NO: 124259 - DNA, 20 bp, Artificial Sequence
  MKO10124259_B_Ubc
  gRNA
cacacccaagaacaagcaca

SEQ ID NO: 124260 - DNA, 20 bp, Artificial Sequence
  MKO10124260_B_Ubc
  gRNA
cacttagtccttcgcctcag

SEQ ID NO: 124261 - DNA, 20 bp, Artificial Sequence
  MKO10124261_B_Ubd
  gRNA
caaaggtcattaaccgccat

SEQ ID NO: 124262 - DNA, 20 bp, Artificial Sequence
  MKO10124262_B_Ubd
  gRNA
agtccaaaaacgaggggcaa

SEQ ID NO: 124263 - DNA, 20 bp, Artificial Sequence
  MKO10124263_B_Ubd
  gRNA
ggtttccttgtcaatcccat

SEQ ID NO: 124264 - DNA, 20 bp, Artificial Sequence
  MKO10124264_B_Ube2a
  gRNA
cacctgtatggacgttaaaa

SEQ ID NO: 124265 - DNA, 20 bp, Artificial Sequence
  MKO10124265_B_Ube2a
  gRNA
cggagtgagcggggctccgt

SEQ ID NO: 124266 - DNA, 20 bp, Artificial Sequence
  MKO10124266_B_Ube2a
  gRNA
ttagagacaaatctaacagt

SEQ ID NO: 124267 - DNA, 20 bp, Artificial Sequence
  MKO10124267_B_Ube2b
  gRNA
tgggactccatcgattctgc

SEQ ID NO: 124268 - DNA, 20 bp, Artificial Sequence
  MKO10124268_B_Ube2b
  gRNA
tccaaaatgtttcatccaaa

SEQ ID NO: 124269 - DNA, 20 bp, Artificial Sequence
  MKO10124269_B_Ube2b
  gRNA
ctgaaaacaacatcatgcag

SEQ ID NO: 124270 - DNA, 20 bp, Artificial Sequence
  MKO10124270_B_Ube2cbp
  gRNA
atcccgacccctttgctaat

SEQ ID NO: 124271 - DNA, 20 bp, Artificial Sequence
  MKO10124271_B_Ube2cbp
  gRNA
ttgggagagaccatgtcatc

SEQ ID NO: 124272 - DNA, 20 bp, Artificial Sequence
  MKO10124272_B_Ube2cbp
  gRNA
atgaagaggcctattagcaa

SEQ ID NO: 124273 - DNA, 20 bp, Artificial Sequence
  MKO10124273_B_Ube2c
  gRNA
gcaggaactgatgatcctca

SEQ ID NO: 124274 - DNA, 20 bp, Artificial Sequence
  MKO10124274_B_Ube2c
  gRNA
accctgctaccaccccaacg

SEQ ID NO: 124275 - DNA, 20 bp, Artificial Sequence
  MKO10124275_B_Ube2c
  gRNA
tccgcagcgtgtgtgttcaa

SEQ ID NO: 124276 - DNA, 20 bp, Artificial Sequence
  MKO10124276_B_Ube2d1
  gRNA
acctttcgatacagtcaaag

SEQ ID NO: 124277 - DNA, 20 bp, Artificial Sequence
  MKO10124277_B_Ube2d1
  gRNA
cagcctgacagcgcctatca

SEQ ID NO: 124278 - DNA, 20 bp, Artificial Sequence
  MKO10124278_B_Ube2d1
  gRNA
aaacttacagtcatctccca

SEQ ID NO: 124279 - DNA, 20 bp, Artificial Sequence
  MKO10124279_B_Ube2d2a
  gRNA
tcttaaggaattgaatgacc

SEQ ID NO: 124280 - DNA, 20 bp, Artificial Sequence
  MKO10124280_B_Ube2d2a
  gRNA
tacttactatcatctccaac

SEQ ID NO: 124281 - DNA, 20 bp, Artificial Sequence
  MKO10124281_B_Ube2d2a
  gRNA
cacccaaatattaacagtaa

SEQ ID NO: 124282 - DNA, 20 bp, Artificial Sequence
  MKO10124282_B_Ube2d2b
  gRNA
ggccctcagcgcattctgcc

SEQ ID NO: 124283 - DNA, 20 bp, Artificial Sequence
  MKO10124283_B_Ube2d2b
  gRNA
gccaaatgatagtccctatc

SEQ ID NO: 124284 - DNA, 20 bp, Artificial Sequence
  MKO10124284_B_Ube2d2b
  gRNA
acatgcagcggtactgtatc

SEQ ID NO: 124285 - DNA, 20 bp, Artificial Sequence
  MKO10124285_B_Ube2d3
  gRNA
cctgctttaactatttctaa

SEQ ID NO: 124286 - DNA, 20 bp, Artificial Sequence
  MKO10124286_B_Ube2d3
  gRNA
tacttactgtcatctccaac

SEQ ID NO: 124287 - DNA, 20 bp, Artificial Sequence
  MKO10124287_B_Ube2d3
  gRNA
cagaatgacagcccatatca

SEQ ID NO: 124288 - DNA, 20 bp, Artificial Sequence
  MKO10124288_B_Ube2dnl1
  gRNA
agagccattgcccccaaact

SEQ ID NO: 124289 - DNA, 20 bp, Artificial Sequence
  MKO10124289_B_Ube2dnl1
  gRNA
cgagcagttgtttgtcctcc

SEQ ID NO: 124290 - DNA, 20 bp, Artificial Sequence
  MKO10124290_B_Ube2dnl1
  gRNA
aattgctaaagtctaccaca

SEQ ID NO: 124291 - DNA, 20 bp, Artificial Sequence
  MKO10124291_B_Ube2dnl2
  gRNA
tttaagagagtacaatagac

SEQ ID NO: 124292 - DNA, 20 bp, Artificial Sequence
  MKO10124292_B_Ube2dnl2
  gRNA
tttgcaatttcagggaccag

SEQ ID NO: 124293 - DNA, 20 bp, Artificial Sequence
  MKO10124293_B_Ube2dnl2
  gRNA
tagatatcttgaattctatg

SEQ ID NO: 124294 - DNA, 20 bp, Artificial Sequence
  MKO10124294_B_Ube2e1
  gRNA
taccaggattgcagtctgta

SEQ ID NO: 124295 - DNA, 20 bp, Artificial Sequence
  MKO10124295_B_Ube2e1
  gRNA
atttcacagtgctggtccca

SEQ ID NO: 124296 - DNA, 20 bp, Artificial Sequence
  MKO10124296_B_Ube2e1
  gRNA
cctccagggtctgtgtatga

SEQ ID NO: 124297 - DNA, 20 bp, Artificial Sequence
  MKO10124297_B_Ube2e2
  gRNA
tacagtgatagattctcgtt

SEQ ID NO: 124298 - DNA, 20 bp, Artificial Sequence
  MKO10124298_B_Ube2e2
  gRNA
tgaatggaggtcaactatat

SEQ ID NO: 124299 - DNA, 20 bp, Artificial Sequence
  MKO10124299_B_Ube2e2
  gRNA
ggagcttgcagaaatcacgc

SEQ ID NO: 124300 - DNA, 20 bp, Artificial Sequence
  MKO10124300_B_Ube2e3
  gRNA
gtttcttacctgcagttagg

SEQ ID NO: 124301 - DNA, 20 bp, Artificial Sequence
  MKO10124301_B_Ube2e3
  gRNA
gaattatgttgcgtatctct

SEQ ID NO: 124302 - DNA, 20 bp, Artificial Sequence
  MKO10124302_B_Ube2e3
  gRNA
ttgatcctcctcctaactgc

SEQ ID NO: 124303 - DNA, 20 bp, Artificial Sequence
  MKO10124303_B_Ube2f
  gRNA
tgaaagcaatgaagcttgtt

SEQ ID NO: 124304 - DNA, 20 bp, Artificial Sequence
  MKO10124304_B_Ube2f
  gRNA
ttcccccgtttctgtgatgt

SEQ ID NO: 124305 - DNA, 20 bp, Artificial Sequence
  MKO10124305_B_Ube2f
  gRNA
tgaaatgcttgactaaaatc

SEQ ID NO: 124306 - DNA, 20 bp, Artificial Sequence
  MKO10124306_B_Ube2g1
  gRNA
ggccggaggggataatcttt

SEQ ID NO: 124307 - DNA, 20 bp, Artificial Sequence
  MKO10124307_B_Ube2g1
  gRNA
tcccaaaagattatcccctc

SEQ ID NO: 124308 - DNA, 20 bp, Artificial Sequence
  MKO10124308_B_Ube2g1
  gRNA
tatacttactaaagtgtatc

SEQ ID NO: 124309 - DNA, 20 bp, Artificial Sequence
  MKO10124309_B_Ube2g2
  gRNA
ttacctgccacgattccttc

SEQ ID NO: 124310 - DNA, 20 bp, Artificial Sequence
  MKO10124310_B_Ube2g2
  gRNA
gttgggatggaacatctcac

SEQ ID NO: 124311 - DNA, 20 bp, Artificial Sequence
  MKO10124311_B_Ube2g2
  gRNA
ttaaccctgaatcctccaga

SEQ ID NO: 124312 - DNA, 20 bp, Artificial Sequence
  MKO10124312_B_Ube2h
  gRNA
accatgtcatcccccagtcc

SEQ ID NO: 124313 - DNA, 20 bp, Artificial Sequence
  MKO10124313_B_Ube2h
  gRNA
cgtgtccatccgcctcttgc

SEQ ID NO: 124314 - DNA, 20 bp, Artificial Sequence
  MKO10124314_B_Ube2h
  gRNA
cgaattcattgagtcctcct

SEQ ID NO: 124315 - DNA, 20 bp, Artificial Sequence
  MKO10124315_B_Ube2i
  gRNA
acccttacccccttctttcc

SEQ ID NO: 124316 - DNA, 20 bp, Artificial Sequence
  MKO10124316_B_Ube2i
  gRNA
acctgtttgatggtgatagc

SEQ ID NO: 124317 - DNA, 20 bp, Artificial Sequence
  MKO10124317_B_Ube2i
  gRNA
gtcccaacaaagaaccctga

SEQ ID NO: 124318 - DNA, 20 bp, Artificial Sequence
  MKO10124318_B_Ube2j1
  gRNA
ggtttcatggggtactctgg

SEQ ID NO: 124319 - DNA, 20 bp, Artificial Sequence
  MKO10124319_B_Ube2j1
  gRNA
actgttagcaggataatgct

SEQ ID NO: 124320 - DNA, 20 bp, Artificial Sequence
  MKO10124320_B_Ube2j1
  gRNA
gctaatggacgatttgaagt

SEQ ID NO: 124321 - DNA, 20 bp, Artificial Sequence
  MKO10124321_B_Ube2j2
  gRNA
cctggggagcatagagacgt

SEQ ID NO: 124322 - DNA, 20 bp, Artificial Sequence
  MKO10124322_B_Ube2j2
  gRNA
taccattcaagaatatttga

SEQ ID NO: 124323 - DNA, 20 bp, Artificial Sequence
  MKO10124323_B_Ube2j2
  gRNA
ctccaacaacagcaacacaa

SEQ ID NO: 124324 - DNA, 20 bp, Artificial Sequence
  MKO10124324_B_Ube2k
  gRNA
aataccttaggggggttaaa

SEQ ID NO: 124325 - DNA, 20 bp, Artificial Sequence
  MKO10124325_B_Ube2k
  gRNA
agcagcaatgactctgcgca

SEQ ID NO: 124326 - DNA, 20 bp, Artificial Sequence
  MKO10124326_B_Ube2k
  gRNA
atatccatttaaccccccta

SEQ ID NO: 124327 - DNA, 20 bp, Artificial Sequence
  MKO10124327_B_Ube2l3
  gRNA
gatccaagatggcggccagc

SEQ ID NO: 124328 - DNA, 20 bp, Artificial Sequence
  MKO10124328_B_Ube2l3
  gRNA
cttgaagagatccgcaaatg

SEQ ID NO: 124329 - DNA, 20 bp, Artificial Sequence
  MKO10124329_B_Ube2l3
  gRNA
ataaattagcttcatcaacc

SEQ ID NO: 124330 - DNA, 20 bp, Artificial Sequence
  MKO10124330_B_Ube2l6
  gRNA
ggagctggagagtctttcga

SEQ ID NO: 124331 - DNA, 20 bp, Artificial Sequence
  MKO10124331_B_Ube2l6
  gRNA
gaaatcaatccgcacttgga

SEQ ID NO: 124332 - DNA, 20 bp, Artificial Sequence
  MKO10124332_B_Ube2l6
  gRNA
tctggaagagcctgtgcgtc

SEQ ID NO: 124333 - DNA, 20 bp, Artificial Sequence
  MKO10124333_B_Ube2m
  gRNA
cccgatgtaaccacctctca

SEQ ID NO: 124334 - DNA, 20 bp, Artificial Sequence
  MKO10124334_B_Ube2m
  gRNA
gaagctgatgtcacacgtct

SEQ ID NO: 124335 - DNA, 20 bp, Artificial Sequence
  MKO10124335_B_Ube2m
  gRNA
aaattatggagtttatcgta

SEQ ID NO: 124336 - DNA, 20 bp, Artificial Sequence
  MKO10124336_B_Ube2n
  gRNA
gtaggaaacccagcgtttgc

SEQ ID NO: 124337 - DNA, 20 bp, Artificial Sequence
  MKO10124337_B_Ube2n
  gRNA
atattaagtacctgtttcta

SEQ ID NO: 124338 - DNA, 20 bp, Artificial Sequence
  MKO10124338_B_Ube2n
  gRNA
agatggccgggctgccccgc

SEQ ID NO: 124339 - DNA, 20 bp, Artificial Sequence
  MKO10124339_B_Ube2o
  gRNA
gcatgtgtcgaaccacatcc

SEQ ID NO: 124340 - DNA, 20 bp, Artificial Sequence
  MKO10124340_B_Ube2o
  gRNA
gactgtgccgtcaagctcat

SEQ ID NO: 124341 - DNA, 20 bp, Artificial Sequence
  MKO10124341_B_Ube2o
  gRNA
gatatagtctccatacatga

SEQ ID NO: 124342 - DNA, 20 bp, Artificial Sequence
  MKO10124342_B_Ube2q1
  gRNA
agctcttgcagcatctgaag

SEQ ID NO: 124343 - DNA, 20 bp, Artificial Sequence
  MKO10124343_B_Ube2q1
  gRNA
atcttcagacttcttgccct

SEQ ID NO: 124344 - DNA, 20 bp, Artificial Sequence
  MKO10124344_B_Ube2q1
  gRNA
accctgctgtgccccccatc

SEQ ID NO: 124345 - DNA, 20 bp, Artificial Sequence
  MKO10124345_B_Ube2q2
  gRNA
acccatcttcttcaccaata

SEQ ID NO: 124346 - DNA, 20 bp, Artificial Sequence
  MKO10124346_B_Ube2q2
  gRNA
tttgtaggatatagaagact

SEQ ID NO: 124347 - DNA, 20 bp, Artificial Sequence
  MKO10124347_B_Ube2q2
  gRNA
agaagtaacttcagaagaag

SEQ ID NO: 124348 - DNA, 20 bp, Artificial Sequence
  MKO10124348_B_Ube2ql1
  gRNA
agacacatgagaaatacggc

SEQ ID NO: 124349 - DNA, 20 bp, Artificial Sequence
  MKO10124349_B_Ube2ql1
  gRNA
cgctgaggcgcgcgatgtcc

SEQ ID NO: 124350 - DNA, 20 bp, Artificial Sequence
  MKO10124350_B_Ube2ql1
  gRNA
ggcagcaaactggcgcatga

SEQ ID NO: 124351 - DNA, 20 bp, Artificial Sequence
  MKO10124351_B_Ube2r2
  gRNA
ggtgaatatgggtaatcaat

SEQ ID NO: 124352 - DNA, 20 bp, Artificial Sequence
  MKO10124352_B_Ube2r2
  gRNA
agtgaaggtccccacaaccc

SEQ ID NO: 124353 - DNA, 20 bp, Artificial Sequence
  MKO10124353_B_Ube2r2
  gRNA
cttctccgcctcagctttag

SEQ ID NO: 124354 - DNA, 20 bp, Artificial Sequence
  MKO10124354_B_Ube2s
  gRNA
tcagaagggactccctatgc

SEQ ID NO: 124355 - DNA, 20 bp, Artificial Sequence
  MKO10124355_B_Ube2s
  gRNA
cccagagtctgcactcaatg

SEQ ID NO: 124356 - DNA, 20 bp, Artificial Sequence
  MKO10124356_B_Ube2s
  gRNA
gtggatcagcaggcacttga

SEQ ID NO: 124357 - DNA, 20 bp, Artificial Sequence
  MKO10124357_B_Ube2t
  gRNA
cttccactagaatcaatgtt

SEQ ID NO: 124358 - DNA, 20 bp, Artificial Sequence
  MKO10124358_B_Ube2t
  gRNA
tattctcaaattgccaccaa

SEQ ID NO: 124359 - DNA, 20 bp, Artificial Sequence
  MKO10124359_B_Ube2t
  gRNA
tggaagttatcattcctgag

SEQ ID NO: 124360 - DNA, 20 bp, Artificial Sequence
  MKO10124360_B_Ube2u
  gRNA
cttcgcaattcagtttgtga

SEQ ID NO: 124361 - DNA, 20 bp, Artificial Sequence
  MKO10124361_B_Ube2u
  gRNA
caattcttacttggtaatgc

SEQ ID NO: 124362 - DNA, 20 bp, Artificial Sequence
  MKO10124362_B_Ube2u
  gRNA
taagtgatgatatgatgaat

SEQ ID NO: 124363 - DNA, 20 bp, Artificial Sequence
  MKO10124363_B_Ube2v1
  gRNA
ccctcgaaatttccgactgt

SEQ ID NO: 124364 - DNA, 20 bp, Artificial Sequence
  MKO10124364_B_Ube2v1
  gRNA
cttccagctcttccaacagt

SEQ ID NO: 124365 - DNA, 20 bp, Artificial Sequence
  MKO10124365_B_Ube2v1
  gRNA
tacagccttaagatagagtg

SEQ ID NO: 124366 - DNA, 20 bp, Artificial Sequence
  MKO10124366_B_Ube2v2
  gRNA
gaacttgaagaaggacaaaa

SEQ ID NO: 124367 - DNA, 20 bp, Artificial Sequence
  MKO10124367_B_Ube2v2
  gRNA
tatagcctgaaagtagaatg

SEQ ID NO: 124368 - DNA, 20 bp, Artificial Sequence
  MKO10124368_B_Ube2v2
  gRNA
tttgttacaaatctaactga

SEQ ID NO: 124369 - DNA, 20 bp, Artificial Sequence
  MKO10124369_B_Ube2w
  gRNA
actgactgcactgagagcgc

SEQ ID NO: 124370 - DNA, 20 bp, Artificial Sequence
  MKO10124370_B_Ube2w
  gRNA
ggaccagtcttctgttagaa

SEQ ID NO: 124371 - DNA, 20 bp, Artificial Sequence
  MKO10124371_B_Ube2w
  gRNA
ttgcagaatgacccacctcc

SEQ ID NO: 124372 - DNA, 20 bp, Artificial Sequence
  MKO10124372_B_Ube2z
  gRNA
aatccctaccacaacgaacc

SEQ ID NO: 124373 - DNA, 20 bp, Artificial Sequence
  MKO10124373_B_Ube2z
  gRNA
cgacactgttgacatgacta

SEQ ID NO: 124374 - DNA, 20 bp, Artificial Sequence
  MKO10124374_B_Ube2z
  gRNA
aaccccaacttctaccgcaa

SEQ ID NO: 124375 - DNA, 20 bp, Artificial Sequence
  MKO10124375_B_Ube3a
  gRNA
aactgcttcttcaagtctgc

SEQ ID NO: 124376 - DNA, 20 bp, Artificial Sequence
  MKO10124376_B_Ube3a
  gRNA
acagctagagatgattgcta

SEQ ID NO: 124377 - DNA, 20 bp, Artificial Sequence
  MKO10124377_B_Ube3a
  gRNA
gatcctcatccctccaagaa

SEQ ID NO: 124378 - DNA, 20 bp, Artificial Sequence
  MKO10124378_B_Ube3b
  gRNA
agggctcacctcgctgtcct

SEQ ID NO: 124379 - DNA, 20 bp, Artificial Sequence
  MKO10124379_B_Ube3b
  gRNA
gtttatatgcaaaactaccg

SEQ ID NO: 124380 - DNA, 20 bp, Artificial Sequence
  MKO10124380_B_Ube3b
  gRNA
actcacctttggctcattct

SEQ ID NO: 124381 - DNA, 20 bp, Artificial Sequence
  MKO10124381_B_Ube3c
  gRNA
ctctctgtttgtcaagcaat

SEQ ID NO: 124382 - DNA, 20 bp, Artificial Sequence
  MKO10124382_B_Ube3c
  gRNA
gctgagccgagtcagtgcat

SEQ ID NO: 124383 - DNA, 20 bp, Artificial Sequence
  MKO10124383_B_Ube3c
  gRNA
taaggttgggaccatcagca

SEQ ID NO: 124384 - DNA, 20 bp, Artificial Sequence
  MKO10124384_B_Ube4a
  gRNA
tcaaatctaccagttgctca

SEQ ID NO: 124385 - DNA, 20 bp, Artificial Sequence
  MKO10124385_B_Ube4a
  gRNA
ctgagattagccgctccttc

SEQ ID NO: 124386 - DNA, 20 bp, Artificial Sequence
  MKO10124386_B_Ube4a
  gRNA
cgattattgcttcaagatcc

SEQ ID NO: 124387 - DNA, 20 bp, Artificial Sequence
  MKO10124387_B_Ube4b
  gRNA
atctctgtcgcggtccttcc

SEQ ID NO: 124388 - DNA, 20 bp, Artificial Sequence
  MKO10124388_B_Ube4b
  gRNA
ttcccgaatccacatccacc

SEQ ID NO: 124389 - DNA, 20 bp, Artificial Sequence
  MKO10124389_B_Ube4b
  gRNA
cctgtgtaggagttgcccat

SEQ ID NO: 124390 - DNA, 20 bp, Artificial Sequence
  MKO10124390_B_Ubfd1
  gRNA
agatgtgatgccgtctgtta

SEQ ID NO: 124391 - DNA, 20 bp, Artificial Sequence
  MKO10124391_B_Ubfd1
  gRNA
cccgaaagatgctgcccagc

SEQ ID NO: 124392 - DNA, 20 bp, Artificial Sequence
  MKO10124392_B_Ubfd1
  gRNA
tctggcatgtacaataagtc

SEQ ID NO: 124393 - DNA, 20 bp, Artificial Sequence
  MKO10124393_B_Ubiad1
  gRNA
gatgtttgcctacgctgtcc

SEQ ID NO: 124394 - DNA, 20 bp, Artificial Sequence
  MKO10124394_B_Ubiad1
  gRNA
gaagaacgaatggcccgagc

SEQ ID NO: 124395 - DNA, 20 bp, Artificial Sequence
  MKO10124395_B_Ubiad1
  gRNA
caagtgcgcctcctacgtgt

SEQ ID NO: 124396 - DNA, 20 bp, Artificial Sequence
  MKO10124396_B_Ubl3
  gRNA
cgggggcttaccttgtgagt

SEQ ID NO: 124397 - DNA, 20 bp, Artificial Sequence
  MKO10124397_B_Ubl3
  gRNA
taaatgagtcgaagaatgtt

SEQ ID NO: 124398 - DNA, 20 bp, Artificial Sequence
  MKO10124398_B_Ubl3
  gRNA
ctgccagagcccaactcaca

SEQ ID NO: 124399 - DNA, 20 bp, Artificial Sequence
  MKO10124399_B_Ubl4a
  gRNA
cctcacttgccggcgtttgc

SEQ ID NO: 124400 - DNA, 20 bp, Artificial Sequence
  MKO10124400_B_Ubl4a
  gRNA
ctcttcatcagcgagattca

SEQ ID NO: 124401 - DNA, 20 bp, Artificial Sequence
  MKO10124401_B_Ubl4a
  gRNA
cttgaatctcgctgatgaag

SEQ ID NO: 124402 - DNA, 20 bp, Artificial Sequence
  MKO10124402_B_Ubl4b
  gRNA
ggaagcccctgctgttgcat

SEQ ID NO: 124403 - DNA, 20 bp, Artificial Sequence
  MKO10124403_B_Ubl4b
  gRNA
tacctctcagattacagcat

SEQ ID NO: 124404 - DNA, 20 bp, Artificial Sequence
  MKO10124404_B_Ubl4b
  gRNA
ttatccagcgctgcatcctc

SEQ ID NO: 124405 - DNA, 20 bp, Artificial Sequence
  MKO10124405_B_Ubl4
  gRNA
ccttgaacagcagacgttgc

SEQ ID NO: 124406 - DNA, 20 bp, Artificial Sequence
  MKO10124406_B_Ubl4
  gRNA
aactaggttgagcttagaat

SEQ ID NO: 124407 - DNA, 20 bp, Artificial Sequence
  MKO10124407_B_Ubl4
  gRNA
gttcgatgtcatccagtgtt

SEQ ID NO: 124408 - DNA, 20 bp, Artificial Sequence
  MKO10124408_B_Ubl5
  gRNA
cagtttcttcaagtcgccga

SEQ ID NO: 124409 - DNA, 20 bp, Artificial Sequence
  MKO10124409_B_Ubl5
  gRNA
tacaatctcccagagacacg

SEQ ID NO: 124410 - DNA, 20 bp, Artificial Sequence
  MKO10124410_B_Ubl5
  gRNA
tccagccacaatgattgagg

SEQ ID NO: 124411 - DNA, 20 bp, Artificial Sequence
  MKO10124411_B_Ubl7
  gRNA
tagctgccctgagagagttc

SEQ ID NO: 124412 - DNA, 20 bp, Artificial Sequence
  MKO10124412_B_Ubl7
  gRNA
gtctcttccaggggttctcc

SEQ ID NO: 124413 - DNA, 20 bp, Artificial Sequence
  MKO10124413_B_Ubl7
  gRNA
cccttaccaggtttctgatc

SEQ ID NO: 124414 - DNA, 20 bp, Artificial Sequence
  MKO10124414_B_Ublcp1
  gRNA
aagtagttgaagtagaaaat

SEQ ID NO: 124415 - DNA, 20 bp, Artificial Sequence
  MKO10124415_B_Ublcp1
  gRNA
ttgatgacatcatcattgtc

SEQ ID NO: 124416 - DNA, 20 bp, Artificial Sequence
  MKO10124416_B_Ublcp1
  gRNA
tagggaggaaaacctcctga

SEQ ID NO: 124417 - DNA, 20 bp, Artificial Sequence
  MKO10124417_B_Ubn1
  gRNA
ataaggtggaggcccttgca

SEQ ID NO: 124418 - DNA, 20 bp, Artificial Sequence
  MKO10124418_B_Ubn1
  gRNA
ttctcagaagcggaagttga

SEQ ID NO: 124419 - DNA, 20 bp, Artificial Sequence
  MKO10124419_B_Ubn1
  gRNA
ttcagggtggaaagaaacgt

SEQ ID NO: 124420 - DNA, 20 bp, Artificial Sequence
  MKO10124420_B_Ubn2
  gRNA
ttcagcataccccagttgct

SEQ ID NO: 124421 - DNA, 20 bp, Artificial Sequence
  MKO10124421_B_Ubn2
  gRNA
tccttatgctcatcagtaaa

SEQ ID NO: 124422 - DNA, 20 bp, Artificial Sequence
  MKO10124422_B_Ubn2
  gRNA
gcttctctaacaacaaaata

SEQ ID NO: 124423 - DNA, 20 bp, Artificial Sequence
  MKO10124423_B_Ubox5
  gRNA
tcggcacagaaggtgaccac

SEQ ID NO: 124424 - DNA, 20 bp, Artificial Sequence
  MKO10124424_B_Ubox5
  gRNA
ctggggattaccggagctgg

SEQ ID NO: 124425 - DNA, 20 bp, Artificial Sequence
  MKO10124425_B_Ubox5
  gRNA
tggagccaagggtagaagtc

SEQ ID NO: 124426 - DNA, 20 bp, Artificial Sequence
  MKO10124426_B_Ubp1
  gRNA
gtcgaagtcgtgcaccagcc

SEQ ID NO: 124427 - DNA, 20 bp, Artificial Sequence
  MKO10124427_B_Ubp1
  gRNA
tgtactgtagccgcctgtca

SEQ ID NO: 124428 - DNA, 20 bp, Artificial Sequence
  MKO10124428_B_Ubp1
  gRNA
atgctggataatcgcaaaat

SEQ ID NO: 124429 - DNA, 20 bp, Artificial Sequence
  MKO10124429_B_Ubqln1
  gRNA
accgggcgcgcaggacagtg

SEQ ID NO: 124430 - DNA, 20 bp, Artificial Sequence
  MKO10124430_B_Ubqln1
  gRNA
gccgcactgtcctgcgcgcc

SEQ ID NO: 124431 - DNA, 20 bp, Artificial Sequence
  MKO10124431_B_Ubqln1
  gRNA
acaaaagttgccgctgcatt

SEQ ID NO: 124432 - DNA, 20 bp, Artificial Sequence
  MKO10124432_B_Ubqln2
  gRNA
gcggatcacgattctccgtg

SEQ ID NO: 124433 - DNA, 20 bp, Artificial Sequence
  MKO10124433_B_Ubqln2
  gRNA
agtgggtcctataggcccga

SEQ ID NO: 124434 - DNA, 20 bp, Artificial Sequence
  MKO10124434_B_Ubqln2
  gRNA
gtgatccgctgcccaatcct

SEQ ID NO: 124435 - DNA, 20 bp, Artificial Sequence
  MKO10124435_B_Ubqln3
  gRNA
tcgtaacccttccatgatgc

SEQ ID NO: 124436 - DNA, 20 bp, Artificial Sequence
  MKO10124436_B_Ubqln3
  gRNA
aagatgcagcgtcggaccat

SEQ ID NO: 124437 - DNA, 20 bp, Artificial Sequence
  MKO10124437_B_Ubqln3
  gRNA
ggatcgtgcactcagtaacc

SEQ ID NO: 124438 - DNA, 20 bp, Artificial Sequence
  MKO10124438_B_Ubqln4
  gRNA
gcccatccttgatgccgtgc

SEQ ID NO: 124439 - DNA, 20 bp, Artificial Sequence
  MKO10124439_B_Ubqln4
  gRNA
cggagggcattataccctcc

SEQ ID NO: 124440 - DNA, 20 bp, Artificial Sequence
  MKO10124440_B_Ubqln4
  gRNA
cttcgcaggcaagatcctca

SEQ ID NO: 124441 - DNA, 20 bp, Artificial Sequence
  MKO10124441_B_Ubqlnl
  gRNA
cagaaagtacagcccccgtc

SEQ ID NO: 124442 - DNA, 20 bp, Artificial Sequence
  MKO10124442_B_Ubqlnl
  gRNA
cgagtgattgtgaagactcc

SEQ ID NO: 124443 - DNA, 20 bp, Artificial Sequence
  MKO10124443_B_Ubqlnl
  gRNA
gcattattacaaattgagca

SEQ ID NO: 124444 - DNA, 20 bp, Artificial Sequence
  MKO10124444_B_Ubr1
  gRNA
agcgttccagttgtgtggga

SEQ ID NO: 124445 - DNA, 20 bp, Artificial Sequence
  MKO10124445_B_Ubr1
  gRNA
acattgcccattgaatgaag

SEQ ID NO: 124446 - DNA, 20 bp, Artificial Sequence
  MKO10124446_B_Ubr1
  gRNA
agccaggagaatattccctt

SEQ ID NO: 124447 - DNA, 20 bp, Artificial Sequence
  MKO10124447_B_Ubr2
  gRNA
agggccccggcagtagattt

SEQ ID NO: 124448 - DNA, 20 bp, Artificial Sequence
  MKO10124448_B_Ubr2
  gRNA
ggccatcgaccgcagtttgc

SEQ ID NO: 124449 - DNA, 20 bp, Artificial Sequence
  MKO10124449_B_Ubr2
  gRNA
tgttctgccgaagagatcgc

SEQ ID NO: 124450 - DNA, 20 bp, Artificial Sequence
  MKO10124450_B_Ubr3
  gRNA
tcaggtctttgtagttctgc

SEQ ID NO: 124451 - DNA, 20 bp, Artificial Sequence
  MKO10124451_B_Ubr3
  gRNA
cttattcagtacttaagaga

SEQ ID NO: 124452 - DNA, 20 bp, Artificial Sequence
  MKO10124452_B_Ubr3
  gRNA
agacatcatcagtaagtctt

SEQ ID NO: 124453 - DNA, 20 bp, Artificial Sequence
  MKO10124453_B_Ubr4
  gRNA
ggacttcatcattgctgtaa

SEQ ID NO: 124454 - DNA, 20 bp, Artificial Sequence
  MKO10124454_B_Ubr4
  gRNA
cagctgccaccgactgaagc

SEQ ID NO: 124455 - DNA, 20 bp, Artificial Sequence
  MKO10124455_B_Ubr4
  gRNA
ccccagtaagccccgagctc

SEQ ID NO: 124456 - DNA, 20 bp, Artificial Sequence
  MKO10124456_B_Ubr5
  gRNA
tcttacccatcattattatc

SEQ ID NO: 124457 - DNA, 20 bp, Artificial Sequence
  MKO10124457_B_Ubr5
  gRNA
gactccccgtggtttctctc

SEQ ID NO: 124458 - DNA, 20 bp, Artificial Sequence
  MKO10124458_B_Ubr5
  gRNA
acagggaggacctctaggcc

SEQ ID NO: 124459 - DNA, 20 bp, Artificial Sequence
  MKO10124459_B_Ubr7
  gRNA
acacactgtatcatctcatc

SEQ ID NO: 124460 - DNA, 20 bp, Artificial Sequence
  MKO10124460_B_Ubr7
  gRNA
tctctttcaggacaaatcaa

SEQ ID NO: 124461 - DNA, 20 bp, Artificial Sequence
  MKO10124461_B_Ubr7
  gRNA
gattctcttacctcatcttc

SEQ ID NO: 124462 - DNA, 20 bp, Artificial Sequence
  MKO10124462_B_Ubtd1
  gRNA
ttgagttgccccaccgtgtc

SEQ ID NO: 124463 - DNA, 20 bp, Artificial Sequence
  MKO10124463_B_Ubtd1
  gRNA
tcgcaatgagcccttgaaga

SEQ ID NO: 124464 - DNA, 20 bp, Artificial Sequence
  MKO10124464_B_Ubtd1
  gRNA
ggagcaaacgagatgagttc

SEQ ID NO: 124465 - DNA, 20 bp, Artificial Sequence
  MKO10124465_B_Ubtd2
  gRNA
gcgcagttgtccatctgtca

SEQ ID NO: 124466 - DNA, 20 bp, Artificial Sequence
  MKO10124466_B_Ubtd2
  gRNA
cggccccatgggcgggtgcg

SEQ ID NO: 124467 - DNA, 20 bp, Artificial Sequence
  MKO10124467_B_Ubtd2
  gRNA
aggcatcccagatctctttc

SEQ ID NO: 124468 - DNA, 20 bp, Artificial Sequence
  MKO10124468_B_Ubtfl1
  gRNA
gctgacggtatttctcagcc

SEQ ID NO: 124469 - DNA, 20 bp, Artificial Sequence
  MKO10124469_B_Ubtfl1
  gRNA
ctgctctgttcgtccaaact

SEQ ID NO: 124470 - DNA, 20 bp, Artificial Sequence
  MKO10124470_B_Ubtfl1
  gRNA
agattcctcagggactattc

SEQ ID NO: 124471 - DNA, 20 bp, Artificial Sequence
  MKO10124471_B_Ubtf
  gRNA
gggacccataccttggcctt

SEQ ID NO: 124472 - DNA, 20 bp, Artificial Sequence
  MKO10124472_B_Ubtf
  gRNA
aggtccaggttgctcatctc

SEQ ID NO: 124473 - DNA, 20 bp, Artificial Sequence
  MKO10124473_B_Ubtf
  gRNA
ctggagaatgaacggagaag

SEQ ID NO: 124474 - DNA, 20 bp, Artificial Sequence
  MKO10124474_B_Ubxn10
  gRNA
cgacctccagaccgtcctcg

SEQ ID NO: 124475 - DNA, 20 bp, Artificial Sequence
  MKO10124475_B_Ubxn10
  gRNA
tgaaatagcgcacgaacctt

SEQ ID NO: 124476 - DNA, 20 bp, Artificial Sequence
  MKO10124476_B_Ubxn10
  gRNA
gtccgacggctcctcgatgt

SEQ ID NO: 124477 - DNA, 20 bp, Artificial Sequence
  MKO10124477_B_Ubxn11
  gRNA
gaacgacgagatgctgtcca

SEQ ID NO: 124478 - DNA, 20 bp, Artificial Sequence
  MKO10124478_B_Ubxn11
  gRNA
agacgagggataagagtcta

SEQ ID NO: 124479 - DNA, 20 bp, Artificial Sequence
  MKO10124479_B_Ubxn11
  gRNA
gcatcggtgcccctgtgagt

SEQ ID NO: 124480 - DNA, 20 bp, Artificial Sequence
  MKO10124480_B_Ubxn1
  gRNA
cccacgccctcagagcaagt

SEQ ID NO: 124481 - DNA, 20 bp, Artificial Sequence
  MKO10124481_B_Ubxn1
  gRNA
cacagggaaccagggcatcg

SEQ ID NO: 124482 - DNA, 20 bp, Artificial Sequence
  MKO10124482_B_Ubxn1
  gRNA
ccatcgcagcctcgatgccc

SEQ ID NO: 124483 - DNA, 20 bp, Artificial Sequence
  MKO10124483_B_Ubxn2a
  gRNA
gtttctgaactccatcaaaa

SEQ ID NO: 124484 - DNA, 20 bp, Artificial Sequence
  MKO10124484_B_Ubxn2a
  gRNA
tacctgtttcttctgttcag

SEQ ID NO: 124485 - DNA, 20 bp, Artificial Sequence
  MKO10124485_B_Ubxn2a
  gRNA
cctcaatgataatcaacaaa

SEQ ID NO: 124486 - DNA, 20 bp, Artificial Sequence
  MKO10124486_B_Ubxn2b
  gRNA
atactctgatcgcttgtaga

SEQ ID NO: 124487 - DNA, 20 bp, Artificial Sequence
  MKO10124487_B_Ubxn2b
  gRNA
aatggtttcagtttagacga

SEQ ID NO: 124488 - DNA, 20 bp, Artificial Sequence
  MKO10124488_B_Ubxn2b
  gRNA
catatagttcaacctccaac

SEQ ID NO: 124489 - DNA, 20 bp, Artificial Sequence
  MKO10124489_B_Ubxn4
  gRNA
aatttgtgaaaactgcagac

SEQ ID NO: 124490 - DNA, 20 bp, Artificial Sequence
  MKO10124490_B_Ubxn4
  gRNA
acaaagtcagatactgcaac

SEQ ID NO: 124491 - DNA, 20 bp, Artificial Sequence
  MKO10124491_B_Ubxn4
  gRNA
tgatgagcaatctatacaaa

SEQ ID NO: 124492 - DNA, 20 bp, Artificial Sequence
  MKO10124492_B_Ubxn6
  gRNA
ccgtcagggccccactgatg

SEQ ID NO: 124493 - DNA, 20 bp, Artificial Sequence
  MKO10124493_B_Ubxn6
  gRNA
acaggatggcctgcttgatg

SEQ ID NO: 124494 - DNA, 20 bp, Artificial Sequence
  MKO10124494_B_Ubxn6
  gRNA
gccacctccagcaacaatcc

SEQ ID NO: 124495 - DNA, 20 bp, Artificial Sequence
  MKO10124495_B_Ubxn7
  gRNA
ccagcacgttcaatatttga

SEQ ID NO: 124496 - DNA, 20 bp, Artificial Sequence
  MKO10124496_B_Ubxn7
  gRNA
tgaagcttgtaacaacaacc

SEQ ID NO: 124497 - DNA, 20 bp, Artificial Sequence
  MKO10124497_B_Ubxn7
  gRNA
agtagagacgcttgctgaac

SEQ ID NO: 124498 - DNA, 20 bp, Artificial Sequence
  MKO10124498_B_Ubxn8
  gRNA
gttctctaacctctaggagt

SEQ ID NO: 124499 - DNA, 20 bp, Artificial Sequence
  MKO10124499_B_Ubxn8
  gRNA
gagacctggaagctgaccgc

SEQ ID NO: 124500 - DNA, 20 bp, Artificial Sequence
  MKO10124500_B_Ubxn8
  gRNA
tgagccttaccttctcaccc

SEQ ID NO: 124501 - DNA, 20 bp, Artificial Sequence
  MKO10124501_B_Uchl1
  gRNA
ctggccggcgacccccagct

SEQ ID NO: 124502 - DNA, 20 bp, Artificial Sequence
  MKO10124502_B_Uchl1
  gRNA
caagtgtttcgagaagaacg

SEQ ID NO: 124503 - DNA, 20 bp, Artificial Sequence
  MKO10124503_B_Uchl1
  gRNA
ctcgttcttctcgaaacact

SEQ ID NO: 124504 - DNA, 20 bp, Artificial Sequence
  MKO10124504_B_Uchl3
  gRNA
tactgacgtcatagttctcc

SEQ ID NO: 124505 - DNA, 20 bp, Artificial Sequence
  MKO10124505_B_Uchl3
  gRNA
ggtaccatgctaagaagttc

SEQ ID NO: 124506 - DNA, 20 bp, Artificial Sequence
  MKO10124506_B_Uchl3
  gRNA
aacaaagacaagatgcactt

SEQ ID NO: 124507 - DNA, 20 bp, Artificial Sequence
  MKO10124507_B_Uchl4
  gRNA
atctctatgaattagatgga

SEQ ID NO: 124508 - DNA, 20 bp, Artificial Sequence
  MKO10124508_B_Uchl4
  gRNA
tgaagagagagccaaatacc

SEQ ID NO: 124509 - DNA, 20 bp, Artificial Sequence
  MKO10124509_B_Uchl4
  gRNA
aggagtaacactgcgcacac

SEQ ID NO: 124510 - DNA, 20 bp, Artificial Sequence
  MKO10124510_B_Uchl5
  gRNA
agctccatatttcttctact

SEQ ID NO: 124511 - DNA, 20 bp, Artificial Sequence
  MKO10124511_B_Uchl5
  gRNA
agaaaaattaacccatgaac

SEQ ID NO: 124512 - DNA, 20 bp, Artificial Sequence
  MKO10124512_B_Uchl5
  gRNA
agaagaacctgctggctctg

SEQ ID NO: 124513 - DNA, 20 bp, Artificial Sequence
  MKO10124513_B_Uck1
  gRNA
aacagtgtgtgagaagatca

SEQ ID NO: 124514 - DNA, 20 bp, Artificial Sequence
  MKO10124514_B_Uck1
  gRNA
gtactgtcccttcaaagcct

SEQ ID NO: 124515 - DNA, 20 bp, Artificial Sequence
  MKO10124515_B_Uck1
  gRNA
accctgaaaaacattgttga

SEQ ID NO: 124516 - DNA, 20 bp, Artificial Sequence
  MKO10124516_B_Uck2
  gRNA
ggactcggtagaagctatcc

SEQ ID NO: 124517 - DNA, 20 bp, Artificial Sequence
  MKO10124517_B_Uck2
  gRNA
gtgggagacaaagtcgtaca

SEQ ID NO: 124518 - DNA, 20 bp, Artificial Sequence
  MKO10124518_B_Uck2
  gRNA
gaagatgagttcgttgtcaa

SEQ ID NO: 124519 - DNA, 20 bp, Artificial Sequence
  MKO10124519_B_Uckl1
  gRNA
ttgaggcactagatgtgccc

SEQ ID NO: 124520 - DNA, 20 bp, Artificial Sequence
  MKO10124520_B_Uckl1
  gRNA
caccttatagaaggagtcca

SEQ ID NO: 124521 - DNA, 20 bp, Artificial Sequence
  MKO10124521_B_Uckl1
  gRNA
aatgatgagatcgaagtcaa

SEQ ID NO: 124522 - DNA, 20 bp, Artificial Sequence
  MKO10124522_B_Ucma
  gRNA
tttaatgaggtcagatgttt

SEQ ID NO: 124523 - DNA, 20 bp, Artificial Sequence
  MKO10124523_B_Ucma
  gRNA
actcactacacaggagcacc

SEQ ID NO: 124524 - DNA, 20 bp, Artificial Sequence
  MKO10124524_B_Ucma
  gRNA
gccactgctccacagcctcc

SEQ ID NO: 124525 - DNA, 20 bp, Artificial Sequence
  MKO10124525_B_Ucn2
  gRNA
agtctcagcggcggccaaca

SEQ ID NO: 124526 - DNA, 20 bp, Artificial Sequence
  MKO10124526_B_Ucn2
  gRNA
ataggatcctatccaacatc

SEQ ID NO: 124527 - DNA, 20 bp, Artificial Sequence
  MKO10124527_B_Ucn2
  gRNA
catccagggagagtatgaca

SEQ ID NO: 124528 - DNA, 20 bp, Artificial Sequence
  MKO10124528_B_Ucn3
  gRNA
tcccacaagttctacaacac

SEQ ID NO: 124529 - DNA, 20 bp, Artificial Sequence
  MKO10124529_B_Ucn3
  gRNA
gccgcgggtgggaatggagc

SEQ ID NO: 124530 - DNA, 20 bp, Artificial Sequence
  MKO10124530_B_Ucn3
  gRNA
tccagtgttgtagaacttgt

SEQ ID NO: 124531 - DNA, 20 bp, Artificial Sequence
  MKO10124531_B_Ucn
  gRNA
ccgccctgattccgcactcc

SEQ ID NO: 124532 - DNA, 20 bp, Artificial Sequence
  MKO10124532_B_Ucn
  gRNA
agcgctccgctaacagcaag

SEQ ID NO: 124533 - DNA, 20 bp, Artificial Sequence
  MKO10124533_B_Ucn
  gRNA
caggcggcaccatgatacag

SEQ ID NO: 124534 - DNA, 20 bp, Artificial Sequence
  MKO10124534_B_Ucp1
  gRNA
atctcagccggcttaatgac

SEQ ID NO: 124535 - DNA, 20 bp, Artificial Sequence
  MKO10124535_B_Ucp1
  gRNA
tccagtaccattaggtataa

SEQ ID NO: 124536 - DNA, 20 bp, Artificial Sequence
  MKO10124536_B_Ucp1
  gRNA
gttcattgggcagcctacag

SEQ ID NO: 124537 - DNA, 20 bp, Artificial Sequence
  MKO10124537_B_Ucp2
  gRNA
gggaccccgcgccttctaca

SEQ ID NO: 124538 - DNA, 20 bp, Artificial Sequence
  MKO10124538_B_Ucp2
  gRNA
catcgcctcccctgttgatg

SEQ ID NO: 124539 - DNA, 20 bp, Artificial Sequence
  MKO10124539_B_Ucp2
  gRNA
ctctcgtgcaatggtcttgt

SEQ ID NO: 124540 - DNA, 20 bp, Artificial Sequence
  MKO10124540_B_Ucp3
  gRNA
ctttaccacatccaccgggg

SEQ ID NO: 124541 - DNA, 20 bp, Artificial Sequence
  MKO10124541_B_Ucp3
  gRNA
gccagcgaccagtccgctgt

SEQ ID NO: 124542 - DNA, 20 bp, Artificial Sequence
  MKO10124542_B_Ucp3
  gRNA
cctctgtgcgcaccatagtc

SEQ ID NO: 124543 - DNA, 20 bp, Artificial Sequence
  MKO10124543_B_Uevld
  gRNA
tacttaccctgatacatcac

SEQ ID NO: 124544 - DNA, 20 bp, Artificial Sequence
  MKO10124544_B_Uevld
  gRNA
acttgccctatctccaaaac

SEQ ID NO: 124545 - DNA, 20 bp, Artificial Sequence
  MKO10124545_B_Uevld
  gRNA
cagcccaaatctgccatcgt

SEQ ID NO: 124546 - DNA, 20 bp, Artificial Sequence
  MKO10124546_B_Ufc1
  gRNA
gcaggtggtttggaaaatgc

SEQ ID NO: 124547 - DNA, 20 bp, Artificial Sequence
  MKO10124547_B_Ufc1
  gRNA
gttccgactggagtccaaca

SEQ ID NO: 124548 - DNA, 20 bp, Artificial Sequence
  MKO10124548_B_Ufc1
  gRNA
gccaggaatgtgcctaagtt

SEQ ID NO: 124549 - DNA, 20 bp, Artificial Sequence
  MKO10124549_B_Ufd1l
  gRNA
agtacttactgagttgatcg

SEQ ID NO: 124550 - DNA, 20 bp, Artificial Sequence
  MKO10124550_B_Ufd1l
  gRNA
ttggtaatatccaggaagtc

SEQ ID NO: 124551 - DNA, 20 bp, Artificial Sequence
  MKO10124551_B_Ufd1l
  gRNA
catccgatctgaattcttat

SEQ ID NO: 124552 - DNA, 20 bp, Artificial Sequence
  MKO10124552_B_Ufl1
  gRNA
tctggatcagttatcagaag

SEQ ID NO: 124553 - DNA, 20 bp, Artificial Sequence
  MKO10124553_B_Ufl1
  gRNA
aaacattgttgacttacaac

SEQ ID NO: 124554 - DNA, 20 bp, Artificial Sequence
  MKO10124554_B_Ufl1
  gRNA
acctgtgtcagaaaatcccc

SEQ ID NO: 124555 - DNA, 20 bp, Artificial Sequence
  MKO10124555_B_Ufm1
  gRNA
acaagtgcgattattactaa

SEQ ID NO: 124556 - DNA, 20 bp, Artificial Sequence
  MKO10124556_B_Ufm1
  gRNA
cactcaccagcagtctgtgc

SEQ ID NO: 124557 - DNA, 20 bp, Artificial Sequence
  MKO10124557_B_Ufm1
  gRNA
aactttagcactgctgtgaa

SEQ ID NO: 124558 - DNA, 20 bp, Artificial Sequence
  MKO10124558_B_Ufsp1
  gRNA
cgttgtgaactacaagctgc

SEQ ID NO: 124559 - DNA, 20 bp, Artificial Sequence
  MKO10124559_B_Ufsp1
  gRNA
ggccagtcctcgggcgtgcc

SEQ ID NO: 124560 - DNA, 20 bp, Artificial Sequence
  MKO10124560_B_Ufsp1
  gRNA
tgcgatggactggatgaccg

SEQ ID NO: 124561 - DNA, 20 bp, Artificial Sequence
  MKO10124561_B_Ufsp2
  gRNA
cagagtgcgcaaacttctag

SEQ ID NO: 124562 - DNA, 20 bp, Artificial Sequence
  MKO10124562_B_Ufsp2
  gRNA
cgtttacctttcgataggct

SEQ ID NO: 124563 - DNA, 20 bp, Artificial Sequence
  MKO10124563_B_Ufsp2
  gRNA
gggagccgtaacccccatcc

SEQ ID NO: 124564 - DNA, 20 bp, Artificial Sequence
  MKO10124564_B_Ugcg
  gRNA
ccttgtctgtcggctacata

SEQ ID NO: 124565 - DNA, 20 bp, Artificial Sequence
  MKO10124565_B_Ugcg
  gRNA
ccggttacacctcaacaaga

SEQ ID NO: 124566 - DNA, 20 bp, Artificial Sequence
  MKO10124566_B_Ugcg
  gRNA
catcatgatcttgtacacaa

SEQ ID NO: 124567 - DNA, 20 bp, Artificial Sequence
  MKO10124567_B_Ugdh
  gRNA
atgctttctgctgcccgcac

SEQ ID NO: 124568 - DNA, 20 bp, Artificial Sequence
  MKO10124568_B_Ugdh
  gRNA
gaccagcttggaaagctccg

SEQ ID NO: 124569 - DNA, 20 bp, Artificial Sequence
  MKO10124569_B_Ugdh
  gRNA
ccaatgcatttcttgcgcag

SEQ ID NO: 124570 - DNA, 20 bp, Artificial Sequence
  MKO10124570_B_Uggt1
  gRNA
gttgacgagcctccaccaga

SEQ ID NO: 124571 - DNA, 20 bp, Artificial Sequence
  MKO10124571_B_Uggt1
  gRNA
acggtaaggccagtgcaatc

SEQ ID NO: 124572 - DNA, 20 bp, Artificial Sequence
  MKO10124572_B_Uggt1
  gRNA
catgagactcctgattgcac

SEQ ID NO: 124573 - DNA, 20 bp, Artificial Sequence
  MKO10124573_B_Uggt2
  gRNA
agagtatgcccttatggaga

SEQ ID NO: 124574 - DNA, 20 bp, Artificial Sequence
  MKO10124574_B_Uggt2
  gRNA
tctgcatagagaacaatcac

SEQ ID NO: 124575 - DNA, 20 bp, Artificial Sequence
  MKO10124575_B_Uggt2
  gRNA
gattaaaaagctgctgaata

SEQ ID NO: 124576 - DNA, 20 bp, Artificial Sequence
  MKO10124576_B_Ugp2
  gRNA
aaaggccctaaaagtctgat

SEQ ID NO: 124577 - DNA, 20 bp, Artificial Sequence
  MKO10124577_B_Ugp2
  gRNA
ccttacctcaaactcatgtg

SEQ ID NO: 124578 - DNA, 20 bp, Artificial Sequence
  MKO10124578_B_Ugp2
  gRNA
tctacaccttcaatcaaagc

SEQ ID NO: 124579 - DNA, 20 bp, Artificial Sequence
  MKO10124579_B_Ugt1a10
  gRNA
tgtccatctgatcgccaaat

SEQ ID NO: 124580 - DNA, 20 bp, Artificial Sequence
  MKO10124580_B_Ugt1a10
  gRNA
gaagcctatgtcaacgcctc

SEQ ID NO: 124581 - DNA, 20 bp, Artificial Sequence
  MKO10124581_B_Ugt1a10
  gRNA
gtgttctttgcaagattcga

SEQ ID NO: 124582 - DNA, 20 bp, Artificial Sequence
  MKO10124582_B_Ugt1a1
  gRNA
tgtccatctgatcgccaaat

SEQ ID NO: 124583 - DNA, 20 bp, Artificial Sequence
  MKO10124583_B_Ugt1a1
  gRNA
gaagcctatgtcaacgcctc

SEQ ID NO: 124584 - DNA, 20 bp, Artificial Sequence
  MKO10124584_B_Ugt1a1
  gRNA
gtgttctttgcaagattcga

SEQ ID NO: 124585 - DNA, 20 bp, Artificial Sequence
  MKO10124585_B_Ugt1a2
  gRNA
tgtccatctgatcgccaaat

SEQ ID NO: 124586 - DNA, 20 bp, Artificial Sequence
  MKO10124586_B_Ugt1a2
  gRNA
gaagcctatgtcaacgcctc

SEQ ID NO: 124587 - DNA, 20 bp, Artificial Sequence
  MKO10124587_B_Ugt1a2
  gRNA
gtgttctttgcaagattcga

SEQ ID NO: 124588 - DNA, 20 bp, Artificial Sequence
  MKO10124588_B_Ugt1a5
  gRNA
tgtccatctgatcgccaaat

SEQ ID NO: 124589 - DNA, 20 bp, Artificial Sequence
  MKO10124589_B_Ugt1a5
  gRNA
gaagcctatgtcaacgcctc

SEQ ID NO: 124590 - DNA, 20 bp, Artificial Sequence
  MKO10124590_B_Ugt1a5
  gRNA
gtgttctttgcaagattcga

SEQ ID NO: 124591 - DNA, 20 bp, Artificial Sequence
  MKO10124591_B_Ugt1a6a
  gRNA
tgtccatctgatcgccaaat

SEQ ID NO: 124592 - DNA, 20 bp, Artificial Sequence
  MKO10124592_B_Ugt1a6a
  gRNA
gaagcctatgtcaacgcctc

SEQ ID NO: 124593 - DNA, 20 bp, Artificial Sequence
  MKO10124593_B_Ugt1a6a
  gRNA
gtgttctttgcaagattcga

SEQ ID NO: 124594 - DNA, 20 bp, Artificial Sequence
  MKO10124594_B_Ugt1a6b
  gRNA
tgtccatctgatcgccaaat

SEQ ID NO: 124595 - DNA, 20 bp, Artificial Sequence
  MKO10124595_B_Ugt1a6b
  gRNA
gaagcctatgtcaacgcctc

SEQ ID NO: 124596 - DNA, 20 bp, Artificial Sequence
  MKO10124596_B_Ugt1a6b
  gRNA
gtgttctttgcaagattcga

SEQ ID NO: 124597 - DNA, 20 bp, Artificial Sequence
  MKO10124597_B_Ugt1a7c
  gRNA
tgtccatctgatcgccaaat

SEQ ID NO: 124598 - DNA, 20 bp, Artificial Sequence
  MKO10124598_B_Ugt1a7c
  gRNA
gaagcctatgtcaacgcctc

SEQ ID NO: 124599 - DNA, 20 bp, Artificial Sequence
  MKO10124599_B_Ugt1a7c
  gRNA
gtgttctttgcaagattcga

SEQ ID NO: 124600 - DNA, 20 bp, Artificial Sequence
  MKO10124600_B_Ugt1a9
  gRNA
tgtccatctgatcgccaaat

SEQ ID NO: 124601 - DNA, 20 bp, Artificial Sequence
  MKO10124601_B_Ugt1a9
  gRNA
gaagcctatgtcaacgcctc

SEQ ID NO: 124602 - DNA, 20 bp, Artificial Sequence
  MKO10124602_B_Ugt1a9
  gRNA
gtgttctttgcaagattcga

SEQ ID NO: 124603 - DNA, 20 bp, Artificial Sequence
  MKO10124603_B_Ugt2a1
  gRNA
tttggctaatgcgaacctat

SEQ ID NO: 124604 - DNA, 20 bp, Artificial Sequence
  MKO10124604_B_Ugt2a1
  gRNA
ccccatagtctcacacagtg

SEQ ID NO: 124605 - DNA, 20 bp, Artificial Sequence
  MKO10124605_B_Ugt2a1
  gRNA
tggaacaaatggaatctatg

SEQ ID NO: 124606 - DNA, 20 bp, Artificial Sequence
  MKO10124606_B_Ugt2a2
  gRNA
tttggctaatgcgaacctat

SEQ ID NO: 124607 - DNA, 20 bp, Artificial Sequence
  MKO10124607_B_Ugt2a2
  gRNA
ccccatagtctcacacagtg

SEQ ID NO: 124608 - DNA, 20 bp, Artificial Sequence
  MKO10124608_B_Ugt2a2
  gRNA
tggaacaaatggaatctatg

SEQ ID NO: 124609 - DNA, 20 bp, Artificial Sequence
  MKO10124609_B_Ugt2a3
  gRNA
taccaaccttctggggaatc

SEQ ID NO: 124610 - DNA, 20 bp, Artificial Sequence
  MKO10124610_B_Ugt2a3
  gRNA
ccacattaggatccaatact

SEQ ID NO: 124611 - DNA, 20 bp, Artificial Sequence
  MKO10124611_B_Ugt2a3
  gRNA
cacaacgttctgtaagactg

SEQ ID NO: 124612 - DNA, 20 bp, Artificial Sequence
  MKO10124612_B_Ugt2b1
  gRNA
tgtagagttaccttaggcag

SEQ ID NO: 124613 - DNA, 20 bp, Artificial Sequence
  MKO10124613_B_Ugt2b1
  gRNA
gtcattaatgacagtcttca

SEQ ID NO: 124614 - DNA, 20 bp, Artificial Sequence
  MKO10124614_B_Ugt2b1
  gRNA
atgttaccttctgtggaatc

SEQ ID NO: 124615 - DNA, 20 bp, Artificial Sequence
  MKO10124615_B_Ugt2b34
  gRNA
ccaacactcgtctgtacaaa

SEQ ID NO: 124616 - DNA, 20 bp, Artificial Sequence
  MKO10124616_B_Ugt2b34
  gRNA
gatctaccatgggattccag

SEQ ID NO: 124617 - DNA, 20 bp, Artificial Sequence
  MKO10124617_B_Ugt2b34
  gRNA
agagccaatgtgattgcagc

SEQ ID NO: 124618 - DNA, 20 bp, Artificial Sequence
  MKO10124618_B_Ugt2b35
  gRNA
taggttctttggcgatttga

SEQ ID NO: 124619 - DNA, 20 bp, Artificial Sequence
  MKO10124619_B_Ugt2b35
  gRNA
cgcgccaccatgagttacaa

SEQ ID NO: 124620 - DNA, 20 bp, Artificial Sequence
  MKO10124620_B_Ugt2b35
  gRNA
tcttaccgagaaggtcattc

SEQ ID NO: 124621 - DNA, 20 bp, Artificial Sequence
  MKO10124621_B_Ugt2b36
  gRNA
cttccccaaaatgatcttct

SEQ ID NO: 124622 - DNA, 20 bp, Artificial Sequence
  MKO10124622_B_Ugt2b36
  gRNA
tcttaccaagaagatcattt

SEQ ID NO: 124623 - DNA, 20 bp, Artificial Sequence
  MKO10124623_B_Ugt2b36
  gRNA
aagagcccatgcaattgcat

SEQ ID NO: 124624 - DNA, 20 bp, Artificial Sequence
  MKO10124624_B_Ugt2b37
  gRNA
aaaaagtcaacgcaattgca

SEQ ID NO: 124625 - DNA, 20 bp, Artificial Sequence
  MKO10124625_B_Ugt2b37
  gRNA
acaatacaagagtgtacaag

SEQ ID NO: 124626 - DNA, 20 bp, Artificial Sequence
  MKO10124626_B_Ugt2b37
  gRNA
caccaccttagctgagacaa

SEQ ID NO: 124627 - DNA, 20 bp, Artificial Sequence
  MKO10124627_B_Ugt2b38
  gRNA
aaaaagccaacacaattgca

SEQ ID NO: 124628 - DNA, 20 bp, Artificial Sequence
  MKO10124628_B_Ugt2b38
  gRNA
acaatacgagagtgtacaag

SEQ ID NO: 124629 - DNA, 20 bp, Artificial Sequence
  MKO10124629_B_Ugt2b38
  gRNA
agtatatttaccttaggcaa

SEQ ID NO: 124630 - DNA, 20 bp, Artificial Sequence
  MKO10124630_B_Ugt2b5
  gRNA
aaaaagccaacgcaattgca

SEQ ID NO: 124631 - DNA, 20 bp, Artificial Sequence
  MKO10124631_B_Ugt2b5
  gRNA
aaccaccttagttgagacaa

SEQ ID NO: 124632 - DNA, 20 bp, Artificial Sequence
  MKO10124632_B_Ugt2b5
  gRNA
acaataccagagtgtacaag

SEQ ID NO: 124633 - DNA, 20 bp, Artificial Sequence
  MKO10124633_B_Ugt3a1
  gRNA
ttcatttcaccaagaagcga

SEQ ID NO: 124634 - DNA, 20 bp, Artificial Sequence
  MKO10124634_B_Ugt3a1
  gRNA
cttgcagaatttgcgacaca

SEQ ID NO: 124635 - DNA, 20 bp, Artificial Sequence
  MKO10124635_B_Ugt3a1
  gRNA
catcataccaggttattaat

SEQ ID NO: 124636 - DNA, 20 bp, Artificial Sequence
  MKO10124636_B_Ugt3a2
  gRNA
gtgtcgcaagttcttcatga

SEQ ID NO: 124637 - DNA, 20 bp, Artificial Sequence
  MKO10124637_B_Ugt3a2
  gRNA
ttacctagaaggtcagtctg

SEQ ID NO: 124638 - DNA, 20 bp, Artificial Sequence
  MKO10124638_B_Ugt3a2
  gRNA
catcatatcaagttattaat

SEQ ID NO: 124639 - DNA, 20 bp, Artificial Sequence
  MKO10124639_B_Ugt8a
  gRNA
tgatactatgactagagtac

SEQ ID NO: 124640 - DNA, 20 bp, Artificial Sequence
  MKO10124640_B_Ugt8a
  gRNA
acaacactaagctcatagaa

SEQ ID NO: 124641 - DNA, 20 bp, Artificial Sequence
  MKO10124641_B_Ugt8a
  gRNA
gattgcctcaaaaagtgatt

SEQ ID NO: 124642 - DNA, 20 bp, Artificial Sequence
  MKO10124642_B_Uhmk1
  gRNA
gtacctcagctgttgatctg

SEQ ID NO: 124643 - DNA, 20 bp, Artificial Sequence
  MKO10124643_B_Uhmk1
  gRNA
tagcatgcttcatgatgacc

SEQ ID NO: 124644 - DNA, 20 bp, Artificial Sequence
  MKO10124644_B_Uhmk1
  gRNA
tatatttgccagtaaagcag

SEQ ID NO: 124645 - DNA, 20 bp, Artificial Sequence
  MKO10124645_B_Uhrf1bp1l
  gRNA
acggagacctgagatttact

SEQ ID NO: 124646 - DNA, 20 bp, Artificial Sequence
  MKO10124646_B_Uhrf1bp1l
  gRNA
ataaacctcagcacccttaa

SEQ ID NO: 124647 - DNA, 20 bp, Artificial Sequence
  MKO10124647_B_Uhrf1bp1l
  gRNA
tctgcaataaagcctccatc

SEQ ID NO: 124648 - DNA, 20 bp, Artificial Sequence
  MKO10124648_B_Uhrf1bp1
  gRNA
attgcagtagaccctagtga

SEQ ID NO: 124649 - DNA, 20 bp, Artificial Sequence
  MKO10124649_B_Uhrf1bp1
  gRNA
ctgcaatcgggcctccatcc

SEQ ID NO: 124650 - DNA, 20 bp, Artificial Sequence
  MKO10124650_B_Uhrf1bp1
  gRNA
gtctcctatcgcccttgcct

SEQ ID NO: 124651 - DNA, 20 bp, Artificial Sequence
  MKO10124651_B_Uhrf1
  gRNA
gtgctcgcactgtgatacca

SEQ ID NO: 124652 - DNA, 20 bp, Artificial Sequence
  MKO10124652_B_Uhrf1
  gRNA
ctccagtgccgttaagacct

SEQ ID NO: 124653 - DNA, 20 bp, Artificial Sequence
  MKO10124653_B_Uhrf1
  gRNA
catcataatcgaagagtgtg

SEQ ID NO: 124654 - DNA, 20 bp, Artificial Sequence
  MKO10124654_B_Uhrf2
  gRNA
accttatatagtccaaagcc

SEQ ID NO: 124655 - DNA, 20 bp, Artificial Sequence
  MKO10124655_B_Uhrf2
  gRNA
atctctagtataccactttc

SEQ ID NO: 124656 - DNA, 20 bp, Artificial Sequence
  MKO10124656_B_Uhrf2
  gRNA
atcttcaagattgagaagcc

SEQ ID NO: 124657 - DNA, 20 bp, Artificial Sequence
  MKO10124657_B_Uimc1
  gRNA
gtcgaacagatcaaagtgtt

SEQ ID NO: 124658 - DNA, 20 bp, Artificial Sequence
  MKO10124658_B_Uimc1
  gRNA
gaagatagttcagcagccag

SEQ ID NO: 124659 - DNA, 20 bp, Artificial Sequence
  MKO10124659_B_Uimc1
  gRNA
tacattcaggctttcagcaa

SEQ ID NO: 124660 - DNA, 20 bp, Artificial Sequence
  MKO10124660_B_Ulbp1
  gRNA
tacgccattgttagcctcaa

SEQ ID NO: 124661 - DNA, 20 bp, Artificial Sequence
  MKO10124661_B_Ulbp1
  gRNA
gtcctcaccaccacctctct

SEQ ID NO: 124662 - DNA, 20 bp, Artificial Sequence
  MKO10124662_B_Ulbp1
  gRNA
gtcaaagagtcatccaagag

SEQ ID NO: 124663 - DNA, 20 bp, Artificial Sequence
  MKO10124663_B_Ulk1
  gRNA
gggaactcacctccatgacc

SEQ ID NO: 124664 - DNA, 20 bp, Artificial Sequence
  MKO10124664_B_Ulk1
  gRNA
cttcttgttaatgcatttga

SEQ ID NO: 124665 - DNA, 20 bp, Artificial Sequence
  MKO10124665_B_Ulk1
  gRNA
tgccaagtcccaaacactgc

SEQ ID NO: 124666 - DNA, 20 bp, Artificial Sequence
  MKO10124666_B_Ulk2
  gRNA
attgcccaactctgtctttc

SEQ ID NO: 124667 - DNA, 20 bp, Artificial Sequence
  MKO10124667_B_Ulk2
  gRNA
tcaaaatcacaaattctgct

SEQ ID NO: 124668 - DNA, 20 bp, Artificial Sequence
  MKO10124668_B_Ulk2
  gRNA
catcaccagaaagacagagt

SEQ ID NO: 124669 - DNA, 20 bp, Artificial Sequence
  MKO10124669_B_Ulk3
  gRNA
agtggtagccataaaatgcg

SEQ ID NO: 124670 - DNA, 20 bp, Artificial Sequence
  MKO10124670_B_Ulk3
  gRNA
ctcgcttcattcatacccgc

SEQ ID NO: 124671 - DNA, 20 bp, Artificial Sequence
  MKO10124671_B_Ulk3
  gRNA
gagtctcaacaaggcgtcag

SEQ ID NO: 124672 - DNA, 20 bp, Artificial Sequence
  MKO10124672_B_Ulk4
  gRNA
acgagaccagcaatcatctc

SEQ ID NO: 124673 - DNA, 20 bp, Artificial Sequence
  MKO10124673_B_Ulk4
  gRNA
caccaaccagagatgattgc

SEQ ID NO: 124674 - DNA, 20 bp, Artificial Sequence
  MKO10124674_B_Ulk4
  gRNA
gtagacagcccaaagaccag

SEQ ID NO: 124675 - DNA, 20 bp, Artificial Sequence
  MKO10124675_B_Umodl1
  gRNA
cacgcgcctgctctactctt

SEQ ID NO: 124676 - DNA, 20 bp, Artificial Sequence
  MKO10124676_B_Umodl1
  gRNA
cttcgaggacctgcagcgag

SEQ ID NO: 124677 - DNA, 20 bp, Artificial Sequence
  MKO10124677_B_Umodl1
  gRNA
actcagggacatccatcgct

SEQ ID NO: 124678 - DNA, 20 bp, Artificial Sequence
  MKO10124678_B_Umod
  gRNA
gaatgatgatcgcatttgcc

SEQ ID NO: 124679 - DNA, 20 bp, Artificial Sequence
  MKO10124679_B_Umod
  gRNA
ttcttcgcaagtcccctcca

SEQ ID NO: 124680 - DNA, 20 bp, Artificial Sequence
  MKO10124680_B_Umod
  gRNA
actccagcctgtactccaat

SEQ ID NO: 124681 - DNA, 20 bp, Artificial Sequence
  MKO10124681_B_Umps
  gRNA
gagcagataactgtcgccag

SEQ ID NO: 124682 - DNA, 20 bp, Artificial Sequence
  MKO10124682_B_Umps
  gRNA
tccttatacagcgttaccac

SEQ ID NO: 124683 - DNA, 20 bp, Artificial Sequence
  MKO10124683_B_Umps
  gRNA
agctcatttctgcaatgagc

SEQ ID NO: 124684 - DNA, 20 bp, Artificial Sequence
  MKO10124684_B_Unc119b
  gRNA
ccgcttcaagattcgagatc

SEQ ID NO: 124685 - DNA, 20 bp, Artificial Sequence
  MKO10124685_B_Unc119b
  gRNA
attgccaagccgtgcatctc

SEQ ID NO: 124686 - DNA, 20 bp, Artificial Sequence
  MKO10124686_B_Unc119b
  gRNA
tgaactgatatcgaacgaaa

SEQ ID NO: 124687 - DNA, 20 bp, Artificial Sequence
  MKO10124687_B_Unc119
  gRNA
tctacaagattgacttcgtc

SEQ ID NO: 124688 - DNA, 20 bp, Artificial Sequence
  MKO10124688_B_Unc119
  gRNA
atcccactcacccgaaacag

SEQ ID NO: 124689 - DNA, 20 bp, Artificial Sequence
  MKO10124689_B_Unc119
  gRNA
agtagtgcctctcgatcatg

SEQ ID NO: 124690 - DNA, 20 bp, Artificial Sequence
  MKO10124690_B_Unc13a
  gRNA
cgctcatttcgagctgccgt

SEQ ID NO: 124691 - DNA, 20 bp, Artificial Sequence
  MKO10124691_B_Unc13a
  gRNA
acacagtgagatcaaccgcc

SEQ ID NO: 124692 - DNA, 20 bp, Artificial Sequence
  MKO10124692_B_Unc13a
  gRNA
tgtcactcacctcattggac

SEQ ID NO: 124693 - DNA, 20 bp, Artificial Sequence
  MKO10124693_B_Unc13b
  gRNA
agcacaactgtagcagttcg

SEQ ID NO: 124694 - DNA, 20 bp, Artificial Sequence
  MKO10124694_B_Unc13b
  gRNA
atgtcgctgctctgtgtgcg

SEQ ID NO: 124695 - DNA, 20 bp, Artificial Sequence
  MKO10124695_B_Unc13b
  gRNA
cagacttacctggtgaaccc

SEQ ID NO: 124696 - DNA, 20 bp, Artificial Sequence
  MKO10124696_B_Unc13c
  gRNA
ctcaccacatcccgcacaat

SEQ ID NO: 124697 - DNA, 20 bp, Artificial Sequence
  MKO10124697_B_Unc13c
  gRNA
tcttccagatagcagctcta

SEQ ID NO: 124698 - DNA, 20 bp, Artificial Sequence
  MKO10124698_B_Unc13c
  gRNA
ttcaaggctcgaatagtaag

SEQ ID NO: 124699 - DNA, 20 bp, Artificial Sequence
  MKO10124699_B_Unc13d
  gRNA
tgacgcgccgcagcatctgc

SEQ ID NO: 124700 - DNA, 20 bp, Artificial Sequence
  MKO10124700_B_Unc13d
  gRNA
gtcccaccatttctccccag

SEQ ID NO: 124701 - DNA, 20 bp, Artificial Sequence
  MKO10124701_B_Unc13d
  gRNA
gaaacaggccaagggtattc

SEQ ID NO: 124702 - DNA, 20 bp, Artificial Sequence
  MKO10124702_B_Unc45a
  gRNA
gaacattgggggccagattc

SEQ ID NO: 124703 - DNA, 20 bp, Artificial Sequence
  MKO10124703_B_Unc45a
  gRNA
ttacagcaaagcagaatcag

SEQ ID NO: 124704 - DNA, 20 bp, Artificial Sequence
  MKO10124704_B_Unc45a
  gRNA
acagatgtttcagatactgt

SEQ ID NO: 124705 - DNA, 20 bp, Artificial Sequence
  MKO10124705_B_Unc45b
  gRNA
tgtgcagcgctgtgctaccc

SEQ ID NO: 124706 - DNA, 20 bp, Artificial Sequence
  MKO10124706_B_Unc45b
  gRNA
tgccaacaacctcattgtcc

SEQ ID NO: 124707 - DNA, 20 bp, Artificial Sequence
  MKO10124707_B_Unc45b
  gRNA
tctcagcacccgcttcttca

SEQ ID NO: 124708 - DNA, 20 bp, Artificial Sequence
  MKO10124708_B_Unc50
  gRNA
cagcacaaagccgaatccta

SEQ ID NO: 124709 - DNA, 20 bp, Artificial Sequence
  MKO10124709_B_Unc50
  gRNA
ggcgttcagatgcacatcaa

SEQ ID NO: 124710 - DNA, 20 bp, Artificial Sequence
  MKO10124710_B_Unc50
  gRNA
ttctgatctcaacgttaatg

SEQ ID NO: 124711 - DNA, 20 bp, Artificial Sequence
  MKO10124711_B_Unc5a
  gRNA
ttgacaatgtacacgtcctc

SEQ ID NO: 124712 - DNA, 20 bp, Artificial Sequence
  MKO10124712_B_Unc5a
  gRNA
gttcaatgacgtgatcgacc

SEQ ID NO: 124713 - DNA, 20 bp, Artificial Sequence
  MKO10124713_B_Unc5a
  gRNA
gctgccttgatacgttgatc

SEQ ID NO: 124714 - DNA, 20 bp, Artificial Sequence
  MKO10124714_B_Unc5b
  gRNA
tcttcgggctcgaggactac

SEQ ID NO: 124715 - DNA, 20 bp, Artificial Sequence
  MKO10124715_B_Unc5b
  gRNA
tttacgatgtaggcgtcctg

SEQ ID NO: 124716 - DNA, 20 bp, Artificial Sequence
  MKO10124716_B_Unc5b
  gRNA
atgatccaagggtacctcct

SEQ ID NO: 124717 - DNA, 20 bp, Artificial Sequence
  MKO10124717_B_Unc5cl
  gRNA
cgagcactcttcattcccat

SEQ ID NO: 124718 - DNA, 20 bp, Artificial Sequence
  MKO10124718_B_Unc5cl
  gRNA
ccctccaggtgctgtgaccg

SEQ ID NO: 124719 - DNA, 20 bp, Artificial Sequence
  MKO10124719_B_Unc5cl
  gRNA
ctccacaggttgggagaatg

SEQ ID NO: 124720 - DNA, 20 bp, Artificial Sequence
  MKO10124720_B_Unc5c
  gRNA
cattgagatttcacgccagc

SEQ ID NO: 124721 - DNA, 20 bp, Artificial Sequence
  MKO10124721_B_Unc5c
  gRNA
acagccactgtcatcgtgta

SEQ ID NO: 124722 - DNA, 20 bp, Artificial Sequence
  MKO10124722_B_Unc5c
  gRNA
cactggcaccagtaatcttc

SEQ ID NO: 124723 - DNA, 20 bp, Artificial Sequence
  MKO10124723_B_Unc5d
  gRNA
ggtggctccacgctacacac

SEQ ID NO: 124724 - DNA, 20 bp, Artificial Sequence
  MKO10124724_B_Unc5d
  gRNA
cctcctcttggccacgatgt

SEQ ID NO: 124725 - DNA, 20 bp, Artificial Sequence
  MKO10124725_B_Unc5d
  gRNA
accagtagtcctctggccca

SEQ ID NO: 124726 - DNA, 20 bp, Artificial Sequence
  MKO10124726_B_Unc79
  gRNA
tagcgttgagatcatcgtgt

SEQ ID NO: 124727 - DNA, 20 bp, Artificial Sequence
  MKO10124727_B_Unc79
  gRNA
tatgatattcctgcaagtac

SEQ ID NO: 124728 - DNA, 20 bp, Artificial Sequence
  MKO10124728_B_Unc79
  gRNA
tggaacttacatatagccat

SEQ ID NO: 124729 - DNA, 20 bp, Artificial Sequence
  MKO10124729_B_Unc80
  gRNA
ctgccatataaccaacccac

SEQ ID NO: 124730 - DNA, 20 bp, Artificial Sequence
  MKO10124730_B_Unc80
  gRNA
gcaatatgaagcctcttgtg

SEQ ID NO: 124731 - DNA, 20 bp, Artificial Sequence
  MKO10124731_B_Unc80
  gRNA
ttccaccaacactcgttcaa

SEQ ID NO: 124732 - DNA, 20 bp, Artificial Sequence
  MKO10124732_B_Unc93a
  gRNA
aggggctgtaccagttggca

SEQ ID NO: 124733 - DNA, 20 bp, Artificial Sequence
  MKO10124733_B_Unc93a
  gRNA
gatccctacctccatcttgc

SEQ ID NO: 124734 - DNA, 20 bp, Artificial Sequence
  MKO10124734_B_Unc93a
  gRNA
catcttgccgaacaccagtg

SEQ ID NO: 124735 - DNA, 20 bp, Artificial Sequence
  MKO10124735_B_Unc93b1
  gRNA
agcatcttgctatcgatgtc

SEQ ID NO: 124736 - DNA, 20 bp, Artificial Sequence
  MKO10124736_B_Unc93b1
  gRNA
ccggggccgcgggtcctcaa

SEQ ID NO: 124737 - DNA, 20 bp, Artificial Sequence
  MKO10124737_B_Unc93b1
  gRNA
cctggtgatatagttgccca

SEQ ID NO: 124738 - DNA, 20 bp, Artificial Sequence
  MKO10124738_B_Uncx
  gRNA
gggccaggcgacgtttcgag

SEQ ID NO: 124739 - DNA, 20 bp, Artificial Sequence
  MKO10124739_B_Uncx
  gRNA
ttcgggaccttccccggacc

SEQ ID NO: 124740 - DNA, 20 bp, Artificial Sequence
  MKO10124740_B_Uncx
  gRNA
cgtgtttatgcgcgaggcgc

SEQ ID NO: 124741 - DNA, 20 bp, Artificial Sequence
  MKO10124741_B_Ung
  gRNA
ccacaaggtctatccgcccc

SEQ ID NO: 124742 - DNA, 20 bp, Artificial Sequence
  MKO10124742_B_Ung
  gRNA
catctcggatgtcgcacatc

SEQ ID NO: 124743 - DNA, 20 bp, Artificial Sequence
  MKO10124743_B_Ung
  gRNA
gagctgtctacagacatcga

SEQ ID NO: 124744 - DNA, 20 bp, Artificial Sequence
  MKO10124744_B_Unkl
  gRNA
agtccaagcgcagcttgctc

SEQ ID NO: 124745 - DNA, 20 bp, Artificial Sequence
  MKO10124745_B_Unkl
  gRNA
agataaagacttagaagaac

SEQ ID NO: 124746 - DNA, 20 bp, Artificial Sequence
  MKO10124746_B_Unkl
  gRNA
ccattgcctgatcttcctct

SEQ ID NO: 124747 - DNA, 20 bp, Artificial Sequence
  MKO10124747_B_Unk
  gRNA
gcctacctgatgtcgtaaac

SEQ ID NO: 124748 - DNA, 20 bp, Artificial Sequence
  MKO10124748_B_Unk
  gRNA
gacgccggtccttgctgttg

SEQ ID NO: 124749 - DNA, 20 bp, Artificial Sequence
  MKO10124749_B_Unk
  gRNA
gtccccggaagcacaaatac

SEQ ID NO: 124750 - DNA, 20 bp, Artificial Sequence
  MKO10124750_B_Uox
  gRNA
atacccctctgagcttcgcc

SEQ ID NO: 124751 - DNA, 20 bp, Artificial Sequence
  MKO10124751_B_Uox
  gRNA
ccactcaagtgtactgcaag

SEQ ID NO: 124752 - DNA, 20 bp, Artificial Sequence
  MKO10124752_B_Uox
  gRNA
tcacagaagtgcgttcccgt

SEQ ID NO: 124753 - DNA, 20 bp, Artificial Sequence
  MKO10124753_B_Upb1
  gRNA
agaatttgctgagtcggccg

SEQ ID NO: 124754 - DNA, 20 bp, Artificial Sequence
  MKO10124754_B_Upb1
  gRNA
tctctatcacgctccaagat

SEQ ID NO: 124755 - DNA, 20 bp, Artificial Sequence
  MKO10124755_B_Upb1
  gRNA
gctgaggtggccgcaatgtg

SEQ ID NO: 124756 - DNA, 20 bp, Artificial Sequence
  MKO10124756_B_Upf1
  gRNA
gctagctgagctgaacttcg

SEQ ID NO: 124757 - DNA, 20 bp, Artificial Sequence
  MKO10124757_B_Upf1
  gRNA
ctgccgcaacgtcttcctgc

SEQ ID NO: 124758 - DNA, 20 bp, Artificial Sequence
  MKO10124758_B_Upf1
  gRNA
aggaccggtgctttctgtca

SEQ ID NO: 124759 - DNA, 20 bp, Artificial Sequence
  MKO10124759_B_Upf2
  gRNA
attagtttctgtcgccattg

SEQ ID NO: 124760 - DNA, 20 bp, Artificial Sequence
  MKO10124760_B_Upf2
  gRNA
atatttacacccggcaaacc

SEQ ID NO: 124761 - DNA, 20 bp, Artificial Sequence
  MKO10124761_B_Upf2
  gRNA
aaatatgcccgatcttcctc

SEQ ID NO: 124762 - DNA, 20 bp, Artificial Sequence
  MKO10124762_B_Upf3a
  gRNA
gcacgattacttcgaggtgg

SEQ ID NO: 124763 - DNA, 20 bp, Artificial Sequence
  MKO10124763_B_Upf3a
  gRNA
acccaggagctctctcgtct

SEQ ID NO: 124764 - DNA, 20 bp, Artificial Sequence
  MKO10124764_B_Upf3a
  gRNA
ctgaacagcaggatgtcatc

SEQ ID NO: 124765 - DNA, 20 bp, Artificial Sequence
  MKO10124765_B_Upf3b
  gRNA
attacctcccactttgacca

SEQ ID NO: 124766 - DNA, 20 bp, Artificial Sequence
  MKO10124766_B_Upf3b
  gRNA
atctactccagagacattgc

SEQ ID NO: 124767 - DNA, 20 bp, Artificial Sequence
  MKO10124767_B_Upf3b
  gRNA
ctatgtattccttgacaata

SEQ ID NO: 124768 - DNA, 20 bp, Artificial Sequence
  MKO10124768_B_Upk1a
  gRNA
gagctgcgctctgtcgtcgt

SEQ ID NO: 124769 - DNA, 20 bp, Artificial Sequence
  MKO10124769_B_Upk1a
  gRNA
gccaggagctaacccgactc

SEQ ID NO: 124770 - DNA, 20 bp, Artificial Sequence
  MKO10124770_B_Upk1a
  gRNA
ccccggaagtggtgttcccg

SEQ ID NO: 124771 - DNA, 20 bp, Artificial Sequence
  MKO10124771_B_Upk1b
  gRNA
gttcttccattcgtcgtcat

SEQ ID NO: 124772 - DNA, 20 bp, Artificial Sequence
  MKO10124772_B_Upk1b
  gRNA
cccgaagatatcatcattgt

SEQ ID NO: 124773 - DNA, 20 bp, Artificial Sequence
  MKO10124773_B_Upk1b
  gRNA
agcttggataggcatgttcg

SEQ ID NO: 124774 - DNA, 20 bp, Artificial Sequence
  MKO10124774_B_Upk2
  gRNA
atgggggcaaggcaattaac

SEQ ID NO: 124775 - DNA, 20 bp, Artificial Sequence
  MKO10124775_B_Upk2
  gRNA
catatcctaccgagtacaga

SEQ ID NO: 124776 - DNA, 20 bp, Artificial Sequence
  MKO10124776_B_Upk2
  gRNA
caataagacccacgaccaac

SEQ ID NO: 124777 - DNA, 20 bp, Artificial Sequence
  MKO10124777_B_Upk3a
  gRNA
caatcatgcctccactccgc

SEQ ID NO: 124778 - DNA, 20 bp, Artificial Sequence
  MKO10124778_B_Upk3a
  gRNA
cgttgttgcccaccctgact

SEQ ID NO: 124779 - DNA, 20 bp, Artificial Sequence
  MKO10124779_B_Upk3a
  gRNA
tcctgaacgcatacctagtc

SEQ ID NO: 124780 - DNA, 20 bp, Artificial Sequence
  MKO10124780_B_Upk3bl
  gRNA
tgctgctcacctataggggc

SEQ ID NO: 124781 - DNA, 20 bp, Artificial Sequence
  MKO10124781_B_Upk3bl
  gRNA
gcttgtggtcttcctcgtac

SEQ ID NO: 124782 - DNA, 20 bp, Artificial Sequence
  MKO10124782_B_Upk3bl
  gRNA
cacacaatctaccttcacgc

SEQ ID NO: 124783 - DNA, 20 bp, Artificial Sequence
  MKO10124783_B_Upk3b
  gRNA
catcacttacaaacgcgtag

SEQ ID NO: 124784 - DNA, 20 bp, Artificial Sequence
  MKO10124784_B_Upk3b
  gRNA
ggccggcggcatccattaca

SEQ ID NO: 124785 - DNA, 20 bp, Artificial Sequence
  MKO10124785_B_Upk3b
  gRNA
gtggaggtgtccccgtgctt

SEQ ID NO: 124786 - DNA, 20 bp, Artificial Sequence
  MKO10124786_B_Upp1
  gRNA
cgctacgccatgtataaagc

SEQ ID NO: 124787 - DNA, 20 bp, Artificial Sequence
  MKO10124787_B_Upp1
  gRNA
ctctgttgtcatcacgcagc

SEQ ID NO: 124788 - DNA, 20 bp, Artificial Sequence
  MKO10124788_B_Upp1
  gRNA
ttcacgtctccaaacatagc

SEQ ID NO: 124789 - DNA, 20 bp, Artificial Sequence
  MKO10124789_B_Upp2
  gRNA
tgacgttccaattctgatga

SEQ ID NO: 124790 - DNA, 20 bp, Artificial Sequence
  MKO10124790_B_Upp2
  gRNA
ggagtaatttgatgagttcg

SEQ ID NO: 124791 - DNA, 20 bp, Artificial Sequence
  MKO10124791_B_Upp2
  gRNA
gtatgttaagaatccatacc

SEQ ID NO: 124792 - DNA, 20 bp, Artificial Sequence
  MKO10124792_B_Uprt
  gRNA
aaacatgaagtcccctctac

SEQ ID NO: 124793 - DNA, 20 bp, Artificial Sequence
  MKO10124793_B_Uprt
  gRNA
tcaacagggcacaagtatga

SEQ ID NO: 124794 - DNA, 20 bp, Artificial Sequence
  MKO10124794_B_Uprt
  gRNA
gaacttggcataatatactt

SEQ ID NO: 124795 - DNA, 20 bp, Artificial Sequence
  MKO10124795_B_Uqcc1
  gRNA
gaatcagtctcgagtgtgtt

SEQ ID NO: 124796 - DNA, 20 bp, Artificial Sequence
  MKO10124796_B_Uqcc1
  gRNA
gactcaccttacttgtgttg

SEQ ID NO: 124797 - DNA, 20 bp, Artificial Sequence
  MKO10124797_B_Uqcc1
  gRNA
cccactgagagatgctagtc

SEQ ID NO: 124798 - DNA, 20 bp, Artificial Sequence
  MKO10124798_B_Uqcc2
  gRNA
gctctcgtacatctgatcac

SEQ ID NO: 124799 - DNA, 20 bp, Artificial Sequence
  MKO10124799_B_Uqcc2
  gRNA
ctttcagattgcagaacccg

SEQ ID NO: 124800 - DNA, 20 bp, Artificial Sequence
  MKO10124800_B_Uqcc2
  gRNA
gatcagcttgtactcttcca

SEQ ID NO: 124801 - DNA, 20 bp, Artificial Sequence
  MKO10124801_B_Uqcr10
  gRNA
agcaaggagtacaggcgcga

SEQ ID NO: 124802 - DNA, 20 bp, Artificial Sequence
  MKO10124802_B_Uqcr10
  gRNA
gatctacgagcacatcaacg

SEQ ID NO: 124803 - DNA, 20 bp, Artificial Sequence
  MKO10124803_B_Uqcr10
  gRNA
ctttgccctcaccatcgcag

SEQ ID NO: 124804 - DNA, 20 bp, Artificial Sequence
  MKO10124804_B_Uqcr11
  gRNA
accctgcagcgatgctgagc

SEQ ID NO: 124805 - DNA, 20 bp, Artificial Sequence
  MKO10124805_B_Uqcr11
  gRNA
gtggggcactgtgggtgccg

SEQ ID NO: 124806 - DNA, 20 bp, Artificial Sequence
  MKO10124806_B_Uqcr11
  gRNA
aggcccgcgctaccgggaac

SEQ ID NO: 124807 - DNA, 20 bp, Artificial Sequence
  MKO10124807_B_Uqcrb
  gRNA
aagtggtattataatgctgc

SEQ ID NO: 124808 - DNA, 20 bp, Artificial Sequence
  MKO10124808_B_Uqcrb
  gRNA
atgtaaaagaagccataaga

SEQ ID NO: 124809 - DNA, 20 bp, Artificial Sequence
  MKO10124809_B_Uqcrb
  gRNA
ccttgaaccctatctaaaag

SEQ ID NO: 124810 - DNA, 20 bp, Artificial Sequence
  MKO10124810_B_Uqcrc1
  gRNA
tatcgtgcagaacagtagtc

SEQ ID NO: 124811 - DNA, 20 bp, Artificial Sequence
  MKO10124811_B_Uqcrc1
  gRNA
ctgtccaaggacctgccaaa

SEQ ID NO: 124812 - DNA, 20 bp, Artificial Sequence
  MKO10124812_B_Uqcrc1
  gRNA
agtgtgctctcgagtgctgt

SEQ ID NO: 124813 - DNA, 20 bp, Artificial Sequence
  MKO10124813_B_Uqcrc2
  gRNA
ggactaacctcaagatcctg

SEQ ID NO: 124814 - DNA, 20 bp, Artificial Sequence
  MKO10124814_B_Uqcrc2
  gRNA
ttccctcaaagttgccccga

SEQ ID NO: 124815 - DNA, 20 bp, Artificial Sequence
  MKO10124815_B_Uqcrc2
  gRNA
tcatctttcaagataacccg

SEQ ID NO: 124816 - DNA, 20 bp, Artificial Sequence
  MKO10124816_B_Uqcrfs1
  gRNA
acgacgatagtcagagaagt

SEQ ID NO: 124817 - DNA, 20 bp, Artificial Sequence
  MKO10124817_B_Uqcrfs1
  gRNA
gccgataggacgggcgcgaa

SEQ ID NO: 124818 - DNA, 20 bp, Artificial Sequence
  MKO10124818_B_Uqcrfs1
  gRNA
gcgggcggcgaccgacaaca

SEQ ID NO: 124819 - DNA, 20 bp, Artificial Sequence
  MKO10124819_B_Uqcrh
  gRNA
ggctcccgacatgggactag

SEQ ID NO: 124820 - DNA, 20 bp, Artificial Sequence
  MKO10124820_B_Uqcrh
  gRNA
cgaaagatgctcactggatc

SEQ ID NO: 124821 - DNA, 20 bp, Artificial Sequence
  MKO10124821_B_Uqcrh
  gRNA
tctttgacttcttgcatgca

SEQ ID NO: 124822 - DNA, 20 bp, Artificial Sequence
  MKO10124822_B_Uqcrq
  gRNA
gatctacacatggggcaacc

SEQ ID NO: 124823 - DNA, 20 bp, Artificial Sequence
  MKO10124823_B_Uqcrq
  gRNA
actcacgcggcgccacgcgc

SEQ ID NO: 124824 - DNA, 20 bp, Artificial Sequence
  MKO10124824_B_Uqcrq
  gRNA
tcgcgagcgcatcctgcgcg

SEQ ID NO: 124825 - DNA, 20 bp, Artificial Sequence
  MKO10124825_B_Urad
  gRNA
cacaaattctccgaagtcca

SEQ ID NO: 124826 - DNA, 20 bp, Artificial Sequence
  MKO10124826_B_Urad
  gRNA
gcggtgcgcagctcggattc

SEQ ID NO: 124827 - DNA, 20 bp, Artificial Sequence
  MKO10124827_B_Urad
  gRNA
acggaaagccgaagcgctca

SEQ ID NO: 124828 - DNA, 20 bp, Artificial Sequence
  MKO10124828_B_Urah
  gRNA
acacatcactttaactcccc

SEQ ID NO: 124829 - DNA, 20 bp, Artificial Sequence
  MKO10124829_B_Urah
  gRNA
tggaggccccctgccagcag

SEQ ID NO: 124830 - DNA, 20 bp, Artificial Sequence
  MKO10124830_B_Urah
  gRNA
tacctctgctgctgagccca

SEQ ID NO: 124831 - DNA, 20 bp, Artificial Sequence
  MKO10124831_B_Urb1
  gRNA
gtggaaatgcgtaagatcac

SEQ ID NO: 124832 - DNA, 20 bp, Artificial Sequence
  MKO10124832_B_Urb1
  gRNA
tgctgccaagaagctaccgc

SEQ ID NO: 124833 - DNA, 20 bp, Artificial Sequence
  MKO10124833_B_Urb1
  gRNA
aaacaacctacttcactctc

SEQ ID NO: 124834 - DNA, 20 bp, Artificial Sequence
  MKO10124834_B_Urb2
  gRNA
tagcagtttgagtagtctaa

SEQ ID NO: 124835 - DNA, 20 bp, Artificial Sequence
  MKO10124835_B_Urb2
  gRNA
ggtactgcagtctattcttc

SEQ ID NO: 124836 - DNA, 20 bp, Artificial Sequence
  MKO10124836_B_Urb2
  gRNA
ttacagtcttcccatcctta

SEQ ID NO: 124837 - DNA, 20 bp, Artificial Sequence
  MKO10124837_B_Urgcp
  gRNA
taggatagaagtggaattac

SEQ ID NO: 124838 - DNA, 20 bp, Artificial Sequence
  MKO10124838_B_Urgcp
  gRNA
caggacaatgacttccccac

SEQ ID NO: 124839 - DNA, 20 bp, Artificial Sequence
  MKO10124839_B_Urgcp
  gRNA
gaaatggaaggagatgactg

SEQ ID NO: 124840 - DNA, 20 bp, Artificial Sequence
  MKO10124840_B_Uri1
  gRNA
tgcaaagtgctcagccaagc

SEQ ID NO: 124841 - DNA, 20 bp, Artificial Sequence
  MKO10124841_B_Uri1
  gRNA
gccaagagaaaatccagcat

SEQ ID NO: 124842 - DNA, 20 bp, Artificial Sequence
  MKO10124842_B_Uri1
  gRNA
atcttctgtgaattcaactc

SEQ ID NO: 124843 - DNA, 20 bp, Artificial Sequence
  MKO10124843_B_Urm1
  gRNA
gcgaccagagctgttcatcc

SEQ ID NO: 124844 - DNA, 20 bp, Artificial Sequence
  MKO10124844_B_Urm1
  gRNA
aagcatcaagtcgccttgcc

SEQ ID NO: 124845 - DNA, 20 bp, Artificial Sequence
  MKO10124845_B_Urm1
  gRNA
ggagctggactaccagctgc

SEQ ID NO: 124846 - DNA, 20 bp, Artificial Sequence
  MKO10124846_B_Uroc1
  gRNA
atcaggtgggaaatagcgca

SEQ ID NO: 124847 - DNA, 20 bp, Artificial Sequence
  MKO10124847_B_Uroc1
  gRNA
gcagctgcccgtgtccggca

SEQ ID NO: 124848 - DNA, 20 bp, Artificial Sequence
  MKO10124848_B_Uroc1
  gRNA
caattgatcagtacccatgc

SEQ ID NO: 124849 - DNA, 20 bp, Artificial Sequence
  MKO10124849_B_Urod
  gRNA
cagcacctgccgatctcccg

SEQ ID NO: 124850 - DNA, 20 bp, Artificial Sequence
  MKO10124850_B_Urod
  gRNA
attccctgcagccactacga

SEQ ID NO: 124851 - DNA, 20 bp, Artificial Sequence
  MKO10124851_B_Urod
  gRNA
caggcaggccgctacttacc

SEQ ID NO: 124852 - DNA, 20 bp, Artificial Sequence
  MKO10124852_B_Uros
  gRNA
gtgcagctgtctcatcctga

SEQ ID NO: 124853 - DNA, 20 bp, Artificial Sequence
  MKO10124853_B_Uros
  gRNA
tctccccagtttgtcagaaa

SEQ ID NO: 124854 - DNA, 20 bp, Artificial Sequence
  MKO10124854_B_Uros
  gRNA
atgagtcctccaaagccttc

SEQ ID NO: 124855 - DNA, 20 bp, Artificial Sequence
  MKO10124855_B_Usb1
  gRNA
tggcccagttgccccgctca

SEQ ID NO: 124856 - DNA, 20 bp, Artificial Sequence
  MKO10124856_B_Usb1
  gRNA
actgacctccagcccgatga

SEQ ID NO: 124857 - DNA, 20 bp, Artificial Sequence
  MKO10124857_B_Usb1
  gRNA
ttacctggtagaaagtagta

SEQ ID NO: 124858 - DNA, 20 bp, Artificial Sequence
  MKO10124858_B_Use1
  gRNA
cacgttacaccagtgagatg

SEQ ID NO: 124859 - DNA, 20 bp, Artificial Sequence
  MKO10124859_B_Use1
  gRNA
cagctcactccgcatctcac

SEQ ID NO: 124860 - DNA, 20 bp, Artificial Sequence
  MKO10124860_B_Use1
  gRNA
gtactcgctgatcacttctg

SEQ ID NO: 124861 - DNA, 20 bp, Artificial Sequence
  MKO10124861_B_Usf1
  gRNA
agctgctccctccgtgtcaa

SEQ ID NO: 124862 - DNA, 20 bp, Artificial Sequence
  MKO10124862_B_Usf1
  gRNA
cctgcttccaggtgatgtac

SEQ ID NO: 124863 - DNA, 20 bp, Artificial Sequence
  MKO10124863_B_Usf1
  gRNA
ccagctgcccctctgacacc

SEQ ID NO: 124864 - DNA, 20 bp, Artificial Sequence
  MKO10124864_B_Usf2
  gRNA
ccggcggccgaagctgtcag

SEQ ID NO: 124865 - DNA, 20 bp, Artificial Sequence
  MKO10124865_B_Usf2
  gRNA
ccccacaggcggggacggcc

SEQ ID NO: 124866 - DNA, 20 bp, Artificial Sequence
  MKO10124866_B_Usf2
  gRNA
tgcccccgcagccacgacaa

SEQ ID NO: 124867 - DNA, 20 bp, Artificial Sequence
  MKO10124867_B_Ush1c
  gRNA
tcagctggtcatactccacc

SEQ ID NO: 124868 - DNA, 20 bp, Artificial Sequence
  MKO10124868_B_Ush1c
  gRNA
acgctgaggccgagaccttc

SEQ ID NO: 124869 - DNA, 20 bp, Artificial Sequence
  MKO10124869_B_Ush1c
  gRNA
aggctcagtcatggaccgga

SEQ ID NO: 124870 - DNA, 20 bp, Artificial Sequence
  MKO10124870_B_Ush1g
  gRNA
ggagctgaatgcccctgacg

SEQ ID NO: 124871 - DNA, 20 bp, Artificial Sequence
  MKO10124871_B_Ush1g
  gRNA
agacgctgtcctcgtccgag

SEQ ID NO: 124872 - DNA, 20 bp, Artificial Sequence
  MKO10124872_B_Ush1g
  gRNA
gatagcgtacgcactccatg

SEQ ID NO: 124873 - DNA, 20 bp, Artificial Sequence
  MKO10124873_B_Ush2a
  gRNA
cagcttctttgtggacggtc

SEQ ID NO: 124874 - DNA, 20 bp, Artificial Sequence
  MKO10124874_B_Ush2a
  gRNA
ccaataaaagtaatgacacc

SEQ ID NO: 124875 - DNA, 20 bp, Artificial Sequence
  MKO10124875_B_Ush2a
  gRNA
acaatgtgtcacttacaaac

SEQ ID NO: 124876 - DNA, 20 bp, Artificial Sequence
  MKO10124876_B_Ushbp1
  gRNA
gcacagggctagccgcagcc

SEQ ID NO: 124877 - DNA, 20 bp, Artificial Sequence
  MKO10124877_B_Ushbp1
  gRNA
agccccagagacgtacctca

SEQ ID NO: 124878 - DNA, 20 bp, Artificial Sequence
  MKO10124878_B_Ushbp1
  gRNA
gactaaacctgagctgcatc

SEQ ID NO: 124879 - DNA, 20 bp, Artificial Sequence
  MKO10124879_B_Usmg5
  gRNA
atttatgttgctttcacagc

SEQ ID NO: 124880 - DNA, 20 bp, Artificial Sequence
  MKO10124880_B_Usmg5
  gRNA
ttcaactcttataccctcac

SEQ ID NO: 124881 - DNA, 20 bp, Artificial Sequence
  MKO10124881_B_Usmg5
  gRNA
tggtcttatacttcaagtta

SEQ ID NO: 124882 - DNA, 20 bp, Artificial Sequence
  MKO10124882_B_Uso1
  gRNA
gcagaaataccgcttagaag

SEQ ID NO: 124883 - DNA, 20 bp, Artificial Sequence
  MKO10124883_B_Uso1
  gRNA
tgaaataatagcatatgctt

SEQ ID NO: 124884 - DNA, 20 bp, Artificial Sequence
  MKO10124884_B_Uso1
  gRNA
ttacctccaacaaagataac

SEQ ID NO: 124885 - DNA, 20 bp, Artificial Sequence
  MKO10124885_B_Usp10
  gRNA
ccagtgtcattgcaaccccg

SEQ ID NO: 124886 - DNA, 20 bp, Artificial Sequence
  MKO10124886_B_Usp10
  gRNA
gactccccgctcttctgttg

SEQ ID NO: 124887 - DNA, 20 bp, Artificial Sequence
  MKO10124887_B_Usp10
  gRNA
atgacactggcttatgtatt

SEQ ID NO: 124888 - DNA, 20 bp, Artificial Sequence
  MKO10124888_B_Usp11
  gRNA
ccagcattgttgatacagcc

SEQ ID NO: 124889 - DNA, 20 bp, Artificial Sequence
  MKO10124889_B_Usp11
  gRNA
acagtgggaggtgtacgtga

SEQ ID NO: 124890 - DNA, 20 bp, Artificial Sequence
  MKO10124890_B_Usp11
  gRNA
tcacaggtaatagaacttcc

SEQ ID NO: 124891 - DNA, 20 bp, Artificial Sequence
  MKO10124891_B_Usp12
  gRNA
catcaattactcactgctta

SEQ ID NO: 124892 - DNA, 20 bp, Artificial Sequence
  MKO10124892_B_Usp12
  gRNA
cgcccaagaagttcatcaca

SEQ ID NO: 124893 - DNA, 20 bp, Artificial Sequence
  MKO10124893_B_Usp12
  gRNA
acagcacaccagacccaacc

SEQ ID NO: 124894 - DNA, 20 bp, Artificial Sequence
  MKO10124894_B_Usp13
  gRNA
tgccaacaaccttgtgcaac

SEQ ID NO: 124895 - DNA, 20 bp, Artificial Sequence
  MKO10124895_B_Usp13
  gRNA
gaaagacactttcgaaaaac

SEQ ID NO: 124896 - DNA, 20 bp, Artificial Sequence
  MKO10124896_B_Usp13
  gRNA
tttgggtaaagctccaccag

SEQ ID NO: 124897 - DNA, 20 bp, Artificial Sequence
  MKO10124897_B_Usp14
  gRNA
ctttgaaataggatgatgac

SEQ ID NO: 124898 - DNA, 20 bp, Artificial Sequence
  MKO10124898_B_Usp14
  gRNA
gccagccagacaaaaagtta

SEQ ID NO: 124899 - DNA, 20 bp, Artificial Sequence
  MKO10124899_B_Usp14
  gRNA
tcatgtaacaagtgttacca

SEQ ID NO: 124900 - DNA, 20 bp, Artificial Sequence
  MKO10124900_B_Usp15
  gRNA
catatacttgttccacagtc

SEQ ID NO: 124901 - DNA, 20 bp, Artificial Sequence
  MKO10124901_B_Usp15
  gRNA
cctggacccatcgataactc

SEQ ID NO: 124902 - DNA, 20 bp, Artificial Sequence
  MKO10124902_B_Usp15
  gRNA
gctggaataaacttgtcagc

SEQ ID NO: 124903 - DNA, 20 bp, Artificial Sequence
  MKO10124903_B_Usp16
  gRNA
gtctggacaactggagcgtc

SEQ ID NO: 124904 - DNA, 20 bp, Artificial Sequence
  MKO10124904_B_Usp16
  gRNA
aagcagaagacccttcggtt

SEQ ID NO: 124905 - DNA, 20 bp, Artificial Sequence
  MKO10124905_B_Usp16
  gRNA
ttaagacagagccaaaccga

SEQ ID NO: 124906 - DNA, 20 bp, Artificial Sequence
  MKO10124906_B_Usp17la
  gRNA
gttgctctttccttcccaga

SEQ ID NO: 124907 - DNA, 20 bp, Artificial Sequence
  MKO10124907_B_Usp17la
  gRNA
tctcctaaatcttctgtgaa

SEQ ID NO: 124908 - DNA, 20 bp, Artificial Sequence
  MKO10124908_B_Usp17la
  gRNA
gatggtgcgacttctcacag

SEQ ID NO: 124909 - DNA, 20 bp, Artificial Sequence
  MKO10124909_B_Usp17lb
  gRNA
atgagacttaccttctggga

SEQ ID NO: 124910 - DNA, 20 bp, Artificial Sequence
  MKO10124910_B_Usp17lb
  gRNA
tcgactcagtggtgcaattg

SEQ ID NO: 124911 - DNA, 20 bp, Artificial Sequence
  MKO10124911_B_Usp17lb
  gRNA
actataaagctttagggtct

SEQ ID NO: 124912 - DNA, 20 bp, Artificial Sequence
  MKO10124912_B_Usp17lc
  gRNA
gtttctctttccttcccaga

SEQ ID NO: 124913 - DNA, 20 bp, Artificial Sequence
  MKO10124913_B_Usp17lc
  gRNA
tgtgtttctgcccaagtttc

SEQ ID NO: 124914 - DNA, 20 bp, Artificial Sequence
  MKO10124914_B_Usp17lc
  gRNA
gaataccaaacttgtgcctc

SEQ ID NO: 124915 - DNA, 20 bp, Artificial Sequence
  MKO10124915_B_Usp17ld
  gRNA
gtgagacttaccttctggga

SEQ ID NO: 124916 - DNA, 20 bp, Artificial Sequence
  MKO10124916_B_Usp17ld
  gRNA
tgtgtttctgccccagtttc

SEQ ID NO: 124917 - DNA, 20 bp, Artificial Sequence
  MKO10124917_B_Usp17ld
  gRNA
tgtcaatactgacctctttg

SEQ ID NO: 124918 - DNA, 20 bp, Artificial Sequence
  MKO10124918_B_Usp17le
  gRNA
gtttctctttccttcccaga

SEQ ID NO: 124919 - DNA, 20 bp, Artificial Sequence
  MKO10124919_B_Usp17le
  gRNA
ccttacttgcagagactgga

SEQ ID NO: 124920 - DNA, 20 bp, Artificial Sequence
  MKO10124920_B_Usp17le
  gRNA
gtgagacttaccttctggga

SEQ ID NO: 124921 - DNA, 20 bp, Artificial Sequence
  MKO10124921_B_Usp18
  gRNA
tagtcaggttccagattgta

SEQ ID NO: 124922 - DNA, 20 bp, Artificial Sequence
  MKO10124922_B_Usp18
  gRNA
ctggttggtttacacaacat

SEQ ID NO: 124923 - DNA, 20 bp, Artificial Sequence
  MKO10124923_B_Usp18
  gRNA
cttgcagacagagcggctgc

SEQ ID NO: 124924 - DNA, 20 bp, Artificial Sequence
  MKO10124924_B_Usp19
  gRNA
acccttgcgagcctgcactt

SEQ ID NO: 124925 - DNA, 20 bp, Artificial Sequence
  MKO10124925_B_Usp19
  gRNA
agcggctcaagatgtctgca

SEQ ID NO: 124926 - DNA, 20 bp, Artificial Sequence
  MKO10124926_B_Usp19
  gRNA
aagttcttgcaccaaagtgc

SEQ ID NO: 124927 - DNA, 20 bp, Artificial Sequence
  MKO10124927_B_Usp1
  gRNA
tcagataacaagtgttgcca

SEQ ID NO: 124928 - DNA, 20 bp, Artificial Sequence
  MKO10124928_B_Usp1
  gRNA
gaaggatgactctaatcaga

SEQ ID NO: 124929 - DNA, 20 bp, Artificial Sequence
  MKO10124929_B_Usp1
  gRNA
ttcactccagtcttaaagcc

SEQ ID NO: 124930 - DNA, 20 bp, Artificial Sequence
  MKO10124930_B_Usp20
  gRNA
gactctccacagccaacgta

SEQ ID NO: 124931 - DNA, 20 bp, Artificial Sequence
  MKO10124931_B_Usp20
  gRNA
caggtcacctgcccttacgt

SEQ ID NO: 124932 - DNA, 20 bp, Artificial Sequence
  MKO10124932_B_Usp20
  gRNA
cagaaagacttcacgctcac

SEQ ID NO: 124933 - DNA, 20 bp, Artificial Sequence
  MKO10124933_B_Usp21
  gRNA
ttcgagacttctgtctgcga

SEQ ID NO: 124934 - DNA, 20 bp, Artificial Sequence
  MKO10124934_B_Usp21
  gRNA
cgcagacagaagtctcgaag

SEQ ID NO: 124935 - DNA, 20 bp, Artificial Sequence
  MKO10124935_B_Usp21
  gRNA
catgttggcctccgaaatct

SEQ ID NO: 124936 - DNA, 20 bp, Artificial Sequence
  MKO10124936_B_Usp22
  gRNA
tcacctacctatggtacaat

SEQ ID NO: 124937 - DNA, 20 bp, Artificial Sequence
  MKO10124937_B_Usp22
  gRNA
agtaaatacctccgtacatc

SEQ ID NO: 124938 - DNA, 20 bp, Artificial Sequence
  MKO10124938_B_Usp22
  gRNA
caagtcaaagcgacacaacc

SEQ ID NO: 124939 - DNA, 20 bp, Artificial Sequence
  MKO10124939_B_Usp24
  gRNA
gttgatgctactaatagaat

SEQ ID NO: 124940 - DNA, 20 bp, Artificial Sequence
  MKO10124940_B_Usp24
  gRNA
aaacaggatccaattcccat

SEQ ID NO: 124941 - DNA, 20 bp, Artificial Sequence
  MKO10124941_B_Usp24
  gRNA
ccttaccttcttaaatgcct

SEQ ID NO: 124942 - DNA, 20 bp, Artificial Sequence
  MKO10124942_B_Usp25
  gRNA
gtttgactccgccaaactca

SEQ ID NO: 124943 - DNA, 20 bp, Artificial Sequence
  MKO10124943_B_Usp25
  gRNA
gggcataaccgatgaagagc

SEQ ID NO: 124944 - DNA, 20 bp, Artificial Sequence
  MKO10124944_B_Usp25
  gRNA
gaatccctccaaacttctat

SEQ ID NO: 124945 - DNA, 20 bp, Artificial Sequence
  MKO10124945_B_Usp26
  gRNA
ggtcttcgccataggtttga

SEQ ID NO: 124946 - DNA, 20 bp, Artificial Sequence
  MKO10124946_B_Usp26
  gRNA
gtttatagtttcgaaaccct

SEQ ID NO: 124947 - DNA, 20 bp, Artificial Sequence
  MKO10124947_B_Usp26
  gRNA
ggaggcccaaaagtaccaac

SEQ ID NO: 124948 - DNA, 20 bp, Artificial Sequence
  MKO10124948_B_Usp27x
  gRNA
aattagtcctcgtaagccga

SEQ ID NO: 124949 - DNA, 20 bp, Artificial Sequence
  MKO10124949_B_Usp27x
  gRNA
gacgagcgtgtatccacacc

SEQ ID NO: 124950 - DNA, 20 bp, Artificial Sequence
  MKO10124950_B_Usp27x
  gRNA
acaagcgtccacctcgacag

SEQ ID NO: 124951 - DNA, 20 bp, Artificial Sequence
  MKO10124951_B_Usp28
  gRNA
cgacaacaaagatgacctgc

SEQ ID NO: 124952 - DNA, 20 bp, Artificial Sequence
  MKO10124952_B_Usp28
  gRNA
atccactctcctccagttat

SEQ ID NO: 124953 - DNA, 20 bp, Artificial Sequence
  MKO10124953_B_Usp28
  gRNA
aatcagctgcgagaaatcac

SEQ ID NO: 124954 - DNA, 20 bp, Artificial Sequence
  MKO10124954_B_Usp29
  gRNA
cgtagtggttagtggtgagc

SEQ ID NO: 124955 - DNA, 20 bp, Artificial Sequence
  MKO10124955_B_Usp29
  gRNA
catacacatcacttacgtaa

SEQ ID NO: 124956 - DNA, 20 bp, Artificial Sequence
  MKO10124956_B_Usp29
  gRNA
ccttcttagataacattgac

SEQ ID NO: 124957 - DNA, 20 bp, Artificial Sequence
  MKO10124957_B_Usp2
  gRNA
ggtcccgcatgtacagcctc

SEQ ID NO: 124958 - DNA, 20 bp, Artificial Sequence
  MKO10124958_B_Usp2
  gRNA
ttacttacgggagatgatca

SEQ ID NO: 124959 - DNA, 20 bp, Artificial Sequence
  MKO10124959_B_Usp2
  gRNA
ctggctggtcttcgaaacct

SEQ ID NO: 124960 - DNA, 20 bp, Artificial Sequence
  MKO10124960_B_Usp30
  gRNA
cctgccctgcgtttgtcaag

SEQ ID NO: 124961 - DNA, 20 bp, Artificial Sequence
  MKO10124961_B_Usp30
  gRNA
cttgtttgatgtgcattccc

SEQ ID NO: 124962 - DNA, 20 bp, Artificial Sequence
  MKO10124962_B_Usp30
  gRNA
cagcagggatctatgttatt

SEQ ID NO: 124963 - DNA, 20 bp, Artificial Sequence
  MKO10124963_B_Usp31
  gRNA
aagaatgcgttgcagtatcg

SEQ ID NO: 124964 - DNA, 20 bp, Artificial Sequence
  MKO10124964_B_Usp31
  gRNA
tcttaccttgtatggggtag

SEQ ID NO: 124965 - DNA, 20 bp, Artificial Sequence
  MKO10124965_B_Usp31
  gRNA
ggcatcatatctgtctctga

SEQ ID NO: 124966 - DNA, 20 bp, Artificial Sequence
  MKO10124966_B_Usp32
  gRNA
tcctactttctaccaaactc

SEQ ID NO: 124967 - DNA, 20 bp, Artificial Sequence
  MKO10124967_B_Usp32
  gRNA
catttcaataacttaatagt

SEQ ID NO: 124968 - DNA, 20 bp, Artificial Sequence
  MKO10124968_B_Usp32
  gRNA
gttattgaaatgcagccctt

SEQ ID NO: 124969 - DNA, 20 bp, Artificial Sequence
  MKO10124969_B_Usp33
  gRNA
cgactccccgcagccaacat

SEQ ID NO: 124970 - DNA, 20 bp, Artificial Sequence
  MKO10124970_B_Usp33
  gRNA
agttggtgaaataacgaaag

SEQ ID NO: 124971 - DNA, 20 bp, Artificial Sequence
  MKO10124971_B_Usp33
  gRNA
atacctccaggcacgcccac

SEQ ID NO: 124972 - DNA, 20 bp, Artificial Sequence
  MKO10124972_B_Usp34
  gRNA
aactgcatacctctgagtcc

SEQ ID NO: 124973 - DNA, 20 bp, Artificial Sequence
  MKO10124973_B_Usp34
  gRNA
agcaatccttcatgagagaa

SEQ ID NO: 124974 - DNA, 20 bp, Artificial Sequence
  MKO10124974_B_Usp34
  gRNA
gacataacgaagcaaatgca

SEQ ID NO: 124975 - DNA, 20 bp, Artificial Sequence
  MKO10124975_B_Usp35
  gRNA
agctgctgtaccccatcgtg

SEQ ID NO: 124976 - DNA, 20 bp, Artificial Sequence
  MKO10124976_B_Usp35
  gRNA
cgtggtccagcacctcccat

SEQ ID NO: 124977 - DNA, 20 bp, Artificial Sequence
  MKO10124977_B_Usp35
  gRNA
ggagccaccgtccagcgcct

SEQ ID NO: 124978 - DNA, 20 bp, Artificial Sequence
  MKO10124978_B_Usp36
  gRNA
acagctccgtgcgtgctcct

SEQ ID NO: 124979 - DNA, 20 bp, Artificial Sequence
  MKO10124979_B_Usp36
  gRNA
tcgcatcaatggtgtaccgc

SEQ ID NO: 124980 - DNA, 20 bp, Artificial Sequence
  MKO10124980_B_Usp36
  gRNA
taggttggatcggcagacac

SEQ ID NO: 124981 - DNA, 20 bp, Artificial Sequence
  MKO10124981_B_Usp37
  gRNA
ccagctatgaaagcttctca

SEQ ID NO: 124982 - DNA, 20 bp, Artificial Sequence
  MKO10124982_B_Usp37
  gRNA
gctttcttactcagacaatc

SEQ ID NO: 124983 - DNA, 20 bp, Artificial Sequence
  MKO10124983_B_Usp37
  gRNA
tattgacaaagtaccaagta

SEQ ID NO: 124984 - DNA, 20 bp, Artificial Sequence
  MKO10124984_B_Usp38
  gRNA
tggctcagcatgtagatacg

SEQ ID NO: 124985 - DNA, 20 bp, Artificial Sequence
  MKO10124985_B_Usp38
  gRNA
caaggcaaccgagggctcaa

SEQ ID NO: 124986 - DNA, 20 bp, Artificial Sequence
  MKO10124986_B_Usp38
  gRNA
cttaccacatggaatgcctc

SEQ ID NO: 124987 - DNA, 20 bp, Artificial Sequence
  MKO10124987_B_Usp39
  gRNA
aagtggtgccatcatatgcc

SEQ ID NO: 124988 - DNA, 20 bp, Artificial Sequence
  MKO10124988_B_Usp39
  gRNA
cacagcatttgcatagtcgt

SEQ ID NO: 124989 - DNA, 20 bp, Artificial Sequence
  MKO10124989_B_Usp39
  gRNA
tgaaatcattgattcctcgc

SEQ ID NO: 124990 - DNA, 20 bp, Artificial Sequence
  MKO10124990_B_Usp3
  gRNA
gcagtagctacagcacatac

SEQ ID NO: 124991 - DNA, 20 bp, Artificial Sequence
  MKO10124991_B_Usp3
  gRNA
caatagctcagcctttacag

SEQ ID NO: 124992 - DNA, 20 bp, Artificial Sequence
  MKO10124992_B_Usp3
  gRNA
acttgttcaagtgtccactg

SEQ ID NO: 124993 - DNA, 20 bp, Artificial Sequence
  MKO10124993_B_Usp40
  gRNA
tacactctttgcaaacaatc

SEQ ID NO: 124994 - DNA, 20 bp, Artificial Sequence
  MKO10124994_B_Usp40
  gRNA
cacaggttccacagtggtac

SEQ ID NO: 124995 - DNA, 20 bp, Artificial Sequence
  MKO10124995_B_Usp40
  gRNA
cctttgctgctttaaccagt

SEQ ID NO: 124996 - DNA, 20 bp, Artificial Sequence
  MKO10124996_B_Usp42
  gRNA
tatcttgcaggccacgcaga

SEQ ID NO: 124997 - DNA, 20 bp, Artificial Sequence
  MKO10124997_B_Usp42
  gRNA
atagctagacacttccgttt

SEQ ID NO: 124998 - DNA, 20 bp, Artificial Sequence
  MKO10124998_B_Usp42
  gRNA
tcatacaaaatccttctgcg

SEQ ID NO: 124999 - DNA, 20 bp, Artificial Sequence
  MKO10124999_B_Usp43
  gRNA
gcttctggatcgtgtccacg

SEQ ID NO: 125000 - DNA, 20 bp, Artificial Sequence
  MKO10125000_B_Usp43
  gRNA
caattcccagcacgatgccc

SEQ ID NO: 125001 - DNA, 20 bp, Artificial Sequence
  MKO10125001_B_Usp43
  gRNA
gccactttcaagcacagtac

SEQ ID NO: 125002 - DNA, 20 bp, Artificial Sequence
  MKO10125002_B_Usp44
  gRNA
tattctgtatggatcgagcg

SEQ ID NO: 125003 - DNA, 20 bp, Artificial Sequence
  MKO10125003_B_Usp44
  gRNA
gttctaaacgataacgcagc

SEQ ID NO: 125004 - DNA, 20 bp, Artificial Sequence
  MKO10125004_B_Usp44
  gRNA
gtacatgtcgttcacctcga

SEQ ID NO: 125005 - DNA, 20 bp, Artificial Sequence
  MKO10125005_B_Usp45
  gRNA
accatatgacccatgtactc

SEQ ID NO: 125006 - DNA, 20 bp, Artificial Sequence
  MKO10125006_B_Usp45
  gRNA
ttgtcatcagcctgagtaca

SEQ ID NO: 125007 - DNA, 20 bp, Artificial Sequence
  MKO10125007_B_Usp45
  gRNA
acattgcaacaagaaagttt

SEQ ID NO: 125008 - DNA, 20 bp, Artificial Sequence
  MKO10125008_B_Usp46
  gRNA
tcttgacctctctgtcgatg

SEQ ID NO: 125009 - DNA, 20 bp, Artificial Sequence
  MKO10125009_B_Usp46
  gRNA
gaagtacagcgcttgaagca

SEQ ID NO: 125010 - DNA, 20 bp, Artificial Sequence
  MKO10125010_B_Usp46
  gRNA
ggagaatgtgttggcataca

SEQ ID NO: 125011 - DNA, 20 bp, Artificial Sequence
  MKO10125011_B_Usp47
  gRNA
ttaggaggactccaataacg

SEQ ID NO: 125012 - DNA, 20 bp, Artificial Sequence
  MKO10125012_B_Usp47
  gRNA
ttatgtgggattagtaaacc

SEQ ID NO: 125013 - DNA, 20 bp, Artificial Sequence
  MKO10125013_B_Usp47
  gRNA
atttatgtagcctactttgt

SEQ ID NO: 125014 - DNA, 20 bp, Artificial Sequence
  MKO10125014_B_Usp48
  gRNA
ccgaattgcttggttggcat

SEQ ID NO: 125015 - DNA, 20 bp, Artificial Sequence
  MKO10125015_B_Usp48
  gRNA
tgcacaacattccgaacatc

SEQ ID NO: 125016 - DNA, 20 bp, Artificial Sequence
  MKO10125016_B_Usp48
  gRNA
ccaatgccaaccaagcaatt

SEQ ID NO: 125017 - DNA, 20 bp, Artificial Sequence
  MKO10125017_B_Usp49
  gRNA
ccaataccattgagcccttt

SEQ ID NO: 125018 - DNA, 20 bp, Artificial Sequence
  MKO10125018_B_Usp49
  gRNA
ggctacaccttaaaagattc

SEQ ID NO: 125019 - DNA, 20 bp, Artificial Sequence
  MKO10125019_B_Usp49
  gRNA
aatgatctacagactacctc

SEQ ID NO: 125020 - DNA, 20 bp, Artificial Sequence
  MKO10125020_B_Usp4
  gRNA
cgatgagctggactatgtgc

SEQ ID NO: 125021 - DNA, 20 bp, Artificial Sequence
  MKO10125021_B_Usp4
  gRNA
tagcttgctcaactgctcat

SEQ ID NO: 125022 - DNA, 20 bp, Artificial Sequence
  MKO10125022_B_Usp4
  gRNA
cctggacctattgacaactc

SEQ ID NO: 125023 - DNA, 20 bp, Artificial Sequence
  MKO10125023_B_Usp50
  gRNA
tgtgaggaccacgatttcca

SEQ ID NO: 125024 - DNA, 20 bp, Artificial Sequence
  MKO10125024_B_Usp50
  gRNA
cctacctgatgacagatatg

SEQ ID NO: 125025 - DNA, 20 bp, Artificial Sequence
  MKO10125025_B_Usp50
  gRNA
acaatagatttggttgctcc

SEQ ID NO: 125026 - DNA, 20 bp, Artificial Sequence
  MKO10125026_B_Usp51
  gRNA
ctagtagtagcacatcgagt

SEQ ID NO: 125027 - DNA, 20 bp, Artificial Sequence
  MKO10125027_B_Usp51
  gRNA
gggtctaataagggtcccac

SEQ ID NO: 125028 - DNA, 20 bp, Artificial Sequence
  MKO10125028_B_Usp51
  gRNA
gctggacatgaccccgttct

SEQ ID NO: 125029 - DNA, 20 bp, Artificial Sequence
  MKO10125029_B_Usp53
  gRNA
atgagtcacacaagacttag

SEQ ID NO: 125030 - DNA, 20 bp, Artificial Sequence
  MKO10125030_B_Usp53
  gRNA
tgccatgactctgtatgagc

SEQ ID NO: 125031 - DNA, 20 bp, Artificial Sequence
  MKO10125031_B_Usp53
  gRNA
tcagagctctcaagcttctt

SEQ ID NO: 125032 - DNA, 20 bp, Artificial Sequence
  MKO10125032_B_Usp54
  gRNA
cccgctgccctttatccaga

SEQ ID NO: 125033 - DNA, 20 bp, Artificial Sequence
  MKO10125033_B_Usp54
  gRNA
aaagggcagcgggtcggacg

SEQ ID NO: 125034 - DNA, 20 bp, Artificial Sequence
  MKO10125034_B_Usp54
  gRNA
ttgtaagctgccgaaagcta

SEQ ID NO: 125035 - DNA, 20 bp, Artificial Sequence
  MKO10125035_B_Usp5
  gRNA
agatcgctcgggatgggttg

SEQ ID NO: 125036 - DNA, 20 bp, Artificial Sequence
  MKO10125036_B_Usp5
  gRNA
ttgggatggggaagtccgtc

SEQ ID NO: 125037 - DNA, 20 bp, Artificial Sequence
  MKO10125037_B_Usp5
  gRNA
cacctcggaagaagcccacc

SEQ ID NO: 125038 - DNA, 20 bp, Artificial Sequence
  MKO10125038_B_Usp6nl
  gRNA
cccataccataatgcagctg

SEQ ID NO: 125039 - DNA, 20 bp, Artificial Sequence
  MKO10125039_B_Usp6nl
  gRNA
aaatcgaaaggacttccaag

SEQ ID NO: 125040 - DNA, 20 bp, Artificial Sequence
  MKO10125040_B_Usp6nl
  gRNA
tctctccacagattccgacc

SEQ ID NO: 125041 - DNA, 20 bp, Artificial Sequence
  MKO10125041_B_Usp7
  gRNA
agaacaagtggctgattcgc

SEQ ID NO: 125042 - DNA, 20 bp, Artificial Sequence
  MKO10125042_B_Usp7
  gRNA
tcttcagcactgcttgtgcg

SEQ ID NO: 125043 - DNA, 20 bp, Artificial Sequence
  MKO10125043_B_Usp7
  gRNA
tgcctgtacaaaaacttcaa

SEQ ID NO: 125044 - DNA, 20 bp, Artificial Sequence
  MKO10125044_B_Usp8
  gRNA
acctgctgttgcttgaaatc

SEQ ID NO: 125045 - DNA, 20 bp, Artificial Sequence
  MKO10125045_B_Usp8
  gRNA
ttgcaataccctttgggttt

SEQ ID NO: 125046 - DNA, 20 bp, Artificial Sequence
  MKO10125046_B_Usp8
  gRNA
tctccgaaagccttaaacta

SEQ ID NO: 125047 - DNA, 20 bp, Artificial Sequence
  MKO10125047_B_Usp9x
  gRNA
aaaactggaacaacccatcg

SEQ ID NO: 125048 - DNA, 20 bp, Artificial Sequence
  MKO10125048_B_Usp9x
  gRNA
gctattgatcttagtaagaa

SEQ ID NO: 125049 - DNA, 20 bp, Artificial Sequence
  MKO10125049_B_Usp9x
  gRNA
agttagatgatatgatcaac

SEQ ID NO: 125050 - DNA, 20 bp, Artificial Sequence
  MKO10125050_B_Usp9y
  gRNA
ttgtgtggccaaattgtctc

SEQ ID NO: 125051 - DNA, 20 bp, Artificial Sequence
  MKO10125051_B_Usp9y
  gRNA
cacaaagctccaccaggcga

SEQ ID NO: 125052 - DNA, 20 bp, Artificial Sequence
  MKO10125052_B_Usp9y
  gRNA
tcaccttggccttgttcata

SEQ ID NO: 125053 - DNA, 20 bp, Artificial Sequence
  MKO10125053_B_Uspl1
  gRNA
tcaacacctccaagtgcacc

SEQ ID NO: 125054 - DNA, 20 bp, Artificial Sequence
  MKO10125054_B_Uspl1
  gRNA
ttaccaatattgttcctgag

SEQ ID NO: 125055 - DNA, 20 bp, Artificial Sequence
  MKO10125055_B_Uspl1
  gRNA
ggttcaagctttaacagtac

SEQ ID NO: 125056 - DNA, 20 bp, Artificial Sequence
  MKO10125056_B_Ust
  gRNA
ccatggaccacctcctagta

SEQ ID NO: 125057 - DNA, 20 bp, Artificial Sequence
  MKO10125057_B_Ust
  gRNA
tacaacagagttggcaagtg

SEQ ID NO: 125058 - DNA, 20 bp, Artificial Sequence
  MKO10125058_B_Ust
  gRNA
gacatgtctcgtgaataaat

SEQ ID NO: 125059 - DNA, 20 bp, Artificial Sequence
  MKO10125059_B_Utf1
  gRNA
gatgtcgcccaagtgcgtca

SEQ ID NO: 125060 - DNA, 20 bp, Artificial Sequence
  MKO10125060_B_Utf1
  gRNA
ggcgtgcgctgcgccgagtc

SEQ ID NO: 125061 - DNA, 20 bp, Artificial Sequence
  MKO10125061_B_Utf1
  gRNA
actcggcgcagcgcacgccc

SEQ ID NO: 125062 - DNA, 20 bp, Artificial Sequence
  MKO10125062_B_Utp11l
  gRNA
gaaatcagagctccatctgc

SEQ ID NO: 125063 - DNA, 20 bp, Artificial Sequence
  MKO10125063_B_Utp11l
  gRNA
aattctactataaaatgact

SEQ ID NO: 125064 - DNA, 20 bp, Artificial Sequence
  MKO10125064_B_Utp11l
  gRNA
gcttcttctgttgcttcccc

SEQ ID NO: 125065 - DNA, 20 bp, Artificial Sequence
  MKO10125065_B_Utp14a
  gRNA
gaaattgcctgagagatctg

SEQ ID NO: 125066 - DNA, 20 bp, Artificial Sequence
  MKO10125066_B_Utp14a
  gRNA
aatccattagatcatcctgc

SEQ ID NO: 125067 - DNA, 20 bp, Artificial Sequence
  MKO10125067_B_Utp14a
  gRNA
gaggtccaagcagatcagaa

SEQ ID NO: 125068 - DNA, 20 bp, Artificial Sequence
  MKO10125068_B_Utp14b
  gRNA
aaaaccctattgggtacatg

SEQ ID NO: 125069 - DNA, 20 bp, Artificial Sequence
  MKO10125069_B_Utp14b
  gRNA
gtgttccacatgtacccaat

SEQ ID NO: 125070 - DNA, 20 bp, Artificial Sequence
  MKO10125070_B_Utp14b
  gRNA
gtctgctacagcattatctt

SEQ ID NO: 125071 - DNA, 20 bp, Artificial Sequence
  MKO10125071_B_Utp15
  gRNA
aagaacattctgattacgtg

SEQ ID NO: 125072 - DNA, 20 bp, Artificial Sequence
  MKO10125072_B_Utp15
  gRNA
ccaaattccttaatctgaac

SEQ ID NO: 125073 - DNA, 20 bp, Artificial Sequence
  MKO10125073_B_Utp15
  gRNA
ttacaggctcttgagagtac

SEQ ID NO: 125074 - DNA, 20 bp, Artificial Sequence
  MKO10125074_B_Utp18
  gRNA
aagcggaggacatcttcaga

SEQ ID NO: 125075 - DNA, 20 bp, Artificial Sequence
  MKO10125075_B_Utp18
  gRNA
tcatcttcatccacccaaac

SEQ ID NO: 125076 - DNA, 20 bp, Artificial Sequence
  MKO10125076_B_Utp18
  gRNA
tcttagattccagcatgcca

SEQ ID NO: 125077 - DNA, 20 bp, Artificial Sequence
  MKO10125077_B_Utp20
  gRNA
agcttgcagttctgtcgata

SEQ ID NO: 125078 - DNA, 20 bp, Artificial Sequence
  MKO10125078_B_Utp20
  gRNA
cgtatctttacaagtacctg

SEQ ID NO: 125079 - DNA, 20 bp, Artificial Sequence
  MKO10125079_B_Utp20
  gRNA
tttggcctaccaacctcttt

SEQ ID NO: 125080 - DNA, 20 bp, Artificial Sequence
  MKO10125080_B_Utp23
  gRNA
tgcgaccccgcagcgccgcc

SEQ ID NO: 125081 - DNA, 20 bp, Artificial Sequence
  MKO10125081_B_Utp23
  gRNA
tctccccagatgtgtgttaa

SEQ ID NO: 125082 - DNA, 20 bp, Artificial Sequence
  MKO10125082_B_Utp23
  gRNA
actgattgcacagaaatgcc

SEQ ID NO: 125083 - DNA, 20 bp, Artificial Sequence
  MKO10125083_B_Utp3
  gRNA
cggctcagtgggccgccgtg

SEQ ID NO: 125084 - DNA, 20 bp, Artificial Sequence
  MKO10125084_B_Utp3
  gRNA
ttgtctcagcttcgtctacc

SEQ ID NO: 125085 - DNA, 20 bp, Artificial Sequence
  MKO10125085_B_Utp3
  gRNA
acgaaaatgaggacgacttg

SEQ ID NO: 125086 - DNA, 20 bp, Artificial Sequence
  MKO10125086_B_Utp6
  gRNA
tgataaagtcttccttgaga

SEQ ID NO: 125087 - DNA, 20 bp, Artificial Sequence
  MKO10125087_B_Utp6
  gRNA
ctgcagggctatcatcaaga

SEQ ID NO: 125088 - DNA, 20 bp, Artificial Sequence
  MKO10125088_B_Utp6
  gRNA
aacttactgctcttcttctc

SEQ ID NO: 125089 - DNA, 20 bp, Artificial Sequence
  MKO10125089_B_Utrn
  gRNA
caggtggacttggtgaatat

SEQ ID NO: 125090 - DNA, 20 bp, Artificial Sequence
  MKO10125090_B_Utrn
  gRNA
gagtaaccctaaagtcagct

SEQ ID NO: 125091 - DNA, 20 bp, Artificial Sequence
  MKO10125091_B_Utrn
  gRNA
gtttaaggcatgcacccttg

SEQ ID NO: 125092 - DNA, 20 bp, Artificial Sequence
  MKO10125092_B_Uts2b
  gRNA
tggagatcttcccagcaaac

SEQ ID NO: 125093 - DNA, 20 bp, Artificial Sequence
  MKO10125093_B_Uts2b
  gRNA
tctaagttcttccagtttgc

SEQ ID NO: 125094 - DNA, 20 bp, Artificial Sequence
  MKO10125094_B_Uts2b
  gRNA
agataaattgtctaaagcat

SEQ ID NO: 125095 - DNA, 20 bp, Artificial Sequence
  MKO10125095_B_Uts2r
  gRNA
gtgagcggcccgagtcctgc

SEQ ID NO: 125096 - DNA, 20 bp, Artificial Sequence
  MKO10125096_B_Uts2r
  gRNA
tgcagctgttgccgtaagtg

SEQ ID NO: 125097 - DNA, 20 bp, Artificial Sequence
  MKO10125097_B_Uts2r
  gRNA
tggagcgctggacggtgtcc

SEQ ID NO: 125098 - DNA, 20 bp, Artificial Sequence
  MKO10125098_B_Uts2
  gRNA
cctctcaccagtgtccgtga

SEQ ID NO: 125099 - DNA, 20 bp, Artificial Sequence
  MKO10125099_B_Uts2
  gRNA
gcagaccctgcgtcagacca

SEQ ID NO: 125100 - DNA, 20 bp, Artificial Sequence
  MKO10125100_B_Uts2
  gRNA
actgctgtcccttcccgtca

SEQ ID NO: 125101 - DNA, 20 bp, Artificial Sequence
  MKO10125101_B_Uty
  gRNA
ttactggaagattattcaaa

SEQ ID NO: 125102 - DNA, 20 bp, Artificial Sequence
  MKO10125102_B_Uty
  gRNA
tctactacaatgcatttcag

SEQ ID NO: 125103 - DNA, 20 bp, Artificial Sequence
  MKO10125103_B_Uty
  gRNA
tctttaatagtaaaagctga

SEQ ID NO: 125104 - DNA, 20 bp, Artificial Sequence
  MKO10125104_B_Uvrag
  gRNA
acagatgtatccagacgatc

SEQ ID NO: 125105 - DNA, 20 bp, Artificial Sequence
  MKO10125105_B_Uvrag
  gRNA
ccctcttaccttgtgttcac

SEQ ID NO: 125106 - DNA, 20 bp, Artificial Sequence
  MKO10125106_B_Uvrag
  gRNA
cggtgctccctgtgaacaca

SEQ ID NO: 125107 - DNA, 20 bp, Artificial Sequence
  MKO10125107_B_Uvssa
  gRNA
tgaggacgaacccagcgacc

SEQ ID NO: 125108 - DNA, 20 bp, Artificial Sequence
  MKO10125108_B_Uvssa
  gRNA
aacccagtccatggctccgc

SEQ ID NO: 125109 - DNA, 20 bp, Artificial Sequence
  MKO10125109_B_Uvssa
  gRNA
cttccatttccctcttagcc

SEQ ID NO: 125110 - DNA, 20 bp, Artificial Sequence
  MKO10125110_B_Uxs1
  gRNA
aacaggtctatccaggaaaa

SEQ ID NO: 125111 - DNA, 20 bp, Artificial Sequence
  MKO10125111_B_Uxs1
  gRNA
aagagagaaaatcagagatt

SEQ ID NO: 125112 - DNA, 20 bp, Artificial Sequence
  MKO10125112_B_Uxt
  gRNA
gttatatatgcaggtggatt

SEQ ID NO: 125113 - DNA, 20 bp, Artificial Sequence
  MKO10125113_B_Uxt
  gRNA
agatacttcacgcatctatg

SEQ ID NO: 125114 - DNA, 20 bp, Artificial Sequence
  MKO10125114_B_Uxt
  gRNA
ctgtgaggagagaactcttt

SEQ ID NO: 125115 - DNA, 20 bp, Artificial Sequence
  MKO10125115_B_V1ra8
  gRNA
attcctgaaagtcaacagtg

SEQ ID NO: 125116 - DNA, 20 bp, Artificial Sequence
  MKO10125116_B_V1ra8
  gRNA
tttccacactgttgactttc

SEQ ID NO: 125117 - DNA, 20 bp, Artificial Sequence
  MKO10125117_B_V1ra8
  gRNA
agctatgagcgacaagaatc

SEQ ID NO: 125118 - DNA, 20 bp, Artificial Sequence
  MKO10125118_B_V1rd18
  gRNA
gctatacttataaaagagta

SEQ ID NO: 125119 - DNA, 20 bp, Artificial Sequence
  MKO10125119_B_V1rd18
  gRNA
agttatataccagagaatgg

SEQ ID NO: 125120 - DNA, 20 bp, Artificial Sequence
  MKO10125120_B_V1rd18
  gRNA
attcctttacctgaattaac

SEQ ID NO: 125121 - DNA, 20 bp, Artificial Sequence
  MKO10125121_B_V1rd19
  gRNA
attcctttacctgaattaac

SEQ ID NO: 125122 - DNA, 20 bp, Artificial Sequence
  MKO10125122_B_V1rd19
  gRNA
acacttgttcctgttaattc

SEQ ID NO: 125123 - DNA, 20 bp, Artificial Sequence
  MKO10125123_B_V1rd19
  gRNA
tatattctcatcattccctg

SEQ ID NO: 125124 - DNA, 20 bp, Artificial Sequence
  MKO10125124_B_Vac14
  gRNA
gctcctggaccgcctcttaa

SEQ ID NO: 125125 - DNA, 20 bp, Artificial Sequence
  MKO10125125_B_Vac14
  gRNA
gatcacgtgcttgatttgca

SEQ ID NO: 125126 - DNA, 20 bp, Artificial Sequence
  MKO10125126_B_Vac14
  gRNA
gaccgatgaggccccctttc

SEQ ID NO: 125127 - DNA, 20 bp, Artificial Sequence
  MKO10125127_B_Vamp1
  gRNA
gcagtgctgccaagctaaaa

SEQ ID NO: 125128 - DNA, 20 bp, Artificial Sequence
  MKO10125128_B_Vamp1
  gRNA
agctatctgtgccatcatcg

SEQ ID NO: 125129 - DNA, 20 bp, Artificial Sequence
  MKO10125129_B_Vamp1
  gRNA
ctcccaacatgaccagtaac

SEQ ID NO: 125130 - DNA, 20 bp, Artificial Sequence
  MKO10125130_B_Vamp2
  gRNA
ccagtatttgcgcttgagct

SEQ ID NO: 125131 - DNA, 20 bp, Artificial Sequence
  MKO10125131_B_Vamp2
  gRNA
actcaccgatgatgatgatg

SEQ ID NO: 125132 - DNA, 20 bp, Artificial Sequence
  MKO10125132_B_Vamp2
  gRNA
ctcttagatgatgatcatct

SEQ ID NO: 125133 - DNA, 20 bp, Artificial Sequence
  MKO10125133_B_Vamp3
  gRNA
ctgcctgcagtgcatctgcg

SEQ ID NO: 125134 - DNA, 20 bp, Artificial Sequence
  MKO10125134_B_Vamp3
  gRNA
caggtctacaggtgtgcctt

SEQ ID NO: 125135 - DNA, 20 bp, Artificial Sequence
  MKO10125135_B_Vamp3
  gRNA
tgatgatgacaatgatcacc

SEQ ID NO: 125136 - DNA, 20 bp, Artificial Sequence
  MKO10125136_B_Vamp4
  gRNA
aatgcaagagaatattacaa

SEQ ID NO: 125137 - DNA, 20 bp, Artificial Sequence
  MKO10125137_B_Vamp4
  gRNA
ttcttaacagagaaatcttt

SEQ ID NO: 125138 - DNA, 20 bp, Artificial Sequence
  MKO10125138_B_Vamp4
  gRNA
agatgattcagatgaagaag

SEQ ID NO: 125139 - DNA, 20 bp, Artificial Sequence
  MKO10125139_B_Vamp5
  gRNA
agacgaccagcaacacaatc

SEQ ID NO: 125140 - DNA, 20 bp, Artificial Sequence
  MKO10125140_B_Vamp5
  gRNA
catgctcaacaatttcgaca

SEQ ID NO: 125141 - DNA, 20 bp, Artificial Sequence
  MKO10125141_B_Vamp5
  gRNA
ctttagcccagcagaagcgc

SEQ ID NO: 125142 - DNA, 20 bp, Artificial Sequence
  MKO10125142_B_Vamp7
  gRNA
gagtctccatcactttgtct

SEQ ID NO: 125143 - DNA, 20 bp, Artificial Sequence
  MKO10125143_B_Vamp7
  gRNA
aaagatacacaatcctgtct

SEQ ID NO: 125144 - DNA, 20 bp, Artificial Sequence
  MKO10125144_B_Vamp7
  gRNA
ctcttgaaccgtaagttgtc

SEQ ID NO: 125145 - DNA, 20 bp, Artificial Sequence
  MKO10125145_B_Vamp8
  gRNA
cagtggcaaaaagtataatg

SEQ ID NO: 125146 - DNA, 20 bp, Artificial Sequence
  MKO10125146_B_Vamp8
  gRNA
ccacctccgaaacaagacag

SEQ ID NO: 125147 - DNA, 20 bp, Artificial Sequence
  MKO10125147_B_Vamp8
  gRNA
gtggtccaggttctcccctc

SEQ ID NO: 125148 - DNA, 20 bp, Artificial Sequence
  MKO10125148_B_Vangl1
  gRNA
gtaggaatatccagaatacg

SEQ ID NO: 125149 - DNA, 20 bp, Artificial Sequence
  MKO10125149_B_Vangl1
  gRNA
ctctgcccgcacaggcgcag

SEQ ID NO: 125150 - DNA, 20 bp, Artificial Sequence
  MKO10125150_B_Vangl1
  gRNA
gaacttcctctgcgcctgtg

SEQ ID NO: 125151 - DNA, 20 bp, Artificial Sequence
  MKO10125151_B_Vangl2
  gRNA
tgacctcacgcgcatcgcca

SEQ ID NO: 125152 - DNA, 20 bp, Artificial Sequence
  MKO10125152_B_Vangl2
  gRNA
ggatccacactgccactcgc

SEQ ID NO: 125153 - DNA, 20 bp, Artificial Sequence
  MKO10125153_B_Vangl2
  gRNA
ccacaatgagtactactacg

SEQ ID NO: 125154 - DNA, 20 bp, Artificial Sequence
  MKO10125154_B_Vapa
  gRNA
gggtcaattgtgactgtttc

SEQ ID NO: 125155 - DNA, 20 bp, Artificial Sequence
  MKO10125155_B_Vapa
  gRNA
gccgaatgaaaatgataagc

SEQ ID NO: 125156 - DNA, 20 bp, Artificial Sequence
  MKO10125156_B_Vapa
  gRNA
ttagaatccattaattcatc

SEQ ID NO: 125157 - DNA, 20 bp, Artificial Sequence
  MKO10125157_B_Vapb
  gRNA
ggggcctctctcaatgtgtc

SEQ ID NO: 125158 - DNA, 20 bp, Artificial Sequence
  MKO10125158_B_Vapb
  gRNA
ggcatcaatgaccccactgt

SEQ ID NO: 125159 - DNA, 20 bp, Artificial Sequence
  MKO10125159_B_Vapb
  gRNA
gcctccatatcagaagtgtc

SEQ ID NO: 125160 - DNA, 20 bp, Artificial Sequence
  MKO10125160_B_Vars2
  gRNA
accagcgcacaagtgcgtcc

SEQ ID NO: 125161 - DNA, 20 bp, Artificial Sequence
  MKO10125161_B_Vars2
  gRNA
cgcgcactgacctgatactc

SEQ ID NO: 125162 - DNA, 20 bp, Artificial Sequence
  MKO10125162_B_Vars2
  gRNA
tccaggacgcacttgtgcgc

SEQ ID NO: 125163 - DNA, 20 bp, Artificial Sequence
  MKO10125163_B_Vars
  gRNA
gctgcggctgcacacctacc

SEQ ID NO: 125164 - DNA, 20 bp, Artificial Sequence
  MKO10125164_B_Vars
  gRNA
ttctggacccttctgcccgc

SEQ ID NO: 125165 - DNA, 20 bp, Artificial Sequence
  MKO10125165_B_Vars
  gRNA
acccagcagcagcccccgca

SEQ ID NO: 125166 - DNA, 20 bp, Artificial Sequence
  MKO10125166_B_Vash1
  gRNA
gacgcccgtccctgagcgcc

SEQ ID NO: 125167 - DNA, 20 bp, Artificial Sequence
  MKO10125167_B_Vash1
  gRNA
ttctcataggctgatggacc

SEQ ID NO: 125168 - DNA, 20 bp, Artificial Sequence
  MKO10125168_B_Vash1
  gRNA
gtccccaggtacaatcacac

SEQ ID NO: 125169 - DNA, 20 bp, Artificial Sequence
  MKO10125169_B_Vash2
  gRNA
acaacctgtagtttgggacc

SEQ ID NO: 125170 - DNA, 20 bp, Artificial Sequence
  MKO10125170_B_Vash2
  gRNA
caggttaatggagacagcga

SEQ ID NO: 125171 - DNA, 20 bp, Artificial Sequence
  MKO10125171_B_Vash2
  gRNA
tcgcacagatacaaccacac

SEQ ID NO: 125172 - DNA, 20 bp, Artificial Sequence
  MKO10125172_B_Vasn
  gRNA
caggccacggaaggtctcgt

SEQ ID NO: 125173 - DNA, 20 bp, Artificial Sequence
  MKO10125173_B_Vasn
  gRNA
tcgatagtacggtggaggcc

SEQ ID NO: 125174 - DNA, 20 bp, Artificial Sequence
  MKO10125174_B_Vasn
  gRNA
ccggttggatgtggcgaatt

SEQ ID NO: 125175 - DNA, 20 bp, Artificial Sequence
  MKO10125175_B_Vasp
  gRNA
cctcaacttcggcagcaagg

SEQ ID NO: 125176 - DNA, 20 bp, Artificial Sequence
  MKO10125176_B_Vasp
  gRNA
gggaccattctgggcagacc

SEQ ID NO: 125177 - DNA, 20 bp, Artificial Sequence
  MKO10125177_B_Vasp
  gRNA
catcacctgcattggagacc

SEQ ID NO: 125178 - DNA, 20 bp, Artificial Sequence
  MKO10125178_B_Vat1l
  gRNA
tgccaggattcgaatgttct

SEQ ID NO: 125179 - DNA, 20 bp, Artificial Sequence
  MKO10125179_B_Vat1l
  gRNA
gtccccaatgtgaccgtctt

SEQ ID NO: 125180 - DNA, 20 bp, Artificial Sequence
  MKO10125180_B_Vat1l
  gRNA
cagaaatgcagactacgtgc

SEQ ID NO: 125181 - DNA, 20 bp, Artificial Sequence
  MKO10125181_B_Vat1
  gRNA
ctaccacacgactgactatg

SEQ ID NO: 125182 - DNA, 20 bp, Artificial Sequence
  MKO10125182_B_Vat1
  gRNA
cgtccacatagtcagtcgtg

SEQ ID NO: 125183 - DNA, 20 bp, Artificial Sequence
  MKO10125183_B_Vat1
  gRNA
aacctcgaattgactcagtc

SEQ ID NO: 125184 - DNA, 20 bp, Artificial Sequence
  MKO10125184_B_Vav1
  gRNA
ctcccagccaccgtgtgacc

SEQ ID NO: 125185 - DNA, 20 bp, Artificial Sequence
  MKO10125185_B_Vav1
  gRNA
ctcactcaatctggtctgaa

SEQ ID NO: 125186 - DNA, 20 bp, Artificial Sequence
  MKO10125186_B_Vav1
  gRNA
gcactgtcgccagagctcca

SEQ ID NO: 125187 - DNA, 20 bp, Artificial Sequence
  MKO10125187_B_Vav2
  gRNA
agtcgtagatgtcctcaccc

SEQ ID NO: 125188 - DNA, 20 bp, Artificial Sequence
  MKO10125188_B_Vav2
  gRNA
ctctttgatgtccgagactt

SEQ ID NO: 125189 - DNA, 20 bp, Artificial Sequence
  MKO10125189_B_Vav2
  gRNA
cactcaccttcccgaagtct

SEQ ID NO: 125190 - DNA, 20 bp, Artificial Sequence
  MKO10125190_B_Vav3
  gRNA
acttcggagagcttccagac

SEQ ID NO: 125191 - DNA, 20 bp, Artificial Sequence
  MKO10125191_B_Vav3
  gRNA
ttcttacagaaacggaccaa

SEQ ID NO: 125192 - DNA, 20 bp, Artificial Sequence
  MKO10125192_B_Vav3
  gRNA
agggccattcaaaccaccag

SEQ ID NO: 125193 - DNA, 20 bp, Artificial Sequence
  MKO10125193_B_Vax1
  gRNA
gttccagcgttgccaatacg

SEQ ID NO: 125194 - DNA, 20 bp, Artificial Sequence
  MKO10125194_B_Vax1
  gRNA
gagccgcagcacgctgcacg

SEQ ID NO: 125195 - DNA, 20 bp, Artificial Sequence
  MKO10125195_B_Vax1
  gRNA
tctcccggcccaccacgtat

SEQ ID NO: 125196 - DNA, 20 bp, Artificial Sequence
  MKO10125196_B_Vax2
  gRNA
tggcagaggggacgacgccg

SEQ ID NO: 125197 - DNA, 20 bp, Artificial Sequence
  MKO10125197_B_Vax2
  gRNA
acgcctcaatccaatgccct

SEQ ID NO: 125198 - DNA, 20 bp, Artificial Sequence
  MKO10125198_B_Vax2
  gRNA
gggcaagacaatttcccgaa

SEQ ID NO: 125199 - DNA, 20 bp, Artificial Sequence
  MKO10125199_B_Vbp1
  gRNA
gttccataaacttatacttc

SEQ ID NO: 125200 - DNA, 20 bp, Artificial Sequence
  MKO10125200_B_Vbp1
  gRNA
atatgatattgatgaagctc

SEQ ID NO: 125201 - DNA, 20 bp, Artificial Sequence
  MKO10125201_B_Vbp1
  gRNA
taaaaggatactgacttctg

SEQ ID NO: 125202 - DNA, 20 bp, Artificial Sequence
  MKO10125202_B_Vcam1
  gRNA
tggtagaccctcgctggaac

SEQ ID NO: 125203 - DNA, 20 bp, Artificial Sequence
  MKO10125203_B_Vcam1
  gRNA
aacctttactcccgtcattg

SEQ ID NO: 125204 - DNA, 20 bp, Artificial Sequence
  MKO10125204_B_Vcam1
  gRNA
gacaatgacctgttccagcg

SEQ ID NO: 125205 - DNA, 20 bp, Artificial Sequence
  MKO10125205_B_Vcan
  gRNA
ctggggagagcggaatccat

SEQ ID NO: 125206 - DNA, 20 bp, Artificial Sequence
  MKO10125206_B_Vcan
  gRNA
gcagctgtttgccgcctatg

SEQ ID NO: 125207 - DNA, 20 bp, Artificial Sequence
  MKO10125207_B_Vcan
  gRNA
gctccccgagagggctgtta

SEQ ID NO: 125208 - DNA, 20 bp, Artificial Sequence
  MKO10125208_B_Vcl
  gRNA
ttcaggttcgtaaaattatt

SEQ ID NO: 125209 - DNA, 20 bp, Artificial Sequence
  MKO10125209_B_Vcl
  gRNA
gttactcacttaataaaggc

SEQ ID NO: 125210 - DNA, 20 bp, Artificial Sequence
  MKO10125210_B_Vcl
  gRNA
tgccccaggaatgactaaga

SEQ ID NO: 125211 - DNA, 20 bp, Artificial Sequence
  MKO10125211_B_Vcpip1
  gRNA
gagcttattcgaatagctcc

SEQ ID NO: 125212 - DNA, 20 bp, Artificial Sequence
  MKO10125212_B_Vcpip1
  gRNA
tgtagaatacaccaccctgc

SEQ ID NO: 125213 - DNA, 20 bp, Artificial Sequence
  MKO10125213_B_Vcpip1
  gRNA
acttcctcacatgttccagc

SEQ ID NO: 125214 - DNA, 20 bp, Artificial Sequence
  MKO10125214_B_Vcpkmt
  gRNA
atgaacaagcatcttgtgac

SEQ ID NO: 125215 - DNA, 20 bp, Artificial Sequence
  MKO10125215_B_Vcpkmt
  gRNA
caaagtcaaagtctagctgc

SEQ ID NO: 125216 - DNA, 20 bp, Artificial Sequence
  MKO10125216_B_Vcpkmt
  gRNA
cactgatcttgaagagctgc

SEQ ID NO: 125217 - DNA, 20 bp, Artificial Sequence
  MKO10125217_B_Vcp
  gRNA
aacagaagaaccgacccaat

SEQ ID NO: 125218 - DNA, 20 bp, Artificial Sequence
  MKO10125218_B_Vcp
  gRNA
cacgctgttatcttcattga

SEQ ID NO: 125219 - DNA, 20 bp, Artificial Sequence
  MKO10125219_B_Vcp
  gRNA
gatgaactgcagttgttccg

SEQ ID NO: 125220 - DNA, 20 bp, Artificial Sequence
  MKO10125220_B_Vdac1
  gRNA
agccaagcaccagagcgccc

SEQ ID NO: 125221 - DNA, 20 bp, Artificial Sequence
  MKO10125221_B_Vdac1
  gRNA
tttaaggaatttaccagctc

SEQ ID NO: 125222 - DNA, 20 bp, Artificial Sequence
  MKO10125222_B_Vdac1
  gRNA
ttccaggctgccgttcactt

SEQ ID NO: 125223 - DNA, 20 bp, Artificial Sequence
  MKO10125223_B_Vdac2
  gRNA
gtgaagacgaagtcatgcag

SEQ ID NO: 125224 - DNA, 20 bp, Artificial Sequence
  MKO10125224_B_Vdac2
  gRNA
cctccaccctatgctgacct

SEQ ID NO: 125225 - DNA, 20 bp, Artificial Sequence
  MKO10125225_B_Vdac2
  gRNA
agagattgcaattgaagacc

SEQ ID NO: 125226 - DNA, 20 bp, Artificial Sequence
  MKO10125226_B_Vdac3
  gRNA
tattgtctgtattccacttt

SEQ ID NO: 125227 - DNA, 20 bp, Artificial Sequence
  MKO10125227_B_Vdac3
  gRNA
ccctgtgtttggtacaaata

SEQ ID NO: 125228 - DNA, 20 bp, Artificial Sequence
  MKO10125228_B_Vdac3
  gRNA
actgatacagggaaagcatc

SEQ ID NO: 125229 - DNA, 20 bp, Artificial Sequence
  MKO10125229_B_Vdr
  gRNA
tcttgtggtgggcatcgagc

SEQ ID NO: 125230 - DNA, 20 bp, Artificial Sequence
  MKO10125230_B_Vdr
  gRNA
accccacctatgccgacttc

SEQ ID NO: 125231 - DNA, 20 bp, Artificial Sequence
  MKO10125231_B_Vdr
  gRNA
attcgtgcagacgtaagtac

SEQ ID NO: 125232 - DNA, 20 bp, Artificial Sequence
  MKO10125232_B_Vegfa
  gRNA
ttcggaggcccgtccggggc

SEQ ID NO: 125233 - DNA, 20 bp, Artificial Sequence
  MKO10125233_B_Vegfa
  gRNA
caggctgcacccacgacaga

SEQ ID NO: 125234 - DNA, 20 bp, Artificial Sequence
  MKO10125234_B_Vegfa
  gRNA
cttctgctctccttctgtcg

SEQ ID NO: 125235 - DNA, 20 bp, Artificial Sequence
  MKO10125235_B_Vegfb
  gRNA
gggccatcaaactgggacac

SEQ ID NO: 125236 - DNA, 20 bp, Artificial Sequence
  MKO10125236_B_Vegfb
  gRNA
gcccctgtgtcccagtttga

SEQ ID NO: 125237 - DNA, 20 bp, Artificial Sequence
  MKO10125237_B_Vegfb
  gRNA
gctggcacctgcattcacat

SEQ ID NO: 125238 - DNA, 20 bp, Artificial Sequence
  MKO10125238_B_Vegfc
  gRNA
taactacatgtgccgatgcc

SEQ ID NO: 125239 - DNA, 20 bp, Artificial Sequence
  MKO10125239_B_Vegfc
  gRNA
acatctatacacacctcacg

SEQ ID NO: 125240 - DNA, 20 bp, Artificial Sequence
  MKO10125240_B_Vegfc
  gRNA
actcactgtggtaatgttgc

SEQ ID NO: 125241 - DNA, 20 bp, Artificial Sequence
  MKO10125241_B_Veph1
  gRNA
cagcagatccgccttggtga

SEQ ID NO: 125242 - DNA, 20 bp, Artificial Sequence
  MKO10125242_B_Veph1
  gRNA
tacagatttcaaccaccgcc

SEQ ID NO: 125243 - DNA, 20 bp, Artificial Sequence
  MKO10125243_B_Veph1
  gRNA
cctggccttgatgtctcaat

SEQ ID NO: 125244 - DNA, 20 bp, Artificial Sequence
  MKO10125244_B_Vezf1
  gRNA
tggaatagcgtgcatgagtg

SEQ ID NO: 125245 - DNA, 20 bp, Artificial Sequence
  MKO10125245_B_Vezf1
  gRNA
acgtgttacagttgatactt

SEQ ID NO: 125246 - DNA, 20 bp, Artificial Sequence
  MKO10125246_B_Vezf1
  gRNA
aacaacaacatgtgacaagc

SEQ ID NO: 125247 - DNA, 20 bp, Artificial Sequence
  MKO10125247_B_Vezt
  gRNA
tcatcatgtttcccacgtgc

SEQ ID NO: 125248 - DNA, 20 bp, Artificial Sequence
  MKO10125248_B_Vezt
  gRNA
aactcacagagtaaatcccc

SEQ ID NO: 125249 - DNA, 20 bp, Artificial Sequence
  MKO10125249_B_Vezt
  gRNA
agatgacttactccataagt

SEQ ID NO: 125250 - DNA, 20 bp, Artificial Sequence
  MKO10125250_B_Vgf
  gRNA
cagccgctcttcttgcgccg

SEQ ID NO: 125251 - DNA, 20 bp, Artificial Sequence
  MKO10125251_B_Vgf
  gRNA
gaagaacgcccctcccgagc

SEQ ID NO: 125252 - DNA, 20 bp, Artificial Sequence
  MKO10125252_B_Vgf
  gRNA
ccctcgagccggcgcacctt

SEQ ID NO: 125253 - DNA, 20 bp, Artificial Sequence
  MKO10125253_B_Vgll1
  gRNA
actccagaggtctaccctga

SEQ ID NO: 125254 - DNA, 20 bp, Artificial Sequence
  MKO10125254_B_Vgll1
  gRNA
cctactttcatcatcaagac

SEQ ID NO: 125255 - DNA, 20 bp, Artificial Sequence
  MKO10125255_B_Vgll1
  gRNA
agaactgaaagacgtgcctg

SEQ ID NO: 125256 - DNA, 20 bp, Artificial Sequence
  MKO10125256_B_Vgll2
  gRNA
cccgcaccatccctatgcgc

SEQ ID NO: 125257 - DNA, 20 bp, Artificial Sequence
  MKO10125257_B_Vgll2
  gRNA
agcctactactcaaaaatgc

SEQ ID NO: 125258 - DNA, 20 bp, Artificial Sequence
  MKO10125258_B_Vgll2
  gRNA
ttgatgtactcagcttcggg

SEQ ID NO: 125259 - DNA, 20 bp, Artificial Sequence
  MKO10125259_B_Vgll3
  gRNA
ctcgcactgatggcattagc

SEQ ID NO: 125260 - DNA, 20 bp, Artificial Sequence
  MKO10125260_B_Vgll3
  gRNA
caaattcttacctcgccata

SEQ ID NO: 125261 - DNA, 20 bp, Artificial Sequence
  MKO10125261_B_Vgll3
  gRNA
gaaagaccagcctgccgaga

SEQ ID NO: 125262 - DNA, 20 bp, Artificial Sequence
  MKO10125262_B_Vgll4
  gRNA
tgtgattacctgtgcatccg

SEQ ID NO: 125263 - DNA, 20 bp, Artificial Sequence
  MKO10125263_B_Vgll4
  gRNA
ggagccgcagtcccattgaa

SEQ ID NO: 125264 - DNA, 20 bp, Artificial Sequence
  MKO10125264_B_Vgll4
  gRNA
cactgtcccatcgcacacag

SEQ ID NO: 125265 - DNA, 20 bp, Artificial Sequence
  MKO10125265_B_Vhl
  gRNA
gtgccatccctcaatgtcga

SEQ ID NO: 125266 - DNA, 20 bp, Artificial Sequence
  MKO10125266_B_Vhl
  gRNA
tgtatgtccttccgcacact

SEQ ID NO: 125267 - DNA, 20 bp, Artificial Sequence
  MKO10125267_B_Vhl
  gRNA
catcgtcaggtcactctatg

SEQ ID NO: 125268 - DNA, 20 bp, Artificial Sequence
  MKO10125268_B_Vil1
  gRNA
ttacccgaagtctctccatg

SEQ ID NO: 125269 - DNA, 20 bp, Artificial Sequence
  MKO10125269_B_Vil1
  gRNA
tgggccagagagtaaccgca

SEQ ID NO: 125270 - DNA, 20 bp, Artificial Sequence
  MKO10125270_B_Vil1
  gRNA
tctcgttgccttgaacctcg

SEQ ID NO: 125271 - DNA, 20 bp, Artificial Sequence
  MKO10125271_B_Vill
  gRNA
gattcagtgacctgcactac

SEQ ID NO: 125272 - DNA, 20 bp, Artificial Sequence
  MKO10125272_B_Vill
  gRNA
ctcagtaatccatatttgca

SEQ ID NO: 125273 - DNA, 20 bp, Artificial Sequence
  MKO10125273_B_Vill
  gRNA
aaattcccatgagccctttc

SEQ ID NO: 125274 - DNA, 20 bp, Artificial Sequence
  MKO10125274_B_Vimp
  gRNA
agctgctcgtttgagaatgc

SEQ ID NO: 125275 - DNA, 20 bp, Artificial Sequence
  MKO10125275_B_Vimp
  gRNA
cccttcgactgagggctttg

SEQ ID NO: 125276 - DNA, 20 bp, Artificial Sequence
  MKO10125276_B_Vimp
  gRNA
ttcttaccacctcctcgcaa

SEQ ID NO: 125277 - DNA, 20 bp, Artificial Sequence
  MKO10125277_B_Vim
  gRNA
tggaaacgtccacatcgatc

SEQ ID NO: 125278 - DNA, 20 bp, Artificial Sequence
  MKO10125278_B_Vim
  gRNA
tcttgaccttgaacggaaag

SEQ ID NO: 125279 - DNA, 20 bp, Artificial Sequence
  MKO10125279_B_Vim
  gRNA
aggattccactttccgttca

SEQ ID NO: 125280 - DNA, 20 bp, Artificial Sequence
  MKO10125280_B_Vipas39
  gRNA
ctccagatgaaccggacaaa

SEQ ID NO: 125281 - DNA, 20 bp, Artificial Sequence
  MKO10125281_B_Vipas39
  gRNA
gagtagcgggtcaacccctg

SEQ ID NO: 125282 - DNA, 20 bp, Artificial Sequence
  MKO10125282_B_Vipas39
  gRNA
gaatagccttcgagacatcg

SEQ ID NO: 125283 - DNA, 20 bp, Artificial Sequence
  MKO10125283_B_Vipr1
  gRNA
agccgtaactgcactgaaga

SEQ ID NO: 125284 - DNA, 20 bp, Artificial Sequence
  MKO10125284_B_Vipr1
  gRNA
agccttcttcagtgcagtta

SEQ ID NO: 125285 - DNA, 20 bp, Artificial Sequence
  MKO10125285_B_Vipr1
  gRNA
gaacaggctcaagatagcca

SEQ ID NO: 125286 - DNA, 20 bp, Artificial Sequence
  MKO10125286_B_Vipr2
  gRNA
ccacacgcatctatgaaatc

SEQ ID NO: 125287 - DNA, 20 bp, Artificial Sequence
  MKO10125287_B_Vipr2
  gRNA
ttctagcctgcagcggtgtc

SEQ ID NO: 125288 - DNA, 20 bp, Artificial Sequence
  MKO10125288_B_Vipr2
  gRNA
gcataattatctgcctcttc

SEQ ID NO: 125289 - DNA, 20 bp, Artificial Sequence
  MKO10125289_B_Vip
  gRNA
gggtcacctgctccttcaaa

SEQ ID NO: 125290 - DNA, 20 bp, Artificial Sequence
  MKO10125290_B_Vip
  gRNA
tacctgaactccatcctgaa

SEQ ID NO: 125291 - DNA, 20 bp, Artificial Sequence
  MKO10125291_B_Vip
  gRNA
caccctattatgatgtgtca

SEQ ID NO: 125292 - DNA, 20 bp, Artificial Sequence
  MKO10125292_B_Vit
  gRNA
aaataccatgtttacggcac

SEQ ID NO: 125293 - DNA, 20 bp, Artificial Sequence
  MKO10125293_B_Vit
  gRNA
gatgaatatgtaagagtcga

SEQ ID NO: 125294 - DNA, 20 bp, Artificial Sequence
  MKO10125294_B_Vit
  gRNA
aaaactgcagctgctaaagc

SEQ ID NO: 125295 - DNA, 20 bp, Artificial Sequence
  MKO10125295_B_Vkorc1l1
  gRNA
ataagtccaaagacactgtt

SEQ ID NO: 125296 - DNA, 20 bp, Artificial Sequence
  MKO10125296_B_Vkorc1l1
  gRNA
aaccagccaaacagtgtctt

SEQ ID NO: 125297 - DNA, 20 bp, Artificial Sequence
  MKO10125297_B_Vkorc1l1
  gRNA
agccagcgcagttgcagctc

SEQ ID NO: 125298 - DNA, 20 bp, Artificial Sequence
  MKO10125298_B_Vkorc1
  gRNA
caggtacacggaaccagcga

SEQ ID NO: 125299 - DNA, 20 bp, Artificial Sequence
  MKO10125299_B_Vkorc1
  gRNA
ctcacctaacaacagctgta

SEQ ID NO: 125300 - DNA, 20 bp, Artificial Sequence
  MKO10125300_B_Vkorc1
  gRNA
tacaccttacagctgttgtt

SEQ ID NO: 125301 - DNA, 20 bp, Artificial Sequence
  MKO10125301_B_Vldlr
  gRNA
gcatgggcacgtccgcgcgc

SEQ ID NO: 125302 - DNA, 20 bp, Artificial Sequence
  MKO10125302_B_Vldlr
  gRNA
ggccatttgtgcactgaaac

SEQ ID NO: 125303 - DNA, 20 bp, Artificial Sequence
  MKO10125303_B_Vldlr
  gRNA
cggggatacactgagtagaa

SEQ ID NO: 125304 - DNA, 20 bp, Artificial Sequence
  MKO10125304_B_Vma21
  gRNA
cttcacagctttaatgatca

SEQ ID NO: 125305 - DNA, 20 bp, Artificial Sequence
  MKO10125305_B_Vma21
  gRNA
ctgtcgtgagccttcattcc

SEQ ID NO: 125306 - DNA, 20 bp, Artificial Sequence
  MKO10125306_B_Vma21
  gRNA
tgctgttgttgctgttcatg

SEQ ID NO: 125307 - DNA, 20 bp, Artificial Sequence
  MKO10125307_B_Vmac
  gRNA
cactcgccaccgaccacccc

SEQ ID NO: 125308 - DNA, 20 bp, Artificial Sequence
  MKO10125308_B_Vmac
  gRNA
tctccagctccgctgcgcgt

SEQ ID NO: 125309 - DNA, 20 bp, Artificial Sequence
  MKO10125309_B_Vmac
  gRNA
agctgggtcgcgccaaggac

SEQ ID NO: 125310 - DNA, 20 bp, Artificial Sequence
  MKO10125310_B_Vmn1r-ps103
  gRNA
cccaaggcaatagaaacttt

SEQ ID NO: 125311 - DNA, 20 bp, Artificial Sequence
  MKO10125311_B_Vmn1r-ps103
  gRNA
tacttatgatagaatgtatt

SEQ ID NO: 125312 - DNA, 20 bp, Artificial Sequence
  MKO10125312_B_Vmn1r-ps103
  gRNA
ttgagtttgaaaagcagtca

SEQ ID NO: 125313 - DNA, 20 bp, Artificial Sequence
  MKO10125313_B_Vmn1r100
  gRNA
taacatccacattccaatta

SEQ ID NO: 125314 - DNA, 20 bp, Artificial Sequence
  MKO10125314_B_Vmn1r100
  gRNA
gtgttattgtctattatctg

SEQ ID NO: 125315 - DNA, 20 bp, Artificial Sequence
  MKO10125315_B_Vmn1r100
  gRNA
aacttgttctgttccacttc

SEQ ID NO: 125316 - DNA, 20 bp, Artificial Sequence
  MKO10125316_B_Vmn1r101
  gRNA
catcataggcaaactgcaag

SEQ ID NO: 125317 - DNA, 20 bp, Artificial Sequence
  MKO10125317_B_Vmn1r101
  gRNA
gttattcttcttacagttgt

SEQ ID NO: 125318 - DNA, 20 bp, Artificial Sequence
  MKO10125318_B_Vmn1r101
  gRNA
gcctacactgaatccagaag

SEQ ID NO: 125319 - DNA, 20 bp, Artificial Sequence
  MKO10125319_B_Vmn1r103
  gRNA
gtgttattgtctgttatctg

SEQ ID NO: 125320 - DNA, 20 bp, Artificial Sequence
  MKO10125320_B_Vmn1r103
  gRNA
aacttgttctgttccacttc

SEQ ID NO: 125321 - DNA, 20 bp, Artificial Sequence
  MKO10125321_B_Vmn1r103
  gRNA
cagtgaccttaattgaaatg

SEQ ID NO: 125322 - DNA, 20 bp, Artificial Sequence
  MKO10125322_B_Vmn1r104
  gRNA
attattcctgctacagttgt

SEQ ID NO: 125323 - DNA, 20 bp, Artificial Sequence
  MKO10125323_B_Vmn1r104
  gRNA
gtgttattgtctgttatctg

SEQ ID NO: 125324 - DNA, 20 bp, Artificial Sequence
  MKO10125324_B_Vmn1r104
  gRNA
taacatccacattccaatta

SEQ ID NO: 125325 - DNA, 20 bp, Artificial Sequence
  MKO10125325_B_Vmn1r107
  gRNA
attattcctgctacagttgt

SEQ ID NO: 125326 - DNA, 20 bp, Artificial Sequence
  MKO10125326_B_Vmn1r107
  gRNA
gtgttattgtctgttatctg

SEQ ID NO: 125327 - DNA, 20 bp, Artificial Sequence
  MKO10125327_B_Vmn1r107
  gRNA
taacatccacattccaatta

SEQ ID NO: 125328 - DNA, 20 bp, Artificial Sequence
  MKO10125328_B_Vmn1r10
  gRNA
ccaaatgcataagaaaacac

SEQ ID NO: 125329 - DNA, 20 bp, Artificial Sequence
  MKO10125329_B_Vmn1r10
  gRNA
cacccagaccatcgtgctgc

SEQ ID NO: 125330 - DNA, 20 bp, Artificial Sequence
  MKO10125330_B_Vmn1r10
  gRNA
cagtcccaatacctctttga

SEQ ID NO: 125331 - DNA, 20 bp, Artificial Sequence
  MKO10125331_B_Vmn1r111
  gRNA
gtgttattgtctgttatctg

SEQ ID NO: 125332 - DNA, 20 bp, Artificial Sequence
  MKO10125332_B_Vmn1r111
  gRNA
gtaacatccacattccaatt

SEQ ID NO: 125333 - DNA, 20 bp, Artificial Sequence
  MKO10125333_B_Vmn1r111
  gRNA
cagtgaccctaattggaatg

SEQ ID NO: 125334 - DNA, 20 bp, Artificial Sequence
  MKO10125334_B_Vmn1r112
  gRNA
attattcttgctacagttgt

SEQ ID NO: 125335 - DNA, 20 bp, Artificial Sequence
  MKO10125335_B_Vmn1r112
  gRNA
cagtgaccttaattggaatg

SEQ ID NO: 125336 - DNA, 20 bp, Artificial Sequence
  MKO10125336_B_Vmn1r112
  gRNA
taacatccacattccaatta

SEQ ID NO: 125337 - DNA, 20 bp, Artificial Sequence
  MKO10125337_B_Vmn1r113
  gRNA
tgacaaactggtggacactc

SEQ ID NO: 125338 - DNA, 20 bp, Artificial Sequence
  MKO10125338_B_Vmn1r113
  gRNA
agaaatgagtatgcataaaa

SEQ ID NO: 125339 - DNA, 20 bp, Artificial Sequence
  MKO10125339_B_Vmn1r113
  gRNA
gccctctccatgtctgttca

SEQ ID NO: 125340 - DNA, 20 bp, Artificial Sequence
  MKO10125340_B_Vmn1r114
  gRNA
gttattcttgttacggttgt

SEQ ID NO: 125341 - DNA, 20 bp, Artificial Sequence
  MKO10125341_B_Vmn1r114
  gRNA
tcttacagtgaatccagaag

SEQ ID NO: 125342 - DNA, 20 bp, Artificial Sequence
  MKO10125342_B_Vmn1r114
  gRNA
taacatccacattccaatta

SEQ ID NO: 125343 - DNA, 20 bp, Artificial Sequence
  MKO10125343_B_Vmn1r115
  gRNA
accctctcaatgtctgatca

SEQ ID NO: 125344 - DNA, 20 bp, Artificial Sequence
  MKO10125344_B_Vmn1r115
  gRNA
tgagtagtactccattgtgt

SEQ ID NO: 125345 - DNA, 20 bp, Artificial Sequence
  MKO10125345_B_Vmn1r115
  gRNA
taacatccacattccaatta

SEQ ID NO: 125346 - DNA, 20 bp, Artificial Sequence
  MKO10125346_B_Vmn1r116
  gRNA
gcctacaatgaatccagaag

SEQ ID NO: 125347 - DNA, 20 bp, Artificial Sequence
  MKO10125347_B_Vmn1r116
  gRNA
attattcctgctacagttgt

SEQ ID NO: 125348 - DNA, 20 bp, Artificial Sequence
  MKO10125348_B_Vmn1r116
  gRNA
gtgttattgtctgttatctg

SEQ ID NO: 125349 - DNA, 20 bp, Artificial Sequence
  MKO10125349_B_Vmn1r117
  gRNA
gcccacactgaatccagaag

SEQ ID NO: 125350 - DNA, 20 bp, Artificial Sequence
  MKO10125350_B_Vmn1r117
  gRNA
gttattcttcttacagttgt

SEQ ID NO: 125351 - DNA, 20 bp, Artificial Sequence
  MKO10125351_B_Vmn1r117
  gRNA
gtgttattgtctgttatctg

SEQ ID NO: 125352 - DNA, 20 bp, Artificial Sequence
  MKO10125352_B_Vmn1r118
  gRNA
gtgttattgtctgttatctg

SEQ ID NO: 125353 - DNA, 20 bp, Artificial Sequence
  MKO10125353_B_Vmn1r118
  gRNA
gtaacatccacattccaatt

SEQ ID NO: 125354 - DNA, 20 bp, Artificial Sequence
  MKO10125354_B_Vmn1r118
  gRNA
cagtgaccctaattggaatg

SEQ ID NO: 125355 - DNA, 20 bp, Artificial Sequence
  MKO10125355_B_Vmn1r119
  gRNA
cagttgaagagcacagaaca

SEQ ID NO: 125356 - DNA, 20 bp, Artificial Sequence
  MKO10125356_B_Vmn1r119
  gRNA
tgtccatcagtttgtcactc

SEQ ID NO: 125357 - DNA, 20 bp, Artificial Sequence
  MKO10125357_B_Vmn1r119
  gRNA
gcctacactgaatccagaag

SEQ ID NO: 125358 - DNA, 20 bp, Artificial Sequence
  MKO10125358_B_Vmn1r11
  gRNA
agtatttagtgactttcatc

SEQ ID NO: 125359 - DNA, 20 bp, Artificial Sequence
  MKO10125359_B_Vmn1r11
  gRNA
tcccaatgaactatattatc

SEQ ID NO: 125360 - DNA, 20 bp, Artificial Sequence
  MKO10125360_B_Vmn1r11
  gRNA
cctctcacttatgttctcat

SEQ ID NO: 125361 - DNA, 20 bp, Artificial Sequence
  MKO10125361_B_Vmn1r120
  gRNA
tatagtgaggaatatagtca

SEQ ID NO: 125362 - DNA, 20 bp, Artificial Sequence
  MKO10125362_B_Vmn1r120
  gRNA
taaatccctgaaaagcactg

SEQ ID NO: 125363 - DNA, 20 bp, Artificial Sequence
  MKO10125363_B_Vmn1r120
  gRNA
aacttgttctgttccacttc

SEQ ID NO: 125364 - DNA, 20 bp, Artificial Sequence
  MKO10125364_B_Vmn1r121
  gRNA
gaccatgatgctcatgaatg

SEQ ID NO: 125365 - DNA, 20 bp, Artificial Sequence
  MKO10125365_B_Vmn1r121
  gRNA
gttattcttgttacggttgt

SEQ ID NO: 125366 - DNA, 20 bp, Artificial Sequence
  MKO10125366_B_Vmn1r121
  gRNA
tcttacagtgaatccagaag

SEQ ID NO: 125367 - DNA, 20 bp, Artificial Sequence
  MKO10125367_B_Vmn1r122
  gRNA
gcctacaatgaatccagaag

SEQ ID NO: 125368 - DNA, 20 bp, Artificial Sequence
  MKO10125368_B_Vmn1r122
  gRNA
aacttgttctgttccacttc

SEQ ID NO: 125369 - DNA, 20 bp, Artificial Sequence
  MKO10125369_B_Vmn1r122
  gRNA
gtgttattgtctgttatctg

SEQ ID NO: 125370 - DNA, 20 bp, Artificial Sequence
  MKO10125370_B_Vmn1r123
  gRNA
gcctacaatgaatccagaag

SEQ ID NO: 125371 - DNA, 20 bp, Artificial Sequence
  MKO10125371_B_Vmn1r123
  gRNA
attattcttgctacaattgt

SEQ ID NO: 125372 - DNA, 20 bp, Artificial Sequence
  MKO10125372_B_Vmn1r123
  gRNA
gtgttattgtctgttatctg

SEQ ID NO: 125373 - DNA, 20 bp, Artificial Sequence
  MKO10125373_B_Vmn1r124
  gRNA
aaaccgtactatcctgatgc

SEQ ID NO: 125374 - DNA, 20 bp, Artificial Sequence
  MKO10125374_B_Vmn1r124
  gRNA
ccagggtcccaaccccaaac

SEQ ID NO: 125375 - DNA, 20 bp, Artificial Sequence
  MKO10125375_B_Vmn1r124
  gRNA
tgtagtgaggaatagagtca

SEQ ID NO: 125376 - DNA, 20 bp, Artificial Sequence
  MKO10125376_B_Vmn1r125
  gRNA
gcctacaatgaatccagaag

SEQ ID NO: 125377 - DNA, 20 bp, Artificial Sequence
  MKO10125377_B_Vmn1r125
  gRNA
taacatccatattccaatta

SEQ ID NO: 125378 - DNA, 20 bp, Artificial Sequence
  MKO10125378_B_Vmn1r125
  gRNA
gtgttattgtctgttatctg

SEQ ID NO: 125379 - DNA, 20 bp, Artificial Sequence
  MKO10125379_B_Vmn1r126
  gRNA
gttattcttgttatggttgt

SEQ ID NO: 125380 - DNA, 20 bp, Artificial Sequence
  MKO10125380_B_Vmn1r126
  gRNA
tcttacagtgaatccagaag

SEQ ID NO: 125381 - DNA, 20 bp, Artificial Sequence
  MKO10125381_B_Vmn1r126
  gRNA
taacatccacattccaatta

SEQ ID NO: 125382 - DNA, 20 bp, Artificial Sequence
  MKO10125382_B_Vmn1r127
  gRNA
gcctacaatgaatccagaag

SEQ ID NO: 125383 - DNA, 20 bp, Artificial Sequence
  MKO10125383_B_Vmn1r127
  gRNA
aacttgttctgttccacttc

SEQ ID NO: 125384 - DNA, 20 bp, Artificial Sequence
  MKO10125384_B_Vmn1r127
  gRNA
gtgttattgtctgttatctg

SEQ ID NO: 125385 - DNA, 20 bp, Artificial Sequence
  MKO10125385_B_Vmn1r128
  gRNA
gtgttattgtctgttatctg

SEQ ID NO: 125386 - DNA, 20 bp, Artificial Sequence
  MKO10125386_B_Vmn1r128
  gRNA
attattcctgctacagttgt

SEQ ID NO: 125387 - DNA, 20 bp, Artificial Sequence
  MKO10125387_B_Vmn1r128
  gRNA
cagtgaccttaattggaatg

SEQ ID NO: 125388 - DNA, 20 bp, Artificial Sequence
  MKO10125388_B_Vmn1r129
  gRNA
cagagcaagtgtcacaaaca

SEQ ID NO: 125389 - DNA, 20 bp, Artificial Sequence
  MKO10125389_B_Vmn1r129
  gRNA
gcccacactgaatccagaag

SEQ ID NO: 125390 - DNA, 20 bp, Artificial Sequence
  MKO10125390_B_Vmn1r129
  gRNA
gttattcttcttgcagttgt

SEQ ID NO: 125391 - DNA, 20 bp, Artificial Sequence
  MKO10125391_B_Vmn1r12
  gRNA
ctctaataatgaaggcataa

SEQ ID NO: 125392 - DNA, 20 bp, Artificial Sequence
  MKO10125392_B_Vmn1r12
  gRNA
ttctgaacaatcaagatgac

SEQ ID NO: 125393 - DNA, 20 bp, Artificial Sequence
  MKO10125393_B_Vmn1r12
  gRNA
gttctgataaaagaattact

SEQ ID NO: 125394 - DNA, 20 bp, Artificial Sequence
  MKO10125394_B_Vmn1r130
  gRNA
attattcctgctacagttgt

SEQ ID NO: 125395 - DNA, 20 bp, Artificial Sequence
  MKO10125395_B_Vmn1r130
  gRNA
gtgttattgtctgttatctg

SEQ ID NO: 125396 - DNA, 20 bp, Artificial Sequence
  MKO10125396_B_Vmn1r130
  gRNA
taacatccacattccaatta

SEQ ID NO: 125397 - DNA, 20 bp, Artificial Sequence
  MKO10125397_B_Vmn1r131
  gRNA
gtgttattgtctgttatctg

SEQ ID NO: 125398 - DNA, 20 bp, Artificial Sequence
  MKO10125398_B_Vmn1r131
  gRNA
gtaacatccacattccaatt

SEQ ID NO: 125399 - DNA, 20 bp, Artificial Sequence
  MKO10125399_B_Vmn1r131
  gRNA
cagtgaccctaattggaatg

SEQ ID NO: 125400 - DNA, 20 bp, Artificial Sequence
  MKO10125400_B_Vmn1r132
  gRNA
gagcaagtgtcccaaatttg

SEQ ID NO: 125401 - DNA, 20 bp, Artificial Sequence
  MKO10125401_B_Vmn1r132
  gRNA
cagtgaccttaattggaatg

SEQ ID NO: 125402 - DNA, 20 bp, Artificial Sequence
  MKO10125402_B_Vmn1r132
  gRNA
attattcttgctacagttgt

SEQ ID NO: 125403 - DNA, 20 bp, Artificial Sequence
  MKO10125403_B_Vmn1r135
  gRNA
attattcctgctacagttgt

SEQ ID NO: 125404 - DNA, 20 bp, Artificial Sequence
  MKO10125404_B_Vmn1r135
  gRNA
cagtgaccttaattggaatg

SEQ ID NO: 125405 - DNA, 20 bp, Artificial Sequence
  MKO10125405_B_Vmn1r135
  gRNA
taacatccacattccaatta

SEQ ID NO: 125406 - DNA, 20 bp, Artificial Sequence
  MKO10125406_B_Vmn1r137
  gRNA
attattcctgctacagttgt

SEQ ID NO: 125407 - DNA, 20 bp, Artificial Sequence
  MKO10125407_B_Vmn1r137
  gRNA
gtgttattgtctgttatctg

SEQ ID NO: 125408 - DNA, 20 bp, Artificial Sequence
  MKO10125408_B_Vmn1r137
  gRNA
taacatccacattccaatta

SEQ ID NO: 125409 - DNA, 20 bp, Artificial Sequence
  MKO10125409_B_Vmn1r138
  gRNA
gtgttattgtctgttatctg

SEQ ID NO: 125410 - DNA, 20 bp, Artificial Sequence
  MKO10125410_B_Vmn1r138
  gRNA
gtaacatccacattccaatt

SEQ ID NO: 125411 - DNA, 20 bp, Artificial Sequence
  MKO10125411_B_Vmn1r138
  gRNA
cagtgaccctaattggaatg

SEQ ID NO: 125412 - DNA, 20 bp, Artificial Sequence
  MKO10125412_B_Vmn1r139
  gRNA
gagcaagtgtcccaaatttg

SEQ ID NO: 125413 - DNA, 20 bp, Artificial Sequence
  MKO10125413_B_Vmn1r139
  gRNA
cagtgaccttaattggaatg

SEQ ID NO: 125414 - DNA, 20 bp, Artificial Sequence
  MKO10125414_B_Vmn1r139
  gRNA
attattcttgctacagttgt

SEQ ID NO: 125415 - DNA, 20 bp, Artificial Sequence
  MKO10125415_B_Vmn1r13
  gRNA
catccacctcagtcacgtta

SEQ ID NO: 125416 - DNA, 20 bp, Artificial Sequence
  MKO10125416_B_Vmn1r13
  gRNA
gcatgacatttcctccagtg

SEQ ID NO: 125417 - DNA, 20 bp, Artificial Sequence
  MKO10125417_B_Vmn1r13
  gRNA
cttagtgatcttcatctgct

SEQ ID NO: 125418 - DNA, 20 bp, Artificial Sequence
  MKO10125418_B_Vmn1r142
  gRNA
gcctacaatgaatccagaag

SEQ ID NO: 125419 - DNA, 20 bp, Artificial Sequence
  MKO10125419_B_Vmn1r142
  gRNA
aacttgttctgttccacttc

SEQ ID NO: 125420 - DNA, 20 bp, Artificial Sequence
  MKO10125420_B_Vmn1r142
  gRNA
gtgttattgtctgttatctg

SEQ ID NO: 125421 - DNA, 20 bp, Artificial Sequence
  MKO10125421_B_Vmn1r143
  gRNA
attattcctgctacagttgt

SEQ ID NO: 125422 - DNA, 20 bp, Artificial Sequence
  MKO10125422_B_Vmn1r143
  gRNA
gtgttattgtctgttatctg

SEQ ID NO: 125423 - DNA, 20 bp, Artificial Sequence
  MKO10125423_B_Vmn1r143
  gRNA
taacatccacattccaatta

SEQ ID NO: 125424 - DNA, 20 bp, Artificial Sequence
  MKO10125424_B_Vmn1r148
  gRNA
taacatccacattccaatta

SEQ ID NO: 125425 - DNA, 20 bp, Artificial Sequence
  MKO10125425_B_Vmn1r148
  gRNA
gtgttattgtctattatctg

SEQ ID NO: 125426 - DNA, 20 bp, Artificial Sequence
  MKO10125426_B_Vmn1r148
  gRNA
aacttgttctgttccacttc

SEQ ID NO: 125427 - DNA, 20 bp, Artificial Sequence
  MKO10125427_B_Vmn1r149
  gRNA
tagagcaagtgtcacaaaca

SEQ ID NO: 125428 - DNA, 20 bp, Artificial Sequence
  MKO10125428_B_Vmn1r149
  gRNA
catcataggcaaactgcaag

SEQ ID NO: 125429 - DNA, 20 bp, Artificial Sequence
  MKO10125429_B_Vmn1r149
  gRNA
gttattcttcttacagttgt

SEQ ID NO: 125430 - DNA, 20 bp, Artificial Sequence
  MKO10125430_B_Vmn1r14
  gRNA
agtccatgggcttaggtctg

SEQ ID NO: 125431 - DNA, 20 bp, Artificial Sequence
  MKO10125431_B_Vmn1r14
  gRNA
ctctaataatgaagacataa

SEQ ID NO: 125432 - DNA, 20 bp, Artificial Sequence
  MKO10125432_B_Vmn1r14
  gRNA
catgattgtccagaagtttg

SEQ ID NO: 125433 - DNA, 20 bp, Artificial Sequence
  MKO10125433_B_Vmn1r151
  gRNA
gtgttattgtctgttatctg

SEQ ID NO: 125434 - DNA, 20 bp, Artificial Sequence
  MKO10125434_B_Vmn1r151
  gRNA
aacttgttctgttccacttc

SEQ ID NO: 125435 - DNA, 20 bp, Artificial Sequence
  MKO10125435_B_Vmn1r151
  gRNA
cagtgaccttaattgaaatg

SEQ ID NO: 125436 - DNA, 20 bp, Artificial Sequence
  MKO10125436_B_Vmn1r152
  gRNA
attattcctgctacagttgt

SEQ ID NO: 125437 - DNA, 20 bp, Artificial Sequence
  MKO10125437_B_Vmn1r152
  gRNA
gtgttattgtctgttatctg

SEQ ID NO: 125438 - DNA, 20 bp, Artificial Sequence
  MKO10125438_B_Vmn1r152
  gRNA
taacatccacattccaatta

SEQ ID NO: 125439 - DNA, 20 bp, Artificial Sequence
  MKO10125439_B_Vmn1r155
  gRNA
attattcctgctacagttgt

SEQ ID NO: 125440 - DNA, 20 bp, Artificial Sequence
  MKO10125440_B_Vmn1r155
  gRNA
gtgttattgtctgttatctg

SEQ ID NO: 125441 - DNA, 20 bp, Artificial Sequence
  MKO10125441_B_Vmn1r155
  gRNA
taacatccacattccaatta

SEQ ID NO: 125442 - DNA, 20 bp, Artificial Sequence
  MKO10125442_B_Vmn1r157
  gRNA
ggcctctccatgtctgctca

SEQ ID NO: 125443 - DNA, 20 bp, Artificial Sequence
  MKO10125443_B_Vmn1r157
  gRNA
gtgttattgtctattatctg

SEQ ID NO: 125444 - DNA, 20 bp, Artificial Sequence
  MKO10125444_B_Vmn1r157
  gRNA
attattcttgctacagttgt

SEQ ID NO: 125445 - DNA, 20 bp, Artificial Sequence
  MKO10125445_B_Vmn1r158
  gRNA
gccctctccatgtctgctca

SEQ ID NO: 125446 - DNA, 20 bp, Artificial Sequence
  MKO10125446_B_Vmn1r158
  gRNA
cagttgaagagcacagaaca

SEQ ID NO: 125447 - DNA, 20 bp, Artificial Sequence
  MKO10125447_B_Vmn1r158
  gRNA
tagagcaagtgtcacaaaca

SEQ ID NO: 125448 - DNA, 20 bp, Artificial Sequence
  MKO10125448_B_Vmn1r159
  gRNA
cagttgaagagcacagaaca

SEQ ID NO: 125449 - DNA, 20 bp, Artificial Sequence
  MKO10125449_B_Vmn1r159
  gRNA
gttattcttgttacggttgt

SEQ ID NO: 125450 - DNA, 20 bp, Artificial Sequence
  MKO10125450_B_Vmn1r159
  gRNA
gcctacaatgaatccagaag

SEQ ID NO: 125451 - DNA, 20 bp, Artificial Sequence
  MKO10125451_B_Vmn1r15
  gRNA
tttgcagtcaaagtgccact

SEQ ID NO: 125452 - DNA, 20 bp, Artificial Sequence
  MKO10125452_B_Vmn1r15
  gRNA
gatctcctgtcaactgactt

SEQ ID NO: 125453 - DNA, 20 bp, Artificial Sequence
  MKO10125453_B_Vmn1r15
  gRNA
acaatgcattgttctatatt

SEQ ID NO: 125454 - DNA, 20 bp, Artificial Sequence
  MKO10125454_B_Vmn1r160
  gRNA
catttgaagagcacagaaca

SEQ ID NO: 125455 - DNA, 20 bp, Artificial Sequence
  MKO10125455_B_Vmn1r160
  gRNA
gccctctccatgtctgctca

SEQ ID NO: 125456 - DNA, 20 bp, Artificial Sequence
  MKO10125456_B_Vmn1r160
  gRNA
gcctacaatgaatccagaag

SEQ ID NO: 125457 - DNA, 20 bp, Artificial Sequence
  MKO10125457_B_Vmn1r163
  gRNA
attattcctgctacagttgt

SEQ ID NO: 125458 - DNA, 20 bp, Artificial Sequence
  MKO10125458_B_Vmn1r163
  gRNA
cagtgaccttaattggaatg

SEQ ID NO: 125459 - DNA, 20 bp, Artificial Sequence
  MKO10125459_B_Vmn1r163
  gRNA
taacatccacattccaatta

SEQ ID NO: 125460 - DNA, 20 bp, Artificial Sequence
  MKO10125460_B_Vmn1r165
  gRNA
attattcctgctacagttgt

SEQ ID NO: 125461 - DNA, 20 bp, Artificial Sequence
  MKO10125461_B_Vmn1r165
  gRNA
gtgttattgtctgttatctg

SEQ ID NO: 125462 - DNA, 20 bp, Artificial Sequence
  MKO10125462_B_Vmn1r165
  gRNA
taacatccacattccaatta

SEQ ID NO: 125463 - DNA, 20 bp, Artificial Sequence
  MKO10125463_B_Vmn1r166
  gRNA
gtgttattgtctgttatctg

SEQ ID NO: 125464 - DNA, 20 bp, Artificial Sequence
  MKO10125464_B_Vmn1r166
  gRNA
gtaacatccacattccaatt

SEQ ID NO: 125465 - DNA, 20 bp, Artificial Sequence
  MKO10125465_B_Vmn1r166
  gRNA
cagtgaccctaattggaatg

SEQ ID NO: 125466 - DNA, 20 bp, Artificial Sequence
  MKO10125466_B_Vmn1r167
  gRNA
tctgttcaggagaattacca

SEQ ID NO: 125467 - DNA, 20 bp, Artificial Sequence
  MKO10125467_B_Vmn1r167
  gRNA
attgaatatactgcagtctt

SEQ ID NO: 125468 - DNA, 20 bp, Artificial Sequence
  MKO10125468_B_Vmn1r167
  gRNA
tgctgatgaacactccatca

SEQ ID NO: 125469 - DNA, 20 bp, Artificial Sequence
  MKO10125469_B_Vmn1r168
  gRNA
ccacaagcaacacaatgcta

SEQ ID NO: 125470 - DNA, 20 bp, Artificial Sequence
  MKO10125470_B_Vmn1r168
  gRNA
ctttcaatgtcttctcagaa

SEQ ID NO: 125471 - DNA, 20 bp, Artificial Sequence
  MKO10125471_B_Vmn1r168
  gRNA
gctattcctgttgtagttgt

SEQ ID NO: 125472 - DNA, 20 bp, Artificial Sequence
  MKO10125472_B_Vmn1r169
  gRNA
tgtcattctcagcagctgaa

SEQ ID NO: 125473 - DNA, 20 bp, Artificial Sequence
  MKO10125473_B_Vmn1r169
  gRNA
tggggtagggtgatgctcca

SEQ ID NO: 125474 - DNA, 20 bp, Artificial Sequence
  MKO10125474_B_Vmn1r169
  gRNA
tgaaatctgagcttctgatt

SEQ ID NO: 125475 - DNA, 20 bp, Artificial Sequence
  MKO10125475_B_Vmn1r16
  gRNA
gagtgaaaaccaccagatga

SEQ ID NO: 125476 - DNA, 20 bp, Artificial Sequence
  MKO10125476_B_Vmn1r16
  gRNA
ctaagagtccaaatccagct

SEQ ID NO: 125477 - DNA, 20 bp, Artificial Sequence
  MKO10125477_B_Vmn1r16
  gRNA
ataaagaacattattgaata

SEQ ID NO: 125478 - DNA, 20 bp, Artificial Sequence
  MKO10125478_B_Vmn1r170
  gRNA
tgttgagatccattcaagtt

SEQ ID NO: 125479 - DNA, 20 bp, Artificial Sequence
  MKO10125479_B_Vmn1r170
  gRNA
aatacagtccagatgataac

SEQ ID NO: 125480 - DNA, 20 bp, Artificial Sequence
  MKO10125480_B_Vmn1r170
  gRNA
atcccacaccatcctgatgc

SEQ ID NO: 125481 - DNA, 20 bp, Artificial Sequence
  MKO10125481_B_Vmn1r171
  gRNA
tctgttcaggagaataacca

SEQ ID NO: 125482 - DNA, 20 bp, Artificial Sequence
  MKO10125482_B_Vmn1r171
  gRNA
ccagagccgagagtccacaa

SEQ ID NO: 125483 - DNA, 20 bp, Artificial Sequence
  MKO10125483_B_Vmn1r171
  gRNA
actgaatatgctgcaatctt

SEQ ID NO: 125484 - DNA, 20 bp, Artificial Sequence
  MKO10125484_B_Vmn1r172
  gRNA
acactgacccgaacagcaaa

SEQ ID NO: 125485 - DNA, 20 bp, Artificial Sequence
  MKO10125485_B_Vmn1r172
  gRNA
cattcttgcccacattgctg

SEQ ID NO: 125486 - DNA, 20 bp, Artificial Sequence
  MKO10125486_B_Vmn1r172
  gRNA
gaacatacccatttgctgtt

SEQ ID NO: 125487 - DNA, 20 bp, Artificial Sequence
  MKO10125487_B_Vmn1r173
  gRNA
gaggcatgtcaatgaaattt

SEQ ID NO: 125488 - DNA, 20 bp, Artificial Sequence
  MKO10125488_B_Vmn1r173
  gRNA
taccatgttcatcagcatca

SEQ ID NO: 125489 - DNA, 20 bp, Artificial Sequence
  MKO10125489_B_Vmn1r173
  gRNA
gtctggtttcgagttagtca

SEQ ID NO: 125490 - DNA, 20 bp, Artificial Sequence
  MKO10125490_B_Vmn1r174
  gRNA
gcttgagtacttcattcgcc

SEQ ID NO: 125491 - DNA, 20 bp, Artificial Sequence
  MKO10125491_B_Vmn1r174
  gRNA
agagattgcccacagtaatg

SEQ ID NO: 125492 - DNA, 20 bp, Artificial Sequence
  MKO10125492_B_Vmn1r174
  gRNA
acccctaacgatcaacatta

SEQ ID NO: 125493 - DNA, 20 bp, Artificial Sequence
  MKO10125493_B_Vmn1r175
  gRNA
tggggaccattgactttcat

SEQ ID NO: 125494 - DNA, 20 bp, Artificial Sequence
  MKO10125494_B_Vmn1r175
  gRNA
taaatctgtgaaaaccacag

SEQ ID NO: 125495 - DNA, 20 bp, Artificial Sequence
  MKO10125495_B_Vmn1r175
  gRNA
cagcagaatagcagagaaca

SEQ ID NO: 125496 - DNA, 20 bp, Artificial Sequence
  MKO10125496_B_Vmn1r176
  gRNA
ctgaagagtcacttccactg

SEQ ID NO: 125497 - DNA, 20 bp, Artificial Sequence
  MKO10125497_B_Vmn1r176
  gRNA
atagcaattctaaaagcaag

SEQ ID NO: 125498 - DNA, 20 bp, Artificial Sequence
  MKO10125498_B_Vmn1r176
  gRNA
tccacctctggtttcagtat

SEQ ID NO: 125499 - DNA, 20 bp, Artificial Sequence
  MKO10125499_B_Vmn1r177
  gRNA
gttagtacaaatcacttctt

SEQ ID NO: 125500 - DNA, 20 bp, Artificial Sequence
  MKO10125500_B_Vmn1r177
  gRNA
ttcaatgagctgatggtcag

SEQ ID NO: 125501 - DNA, 20 bp, Artificial Sequence
  MKO10125501_B_Vmn1r177
  gRNA
ggaaaatatactgcagtctc

SEQ ID NO: 125502 - DNA, 20 bp, Artificial Sequence
  MKO10125502_B_Vmn1r178
  gRNA
ttgaagagtcatgtcatcag

SEQ ID NO: 125503 - DNA, 20 bp, Artificial Sequence
  MKO10125503_B_Vmn1r178
  gRNA
taatatctacattgcaatta

SEQ ID NO: 125504 - DNA, 20 bp, Artificial Sequence
  MKO10125504_B_Vmn1r178
  gRNA
tgaagtgaggaagagaatca

SEQ ID NO: 125505 - DNA, 20 bp, Artificial Sequence
  MKO10125505_B_Vmn1r179
  gRNA
tggagcaaaagtcatcacat

SEQ ID NO: 125506 - DNA, 20 bp, Artificial Sequence
  MKO10125506_B_Vmn1r179
  gRNA
caagaataccttgccaaact

SEQ ID NO: 125507 - DNA, 20 bp, Artificial Sequence
  MKO10125507_B_Vmn1r179
  gRNA
tggagtgaagctttggtcac

SEQ ID NO: 125508 - DNA, 20 bp, Artificial Sequence
  MKO10125508_B_Vmn1r17
  gRNA
tcacaaacttctgaacctgc

SEQ ID NO: 125509 - DNA, 20 bp, Artificial Sequence
  MKO10125509_B_Vmn1r17
  gRNA
tccagagatgtatttctcgt

SEQ ID NO: 125510 - DNA, 20 bp, Artificial Sequence
  MKO10125510_B_Vmn1r17
  gRNA
cagtcccaaaacctcagtgt

SEQ ID NO: 125511 - DNA, 20 bp, Artificial Sequence
  MKO10125511_B_Vmn1r180
  gRNA
gcatttgctgttgatgtcta

SEQ ID NO: 125512 - DNA, 20 bp, Artificial Sequence
  MKO10125512_B_Vmn1r180
  gRNA
cctgaaaaacactgaagaag

SEQ ID NO: 125513 - DNA, 20 bp, Artificial Sequence
  MKO10125513_B_Vmn1r180
  gRNA
cagttgaagagcatagaaca

SEQ ID NO: 125514 - DNA, 20 bp, Artificial Sequence
  MKO10125514_B_Vmn1r181
  gRNA
ggagcaaaagccatgttgtt

SEQ ID NO: 125515 - DNA, 20 bp, Artificial Sequence
  MKO10125515_B_Vmn1r181
  gRNA
cactacatttccaaacaaca

SEQ ID NO: 125516 - DNA, 20 bp, Artificial Sequence
  MKO10125516_B_Vmn1r181
  gRNA
cgcatggtggcaagaagcac

SEQ ID NO: 125517 - DNA, 20 bp, Artificial Sequence
  MKO10125517_B_Vmn1r183
  gRNA
ggatttactatgagcagaca

SEQ ID NO: 125518 - DNA, 20 bp, Artificial Sequence
  MKO10125518_B_Vmn1r183
  gRNA
gtggcttaaaagcacctgtc

SEQ ID NO: 125519 - DNA, 20 bp, Artificial Sequence
  MKO10125519_B_Vmn1r183
  gRNA
cagctgaagagcacagaaca

SEQ ID NO: 125520 - DNA, 20 bp, Artificial Sequence
  MKO10125520_B_Vmn1r184
  gRNA
ccaaattgcatctagacatg

SEQ ID NO: 125521 - DNA, 20 bp, Artificial Sequence
  MKO10125521_B_Vmn1r184
  gRNA
cctcatgtctagatgcaatt

SEQ ID NO: 125522 - DNA, 20 bp, Artificial Sequence
  MKO10125522_B_Vmn1r184
  gRNA
ttctatttaaacacaagcag

SEQ ID NO: 125523 - DNA, 20 bp, Artificial Sequence
  MKO10125523_B_Vmn1r185
  gRNA
ccaagttgaatctagacatg

SEQ ID NO: 125524 - DNA, 20 bp, Artificial Sequence
  MKO10125524_B_Vmn1r185
  gRNA
ccagaattccaactgtagtt

SEQ ID NO: 125525 - DNA, 20 bp, Artificial Sequence
  MKO10125525_B_Vmn1r185
  gRNA
gtcaaagctataatgcacaa

SEQ ID NO: 125526 - DNA, 20 bp, Artificial Sequence
  MKO10125526_B_Vmn1r186
  gRNA
gtctacactgaccccagaga

SEQ ID NO: 125527 - DNA, 20 bp, Artificial Sequence
  MKO10125527_B_Vmn1r186
  gRNA
aattcgatatgctccatctc

SEQ ID NO: 125528 - DNA, 20 bp, Artificial Sequence
  MKO10125528_B_Vmn1r186
  gRNA
gagtcattgtgtgatttctg

SEQ ID NO: 125529 - DNA, 20 bp, Artificial Sequence
  MKO10125529_B_Vmn1r187
  gRNA
gtctacactgaccccagaga

SEQ ID NO: 125530 - DNA, 20 bp, Artificial Sequence
  MKO10125530_B_Vmn1r187
  gRNA
cacaatgactctgattctaa

SEQ ID NO: 125531 - DNA, 20 bp, Artificial Sequence
  MKO10125531_B_Vmn1r187
  gRNA
gagtcattgtgtgatttctg

SEQ ID NO: 125532 - DNA, 20 bp, Artificial Sequence
  MKO10125532_B_Vmn1r188
  gRNA
aatatatcacagcttaggaa

SEQ ID NO: 125533 - DNA, 20 bp, Artificial Sequence
  MKO10125533_B_Vmn1r188
  gRNA
ttatattatgctagaaagtc

SEQ ID NO: 125534 - DNA, 20 bp, Artificial Sequence
  MKO10125534_B_Vmn1r188
  gRNA
tcttacagcctatatcatcc

SEQ ID NO: 125535 - DNA, 20 bp, Artificial Sequence
  MKO10125535_B_Vmn1r189
  gRNA
actctagaatttctgaccct

SEQ ID NO: 125536 - DNA, 20 bp, Artificial Sequence
  MKO10125536_B_Vmn1r189
  gRNA
aggatgtgccttgcagactt

SEQ ID NO: 125537 - DNA, 20 bp, Artificial Sequence
  MKO10125537_B_Vmn1r189
  gRNA
caccagaagtctcctcactg

SEQ ID NO: 125538 - DNA, 20 bp, Artificial Sequence
  MKO10125538_B_Vmn1r18
  gRNA
ttagaaaatctagtggaact

SEQ ID NO: 125539 - DNA, 20 bp, Artificial Sequence
  MKO10125539_B_Vmn1r18
  gRNA
tttgagtggccctttcctca

SEQ ID NO: 125540 - DNA, 20 bp, Artificial Sequence
  MKO10125540_B_Vmn1r18
  gRNA
agttgacagacctaagccca

SEQ ID NO: 125541 - DNA, 20 bp, Artificial Sequence
  MKO10125541_B_Vmn1r191
  gRNA
atcatactacttcttgcaaa

SEQ ID NO: 125542 - DNA, 20 bp, Artificial Sequence
  MKO10125542_B_Vmn1r191
  gRNA
ttcttgaatatttactatca

SEQ ID NO: 125543 - DNA, 20 bp, Artificial Sequence
  MKO10125543_B_Vmn1r191
  gRNA
gactgctagtgcaaatggag

SEQ ID NO: 125544 - DNA, 20 bp, Artificial Sequence
  MKO10125544_B_Vmn1r192
  gRNA
ataatcattatttgtagcac

SEQ ID NO: 125545 - DNA, 20 bp, Artificial Sequence
  MKO10125545_B_Vmn1r192
  gRNA
agcagagttgtttgcagacc

SEQ ID NO: 125546 - DNA, 20 bp, Artificial Sequence
  MKO10125546_B_Vmn1r192
  gRNA
ttatattagaaaaagccaag

SEQ ID NO: 125547 - DNA, 20 bp, Artificial Sequence
  MKO10125547_B_Vmn1r193
  gRNA
acatttgtatgcagtcatca

SEQ ID NO: 125548 - DNA, 20 bp, Artificial Sequence
  MKO10125548_B_Vmn1r193
  gRNA
agctcaaaccacagaccaca

SEQ ID NO: 125549 - DNA, 20 bp, Artificial Sequence
  MKO10125549_B_Vmn1r193
  gRNA
cacgaagagccatgaaagaa

SEQ ID NO: 125550 - DNA, 20 bp, Artificial Sequence
  MKO10125550_B_Vmn1r194
  gRNA
ttgtgtacacttcagccttc

SEQ ID NO: 125551 - DNA, 20 bp, Artificial Sequence
  MKO10125551_B_Vmn1r194
  gRNA
tgacagcctggactgtactg

SEQ ID NO: 125552 - DNA, 20 bp, Artificial Sequence
  MKO10125552_B_Vmn1r194
  gRNA
aaattctaggatttagcaac

SEQ ID NO: 125553 - DNA, 20 bp, Artificial Sequence
  MKO10125553_B_Vmn1r195
  gRNA
cacttaactgtgtacctaga

SEQ ID NO: 125554 - DNA, 20 bp, Artificial Sequence
  MKO10125554_B_Vmn1r195
  gRNA
agtttgaatagatctagagc

SEQ ID NO: 125555 - DNA, 20 bp, Artificial Sequence
  MKO10125555_B_Vmn1r195
  gRNA
gctggcattatttgcaagcc

SEQ ID NO: 125556 - DNA, 20 bp, Artificial Sequence
  MKO10125556_B_Vmn1r196
  gRNA
acgttattgtttatctagaa

SEQ ID NO: 125557 - DNA, 20 bp, Artificial Sequence
  MKO10125557_B_Vmn1r196
  gRNA
tggggctcatgataactgct

SEQ ID NO: 125558 - DNA, 20 bp, Artificial Sequence
  MKO10125558_B_Vmn1r196
  gRNA
ctacagacaccttacaactg

SEQ ID NO: 125559 - DNA, 20 bp, Artificial Sequence
  MKO10125559_B_Vmn1r197
  gRNA
agcgagaaaagagtgtgctg

SEQ ID NO: 125560 - DNA, 20 bp, Artificial Sequence
  MKO10125560_B_Vmn1r197
  gRNA
ttctacagtactatatgttc

SEQ ID NO: 125561 - DNA, 20 bp, Artificial Sequence
  MKO10125561_B_Vmn1r197
  gRNA
atctctatgaatcagcatga

SEQ ID NO: 125562 - DNA, 20 bp, Artificial Sequence
  MKO10125562_B_Vmn1r198
  gRNA
aacttactctcttacattaa

SEQ ID NO: 125563 - DNA, 20 bp, Artificial Sequence
  MKO10125563_B_Vmn1r198
  gRNA
catccagacacattatcaag

SEQ ID NO: 125564 - DNA, 20 bp, Artificial Sequence
  MKO10125564_B_Vmn1r198
  gRNA
tttaatgtaagagagtaagt

SEQ ID NO: 125565 - DNA, 20 bp, Artificial Sequence
  MKO10125565_B_Vmn1r199
  gRNA
tgacagtgtttgtaaaagcc

SEQ ID NO: 125566 - DNA, 20 bp, Artificial Sequence
  MKO10125566_B_Vmn1r199
  gRNA
actgtcatccttcttgcaaa

SEQ ID NO: 125567 - DNA, 20 bp, Artificial Sequence
  MKO10125567_B_Vmn1r199
  gRNA
agaaatttcctagatgactc

SEQ ID NO: 125568 - DNA, 20 bp, Artificial Sequence
  MKO10125568_B_Vmn1r19
  gRNA
tcagaactgatctgcaccaa

SEQ ID NO: 125569 - DNA, 20 bp, Artificial Sequence
  MKO10125569_B_Vmn1r19
  gRNA
ataaaggacattctcaaatg

SEQ ID NO: 125570 - DNA, 20 bp, Artificial Sequence
  MKO10125570_B_Vmn1r19
  gRNA
gtaggagtccaagtccagct

SEQ ID NO: 125571 - DNA, 20 bp, Artificial Sequence
  MKO10125571_B_Vmn1r1
  gRNA
tggccagcagcatcacgatg

SEQ ID NO: 125572 - DNA, 20 bp, Artificial Sequence
  MKO10125572_B_Vmn1r1
  gRNA
actgaacgtggcataaccac

SEQ ID NO: 125573 - DNA, 20 bp, Artificial Sequence
  MKO10125573_B_Vmn1r1
  gRNA
cacattgtgggcggccacaa

SEQ ID NO: 125574 - DNA, 20 bp, Artificial Sequence
  MKO10125574_B_Vmn1r200
  gRNA
ctgtaagagcattgtctacc

SEQ ID NO: 125575 - DNA, 20 bp, Artificial Sequence
  MKO10125575_B_Vmn1r200
  gRNA
ggtaaatactcaagaatttc

SEQ ID NO: 125576 - DNA, 20 bp, Artificial Sequence
  MKO10125576_B_Vmn1r200
  gRNA
tgcagtgtttcagagtgccc

SEQ ID NO: 125577 - DNA, 20 bp, Artificial Sequence
  MKO10125577_B_Vmn1r201
  gRNA
agaatatttcctacaattcc

SEQ ID NO: 125578 - DNA, 20 bp, Artificial Sequence
  MKO10125578_B_Vmn1r201
  gRNA
gccactacctgctttgatgt

SEQ ID NO: 125579 - DNA, 20 bp, Artificial Sequence
  MKO10125579_B_Vmn1r201
  gRNA
aggggagttatttgcagacc

SEQ ID NO: 125580 - DNA, 20 bp, Artificial Sequence
  MKO10125580_B_Vmn1r202
  gRNA
agaaactttctagatgatgt

SEQ ID NO: 125581 - DNA, 20 bp, Artificial Sequence
  MKO10125581_B_Vmn1r202
  gRNA
gtggatgttcatctctctca

SEQ ID NO: 125582 - DNA, 20 bp, Artificial Sequence
  MKO10125582_B_Vmn1r202
  gRNA
catccacttaactgtgttcc

SEQ ID NO: 125583 - DNA, 20 bp, Artificial Sequence
  MKO10125583_B_Vmn1r203
  gRNA
gcatgccaaaatttaaccaa

SEQ ID NO: 125584 - DNA, 20 bp, Artificial Sequence
  MKO10125584_B_Vmn1r203
  gRNA
atacctcattctgatccaca

SEQ ID NO: 125585 - DNA, 20 bp, Artificial Sequence
  MKO10125585_B_Vmn1r203
  gRNA
gatgcttataattagagata

SEQ ID NO: 125586 - DNA, 20 bp, Artificial Sequence
  MKO10125586_B_Vmn1r204
  gRNA
catttatatgtagtcatcat

SEQ ID NO: 125587 - DNA, 20 bp, Artificial Sequence
  MKO10125587_B_Vmn1r204
  gRNA
cagccatttaactatgttcc

SEQ ID NO: 125588 - DNA, 20 bp, Artificial Sequence
  MKO10125588_B_Vmn1r204
  gRNA
ctccaagtaaaataagtgaa

SEQ ID NO: 125589 - DNA, 20 bp, Artificial Sequence
  MKO10125589_B_Vmn1r205
  gRNA
atgggcttctgaataaattt

SEQ ID NO: 125590 - DNA, 20 bp, Artificial Sequence
  MKO10125590_B_Vmn1r205
  gRNA
accaaaaactaaaatagtct

SEQ ID NO: 125591 - DNA, 20 bp, Artificial Sequence
  MKO10125591_B_Vmn1r205
  gRNA
tcttacaccctatatcatct

SEQ ID NO: 125592 - DNA, 20 bp, Artificial Sequence
  MKO10125592_B_Vmn1r206
  gRNA
ttcatctttataactgtgat

SEQ ID NO: 125593 - DNA, 20 bp, Artificial Sequence
  MKO10125593_B_Vmn1r206
  gRNA
agcaaatactcaagaatttc

SEQ ID NO: 125594 - DNA, 20 bp, Artificial Sequence
  MKO10125594_B_Vmn1r206
  gRNA
ctatttaatgcaagaaagtc

SEQ ID NO: 125595 - DNA, 20 bp, Artificial Sequence
  MKO10125595_B_Vmn1r207-ps
  gRNA
actcaagaatttctgaccct

SEQ ID NO: 125596 - DNA, 20 bp, Artificial Sequence
  MKO10125596_B_Vmn1r207-ps
  gRNA
tagaaaatcaagaagtaaaa

SEQ ID NO: 125597 - DNA, 20 bp, Artificial Sequence
  MKO10125597_B_Vmn1r207-ps
  gRNA
tctgaaggtagaagacatgc

SEQ ID NO: 125598 - DNA, 20 bp, Artificial Sequence
  MKO10125598_B_Vmn1r208
  gRNA
cctgaaacaatgcatctctc

SEQ ID NO: 125599 - DNA, 20 bp, Artificial Sequence
  MKO10125599_B_Vmn1r208
  gRNA
gtccctgtgaatcagcacaa

SEQ ID NO: 125600 - DNA, 20 bp, Artificial Sequence
  MKO10125600_B_Vmn1r208
  gRNA
atcatcagtcccagagcatc

SEQ ID NO: 125601 - DNA, 20 bp, Artificial Sequence
  MKO10125601_B_Vmn1r209
  gRNA
gatctgtacttgtgatagaa

SEQ ID NO: 125602 - DNA, 20 bp, Artificial Sequence
  MKO10125602_B_Vmn1r209
  gRNA
actgaagaatttctgaccct

SEQ ID NO: 125603 - DNA, 20 bp, Artificial Sequence
  MKO10125603_B_Vmn1r209
  gRNA
aaacgaaacatagcatcaga

SEQ ID NO: 125604 - DNA, 20 bp, Artificial Sequence
  MKO10125604_B_Vmn1r20
  gRNA
ggtatgacacagtcatcctg

SEQ ID NO: 125605 - DNA, 20 bp, Artificial Sequence
  MKO10125605_B_Vmn1r20
  gRNA
cagtcccagtacttcttgtt

SEQ ID NO: 125606 - DNA, 20 bp, Artificial Sequence
  MKO10125606_B_Vmn1r20
  gRNA
tcactagcagcaagatagtc

SEQ ID NO: 125607 - DNA, 20 bp, Artificial Sequence
  MKO10125607_B_Vmn1r210
  gRNA
atgggcttctggttaaattt

SEQ ID NO: 125608 - DNA, 20 bp, Artificial Sequence
  MKO10125608_B_Vmn1r210
  gRNA
agatcattgtttacctagaa

SEQ ID NO: 125609 - DNA, 20 bp, Artificial Sequence
  MKO10125609_B_Vmn1r210
  gRNA
taattataagcatctcttca

SEQ ID NO: 125610 - DNA, 20 bp, Artificial Sequence
  MKO10125610_B_Vmn1r211
  gRNA
aattgagtatccacaggcag

SEQ ID NO: 125611 - DNA, 20 bp, Artificial Sequence
  MKO10125611_B_Vmn1r211
  gRNA
tagtaagttcatgctgatca

SEQ ID NO: 125612 - DNA, 20 bp, Artificial Sequence
  MKO10125612_B_Vmn1r211
  gRNA
atctctatgaatcagtatga

SEQ ID NO: 125613 - DNA, 20 bp, Artificial Sequence
  MKO10125613_B_Vmn1r212
  gRNA
cacagggatggagttctgac

SEQ ID NO: 125614 - DNA, 20 bp, Artificial Sequence
  MKO10125614_B_Vmn1r212
  gRNA
aaatagattcttaaccttct

SEQ ID NO: 125615 - DNA, 20 bp, Artificial Sequence
  MKO10125615_B_Vmn1r212
  gRNA
catcctctccaggtaaacaa

SEQ ID NO: 125616 - DNA, 20 bp, Artificial Sequence
  MKO10125616_B_Vmn1r213
  gRNA
gggaggggccagtggttatg

SEQ ID NO: 125617 - DNA, 20 bp, Artificial Sequence
  MKO10125617_B_Vmn1r213
  gRNA
ataataatccttcttgtaaa

SEQ ID NO: 125618 - DNA, 20 bp, Artificial Sequence
  MKO10125618_B_Vmn1r213
  gRNA
gtttctaactctctcttcag

SEQ ID NO: 125619 - DNA, 20 bp, Artificial Sequence
  MKO10125619_B_Vmn1r214
  gRNA
agaaacttcctaaataactt

SEQ ID NO: 125620 - DNA, 20 bp, Artificial Sequence
  MKO10125620_B_Vmn1r214
  gRNA
tttctcttcatgaccatgct

SEQ ID NO: 125621 - DNA, 20 bp, Artificial Sequence
  MKO10125621_B_Vmn1r214
  gRNA
gttccccagaatgccaagca

SEQ ID NO: 125622 - DNA, 20 bp, Artificial Sequence
  MKO10125622_B_Vmn1r215
  gRNA
ataatttggcatgctgtttg

SEQ ID NO: 125623 - DNA, 20 bp, Artificial Sequence
  MKO10125623_B_Vmn1r215
  gRNA
ctttgtccaaagggaagttc

SEQ ID NO: 125624 - DNA, 20 bp, Artificial Sequence
  MKO10125624_B_Vmn1r215
  gRNA
agcatatttcccacaattcc

SEQ ID NO: 125625 - DNA, 20 bp, Artificial Sequence
  MKO10125625_B_Vmn1r216
  gRNA
atcccagataatcaggataa

SEQ ID NO: 125626 - DNA, 20 bp, Artificial Sequence
  MKO10125626_B_Vmn1r216
  gRNA
acaatcattatttactgtat

SEQ ID NO: 125627 - DNA, 20 bp, Artificial Sequence
  MKO10125627_B_Vmn1r216
  gRNA
agcatgaataggtctgaaat

SEQ ID NO: 125628 - DNA, 20 bp, Artificial Sequence
  MKO10125628_B_Vmn1r217
  gRNA
cactgagcatgccaacatgc

SEQ ID NO: 125629 - DNA, 20 bp, Artificial Sequence
  MKO10125629_B_Vmn1r217
  gRNA
cagaaagtcgagaaataaaa

SEQ ID NO: 125630 - DNA, 20 bp, Artificial Sequence
  MKO10125630_B_Vmn1r217
  gRNA
cttgatgataaatattcaaa

SEQ ID NO: 125631 - DNA, 20 bp, Artificial Sequence
  MKO10125631_B_Vmn1r218
  gRNA
atatgtgtacacttctgcct

SEQ ID NO: 125632 - DNA, 20 bp, Artificial Sequence
  MKO10125632_B_Vmn1r218
  gRNA
agatattggctgtaaaatga

SEQ ID NO: 125633 - DNA, 20 bp, Artificial Sequence
  MKO10125633_B_Vmn1r218
  gRNA
gaagatgaataaaattactc

SEQ ID NO: 125634 - DNA, 20 bp, Artificial Sequence
  MKO10125634_B_Vmn1r219
  gRNA
atccattcgattagaagtat

SEQ ID NO: 125635 - DNA, 20 bp, Artificial Sequence
  MKO10125635_B_Vmn1r219
  gRNA
ggctggaaactgcataacca

SEQ ID NO: 125636 - DNA, 20 bp, Artificial Sequence
  MKO10125636_B_Vmn1r219
  gRNA
attcatgaatctgtgaccct

SEQ ID NO: 125637 - DNA, 20 bp, Artificial Sequence
  MKO10125637_B_Vmn1r21
  gRNA
atgtattattcagtagtaga

SEQ ID NO: 125638 - DNA, 20 bp, Artificial Sequence
  MKO10125638_B_Vmn1r21
  gRNA
catagcatcagcaacctgag

SEQ ID NO: 125639 - DNA, 20 bp, Artificial Sequence
  MKO10125639_B_Vmn1r21
  gRNA
catataatgatgattctcac

SEQ ID NO: 125640 - DNA, 20 bp, Artificial Sequence
  MKO10125640_B_Vmn1r220
  gRNA
cccttgaatatttatcatca

SEQ ID NO: 125641 - DNA, 20 bp, Artificial Sequence
  MKO10125641_B_Vmn1r220
  gRNA
cactgagcatgccaacatac

SEQ ID NO: 125642 - DNA, 20 bp, Artificial Sequence
  MKO10125642_B_Vmn1r220
  gRNA
tccttgatgataaatattca

SEQ ID NO: 125643 - DNA, 20 bp, Artificial Sequence
  MKO10125643_B_Vmn1r221
  gRNA
gattcacagggatagaattc

SEQ ID NO: 125644 - DNA, 20 bp, Artificial Sequence
  MKO10125644_B_Vmn1r221
  gRNA
tatccctgtgaatcagcacc

SEQ ID NO: 125645 - DNA, 20 bp, Artificial Sequence
  MKO10125645_B_Vmn1r221
  gRNA
cttcctccacccagatgctc

SEQ ID NO: 125646 - DNA, 20 bp, Artificial Sequence
  MKO10125646_B_Vmn1r222
  gRNA
ggctcaggccaaagtatgca

SEQ ID NO: 125647 - DNA, 20 bp, Artificial Sequence
  MKO10125647_B_Vmn1r222
  gRNA
acacctcattcttatccact

SEQ ID NO: 125648 - DNA, 20 bp, Artificial Sequence
  MKO10125648_B_Vmn1r222
  gRNA
ctgtaagagcattgtttacc

SEQ ID NO: 125649 - DNA, 20 bp, Artificial Sequence
  MKO10125649_B_Vmn1r223
  gRNA
tgttctttgttccattgaca

SEQ ID NO: 125650 - DNA, 20 bp, Artificial Sequence
  MKO10125650_B_Vmn1r223
  gRNA
acatttatatactttcatca

SEQ ID NO: 125651 - DNA, 20 bp, Artificial Sequence
  MKO10125651_B_Vmn1r223
  gRNA
ggaaaaacctgagaaacaca

SEQ ID NO: 125652 - DNA, 20 bp, Artificial Sequence
  MKO10125652_B_Vmn1r224
  gRNA
ataccaaggccagtatcctg

SEQ ID NO: 125653 - DNA, 20 bp, Artificial Sequence
  MKO10125653_B_Vmn1r224
  gRNA
tacctattatcaaatccttg

SEQ ID NO: 125654 - DNA, 20 bp, Artificial Sequence
  MKO10125654_B_Vmn1r224
  gRNA
gtttactatagtaattgaat

SEQ ID NO: 125655 - DNA, 20 bp, Artificial Sequence
  MKO10125655_B_Vmn1r225
  gRNA
atacagtgtacatagcattt

SEQ ID NO: 125656 - DNA, 20 bp, Artificial Sequence
  MKO10125656_B_Vmn1r225
  gRNA
ctttgaatgcatccaccaaa

SEQ ID NO: 125657 - DNA, 20 bp, Artificial Sequence
  MKO10125657_B_Vmn1r225
  gRNA
taaacgacagaatggagtcc

SEQ ID NO: 125658 - DNA, 20 bp, Artificial Sequence
  MKO10125658_B_Vmn1r226
  gRNA
gagcactattccaactatca

SEQ ID NO: 125659 - DNA, 20 bp, Artificial Sequence
  MKO10125659_B_Vmn1r226
  gRNA
ccatttatacagctaccaat

SEQ ID NO: 125660 - DNA, 20 bp, Artificial Sequence
  MKO10125660_B_Vmn1r226
  gRNA
ggtgctgatggacatactcc

SEQ ID NO: 125661 - DNA, 20 bp, Artificial Sequence
  MKO10125661_B_Vmn1r227
  gRNA
agcaatatagcctagtaaaa

SEQ ID NO: 125662 - DNA, 20 bp, Artificial Sequence
  MKO10125662_B_Vmn1r227
  gRNA
tgattacccaaaagacactc

SEQ ID NO: 125663 - DNA, 20 bp, Artificial Sequence
  MKO10125663_B_Vmn1r227
  gRNA
ctgtctacacaactaccaag

SEQ ID NO: 125664 - DNA, 20 bp, Artificial Sequence
  MKO10125664_B_Vmn1r228
  gRNA
aagcagttattcaataatgt

SEQ ID NO: 125665 - DNA, 20 bp, Artificial Sequence
  MKO10125665_B_Vmn1r228
  gRNA
cttctagatgttgctttacc

SEQ ID NO: 125666 - DNA, 20 bp, Artificial Sequence
  MKO10125666_B_Vmn1r228
  gRNA
gcctgtccatttccttctac

SEQ ID NO: 125667 - DNA, 20 bp, Artificial Sequence
  MKO10125667_B_Vmn1r229
  gRNA
accatgatagtcatacttta

SEQ ID NO: 125668 - DNA, 20 bp, Artificial Sequence
  MKO10125668_B_Vmn1r229
  gRNA
atgtgcgttctttgttataa

SEQ ID NO: 125669 - DNA, 20 bp, Artificial Sequence
  MKO10125669_B_Vmn1r229
  gRNA
catgctaattgacatactcc

SEQ ID NO: 125670 - DNA, 20 bp, Artificial Sequence
  MKO10125670_B_Vmn1r22
  gRNA
gccaaatatcccctgcagtg

SEQ ID NO: 125671 - DNA, 20 bp, Artificial Sequence
  MKO10125671_B_Vmn1r22
  gRNA
tatgtgcatcacatgcctcc

SEQ ID NO: 125672 - DNA, 20 bp, Artificial Sequence
  MKO10125672_B_Vmn1r22
  gRNA
acagaccatcctgctgctgc

SEQ ID NO: 125673 - DNA, 20 bp, Artificial Sequence
  MKO10125673_B_Vmn1r230
  gRNA
gactctaatattcttccaac

SEQ ID NO: 125674 - DNA, 20 bp, Artificial Sequence
  MKO10125674_B_Vmn1r230
  gRNA
tacatgtccataacatttac

SEQ ID NO: 125675 - DNA, 20 bp, Artificial Sequence
  MKO10125675_B_Vmn1r230
  gRNA
tttgaagcatgagaagtgtt

SEQ ID NO: 125676 - DNA, 20 bp, Artificial Sequence
  MKO10125676_B_Vmn1r231
  gRNA
agctcccagaacagacaata

SEQ ID NO: 125677 - DNA, 20 bp, Artificial Sequence
  MKO10125677_B_Vmn1r231
  gRNA
ccattaaggcacgagtcact

SEQ ID NO: 125678 - DNA, 20 bp, Artificial Sequence
  MKO10125678_B_Vmn1r231
  gRNA
aattatggttaatgacaaga

SEQ ID NO: 125679 - DNA, 20 bp, Artificial Sequence
  MKO10125679_B_Vmn1r232
  gRNA
acccaacatcattgaataac

SEQ ID NO: 125680 - DNA, 20 bp, Artificial Sequence
  MKO10125680_B_Vmn1r232
  gRNA
acccaaaagctcccattatc

SEQ ID NO: 125681 - DNA, 20 bp, Artificial Sequence
  MKO10125681_B_Vmn1r232
  gRNA
aggaacatggcaataggagt

SEQ ID NO: 125682 - DNA, 20 bp, Artificial Sequence
  MKO10125682_B_Vmn1r233
  gRNA
ccctgtataggcacaagcaa

SEQ ID NO: 125683 - DNA, 20 bp, Artificial Sequence
  MKO10125683_B_Vmn1r233
  gRNA
tatagtagagattgtgtaac

SEQ ID NO: 125684 - DNA, 20 bp, Artificial Sequence
  MKO10125684_B_Vmn1r233
  gRNA
ttgacactaatgctgcatac

SEQ ID NO: 125685 - DNA, 20 bp, Artificial Sequence
  MKO10125685_B_Vmn1r234
  gRNA
cgcctcttcccaccctatga

SEQ ID NO: 125686 - DNA, 20 bp, Artificial Sequence
  MKO10125686_B_Vmn1r234
  gRNA
gacccttctgcctgatcccg

SEQ ID NO: 125687 - DNA, 20 bp, Artificial Sequence
  MKO10125687_B_Vmn1r234
  gRNA
ctgggctgatagtgatgacc

SEQ ID NO: 125688 - DNA, 20 bp, Artificial Sequence
  MKO10125688_B_Vmn1r235
  gRNA
tttaagcccaaaagctgcca

SEQ ID NO: 125689 - DNA, 20 bp, Artificial Sequence
  MKO10125689_B_Vmn1r235
  gRNA
taaatgtactcaattgaaga

SEQ ID NO: 125690 - DNA, 20 bp, Artificial Sequence
  MKO10125690_B_Vmn1r235
  gRNA
ataattcaacatccagtctg

SEQ ID NO: 125691 - DNA, 20 bp, Artificial Sequence
  MKO10125691_B_Vmn1r236
  gRNA
acaagttaaggtctacagac

SEQ ID NO: 125692 - DNA, 20 bp, Artificial Sequence
  MKO10125692_B_Vmn1r236
  gRNA
tattcctatagacaactcac

SEQ ID NO: 125693 - DNA, 20 bp, Artificial Sequence
  MKO10125693_B_Vmn1r236
  gRNA
acatagtacagttaagatat

SEQ ID NO: 125694 - DNA, 20 bp, Artificial Sequence
  MKO10125694_B_Vmn1r237
  gRNA
ggctttaagctgtgtccacc

SEQ ID NO: 125695 - DNA, 20 bp, Artificial Sequence
  MKO10125695_B_Vmn1r237
  gRNA
agactaagaaggagttgccc

SEQ ID NO: 125696 - DNA, 20 bp, Artificial Sequence
  MKO10125696_B_Vmn1r237
  gRNA
gtttacaaccaatgtcatcg

SEQ ID NO: 125697 - DNA, 20 bp, Artificial Sequence
  MKO10125697_B_Vmn1r238
  gRNA
aagttatctcttacctaagc

SEQ ID NO: 125698 - DNA, 20 bp, Artificial Sequence
  MKO10125698_B_Vmn1r238
  gRNA
acaagaaaaatgcaactaac

SEQ ID NO: 125699 - DNA, 20 bp, Artificial Sequence
  MKO10125699_B_Vmn1r238
  gRNA
cttctctgatgtcttctgtc

SEQ ID NO: 125700 - DNA, 20 bp, Artificial Sequence
  MKO10125700_B_Vmn1r23
  gRNA
gaaaatcagcagaaacatat

SEQ ID NO: 125701 - DNA, 20 bp, Artificial Sequence
  MKO10125701_B_Vmn1r23
  gRNA
taagaatgacttcatatgta

SEQ ID NO: 125702 - DNA, 20 bp, Artificial Sequence
  MKO10125702_B_Vmn1r23
  gRNA
taacatcattatgtgaacga

SEQ ID NO: 125703 - DNA, 20 bp, Artificial Sequence
  MKO10125703_B_Vmn1r24
  gRNA
taccaccatgtatgaacttg

SEQ ID NO: 125704 - DNA, 20 bp, Artificial Sequence
  MKO10125704_B_Vmn1r24
  gRNA
tccccttataatgttgttca

SEQ ID NO: 125705 - DNA, 20 bp, Artificial Sequence
  MKO10125705_B_Vmn1r24
  gRNA
atgtcacagtcctaagcctg

SEQ ID NO: 125706 - DNA, 20 bp, Artificial Sequence
  MKO10125706_B_Vmn1r25
  gRNA
ctatgagcttctgaacagtc

SEQ ID NO: 125707 - DNA, 20 bp, Artificial Sequence
  MKO10125707_B_Vmn1r25
  gRNA
agtcacctgttagtctatgt

SEQ ID NO: 125708 - DNA, 20 bp, Artificial Sequence
  MKO10125708_B_Vmn1r25
  gRNA
tatacaaatagggtcatgag

SEQ ID NO: 125709 - DNA, 20 bp, Artificial Sequence
  MKO10125709_B_Vmn1r26
  gRNA
ggtgacaacaagtgcataca

SEQ ID NO: 125710 - DNA, 20 bp, Artificial Sequence
  MKO10125710_B_Vmn1r26
  gRNA
gtgccagcatcatgccactt

SEQ ID NO: 125711 - DNA, 20 bp, Artificial Sequence
  MKO10125711_B_Vmn1r26
  gRNA
ttgcccctttaaaaaaagct

SEQ ID NO: 125712 - DNA, 20 bp, Artificial Sequence
  MKO10125712_B_Vmn1r27
  gRNA
aatccacaacagaactgatg

SEQ ID NO: 125713 - DNA, 20 bp, Artificial Sequence
  MKO10125713_B_Vmn1r27
  gRNA
tcagaaacttctgaaccatc

SEQ ID NO: 125714 - DNA, 20 bp, Artificial Sequence
  MKO10125714_B_Vmn1r27
  gRNA
caaccacatcagttctgttg

SEQ ID NO: 125715 - DNA, 20 bp, Artificial Sequence
  MKO10125715_B_Vmn1r28
  gRNA
tcctacaagaaatacatccc

SEQ ID NO: 125716 - DNA, 20 bp, Artificial Sequence
  MKO10125716_B_Vmn1r28
  gRNA
gaacactaccaacagcaaga

SEQ ID NO: 125717 - DNA, 20 bp, Artificial Sequence
  MKO10125717_B_Vmn1r28
  gRNA
atacttccatgacagggttg

SEQ ID NO: 125718 - DNA, 20 bp, Artificial Sequence
  MKO10125718_B_Vmn1r29
  gRNA
ccagaccatcttactgcttg

SEQ ID NO: 125719 - DNA, 20 bp, Artificial Sequence
  MKO10125719_B_Vmn1r29
  gRNA
gaagaccacaagcagtaaga

SEQ ID NO: 125720 - DNA, 20 bp, Artificial Sequence
  MKO10125720_B_Vmn1r29
  gRNA
cctttgatgatgtagttctt

SEQ ID NO: 125721 - DNA, 20 bp, Artificial Sequence
  MKO10125721_B_Vmn1r2
  gRNA
acaagaaaaatgcaactaac

SEQ ID NO: 125722 - DNA, 20 bp, Artificial Sequence
  MKO10125722_B_Vmn1r2
  gRNA
gagtcaagatgtttagaagc

SEQ ID NO: 125723 - DNA, 20 bp, Artificial Sequence
  MKO10125723_B_Vmn1r2
  gRNA
cttctctgatgtcttctgtc

SEQ ID NO: 125724 - DNA, 20 bp, Artificial Sequence
  MKO10125724_B_Vmn1r30
  gRNA
gaaaaccacaagtagtaaga

SEQ ID NO: 125725 - DNA, 20 bp, Artificial Sequence
  MKO10125725_B_Vmn1r30
  gRNA
tgggctttgatctatgacct

SEQ ID NO: 125726 - DNA, 20 bp, Artificial Sequence
  MKO10125726_B_Vmn1r30
  gRNA
aggattgagtgactctcatc

SEQ ID NO: 125727 - DNA, 20 bp, Artificial Sequence
  MKO10125727_B_Vmn1r31
  gRNA
cagtcccaatacctcaatgt

SEQ ID NO: 125728 - DNA, 20 bp, Artificial Sequence
  MKO10125728_B_Vmn1r31
  gRNA
gagtgagaataaccagatgc

SEQ ID NO: 125729 - DNA, 20 bp, Artificial Sequence
  MKO10125729_B_Vmn1r31
  gRNA
aaccatgaacatagaagaac

SEQ ID NO: 125730 - DNA, 20 bp, Artificial Sequence
  MKO10125730_B_Vmn1r32
  gRNA
aatcaccatatatgcacttg

SEQ ID NO: 125731 - DNA, 20 bp, Artificial Sequence
  MKO10125731_B_Vmn1r32
  gRNA
atttgtcattcagcagtaac

SEQ ID NO: 125732 - DNA, 20 bp, Artificial Sequence
  MKO10125732_B_Vmn1r32
  gRNA
tacgagcttcccctgagaaa

SEQ ID NO: 125733 - DNA, 20 bp, Artificial Sequence
  MKO10125733_B_Vmn1r33
  gRNA
aattatcatgtatgcacttg

SEQ ID NO: 125734 - DNA, 20 bp, Artificial Sequence
  MKO10125734_B_Vmn1r33
  gRNA
atactgctcactcttcccca

SEQ ID NO: 125735 - DNA, 20 bp, Artificial Sequence
  MKO10125735_B_Vmn1r33
  gRNA
gaccataattatgtgaacga

SEQ ID NO: 125736 - DNA, 20 bp, Artificial Sequence
  MKO10125736_B_Vmn1r34
  gRNA
tctcaggggatgctctgaag

SEQ ID NO: 125737 - DNA, 20 bp, Artificial Sequence
  MKO10125737_B_Vmn1r34
  gRNA
ccatagctccaagcccagct

SEQ ID NO: 125738 - DNA, 20 bp, Artificial Sequence
  MKO10125738_B_Vmn1r34
  gRNA
ccagactatcttgctgctgc

SEQ ID NO: 125739 - DNA, 20 bp, Artificial Sequence
  MKO10125739_B_Vmn1r35
  gRNA
agtatttaatcaccttcaac

SEQ ID NO: 125740 - DNA, 20 bp, Artificial Sequence
  MKO10125740_B_Vmn1r35
  gRNA
gagtgagaccagccagttga

SEQ ID NO: 125741 - DNA, 20 bp, Artificial Sequence
  MKO10125741_B_Vmn1r35
  gRNA
aaacaacattatgtgaatga

SEQ ID NO: 125742 - DNA, 20 bp, Artificial Sequence
  MKO10125742_B_Vmn1r36
  gRNA
tccccatgaactacatcatc

SEQ ID NO: 125743 - DNA, 20 bp, Artificial Sequence
  MKO10125743_B_Vmn1r36
  gRNA
tgggactgatcgtcacagcc

SEQ ID NO: 125744 - DNA, 20 bp, Artificial Sequence
  MKO10125744_B_Vmn1r36
  gRNA
ttaagagatgtgtttcttgt

SEQ ID NO: 125745 - DNA, 20 bp, Artificial Sequence
  MKO10125745_B_Vmn1r37
  gRNA
tgggactgatcgtcacagcc

SEQ ID NO: 125746 - DNA, 20 bp, Artificial Sequence
  MKO10125746_B_Vmn1r37
  gRNA
tccccatgaactacatcatc

SEQ ID NO: 125747 - DNA, 20 bp, Artificial Sequence
  MKO10125747_B_Vmn1r37
  gRNA
ggcaggtgatgcagatagag

SEQ ID NO: 125748 - DNA, 20 bp, Artificial Sequence
  MKO10125748_B_Vmn1r38
  gRNA
gaccttcattcacataatca

SEQ ID NO: 125749 - DNA, 20 bp, Artificial Sequence
  MKO10125749_B_Vmn1r38
  gRNA
tgatagtgtagaaaataaga

SEQ ID NO: 125750 - DNA, 20 bp, Artificial Sequence
  MKO10125750_B_Vmn1r38
  gRNA
tccctatgaacaacatcatc

SEQ ID NO: 125751 - DNA, 20 bp, Artificial Sequence
  MKO10125751_B_Vmn1r39
  gRNA
gaagatgcttgcattgcctc

SEQ ID NO: 125752 - DNA, 20 bp, Artificial Sequence
  MKO10125752_B_Vmn1r39
  gRNA
ctagggttccaagtacagct

SEQ ID NO: 125753 - DNA, 20 bp, Artificial Sequence
  MKO10125753_B_Vmn1r39
  gRNA
ttctgaacagtcaacatgac

SEQ ID NO: 125754 - DNA, 20 bp, Artificial Sequence
  MKO10125754_B_Vmn1r3
  gRNA
cttctctgatgtcttctgtc

SEQ ID NO: 125755 - DNA, 20 bp, Artificial Sequence
  MKO10125755_B_Vmn1r3
  gRNA
gagtcaagatgtttagaagc

SEQ ID NO: 125756 - DNA, 20 bp, Artificial Sequence
  MKO10125756_B_Vmn1r3
  gRNA
ggcctgctcaagtatctcca

SEQ ID NO: 125757 - DNA, 20 bp, Artificial Sequence
  MKO10125757_B_Vmn1r40
  gRNA
ttctacctctgagttactcc

SEQ ID NO: 125758 - DNA, 20 bp, Artificial Sequence
  MKO10125758_B_Vmn1r40
  gRNA
aaatctcctcatcatatctc

SEQ ID NO: 125759 - DNA, 20 bp, Artificial Sequence
  MKO10125759_B_Vmn1r40
  gRNA
tgtggacatgtttctatctc

SEQ ID NO: 125760 - DNA, 20 bp, Artificial Sequence
  MKO10125760_B_Vmn1r41
  gRNA
ttgttctctgaagtgagtgt

SEQ ID NO: 125761 - DNA, 20 bp, Artificial Sequence
  MKO10125761_B_Vmn1r41
  gRNA
tgtggaaaacatgcttgtcc

SEQ ID NO: 125762 - DNA, 20 bp, Artificial Sequence
  MKO10125762_B_Vmn1r41
  gRNA
tttccacagcgatagccatc

SEQ ID NO: 125763 - DNA, 20 bp, Artificial Sequence
  MKO10125763_B_Vmn1r42
  gRNA
gtttcctgtgcatgcttaag

SEQ ID NO: 125764 - DNA, 20 bp, Artificial Sequence
  MKO10125764_B_Vmn1r42
  gRNA
ctacatactcattctatcat

SEQ ID NO: 125765 - DNA, 20 bp, Artificial Sequence
  MKO10125765_B_Vmn1r42
  gRNA
ctaccatgtaccaattagag

SEQ ID NO: 125766 - DNA, 20 bp, Artificial Sequence
  MKO10125766_B_Vmn1r43
  gRNA
attctacgctgctagccatc

SEQ ID NO: 125767 - DNA, 20 bp, Artificial Sequence
  MKO10125767_B_Vmn1r43
  gRNA
gtatgtgagaacagtgaaca

SEQ ID NO: 125768 - DNA, 20 bp, Artificial Sequence
  MKO10125768_B_Vmn1r43
  gRNA
aacataagtaaggtcatttg

SEQ ID NO: 125769 - DNA, 20 bp, Artificial Sequence
  MKO10125769_B_Vmn1r44
  gRNA
tgcagaggtaggctataaaa

SEQ ID NO: 125770 - DNA, 20 bp, Artificial Sequence
  MKO10125770_B_Vmn1r44
  gRNA
gcctacctctgcatgctcct

SEQ ID NO: 125771 - DNA, 20 bp, Artificial Sequence
  MKO10125771_B_Vmn1r44
  gRNA
taagcagcattagttgagtt

SEQ ID NO: 125772 - DNA, 20 bp, Artificial Sequence
  MKO10125772_B_Vmn1r45
  gRNA
cttactgatgctactgctca

SEQ ID NO: 125773 - DNA, 20 bp, Artificial Sequence
  MKO10125773_B_Vmn1r45
  gRNA
caaattgggggtagcaatga

SEQ ID NO: 125774 - DNA, 20 bp, Artificial Sequence
  MKO10125774_B_Vmn1r45
  gRNA
gtgcttgagctttgctaaac

SEQ ID NO: 125775 - DNA, 20 bp, Artificial Sequence
  MKO10125775_B_Vmn1r46
  gRNA
actctgttatcttctactca

SEQ ID NO: 125776 - DNA, 20 bp, Artificial Sequence
  MKO10125776_B_Vmn1r46
  gRNA
gtttcttggactaagggtga

SEQ ID NO: 125777 - DNA, 20 bp, Artificial Sequence
  MKO10125777_B_Vmn1r46
  gRNA
cctaatgctgcttgtaacta

SEQ ID NO: 125778 - DNA, 20 bp, Artificial Sequence
  MKO10125778_B_Vmn1r47
  gRNA
atttattatccactcacaca

SEQ ID NO: 125779 - DNA, 20 bp, Artificial Sequence
  MKO10125779_B_Vmn1r47
  gRNA
gactgctaattgacatatac

SEQ ID NO: 125780 - DNA, 20 bp, Artificial Sequence
  MKO10125780_B_Vmn1r47
  gRNA
tggccctcttgtgcatgcac

SEQ ID NO: 125781 - DNA, 20 bp, Artificial Sequence
  MKO10125781_B_Vmn1r48
  gRNA
tcagtgcttataaacacaaa

SEQ ID NO: 125782 - DNA, 20 bp, Artificial Sequence
  MKO10125782_B_Vmn1r48
  gRNA
tacacactcattctaacata

SEQ ID NO: 125783 - DNA, 20 bp, Artificial Sequence
  MKO10125783_B_Vmn1r48
  gRNA
ctcagggaagtctttcttat

SEQ ID NO: 125784 - DNA, 20 bp, Artificial Sequence
  MKO10125784_B_Vmn1r49
  gRNA
gctgctcacgagcctctttg

SEQ ID NO: 125785 - DNA, 20 bp, Artificial Sequence
  MKO10125785_B_Vmn1r49
  gRNA
aaagagttgtcttccaatca

SEQ ID NO: 125786 - DNA, 20 bp, Artificial Sequence
  MKO10125786_B_Vmn1r49
  gRNA
tgagttactccagagaaagc

SEQ ID NO: 125787 - DNA, 20 bp, Artificial Sequence
  MKO10125787_B_Vmn1r4
  gRNA
aagaaacacgtctcttaaga

SEQ ID NO: 125788 - DNA, 20 bp, Artificial Sequence
  MKO10125788_B_Vmn1r4
  gRNA
taagatgtcattgtgactgt

SEQ ID NO: 125789 - DNA, 20 bp, Artificial Sequence
  MKO10125789_B_Vmn1r4
  gRNA
ctgataacagaataatcaat

SEQ ID NO: 125790 - DNA, 20 bp, Artificial Sequence
  MKO10125790_B_Vmn1r50
  gRNA
gtttgggcttgttctcatga

SEQ ID NO: 125791 - DNA, 20 bp, Artificial Sequence
  MKO10125791_B_Vmn1r50
  gRNA
aagtttgtcacatcaatgtg

SEQ ID NO: 125792 - DNA, 20 bp, Artificial Sequence
  MKO10125792_B_Vmn1r50
  gRNA
gaagcccatgagtagcatga

SEQ ID NO: 125793 - DNA, 20 bp, Artificial Sequence
  MKO10125793_B_Vmn1r51
  gRNA
atatgatgaatgagaacagc

SEQ ID NO: 125794 - DNA, 20 bp, Artificial Sequence
  MKO10125794_B_Vmn1r51
  gRNA
tacacactcattctaactta

SEQ ID NO: 125795 - DNA, 20 bp, Artificial Sequence
  MKO10125795_B_Vmn1r51
  gRNA
ccatgaccagtagcattagt

SEQ ID NO: 125796 - DNA, 20 bp, Artificial Sequence
  MKO10125796_B_Vmn1r52
  gRNA
gaatagctgctattaaaata

SEQ ID NO: 125797 - DNA, 20 bp, Artificial Sequence
  MKO10125797_B_Vmn1r52
  gRNA
attcctgaaagccaacagtg

SEQ ID NO: 125798 - DNA, 20 bp, Artificial Sequence
  MKO10125798_B_Vmn1r52
  gRNA
aatgccttcttctctgagat

SEQ ID NO: 125799 - DNA, 20 bp, Artificial Sequence
  MKO10125799_B_Vmn1r53
  gRNA
aagaaaggctggtcctgtga

SEQ ID NO: 125800 - DNA, 20 bp, Artificial Sequence
  MKO10125800_B_Vmn1r53
  gRNA
tgcagagatgggcaaaaata

SEQ ID NO: 125801 - DNA, 20 bp, Artificial Sequence
  MKO10125801_B_Vmn1r53
  gRNA
ccttgaacttcattcttgag

SEQ ID NO: 125802 - DNA, 20 bp, Artificial Sequence
  MKO10125802_B_Vmn1r54
  gRNA
tggtaaccatcatattgctc

SEQ ID NO: 125803 - DNA, 20 bp, Artificial Sequence
  MKO10125803_B_Vmn1r54
  gRNA
cctattcctgagcaatatga

SEQ ID NO: 125804 - DNA, 20 bp, Artificial Sequence
  MKO10125804_B_Vmn1r54
  gRNA
aatgggcaggtcaatatgtc

SEQ ID NO: 125805 - DNA, 20 bp, Artificial Sequence
  MKO10125805_B_Vmn1r55
  gRNA
tgttctctgtacttcaatgt

SEQ ID NO: 125806 - DNA, 20 bp, Artificial Sequence
  MKO10125806_B_Vmn1r55
  gRNA
taatgactttgccagtcaca

SEQ ID NO: 125807 - DNA, 20 bp, Artificial Sequence
  MKO10125807_B_Vmn1r55
  gRNA
acaagagtatctcacgacct

SEQ ID NO: 125808 - DNA, 20 bp, Artificial Sequence
  MKO10125808_B_Vmn1r56
  gRNA
agtcgggaatcagtcaagat

SEQ ID NO: 125809 - DNA, 20 bp, Artificial Sequence
  MKO10125809_B_Vmn1r56
  gRNA
tcttgactgattcccgactg

SEQ ID NO: 125810 - DNA, 20 bp, Artificial Sequence
  MKO10125810_B_Vmn1r56
  gRNA
catcatgttccttagcatca

SEQ ID NO: 125811 - DNA, 20 bp, Artificial Sequence
  MKO10125811_B_Vmn1r57
  gRNA
gcctggaaatccacgtgact

SEQ ID NO: 125812 - DNA, 20 bp, Artificial Sequence
  MKO10125812_B_Vmn1r57
  gRNA
tccttggaacaaaatcaatc

SEQ ID NO: 125813 - DNA, 20 bp, Artificial Sequence
  MKO10125813_B_Vmn1r57
  gRNA
agtctggagtcagtcaagtt

SEQ ID NO: 125814 - DNA, 20 bp, Artificial Sequence
  MKO10125814_B_Vmn1r58
  gRNA
atccctaaatatcaaaagaa

SEQ ID NO: 125815 - DNA, 20 bp, Artificial Sequence
  MKO10125815_B_Vmn1r58
  gRNA
gaggtatgccacaaaactcc

SEQ ID NO: 125816 - DNA, 20 bp, Artificial Sequence
  MKO10125816_B_Vmn1r58
  gRNA
cagtttgtcactcttgtccc

SEQ ID NO: 125817 - DNA, 20 bp, Artificial Sequence
  MKO10125817_B_Vmn1r59
  gRNA
atgtagacatgcatttcttg

SEQ ID NO: 125818 - DNA, 20 bp, Artificial Sequence
  MKO10125818_B_Vmn1r59
  gRNA
gagaatgaaccgcatacata

SEQ ID NO: 125819 - DNA, 20 bp, Artificial Sequence
  MKO10125819_B_Vmn1r59
  gRNA
agtctggagtcagtcaagac

SEQ ID NO: 125820 - DNA, 20 bp, Artificial Sequence
  MKO10125820_B_Vmn1r5
  gRNA
tttagtagccttcatctgtt

SEQ ID NO: 125821 - DNA, 20 bp, Artificial Sequence
  MKO10125821_B_Vmn1r5
  gRNA
agtaaccagatcttctttgt

SEQ ID NO: 125822 - DNA, 20 bp, Artificial Sequence
  MKO10125822_B_Vmn1r5
  gRNA
catataatcatgtttctcac

SEQ ID NO: 125823 - DNA, 20 bp, Artificial Sequence
  MKO10125823_B_Vmn1r60
  gRNA
ttctttcacctagttgctcg

SEQ ID NO: 125824 - DNA, 20 bp, Artificial Sequence
  MKO10125824_B_Vmn1r60
  gRNA
gtgtggacatgaatgtcttg

SEQ ID NO: 125825 - DNA, 20 bp, Artificial Sequence
  MKO10125825_B_Vmn1r60
  gRNA
tattaaggaatatgatgtca

SEQ ID NO: 125826 - DNA, 20 bp, Artificial Sequence
  MKO10125826_B_Vmn1r61
  gRNA
agtttacatttgacttcagt

SEQ ID NO: 125827 - DNA, 20 bp, Artificial Sequence
  MKO10125827_B_Vmn1r61
  gRNA
tcgtggggaagcttagagcc

SEQ ID NO: 125828 - DNA, 20 bp, Artificial Sequence
  MKO10125828_B_Vmn1r61
  gRNA
tcaagattcgagagaagtta

SEQ ID NO: 125829 - DNA, 20 bp, Artificial Sequence
  MKO10125829_B_Vmn1r62
  gRNA
tacatgctaatgaatgtcag

SEQ ID NO: 125830 - DNA, 20 bp, Artificial Sequence
  MKO10125830_B_Vmn1r62
  gRNA
gagtcattgtgtgatttctg

SEQ ID NO: 125831 - DNA, 20 bp, Artificial Sequence
  MKO10125831_B_Vmn1r62
  gRNA
aattcgatatgctccatctc

SEQ ID NO: 125832 - DNA, 20 bp, Artificial Sequence
  MKO10125832_B_Vmn1r63
  gRNA
gtctacactgaccccagaga

SEQ ID NO: 125833 - DNA, 20 bp, Artificial Sequence
  MKO10125833_B_Vmn1r63
  gRNA
cacaatgactctgattctaa

SEQ ID NO: 125834 - DNA, 20 bp, Artificial Sequence
  MKO10125834_B_Vmn1r63
  gRNA
gagtcattgtgtgatttctg

SEQ ID NO: 125835 - DNA, 20 bp, Artificial Sequence
  MKO10125835_B_Vmn1r64
  gRNA
ctcccttcctgttgatttgt

SEQ ID NO: 125836 - DNA, 20 bp, Artificial Sequence
  MKO10125836_B_Vmn1r64
  gRNA
tcctgggaacaaaatcaatc

SEQ ID NO: 125837 - DNA, 20 bp, Artificial Sequence
  MKO10125837_B_Vmn1r64
  gRNA
tcttgactgactcccgactg

SEQ ID NO: 125838 - DNA, 20 bp, Artificial Sequence
  MKO10125838_B_Vmn1r65
  gRNA
tctgttcaggtgaagcacta

SEQ ID NO: 125839 - DNA, 20 bp, Artificial Sequence
  MKO10125839_B_Vmn1r65
  gRNA
gagcttcttacagtttgccc

SEQ ID NO: 125840 - DNA, 20 bp, Artificial Sequence
  MKO10125840_B_Vmn1r65
  gRNA
catccaaacaaacttagctg

SEQ ID NO: 125841 - DNA, 20 bp, Artificial Sequence
  MKO10125841_B_Vmn1r66
  gRNA
gccaatatactttgcaactt

SEQ ID NO: 125842 - DNA, 20 bp, Artificial Sequence
  MKO10125842_B_Vmn1r66
  gRNA
gccttgatagttctttctac

SEQ ID NO: 125843 - DNA, 20 bp, Artificial Sequence
  MKO10125843_B_Vmn1r66
  gRNA
atccagaccaaacttagtct

SEQ ID NO: 125844 - DNA, 20 bp, Artificial Sequence
  MKO10125844_B_Vmn1r67
  gRNA
acaatgattcataagaacga

SEQ ID NO: 125845 - DNA, 20 bp, Artificial Sequence
  MKO10125845_B_Vmn1r67
  gRNA
gccttgatagttctctttac

SEQ ID NO: 125846 - DNA, 20 bp, Artificial Sequence
  MKO10125846_B_Vmn1r67
  gRNA
tttgattctcatgcacctaa

SEQ ID NO: 125847 - DNA, 20 bp, Artificial Sequence
  MKO10125847_B_Vmn1r68
  gRNA
taccctatgactgattgtaa

SEQ ID NO: 125848 - DNA, 20 bp, Artificial Sequence
  MKO10125848_B_Vmn1r68
  gRNA
gtaatgactcattagaacac

SEQ ID NO: 125849 - DNA, 20 bp, Artificial Sequence
  MKO10125849_B_Vmn1r68
  gRNA
tcatagggtatcttgttata

SEQ ID NO: 125850 - DNA, 20 bp, Artificial Sequence
  MKO10125850_B_Vmn1r69
  gRNA
gtcaaatctgcaaagtacgt

SEQ ID NO: 125851 - DNA, 20 bp, Artificial Sequence
  MKO10125851_B_Vmn1r69
  gRNA
cttactctatgtagcattag

SEQ ID NO: 125852 - DNA, 20 bp, Artificial Sequence
  MKO10125852_B_Vmn1r69
  gRNA
tgcccaaactcagtttgacc

SEQ ID NO: 125853 - DNA, 20 bp, Artificial Sequence
  MKO10125853_B_Vmn1r6
  gRNA
gaagatcctgttactactga

SEQ ID NO: 125854 - DNA, 20 bp, Artificial Sequence
  MKO10125854_B_Vmn1r6
  gRNA
caaccacctcattcctctta

SEQ ID NO: 125855 - DNA, 20 bp, Artificial Sequence
  MKO10125855_B_Vmn1r6
  gRNA
gaaaactaccagcatcaaga

SEQ ID NO: 125856 - DNA, 20 bp, Artificial Sequence
  MKO10125856_B_Vmn1r70
  gRNA
tttatcatcgctgacttcac

SEQ ID NO: 125857 - DNA, 20 bp, Artificial Sequence
  MKO10125857_B_Vmn1r70
  gRNA
tttctgtcccagattgtgct

SEQ ID NO: 125858 - DNA, 20 bp, Artificial Sequence
  MKO10125858_B_Vmn1r70
  gRNA
aggtcaggtgtttaacaatt

SEQ ID NO: 125859 - DNA, 20 bp, Artificial Sequence
  MKO10125859_B_Vmn1r71
  gRNA
ctggtgatacttctctctat

SEQ ID NO: 125860 - DNA, 20 bp, Artificial Sequence
  MKO10125860_B_Vmn1r71
  gRNA
agctacaaagcctcttaaga

SEQ ID NO: 125861 - DNA, 20 bp, Artificial Sequence
  MKO10125861_B_Vmn1r71
  gRNA
tctctcaccaccatcttaag

SEQ ID NO: 125862 - DNA, 20 bp, Artificial Sequence
  MKO10125862_B_Vmn1r72
  gRNA
ttgtttaagcatcagccctt

SEQ ID NO: 125863 - DNA, 20 bp, Artificial Sequence
  MKO10125863_B_Vmn1r72
  gRNA
atttacatccagtgacatcc

SEQ ID NO: 125864 - DNA, 20 bp, Artificial Sequence
  MKO10125864_B_Vmn1r72
  gRNA
aaagatttcctggatgtcac

SEQ ID NO: 125865 - DNA, 20 bp, Artificial Sequence
  MKO10125865_B_Vmn1r73
  gRNA
ttatttgttctcctccatta

SEQ ID NO: 125866 - DNA, 20 bp, Artificial Sequence
  MKO10125866_B_Vmn1r73
  gRNA
ccacagacactgttgaatta

SEQ ID NO: 125867 - DNA, 20 bp, Artificial Sequence
  MKO10125867_B_Vmn1r73
  gRNA
caaagagctactaagtacat

SEQ ID NO: 125868 - DNA, 20 bp, Artificial Sequence
  MKO10125868_B_Vmn1r74
  gRNA
atacttaccacccatagcat

SEQ ID NO: 125869 - DNA, 20 bp, Artificial Sequence
  MKO10125869_B_Vmn1r74
  gRNA
tatgcttatcgaataacaag

SEQ ID NO: 125870 - DNA, 20 bp, Artificial Sequence
  MKO10125870_B_Vmn1r74
  gRNA
ccacagacactgtcaaatta

SEQ ID NO: 125871 - DNA, 20 bp, Artificial Sequence
  MKO10125871_B_Vmn1r75
  gRNA
ccacaatctgacattgcccg

SEQ ID NO: 125872 - DNA, 20 bp, Artificial Sequence
  MKO10125872_B_Vmn1r75
  gRNA
ggttgtcaagatgaccacta

SEQ ID NO: 125873 - DNA, 20 bp, Artificial Sequence
  MKO10125873_B_Vmn1r75
  gRNA
aattcccattgcaaaatgcc

SEQ ID NO: 125874 - DNA, 20 bp, Artificial Sequence
  MKO10125874_B_Vmn1r76
  gRNA
aagttatctcttacaaaagc

SEQ ID NO: 125875 - DNA, 20 bp, Artificial Sequence
  MKO10125875_B_Vmn1r76
  gRNA
tgatttatggttcttgttca

SEQ ID NO: 125876 - DNA, 20 bp, Artificial Sequence
  MKO10125876_B_Vmn1r76
  gRNA
ctgtgtctgggtctcatggc

SEQ ID NO: 125877 - DNA, 20 bp, Artificial Sequence
  MKO10125877_B_Vmn1r77
  gRNA
tcatcttaagagacattcca

SEQ ID NO: 125878 - DNA, 20 bp, Artificial Sequence
  MKO10125878_B_Vmn1r77
  gRNA
tggacatacatcttgttatt

SEQ ID NO: 125879 - DNA, 20 bp, Artificial Sequence
  MKO10125879_B_Vmn1r77
  gRNA
caaatatacacagaaagatg

SEQ ID NO: 125880 - DNA, 20 bp, Artificial Sequence
  MKO10125880_B_Vmn1r78
  gRNA
cagagcagttgccacatttc

SEQ ID NO: 125881 - DNA, 20 bp, Artificial Sequence
  MKO10125881_B_Vmn1r78
  gRNA
ttggctcatgcaatatttga

SEQ ID NO: 125882 - DNA, 20 bp, Artificial Sequence
  MKO10125882_B_Vmn1r78
  gRNA
caatcagccccagcaacacc

SEQ ID NO: 125883 - DNA, 20 bp, Artificial Sequence
  MKO10125883_B_Vmn1r79
  gRNA
tgggactgatggtgattgct

SEQ ID NO: 125884 - DNA, 20 bp, Artificial Sequence
  MKO10125884_B_Vmn1r79
  gRNA
agttatctcttacctaagca

SEQ ID NO: 125885 - DNA, 20 bp, Artificial Sequence
  MKO10125885_B_Vmn1r79
  gRNA
ataggaatgaaaatggatcc

SEQ ID NO: 125886 - DNA, 20 bp, Artificial Sequence
  MKO10125886_B_Vmn1r7
  gRNA
ctttctttgttgtcctatac

SEQ ID NO: 125887 - DNA, 20 bp, Artificial Sequence
  MKO10125887_B_Vmn1r7
  gRNA
aaccaccattatgtgaacaa

SEQ ID NO: 125888 - DNA, 20 bp, Artificial Sequence
  MKO10125888_B_Vmn1r7
  gRNA
catttacctcagaaatgtta

SEQ ID NO: 125889 - DNA, 20 bp, Artificial Sequence
  MKO10125889_B_Vmn1r80
  gRNA
ttaaaaaatcttgagccctg

SEQ ID NO: 125890 - DNA, 20 bp, Artificial Sequence
  MKO10125890_B_Vmn1r80
  gRNA
gagaaagttattatgaaagc

SEQ ID NO: 125891 - DNA, 20 bp, Artificial Sequence
  MKO10125891_B_Vmn1r80
  gRNA
catgaaaactatcctcatcc

SEQ ID NO: 125892 - DNA, 20 bp, Artificial Sequence
  MKO10125892_B_Vmn1r81
  gRNA
agtgcagttgccagattgct

SEQ ID NO: 125893 - DNA, 20 bp, Artificial Sequence
  MKO10125893_B_Vmn1r81
  gRNA
cctgtatgcaatgtgcctac

SEQ ID NO: 125894 - DNA, 20 bp, Artificial Sequence
  MKO10125894_B_Vmn1r81
  gRNA
tgtatatttaccgagtaaca

SEQ ID NO: 125895 - DNA, 20 bp, Artificial Sequence
  MKO10125895_B_Vmn1r82
  gRNA
tcagccttatttggtaatcc

SEQ ID NO: 125896 - DNA, 20 bp, Artificial Sequence
  MKO10125896_B_Vmn1r82
  gRNA
tcagctcaagcaccaccaaa

SEQ ID NO: 125897 - DNA, 20 bp, Artificial Sequence
  MKO10125897_B_Vmn1r82
  gRNA
ttgtatatagtgaaaccccc

SEQ ID NO: 125898 - DNA, 20 bp, Artificial Sequence
  MKO10125898_B_Vmn1r83
  gRNA
cacagagccgtgaagtacgt

SEQ ID NO: 125899 - DNA, 20 bp, Artificial Sequence
  MKO10125899_B_Vmn1r83
  gRNA
tgtatatttaccgaatagtg

SEQ ID NO: 125900 - DNA, 20 bp, Artificial Sequence
  MKO10125900_B_Vmn1r83
  gRNA
gagacatccccctcactatt

SEQ ID NO: 125901 - DNA, 20 bp, Artificial Sequence
  MKO10125901_B_Vmn1r84
  gRNA
ttatggtgaagattctctat

SEQ ID NO: 125902 - DNA, 20 bp, Artificial Sequence
  MKO10125902_B_Vmn1r84
  gRNA
ctttaccctgctgtagtaga

SEQ ID NO: 125903 - DNA, 20 bp, Artificial Sequence
  MKO10125903_B_Vmn1r84
  gRNA
actggggttgcagtatctcc

SEQ ID NO: 125904 - DNA, 20 bp, Artificial Sequence
  MKO10125904_B_Vmn1r85
  gRNA
tgtatatctatagagtctcc

SEQ ID NO: 125905 - DNA, 20 bp, Artificial Sequence
  MKO10125905_B_Vmn1r85
  gRNA
acttaatcaccctttatgat

SEQ ID NO: 125906 - DNA, 20 bp, Artificial Sequence
  MKO10125906_B_Vmn1r85
  gRNA
cctggattggggtactcaac

SEQ ID NO: 125907 - DNA, 20 bp, Artificial Sequence
  MKO10125907_B_Vmn1r86
  gRNA
aaaacaaataacagtcacgt

SEQ ID NO: 125908 - DNA, 20 bp, Artificial Sequence
  MKO10125908_B_Vmn1r86
  gRNA
cactcatgatctcatctatg

SEQ ID NO: 125909 - DNA, 20 bp, Artificial Sequence
  MKO10125909_B_Vmn1r86
  gRNA
ggagatgctgggctgtcttg

SEQ ID NO: 125910 - DNA, 20 bp, Artificial Sequence
  MKO10125910_B_Vmn1r87
  gRNA
gatatactgccgaagtagcc

SEQ ID NO: 125911 - DNA, 20 bp, Artificial Sequence
  MKO10125911_B_Vmn1r87
  gRNA
acccaagagcaacccagtat

SEQ ID NO: 125912 - DNA, 20 bp, Artificial Sequence
  MKO10125912_B_Vmn1r87
  gRNA
tcatgagatcctttgcagtc

SEQ ID NO: 125913 - DNA, 20 bp, Artificial Sequence
  MKO10125913_B_Vmn1r88
  gRNA
gataagtagattaataatcc

SEQ ID NO: 125914 - DNA, 20 bp, Artificial Sequence
  MKO10125914_B_Vmn1r88
  gRNA
ataatcctacgtttgtctcc

SEQ ID NO: 125915 - DNA, 20 bp, Artificial Sequence
  MKO10125915_B_Vmn1r88
  gRNA
ggagatgctgggctaacttg

SEQ ID NO: 125916 - DNA, 20 bp, Artificial Sequence
  MKO10125916_B_Vmn1r89
  gRNA
cttattaacctagtcatcta

SEQ ID NO: 125917 - DNA, 20 bp, Artificial Sequence
  MKO10125917_B_Vmn1r89
  gRNA
gcattaattgactccaatct

SEQ ID NO: 125918 - DNA, 20 bp, Artificial Sequence
  MKO10125918_B_Vmn1r89
  gRNA
ctgaatatccattgccaaca

SEQ ID NO: 125919 - DNA, 20 bp, Artificial Sequence
  MKO10125919_B_Vmn1r8
  gRNA
tattgtaaaaataagtcccc

SEQ ID NO: 125920 - DNA, 20 bp, Artificial Sequence
  MKO10125920_B_Vmn1r8
  gRNA
tacccatgaaccacatcacc

SEQ ID NO: 125921 - DNA, 20 bp, Artificial Sequence
  MKO10125921_B_Vmn1r8
  gRNA
atttgtctttcagtactaac

SEQ ID NO: 125922 - DNA, 20 bp, Artificial Sequence
  MKO10125922_B_Vmn1r90
  gRNA
ccacaagcatagcaatgcta

SEQ ID NO: 125923 - DNA, 20 bp, Artificial Sequence
  MKO10125923_B_Vmn1r90
  gRNA
ccatagcattgctatgcttg

SEQ ID NO: 125924 - DNA, 20 bp, Artificial Sequence
  MKO10125924_B_Vmn1r90
  gRNA
gttagtacaaatcacttgtt

SEQ ID NO: 125925 - DNA, 20 bp, Artificial Sequence
  MKO10125925_B_Vmn1r91
  gRNA
tctctgaagatcaacactaa

SEQ ID NO: 125926 - DNA, 20 bp, Artificial Sequence
  MKO10125926_B_Vmn1r91
  gRNA
gatatttccaaacaacatga

SEQ ID NO: 125927 - DNA, 20 bp, Artificial Sequence
  MKO10125927_B_Vmn1r91
  gRNA
tggggtcctgattgggagtg

SEQ ID NO: 125928 - DNA, 20 bp, Artificial Sequence
  MKO10125928_B_Vmn1r93
  gRNA
gttattcttgttacggttgt

SEQ ID NO: 125929 - DNA, 20 bp, Artificial Sequence
  MKO10125929_B_Vmn1r93
  gRNA
tcttacagtgaatccagaag

SEQ ID NO: 125930 - DNA, 20 bp, Artificial Sequence
  MKO10125930_B_Vmn1r93
  gRNA
taacatccacattccaatta

SEQ ID NO: 125931 - DNA, 20 bp, Artificial Sequence
  MKO10125931_B_Vmn1r94
  gRNA
taacatccacattccaatta

SEQ ID NO: 125932 - DNA, 20 bp, Artificial Sequence
  MKO10125932_B_Vmn1r94
  gRNA
gcctacaatgaatccagaag

SEQ ID NO: 125933 - DNA, 20 bp, Artificial Sequence
  MKO10125933_B_Vmn1r94
  gRNA
aacttgttctgttccacttc

SEQ ID NO: 125934 - DNA, 20 bp, Artificial Sequence
  MKO10125934_B_Vmn1r95
  gRNA
attattcctgctacagttgt

SEQ ID NO: 125935 - DNA, 20 bp, Artificial Sequence
  MKO10125935_B_Vmn1r95
  gRNA
gtgttattgtctgttatctg

SEQ ID NO: 125936 - DNA, 20 bp, Artificial Sequence
  MKO10125936_B_Vmn1r95
  gRNA
taacatccacattccaatta

SEQ ID NO: 125937 - DNA, 20 bp, Artificial Sequence
  MKO10125937_B_Vmn1r9
  gRNA
cattcacctcagacatgata

SEQ ID NO: 125938 - DNA, 20 bp, Artificial Sequence
  MKO10125938_B_Vmn1r9
  gRNA
gaaagacaccagcagcaaga

SEQ ID NO: 125939 - DNA, 20 bp, Artificial Sequence
  MKO10125939_B_Vmn1r9
  gRNA
tcataaacttctgaacagtc

SEQ ID NO: 125940 - DNA, 20 bp, Artificial Sequence
  MKO10125940_B_Vmn2r100
  gRNA
tgagacttcagcaacttcaa

SEQ ID NO: 125941 - DNA, 20 bp, Artificial Sequence
  MKO10125941_B_Vmn2r100
  gRNA
taaaacctttctttccacat

SEQ ID NO: 125942 - DNA, 20 bp, Artificial Sequence
  MKO10125942_B_Vmn2r100
  gRNA
cacagcccatgtggaaagaa

SEQ ID NO: 125943 - DNA, 20 bp, Artificial Sequence
  MKO10125943_B_Vmn2r101
  gRNA
gttgaagcaatgtccctatc

SEQ ID NO: 125944 - DNA, 20 bp, Artificial Sequence
  MKO10125944_B_Vmn2r101
  gRNA
ctttcagttcaatgtctttc

SEQ ID NO: 125945 - DNA, 20 bp, Artificial Sequence
  MKO10125945_B_Vmn2r101
  gRNA
tgctctgcaatttgcaattg

SEQ ID NO: 125946 - DNA, 20 bp, Artificial Sequence
  MKO10125946_B_Vmn2r102
  gRNA
ctgttacccaacacatctct

SEQ ID NO: 125947 - DNA, 20 bp, Artificial Sequence
  MKO10125947_B_Vmn2r102
  gRNA
aaagataactgttgaccctg

SEQ ID NO: 125948 - DNA, 20 bp, Artificial Sequence
  MKO10125948_B_Vmn2r102
  gRNA
cccacctctgaaaatatttc

SEQ ID NO: 125949 - DNA, 20 bp, Artificial Sequence
  MKO10125949_B_Vmn2r103
  gRNA
gaaatctcgttgtctccaca

SEQ ID NO: 125950 - DNA, 20 bp, Artificial Sequence
  MKO10125950_B_Vmn2r103
  gRNA
ctattacccaacacatctct

SEQ ID NO: 125951 - DNA, 20 bp, Artificial Sequence
  MKO10125951_B_Vmn2r103
  gRNA
ataaagacaactcttgaccc

SEQ ID NO: 125952 - DNA, 20 bp, Artificial Sequence
  MKO10125952_B_Vmn2r104
  gRNA
tatcattgctctctttacat

SEQ ID NO: 125953 - DNA, 20 bp, Artificial Sequence
  MKO10125953_B_Vmn2r104
  gRNA
ctcattagatatctcattgt

SEQ ID NO: 125954 - DNA, 20 bp, Artificial Sequence
  MKO10125954_B_Vmn2r104
  gRNA
tcagctaaacacattcctga

SEQ ID NO: 125955 - DNA, 20 bp, Artificial Sequence
  MKO10125955_B_Vmn2r105
  gRNA
taactgagcagatcatccaa

SEQ ID NO: 125956 - DNA, 20 bp, Artificial Sequence
  MKO10125956_B_Vmn2r105
  gRNA
tattcagtcatgtgacataa

SEQ ID NO: 125957 - DNA, 20 bp, Artificial Sequence
  MKO10125957_B_Vmn2r105
  gRNA
tggaccatatctgcacaaat

SEQ ID NO: 125958 - DNA, 20 bp, Artificial Sequence
  MKO10125958_B_Vmn2r106
  gRNA
gagtgtccttctcagtgaat

SEQ ID NO: 125959 - DNA, 20 bp, Artificial Sequence
  MKO10125959_B_Vmn2r106
  gRNA
ctcacatctaaaaatccttc

SEQ ID NO: 125960 - DNA, 20 bp, Artificial Sequence
  MKO10125960_B_Vmn2r106
  gRNA
tcagcttaacactttcttaa

SEQ ID NO: 125961 - DNA, 20 bp, Artificial Sequence
  MKO10125961_B_Vmn2r107
  gRNA
gatcctttcttgagtgaccg

SEQ ID NO: 125962 - DNA, 20 bp, Artificial Sequence
  MKO10125962_B_Vmn2r107
  gRNA
gaaagtaaccctggagaata

SEQ ID NO: 125963 - DNA, 20 bp, Artificial Sequence
  MKO10125963_B_Vmn2r107
  gRNA
cacttatgaatactgttatt

SEQ ID NO: 125964 - DNA, 20 bp, Artificial Sequence
  MKO10125964_B_Vmn2r108
  gRNA
gagagagacaatatgagttt

SEQ ID NO: 125965 - DNA, 20 bp, Artificial Sequence
  MKO10125965_B_Vmn2r108
  gRNA
caatgtcagattcattgaga

SEQ ID NO: 125966 - DNA, 20 bp, Artificial Sequence
  MKO10125966_B_Vmn2r108
  gRNA
gttcagataaagacaactgt

SEQ ID NO: 125967 - DNA, 20 bp, Artificial Sequence
  MKO10125967_B_Vmn2r109
  gRNA
accaaagggtcttggacgaa

SEQ ID NO: 125968 - DNA, 20 bp, Artificial Sequence
  MKO10125968_B_Vmn2r109
  gRNA
ctcgggagcatttgctgaga

SEQ ID NO: 125969 - DNA, 20 bp, Artificial Sequence
  MKO10125969_B_Vmn2r109
  gRNA
tgcagtaagagctgtgagcc

SEQ ID NO: 125970 - DNA, 20 bp, Artificial Sequence
  MKO10125970_B_Vmn2r10
  gRNA
atttaagtataaggagaatc

SEQ ID NO: 125971 - DNA, 20 bp, Artificial Sequence
  MKO10125971_B_Vmn2r10
  gRNA
acccactgatgatcctcctg

SEQ ID NO: 125972 - DNA, 20 bp, Artificial Sequence
  MKO10125972_B_Vmn2r10
  gRNA
tgtcttccatgctgaagtcc

SEQ ID NO: 125973 - DNA, 20 bp, Artificial Sequence
  MKO10125973_B_Vmn2r110
  gRNA
caatagcaaacaccaaagcc

SEQ ID NO: 125974 - DNA, 20 bp, Artificial Sequence
  MKO10125974_B_Vmn2r110
  gRNA
taagaactaccagtatatcc

SEQ ID NO: 125975 - DNA, 20 bp, Artificial Sequence
  MKO10125975_B_Vmn2r110
  gRNA
ctctctcattaatgtccttc

SEQ ID NO: 125976 - DNA, 20 bp, Artificial Sequence
  MKO10125976_B_Vmn2r111
  gRNA
tatctgaagttataataaag

SEQ ID NO: 125977 - DNA, 20 bp, Artificial Sequence
  MKO10125977_B_Vmn2r111
  gRNA
agctctaccagatagtcatc

SEQ ID NO: 125978 - DNA, 20 bp, Artificial Sequence
  MKO10125978_B_Vmn2r111
  gRNA
tttagtccctatcttccaaa

SEQ ID NO: 125979 - DNA, 20 bp, Artificial Sequence
  MKO10125979_B_Vmn2r112
  gRNA
gaataacttcatgtctgagc

SEQ ID NO: 125980 - DNA, 20 bp, Artificial Sequence
  MKO10125980_B_Vmn2r112
  gRNA
atagtgaatatgaaccaaaa

SEQ ID NO: 125981 - DNA, 20 bp, Artificial Sequence
  MKO10125981_B_Vmn2r112
  gRNA
atttatctgaagttatgata

SEQ ID NO: 125982 - DNA, 20 bp, Artificial Sequence
  MKO10125982_B_Vmn2r113
  gRNA
ttgttctttcacattgtcag

SEQ ID NO: 125983 - DNA, 20 bp, Artificial Sequence
  MKO10125983_B_Vmn2r113
  gRNA
tagttccttcatcttactta

SEQ ID NO: 125984 - DNA, 20 bp, Artificial Sequence
  MKO10125984_B_Vmn2r113
  gRNA
ctgttgaccatttataatat

SEQ ID NO: 125985 - DNA, 20 bp, Artificial Sequence
  MKO10125985_B_Vmn2r114
  gRNA
ctcctatttgagaagagtca

SEQ ID NO: 125986 - DNA, 20 bp, Artificial Sequence
  MKO10125986_B_Vmn2r114
  gRNA
aaagacccagttcactaatc

SEQ ID NO: 125987 - DNA, 20 bp, Artificial Sequence
  MKO10125987_B_Vmn2r114
  gRNA
tggatcaagaaaattcagga

SEQ ID NO: 125988 - DNA, 20 bp, Artificial Sequence
  MKO10125988_B_Vmn2r115
  gRNA
tctcagtacacaattgtgtc

SEQ ID NO: 125989 - DNA, 20 bp, Artificial Sequence
  MKO10125989_B_Vmn2r115
  gRNA
acccagttcattaatcctgt

SEQ ID NO: 125990 - DNA, 20 bp, Artificial Sequence
  MKO10125990_B_Vmn2r115
  gRNA
cttggatttaaagttaaaat

SEQ ID NO: 125991 - DNA, 20 bp, Artificial Sequence
  MKO10125991_B_Vmn2r116
  gRNA
tggatctagaaaatttcgga

SEQ ID NO: 125992 - DNA, 20 bp, Artificial Sequence
  MKO10125992_B_Vmn2r116
  gRNA
gtaataactctcttcaataa

SEQ ID NO: 125993 - DNA, 20 bp, Artificial Sequence
  MKO10125993_B_Vmn2r116
  gRNA
aagttccataagtaatatga

SEQ ID NO: 125994 - DNA, 20 bp, Artificial Sequence
  MKO10125994_B_Vmn2r117
  gRNA
atatttactctgtccccaac

SEQ ID NO: 125995 - DNA, 20 bp, Artificial Sequence
  MKO10125995_B_Vmn2r117
  gRNA
aaagcttgataatctgccca

SEQ ID NO: 125996 - DNA, 20 bp, Artificial Sequence
  MKO10125996_B_Vmn2r117
  gRNA
tagttccttcagattactta

SEQ ID NO: 125997 - DNA, 20 bp, Artificial Sequence
  MKO10125997_B_Vmn2r118
  gRNA
gcatgtgaaatagcacttac

SEQ ID NO: 125998 - DNA, 20 bp, Artificial Sequence
  MKO10125998_B_Vmn2r118
  gRNA
agtatgagatctatatgatt

SEQ ID NO: 125999 - DNA, 20 bp, Artificial Sequence
  MKO10125999_B_Vmn2r118
  gRNA
tctttagatccatgcattct

SEQ ID NO: 126000 - DNA, 20 bp, Artificial Sequence
  MKO10126000_B_Vmn2r11
  gRNA
actatgattgttaggatatt

SEQ ID NO: 126001 - DNA, 20 bp, Artificial Sequence
  MKO10126001_B_Vmn2r11
  gRNA
taacaatcatagtcctcatg

SEQ ID NO: 126002 - DNA, 20 bp, Artificial Sequence
  MKO10126002_B_Vmn2r11
  gRNA
tgtagtatgacatgcactgc

SEQ ID NO: 126003 - DNA, 20 bp, Artificial Sequence
  MKO10126003_B_Vmn2r120
  gRNA
gtggggcaccaaagacaaac

SEQ ID NO: 126004 - DNA, 20 bp, Artificial Sequence
  MKO10126004_B_Vmn2r120
  gRNA
aaattaatagcagtagtgac

SEQ ID NO: 126005 - DNA, 20 bp, Artificial Sequence
  MKO10126005_B_Vmn2r120
  gRNA
atatttgtagagacctagaa

SEQ ID NO: 126006 - DNA, 20 bp, Artificial Sequence
  MKO10126006_B_Vmn2r121
  gRNA
attgcattcttcgatgccac

SEQ ID NO: 126007 - DNA, 20 bp, Artificial Sequence
  MKO10126007_B_Vmn2r121
  gRNA
acttcatatatgtgatgact

SEQ ID NO: 126008 - DNA, 20 bp, Artificial Sequence
  MKO10126008_B_Vmn2r121
  gRNA
tccatcctctgtatgtagtg

SEQ ID NO: 126009 - DNA, 20 bp, Artificial Sequence
  MKO10126009_B_Vmn2r122
  gRNA
aattgtaaccttcatcgctc

SEQ ID NO: 126010 - DNA, 20 bp, Artificial Sequence
  MKO10126010_B_Vmn2r122
  gRNA
ttagatgattcatgtgccac

SEQ ID NO: 126011 - DNA, 20 bp, Artificial Sequence
  MKO10126011_B_Vmn2r122
  gRNA
agatatttctcatactattt

SEQ ID NO: 126012 - DNA, 20 bp, Artificial Sequence
  MKO10126012_B_Vmn2r123
  gRNA
ccttgatgtttcactttaga

SEQ ID NO: 126013 - DNA, 20 bp, Artificial Sequence
  MKO10126013_B_Vmn2r123
  gRNA
acccactgatgttcctccct

SEQ ID NO: 126014 - DNA, 20 bp, Artificial Sequence
  MKO10126014_B_Vmn2r123
  gRNA
tgtcttccttgatgaaaacc

SEQ ID NO: 126015 - DNA, 20 bp, Artificial Sequence
  MKO10126015_B_Vmn2r124
  gRNA
tcctgaaagacattgaagtg

SEQ ID NO: 126016 - DNA, 20 bp, Artificial Sequence
  MKO10126016_B_Vmn2r124
  gRNA
ctcttgataatgctgttatt

SEQ ID NO: 126017 - DNA, 20 bp, Artificial Sequence
  MKO10126017_B_Vmn2r124
  gRNA
atagcagggtgagaatatac

SEQ ID NO: 126018 - DNA, 20 bp, Artificial Sequence
  MKO10126018_B_Vmn2r12
  gRNA
actatttgccttgttaccaa

SEQ ID NO: 126019 - DNA, 20 bp, Artificial Sequence
  MKO10126019_B_Vmn2r12
  gRNA
ttcaccctcgatttcttcca

SEQ ID NO: 126020 - DNA, 20 bp, Artificial Sequence
  MKO10126020_B_Vmn2r12
  gRNA
acaacttcatatatatgatt

SEQ ID NO: 126021 - DNA, 20 bp, Artificial Sequence
  MKO10126021_B_Vmn2r13
  gRNA
tttagaaggtggatacattt

SEQ ID NO: 126022 - DNA, 20 bp, Artificial Sequence
  MKO10126022_B_Vmn2r13
  gRNA
agagtatttactaaccctgt

SEQ ID NO: 126023 - DNA, 20 bp, Artificial Sequence
  MKO10126023_B_Vmn2r13
  gRNA
acccactgatgttcctcctg

SEQ ID NO: 126024 - DNA, 20 bp, Artificial Sequence
  MKO10126024_B_Vmn2r14
  gRNA
aaatatcctggatttcagtg

SEQ ID NO: 126025 - DNA, 20 bp, Artificial Sequence
  MKO10126025_B_Vmn2r14
  gRNA
tgtcttccacactgaaatcc

SEQ ID NO: 126026 - DNA, 20 bp, Artificial Sequence
  MKO10126026_B_Vmn2r14
  gRNA
cagcaaacagaagaacccaa

SEQ ID NO: 126027 - DNA, 20 bp, Artificial Sequence
  MKO10126027_B_Vmn2r15
  gRNA
cagttccgtgaaagaaatca

SEQ ID NO: 126028 - DNA, 20 bp, Artificial Sequence
  MKO10126028_B_Vmn2r15
  gRNA
tgtcttccatgctgaaatcc

SEQ ID NO: 126029 - DNA, 20 bp, Artificial Sequence
  MKO10126029_B_Vmn2r15
  gRNA
acccactgacgatcctcctg

SEQ ID NO: 126030 - DNA, 20 bp, Artificial Sequence
  MKO10126030_B_Vmn2r16
  gRNA
acatgtaacatacaaattac

SEQ ID NO: 126031 - DNA, 20 bp, Artificial Sequence
  MKO10126031_B_Vmn2r16
  gRNA
agatacattgggatatatag

SEQ ID NO: 126032 - DNA, 20 bp, Artificial Sequence
  MKO10126032_B_Vmn2r16
  gRNA
gtgggctacaggaggagctt

SEQ ID NO: 126033 - DNA, 20 bp, Artificial Sequence
  MKO10126033_B_Vmn2r17
  gRNA
atataacaatttcaccattg

SEQ ID NO: 126034 - DNA, 20 bp, Artificial Sequence
  MKO10126034_B_Vmn2r17
  gRNA
gatacatatacctgtctcat

SEQ ID NO: 126035 - DNA, 20 bp, Artificial Sequence
  MKO10126035_B_Vmn2r17
  gRNA
gtgggccacaggaggaacgt

SEQ ID NO: 126036 - DNA, 20 bp, Artificial Sequence
  MKO10126036_B_Vmn2r18
  gRNA
gtacagtatacatctggtgt

SEQ ID NO: 126037 - DNA, 20 bp, Artificial Sequence
  MKO10126037_B_Vmn2r18
  gRNA
gtaaatgtgaacatactcta

SEQ ID NO: 126038 - DNA, 20 bp, Artificial Sequence
  MKO10126038_B_Vmn2r18
  gRNA
catttcaagtttctcttatc

SEQ ID NO: 126039 - DNA, 20 bp, Artificial Sequence
  MKO10126039_B_Vmn2r19
  gRNA
actttctgccaatacaaata

SEQ ID NO: 126040 - DNA, 20 bp, Artificial Sequence
  MKO10126040_B_Vmn2r19
  gRNA
gattgtctgccatgtgcaga

SEQ ID NO: 126041 - DNA, 20 bp, Artificial Sequence
  MKO10126041_B_Vmn2r19
  gRNA
tgttgactatcttgagatga

SEQ ID NO: 126042 - DNA, 20 bp, Artificial Sequence
  MKO10126042_B_Vmn2r1
  gRNA
gacactatgatgtcctaaac

SEQ ID NO: 126043 - DNA, 20 bp, Artificial Sequence
  MKO10126043_B_Vmn2r1
  gRNA
caaaatattgtagaattcgt

SEQ ID NO: 126044 - DNA, 20 bp, Artificial Sequence
  MKO10126044_B_Vmn2r1
  gRNA
ctcagactggaggttatcac

SEQ ID NO: 126045 - DNA, 20 bp, Artificial Sequence
  MKO10126045_B_Vmn2r20
  gRNA
cattgtagagacttagaact

SEQ ID NO: 126046 - DNA, 20 bp, Artificial Sequence
  MKO10126046_B_Vmn2r20
  gRNA
atagctaccttccaagggag

SEQ ID NO: 126047 - DNA, 20 bp, Artificial Sequence
  MKO10126047_B_Vmn2r20
  gRNA
attatcatttactgatcgca

SEQ ID NO: 126048 - DNA, 20 bp, Artificial Sequence
  MKO10126048_B_Vmn2r21
  gRNA
attatcatttactgatcgca

SEQ ID NO: 126049 - DNA, 20 bp, Artificial Sequence
  MKO10126049_B_Vmn2r21
  gRNA
gctccatccattcttgcaaa

SEQ ID NO: 126050 - DNA, 20 bp, Artificial Sequence
  MKO10126050_B_Vmn2r21
  gRNA
ttgtaccactctgcagagac

SEQ ID NO: 126051 - DNA, 20 bp, Artificial Sequence
  MKO10126051_B_Vmn2r22
  gRNA
caatatgtgctgatagtgtt

SEQ ID NO: 126052 - DNA, 20 bp, Artificial Sequence
  MKO10126052_B_Vmn2r22
  gRNA
gctccatccattcttgcaaa

SEQ ID NO: 126053 - DNA, 20 bp, Artificial Sequence
  MKO10126053_B_Vmn2r22
  gRNA
ttgtaccactctgcagagac

SEQ ID NO: 126054 - DNA, 20 bp, Artificial Sequence
  MKO10126054_B_Vmn2r23
  gRNA
taatgaagcaagcatgaata

SEQ ID NO: 126055 - DNA, 20 bp, Artificial Sequence
  MKO10126055_B_Vmn2r23
  gRNA
agttgacccttctgtaagaa

SEQ ID NO: 126056 - DNA, 20 bp, Artificial Sequence
  MKO10126056_B_Vmn2r23
  gRNA
caattcctaactacagttgt

SEQ ID NO: 126057 - DNA, 20 bp, Artificial Sequence
  MKO10126057_B_Vmn2r24
  gRNA
aagtctctacaacattccac

SEQ ID NO: 126058 - DNA, 20 bp, Artificial Sequence
  MKO10126058_B_Vmn2r24
  gRNA
ttcttacaaaacagccaact

SEQ ID NO: 126059 - DNA, 20 bp, Artificial Sequence
  MKO10126059_B_Vmn2r24
  gRNA
ctttgactacaagcagataa

SEQ ID NO: 126060 - DNA, 20 bp, Artificial Sequence
  MKO10126060_B_Vmn2r25
  gRNA
agttgggagaagcaccaatg

SEQ ID NO: 126061 - DNA, 20 bp, Artificial Sequence
  MKO10126061_B_Vmn2r25
  gRNA
tattctattcaataagtccc

SEQ ID NO: 126062 - DNA, 20 bp, Artificial Sequence
  MKO10126062_B_Vmn2r25
  gRNA
aagtctctacaaagtcccac

SEQ ID NO: 126063 - DNA, 20 bp, Artificial Sequence
  MKO10126063_B_Vmn2r26
  gRNA
tattctattcaacaagtccc

SEQ ID NO: 126064 - DNA, 20 bp, Artificial Sequence
  MKO10126064_B_Vmn2r26
  gRNA
gacttgttgaatagaatatt

SEQ ID NO: 126065 - DNA, 20 bp, Artificial Sequence
  MKO10126065_B_Vmn2r26
  gRNA
acttgggagaagcaccaatg

SEQ ID NO: 126066 - DNA, 20 bp, Artificial Sequence
  MKO10126066_B_Vmn2r27
  gRNA
ttagcaaaatacctgatgat

SEQ ID NO: 126067 - DNA, 20 bp, Artificial Sequence
  MKO10126067_B_Vmn2r27
  gRNA
caacaccatacaactttcca

SEQ ID NO: 126068 - DNA, 20 bp, Artificial Sequence
  MKO10126068_B_Vmn2r27
  gRNA
aatatgtgctgataatgttt

SEQ ID NO: 126069 - DNA, 20 bp, Artificial Sequence
  MKO10126069_B_Vmn2r28
  gRNA
ttccgggatcttctgaatcc

SEQ ID NO: 126070 - DNA, 20 bp, Artificial Sequence
  MKO10126070_B_Vmn2r28
  gRNA
taaaaaccacaaatatgctt

SEQ ID NO: 126071 - DNA, 20 bp, Artificial Sequence
  MKO10126071_B_Vmn2r28
  gRNA
gtggagataagaaaatgtcc

SEQ ID NO: 126072 - DNA, 20 bp, Artificial Sequence
  MKO10126072_B_Vmn2r29
  gRNA
gtggagataaaaagctgtcc

SEQ ID NO: 126073 - DNA, 20 bp, Artificial Sequence
  MKO10126073_B_Vmn2r29
  gRNA
tagatccttcagcttaccta

SEQ ID NO: 126074 - DNA, 20 bp, Artificial Sequence
  MKO10126074_B_Vmn2r29
  gRNA
taccttcaagcagtgagaac

SEQ ID NO: 126075 - DNA, 20 bp, Artificial Sequence
  MKO10126075_B_Vmn2r2
  gRNA
gacccgaagggggattcgac

SEQ ID NO: 126076 - DNA, 20 bp, Artificial Sequence
  MKO10126076_B_Vmn2r2
  gRNA
ccagtgcctctccataagca

SEQ ID NO: 126077 - DNA, 20 bp, Artificial Sequence
  MKO10126077_B_Vmn2r2
  gRNA
ttgaaaattattacacatga

SEQ ID NO: 126078 - DNA, 20 bp, Artificial Sequence
  MKO10126078_B_Vmn2r30
  gRNA
taccttcaagcagtgagaac

SEQ ID NO: 126079 - DNA, 20 bp, Artificial Sequence
  MKO10126079_B_Vmn2r30
  gRNA
aggtaaactcctttctaaga

SEQ ID NO: 126080 - DNA, 20 bp, Artificial Sequence
  MKO10126080_B_Vmn2r30
  gRNA
acttacctttcttcttcctg

SEQ ID NO: 126081 - DNA, 20 bp, Artificial Sequence
  MKO10126081_B_Vmn2r31
  gRNA
tagatccttcagcttaccta

SEQ ID NO: 126082 - DNA, 20 bp, Artificial Sequence
  MKO10126082_B_Vmn2r31
  gRNA
atccacttcactaatcctct

SEQ ID NO: 126083 - DNA, 20 bp, Artificial Sequence
  MKO10126083_B_Vmn2r31
  gRNA
acccacctttctacttcctg

SEQ ID NO: 126084 - DNA, 20 bp, Artificial Sequence
  MKO10126084_B_Vmn2r32
  gRNA
tagatccttcagctttccta

SEQ ID NO: 126085 - DNA, 20 bp, Artificial Sequence
  MKO10126085_B_Vmn2r32
  gRNA
aggtaaactcctttctaaga

SEQ ID NO: 126086 - DNA, 20 bp, Artificial Sequence
  MKO10126086_B_Vmn2r32
  gRNA
tcttacctttcttcttcctg

SEQ ID NO: 126087 - DNA, 20 bp, Artificial Sequence
  MKO10126087_B_Vmn2r33
  gRNA
gtggagataagaagctgtcc

SEQ ID NO: 126088 - DNA, 20 bp, Artificial Sequence
  MKO10126088_B_Vmn2r33
  gRNA
tagatccttcagcttaccta

SEQ ID NO: 126089 - DNA, 20 bp, Artificial Sequence
  MKO10126089_B_Vmn2r33
  gRNA
taccttcaagcagtgagaac

SEQ ID NO: 126090 - DNA, 20 bp, Artificial Sequence
  MKO10126090_B_Vmn2r34
  gRNA
aacctaaagatacctcccaa

SEQ ID NO: 126091 - DNA, 20 bp, Artificial Sequence
  MKO10126091_B_Vmn2r34
  gRNA
aggtaaactcctttctaaga

SEQ ID NO: 126092 - DNA, 20 bp, Artificial Sequence
  MKO10126092_B_Vmn2r34
  gRNA
acttacctttcttcttcctg

SEQ ID NO: 126093 - DNA, 20 bp, Artificial Sequence
  MKO10126093_B_Vmn2r35
  gRNA
taccttcaagcagtgagaac

SEQ ID NO: 126094 - DNA, 20 bp, Artificial Sequence
  MKO10126094_B_Vmn2r35
  gRNA
atccactttactaatcctct

SEQ ID NO: 126095 - DNA, 20 bp, Artificial Sequence
  MKO10126095_B_Vmn2r35
  gRNA
gaaacaaagagtaataatgc

SEQ ID NO: 126096 - DNA, 20 bp, Artificial Sequence
  MKO10126096_B_Vmn2r36
  gRNA
taccttcaagcagtgagaac

SEQ ID NO: 126097 - DNA, 20 bp, Artificial Sequence
  MKO10126097_B_Vmn2r36
  gRNA
aggtaaactcctttctaaga

SEQ ID NO: 126098 - DNA, 20 bp, Artificial Sequence
  MKO10126098_B_Vmn2r36
  gRNA
tcttacctttcttcttcctg

SEQ ID NO: 126099 - DNA, 20 bp, Artificial Sequence
  MKO10126099_B_Vmn2r37
  gRNA
taccttcaagcagtgagaac

SEQ ID NO: 126100 - DNA, 20 bp, Artificial Sequence
  MKO10126100_B_Vmn2r37
  gRNA
aggtaaactcctttctaaga

SEQ ID NO: 126101 - DNA, 20 bp, Artificial Sequence
  MKO10126101_B_Vmn2r37
  gRNA
acttacctttcttcttcctg

SEQ ID NO: 126102 - DNA, 20 bp, Artificial Sequence
  MKO10126102_B_Vmn2r38
  gRNA
taccttcaagcagtgagaac

SEQ ID NO: 126103 - DNA, 20 bp, Artificial Sequence
  MKO10126103_B_Vmn2r38
  gRNA
atccacttcactaatcctct

SEQ ID NO: 126104 - DNA, 20 bp, Artificial Sequence
  MKO10126104_B_Vmn2r38
  gRNA
acccacctttctacttcctg

SEQ ID NO: 126105 - DNA, 20 bp, Artificial Sequence
  MKO10126105_B_Vmn2r39
  gRNA
gtggagataagaagctgtcc

SEQ ID NO: 126106 - DNA, 20 bp, Artificial Sequence
  MKO10126106_B_Vmn2r39
  gRNA
tagatccttcagcttaccta

SEQ ID NO: 126107 - DNA, 20 bp, Artificial Sequence
  MKO10126107_B_Vmn2r39
  gRNA
taccttcaagcagtgagaac

SEQ ID NO: 126108 - DNA, 20 bp, Artificial Sequence
  MKO10126108_B_Vmn2r3
  gRNA
tgttatccatctgccaattt

SEQ ID NO: 126109 - DNA, 20 bp, Artificial Sequence
  MKO10126109_B_Vmn2r3
  gRNA
actagctttcatgtcctata

SEQ ID NO: 126110 - DNA, 20 bp, Artificial Sequence
  MKO10126110_B_Vmn2r3
  gRNA
tggagatattgccattgtca

SEQ ID NO: 126111 - DNA, 20 bp, Artificial Sequence
  MKO10126111_B_Vmn2r40
  gRNA
gtggagataagaagctgtcc

SEQ ID NO: 126112 - DNA, 20 bp, Artificial Sequence
  MKO10126112_B_Vmn2r40
  gRNA
aggtaaactcctttctaaga

SEQ ID NO: 126113 - DNA, 20 bp, Artificial Sequence
  MKO10126113_B_Vmn2r40
  gRNA
acttacctttcttcttcctg

SEQ ID NO: 126114 - DNA, 20 bp, Artificial Sequence
  MKO10126114_B_Vmn2r41
  gRNA
taccttcaagcagtgagaac

SEQ ID NO: 126115 - DNA, 20 bp, Artificial Sequence
  MKO10126115_B_Vmn2r41
  gRNA
aggtaaactcctttctaaga

SEQ ID NO: 126116 - DNA, 20 bp, Artificial Sequence
  MKO10126116_B_Vmn2r41
  gRNA
acttacctttcttcttcctg

SEQ ID NO: 126117 - DNA, 20 bp, Artificial Sequence
  MKO10126117_B_Vmn2r42
  gRNA
taccttcaagcagtgagaac

SEQ ID NO: 126118 - DNA, 20 bp, Artificial Sequence
  MKO10126118_B_Vmn2r42
  gRNA
aggtaaactcctttctaaga

SEQ ID NO: 126119 - DNA, 20 bp, Artificial Sequence
  MKO10126119_B_Vmn2r42
  gRNA
tcttacctttcttcttcctg

SEQ ID NO: 126120 - DNA, 20 bp, Artificial Sequence
  MKO10126120_B_Vmn2r43
  gRNA
tagatccttcagcttaccta

SEQ ID NO: 126121 - DNA, 20 bp, Artificial Sequence
  MKO10126121_B_Vmn2r43
  gRNA
atccacttcactaatcctgt

SEQ ID NO: 126122 - DNA, 20 bp, Artificial Sequence
  MKO10126122_B_Vmn2r43
  gRNA
actcacctttctacttcctg

SEQ ID NO: 126123 - DNA, 20 bp, Artificial Sequence
  MKO10126123_B_Vmn2r44
  gRNA
taccttcaagcagtgagaac

SEQ ID NO: 126124 - DNA, 20 bp, Artificial Sequence
  MKO10126124_B_Vmn2r44
  gRNA
atccacttcactaatcctct

SEQ ID NO: 126125 - DNA, 20 bp, Artificial Sequence
  MKO10126125_B_Vmn2r44
  gRNA
acccacctttctacttcctg

SEQ ID NO: 126126 - DNA, 20 bp, Artificial Sequence
  MKO10126126_B_Vmn2r45
  gRNA
tttgattataagatactctt

SEQ ID NO: 126127 - DNA, 20 bp, Artificial Sequence
  MKO10126127_B_Vmn2r45
  gRNA
taaaaaccacaaatatgctt

SEQ ID NO: 126128 - DNA, 20 bp, Artificial Sequence
  MKO10126128_B_Vmn2r45
  gRNA
aggtaaactcctttctaaga

SEQ ID NO: 126129 - DNA, 20 bp, Artificial Sequence
  MKO10126129_B_Vmn2r46
  gRNA
taccttcaagcagtgagaac

SEQ ID NO: 126130 - DNA, 20 bp, Artificial Sequence
  MKO10126130_B_Vmn2r46
  gRNA
acccacttcactaatcctct

SEQ ID NO: 126131 - DNA, 20 bp, Artificial Sequence
  MKO10126131_B_Vmn2r46
  gRNA
actcacctttctacttcctg

SEQ ID NO: 126132 - DNA, 20 bp, Artificial Sequence
  MKO10126132_B_Vmn2r47
  gRNA
taccttcaagcagtgagaac

SEQ ID NO: 126133 - DNA, 20 bp, Artificial Sequence
  MKO10126133_B_Vmn2r47
  gRNA
aggtaaactcctttctaaga

SEQ ID NO: 126134 - DNA, 20 bp, Artificial Sequence
  MKO10126134_B_Vmn2r47
  gRNA
acttacctttcttcttcctg

SEQ ID NO: 126135 - DNA, 20 bp, Artificial Sequence
  MKO10126135_B_Vmn2r48
  gRNA
taccttcaagcagtgagaac

SEQ ID NO: 126136 - DNA, 20 bp, Artificial Sequence
  MKO10126136_B_Vmn2r48
  gRNA
aggtaaactcctttctaaga

SEQ ID NO: 126137 - DNA, 20 bp, Artificial Sequence
  MKO10126137_B_Vmn2r48
  gRNA
acttacctttcttcttcctg

SEQ ID NO: 126138 - DNA, 20 bp, Artificial Sequence
  MKO10126138_B_Vmn2r49
  gRNA
tagatccttcagctttccta

SEQ ID NO: 126139 - DNA, 20 bp, Artificial Sequence
  MKO10126139_B_Vmn2r49
  gRNA
taccttcaagcagtgagaac

SEQ ID NO: 126140 - DNA, 20 bp, Artificial Sequence
  MKO10126140_B_Vmn2r49
  gRNA
aggtaaactcctttctaaga

SEQ ID NO: 126141 - DNA, 20 bp, Artificial Sequence
  MKO10126141_B_Vmn2r4
  gRNA
agaattcccttccgagtccc

SEQ ID NO: 126142 - DNA, 20 bp, Artificial Sequence
  MKO10126142_B_Vmn2r4
  gRNA
atgcacagcttacttagttt

SEQ ID NO: 126143 - DNA, 20 bp, Artificial Sequence
  MKO10126143_B_Vmn2r4
  gRNA
aaaatagaacttggtagtaa

SEQ ID NO: 126144 - DNA, 20 bp, Artificial Sequence
  MKO10126144_B_Vmn2r50
  gRNA
ggggctgcaaaaaaaacagc

SEQ ID NO: 126145 - DNA, 20 bp, Artificial Sequence
  MKO10126145_B_Vmn2r50
  gRNA
taaaaaccacaaatatgctt

SEQ ID NO: 126146 - DNA, 20 bp, Artificial Sequence
  MKO10126146_B_Vmn2r50
  gRNA
tagatccttcagcttaccta

SEQ ID NO: 126147 - DNA, 20 bp, Artificial Sequence
  MKO10126147_B_Vmn2r51
  gRNA
aagtgaaagtgtcgaccgtg

SEQ ID NO: 126148 - DNA, 20 bp, Artificial Sequence
  MKO10126148_B_Vmn2r51
  gRNA
gaatatgacattgttcactt

SEQ ID NO: 126149 - DNA, 20 bp, Artificial Sequence
  MKO10126149_B_Vmn2r51
  gRNA
gtggagataagaagctgttc

SEQ ID NO: 126150 - DNA, 20 bp, Artificial Sequence
  MKO10126150_B_Vmn2r52
  gRNA
tggattcagaagatcttgga

SEQ ID NO: 126151 - DNA, 20 bp, Artificial Sequence
  MKO10126151_B_Vmn2r52
  gRNA
gaggctgcaagtgaaacagc

SEQ ID NO: 126152 - DNA, 20 bp, Artificial Sequence
  MKO10126152_B_Vmn2r52
  gRNA
aattgaaagtgttcaccatg

SEQ ID NO: 126153 - DNA, 20 bp, Artificial Sequence
  MKO10126153_B_Vmn2r53
  gRNA
tactcaatgcacacaccagc

SEQ ID NO: 126154 - DNA, 20 bp, Artificial Sequence
  MKO10126154_B_Vmn2r53
  gRNA
gtgtacttcaagacttctga

SEQ ID NO: 126155 - DNA, 20 bp, Artificial Sequence
  MKO10126155_B_Vmn2r53
  gRNA
ctgcatttagagaactcact

SEQ ID NO: 126156 - DNA, 20 bp, Artificial Sequence
  MKO10126156_B_Vmn2r54
  gRNA
cattgtcatccagtgccaag

SEQ ID NO: 126157 - DNA, 20 bp, Artificial Sequence
  MKO10126157_B_Vmn2r54
  gRNA
actgataggaagggacgtga

SEQ ID NO: 126158 - DNA, 20 bp, Artificial Sequence
  MKO10126158_B_Vmn2r54
  gRNA
caacagtttcctctgcattc

SEQ ID NO: 126159 - DNA, 20 bp, Artificial Sequence
  MKO10126159_B_Vmn2r55
  gRNA
agttcacctttgattgtacg

SEQ ID NO: 126160 - DNA, 20 bp, Artificial Sequence
  MKO10126160_B_Vmn2r55
  gRNA
gctgctccatgccctcaaaa

SEQ ID NO: 126161 - DNA, 20 bp, Artificial Sequence
  MKO10126161_B_Vmn2r55
  gRNA
aagattatgtttgatgccaa

SEQ ID NO: 126162 - DNA, 20 bp, Artificial Sequence
  MKO10126162_B_Vmn2r56
  gRNA
ggccagctctctggccagtc

SEQ ID NO: 126163 - DNA, 20 bp, Artificial Sequence
  MKO10126163_B_Vmn2r56
  gRNA
aaacataatctcacttccat

SEQ ID NO: 126164 - DNA, 20 bp, Artificial Sequence
  MKO10126164_B_Vmn2r56
  gRNA
gttcagccaagtgcccagac

SEQ ID NO: 126165 - DNA, 20 bp, Artificial Sequence
  MKO10126165_B_Vmn2r57
  gRNA
gttggcagttctctaaaagt

SEQ ID NO: 126166 - DNA, 20 bp, Artificial Sequence
  MKO10126166_B_Vmn2r57
  gRNA
aatttacctgcagcacttac

SEQ ID NO: 126167 - DNA, 20 bp, Artificial Sequence
  MKO10126167_B_Vmn2r57
  gRNA
gatgttcctgtaagtgctgc

SEQ ID NO: 126168 - DNA, 20 bp, Artificial Sequence
  MKO10126168_B_Vmn2r58
  gRNA
ttctgtccacagtcacaatt

SEQ ID NO: 126169 - DNA, 20 bp, Artificial Sequence
  MKO10126169_B_Vmn2r58
  gRNA
taagaactaccaatttgttc

SEQ ID NO: 126170 - DNA, 20 bp, Artificial Sequence
  MKO10126170_B_Vmn2r58
  gRNA
ctcaccattgtaaaccctgt

SEQ ID NO: 126171 - DNA, 20 bp, Artificial Sequence
  MKO10126171_B_Vmn2r59
  gRNA
ttctctatcgtgcctttatt

SEQ ID NO: 126172 - DNA, 20 bp, Artificial Sequence
  MKO10126172_B_Vmn2r59
  gRNA
ttcaggaaagctgccaaaga

SEQ ID NO: 126173 - DNA, 20 bp, Artificial Sequence
  MKO10126173_B_Vmn2r59
  gRNA
ctttcactgcatacagaccg

SEQ ID NO: 126174 - DNA, 20 bp, Artificial Sequence
  MKO10126174_B_Vmn2r5
  gRNA
ctgaaaattactacccatga

SEQ ID NO: 126175 - DNA, 20 bp, Artificial Sequence
  MKO10126175_B_Vmn2r5
  gRNA
caaaacaacgatgagttctt

SEQ ID NO: 126176 - DNA, 20 bp, Artificial Sequence
  MKO10126176_B_Vmn2r5
  gRNA
tgcacaaaactgtgtgctcc

SEQ ID NO: 126177 - DNA, 20 bp, Artificial Sequence
  MKO10126177_B_Vmn2r60
  gRNA
aaagagaattaaactgagct

SEQ ID NO: 126178 - DNA, 20 bp, Artificial Sequence
  MKO10126178_B_Vmn2r60
  gRNA
atgaagcaacaaaaagacta

SEQ ID NO: 126179 - DNA, 20 bp, Artificial Sequence
  MKO10126179_B_Vmn2r60
  gRNA
gtgctgagcacttagagaat

SEQ ID NO: 126180 - DNA, 20 bp, Artificial Sequence
  MKO10126180_B_Vmn2r61
  gRNA
tccattcctaattgtgacta

SEQ ID NO: 126181 - DNA, 20 bp, Artificial Sequence
  MKO10126181_B_Vmn2r61
  gRNA
ctattctgtaagtgctccgc

SEQ ID NO: 126182 - DNA, 20 bp, Artificial Sequence
  MKO10126182_B_Vmn2r61
  gRNA
atcatatccaatagtagtat

SEQ ID NO: 126183 - DNA, 20 bp, Artificial Sequence
  MKO10126183_B_Vmn2r62
  gRNA
gaatgccattccgtctccat

SEQ ID NO: 126184 - DNA, 20 bp, Artificial Sequence
  MKO10126184_B_Vmn2r62
  gRNA
ctacttaaaaaccatccaag

SEQ ID NO: 126185 - DNA, 20 bp, Artificial Sequence
  MKO10126185_B_Vmn2r62
  gRNA
ttgtatcatttcctcagata

SEQ ID NO: 126186 - DNA, 20 bp, Artificial Sequence
  MKO10126186_B_Vmn2r63
  gRNA
gcaaatgtgattgttatttg

SEQ ID NO: 126187 - DNA, 20 bp, Artificial Sequence
  MKO10126187_B_Vmn2r63
  gRNA
gacgttccagtgagtgctgc

SEQ ID NO: 126188 - DNA, 20 bp, Artificial Sequence
  MKO10126188_B_Vmn2r63
  gRNA
ctctcactgcacaaagactg

SEQ ID NO: 126189 - DNA, 20 bp, Artificial Sequence
  MKO10126189_B_Vmn2r65
  gRNA
ttggaccatagacattagac

SEQ ID NO: 126190 - DNA, 20 bp, Artificial Sequence
  MKO10126190_B_Vmn2r65
  gRNA
actcacctgtctaatgtcta

SEQ ID NO: 126191 - DNA, 20 bp, Artificial Sequence
  MKO10126191_B_Vmn2r65
  gRNA
acacatctttgcaataccac

SEQ ID NO: 126192 - DNA, 20 bp, Artificial Sequence
  MKO10126192_B_Vmn2r66
  gRNA
tgtccttagtggttcatttc

SEQ ID NO: 126193 - DNA, 20 bp, Artificial Sequence
  MKO10126193_B_Vmn2r66
  gRNA
tggataaattgctcaaaacc

SEQ ID NO: 126194 - DNA, 20 bp, Artificial Sequence
  MKO10126194_B_Vmn2r66
  gRNA
tcaacagttacttatgtcta

SEQ ID NO: 126195 - DNA, 20 bp, Artificial Sequence
  MKO10126195_B_Vmn2r67
  gRNA
taaaaccttacttgtcatgt

SEQ ID NO: 126196 - DNA, 20 bp, Artificial Sequence
  MKO10126196_B_Vmn2r67
  gRNA
aaaaaatatgatgaaaaaac

SEQ ID NO: 126197 - DNA, 20 bp, Artificial Sequence
  MKO10126197_B_Vmn2r67
  gRNA
tttctctgtttatcttgcct

SEQ ID NO: 126198 - DNA, 20 bp, Artificial Sequence
  MKO10126198_B_Vmn2r68
  gRNA
ttatatttacagctccaata

SEQ ID NO: 126199 - DNA, 20 bp, Artificial Sequence
  MKO10126199_B_Vmn2r68
  gRNA
caatttctttctaaattgag

SEQ ID NO: 126200 - DNA, 20 bp, Artificial Sequence
  MKO10126200_B_Vmn2r68
  gRNA
ttacaatttgtaaatcctgc

SEQ ID NO: 126201 - DNA, 20 bp, Artificial Sequence
  MKO10126201_B_Vmn2r69
  gRNA
ctagtcaatattgaatgtaa

SEQ ID NO: 126202 - DNA, 20 bp, Artificial Sequence
  MKO10126202_B_Vmn2r69
  gRNA
atatgttctctcatttgtgc

SEQ ID NO: 126203 - DNA, 20 bp, Artificial Sequence
  MKO10126203_B_Vmn2r69
  gRNA
ttaaaatttgtaaatcctgc

SEQ ID NO: 126204 - DNA, 20 bp, Artificial Sequence
  MKO10126204_B_Vmn2r6
  gRNA
atgcacaacttacttagtgt

SEQ ID NO: 126205 - DNA, 20 bp, Artificial Sequence
  MKO10126205_B_Vmn2r6
  gRNA
ataaaattcattacccatga

SEQ ID NO: 126206 - DNA, 20 bp, Artificial Sequence
  MKO10126206_B_Vmn2r6
  gRNA
tgcacaaaagtgtgtcctcc

SEQ ID NO: 126207 - DNA, 20 bp, Artificial Sequence
  MKO10126207_B_Vmn2r70
  gRNA
tatcaaaactcagaagctcg

SEQ ID NO: 126208 - DNA, 20 bp, Artificial Sequence
  MKO10126208_B_Vmn2r70
  gRNA
attcgggacataaaaaggaa

SEQ ID NO: 126209 - DNA, 20 bp, Artificial Sequence
  MKO10126209_B_Vmn2r70
  gRNA
atctttacttgatttacctc

SEQ ID NO: 126210 - DNA, 20 bp, Artificial Sequence
  MKO10126210_B_Vmn2r71
  gRNA
ctagttaatactgaatgtaa

SEQ ID NO: 126211 - DNA, 20 bp, Artificial Sequence
  MKO10126211_B_Vmn2r71
  gRNA
tgtagtgtgccttgcagtcc

SEQ ID NO: 126212 - DNA, 20 bp, Artificial Sequence
  MKO10126212_B_Vmn2r71
  gRNA
cgaaaatatgatgagaaaac

SEQ ID NO: 126213 - DNA, 20 bp, Artificial Sequence
  MKO10126213_B_Vmn2r72
  gRNA
cagatatccatttcttcctc

SEQ ID NO: 126214 - DNA, 20 bp, Artificial Sequence
  MKO10126214_B_Vmn2r72
  gRNA
atatcttctttcatttgtgc

SEQ ID NO: 126215 - DNA, 20 bp, Artificial Sequence
  MKO10126215_B_Vmn2r72
  gRNA
caaaaatatgatgaaaaaac

SEQ ID NO: 126216 - DNA, 20 bp, Artificial Sequence
  MKO10126216_B_Vmn2r73
  gRNA
tcatttgcacagtagtaatt

SEQ ID NO: 126217 - DNA, 20 bp, Artificial Sequence
  MKO10126217_B_Vmn2r73
  gRNA
ctcagaaaatccccgcagga

SEQ ID NO: 126218 - DNA, 20 bp, Artificial Sequence
  MKO10126218_B_Vmn2r73
  gRNA
gatagaatgggctacagata

SEQ ID NO: 126219 - DNA, 20 bp, Artificial Sequence
  MKO10126219_B_Vmn2r74
  gRNA
attctggacatgaacaggta

SEQ ID NO: 126220 - DNA, 20 bp, Artificial Sequence
  MKO10126220_B_Vmn2r74
  gRNA
atgttgactaaatctccagc

SEQ ID NO: 126221 - DNA, 20 bp, Artificial Sequence
  MKO10126221_B_Vmn2r74
  gRNA
atatatatctgttgaccact

SEQ ID NO: 126222 - DNA, 20 bp, Artificial Sequence
  MKO10126222_B_Vmn2r75
  gRNA
actctagagatgtacagtaa

SEQ ID NO: 126223 - DNA, 20 bp, Artificial Sequence
  MKO10126223_B_Vmn2r75
  gRNA
ccaaatttccaaaaatatta

SEQ ID NO: 126224 - DNA, 20 bp, Artificial Sequence
  MKO10126224_B_Vmn2r75
  gRNA
catgaaccagaatttaaaac

SEQ ID NO: 126225 - DNA, 20 bp, Artificial Sequence
  MKO10126225_B_Vmn2r76
  gRNA
ctgggccacagatgttagac

SEQ ID NO: 126226 - DNA, 20 bp, Artificial Sequence
  MKO10126226_B_Vmn2r76
  gRNA
tcatacataagcaattcttg

SEQ ID NO: 126227 - DNA, 20 bp, Artificial Sequence
  MKO10126227_B_Vmn2r76
  gRNA
gtcagtttatcctcaagaag

SEQ ID NO: 126228 - DNA, 20 bp, Artificial Sequence
  MKO10126228_B_Vmn2r77
  gRNA
gtacttctctagaactccag

SEQ ID NO: 126229 - DNA, 20 bp, Artificial Sequence
  MKO10126229_B_Vmn2r77
  gRNA
catgaaccagaatagaaaac

SEQ ID NO: 126230 - DNA, 20 bp, Artificial Sequence
  MKO10126230_B_Vmn2r77
  gRNA
gaaggacttaagatgaaaat

SEQ ID NO: 126231 - DNA, 20 bp, Artificial Sequence
  MKO10126231_B_Vmn2r78
  gRNA
atatttattaggtctccagc

SEQ ID NO: 126232 - DNA, 20 bp, Artificial Sequence
  MKO10126232_B_Vmn2r78
  gRNA
atatgaaccagaatagagaa

SEQ ID NO: 126233 - DNA, 20 bp, Artificial Sequence
  MKO10126233_B_Vmn2r78
  gRNA
tctgacttacctctggagtt

SEQ ID NO: 126234 - DNA, 20 bp, Artificial Sequence
  MKO10126234_B_Vmn2r79
  gRNA
atacaatttgtaaaccctgt

SEQ ID NO: 126235 - DNA, 20 bp, Artificial Sequence
  MKO10126235_B_Vmn2r79
  gRNA
cgatatttaattgtactgac

SEQ ID NO: 126236 - DNA, 20 bp, Artificial Sequence
  MKO10126236_B_Vmn2r79
  gRNA
catatcctcacctgtcatgt

SEQ ID NO: 126237 - DNA, 20 bp, Artificial Sequence
  MKO10126237_B_Vmn2r7
  gRNA
agagctgagcttcctcattc

SEQ ID NO: 126238 - DNA, 20 bp, Artificial Sequence
  MKO10126238_B_Vmn2r7
  gRNA
caaaggctttgtgatccatg

SEQ ID NO: 126239 - DNA, 20 bp, Artificial Sequence
  MKO10126239_B_Vmn2r7
  gRNA
ataaaattcattacccatga

SEQ ID NO: 126240 - DNA, 20 bp, Artificial Sequence
  MKO10126240_B_Vmn2r80
  gRNA
tattgacaattgttcccctt

SEQ ID NO: 126241 - DNA, 20 bp, Artificial Sequence
  MKO10126241_B_Vmn2r80
  gRNA
actaattgtgaaagacctgt

SEQ ID NO: 126242 - DNA, 20 bp, Artificial Sequence
  MKO10126242_B_Vmn2r80
  gRNA
aaatttgtaaagatccaata

SEQ ID NO: 126243 - DNA, 20 bp, Artificial Sequence
  MKO10126243_B_Vmn2r81
  gRNA
cattgacaattgttcccctt

SEQ ID NO: 126244 - DNA, 20 bp, Artificial Sequence
  MKO10126244_B_Vmn2r81
  gRNA
tgcactgagagctgcaatcc

SEQ ID NO: 126245 - DNA, 20 bp, Artificial Sequence
  MKO10126245_B_Vmn2r81
  gRNA
aggagtgcaatcaaagcaac

SEQ ID NO: 126246 - DNA, 20 bp, Artificial Sequence
  MKO10126246_B_Vmn2r82
  gRNA
tgtctgaatatatgattaac

SEQ ID NO: 126247 - DNA, 20 bp, Artificial Sequence
  MKO10126247_B_Vmn2r82
  gRNA
acgaaactaccaactcgttt

SEQ ID NO: 126248 - DNA, 20 bp, Artificial Sequence
  MKO10126248_B_Vmn2r82
  gRNA
aaaatattccttccaatagc

SEQ ID NO: 126249 - DNA, 20 bp, Artificial Sequence
  MKO10126249_B_Vmn2r83
  gRNA
tatctgaacacataattgac

SEQ ID NO: 126250 - DNA, 20 bp, Artificial Sequence
  MKO10126250_B_Vmn2r83
  gRNA
cccatgagataattctaaca

SEQ ID NO: 126251 - DNA, 20 bp, Artificial Sequence
  MKO10126251_B_Vmn2r83
  gRNA
atttgctccaagtgctccaa

SEQ ID NO: 126252 - DNA, 20 bp, Artificial Sequence
  MKO10126252_B_Vmn2r84
  gRNA
agaatacacagaatgtcagc

SEQ ID NO: 126253 - DNA, 20 bp, Artificial Sequence
  MKO10126253_B_Vmn2r84
  gRNA
cttgttgaagaatgtgctca

SEQ ID NO: 126254 - DNA, 20 bp, Artificial Sequence
  MKO10126254_B_Vmn2r84
  gRNA
acccactgatgttcctcctg

SEQ ID NO: 126255 - DNA, 20 bp, Artificial Sequence
  MKO10126255_B_Vmn2r85
  gRNA
acatgtcacactgcacattg

SEQ ID NO: 126256 - DNA, 20 bp, Artificial Sequence
  MKO10126256_B_Vmn2r85
  gRNA
attgactcagaaatgcttat

SEQ ID NO: 126257 - DNA, 20 bp, Artificial Sequence
  MKO10126257_B_Vmn2r85
  gRNA
aactggtggatatgaatcat

SEQ ID NO: 126258 - DNA, 20 bp, Artificial Sequence
  MKO10126258_B_Vmn2r86
  gRNA
agtacatgtcacactgcaaa

SEQ ID NO: 126259 - DNA, 20 bp, Artificial Sequence
  MKO10126259_B_Vmn2r86
  gRNA
atatgaagttgttgactcca

SEQ ID NO: 126260 - DNA, 20 bp, Artificial Sequence
  MKO10126260_B_Vmn2r86
  gRNA
acaaactcatattcacttgc

SEQ ID NO: 126261 - DNA, 20 bp, Artificial Sequence
  MKO10126261_B_Vmn2r87
  gRNA
atatgtagttgttgactccg

SEQ ID NO: 126262 - DNA, 20 bp, Artificial Sequence
  MKO10126262_B_Vmn2r87
  gRNA
tggtaaatgtcaagattctt

SEQ ID NO: 126263 - DNA, 20 bp, Artificial Sequence
  MKO10126263_B_Vmn2r87
  gRNA
aaaatacacagaatgtcagc

SEQ ID NO: 126264 - DNA, 20 bp, Artificial Sequence
  MKO10126264_B_Vmn2r88
  gRNA
taagaatttgtgacaatgaa

SEQ ID NO: 126265 - DNA, 20 bp, Artificial Sequence
  MKO10126265_B_Vmn2r88
  gRNA
ttgtcacaaattcttaccag

SEQ ID NO: 126266 - DNA, 20 bp, Artificial Sequence
  MKO10126266_B_Vmn2r88
  gRNA
atatgaagttcttgtctctg

SEQ ID NO: 126267 - DNA, 20 bp, Artificial Sequence
  MKO10126267_B_Vmn2r89
  gRNA
taatatgatatcccattgtg

SEQ ID NO: 126268 - DNA, 20 bp, Artificial Sequence
  MKO10126268_B_Vmn2r89
  gRNA
aagaatagtgaagatagtga

SEQ ID NO: 126269 - DNA, 20 bp, Artificial Sequence
  MKO10126269_B_Vmn2r89
  gRNA
ttataaaaattatcttcaat

SEQ ID NO: 126270 - DNA, 20 bp, Artificial Sequence
  MKO10126270_B_Vmn2r8
  gRNA
gaccatttaatcctgacctg

SEQ ID NO: 126271 - DNA, 20 bp, Artificial Sequence
  MKO10126271_B_Vmn2r8
  gRNA
cagtacatgtcacactacac

SEQ ID NO: 126272 - DNA, 20 bp, Artificial Sequence
  MKO10126272_B_Vmn2r8
  gRNA
tggcttccatgctgaaatcc

SEQ ID NO: 126273 - DNA, 20 bp, Artificial Sequence
  MKO10126273_B_Vmn2r90
  gRNA
tcttctacccaatataactt

SEQ ID NO: 126274 - DNA, 20 bp, Artificial Sequence
  MKO10126274_B_Vmn2r90
  gRNA
ttgctgatgattccttagtc

SEQ ID NO: 126275 - DNA, 20 bp, Artificial Sequence
  MKO10126275_B_Vmn2r90
  gRNA
atcaaagcccaaagttatat

SEQ ID NO: 126276 - DNA, 20 bp, Artificial Sequence
  MKO10126276_B_Vmn2r91
  gRNA
attgaagcaatgtcccaatt

SEQ ID NO: 126277 - DNA, 20 bp, Artificial Sequence
  MKO10126277_B_Vmn2r91
  gRNA
cccacctctgaaaatatttc

SEQ ID NO: 126278 - DNA, 20 bp, Artificial Sequence
  MKO10126278_B_Vmn2r91
  gRNA
tcagcttaacactttcctga

SEQ ID NO: 126279 - DNA, 20 bp, Artificial Sequence
  MKO10126279_B_Vmn2r92
  gRNA
ggttattgacatggaatgtc

SEQ ID NO: 126280 - DNA, 20 bp, Artificial Sequence
  MKO10126280_B_Vmn2r92
  gRNA
cccacctctgaaaatatttc

SEQ ID NO: 126281 - DNA, 20 bp, Artificial Sequence
  MKO10126281_B_Vmn2r92
  gRNA
tcagcttaacactttcctga

SEQ ID NO: 126282 - DNA, 20 bp, Artificial Sequence
  MKO10126282_B_Vmn2r93
  gRNA
ttctcatctcaatatccttc

SEQ ID NO: 126283 - DNA, 20 bp, Artificial Sequence
  MKO10126283_B_Vmn2r93
  gRNA
ccatctaaaatgaacaatca

SEQ ID NO: 126284 - DNA, 20 bp, Artificial Sequence
  MKO10126284_B_Vmn2r93
  gRNA
tggatggcatctgcccaaat

SEQ ID NO: 126285 - DNA, 20 bp, Artificial Sequence
  MKO10126285_B_Vmn2r94
  gRNA
attcagaacagtaacccagc

SEQ ID NO: 126286 - DNA, 20 bp, Artificial Sequence
  MKO10126286_B_Vmn2r94
  gRNA
cacagcccatgtagagagaa

SEQ ID NO: 126287 - DNA, 20 bp, Artificial Sequence
  MKO10126287_B_Vmn2r94
  gRNA
tggagacagacaaaagattc

SEQ ID NO: 126288 - DNA, 20 bp, Artificial Sequence
  MKO10126288_B_Vmn2r95
  gRNA
aactttcactgcacacagat

SEQ ID NO: 126289 - DNA, 20 bp, Artificial Sequence
  MKO10126289_B_Vmn2r95
  gRNA
actcaaaattctccctataa

SEQ ID NO: 126290 - DNA, 20 bp, Artificial Sequence
  MKO10126290_B_Vmn2r95
  gRNA
gagacaaaaagagtttagat

SEQ ID NO: 126291 - DNA, 20 bp, Artificial Sequence
  MKO10126291_B_Vmn2r96
  gRNA
cactttcctgaagaatattg

SEQ ID NO: 126292 - DNA, 20 bp, Artificial Sequence
  MKO10126292_B_Vmn2r96
  gRNA
ctcatctgtggccttccatt

SEQ ID NO: 126293 - DNA, 20 bp, Artificial Sequence
  MKO10126293_B_Vmn2r96
  gRNA
ctggaggatgcaggaaactg

SEQ ID NO: 126294 - DNA, 20 bp, Artificial Sequence
  MKO10126294_B_Vmn2r97
  gRNA
atcaaacccaagagatatgt

SEQ ID NO: 126295 - DNA, 20 bp, Artificial Sequence
  MKO10126295_B_Vmn2r97
  gRNA
gttgaagcaatgtcccaatt

SEQ ID NO: 126296 - DNA, 20 bp, Artificial Sequence
  MKO10126296_B_Vmn2r97
  gRNA
atattgaggtgaaagacaaa

SEQ ID NO: 126297 - DNA, 20 bp, Artificial Sequence
  MKO10126297_B_Vmn2r98
  gRNA
attgtaaatacttgtgctct

SEQ ID NO: 126298 - DNA, 20 bp, Artificial Sequence
  MKO10126298_B_Vmn2r98
  gRNA
ctttcacttcaatatccttc

SEQ ID NO: 126299 - DNA, 20 bp, Artificial Sequence
  MKO10126299_B_Vmn2r98
  gRNA
gttgaagcaatgtcccaatt

SEQ ID NO: 126300 - DNA, 20 bp, Artificial Sequence
  MKO10126300_B_Vmn2r99
  gRNA
ataaacacaactgctgatcc

SEQ ID NO: 126301 - DNA, 20 bp, Artificial Sequence
  MKO10126301_B_Vmn2r99
  gRNA
aattcagagcaagaatatac

SEQ ID NO: 126302 - DNA, 20 bp, Artificial Sequence
  MKO10126302_B_Vmn2r99
  gRNA
ctttcaattcaatatccttc

SEQ ID NO: 126303 - DNA, 20 bp, Artificial Sequence
  MKO10126303_B_Vmn2r9
  gRNA
cacacacttgtcccatgcca

SEQ ID NO: 126304 - DNA, 20 bp, Artificial Sequence
  MKO10126304_B_Vmn2r9
  gRNA
tgtagtgtgacgtgtactgc

SEQ ID NO: 126305 - DNA, 20 bp, Artificial Sequence
  MKO10126305_B_Vmn2r9
  gRNA
acccactgatgttccttctg

SEQ ID NO: 126306 - DNA, 20 bp, Artificial Sequence
  MKO10126306_B_Vmo1
  gRNA
tccctcgagtgcagtgtagc

SEQ ID NO: 126307 - DNA, 20 bp, Artificial Sequence
  MKO10126307_B_Vmo1
  gRNA
atgtaaatggctccacccgg

SEQ ID NO: 126308 - DNA, 20 bp, Artificial Sequence
  MKO10126308_B_Vmo1
  gRNA
atcaccccaggtaccaccgt

SEQ ID NO: 126309 - DNA, 20 bp, Artificial Sequence
  MKO10126309_B_Vmp1
  gRNA
gtggcatcgtcaaagcattg

SEQ ID NO: 126310 - DNA, 20 bp, Artificial Sequence
  MKO10126310_B_Vmp1
  gRNA
gcttaccagataaagcagaa

SEQ ID NO: 126311 - DNA, 20 bp, Artificial Sequence
  MKO10126311_B_Vmp1
  gRNA
tcctgttccaagaccaacag

SEQ ID NO: 126312 - DNA, 20 bp, Artificial Sequence
  MKO10126312_B_Vnn1
  gRNA
tctatgcacccgattctcca

SEQ ID NO: 126313 - DNA, 20 bp, Artificial Sequence
  MKO10126313_B_Vnn1
  gRNA
ccatactgttcccaaccgcc

SEQ ID NO: 126314 - DNA, 20 bp, Artificial Sequence
  MKO10126314_B_Vnn1
  gRNA
gtgactttcgacaccccctt

SEQ ID NO: 126315 - DNA, 20 bp, Artificial Sequence
  MKO10126315_B_Vnn3
  gRNA
ctggcccacaccgaatggaa

SEQ ID NO: 126316 - DNA, 20 bp, Artificial Sequence
  MKO10126316_B_Vnn3
  gRNA
gctaacagcccgctaccata

SEQ ID NO: 126317 - DNA, 20 bp, Artificial Sequence
  MKO10126317_B_Vnn3
  gRNA
gaccatttacccctacctag

SEQ ID NO: 126318 - DNA, 20 bp, Artificial Sequence
  MKO10126318_B_Vopp1
  gRNA
ggacccgggatgaatcctgt

SEQ ID NO: 126319 - DNA, 20 bp, Artificial Sequence
  MKO10126319_B_Vopp1
  gRNA
tgagggccctttccatacag

SEQ ID NO: 126320 - DNA, 20 bp, Artificial Sequence
  MKO10126320_B_Vopp1
  gRNA
ctatacttacatatagtatg

SEQ ID NO: 126321 - DNA, 20 bp, Artificial Sequence
  MKO10126321_B_Vprbp
  gRNA
acatattctactggactgct

SEQ ID NO: 126322 - DNA, 20 bp, Artificial Sequence
  MKO10126322_B_Vprbp
  gRNA
cgcagttgtctttcaagaaa

SEQ ID NO: 126323 - DNA, 20 bp, Artificial Sequence
  MKO10126323_B_Vprbp
  gRNA
agctgatccagagtgtatgc

SEQ ID NO: 126324 - DNA, 20 bp, Artificial Sequence
  MKO10126324_B_Vpreb1
  gRNA
gtctgtcctgctcatgctgc

SEQ ID NO: 126325 - DNA, 20 bp, Artificial Sequence
  MKO10126325_B_Vpreb1
  gRNA
cctggtcgtatctttggacc

SEQ ID NO: 126326 - DNA, 20 bp, Artificial Sequence
  MKO10126326_B_Vpreb1
  gRNA
ccaagggaagaagatgctaa

SEQ ID NO: 126327 - DNA, 20 bp, Artificial Sequence
  MKO10126327_B_Vpreb2
  gRNA
gtctgtcctgctcatgctgc

SEQ ID NO: 126328 - DNA, 20 bp, Artificial Sequence
  MKO10126328_B_Vpreb2
  gRNA
caaagatacggccaggaacc

SEQ ID NO: 126329 - DNA, 20 bp, Artificial Sequence
  MKO10126329_B_Vpreb2
  gRNA
ccaagggaagaagatgctga

SEQ ID NO: 126330 - DNA, 20 bp, Artificial Sequence
  MKO10126330_B_Vpreb3
  gRNA
atgtgccgtacctgccacaa

SEQ ID NO: 126331 - DNA, 20 bp, Artificial Sequence
  MKO10126331_B_Vpreb3
  gRNA
gacgcgttctcagtcttccc

SEQ ID NO: 126332 - DNA, 20 bp, Artificial Sequence
  MKO10126332_B_Vpreb3
  gRNA
cgacagattctcagctaccg

SEQ ID NO: 126333 - DNA, 20 bp, Artificial Sequence
  MKO10126333_B_Vps11
  gRNA
gtgtgtcacccgtagtttgt

SEQ ID NO: 126334 - DNA, 20 bp, Artificial Sequence
  MKO10126334_B_Vps11
  gRNA
gttccaggcctacaaactac

SEQ ID NO: 126335 - DNA, 20 bp, Artificial Sequence
  MKO10126335_B_Vps11
  gRNA
ggtctttcctgcttggcgaa

SEQ ID NO: 126336 - DNA, 20 bp, Artificial Sequence
  MKO10126336_B_Vps13a
  gRNA
tcttccaaaacagcttcaac

SEQ ID NO: 126337 - DNA, 20 bp, Artificial Sequence
  MKO10126337_B_Vps13a
  gRNA
aaacagaaagtatttgataa

SEQ ID NO: 126338 - DNA, 20 bp, Artificial Sequence
  MKO10126338_B_Vps13a
  gRNA
tgtaattaaagaaaatgcat

SEQ ID NO: 126339 - DNA, 20 bp, Artificial Sequence
  MKO10126339_B_Vps13b
  gRNA
aaaaccccgaagaattcagc

SEQ ID NO: 126340 - DNA, 20 bp, Artificial Sequence
  MKO10126340_B_Vps13b
  gRNA
aaaattgggctccgaacctg

SEQ ID NO: 126341 - DNA, 20 bp, Artificial Sequence
  MKO10126341_B_Vps13b
  gRNA
gaattacctggtggtaagtc

SEQ ID NO: 126342 - DNA, 20 bp, Artificial Sequence
  MKO10126342_B_Vps13c
  gRNA
ttaaacaggtaatgtggctt

SEQ ID NO: 126343 - DNA, 20 bp, Artificial Sequence
  MKO10126343_B_Vps13c
  gRNA
tttctgtttaatatcctgca

SEQ ID NO: 126344 - DNA, 20 bp, Artificial Sequence
  MKO10126344_B_Vps13c
  gRNA
tggccagccttgactttgaa

SEQ ID NO: 126345 - DNA, 20 bp, Artificial Sequence
  MKO10126345_B_Vps13d
  gRNA
gcgtaagaaagcgctgcttc

SEQ ID NO: 126346 - DNA, 20 bp, Artificial Sequence
  MKO10126346_B_Vps13d
  gRNA
ttcccttgcagagtgagcgg

SEQ ID NO: 126347 - DNA, 20 bp, Artificial Sequence
  MKO10126347_B_Vps13d
  gRNA
cgtaccagctttgacttcaa

SEQ ID NO: 126348 - DNA, 20 bp, Artificial Sequence
  MKO10126348_B_Vps16
  gRNA
gcagagtagatctccagtac

SEQ ID NO: 126349 - DNA, 20 bp, Artificial Sequence
  MKO10126349_B_Vps16
  gRNA
cctcctcagctgaccagccg

SEQ ID NO: 126350 - DNA, 20 bp, Artificial Sequence
  MKO10126350_B_Vps16
  gRNA
cttccggaggcacttcagca

SEQ ID NO: 126351 - DNA, 20 bp, Artificial Sequence
  MKO10126351_B_Vps18
  gRNA
ggatgtctggcgcacctact

SEQ ID NO: 126352 - DNA, 20 bp, Artificial Sequence
  MKO10126352_B_Vps18
  gRNA
ttgacttcaccccctcggag

SEQ ID NO: 126353 - DNA, 20 bp, Artificial Sequence
  MKO10126353_B_Vps18
  gRNA
ggcaagtgagcccaaccgtg

SEQ ID NO: 126354 - DNA, 20 bp, Artificial Sequence
  MKO10126354_B_Vps25
  gRNA
acaatctgaattgactccac

SEQ ID NO: 126355 - DNA, 20 bp, Artificial Sequence
  MKO10126355_B_Vps25
  gRNA
tattcttatccaaccactcg

SEQ ID NO: 126356 - DNA, 20 bp, Artificial Sequence
  MKO10126356_B_Vps25
  gRNA
agtctagcttcctgatcatg

SEQ ID NO: 126357 - DNA, 20 bp, Artificial Sequence
  MKO10126357_B_Vps26a
  gRNA
ttaatagagttgttgacatc

SEQ ID NO: 126358 - DNA, 20 bp, Artificial Sequence
  MKO10126358_B_Vps26a
  gRNA
tgtcaacaactctattaaaa

SEQ ID NO: 126359 - DNA, 20 bp, Artificial Sequence
  MKO10126359_B_Vps26a
  gRNA
ggcaacatcaatctcacaaa

SEQ ID NO: 126360 - DNA, 20 bp, Artificial Sequence
  MKO10126360_B_Vps26b
  gRNA
ggcggctgatggtggctcga

SEQ ID NO: 126361 - DNA, 20 bp, Artificial Sequence
  MKO10126361_B_Vps26b
  gRNA
tgtgcgctattacctcaact

SEQ ID NO: 126362 - DNA, 20 bp, Artificial Sequence
  MKO10126362_B_Vps26b
  gRNA
caggtgagtccatccccatc

SEQ ID NO: 126363 - DNA, 20 bp, Artificial Sequence
  MKO10126363_B_Vps28
  gRNA
cctggagaaggcgtacatca

SEQ ID NO: 126364 - DNA, 20 bp, Artificial Sequence
  MKO10126364_B_Vps28
  gRNA
tgcagcccctgggaacaagc

SEQ ID NO: 126365 - DNA, 20 bp, Artificial Sequence
  MKO10126365_B_Vps28
  gRNA
taaagctctacaagaatgct

SEQ ID NO: 126366 - DNA, 20 bp, Artificial Sequence
  MKO10126366_B_Vps29
  gRNA
cactggggcctataatgcct

SEQ ID NO: 126367 - DNA, 20 bp, Artificial Sequence
  MKO10126367_B_Vps29
  gRNA
ggatcagaccgatcttgaac

SEQ ID NO: 126368 - DNA, 20 bp, Artificial Sequence
  MKO10126368_B_Vps29
  gRNA
atgtccatcagcacaaacga

SEQ ID NO: 126369 - DNA, 20 bp, Artificial Sequence
  MKO10126369_B_Vps33a
  gRNA
tatgtccatcagctctagcc

SEQ ID NO: 126370 - DNA, 20 bp, Artificial Sequence
  MKO10126370_B_Vps33a
  gRNA
cagcctgtaccacgcagcca

SEQ ID NO: 126371 - DNA, 20 bp, Artificial Sequence
  MKO10126371_B_Vps33a
  gRNA
tgatggggacctcttatcca

SEQ ID NO: 126372 - DNA, 20 bp, Artificial Sequence
  MKO10126372_B_Vps33b
  gRNA
tagcgcatattcttgattcg

SEQ ID NO: 126373 - DNA, 20 bp, Artificial Sequence
  MKO10126373_B_Vps33b
  gRNA
tcttgtcaatgctgacaagc

SEQ ID NO: 126374 - DNA, 20 bp, Artificial Sequence
  MKO10126374_B_Vps33b
  gRNA
agtcatcctaagccctcaga

SEQ ID NO: 126375 - DNA, 20 bp, Artificial Sequence
  MKO10126375_B_Vps35
  gRNA
ccggagctctccaagcatat

SEQ ID NO: 126376 - DNA, 20 bp, Artificial Sequence
  MKO10126376_B_Vps35
  gRNA
agttatctcttgatcacagt

SEQ ID NO: 126377 - DNA, 20 bp, Artificial Sequence
  MKO10126377_B_Vps35
  gRNA
atgactgaaccttcacagcc

SEQ ID NO: 126378 - DNA, 20 bp, Artificial Sequence
  MKO10126378_B_Vps36
  gRNA
tgtactaagaagaagagtcc

SEQ ID NO: 126379 - DNA, 20 bp, Artificial Sequence
  MKO10126379_B_Vps36
  gRNA
aggcagctggaatcgggaag

SEQ ID NO: 126380 - DNA, 20 bp, Artificial Sequence
  MKO10126380_B_Vps36
  gRNA
ctcttcttcttagtacacac

SEQ ID NO: 126381 - DNA, 20 bp, Artificial Sequence
  MKO10126381_B_Vps37a
  gRNA
tttacaatgcactcagatct

SEQ ID NO: 126382 - DNA, 20 bp, Artificial Sequence
  MKO10126382_B_Vps37a
  gRNA
gccaatcagacatcatttaa

SEQ ID NO: 126383 - DNA, 20 bp, Artificial Sequence
  MKO10126383_B_Vps37a
  gRNA
acatattaatgttaattgtc

SEQ ID NO: 126384 - DNA, 20 bp, Artificial Sequence
  MKO10126384_B_Vps37b
  gRNA
gcacatgcgccgtgtgaaag

SEQ ID NO: 126385 - DNA, 20 bp, Artificial Sequence
  MKO10126385_B_Vps37b
  gRNA
tctgttagcgcttcttcaag

SEQ ID NO: 126386 - DNA, 20 bp, Artificial Sequence
  MKO10126386_B_Vps37b
  gRNA
acagtctaacaacgcttcct

SEQ ID NO: 126387 - DNA, 20 bp, Artificial Sequence
  MKO10126387_B_Vps37c
  gRNA
ctctgccaggctccggttcg

SEQ ID NO: 126388 - DNA, 20 bp, Artificial Sequence
  MKO10126388_B_Vps37c
  gRNA
actggccacgaaccggagcc

SEQ ID NO: 126389 - DNA, 20 bp, Artificial Sequence
  MKO10126389_B_Vps37c
  gRNA
ctagccgggcaatggcttct

SEQ ID NO: 126390 - DNA, 20 bp, Artificial Sequence
  MKO10126390_B_Vps37d
  gRNA
cacccgggagagcccttcac

SEQ ID NO: 126391 - DNA, 20 bp, Artificial Sequence
  MKO10126391_B_Vps37d
  gRNA
gtgtccgcctcaggtgggcc

SEQ ID NO: 126392 - DNA, 20 bp, Artificial Sequence
  MKO10126392_B_Vps37d
  gRNA
gcccccaatgtgcgctgggc

SEQ ID NO: 126393 - DNA, 20 bp, Artificial Sequence
  MKO10126393_B_Vps39
  gRNA
agctgaccagaatcttaaac

SEQ ID NO: 126394 - DNA, 20 bp, Artificial Sequence
  MKO10126394_B_Vps39
  gRNA
ggtttcccagtttaagattc

SEQ ID NO: 126395 - DNA, 20 bp, Artificial Sequence
  MKO10126395_B_Vps39
  gRNA
aagggcatcttcttctctac

SEQ ID NO: 126396 - DNA, 20 bp, Artificial Sequence
  MKO10126396_B_Vps41
  gRNA
cactgtcatccaagctaatt

SEQ ID NO: 126397 - DNA, 20 bp, Artificial Sequence
  MKO10126397_B_Vps41
  gRNA
gaagataaaccaaattagct

SEQ ID NO: 126398 - DNA, 20 bp, Artificial Sequence
  MKO10126398_B_Vps41
  gRNA
acttctgagtgatgtttccc

SEQ ID NO: 126399 - DNA, 20 bp, Artificial Sequence
  MKO10126399_B_Vps45
  gRNA
caagagtgacgtgaagtcac

SEQ ID NO: 126400 - DNA, 20 bp, Artificial Sequence
  MKO10126400_B_Vps45
  gRNA
agctgacgagcaggaagttg

SEQ ID NO: 126401 - DNA, 20 bp, Artificial Sequence
  MKO10126401_B_Vps45
  gRNA
aataaaatatatgctgtact

SEQ ID NO: 126402 - DNA, 20 bp, Artificial Sequence
  MKO10126402_B_Vps4a
  gRNA
ttcttacctgtgaataagtg

SEQ ID NO: 126403 - DNA, 20 bp, Artificial Sequence
  MKO10126403_B_Vps4a
  gRNA
tcagcttctccgctctgtct

SEQ ID NO: 126404 - DNA, 20 bp, Artificial Sequence
  MKO10126404_B_Vps4a
  gRNA
ctcaccccttgccttcactc

SEQ ID NO: 126405 - DNA, 20 bp, Artificial Sequence
  MKO10126405_B_Vps4b
  gRNA
atttcacctgtaaacagatg

SEQ ID NO: 126406 - DNA, 20 bp, Artificial Sequence
  MKO10126406_B_Vps4b
  gRNA
acatcactccacttcacatt

SEQ ID NO: 126407 - DNA, 20 bp, Artificial Sequence
  MKO10126407_B_Vps4b
  gRNA
ttcattaggaatgacagtga

SEQ ID NO: 126408 - DNA, 20 bp, Artificial Sequence
  MKO10126408_B_Vps51
  gRNA
ttcgcgcctcaccaagtgtg

SEQ ID NO: 126409 - DNA, 20 bp, Artificial Sequence
  MKO10126409_B_Vps51
  gRNA
tgggcaggcagtgcgctatc

SEQ ID NO: 126410 - DNA, 20 bp, Artificial Sequence
  MKO10126410_B_Vps51
  gRNA
gctgatccgtgcgctgaagt

SEQ ID NO: 126411 - DNA, 20 bp, Artificial Sequence
  MKO10126411_B_Vps52
  gRNA
gtctctgcacaatcagatca

SEQ ID NO: 126412 - DNA, 20 bp, Artificial Sequence
  MKO10126412_B_Vps52
  gRNA
agattgagcagaagtcaatc

SEQ ID NO: 126413 - DNA, 20 bp, Artificial Sequence
  MKO10126413_B_Vps52
  gRNA
cctcttcagggggggggttc

SEQ ID NO: 126414 - DNA, 20 bp, Artificial Sequence
  MKO10126414_B_Vps53
  gRNA
cagagtattgatatactcaa

SEQ ID NO: 126415 - DNA, 20 bp, Artificial Sequence
  MKO10126415_B_Vps53
  gRNA
tttgccaaagagttgctgaa

SEQ ID NO: 126416 - DNA, 20 bp, Artificial Sequence
  MKO10126416_B_Vps53
  gRNA
tttattataggcacttgaag

SEQ ID NO: 126417 - DNA, 20 bp, Artificial Sequence
  MKO10126417_B_Vps54
  gRNA
tgctgctgggagatttactt

SEQ ID NO: 126418 - DNA, 20 bp, Artificial Sequence
  MKO10126418_B_Vps54
  gRNA
atgtaaaagagtcctgtcaa

SEQ ID NO: 126419 - DNA, 20 bp, Artificial Sequence
  MKO10126419_B_Vps54
  gRNA
gcagtattaaaatgagacca

SEQ ID NO: 126420 - DNA, 20 bp, Artificial Sequence
  MKO10126420_B_Vps72
  gRNA
tgttggggagcccggcccca

SEQ ID NO: 126421 - DNA, 20 bp, Artificial Sequence
  MKO10126421_B_Vps72
  gRNA
tcctcttaccttataggctt

SEQ ID NO: 126422 - DNA, 20 bp, Artificial Sequence
  MKO10126422_B_Vps72
  gRNA
cctcatcctccgtatcagac

SEQ ID NO: 126423 - DNA, 20 bp, Artificial Sequence
  MKO10126423_B_Vps8
  gRNA
ctcttacgatacctcatctg

SEQ ID NO: 126424 - DNA, 20 bp, Artificial Sequence
  MKO10126424_B_Vps8
  gRNA
ctaccaaagagatcatcgtt

SEQ ID NO: 126425 - DNA, 20 bp, Artificial Sequence
  MKO10126425_B_Vps8
  gRNA
ctttacttagatcgatgaca

SEQ ID NO: 126426 - DNA, 20 bp, Artificial Sequence
  MKO10126426_B_Vps9d1
  gRNA
ggccatgcagaagacatcgc

SEQ ID NO: 126427 - DNA, 20 bp, Artificial Sequence
  MKO10126427_B_Vps9d1
  gRNA
cgccgagtgtgttcagatga

SEQ ID NO: 126428 - DNA, 20 bp, Artificial Sequence
  MKO10126428_B_Vps9d1
  gRNA
caagcttggtagctgttgac

SEQ ID NO: 126429 - DNA, 20 bp, Artificial Sequence
  MKO10126429_B_Vrk1
  gRNA
cgcgccctgtgttgtgaaag

SEQ ID NO: 126430 - DNA, 20 bp, Artificial Sequence
  MKO10126430_B_Vrk1
  gRNA
cggaattaaagttctaccag

SEQ ID NO: 126431 - DNA, 20 bp, Artificial Sequence
  MKO10126431_B_Vrk1
  gRNA
gttcctaagtattggggatc

SEQ ID NO: 126432 - DNA, 20 bp, Artificial Sequence
  MKO10126432_B_Vrk2
  gRNA
tccaaaagtggatacaacag

SEQ ID NO: 126433 - DNA, 20 bp, Artificial Sequence
  MKO10126433_B_Vrk2
  gRNA
tttggtctgactgatttcaa

SEQ ID NO: 126434 - DNA, 20 bp, Artificial Sequence
  MKO10126434_B_Vrk2
  gRNA
aatagatttacagaaactcc

SEQ ID NO: 126435 - DNA, 20 bp, Artificial Sequence
  MKO10126435_B_Vrk3
  gRNA
gaccaaggcattctctatga

SEQ ID NO: 126436 - DNA, 20 bp, Artificial Sequence
  MKO10126436_B_Vrk3
  gRNA
tggaataccttgcagaggct

SEQ ID NO: 126437 - DNA, 20 bp, Artificial Sequence
  MKO10126437_B_Vrk3
  gRNA
ccgggtgaccacctcactcc

SEQ ID NO: 126438 - DNA, 20 bp, Artificial Sequence
  MKO10126438_B_Vrtn
  gRNA
cgcccgcttccacatgtagt

SEQ ID NO: 126439 - DNA, 20 bp, Artificial Sequence
  MKO10126439_B_Vrtn
  gRNA
caacgagcttctccaatgtg

SEQ ID NO: 126440 - DNA, 20 bp, Artificial Sequence
  MKO10126440_B_Vrtn
  gRNA
cgaggtctacctactacaac

SEQ ID NO: 126441 - DNA, 20 bp, Artificial Sequence
  MKO10126441_B_Vsig10
  gRNA
ctgagcacgtgtagttgcct

SEQ ID NO: 126442 - DNA, 20 bp, Artificial Sequence
  MKO10126442_B_Vsig10
  gRNA
gtagcccccgtcccagttac

SEQ ID NO: 126443 - DNA, 20 bp, Artificial Sequence
  MKO10126443_B_Vsig10
  gRNA
aactcgcctgtaactgggac

SEQ ID NO: 126444 - DNA, 20 bp, Artificial Sequence
  MKO10126444_B_Vsig1
  gRNA
caccgtctcctttgtattac

SEQ ID NO: 126445 - DNA, 20 bp, Artificial Sequence
  MKO10126445_B_Vsig1
  gRNA
tatggtgatagatgcattac

SEQ ID NO: 126446 - DNA, 20 bp, Artificial Sequence
  MKO10126446_B_Vsig1
  gRNA
tgtactgccatcaacagtct

SEQ ID NO: 126447 - DNA, 20 bp, Artificial Sequence
  MKO10126447_B_Vsig2
  gRNA
tacgggcacggacgcagaga

SEQ ID NO: 126448 - DNA, 20 bp, Artificial Sequence
  MKO10126448_B_Vsig2
  gRNA
agacgttcccagttgtacac

SEQ ID NO: 126449 - DNA, 20 bp, Artificial Sequence
  MKO10126449_B_Vsig2
  gRNA
ttaccctttggcacgctcag

SEQ ID NO: 126450 - DNA, 20 bp, Artificial Sequence
  MKO10126450_B_Vsig4
  gRNA
acctctgacttgaccactaa

SEQ ID NO: 126451 - DNA, 20 bp, Artificial Sequence
  MKO10126451_B_Vsig4
  gRNA
actcttacctgaaccagcaa

SEQ ID NO: 126452 - DNA, 20 bp, Artificial Sequence
  MKO10126452_B_Vsig4
  gRNA
tacaaccctgcactcctctt

SEQ ID NO: 126453 - DNA, 20 bp, Artificial Sequence
  MKO10126453_B_Vsig8
  gRNA
gtccaacacatgggcaccgc

SEQ ID NO: 126454 - DNA, 20 bp, Artificial Sequence
  MKO10126454_B_Vsig8
  gRNA
tggccaggaggtcatgtacc

SEQ ID NO: 126455 - DNA, 20 bp, Artificial Sequence
  MKO10126455_B_Vsig8
  gRNA
gtgcacagtggccaaccatg

SEQ ID NO: 126456 - DNA, 20 bp, Artificial Sequence
  MKO10126456_B_Vsnl1
  gRNA
atcttgtccacccgctgttc

SEQ ID NO: 126457 - DNA, 20 bp, Artificial Sequence
  MKO10126457_B_Vsnl1
  gRNA
atggcctgacgcctgaacag

SEQ ID NO: 126458 - DNA, 20 bp, Artificial Sequence
  MKO10126458_B_Vsnl1
  gRNA
gttccagcagctctatgtga

SEQ ID NO: 126459 - DNA, 20 bp, Artificial Sequence
  MKO10126459_B_Vstm2a
  gRNA
cgctaactacggggagcttc

SEQ ID NO: 126460 - DNA, 20 bp, Artificial Sequence
  MKO10126460_B_Vstm2a
  gRNA
agtcacatttctcggcaact

SEQ ID NO: 126461 - DNA, 20 bp, Artificial Sequence
  MKO10126461_B_Vstm2a
  gRNA
gcgaggatagctacaagcca

SEQ ID NO: 126462 - DNA, 20 bp, Artificial Sequence
  MKO10126462_B_Vstm2b
  gRNA
accttcgtcctgcaatcgta

SEQ ID NO: 126463 - DNA, 20 bp, Artificial Sequence
  MKO10126463_B_Vstm2b
  gRNA
tcacttgcaggtaccggccc

SEQ ID NO: 126464 - DNA, 20 bp, Artificial Sequence
  MKO10126464_B_Vstm2b
  gRNA
taagttcctgcacccacttc

SEQ ID NO: 126465 - DNA, 20 bp, Artificial Sequence
  MKO10126465_B_Vstm2l
  gRNA
gcgtggcgccgccgagttgc

SEQ ID NO: 126466 - DNA, 20 bp, Artificial Sequence
  MKO10126466_B_Vstm2l
  gRNA
ctgtccgtgccgtcatgtca

SEQ ID NO: 126467 - DNA, 20 bp, Artificial Sequence
  MKO10126467_B_Vstm2l
  gRNA
ggtggtacctgcgcagccac

SEQ ID NO: 126468 - DNA, 20 bp, Artificial Sequence
  MKO10126468_B_Vstm4
  gRNA
cgctgtccttgtgtgctgcg

SEQ ID NO: 126469 - DNA, 20 bp, Artificial Sequence
  MKO10126469_B_Vstm4
  gRNA
aatattcctacctgttctga

SEQ ID NO: 126470 - DNA, 20 bp, Artificial Sequence
  MKO10126470_B_Vstm4
  gRNA
acagtgatctccctcaaagc

SEQ ID NO: 126471 - DNA, 20 bp, Artificial Sequence
  MKO10126471_B_Vstm5
  gRNA
gaggacccaaggcatcccgc

SEQ ID NO: 126472 - DNA, 20 bp, Artificial Sequence
  MKO10126472_B_Vstm5
  gRNA
agtgtgcgtataaattccaa

SEQ ID NO: 126473 - DNA, 20 bp, Artificial Sequence
  MKO10126473_B_Vstm5
  gRNA
actgattgcaaacccacatg

SEQ ID NO: 126474 - DNA, 20 bp, Artificial Sequence
  MKO10126474_B_Vsx1
  gRNA
gacacctgtattcggtcttc

SEQ ID NO: 126475 - DNA, 20 bp, Artificial Sequence
  MKO10126475_B_Vsx1
  gRNA
gggatgcataaaaagtccac

SEQ ID NO: 126476 - DNA, 20 bp, Artificial Sequence
  MKO10126476_B_Vsx1
  gRNA
gtttcgtctggccccctctc

SEQ ID NO: 126477 - DNA, 20 bp, Artificial Sequence
  MKO10126477_B_Vsx2
  gRNA
cgccctccgagccaaagctc

SEQ ID NO: 126478 - DNA, 20 bp, Artificial Sequence
  MKO10126478_B_Vsx2
  gRNA
actcagccatgacgctgctc

SEQ ID NO: 126479 - DNA, 20 bp, Artificial Sequence
  MKO10126479_B_Vsx2
  gRNA
ggaatccattatgccatcct

SEQ ID NO: 126480 - DNA, 20 bp, Artificial Sequence
  MKO10126480_B_Vta1
  gRNA
gctgttactcaagaaatagt

SEQ ID NO: 126481 - DNA, 20 bp, Artificial Sequence
  MKO10126481_B_Vta1
  gRNA
ctgtgatgacatctattaaa

SEQ ID NO: 126482 - DNA, 20 bp, Artificial Sequence
  MKO10126482_B_Vta1
  gRNA
attcataactgcttaaagaa

SEQ ID NO: 126483 - DNA, 20 bp, Artificial Sequence
  MKO10126483_B_Vtcn1
  gRNA
atgccgttgagtttgatgtc

SEQ ID NO: 126484 - DNA, 20 bp, Artificial Sequence
  MKO10126484_B_Vtcn1
  gRNA
aaagccaatgatgagtgcga

SEQ ID NO: 126485 - DNA, 20 bp, Artificial Sequence
  MKO10126485_B_Vtcn1
  gRNA
tgttacatccgcacctcaaa

SEQ ID NO: 126486 - DNA, 20 bp, Artificial Sequence
  MKO10126486_B_Vti1a
  gRNA
tgctatacattcctcgactt

SEQ ID NO: 126487 - DNA, 20 bp, Artificial Sequence
  MKO10126487_B_Vti1a
  gRNA
gaaattccaccccaaagtcg

SEQ ID NO: 126488 - DNA, 20 bp, Artificial Sequence
  MKO10126488_B_Vti1a
  gRNA
taccagtctccactgctatc

SEQ ID NO: 126489 - DNA, 20 bp, Artificial Sequence
  MKO10126489_B_Vti1b
  gRNA
acattgagcgaagaatcttc

SEQ ID NO: 126490 - DNA, 20 bp, Artificial Sequence
  MKO10126490_B_Vti1b
  gRNA
aaagcattgagcgttctcat

SEQ ID NO: 126491 - DNA, 20 bp, Artificial Sequence
  MKO10126491_B_Vti1b
  gRNA
atgaaaatttgagcaaaagc

SEQ ID NO: 126492 - DNA, 20 bp, Artificial Sequence
  MKO10126492_B_Vtn
  gRNA
gagctgctgtgccgactaca

SEQ ID NO: 126493 - DNA, 20 bp, Artificial Sequence
  MKO10126493_B_Vtn
  gRNA
cttcactcgcatcaactgtc

SEQ ID NO: 126494 - DNA, 20 bp, Artificial Sequence
  MKO10126494_B_Vtn
  gRNA
aacgctgcatcaacattgtc

SEQ ID NO: 126495 - DNA, 20 bp, Artificial Sequence
  MKO10126495_B_Vwa1
  gRNA
ccatacgttggggtgcaaca

SEQ ID NO: 126496 - DNA, 20 bp, Artificial Sequence
  MKO10126496_B_Vwa1
  gRNA
gcgcggagcagcatagagcg

SEQ ID NO: 126497 - DNA, 20 bp, Artificial Sequence
  MKO10126497_B_Vwa1
  gRNA
gacctggacagatctcgacc

SEQ ID NO: 126498 - DNA, 20 bp, Artificial Sequence
  MKO10126498_B_Vwa2
  gRNA
agagtcggagccttgcagtt

SEQ ID NO: 126499 - DNA, 20 bp, Artificial Sequence
  MKO10126499_B_Vwa2
  gRNA
ctcaactcgacaggaagtga

SEQ ID NO: 126500 - DNA, 20 bp, Artificial Sequence
  MKO10126500_B_Vwa2
  gRNA
ggccacagcgatcttcccca

SEQ ID NO: 126501 - DNA, 20 bp, Artificial Sequence
  MKO10126501_B_Vwa3a
  gRNA
tacacatgttaaccagaccc

SEQ ID NO: 126502 - DNA, 20 bp, Artificial Sequence
  MKO10126502_B_Vwa3a
  gRNA
ctattgaactctatcagcag

SEQ ID NO: 126503 - DNA, 20 bp, Artificial Sequence
  MKO10126503_B_Vwa3a
  gRNA
ccatccaccacttcaagtca

SEQ ID NO: 126504 - DNA, 20 bp, Artificial Sequence
  MKO10126504_B_Vwa5a
  gRNA
aaccttaaattacgagaatg

SEQ ID NO: 126505 - DNA, 20 bp, Artificial Sequence
  MKO10126505_B_Vwa5a
  gRNA
ggaccctttcaataccatgc

SEQ ID NO: 126506 - DNA, 20 bp, Artificial Sequence
  MKO10126506_B_Vwa5a
  gRNA
gcacaagtttgaccgggatg

SEQ ID NO: 126507 - DNA, 20 bp, Artificial Sequence
  MKO10126507_B_Vwa5b1
  gRNA
actgtgctatactcgtctat

SEQ ID NO: 126508 - DNA, 20 bp, Artificial Sequence
  MKO10126508_B_Vwa5b1
  gRNA
ccgatggggctgcgtctgct

SEQ ID NO: 126509 - DNA, 20 bp, Artificial Sequence
  MKO10126509_B_Vwa5b1
  gRNA
aatagacgagtatagcacag

SEQ ID NO: 126510 - DNA, 20 bp, Artificial Sequence
  MKO10126510_B_Vwa5b2
  gRNA
gagcggcagcggcgtccagc

SEQ ID NO: 126511 - DNA, 20 bp, Artificial Sequence
  MKO10126511_B_Vwa5b2
  gRNA
cgctcaccgactcctgcgtc

SEQ ID NO: 126512 - DNA, 20 bp, Artificial Sequence
  MKO10126512_B_Vwa5b2
  gRNA
ctccggggctctgtgacgac

SEQ ID NO: 126513 - DNA, 20 bp, Artificial Sequence
  MKO10126513_B_Vwa7
  gRNA
cagcctcctgcgaagccgcc

SEQ ID NO: 126514 - DNA, 20 bp, Artificial Sequence
  MKO10126514_B_Vwa7
  gRNA
ttatggtgcggggagaaact

SEQ ID NO: 126515 - DNA, 20 bp, Artificial Sequence
  MKO10126515_B_Vwa7
  gRNA
atgcattccgaagtagccag

SEQ ID NO: 126516 - DNA, 20 bp, Artificial Sequence
  MKO10126516_B_Vwa8
  gRNA
tggaatacatcgccctgtca

SEQ ID NO: 126517 - DNA, 20 bp, Artificial Sequence
  MKO10126517_B_Vwa8
  gRNA
tccagtactgaacaacttgc

SEQ ID NO: 126518 - DNA, 20 bp, Artificial Sequence
  MKO10126518_B_Vwa8
  gRNA
gtctttctcatcggacctcc

SEQ ID NO: 126519 - DNA, 20 bp, Artificial Sequence
  MKO10126519_B_Vwa9
  gRNA
ctgatgtacaagtcttcccc

SEQ ID NO: 126520 - DNA, 20 bp, Artificial Sequence
  MKO10126520_B_Vwa9
  gRNA
taagttatatgtcatgtgca

SEQ ID NO: 126521 - DNA, 20 bp, Artificial Sequence
  MKO10126521_B_Vwa9
  gRNA
acaggaagcactgagtaaca

SEQ ID NO: 126522 - DNA, 20 bp, Artificial Sequence
  MKO10126522_B_Vwc2l
  gRNA
gaagactatcctgctgatga

SEQ ID NO: 126523 - DNA, 20 bp, Artificial Sequence
  MKO10126523_B_Vwc2l
  gRNA
cctagccctctccatgtgaa

SEQ ID NO: 126524 - DNA, 20 bp, Artificial Sequence
  MKO10126524_B_Vwc2l
  gRNA
aacacagtgaacttcattgc

SEQ ID NO: 126525 - DNA, 20 bp, Artificial Sequence
  MKO10126525_B_Vwc2
  gRNA
tcacagcggcaccgttcaca

SEQ ID NO: 126526 - DNA, 20 bp, Artificial Sequence
  MKO10126526_B_Vwc2
  gRNA
gcactcatgtctcgtgcaca

SEQ ID NO: 126527 - DNA, 20 bp, Artificial Sequence
  MKO10126527_B_Vwc2
  gRNA
atgtcactgcacttatgaag

SEQ ID NO: 126528 - DNA, 20 bp, Artificial Sequence
  MKO10126528_B_Vwce
  gRNA
gagcaaggggccacttgccc

SEQ ID NO: 126529 - DNA, 20 bp, Artificial Sequence
  MKO10126529_B_Vwce
  gRNA
cactgcgtgaacacagaagg

SEQ ID NO: 126530 - DNA, 20 bp, Artificial Sequence
  MKO10126530_B_Vwce
  gRNA
gatgccactcccacagccaa

SEQ ID NO: 126531 - DNA, 20 bp, Artificial Sequence
  MKO10126531_B_Vwde
  gRNA
ggtcttgaacagctgaatac

SEQ ID NO: 126532 - DNA, 20 bp, Artificial Sequence
  MKO10126532_B_Vwde
  gRNA
tgtatgggctactgtgctga

SEQ ID NO: 126533 - DNA, 20 bp, Artificial Sequence
  MKO10126533_B_Vwde
  gRNA
aagtacacctacaaaacacc

SEQ ID NO: 126534 - DNA, 20 bp, Artificial Sequence
  MKO10126534_B_Vwf
  gRNA
gttgccattgccatcgattc

SEQ ID NO: 126535 - DNA, 20 bp, Artificial Sequence
  MKO10126535_B_Vwf
  gRNA
gcggccagaatcgatggcaa

SEQ ID NO: 126536 - DNA, 20 bp, Artificial Sequence
  MKO10126536_B_Vwf
  gRNA
acggcccgatgcagcctctt

SEQ ID NO: 126537 - DNA, 20 bp, Artificial Sequence
  MKO10126537_B_Wac
  gRNA
aaggctgagagtcccctctc

SEQ ID NO: 126538 - DNA, 20 bp, Artificial Sequence
  MKO10126538_B_Wac
  gRNA
aaacagcagagactcagtga

SEQ ID NO: 126539 - DNA, 20 bp, Artificial Sequence
  MKO10126539_B_Wac
  gRNA
tcaaagagtcaccccagtag

SEQ ID NO: 126540 - DNA, 20 bp, Artificial Sequence
  MKO10126540_B_Wapal
  gRNA
ttacttactgtgacacgctg

SEQ ID NO: 126541 - DNA, 20 bp, Artificial Sequence
  MKO10126541_B_Wapal
  gRNA
ggggccactaaaaatctttc

SEQ ID NO: 126542 - DNA, 20 bp, Artificial Sequence
  MKO10126542_B_Wapal
  gRNA
aagaagcccataagtaaaca

SEQ ID NO: 126543 - DNA, 20 bp, Artificial Sequence
  MKO10126543_B_Wap
  gRNA
ggccctcgctcagaacctag

SEQ ID NO: 126544 - DNA, 20 bp, Artificial Sequence
  MKO10126544_B_Wap
  gRNA
attctgggcacactcctcgt

SEQ ID NO: 126545 - DNA, 20 bp, Artificial Sequence
  MKO10126545_B_Wap
  gRNA
tctgagcgagggccacctcc

SEQ ID NO: 126546 - DNA, 20 bp, Artificial Sequence
  MKO10126546_B_Wars2
  gRNA
cgaagtttcaaccaaaagta

SEQ ID NO: 126547 - DNA, 20 bp, Artificial Sequence
  MKO10126547_B_Wars2
  gRNA
cacagtgatatacagcatcg

SEQ ID NO: 126548 - DNA, 20 bp, Artificial Sequence
  MKO10126548_B_Wars2
  gRNA
gattgcagcatttacaccag

SEQ ID NO: 126549 - DNA, 20 bp, Artificial Sequence
  MKO10126549_B_Wars
  gRNA
agaggtgcaggactcgccac

SEQ ID NO: 126550 - DNA, 20 bp, Artificial Sequence
  MKO10126550_B_Wars
  gRNA
ttgtggatccatggacggtg

SEQ ID NO: 126551 - DNA, 20 bp, Artificial Sequence
  MKO10126551_B_Wars
  gRNA
ctgcttgtccgcaccgtcca

SEQ ID NO: 126552 - DNA, 20 bp, Artificial Sequence
  MKO10126552_B_Wasf1
  gRNA
ttgcaacgagttaactctga

SEQ ID NO: 126553 - DNA, 20 bp, Artificial Sequence
  MKO10126553_B_Wasf1
  gRNA
gcaagatataacgatgagaa

SEQ ID NO: 126554 - DNA, 20 bp, Artificial Sequence
  MKO10126554_B_Wasf1
  gRNA
tgccaagagcacctcatgac

SEQ ID NO: 126555 - DNA, 20 bp, Artificial Sequence
  MKO10126555_B_Wasf2
  gRNA
aggagcgtcacagctgttat

SEQ ID NO: 126556 - DNA, 20 bp, Artificial Sequence
  MKO10126556_B_Wasf2
  gRNA
taaggactgagattgttaag

SEQ ID NO: 126557 - DNA, 20 bp, Artificial Sequence
  MKO10126557_B_Wasf2
  gRNA
acaagaatttgtagagtcca

SEQ ID NO: 126558 - DNA, 20 bp, Artificial Sequence
  MKO10126558_B_Wasf3
  gRNA
caggaacaaaagcgtgtaga

SEQ ID NO: 126559 - DNA, 20 bp, Artificial Sequence
  MKO10126559_B_Wasf3
  gRNA
ctctaccatccaagaccagc

SEQ ID NO: 126560 - DNA, 20 bp, Artificial Sequence
  MKO10126560_B_Wasf3
  gRNA
cccttcaagacagaatcgat

SEQ ID NO: 126561 - DNA, 20 bp, Artificial Sequence
  MKO10126561_B_Wash
  gRNA
aacaaaaacgcacacgatgc

SEQ ID NO: 126562 - DNA, 20 bp, Artificial Sequence
  MKO10126562_B_Wash
  gRNA
tgcagagaagaccccgttac

SEQ ID NO: 126563 - DNA, 20 bp, Artificial Sequence
  MKO10126563_B_Wash
  gRNA
tttgttactgcaccagccag

SEQ ID NO: 126564 - DNA, 20 bp, Artificial Sequence
  MKO10126564_B_Wasl
  gRNA
tttgtatataatagtcctag

SEQ ID NO: 126565 - DNA, 20 bp, Artificial Sequence
  MKO10126565_B_Wasl
  gRNA
aaaagcagttacagacctgt

SEQ ID NO: 126566 - DNA, 20 bp, Artificial Sequence
  MKO10126566_B_Wasl
  gRNA
aggacttacatctccagcaa

SEQ ID NO: 126567 - DNA, 20 bp, Artificial Sequence
  MKO10126567_B_Was
  gRNA
gaggactcaccctcattgat

SEQ ID NO: 126568 - DNA, 20 bp, Artificial Sequence
  MKO10126568_B_Was
  gRNA
catgtataggactgtcaagt

SEQ ID NO: 126569 - DNA, 20 bp, Artificial Sequence
  MKO10126569_B_Was
  gRNA
accaccagcaccaatcaatg

SEQ ID NO: 126570 - DNA, 20 bp, Artificial Sequence
  MKO10126570_B_Wbp11
  gRNA
ctgaagaaaacctcagcgta

SEQ ID NO: 126571 - DNA, 20 bp, Artificial Sequence
  MKO10126571_B_Wbp11
  gRNA
aagaccccaaacaaattatc

SEQ ID NO: 126572 - DNA, 20 bp, Artificial Sequence
  MKO10126572_B_Wbp11
  gRNA
gaacaaaaaacagcgcatga

SEQ ID NO: 126573 - DNA, 20 bp, Artificial Sequence
  MKO10126573_B_Wbp1l
  gRNA
ccgagccaagcaccgccttc

SEQ ID NO: 126574 - DNA, 20 bp, Artificial Sequence
  MKO10126574_B_Wbp1l
  gRNA
acagatgtagctttgattgt

SEQ ID NO: 126575 - DNA, 20 bp, Artificial Sequence
  MKO10126575_B_Wbp1l
  gRNA
caaagctacatctgtgacac

SEQ ID NO: 126576 - DNA, 20 bp, Artificial Sequence
  MKO10126576_B_Wbp1
  gRNA
acttcaggcgccgcaacagc

SEQ ID NO: 126577 - DNA, 20 bp, Artificial Sequence
  MKO10126577_B_Wbp1
  gRNA
ggggctggccctgttccaac

SEQ ID NO: 126578 - DNA, 20 bp, Artificial Sequence
  MKO10126578_B_Wbp1
  gRNA
acaccagagttcatagtagt

SEQ ID NO: 126579 - DNA, 20 bp, Artificial Sequence
  MKO10126579_B_Wbp2nl
  gRNA
atgtagtttgcaccaaagat

SEQ ID NO: 126580 - DNA, 20 bp, Artificial Sequence
  MKO10126580_B_Wbp2nl
  gRNA
ccctctttgtaccactaaag

SEQ ID NO: 126581 - DNA, 20 bp, Artificial Sequence
  MKO10126581_B_Wbp2nl
  gRNA
agtcgatagcacctcctttc

SEQ ID NO: 126582 - DNA, 20 bp, Artificial Sequence
  MKO10126582_B_Wbp2
  gRNA
gagattaagcagccggtgtt

SEQ ID NO: 126583 - DNA, 20 bp, Artificial Sequence
  MKO10126583_B_Wbp2
  gRNA
tacattccattggcgactgg

SEQ ID NO: 126584 - DNA, 20 bp, Artificial Sequence
  MKO10126584_B_Wbp2
  gRNA
atgaagttcgcaccaaacac

SEQ ID NO: 126585 - DNA, 20 bp, Artificial Sequence
  MKO10126585_B_Wbp4
  gRNA
gtggaaggcgtgacagccga

SEQ ID NO: 126586 - DNA, 20 bp, Artificial Sequence
  MKO10126586_B_Wbp4
  gRNA
tactattatgatctcatcac

SEQ ID NO: 126587 - DNA, 20 bp, Artificial Sequence
  MKO10126587_B_Wbp4
  gRNA
ggttacctcactgatcctcc

SEQ ID NO: 126588 - DNA, 20 bp, Artificial Sequence
  MKO10126588_B_Wbp5
  gRNA
taaacagatcatcactgctc

SEQ ID NO: 126589 - DNA, 20 bp, Artificial Sequence
  MKO10126589_B_Wbp5
  gRNA
aaagccggaggaaaagcccg

SEQ ID NO: 126590 - DNA, 20 bp, Artificial Sequence
  MKO10126590_B_Wbp5
  gRNA
tccggctttggctcttcctc

SEQ ID NO: 126591 - DNA, 20 bp, Artificial Sequence
  MKO10126591_B_Wbscr16
  gRNA
tggtggaggatgaagtatac

SEQ ID NO: 126592 - DNA, 20 bp, Artificial Sequence
  MKO10126592_B_Wbscr16
  gRNA
gcaggacttcgatggacagg

SEQ ID NO: 126593 - DNA, 20 bp, Artificial Sequence
  MKO10126593_B_Wbscr16
  gRNA
gcgagagtcacaaagtgcac

SEQ ID NO: 126594 - DNA, 20 bp, Artificial Sequence
  MKO10126594_B_Wbscr17
  gRNA
tacttggtaggacgataatc

SEQ ID NO: 126595 - DNA, 20 bp, Artificial Sequence
  MKO10126595_B_Wbscr17
  gRNA
catacccttcgatgagcccg

SEQ ID NO: 126596 - DNA, 20 bp, Artificial Sequence
  MKO10126596_B_Wbscr17
  gRNA
gtcctgcttgatgttgtcga

SEQ ID NO: 126597 - DNA, 20 bp, Artificial Sequence
  MKO10126597_B_Wbscr22
  gRNA
gacctcacccaatgtctaac

SEQ ID NO: 126598 - DNA, 20 bp, Artificial Sequence
  MKO10126598_B_Wbscr22
  gRNA
caagatgactgagcgagcgc

SEQ ID NO: 126599 - DNA, 20 bp, Artificial Sequence
  MKO10126599_B_Wbscr22
  gRNA
cgtttcttcagctgcggttc

SEQ ID NO: 126600 - DNA, 20 bp, Artificial Sequence
  MKO10126600_B_Wbscr27
  gRNA
acacgcagggacctttgacg

SEQ ID NO: 126601 - DNA, 20 bp, Artificial Sequence
  MKO10126601_B_Wbscr27
  gRNA
gacttgtttgtctgactacc

SEQ ID NO: 126602 - DNA, 20 bp, Artificial Sequence
  MKO10126602_B_Wbscr27
  gRNA
aaggttggatgggttggtcc

SEQ ID NO: 126603 - DNA, 20 bp, Artificial Sequence
  MKO10126603_B_Wbscr28
  gRNA
cagacatggaggccgctccc

SEQ ID NO: 126604 - DNA, 20 bp, Artificial Sequence
  MKO10126604_B_Wbscr28
  gRNA
tagaggcgtctcagcagggc

SEQ ID NO: 126605 - DNA, 20 bp, Artificial Sequence
  MKO10126605_B_Wbscr28
  gRNA
cccgcagaagaattctgaga

SEQ ID NO: 126606 - DNA, 20 bp, Artificial Sequence
  MKO10126606_B_Wdfy1
  gRNA
cataccaccacgacagcagg

SEQ ID NO: 126607 - DNA, 20 bp, Artificial Sequence
  MKO10126607_B_Wdfy1
  gRNA
tccacagaaccatccgagta

SEQ ID NO: 126608 - DNA, 20 bp, Artificial Sequence
  MKO10126608_B_Wdfy1
  gRNA
aaagagacagcggccagtac

SEQ ID NO: 126609 - DNA, 20 bp, Artificial Sequence
  MKO10126609_B_Wdfy2
  gRNA
ctgtccataggtctagacaa

SEQ ID NO: 126610 - DNA, 20 bp, Artificial Sequence
  MKO10126610_B_Wdfy2
  gRNA
tgtaccattgtctagaccta

SEQ ID NO: 126611 - DNA, 20 bp, Artificial Sequence
  MKO10126611_B_Wdfy2
  gRNA
gatacttacaaggcattgca

SEQ ID NO: 126612 - DNA, 20 bp, Artificial Sequence
  MKO10126612_B_Wdfy3
  gRNA
aacgcaagtctcccgactca

SEQ ID NO: 126613 - DNA, 20 bp, Artificial Sequence
  MKO10126613_B_Wdfy3
  gRNA
cttcactctgattgatctcc

SEQ ID NO: 126614 - DNA, 20 bp, Artificial Sequence
  MKO10126614_B_Wdfy3
  gRNA
cctaacaacaattaacctgc

SEQ ID NO: 126615 - DNA, 20 bp, Artificial Sequence
  MKO10126615_B_Wdfy4
  gRNA
cttgaacatcgctctccaaa

SEQ ID NO: 126616 - DNA, 20 bp, Artificial Sequence
  MKO10126616_B_Wdfy4
  gRNA
caagtgcctgttgtatttcc

SEQ ID NO: 126617 - DNA, 20 bp, Artificial Sequence
  MKO10126617_B_Wdfy4
  gRNA
aaatacaacaggcacttgct

SEQ ID NO: 126618 - DNA, 20 bp, Artificial Sequence
  MKO10126618_B_Wdhd1
  gRNA
caggcatcggctagttgtga

SEQ ID NO: 126619 - DNA, 20 bp, Artificial Sequence
  MKO10126619_B_Wdhd1
  gRNA
ggtatggaatatatctgatc

SEQ ID NO: 126620 - DNA, 20 bp, Artificial Sequence
  MKO10126620_B_Wdhd1
  gRNA
gtcctcgaaatgtttgctgc

SEQ ID NO: 126621 - DNA, 20 bp, Artificial Sequence
  MKO10126621_B_Wdpcp
  gRNA
gtccgtgtgtgctgagcaaa

SEQ ID NO: 126622 - DNA, 20 bp, Artificial Sequence
  MKO10126622_B_Wdpcp
  gRNA
tatgacaagaaagatccatc

SEQ ID NO: 126623 - DNA, 20 bp, Artificial Sequence
  MKO10126623_B_Wdpcp
  gRNA
ttccatttgctcagcacaca

SEQ ID NO: 126624 - DNA, 20 bp, Artificial Sequence
  MKO10126624_B_Wdr11
  gRNA
catccgcagaagccaagcgc

SEQ ID NO: 126625 - DNA, 20 bp, Artificial Sequence
  MKO10126625_B_Wdr11
  gRNA
ttccacagcacgatgtaatt

SEQ ID NO: 126626 - DNA, 20 bp, Artificial Sequence
  MKO10126626_B_Wdr11
  gRNA
tgcatatggatgccattcac

SEQ ID NO: 126627 - DNA, 20 bp, Artificial Sequence
  MKO10126627_B_Wdr12
  gRNA
aatcaaactcgacatgcttg

SEQ ID NO: 126628 - DNA, 20 bp, Artificial Sequence
  MKO10126628_B_Wdr12
  gRNA
ctgtgactaggaagaggttg

SEQ ID NO: 126629 - DNA, 20 bp, Artificial Sequence
  MKO10126629_B_Wdr12
  gRNA
cgagtttgatttccttatca

SEQ ID NO: 126630 - DNA, 20 bp, Artificial Sequence
  MKO10126630_B_Wdr13
  gRNA
tgcgcttcgccaatgacgac

SEQ ID NO: 126631 - DNA, 20 bp, Artificial Sequence
  MKO10126631_B_Wdr13
  gRNA
aacctcggctgacagatcgg

SEQ ID NO: 126632 - DNA, 20 bp, Artificial Sequence
  MKO10126632_B_Wdr13
  gRNA
acttgcctctgccaccgacg

SEQ ID NO: 126633 - DNA, 20 bp, Artificial Sequence
  MKO10126633_B_Wdr16
  gRNA
caagggcaaaatcgaagcct

SEQ ID NO: 126634 - DNA, 20 bp, Artificial Sequence
  MKO10126634_B_Wdr16
  gRNA
taaatcaggtgctcctggtc

SEQ ID NO: 126635 - DNA, 20 bp, Artificial Sequence
  MKO10126635_B_Wdr16
  gRNA
cacaggagacgttgttacca

SEQ ID NO: 126636 - DNA, 20 bp, Artificial Sequence
  MKO10126636_B_Wdr17
  gRNA
gctaaactcgacaacatcaa

SEQ ID NO: 126637 - DNA, 20 bp, Artificial Sequence
  MKO10126637_B_Wdr17
  gRNA
gctccaggcatgtttataac

SEQ ID NO: 126638 - DNA, 20 bp, Artificial Sequence
  MKO10126638_B_Wdr17
  gRNA
aaacaatcacggcaatttcc

SEQ ID NO: 126639 - DNA, 20 bp, Artificial Sequence
  MKO10126639_B_Wdr18
  gRNA
tgctacaggcagacccatcc

SEQ ID NO: 126640 - DNA, 20 bp, Artificial Sequence
  MKO10126640_B_Wdr18
  gRNA
ggccactcacccagctgcac

SEQ ID NO: 126641 - DNA, 20 bp, Artificial Sequence
  MKO10126641_B_Wdr18
  gRNA
atacaagccattaggtgctg

SEQ ID NO: 126642 - DNA, 20 bp, Artificial Sequence
  MKO10126642_B_Wdr19
  gRNA
ggaaactaccttgcagtaac

SEQ ID NO: 126643 - DNA, 20 bp, Artificial Sequence
  MKO10126643_B_Wdr19
  gRNA
acctcatgccattgtccagc

SEQ ID NO: 126644 - DNA, 20 bp, Artificial Sequence
  MKO10126644_B_Wdr19
  gRNA
tctcgaaagattcctgttct

SEQ ID NO: 126645 - DNA, 20 bp, Artificial Sequence
  MKO10126645_B_Wdr1
  gRNA
agaagcaatgtagaatccgc

SEQ ID NO: 126646 - DNA, 20 bp, Artificial Sequence
  MKO10126646_B_Wdr1
  gRNA
tactcacatcgatgtttctt

SEQ ID NO: 126647 - DNA, 20 bp, Artificial Sequence
  MKO10126647_B_Wdr1
  gRNA
taactgtgctgcgttcttcg

SEQ ID NO: 126648 - DNA, 20 bp, Artificial Sequence
  MKO10126648_B_Wdr20rt
  gRNA
gaacatgtactcgtacaatg

SEQ ID NO: 126649 - DNA, 20 bp, Artificial Sequence
  MKO10126649_B_Wdr20rt
  gRNA
gacagcgctcccattgcttc

SEQ ID NO: 126650 - DNA, 20 bp, Artificial Sequence
  MKO10126650_B_Wdr20rt
  gRNA
gtacaggctgctgccgcact

SEQ ID NO: 126651 - DNA, 20 bp, Artificial Sequence
  MKO10126651_B_Wdr20
  gRNA
cgaccgcctctgcttcaatg

SEQ ID NO: 126652 - DNA, 20 bp, Artificial Sequence
  MKO10126652_B_Wdr20
  gRNA
gaccagcaagctgtttaatg

SEQ ID NO: 126653 - DNA, 20 bp, Artificial Sequence
  MKO10126653_B_Wdr20
  gRNA
tgagtaaacccatagataag

SEQ ID NO: 126654 - DNA, 20 bp, Artificial Sequence
  MKO10126654_B_Wdr24
  gRNA
acagtagataatccgtaaca

SEQ ID NO: 126655 - DNA, 20 bp, Artificial Sequence
  MKO10126655_B_Wdr24
  gRNA
accctcattggtgacgagtg

SEQ ID NO: 126656 - DNA, 20 bp, Artificial Sequence
  MKO10126656_B_Wdr24
  gRNA
catcccgcacgctctcagac

SEQ ID NO: 126657 - DNA, 20 bp, Artificial Sequence
  MKO10126657_B_Wdr25
  gRNA
aatcccaggcgataatggtt

SEQ ID NO: 126658 - DNA, 20 bp, Artificial Sequence
  MKO10126658_B_Wdr25
  gRNA
cgccacataaaaagacgttg

SEQ ID NO: 126659 - DNA, 20 bp, Artificial Sequence
  MKO10126659_B_Wdr25
  gRNA
cacctaacagaccttgaaac

SEQ ID NO: 126660 - DNA, 20 bp, Artificial Sequence
  MKO10126660_B_Wdr26
  gRNA
cgctcggtgttgtatttcaa

SEQ ID NO: 126661 - DNA, 20 bp, Artificial Sequence
  MKO10126661_B_Wdr26
  gRNA
gcagccatgccgaagaccta

SEQ ID NO: 126662 - DNA, 20 bp, Artificial Sequence
  MKO10126662_B_Wdr26
  gRNA
gatctcctcatgcaagagtc

SEQ ID NO: 126663 - DNA, 20 bp, Artificial Sequence
  MKO10126663_B_Wdr27
  gRNA
ctcgtagaagcagtctgtgc

SEQ ID NO: 126664 - DNA, 20 bp, Artificial Sequence
  MKO10126664_B_Wdr27
  gRNA
ttatattataatgtggaacg

SEQ ID NO: 126665 - DNA, 20 bp, Artificial Sequence
  MKO10126665_B_Wdr27
  gRNA
tttaagcttctcaccctaca

SEQ ID NO: 126666 - DNA, 20 bp, Artificial Sequence
  MKO10126666_B_Wdr31
  gRNA
ctcgagaggcgctgaagaac

SEQ ID NO: 126667 - DNA, 20 bp, Artificial Sequence
  MKO10126667_B_Wdr31
  gRNA
tgcagggctcctcgcaccct

SEQ ID NO: 126668 - DNA, 20 bp, Artificial Sequence
  MKO10126668_B_Wdr31
  gRNA
gactcgtcccagctgtgcac

SEQ ID NO: 126669 - DNA, 20 bp, Artificial Sequence
  MKO10126669_B_Wdr33
  gRNA
gtgaccaatcgtcttccttc

SEQ ID NO: 126670 - DNA, 20 bp, Artificial Sequence
  MKO10126670_B_Wdr33
  gRNA
ttattcaacattcctattgg

SEQ ID NO: 126671 - DNA, 20 bp, Artificial Sequence
  MKO10126671_B_Wdr33
  gRNA
tcattataataacctgcatc

SEQ ID NO: 126672 - DNA, 20 bp, Artificial Sequence
  MKO10126672_B_Wdr34
  gRNA
taggcactcaccggcaatgt

SEQ ID NO: 126673 - DNA, 20 bp, Artificial Sequence
  MKO10126673_B_Wdr34
  gRNA
cacagccgagtcgtctgccc

SEQ ID NO: 126674 - DNA, 20 bp, Artificial Sequence
  MKO10126674_B_Wdr34
  gRNA
cactcaccgaccataggcac

SEQ ID NO: 126675 - DNA, 20 bp, Artificial Sequence
  MKO10126675_B_Wdr35
  gRNA
attgtctggatgctgtataa

SEQ ID NO: 126676 - DNA, 20 bp, Artificial Sequence
  MKO10126676_B_Wdr35
  gRNA
cactatgaccttcaagattt

SEQ ID NO: 126677 - DNA, 20 bp, Artificial Sequence
  MKO10126677_B_Wdr35
  gRNA
catggaaaggttactagggg

SEQ ID NO: 126678 - DNA, 20 bp, Artificial Sequence
  MKO10126678_B_Wdr36
  gRNA
taatacgaacctctttattc

SEQ ID NO: 126679 - DNA, 20 bp, Artificial Sequence
  MKO10126679_B_Wdr36
  gRNA
tgagataacgtgatccccaa

SEQ ID NO: 126680 - DNA, 20 bp, Artificial Sequence
  MKO10126680_B_Wdr36
  gRNA
ctgacagcgttcttattatt

SEQ ID NO: 126681 - DNA, 20 bp, Artificial Sequence
  MKO10126681_B_Wdr37
  gRNA
gaagcttaagaccacctaca

SEQ ID NO: 126682 - DNA, 20 bp, Artificial Sequence
  MKO10126682_B_Wdr37
  gRNA
tgttagttcttcgtatagaa

SEQ ID NO: 126683 - DNA, 20 bp, Artificial Sequence
  MKO10126683_B_Wdr37
  gRNA
ctcagttcgcagtacactgc

SEQ ID NO: 126684 - DNA, 20 bp, Artificial Sequence
  MKO10126684_B_Wdr38
  gRNA
aagtgtctacatgtgctgaa

SEQ ID NO: 126685 - DNA, 20 bp, Artificial Sequence
  MKO10126685_B_Wdr38
  gRNA
tgacagtttccacactcctc

SEQ ID NO: 126686 - DNA, 20 bp, Artificial Sequence
  MKO10126686_B_Wdr38
  gRNA
tctctctacagtctggccgc

SEQ ID NO: 126687 - DNA, 20 bp, Artificial Sequence
  MKO10126687_B_Wdr3
  gRNA
caatacatacctcagttcgg

SEQ ID NO: 126688 - DNA, 20 bp, Artificial Sequence
  MKO10126688_B_Wdr3
  gRNA
ttgcagatagtcgatgtccc

SEQ ID NO: 126689 - DNA, 20 bp, Artificial Sequence
  MKO10126689_B_Wdr3
  gRNA
aagctttgtttctccgagaa

SEQ ID NO: 126690 - DNA, 20 bp, Artificial Sequence
  MKO10126690_B_Wdr41
  gRNA
tcctcccctagactcgtgtg

SEQ ID NO: 126691 - DNA, 20 bp, Artificial Sequence
  MKO10126691_B_Wdr41
  gRNA
caaaccaggtttgcatctgc

SEQ ID NO: 126692 - DNA, 20 bp, Artificial Sequence
  MKO10126692_B_Wdr41
  gRNA
atgatggaattatagttgtg

SEQ ID NO: 126693 - DNA, 20 bp, Artificial Sequence
  MKO10126693_B_Wdr43
  gRNA
ctgccgtgccaagagccaac

SEQ ID NO: 126694 - DNA, 20 bp, Artificial Sequence
  MKO10126694_B_Wdr43
  gRNA
aaaaggaaatcggaagttac

SEQ ID NO: 126695 - DNA, 20 bp, Artificial Sequence
  MKO10126695_B_Wdr43
  gRNA
gaaagtaacatctttccatc

SEQ ID NO: 126696 - DNA, 20 bp, Artificial Sequence
  MKO10126696_B_Wdr44
  gRNA
tcttgtctcaattcttgtac

SEQ ID NO: 126697 - DNA, 20 bp, Artificial Sequence
  MKO10126697_B_Wdr44
  gRNA
gatttagcaagtgctaccag

SEQ ID NO: 126698 - DNA, 20 bp, Artificial Sequence
  MKO10126698_B_Wdr44
  gRNA
gagacaagatgtatctaaaa

SEQ ID NO: 126699 - DNA, 20 bp, Artificial Sequence
  MKO10126699_B_Wdr45b
  gRNA
gaaacctgctacaaccctaa

SEQ ID NO: 126700 - DNA, 20 bp, Artificial Sequence
  MKO10126700_B_Wdr45b
  gRNA
actactgtacctttgttggg

SEQ ID NO: 126701 - DNA, 20 bp, Artificial Sequence
  MKO10126701_B_Wdr45b
  gRNA
tggtgtttcagtgatgatct

SEQ ID NO: 126702 - DNA, 20 bp, Artificial Sequence
  MKO10126702_B_Wdr45
  gRNA
ccaggatcgtgattgtgctg

SEQ ID NO: 126703 - DNA, 20 bp, Artificial Sequence
  MKO10126703_B_Wdr45
  gRNA
agatgccccttctccataag

SEQ ID NO: 126704 - DNA, 20 bp, Artificial Sequence
  MKO10126704_B_Wdr45
  gRNA
ggaaggagtacacatagatg

SEQ ID NO: 126705 - DNA, 20 bp, Artificial Sequence
  MKO10126705_B_Wdr46
  gRNA
caggctcaggacccgttccc

SEQ ID NO: 126706 - DNA, 20 bp, Artificial Sequence
  MKO10126706_B_Wdr46
  gRNA
ctgcaagcagcagctcagcg

SEQ ID NO: 126707 - DNA, 20 bp, Artificial Sequence
  MKO10126707_B_Wdr46
  gRNA
aactcaaagcaaactcgaga

SEQ ID NO: 126708 - DNA, 20 bp, Artificial Sequence
  MKO10126708_B_Wdr47
  gRNA
tttatttaggcagctgatcc

SEQ ID NO: 126709 - DNA, 20 bp, Artificial Sequence
  MKO10126709_B_Wdr47
  gRNA
aatttctccatacattctag

SEQ ID NO: 126710 - DNA, 20 bp, Artificial Sequence
  MKO10126710_B_Wdr47
  gRNA
ttagaaaaagagcctgcaaa

SEQ ID NO: 126711 - DNA, 20 bp, Artificial Sequence
  MKO10126711_B_Wdr48
  gRNA
gtacgccaaggataaagagc

SEQ ID NO: 126712 - DNA, 20 bp, Artificial Sequence
  MKO10126712_B_Wdr48
  gRNA
gatgtcgtgctctgttgcaa

SEQ ID NO: 126713 - DNA, 20 bp, Artificial Sequence
  MKO10126713_B_Wdr48
  gRNA
ttatgtaattcgagatgaag

SEQ ID NO: 126714 - DNA, 20 bp, Artificial Sequence
  MKO10126714_B_Wdr4
  gRNA
tagcatcgagtctttctgcc

SEQ ID NO: 126715 - DNA, 20 bp, Artificial Sequence
  MKO10126715_B_Wdr4
  gRNA
atgagaagatccgggtcagc

SEQ ID NO: 126716 - DNA, 20 bp, Artificial Sequence
  MKO10126716_B_Wdr4
  gRNA
tccagcctgccacatccatc

SEQ ID NO: 126717 - DNA, 20 bp, Artificial Sequence
  MKO10126717_B_Wdr52
  gRNA
gcgagccaacctacagcttc

SEQ ID NO: 126718 - DNA, 20 bp, Artificial Sequence
  MKO10126718_B_Wdr52
  gRNA
tacttcgcagttgccgaaaa

SEQ ID NO: 126719 - DNA, 20 bp, Artificial Sequence
  MKO10126719_B_Wdr52
  gRNA
acagctgactcatataccga

SEQ ID NO: 126720 - DNA, 20 bp, Artificial Sequence
  MKO10126720_B_Wdr53
  gRNA
cccgttaggacacatgcaat

SEQ ID NO: 126721 - DNA, 20 bp, Artificial Sequence
  MKO10126721_B_Wdr53
  gRNA
tctgtctctgtagcgtcgtg

SEQ ID NO: 126722 - DNA, 20 bp, Artificial Sequence
  MKO10126722_B_Wdr53
  gRNA
tctggagtttccaccctgcg

SEQ ID NO: 126723 - DNA, 20 bp, Artificial Sequence
  MKO10126723_B_Wdr54
  gRNA
catggtttattggcacgcct

SEQ ID NO: 126724 - DNA, 20 bp, Artificial Sequence
  MKO10126724_B_Wdr54
  gRNA
atcaaagaccagtactcgac

SEQ ID NO: 126725 - DNA, 20 bp, Artificial Sequence
  MKO10126725_B_Wdr54
  gRNA
cacctgtatccctcgatgcg

SEQ ID NO: 126726 - DNA, 20 bp, Artificial Sequence
  MKO10126726_B_Wdr55
  gRNA
atgagaatgctctggttacg

SEQ ID NO: 126727 - DNA, 20 bp, Artificial Sequence
  MKO10126727_B_Wdr55
  gRNA
ctgtactttcatgagggcga

SEQ ID NO: 126728 - DNA, 20 bp, Artificial Sequence
  MKO10126728_B_Wdr55
  gRNA
tcttcaacatcaagagacgc

SEQ ID NO: 126729 - DNA, 20 bp, Artificial Sequence
  MKO10126729_B_Wdr59
  gRNA
ggtggagtttcgagactctc

SEQ ID NO: 126730 - DNA, 20 bp, Artificial Sequence
  MKO10126730_B_Wdr59
  gRNA
ggaagttggtacaactttac

SEQ ID NO: 126731 - DNA, 20 bp, Artificial Sequence
  MKO10126731_B_Wdr59
  gRNA
tgccatctttccacttataa

SEQ ID NO: 126732 - DNA, 20 bp, Artificial Sequence
  MKO10126732_B_Wdr5b
  gRNA
accatccaacctcatcgttt

SEQ ID NO: 126733 - DNA, 20 bp, Artificial Sequence
  MKO10126733_B_Wdr5b
  gRNA
ctcagatgataagactctaa

SEQ ID NO: 126734 - DNA, 20 bp, Artificial Sequence
  MKO10126734_B_Wdr5b
  gRNA
tctaccagtaaccgagaaac

SEQ ID NO: 126735 - DNA, 20 bp, Artificial Sequence
  MKO10126735_B_Wdr5
  gRNA
atagtttggcttaactggtg

SEQ ID NO: 126736 - DNA, 20 bp, Artificial Sequence
  MKO10126736_B_Wdr5
  gRNA
ttacagaccctgagacgatg

SEQ ID NO: 126737 - DNA, 20 bp, Artificial Sequence
  MKO10126737_B_Wdr5
  gRNA
aagtttgagaaaactatatc

SEQ ID NO: 126738 - DNA, 20 bp, Artificial Sequence
  MKO10126738_B_Wdr60
  gRNA
ctcttgagtcgagatatgcg

SEQ ID NO: 126739 - DNA, 20 bp, Artificial Sequence
  MKO10126739_B_Wdr60
  gRNA
agcaagtaaaatacgaactg

SEQ ID NO: 126740 - DNA, 20 bp, Artificial Sequence
  MKO10126740_B_Wdr60
  gRNA
tgacctcagaaagcacctga

SEQ ID NO: 126741 - DNA, 20 bp, Artificial Sequence
  MKO10126741_B_Wdr61
  gRNA
ctccttgacagagtcctgat

SEQ ID NO: 126742 - DNA, 20 bp, Artificial Sequence
  MKO10126742_B_Wdr61
  gRNA
tccttacatatgcaatacta

SEQ ID NO: 126743 - DNA, 20 bp, Artificial Sequence
  MKO10126743_B_Wdr61
  gRNA
tctagtggatgcctggactt

SEQ ID NO: 126744 - DNA, 20 bp, Artificial Sequence
  MKO10126744_B_Wdr62
  gRNA
attgggtgagaaagccacac

SEQ ID NO: 126745 - DNA, 20 bp, Artificial Sequence
  MKO10126745_B_Wdr62
  gRNA
tttccctaggtgcgtggtgg

SEQ ID NO: 126746 - DNA, 20 bp, Artificial Sequence
  MKO10126746_B_Wdr62
  gRNA
gatgggaagtacatagtgac

SEQ ID NO: 126747 - DNA, 20 bp, Artificial Sequence
  MKO10126747_B_Wdr63
  gRNA
ctcgacagttgaatatttcc

SEQ ID NO: 126748 - DNA, 20 bp, Artificial Sequence
  MKO10126748_B_Wdr63
  gRNA
tgaagtctttgtcataaacg

SEQ ID NO: 126749 - DNA, 20 bp, Artificial Sequence
  MKO10126749_B_Wdr63
  gRNA
tgccgtcctctgttccaatg

SEQ ID NO: 126750 - DNA, 20 bp, Artificial Sequence
  MKO10126750_B_Wdr64
  gRNA
agattctcttacttcgcaga

SEQ ID NO: 126751 - DNA, 20 bp, Artificial Sequence
  MKO10126751_B_Wdr64
  gRNA
tgtgatcaaatgcattgtga

SEQ ID NO: 126752 - DNA, 20 bp, Artificial Sequence
  MKO10126752_B_Wdr64
  gRNA
aaacagcgaattgtgattgc

SEQ ID NO: 126753 - DNA, 20 bp, Artificial Sequence
  MKO10126753_B_Wdr65
  gRNA
tttcccacagccaatagacg

SEQ ID NO: 126754 - DNA, 20 bp, Artificial Sequence
  MKO10126754_B_Wdr65
  gRNA
ttaccttgctgatctccgtc

SEQ ID NO: 126755 - DNA, 20 bp, Artificial Sequence
  MKO10126755_B_Wdr65
  gRNA
ctgactcttgaatgacctcc

SEQ ID NO: 126756 - DNA, 20 bp, Artificial Sequence
  MKO10126756_B_Wdr6
  gRNA
gcctctcaccgacgctggtt

SEQ ID NO: 126757 - DNA, 20 bp, Artificial Sequence
  MKO10126757_B_Wdr6
  gRNA
tttgtgagcttgacaacgat

SEQ ID NO: 126758 - DNA, 20 bp, Artificial Sequence
  MKO10126758_B_Wdr6
  gRNA
gaattcgcccagagtcctgc

SEQ ID NO: 126759 - DNA, 20 bp, Artificial Sequence
  MKO10126759_B_Wdr70
  gRNA
tgatgactgtgagcgctctc

SEQ ID NO: 126760 - DNA, 20 bp, Artificial Sequence
  MKO10126760_B_Wdr70
  gRNA
tccagtgacaggcgcagaca

SEQ ID NO: 126761 - DNA, 20 bp, Artificial Sequence
  MKO10126761_B_Wdr70
  gRNA
accgaatcctgtgaagccca

SEQ ID NO: 126762 - DNA, 20 bp, Artificial Sequence
  MKO10126762_B_Wdr72
  gRNA
tcagcagcactcacaacgta

SEQ ID NO: 126763 - DNA, 20 bp, Artificial Sequence
  MKO10126763_B_Wdr72
  gRNA
gatgttctcgtccttgatgc

SEQ ID NO: 126764 - DNA, 20 bp, Artificial Sequence
  MKO10126764_B_Wdr72
  gRNA
ttcggcttcggtgacatgtt

SEQ ID NO: 126765 - DNA, 20 bp, Artificial Sequence
  MKO10126765_B_Wdr73
  gRNA
cacatttgtatgtaacaccc

SEQ ID NO: 126766 - DNA, 20 bp, Artificial Sequence
  MKO10126766_B_Wdr73
  gRNA
cagggtgttacatacaaatg

SEQ ID NO: 126767 - DNA, 20 bp, Artificial Sequence
  MKO10126767_B_Wdr73
  gRNA
ttcatttgatactacctctc

SEQ ID NO: 126768 - DNA, 20 bp, Artificial Sequence
  MKO10126768_B_Wdr74
  gRNA
gcggcaaatttcacaccgtc

SEQ ID NO: 126769 - DNA, 20 bp, Artificial Sequence
  MKO10126769_B_Wdr74
  gRNA
cagaatccacacatgtgata

SEQ ID NO: 126770 - DNA, 20 bp, Artificial Sequence
  MKO10126770_B_Wdr74
  gRNA
cagcacccttatcacatgtg

SEQ ID NO: 126771 - DNA, 20 bp, Artificial Sequence
  MKO10126771_B_Wdr75
  gRNA
aagctgtgggactatgttga

SEQ ID NO: 126772 - DNA, 20 bp, Artificial Sequence
  MKO10126772_B_Wdr75
  gRNA
ataaagaaggcgtggagttt

SEQ ID NO: 126773 - DNA, 20 bp, Artificial Sequence
  MKO10126773_B_Wdr75
  gRNA
gagtgtgtgcacattctgca

SEQ ID NO: 126774 - DNA, 20 bp, Artificial Sequence
  MKO10126774_B_Wdr76
  gRNA
tgcttcccttcagttagctg

SEQ ID NO: 126775 - DNA, 20 bp, Artificial Sequence
  MKO10126775_B_Wdr76
  gRNA
acagttcactgctgtcatct

SEQ ID NO: 126776 - DNA, 20 bp, Artificial Sequence
  MKO10126776_B_Wdr76
  gRNA
cgcgcttctttatcatccca

SEQ ID NO: 126777 - DNA, 20 bp, Artificial Sequence
  MKO10126777_B_Wdr77
  gRNA
caacaggtgctgttgaattg

SEQ ID NO: 126778 - DNA, 20 bp, Artificial Sequence
  MKO10126778_B_Wdr77
  gRNA
cagctactccagcctcggtc

SEQ ID NO: 126779 - DNA, 20 bp, Artificial Sequence
  MKO10126779_B_Wdr77
  gRNA
tgtgtttctttcatgtagtg

SEQ ID NO: 126780 - DNA, 20 bp, Artificial Sequence
  MKO10126780_B_Wdr78
  gRNA
aacaactgagtcgatgtcag

SEQ ID NO: 126781 - DNA, 20 bp, Artificial Sequence
  MKO10126781_B_Wdr78
  gRNA
ggagtgccagtgcacaacca

SEQ ID NO: 126782 - DNA, 20 bp, Artificial Sequence
  MKO10126782_B_Wdr78
  gRNA
tcgacactgaactgctcccc

SEQ ID NO: 126783 - DNA, 20 bp, Artificial Sequence
  MKO10126783_B_Wdr7
  gRNA
ttgtcaaaagcctgcgcttc

SEQ ID NO: 126784 - DNA, 20 bp, Artificial Sequence
  MKO10126784_B_Wdr7
  gRNA
cttacagagagatgtgcctc

SEQ ID NO: 126785 - DNA, 20 bp, Artificial Sequence
  MKO10126785_B_Wdr7
  gRNA
attgtcacctctgaaatgag

SEQ ID NO: 126786 - DNA, 20 bp, Artificial Sequence
  MKO10126786_B_Wdr81
  gRNA
cagccgactgaacagccgca

SEQ ID NO: 126787 - DNA, 20 bp, Artificial Sequence
  MKO10126787_B_Wdr81
  gRNA
gccccgacacgatgtcacct

SEQ ID NO: 126788 - DNA, 20 bp, Artificial Sequence
  MKO10126788_B_Wdr81
  gRNA
gacacccctccactgaatgc

SEQ ID NO: 126789 - DNA, 20 bp, Artificial Sequence
  MKO10126789_B_Wdr82
  gRNA
atagggcctcatgcatctac

SEQ ID NO: 126790 - DNA, 20 bp, Artificial Sequence
  MKO10126790_B_Wdr82
  gRNA
ggtaccattacctggcagtt

SEQ ID NO: 126791 - DNA, 20 bp, Artificial Sequence
  MKO10126791_B_Wdr82
  gRNA
accctgtacagtaagaagta

SEQ ID NO: 126792 - DNA, 20 bp, Artificial Sequence
  MKO10126792_B_Wdr83
  gRNA
tcgattccagtgtccgatgt

SEQ ID NO: 126793 - DNA, 20 bp, Artificial Sequence
  MKO10126793_B_Wdr83
  gRNA
gagaacgacaatcccaacat

SEQ ID NO: 126794 - DNA, 20 bp, Artificial Sequence
  MKO10126794_B_Wdr83
  gRNA
caccgttcagtttaatgaag

SEQ ID NO: 126795 - DNA, 20 bp, Artificial Sequence
  MKO10126795_B_Wdr86
  gRNA
gtagtgctgactgcaccatc

SEQ ID NO: 126796 - DNA, 20 bp, Artificial Sequence
  MKO10126796_B_Wdr86
  gRNA
cggacagaactgtcaagtgc

SEQ ID NO: 126797 - DNA, 20 bp, Artificial Sequence
  MKO10126797_B_Wdr86
  gRNA
cgggcctttgatgcccagtc

SEQ ID NO: 126798 - DNA, 20 bp, Artificial Sequence
  MKO10126798_B_Wdr89
  gRNA
ttgacgtgtctatgccaagc

SEQ ID NO: 126799 - DNA, 20 bp, Artificial Sequence
  MKO10126799_B_Wdr89
  gRNA
tcttgtaagaatcgctgctg

SEQ ID NO: 126800 - DNA, 20 bp, Artificial Sequence
  MKO10126800_B_Wdr89
  gRNA
ctgtcgacgagagacccact

SEQ ID NO: 126801 - DNA, 20 bp, Artificial Sequence
  MKO10126801_B_Wdr8
  gRNA
tccctggcagctgcgaatca

SEQ ID NO: 126802 - DNA, 20 bp, Artificial Sequence
  MKO10126802_B_Wdr8
  gRNA
ctgcagaccactctatgtgc

SEQ ID NO: 126803 - DNA, 20 bp, Artificial Sequence
  MKO10126803_B_Wdr8
  gRNA
ccacaggactaactttcacc

SEQ ID NO: 126804 - DNA, 20 bp, Artificial Sequence
  MKO10126804_B_Wdr90
  gRNA
atgacaattacatccacgtt

SEQ ID NO: 126805 - DNA, 20 bp, Artificial Sequence
  MKO10126805_B_Wdr90
  gRNA
ttcattcaagccgtccctct

SEQ ID NO: 126806 - DNA, 20 bp, Artificial Sequence
  MKO10126806_B_Wdr90
  gRNA
tagctcttcctcgtgcccgc

SEQ ID NO: 126807 - DNA, 20 bp, Artificial Sequence
  MKO10126807_B_Wdr91
  gRNA
gccgccttatgtttccagta

SEQ ID NO: 126808 - DNA, 20 bp, Artificial Sequence
  MKO10126808_B_Wdr91
  gRNA
aaatgaagttctgcgccaga

SEQ ID NO: 126809 - DNA, 20 bp, Artificial Sequence
  MKO10126809_B_Wdr91
  gRNA
ggcattccgcatcaaagttc

SEQ ID NO: 126810 - DNA, 20 bp, Artificial Sequence
  MKO10126810_B_Wdr92
  gRNA
gctaacatggaacctgcaca

SEQ ID NO: 126811 - DNA, 20 bp, Artificial Sequence
  MKO10126811_B_Wdr92
  gRNA
aaggccaagcccattaaatg

SEQ ID NO: 126812 - DNA, 20 bp, Artificial Sequence
  MKO10126812_B_Wdr92
  gRNA
gaagaacgtgttgtctgtgc

SEQ ID NO: 126813 - DNA, 20 bp, Artificial Sequence
  MKO10126813_B_Wdr93
  gRNA
cacttccagccagacatccc

SEQ ID NO: 126814 - DNA, 20 bp, Artificial Sequence
  MKO10126814_B_Wdr93
  gRNA
tcctaccagttgcagctgtt

SEQ ID NO: 126815 - DNA, 20 bp, Artificial Sequence
  MKO10126815_B_Wdr93
  gRNA
gataaagactgtccttacac

SEQ ID NO: 126816 - DNA, 20 bp, Artificial Sequence
  MKO10126816_B_Wdr95
  gRNA
gctcttggtgggaacgtacc

SEQ ID NO: 126817 - DNA, 20 bp, Artificial Sequence
  MKO10126817_B_Wdr95
  gRNA
gagttctcccttgatgccac

SEQ ID NO: 126818 - DNA, 20 bp, Artificial Sequence
  MKO10126818_B_Wdr95
  gRNA
gctgagaggccaccgggctc

SEQ ID NO: 126819 - DNA, 20 bp, Artificial Sequence
  MKO10126819_B_Wdr96
  gRNA
tgccgggctggtaggcgaag

SEQ ID NO: 126820 - DNA, 20 bp, Artificial Sequence
  MKO10126820_B_Wdr96
  gRNA
taatgtgcccagtgaagtcg

SEQ ID NO: 126821 - DNA, 20 bp, Artificial Sequence
  MKO10126821_B_Wdr96
  gRNA
cagaccatctgctacccttc

SEQ ID NO: 126822 - DNA, 20 bp, Artificial Sequence
  MKO10126822_B_Wdsub1
  gRNA
cttgaccacatgacgccaac

SEQ ID NO: 126823 - DNA, 20 bp, Artificial Sequence
  MKO10126823_B_Wdsub1
  gRNA
gttactattacccgtgtctt

SEQ ID NO: 126824 - DNA, 20 bp, Artificial Sequence
  MKO10126824_B_Wdsub1
  gRNA
cactgtcaagtccccgcccg

SEQ ID NO: 126825 - DNA, 20 bp, Artificial Sequence
  MKO10126825_B_Wdtc1
  gRNA
cacaatggtgtgctggtcgt

SEQ ID NO: 126826 - DNA, 20 bp, Artificial Sequence
  MKO10126826_B_Wdtc1
  gRNA
ttacctgaagctccgcctcc

SEQ ID NO: 126827 - DNA, 20 bp, Artificial Sequence
  MKO10126827_B_Wdtc1
  gRNA
accctcagcctgctggcgtc

SEQ ID NO: 126828 - DNA, 20 bp, Artificial Sequence
  MKO10126828_B_Wdyhv1
  gRNA
tcttctatgtaaatgtcgaa

SEQ ID NO: 126829 - DNA, 20 bp, Artificial Sequence
  MKO10126829_B_Wdyhv1
  gRNA
ggccatcttacccagatcac

SEQ ID NO: 126830 - DNA, 20 bp, Artificial Sequence
  MKO10126830_B_Wdyhv1
  gRNA
agcactcctccaacagatac

SEQ ID NO: 126831 - DNA, 20 bp, Artificial Sequence
  MKO10126831_B_Wee1
  gRNA
tcgttcgctatttctctgcc

SEQ ID NO: 126832 - DNA, 20 bp, Artificial Sequence
  MKO10126832_B_Wee1
  gRNA
tacaactgaatttcatgagc

SEQ ID NO: 126833 - DNA, 20 bp, Artificial Sequence
  MKO10126833_B_Wee1
  gRNA
atcttcaaactcataatcac

SEQ ID NO: 126834 - DNA, 20 bp, Artificial Sequence
  MKO10126834_B_Wee2
  gRNA
cagtctacaagtgcattaag

SEQ ID NO: 126835 - DNA, 20 bp, Artificial Sequence
  MKO10126835_B_Wee2
  gRNA
cccgaagctctagacatatg

SEQ ID NO: 126836 - DNA, 20 bp, Artificial Sequence
  MKO10126836_B_Wee2
  gRNA
tattctacaagaaactaata

SEQ ID NO: 126837 - DNA, 20 bp, Artificial Sequence
  MKO10126837_B_Wfdc10
  gRNA
cggctgcacagataccgttt

SEQ ID NO: 126838 - DNA, 20 bp, Artificial Sequence
  MKO10126838_B_Wfdc10
  gRNA
atctgctgctccgctgcatg

SEQ ID NO: 126839 - DNA, 20 bp, Artificial Sequence
  MKO10126839_B_Wfdc10
  gRNA
gactatgtctacccagagag

SEQ ID NO: 126840 - DNA, 20 bp, Artificial Sequence
  MKO10126840_B_Wfdc11
  gRNA
acacttcttgacgcagtcat

SEQ ID NO: 126841 - DNA, 20 bp, Artificial Sequence
  MKO10126841_B_Wfdc11
  gRNA
tgcacagatgttaccacagt

SEQ ID NO: 126842 - DNA, 20 bp, Artificial Sequence
  MKO10126842_B_Wfdc11
  gRNA
ggtaacatctgtgcagaaaa

SEQ ID NO: 126843 - DNA, 20 bp, Artificial Sequence
  MKO10126843_B_Wfdc12
  gRNA
atgaggaccaagatactgtt

SEQ ID NO: 126844 - DNA, 20 bp, Artificial Sequence
  MKO10126844_B_Wfdc12
  gRNA
agatatcacaccttactctg

SEQ ID NO: 126845 - DNA, 20 bp, Artificial Sequence
  MKO10126845_B_Wfdc12
  gRNA
tagacagatccctcagagta

SEQ ID NO: 126846 - DNA, 20 bp, Artificial Sequence
  MKO10126846_B_Wfdc13
  gRNA
gtcacctttgcagctcctgc

SEQ ID NO: 126847 - DNA, 20 bp, Artificial Sequence
  MKO10126847_B_Wfdc13
  gRNA
cttcattccagagtacatcc

SEQ ID NO: 126848 - DNA, 20 bp, Artificial Sequence
  MKO10126848_B_Wfdc13
  gRNA
gaacagcactgaagcggttc

SEQ ID NO: 126849 - DNA, 20 bp, Artificial Sequence
  MKO10126849_B_Wfdc15a
  gRNA
tggttgttgtgaacagtagg

SEQ ID NO: 126850 - DNA, 20 bp, Artificial Sequence
  MKO10126850_B_Wfdc15a
  gRNA
tgcccttgcaccctttatca

SEQ ID NO: 126851 - DNA, 20 bp, Artificial Sequence
  MKO10126851_B_Wfdc15a
  gRNA
tccggacagtacccctgttt

SEQ ID NO: 126852 - DNA, 20 bp, Artificial Sequence
  MKO10126852_B_Wfdc15b
  gRNA
tcttgggagatgaagctgct

SEQ ID NO: 126853 - DNA, 20 bp, Artificial Sequence
  MKO10126853_B_Wfdc15b
  gRNA
cctttatcacgcctgcattt

SEQ ID NO: 126854 - DNA, 20 bp, Artificial Sequence
  MKO10126854_B_Wfdc15b
  gRNA
tccatgggagagcccagaat

SEQ ID NO: 126855 - DNA, 20 bp, Artificial Sequence
  MKO10126855_B_Wfdc16
  gRNA
gagtgacttgccacttcatg

SEQ ID NO: 126856 - DNA, 20 bp, Artificial Sequence
  MKO10126856_B_Wfdc16
  gRNA
acctactgtaatcttgaatt

SEQ ID NO: 126857 - DNA, 20 bp, Artificial Sequence
  MKO10126857_B_Wfdc16
  gRNA
caaagccaaaccatacaatc

SEQ ID NO: 126858 - DNA, 20 bp, Artificial Sequence
  MKO10126858_B_Wfdc17
  gRNA
tatgtagtgtcttgccccaa

SEQ ID NO: 126859 - DNA, 20 bp, Artificial Sequence
  MKO10126859_B_Wfdc17
  gRNA
aagccttcaccagaaagtgt

SEQ ID NO: 126860 - DNA, 20 bp, Artificial Sequence
  MKO10126860_B_Wfdc17
  gRNA
gacagccacagtcttgtttc

SEQ ID NO: 126861 - DNA, 20 bp, Artificial Sequence
  MKO10126861_B_Wfdc18
  gRNA
tttggggttagacagagccc

SEQ ID NO: 126862 - DNA, 20 bp, Artificial Sequence
  MKO10126862_B_Wfdc18
  gRNA
ggcggcttaggacaagcgcc

SEQ ID NO: 126863 - DNA, 20 bp, Artificial Sequence
  MKO10126863_B_Wfdc18
  gRNA
tcacaagttccaaaactgcg

SEQ ID NO: 126864 - DNA, 20 bp, Artificial Sequence
  MKO10126864_B_Wfdc1
  gRNA
ccgttgccacccagccatcg

SEQ ID NO: 126865 - DNA, 20 bp, Artificial Sequence
  MKO10126865_B_Wfdc1
  gRNA
accgctgcccaccaccgcca

SEQ ID NO: 126866 - DNA, 20 bp, Artificial Sequence
  MKO10126866_B_Wfdc1
  gRNA
gcccagggcatacccaacca

SEQ ID NO: 126867 - DNA, 20 bp, Artificial Sequence
  MKO10126867_B_Wfdc2
  gRNA
gagcttgggtatgtccacgc

SEQ ID NO: 126868 - DNA, 20 bp, Artificial Sequence
  MKO10126868_B_Wfdc2
  gRNA
tcggacacctaagccttccc

SEQ ID NO: 126869 - DNA, 20 bp, Artificial Sequence
  MKO10126869_B_Wfdc2
  gRNA
aacatgaaatgctgccgcaa

SEQ ID NO: 126870 - DNA, 20 bp, Artificial Sequence
  MKO10126870_B_Wfdc3
  gRNA
tgacttacagcacctttccc

SEQ ID NO: 126871 - DNA, 20 bp, Artificial Sequence
  MKO10126871_B_Wfdc3
  gRNA
ctggcatcttgggtagctgc

SEQ ID NO: 126872 - DNA, 20 bp, Artificial Sequence
  MKO10126872_B_Wfdc3
  gRNA
ctgcagctacccaagatgcc

SEQ ID NO: 126873 - DNA, 20 bp, Artificial Sequence
  MKO10126873_B_Wfdc5
  gRNA
tggttgcagagtccatcgtc

SEQ ID NO: 126874 - DNA, 20 bp, Artificial Sequence
  MKO10126874_B_Wfdc5
  gRNA
gcaagtgagtctccaaagcc

SEQ ID NO: 126875 - DNA, 20 bp, Artificial Sequence
  MKO10126875_B_Wfdc5
  gRNA
agtccagagctccctcctcc

SEQ ID NO: 126876 - DNA, 20 bp, Artificial Sequence
  MKO10126876_B_Wfdc6a
  gRNA
atttcttcccacagctgaac

SEQ ID NO: 126877 - DNA, 20 bp, Artificial Sequence
  MKO10126877_B_Wfdc6a
  gRNA
aagaaaccctctgccagctc

SEQ ID NO: 126878 - DNA, 20 bp, Artificial Sequence
  MKO10126878_B_Wfdc6a
  gRNA
ccaggaacctgagctggcag

SEQ ID NO: 126879 - DNA, 20 bp, Artificial Sequence
  MKO10126879_B_Wfdc6b
  gRNA
atttcctcccacaggcgaac

SEQ ID NO: 126880 - DNA, 20 bp, Artificial Sequence
  MKO10126880_B_Wfdc6b
  gRNA
gatgaattcgatacaaagct

SEQ ID NO: 126881 - DNA, 20 bp, Artificial Sequence
  MKO10126881_B_Wfdc6b
  gRNA
ccaggaacctgcgctggcag

SEQ ID NO: 126882 - DNA, 20 bp, Artificial Sequence
  MKO10126882_B_Wfdc8
  gRNA
gacgcacgcacgtttgatct

SEQ ID NO: 126883 - DNA, 20 bp, Artificial Sequence
  MKO10126883_B_Wfdc8
  gRNA
agcgtttctacagtcagtct

SEQ ID NO: 126884 - DNA, 20 bp, Artificial Sequence
  MKO10126884_B_Wfdc8
  gRNA
ctgcattccaaccgctgcct

SEQ ID NO: 126885 - DNA, 20 bp, Artificial Sequence
  MKO10126885_B_Wfdc9
  gRNA
ctggtgtttctgcacgttct

SEQ ID NO: 126886 - DNA, 20 bp, Artificial Sequence
  MKO10126886_B_Wfdc9
  gRNA
actttcatcagtgtttcaaa

SEQ ID NO: 126887 - DNA, 20 bp, Artificial Sequence
  MKO10126887_B_Wfdc9
  gRNA
cacagtctaccatgaagcct

SEQ ID NO: 126888 - DNA, 20 bp, Artificial Sequence
  MKO10126888_B_Wfikkn1
  gRNA
tgctctgggcgtcgacccac

SEQ ID NO: 126889 - DNA, 20 bp, Artificial Sequence
  MKO10126889_B_Wfikkn1
  gRNA
caaccacgttgccatacatt

SEQ ID NO: 126890 - DNA, 20 bp, Artificial Sequence
  MKO10126890_B_Wfikkn1
  gRNA
cccaacgtgacagctgtcga

SEQ ID NO: 126891 - DNA, 20 bp, Artificial Sequence
  MKO10126891_B_Wfikkn2
  gRNA
atcatcggttctggtttcac

SEQ ID NO: 126892 - DNA, 20 bp, Artificial Sequence
  MKO10126892_B_Wfikkn2
  gRNA
agcgacatttcgagctgtac

SEQ ID NO: 126893 - DNA, 20 bp, Artificial Sequence
  MKO10126893_B_Wfikkn2
  gRNA
gaaaacctgtgacgtcctca

SEQ ID NO: 126894 - DNA, 20 bp, Artificial Sequence
  MKO10126894_B_Wfs1
  gRNA
gatcccctttgaagaagtcc

SEQ ID NO: 126895 - DNA, 20 bp, Artificial Sequence
  MKO10126895_B_Wfs1
  gRNA
gctatcctctgagaccgacc

SEQ ID NO: 126896 - DNA, 20 bp, Artificial Sequence
  MKO10126896_B_Wfs1
  gRNA
acagatggaggggcgcagcc

SEQ ID NO: 126897 - DNA, 20 bp, Artificial Sequence
  MKO10126897_B_Whamm
  gRNA
tgagctgggtcctagaaggg

SEQ ID NO: 126898 - DNA, 20 bp, Artificial Sequence
  MKO10126898_B_Whamm
  gRNA
gttgcaacttcatgtaagct

SEQ ID NO: 126899 - DNA, 20 bp, Artificial Sequence
  MKO10126899_B_Whamm
  gRNA
atctcaagctcatgttagct

SEQ ID NO: 126900 - DNA, 20 bp, Artificial Sequence
  MKO10126900_B_Whrn
  gRNA
gaaagcgtcgccaactcagc

SEQ ID NO: 126901 - DNA, 20 bp, Artificial Sequence
  MKO10126901_B_Whrn
  gRNA
ctgctccacctcggatcgtg

SEQ ID NO: 126902 - DNA, 20 bp, Artificial Sequence
  MKO10126902_B_Whrn
  gRNA
tccttgggcctcacgatccg

SEQ ID NO: 126903 - DNA, 20 bp, Artificial Sequence
  MKO10126903_B_Whsc1l1
  gRNA
ccaagggtaggttcccacct

SEQ ID NO: 126904 - DNA, 20 bp, Artificial Sequence
  MKO10126904_B_Whsc1l1
  gRNA
ttcaagtgatccccagcttg

SEQ ID NO: 126905 - DNA, 20 bp, Artificial Sequence
  MKO10126905_B_Whsc1l1
  gRNA
gggttcatgagaaacgggta

SEQ ID NO: 126906 - DNA, 20 bp, Artificial Sequence
  MKO10126906_B_Whsc1
  gRNA
ctcttgttaaaatacaacgt

SEQ ID NO: 126907 - DNA, 20 bp, Artificial Sequence
  MKO10126907_B_Whsc1
  gRNA
tcaactttctaacagcctac

SEQ ID NO: 126908 - DNA, 20 bp, Artificial Sequence
  MKO10126908_B_Whsc1
  gRNA
ggggtcatgcagaaatttaa

SEQ ID NO: 126909 - DNA, 20 bp, Artificial Sequence
  MKO10126909_B_Wibg
  gRNA
gccggtctcgtcagttacat

SEQ ID NO: 126910 - DNA, 20 bp, Artificial Sequence
  MKO10126910_B_Wibg
  gRNA
gacgtggcgaaagcagcgga

SEQ ID NO: 126911 - DNA, 20 bp, Artificial Sequence
  MKO10126911_B_Wibg
  gRNA
ccctatgtaactgacgagac

SEQ ID NO: 126912 - DNA, 20 bp, Artificial Sequence
  MKO10126912_B_Wif1
  gRNA
attctgaggggtcctaagga

SEQ ID NO: 126913 - DNA, 20 bp, Artificial Sequence
  MKO10126913_B_Wif1
  gRNA
acagtgcctcacaaggcatc

SEQ ID NO: 126914 - DNA, 20 bp, Artificial Sequence
  MKO10126914_B_Wif1
  gRNA
ccccctttacacatgatttc

SEQ ID NO: 126915 - DNA, 20 bp, Artificial Sequence
  MKO10126915_B_Wipf1
  gRNA
ccctccacatcagttcgaaa

SEQ ID NO: 126916 - DNA, 20 bp, Artificial Sequence
  MKO10126916_B_Wipf1
  gRNA
agctgaggtccaccgccaac

SEQ ID NO: 126917 - DNA, 20 bp, Artificial Sequence
  MKO10126917_B_Wipf1
  gRNA
aatagtcctcccagtcctgg

SEQ ID NO: 126918 - DNA, 20 bp, Artificial Sequence
  MKO10126918_B_Wipf2
  gRNA
tctgacccatgcatccggta

SEQ ID NO: 126919 - DNA, 20 bp, Artificial Sequence
  MKO10126919_B_Wipf2
  gRNA
agtgccgaagctccgacctg

SEQ ID NO: 126920 - DNA, 20 bp, Artificial Sequence
  MKO10126920_B_Wipf2
  gRNA
aggtgaccaacgttaatgat

SEQ ID NO: 126921 - DNA, 20 bp, Artificial Sequence
  MKO10126921_B_Wipf3
  gRNA
ccgcagtgccccacagatcg

SEQ ID NO: 126922 - DNA, 20 bp, Artificial Sequence
  MKO10126922_B_Wipf3
  gRNA
acaggtcttaccggaggccc

SEQ ID NO: 126923 - DNA, 20 bp, Artificial Sequence
  MKO10126923_B_Wipf3
  gRNA
ggagggggtggcgccccaag

SEQ ID NO: 126924 - DNA, 20 bp, Artificial Sequence
  MKO10126924_B_Wipi1
  gRNA
aatccctgacgtgtatatcg

SEQ ID NO: 126925 - DNA, 20 bp, Artificial Sequence
  MKO10126925_B_Wipi1
  gRNA
actctatgatggaaactccc

SEQ ID NO: 126926 - DNA, 20 bp, Artificial Sequence
  MKO10126926_B_Wipi1
  gRNA
gtacaatctcgcctgtactc

SEQ ID NO: 126927 - DNA, 20 bp, Artificial Sequence
  MKO10126927_B_Wipi2
  gRNA
ggtcttcgacaccattaact

SEQ ID NO: 126928 - DNA, 20 bp, Artificial Sequence
  MKO10126928_B_Wipi2
  gRNA
cgctctacatacacaacatc

SEQ ID NO: 126929 - DNA, 20 bp, Artificial Sequence
  MKO10126929_B_Wipi2
  gRNA
cagctactccaacactatcc

SEQ ID NO: 126930 - DNA, 20 bp, Artificial Sequence
  MKO10126930_B_Wisp1
  gRNA
gccacgaacttcactctcgc

SEQ ID NO: 126931 - DNA, 20 bp, Artificial Sequence
  MKO10126931_B_Wisp1
  gRNA
ccccactgtaatcgcagtag

SEQ ID NO: 126932 - DNA, 20 bp, Artificial Sequence
  MKO10126932_B_Wisp1
  gRNA
tacagcagcgtcaggcgccg

SEQ ID NO: 126933 - DNA, 20 bp, Artificial Sequence
  MKO10126933_B_Wisp2
  gRNA
gctgtcgagtgtgtgcacgg

SEQ ID NO: 126934 - DNA, 20 bp, Artificial Sequence
  MKO10126934_B_Wisp2
  gRNA
ttgccggctgcatcactgcc

SEQ ID NO: 126935 - DNA, 20 bp, Artificial Sequence
  MKO10126935_B_Wisp2
  gRNA
ggtacccccggtgggcactg

SEQ ID NO: 126936 - DNA, 20 bp, Artificial Sequence
  MKO10126936_B_Wisp3
  gRNA
gctgaaatacttggccattc

SEQ ID NO: 126937 - DNA, 20 bp, Artificial Sequence
  MKO10126937_B_Wisp3
  gRNA
gttccccggccacagtttgg

SEQ ID NO: 126938 - DNA, 20 bp, Artificial Sequence
  MKO10126938_B_Wisp3
  gRNA
ccacttaaatgacccttcac

SEQ ID NO: 126939 - DNA, 20 bp, Artificial Sequence
  MKO10126939_B_Wiz
  gRNA
tctgcttcaccagctcgtag

SEQ ID NO: 126940 - DNA, 20 bp, Artificial Sequence
  MKO10126940_B_Wiz
  gRNA
atcttctcgaggcgtgcccc

SEQ ID NO: 126941 - DNA, 20 bp, Artificial Sequence
  MKO10126941_B_Wiz
  gRNA
gctgccccggatcatcctcg

SEQ ID NO: 126942 - DNA, 20 bp, Artificial Sequence
  MKO10126942_B_Wls
  gRNA
taataacgaccttcgtgctc

SEQ ID NO: 126943 - DNA, 20 bp, Artificial Sequence
  MKO10126943_B_Wls
  gRNA
gtcccgacctccagtgcttc

SEQ ID NO: 126944 - DNA, 20 bp, Artificial Sequence
  MKO10126944_B_Wls
  gRNA
aaagtacatttgagtttacg

SEQ ID NO: 126945 - DNA, 20 bp, Artificial Sequence
  MKO10126945_B_Wnk1
  gRNA
ttggtctggcaactctaaag

SEQ ID NO: 126946 - DNA, 20 bp, Artificial Sequence
  MKO10126946_B_Wnk1
  gRNA
ccgatcttgactgagccagt

SEQ ID NO: 126947 - DNA, 20 bp, Artificial Sequence
  MKO10126947_B_Wnk1
  gRNA
atcatagaatcgaacaatgt

SEQ ID NO: 126948 - DNA, 20 bp, Artificial Sequence
  MKO10126948_B_Wnk2
  gRNA
ttcatccttgcgtgcgcgcc

SEQ ID NO: 126949 - DNA, 20 bp, Artificial Sequence
  MKO10126949_B_Wnk2
  gRNA
tcatcaccttgaaccgcttc

SEQ ID NO: 126950 - DNA, 20 bp, Artificial Sequence
  MKO10126950_B_Wnk2
  gRNA
aggtgaccttgcgatagatc

SEQ ID NO: 126951 - DNA, 20 bp, Artificial Sequence
  MKO10126951_B_Wnk3
  gRNA
tacaggcactcctgaattta

SEQ ID NO: 126952 - DNA, 20 bp, Artificial Sequence
  MKO10126952_B_Wnk3
  gRNA
ccagctctatatcgaatttc

SEQ ID NO: 126953 - DNA, 20 bp, Artificial Sequence
  MKO10126953_B_Wnk3
  gRNA
ttgcaacttcccctagtggc

SEQ ID NO: 126954 - DNA, 20 bp, Artificial Sequence
  MKO10126954_B_Wnk4
  gRNA
aaaggaggcgcgcttgagcg

SEQ ID NO: 126955 - DNA, 20 bp, Artificial Sequence
  MKO10126955_B_Wnk4
  gRNA
tcatttcgcggaaccgcctc

SEQ ID NO: 126956 - DNA, 20 bp, Artificial Sequence
  MKO10126956_B_Wnk4
  gRNA
gtacgaggaaaagtacgacg

SEQ ID NO: 126957 - DNA, 20 bp, Artificial Sequence
  MKO10126957_B_Wnt10a
  gRNA
ctgtgagcgcgagccgcgcc

SEQ ID NO: 126958 - DNA, 20 bp, Artificial Sequence
  MKO10126958_B_Wnt10a
  gRNA
gtgtgtgcgtcaccctgacg

SEQ ID NO: 126959 - DNA, 20 bp, Artificial Sequence
  MKO10126959_B_Wnt10a
  gRNA
gtcagcacccaacgacatcc

SEQ ID NO: 126960 - DNA, 20 bp, Artificial Sequence
  MKO10126960_B_Wnt10b
  gRNA
tctctccgaagtccatgtcg

SEQ ID NO: 126961 - DNA, 20 bp, Artificial Sequence
  MKO10126961_B_Wnt10b
  gRNA
ggcgtcccaccctgttgttg

SEQ ID NO: 126962 - DNA, 20 bp, Artificial Sequence
  MKO10126962_B_Wnt10b
  gRNA
cacagcgccatcctcaagcg

SEQ ID NO: 126963 - DNA, 20 bp, Artificial Sequence
  MKO10126963_B_Wnt11
  gRNA
gtgtagacgcatcagtttat

SEQ ID NO: 126964 - DNA, 20 bp, Artificial Sequence
  MKO10126964_B_Wnt11
  gRNA
gcaccatcgtgcacgccgcc

SEQ ID NO: 126965 - DNA, 20 bp, Artificial Sequence
  MKO10126965_B_Wnt11
  gRNA
ccgctacctgtcagccacga

SEQ ID NO: 126966 - DNA, 20 bp, Artificial Sequence
  MKO10126966_B_Wnt16
  gRNA
tgctgaaccacatgccgtac

SEQ ID NO: 126967 - DNA, 20 bp, Artificial Sequence
  MKO10126967_B_Wnt16
  gRNA
gttgcctgcactgcatgacc

SEQ ID NO: 126968 - DNA, 20 bp, Artificial Sequence
  MKO10126968_B_Wnt16
  gRNA
gctacaacacccatgtagtc

SEQ ID NO: 126969 - DNA, 20 bp, Artificial Sequence
  MKO10126969_B_Wnt1
  gRNA
ggatcagtcgccgctgcttg

SEQ ID NO: 126970 - DNA, 20 bp, Artificial Sequence
  MKO10126970_B_Wnt1
  gRNA
gtcgcaggtgcaggactcga

SEQ ID NO: 126971 - DNA, 20 bp, Artificial Sequence
  MKO10126971_B_Wnt1
  gRNA
agtcctgcacctgcgactac

SEQ ID NO: 126972 - DNA, 20 bp, Artificial Sequence
  MKO10126972_B_Wnt2b
  gRNA
caatttcacagcagcgcgcc

SEQ ID NO: 126973 - DNA, 20 bp, Artificial Sequence
  MKO10126973_B_Wnt2b
  gRNA
ctctcagacttccgacgcac

SEQ ID NO: 126974 - DNA, 20 bp, Artificial Sequence
  MKO10126974_B_Wnt2b
  gRNA
ccagacatcatgcgctcagt

SEQ ID NO: 126975 - DNA, 20 bp, Artificial Sequence
  MKO10126975_B_Wnt2
  gRNA
gtgtgcaacttgacttcccg

SEQ ID NO: 126976 - DNA, 20 bp, Artificial Sequence
  MKO10126976_B_Wnt2
  gRNA
tgttgcagttccagcgatgc

SEQ ID NO: 126977 - DNA, 20 bp, Artificial Sequence
  MKO10126977_B_Wnt2
  gRNA
aaacaggcgactatctctgg

SEQ ID NO: 126978 - DNA, 20 bp, Artificial Sequence
  MKO10126978_B_Wnt3a
  gRNA
ctctgggcagctacccgatc

SEQ ID NO: 126979 - DNA, 20 bp, Artificial Sequence
  MKO10126979_B_Wnt3a
  gRNA
agcactaagaggtatccgag

SEQ ID NO: 126980 - DNA, 20 bp, Artificial Sequence
  MKO10126980_B_Wnt3a
  gRNA
gggtgtcaaagcgggcatcc

SEQ ID NO: 126981 - DNA, 20 bp, Artificial Sequence
  MKO10126981_B_Wnt3
  gRNA
gatcgcagccatcgatgccg

SEQ ID NO: 126982 - DNA, 20 bp, Artificial Sequence
  MKO10126982_B_Wnt3
  gRNA
cgaggcgatggcatgcacga

SEQ ID NO: 126983 - DNA, 20 bp, Artificial Sequence
  MKO10126983_B_Wnt3
  gRNA
gcatgatctcgatgtaattg

SEQ ID NO: 126984 - DNA, 20 bp, Artificial Sequence
  MKO10126984_B_Wnt4
  gRNA
tgctcggacaacatcgccta

SEQ ID NO: 126985 - DNA, 20 bp, Artificial Sequence
  MKO10126985_B_Wnt4
  gRNA
ggctgaccccgtgcactgtc

SEQ ID NO: 126986 - DNA, 20 bp, Artificial Sequence
  MKO10126986_B_Wnt4
  gRNA
ctggtattggcactcctcga

SEQ ID NO: 126987 - DNA, 20 bp, Artificial Sequence
  MKO10126987_B_Wnt5a
  gRNA
tcgttgcgcacacagtagtc

SEQ ID NO: 126988 - DNA, 20 bp, Artificial Sequence
  MKO10126988_B_Wnt5a
  gRNA
tgcagttccatctccgatgc

SEQ ID NO: 126989 - DNA, 20 bp, Artificial Sequence
  MKO10126989_B_Wnt5a
  gRNA
gaaactctgccacttgtatc

SEQ ID NO: 126990 - DNA, 20 bp, Artificial Sequence
  MKO10126990_B_Wnt5b
  gRNA
tccagcgcctctgtcgaaac

SEQ ID NO: 126991 - DNA, 20 bp, Artificial Sequence
  MKO10126991_B_Wnt5b
  gRNA
gtggctgcagccgtgctgcg

SEQ ID NO: 126992 - DNA, 20 bp, Artificial Sequence
  MKO10126992_B_Wnt5b
  gRNA
acgtatgcagtgagcgccgc

SEQ ID NO: 126993 - DNA, 20 bp, Artificial Sequence
  MKO10126993_B_Wnt6
  gRNA
ccacagtccatcgacgtgcg

SEQ ID NO: 126994 - DNA, 20 bp, Artificial Sequence
  MKO10126994_B_Wnt6
  gRNA
gcctaggcggtgcccgcccg

SEQ ID NO: 126995 - DNA, 20 bp, Artificial Sequence
  MKO10126995_B_Wnt6
  gRNA
cccgcgggcgggcaccgcct

SEQ ID NO: 126996 - DNA, 20 bp, Artificial Sequence
  MKO10126996_B_Wnt7a
  gRNA
taacacgtgcagcgagcgca

SEQ ID NO: 126997 - DNA, 20 bp, Artificial Sequence
  MKO10126997_B_Wnt7a
  gRNA
actgaaactgacactcgtcc

SEQ ID NO: 126998 - DNA, 20 bp, Artificial Sequence
  MKO10126998_B_Wnt7a
  gRNA
cacctatgcgattatcgctg

SEQ ID NO: 126999 - DNA, 20 bp, Artificial Sequence
  MKO10126999_B_Wnt7b
  gRNA
cgccacgcccgccgccgtga

SEQ ID NO: 127000 - DNA, 20 bp, Artificial Sequence
  MKO10127000_B_Wnt7b
  gRNA
acggagaccagcgcgctgcg

SEQ ID NO: 127001 - DNA, 20 bp, Artificial Sequence
  MKO10127001_B_Wnt7b
  gRNA
ccgctggaactgctccgccc

SEQ ID NO: 127002 - DNA, 20 bp, Artificial Sequence
  MKO10127002_B_Wnt8a
  gRNA
actggcggtgtaggtcagat

SEQ ID NO: 127003 - DNA, 20 bp, Artificial Sequence
  MKO10127003_B_Wnt8a
  gRNA
tgccggccctgttgttgtga

SEQ ID NO: 127004 - DNA, 20 bp, Artificial Sequence
  MKO10127004_B_Wnt8a
  gRNA
ggctgtgacgagtcacaaaa

SEQ ID NO: 127005 - DNA, 20 bp, Artificial Sequence
  MKO10127005_B_Wnt8b
  gRNA
ggctgtgatgactcccgaaa

SEQ ID NO: 127006 - DNA, 20 bp, Artificial Sequence
  MKO10127006_B_Wnt8b
  gRNA
gggcatcttgtcctgtctcg

SEQ ID NO: 127007 - DNA, 20 bp, Artificial Sequence
  MKO10127007_B_Wnt8b
  gRNA
ctcattgttgtgcagattca

SEQ ID NO: 127008 - DNA, 20 bp, Artificial Sequence
  MKO10127008_B_Wnt9a
  gRNA
agcagcgccgcatgtgccgc

SEQ ID NO: 127009 - DNA, 20 bp, Artificial Sequence
  MKO10127009_B_Wnt9a
  gRNA
gctcgccgcgctgcgccctt

SEQ ID NO: 127010 - DNA, 20 bp, Artificial Sequence
  MKO10127010_B_Wnt9a
  gRNA
ggcgcggcaagatgctggat

SEQ ID NO: 127011 - DNA, 20 bp, Artificial Sequence
  MKO10127011_B_Wnt9b
  gRNA
cgtgtatacctgcaagcgct

SEQ ID NO: 127012 - DNA, 20 bp, Artificial Sequence
  MKO10127012_B_Wnt9b
  gRNA
cggcactgacccgaagtagg

SEQ ID NO: 127013 - DNA, 20 bp, Artificial Sequence
  MKO10127013_B_Wnt9b
  gRNA
tgacgcccacaacacccacg

SEQ ID NO: 127014 - DNA, 20 bp, Artificial Sequence
  MKO10127014_B_Wrap53
  gRNA
cgctccgagaacttcttgaa

SEQ ID NO: 127015 - DNA, 20 bp, Artificial Sequence
  MKO10127015_B_Wrap53
  gRNA
ttggacctacagcttctcgc

SEQ ID NO: 127016 - DNA, 20 bp, Artificial Sequence
  MKO10127016_B_Wrap53
  gRNA
acaccatctatgattactgc

SEQ ID NO: 127017 - DNA, 20 bp, Artificial Sequence
  MKO10127017_B_Wrap73
  gRNA
ccacaggactaactttcacc

SEQ ID NO: 127018 - DNA, 20 bp, Artificial Sequence
  MKO10127018_B_Wrap73
  gRNA
tcgatcttgcagtgccattc

SEQ ID NO: 127019 - DNA, 20 bp, Artificial Sequence
  MKO10127019_B_Wrap73
  gRNA
gcagtcccgcctctctgcta

SEQ ID NO: 127020 - DNA, 20 bp, Artificial Sequence
  MKO10127020_B_Wrb
  gRNA
aaactcgtccatcatgttga

SEQ ID NO: 127021 - DNA, 20 bp, Artificial Sequence
  MKO10127021_B_Wrb
  gRNA
acttataaaccacttgatct

SEQ ID NO: 127022 - DNA, 20 bp, Artificial Sequence
  MKO10127022_B_Wrb
  gRNA
tggccttcccctcagctgaa

SEQ ID NO: 127023 - DNA, 20 bp, Artificial Sequence
  MKO10127023_B_Wrnip1
  gRNA
tcagtgatcagaactcgact

SEQ ID NO: 127024 - DNA, 20 bp, Artificial Sequence
  MKO10127024_B_Wrnip1
  gRNA
ccactcaccgatgtcctcgc

SEQ ID NO: 127025 - DNA, 20 bp, Artificial Sequence
  MKO10127025_B_Wrnip1
  gRNA
gctggtaaggtttgccagcg

SEQ ID NO: 127026 - DNA, 20 bp, Artificial Sequence
  MKO10127026_B_Wrn
  gRNA
agtccatccgctgcagcaat

SEQ ID NO: 127027 - DNA, 20 bp, Artificial Sequence
  MKO10127027_B_Wrn
  gRNA
aagaacactcttctgaacgc

SEQ ID NO: 127028 - DNA, 20 bp, Artificial Sequence
  MKO10127028_B_Wrn
  gRNA
cgatgtggtgggatttgaca

SEQ ID NO: 127029 - DNA, 20 bp, Artificial Sequence
  MKO10127029_B_Wsb1
  gRNA
tccttgtgaccacgcaaagt

SEQ ID NO: 127030 - DNA, 20 bp, Artificial Sequence
  MKO10127030_B_Wsb1
  gRNA
tgtctcttgaagctgataca

SEQ ID NO: 127031 - DNA, 20 bp, Artificial Sequence
  MKO10127031_B_Wsb1
  gRNA
aatctctaaccatttcaatg

SEQ ID NO: 127032 - DNA, 20 bp, Artificial Sequence
  MKO10127032_B_Wsb2
  gRNA
gacttacaactgttcctcta

SEQ ID NO: 127033 - DNA, 20 bp, Artificial Sequence
  MKO10127033_B_Wsb2
  gRNA
tgtggcaggtaagcagatcc

SEQ ID NO: 127034 - DNA, 20 bp, Artificial Sequence
  MKO10127034_B_Wsb2
  gRNA
ctgggcacgtcaccatcccc

SEQ ID NO: 127035 - DNA, 20 bp, Artificial Sequence
  MKO10127035_B_Wscd1
  gRNA
atgactgtggagacgtgttc

SEQ ID NO: 127036 - DNA, 20 bp, Artificial Sequence
  MKO10127036_B_Wscd1
  gRNA
ccatgtgcggggctgtgcgc

SEQ ID NO: 127037 - DNA, 20 bp, Artificial Sequence
  MKO10127037_B_Wscd1
  gRNA
actcctgattgcactccttc

SEQ ID NO: 127038 - DNA, 20 bp, Artificial Sequence
  MKO10127038_B_Wscd2
  gRNA
gatgacagtcttccgttgcc

SEQ ID NO: 127039 - DNA, 20 bp, Artificial Sequence
  MKO10127039_B_Wscd2
  gRNA
caggtagcagccgatgtact

SEQ ID NO: 127040 - DNA, 20 bp, Artificial Sequence
  MKO10127040_B_Wscd2
  gRNA
cttcatcgtgtaccagacac

SEQ ID NO: 127041 - DNA, 20 bp, Artificial Sequence
  MKO10127041_B_Wt1
  gRNA
cccagcttgaatgcatgacc

SEQ ID NO: 127042 - DNA, 20 bp, Artificial Sequence
  MKO10127042_B_Wt1
  gRNA
acctgctgtagggcgtcctc

SEQ ID NO: 127043 - DNA, 20 bp, Artificial Sequence
  MKO10127043_B_Wt1
  gRNA
gaacctaggagctaccttaa

SEQ ID NO: 127044 - DNA, 20 bp, Artificial Sequence
  MKO10127044_B_Wtap
  gRNA
cgaagaacctcttcctaaaa

SEQ ID NO: 127045 - DNA, 20 bp, Artificial Sequence
  MKO10127045_B_Wtap
  gRNA
tgaaacagacttcaaagtta

SEQ ID NO: 127046 - DNA, 20 bp, Artificial Sequence
  MKO10127046_B_Wtap
  gRNA
tgaagcatatgttcaagctt

SEQ ID NO: 127047 - DNA, 20 bp, Artificial Sequence
  MKO10127047_B_Wtip
  gRNA
tttctcacccacgttataga

SEQ ID NO: 127048 - DNA, 20 bp, Artificial Sequence
  MKO10127048_B_Wtip
  gRNA
ctcagtgtgcaacgagtgct

SEQ ID NO: 127049 - DNA, 20 bp, Artificial Sequence
  MKO10127049_B_Wtip
  gRNA
cttccagggagacggctccg

SEQ ID NO: 127050 - DNA, 20 bp, Artificial Sequence
  MKO10127050_B_Wwc1
  gRNA
atccaagggtgcaatggcgg

SEQ ID NO: 127051 - DNA, 20 bp, Artificial Sequence
  MKO10127051_B_Wwc1
  gRNA
gtcatacttggagctggacg

SEQ ID NO: 127052 - DNA, 20 bp, Artificial Sequence
  MKO10127052_B_Wwc1
  gRNA
aaattgccactgcaaagtcc

SEQ ID NO: 127053 - DNA, 20 bp, Artificial Sequence
  MKO10127053_B_Wwc2
  gRNA
agatctccaccacacaatta

SEQ ID NO: 127054 - DNA, 20 bp, Artificial Sequence
  MKO10127054_B_Wwc2
  gRNA
gttgatgtggtcgatgtagt

SEQ ID NO: 127055 - DNA, 20 bp, Artificial Sequence
  MKO10127055_B_Wwc2
  gRNA
caatcttacccttaattgtg

SEQ ID NO: 127056 - DNA, 20 bp, Artificial Sequence
  MKO10127056_B_Wwox
  gRNA
ccaggatcacatgcgcgcca

SEQ ID NO: 127057 - DNA, 20 bp, Artificial Sequence
  MKO10127057_B_Wwox
  gRNA
tgtgtttcagatttgccgta

SEQ ID NO: 127058 - DNA, 20 bp, Artificial Sequence
  MKO10127058_B_Wwox
  gRNA
aacatccgaaaaccggcaag

SEQ ID NO: 127059 - DNA, 20 bp, Artificial Sequence
  MKO10127059_B_Wwp1
  gRNA
gtagttcctctaatccaaaa

SEQ ID NO: 127060 - DNA, 20 bp, Artificial Sequence
  MKO10127060_B_Wwp1
  gRNA
actccaaactcggaactcca

SEQ ID NO: 127061 - DNA, 20 bp, Artificial Sequence
  MKO10127061_B_Wwp1
  gRNA
gcacagcttactgggtggcg

SEQ ID NO: 127062 - DNA, 20 bp, Artificial Sequence
  MKO10127062_B_Wwp2
  gRNA
ccttcagatccaaatgactc

SEQ ID NO: 127063 - DNA, 20 bp, Artificial Sequence
  MKO10127063_B_Wwp2
  gRNA
gatctgggaagtgtgcctaa

SEQ ID NO: 127064 - DNA, 20 bp, Artificial Sequence
  MKO10127064_B_Wwp2
  gRNA
ccccccagtacaaactgctt

SEQ ID NO: 127065 - DNA, 20 bp, Artificial Sequence
  MKO10127065_B_Wwtr1
  gRNA
ggctagtggccacgacttgc

SEQ ID NO: 127066 - DNA, 20 bp, Artificial Sequence
  MKO10127066_B_Wwtr1
  gRNA
gcgcgagtgcgagccggaat

SEQ ID NO: 127067 - DNA, 20 bp, Artificial Sequence
  MKO10127067_B_Wwtr1
  gRNA
taaacttacccattgaggaa

SEQ ID NO: 127068 - DNA, 20 bp, Artificial Sequence
  MKO10127068_B_Xab2
  gRNA
actggcagtagtctaaccac

SEQ ID NO: 127069 - DNA, 20 bp, Artificial Sequence
  MKO10127069_B_Xab2
  gRNA
accgatatctgaaggcacgc

SEQ ID NO: 127070 - DNA, 20 bp, Artificial Sequence
  MKO10127070_B_Xab2
  gRNA
gctgtgcagcctcgtctagc

SEQ ID NO: 127071 - DNA, 20 bp, Artificial Sequence
  MKO10127071_B_Xaf1
  gRNA
aaatacgtatgcctcccata

SEQ ID NO: 127072 - DNA, 20 bp, Artificial Sequence
  MKO10127072_B_Xaf1
  gRNA
atccagattgctaagctgca

SEQ ID NO: 127073 - DNA, 20 bp, Artificial Sequence
  MKO10127073_B_Xaf1
  gRNA
tctccacttcatgctccacg

SEQ ID NO: 127074 - DNA, 20 bp, Artificial Sequence
  MKO10127074_B_Xbp1
  gRNA
acttgtccagaatgcccaaa

SEQ ID NO: 127075 - DNA, 20 bp, Artificial Sequence
  MKO10127075_B_Xbp1
  gRNA
ttccccagagtctgctagtc

SEQ ID NO: 127076 - DNA, 20 bp, Artificial Sequence
  MKO10127076_B_Xbp1
  gRNA
actatgtgcacctctgcagc

SEQ ID NO: 127077 - DNA, 20 bp, Artificial Sequence
  MKO10127077_B_Xcl1
  gRNA
tcgctgtgctggtggacctc

SEQ ID NO: 127078 - DNA, 20 bp, Artificial Sequence
  MKO10127078_B_Xcl1
  gRNA
gtgtgaacttacaaacccag

SEQ ID NO: 127079 - DNA, 20 bp, Artificial Sequence
  MKO10127079_B_Xcl1
  gRNA
gagtctgctgcctcacccca

SEQ ID NO: 127080 - DNA, 20 bp, Artificial Sequence
  MKO10127080_B_Xcr1
  gRNA
tgaagatgagcctgactgtt

SEQ ID NO: 127081 - DNA, 20 bp, Artificial Sequence
  MKO10127081_B_Xcr1
  gRNA
gacagagacaccgaacagtc

SEQ ID NO: 127082 - DNA, 20 bp, Artificial Sequence
  MKO10127082_B_Xcr1
  gRNA
tagaggactccatctggacg

SEQ ID NO: 127083 - DNA, 20 bp, Artificial Sequence
  MKO10127083_B_Xdh
  gRNA
gatacacgatcttgttctga

SEQ ID NO: 127084 - DNA, 20 bp, Artificial Sequence
  MKO10127084_B_Xdh
  gRNA
caagaagctgcatcctgtcc

SEQ ID NO: 127085 - DNA, 20 bp, Artificial Sequence
  MKO10127085_B_Xdh
  gRNA
tgtcacagcaacatgatgca

SEQ ID NO: 127086 - DNA, 20 bp, Artificial Sequence
  MKO10127086_B_Xiap
  gRNA
cttgccccttctcatccaat

SEQ ID NO: 127087 - DNA, 20 bp, Artificial Sequence
  MKO10127087_B_Xiap
  gRNA
cactcacaagatctgcaatc

SEQ ID NO: 127088 - DNA, 20 bp, Artificial Sequence
  MKO10127088_B_Xiap
  gRNA
agtcaaacttcattgcagaa

SEQ ID NO: 127089 - DNA, 20 bp, Artificial Sequence
  MKO10127089_B_Xirp1
  gRNA
tcgtccgtcaagtgctgcgc

SEQ ID NO: 127090 - DNA, 20 bp, Artificial Sequence
  MKO10127090_B_Xirp1
  gRNA
cgccccggtatatgctatgc

SEQ ID NO: 127091 - DNA, 20 bp, Artificial Sequence
  MKO10127091_B_Xirp1
  gRNA
tgtgtcaggtggcaacgtcc

SEQ ID NO: 127092 - DNA, 20 bp, Artificial Sequence
  MKO10127092_B_Xirp2
  gRNA
atactcagaaaaggcgttgc

SEQ ID NO: 127093 - DNA, 20 bp, Artificial Sequence
  MKO10127093_B_Xirp2
  gRNA
ttattatttcttgactgctg

SEQ ID NO: 127094 - DNA, 20 bp, Artificial Sequence
  MKO10127094_B_Xirp2
  gRNA
gcagtcaagaaataataaga

SEQ ID NO: 127095 - DNA, 20 bp, Artificial Sequence
  MKO10127095_B_Xkr4
  gRNA
tgccatccctgcattgtgcg

SEQ ID NO: 127096 - DNA, 20 bp, Artificial Sequence
  MKO10127096_B_Xkr4
  gRNA
tatccggagccggcagagtg

SEQ ID NO: 127097 - DNA, 20 bp, Artificial Sequence
  MKO10127097_B_Xkr4
  gRNA
gtacaataatgcagagctgc

SEQ ID NO: 127098 - DNA, 20 bp, Artificial Sequence
  MKO10127098_B_Xkr5
  gRNA
gaactccatactcttactac

SEQ ID NO: 127099 - DNA, 20 bp, Artificial Sequence
  MKO10127099_B_Xkr5
  gRNA
tctctacaatgtcgctctgc

SEQ ID NO: 127100 - DNA, 20 bp, Artificial Sequence
  MKO10127100_B_Xkr5
  gRNA
caggccaccataccatgcta

SEQ ID NO: 127101 - DNA, 20 bp, Artificial Sequence
  MKO10127101_B_Xkr6
  gRNA
tcgtatagtatgcgaacatt

SEQ ID NO: 127102 - DNA, 20 bp, Artificial Sequence
  MKO10127102_B_Xkr6
  gRNA
cgaagatcccgaaatacagc

SEQ ID NO: 127103 - DNA, 20 bp, Artificial Sequence
  MKO10127103_B_Xkr6
  gRNA
tgtcaacatgctgcgcctcc

SEQ ID NO: 127104 - DNA, 20 bp, Artificial Sequence
  MKO10127104_B_Xkr7
  gRNA
ggccagggttcgtgccgcaa

SEQ ID NO: 127105 - DNA, 20 bp, Artificial Sequence
  MKO10127105_B_Xkr7
  gRNA
gtacctgcgcgccctatacc

SEQ ID NO: 127106 - DNA, 20 bp, Artificial Sequence
  MKO10127106_B_Xkr7
  gRNA
gactgcagagccgctggcgc

SEQ ID NO: 127107 - DNA, 20 bp, Artificial Sequence
  MKO10127107_B_Xkr8
  gRNA
cacactggtagtattccgcc

SEQ ID NO: 127108 - DNA, 20 bp, Artificial Sequence
  MKO10127108_B_Xkr8
  gRNA
ggcgacgccacagctcacac

SEQ ID NO: 127109 - DNA, 20 bp, Artificial Sequence
  MKO10127109_B_Xkr8
  gRNA
tgacggcccggcctcgagtg

SEQ ID NO: 127110 - DNA, 20 bp, Artificial Sequence
  MKO10127110_B_Xkr9
  gRNA
cttctacttcattgcttgca

SEQ ID NO: 127111 - DNA, 20 bp, Artificial Sequence
  MKO10127111_B_Xkr9
  gRNA
tacactgacttaaatttgcc

SEQ ID NO: 127112 - DNA, 20 bp, Artificial Sequence
  MKO10127112_B_Xkr9
  gRNA
atagattataatgcccaaaa

SEQ ID NO: 127113 - DNA, 20 bp, Artificial Sequence
  MKO10127113_B_Xkrx
  gRNA
gagaaaaacttcagccgagt

SEQ ID NO: 127114 - DNA, 20 bp, Artificial Sequence
  MKO10127114_B_Xkrx
  gRNA
ggctgcgtctgctttgtaca

SEQ ID NO: 127115 - DNA, 20 bp, Artificial Sequence
  MKO10127115_B_Xkrx
  gRNA
taaagcgtgggttaggcccc

SEQ ID NO: 127116 - DNA, 20 bp, Artificial Sequence
  MKO10127116_B_Xk
  gRNA
tgccacccgagtcatcgtcc

SEQ ID NO: 127117 - DNA, 20 bp, Artificial Sequence
  MKO10127117_B_Xk
  gRNA
taatcagcttgccttctgcc

SEQ ID NO: 127118 - DNA, 20 bp, Artificial Sequence
  MKO10127118_B_Xk
  gRNA
ctttctccacctcctctgaa

SEQ ID NO: 127119 - DNA, 20 bp, Artificial Sequence
  MKO10127119_B_Xlr3a
  gRNA
tctttgcaggaaggaaaaac

SEQ ID NO: 127120 - DNA, 20 bp, Artificial Sequence
  MKO10127120_B_Xlr3a
  gRNA
agaacataccttcgaattct

SEQ ID NO: 127121 - DNA, 20 bp, Artificial Sequence
  MKO10127121_B_Xlr3a
  gRNA
gccacctaacaaagttcttc

SEQ ID NO: 127122 - DNA, 20 bp, Artificial Sequence
  MKO10127122_B_Xlr3b
  gRNA
tctttgcaggaaggaaaaac

SEQ ID NO: 127123 - DNA, 20 bp, Artificial Sequence
  MKO10127123_B_Xlr3b
  gRNA
aaccctacctctcttcacag

SEQ ID NO: 127124 - DNA, 20 bp, Artificial Sequence
  MKO10127124_B_Xlr3b
  gRNA
gccacctaacaaagttcttc

SEQ ID NO: 127125 - DNA, 20 bp, Artificial Sequence
  MKO10127125_B_Xlr3c
  gRNA
ctgttgcctctctgttcctg

SEQ ID NO: 127126 - DNA, 20 bp, Artificial Sequence
  MKO10127126_B_Xlr3c
  gRNA
tctttgcaggaaggaaaaac

SEQ ID NO: 127127 - DNA, 20 bp, Artificial Sequence
  MKO10127127_B_Xlr3c
  gRNA
agaacataccttcgaattct

SEQ ID NO: 127128 - DNA, 20 bp, Artificial Sequence
  MKO10127128_B_Xlr4a
  gRNA
agtcttaccttcgctcatgc

SEQ ID NO: 127129 - DNA, 20 bp, Artificial Sequence
  MKO10127129_B_Xlr4a
  gRNA
ctacaggcaggaactttata

SEQ ID NO: 127130 - DNA, 20 bp, Artificial Sequence
  MKO10127130_B_Xlr4a
  gRNA
ttccagcctgtttcttgatt

SEQ ID NO: 127131 - DNA, 20 bp, Artificial Sequence
  MKO10127131_B_Xlr4b
  gRNA
gtaagaaaactctaaatgaa

SEQ ID NO: 127132 - DNA, 20 bp, Artificial Sequence
  MKO10127132_B_Xlr4b
  gRNA
ttccagcctgtttcttgatt

SEQ ID NO: 127133 - DNA, 20 bp, Artificial Sequence
  MKO10127133_B_Xlr4b
  gRNA
ctacaggcaggaactttata

SEQ ID NO: 127134 - DNA, 20 bp, Artificial Sequence
  MKO10127134_B_Xlr4c
  gRNA
agtcttaccttcgctcatgc

SEQ ID NO: 127135 - DNA, 20 bp, Artificial Sequence
  MKO10127135_B_Xlr4c
  gRNA
ctacaggcaggaactttata

SEQ ID NO: 127136 - DNA, 20 bp, Artificial Sequence
  MKO10127136_B_Xlr4c
  gRNA
ttccagcctgtttcttgatt

SEQ ID NO: 127137 - DNA, 20 bp, Artificial Sequence
  MKO10127137_B_Xlr5a
  gRNA
tcctgcatcttcttctgaac

SEQ ID NO: 127138 - DNA, 20 bp, Artificial Sequence
  MKO10127138_B_Xlr5a
  gRNA
cacacaggtgatgatggtac

SEQ ID NO: 127139 - DNA, 20 bp, Artificial Sequence
  MKO10127139_B_Xlr5a
  gRNA
gctgagctttcaaaatgctc

SEQ ID NO: 127140 - DNA, 20 bp, Artificial Sequence
  MKO10127140_B_Xlr5b
  gRNA
gcctgttcagaagaagatgc

SEQ ID NO: 127141 - DNA, 20 bp, Artificial Sequence
  MKO10127141_B_Xlr5b
  gRNA
gctgagctttcaaaatgctc

SEQ ID NO: 127142 - DNA, 20 bp, Artificial Sequence
  MKO10127142_B_Xlr5b
  gRNA
cacacaggtgatgatggtac

SEQ ID NO: 127143 - DNA, 20 bp, Artificial Sequence
  MKO10127143_B_Xlr5c
  gRNA
tcctgcatcttcttctgaac

SEQ ID NO: 127144 - DNA, 20 bp, Artificial Sequence
  MKO10127144_B_Xlr5c
  gRNA
cacacaggtgatgatggtac

SEQ ID NO: 127145 - DNA, 20 bp, Artificial Sequence
  MKO10127145_B_Xlr5c
  gRNA
gctgagctttcaaaatgctc

SEQ ID NO: 127146 - DNA, 20 bp, Artificial Sequence
  MKO10127146_B_Xlr
  gRNA
atctccagtacaaaatattc

SEQ ID NO: 127147 - DNA, 20 bp, Artificial Sequence
  MKO10127147_B_Xlr
  gRNA
atataggtgacattaacaag

SEQ ID NO: 127148 - DNA, 20 bp, Artificial Sequence
  MKO10127148_B_Xlr
  gRNA
tacatttcagaagtttgata

SEQ ID NO: 127149 - DNA, 20 bp, Artificial Sequence
  MKO10127149_B_Xndr-trpc2
  gRNA
gtcagtgcgggacattagca

SEQ ID NO: 127150 - DNA, 20 bp, Artificial Sequence
  MKO10127150_B_Xndr-trpc2
  gRNA
aagaatgtcctccggataga

SEQ ID NO: 127151 - DNA, 20 bp, Artificial Sequence
  MKO10127151_B_Xndr-trpc2
  gRNA
cccataagctatattgatgt

SEQ ID NO: 127152 - DNA, 20 bp, Artificial Sequence
  MKO10127152_B_Xndr
  gRNA
aaacatcaacagtaccaccg

SEQ ID NO: 127153 - DNA, 20 bp, Artificial Sequence
  MKO10127153_B_Xndr
  gRNA
gcgtgtcttcctcgcactta

SEQ ID NO: 127154 - DNA, 20 bp, Artificial Sequence
  MKO10127154_B_Xndr
  gRNA
gtcagtgcgggacattagca

SEQ ID NO: 127155 - DNA, 20 bp, Artificial Sequence
  MKO10127155_B_Xpa
  gRNA
cccaaaatgattgacaccaa

SEQ ID NO: 127156 - DNA, 20 bp, Artificial Sequence
  MKO10127156_B_Xpa
  gRNA
tcatatcgccccactgtgaa

SEQ ID NO: 127157 - DNA, 20 bp, Artificial Sequence
  MKO10127157_B_Xpa
  gRNA
tcttgaagtgtggggtagcc

SEQ ID NO: 127158 - DNA, 20 bp, Artificial Sequence
  MKO10127158_B_Xpc
  gRNA
agagcttactgaacctgtgc

SEQ ID NO: 127159 - DNA, 20 bp, Artificial Sequence
  MKO10127159_B_Xpc
  gRNA
tcaatctccaccgccttcac

SEQ ID NO: 127160 - DNA, 20 bp, Artificial Sequence
  MKO10127160_B_Xpc
  gRNA
atgagaagcagaaaccccga

SEQ ID NO: 127161 - DNA, 20 bp, Artificial Sequence
  MKO10127161_B_Xpnpep1
  gRNA
tatgaggaactccgaatacg

SEQ ID NO: 127162 - DNA, 20 bp, Artificial Sequence
  MKO10127162_B_Xpnpep1
  gRNA
gatgggttctgccacgtatt

SEQ ID NO: 127163 - DNA, 20 bp, Artificial Sequence
  MKO10127163_B_Xpnpep1
  gRNA
cgcatgctcctccgtgatga

SEQ ID NO: 127164 - DNA, 20 bp, Artificial Sequence
  MKO10127164_B_Xpnpep2
  gRNA
ctgccgtcaatacaacaatg

SEQ ID NO: 127165 - DNA, 20 bp, Artificial Sequence
  MKO10127165_B_Xpnpep2
  gRNA
tacccagagcccaagtacct

SEQ ID NO: 127166 - DNA, 20 bp, Artificial Sequence
  MKO10127166_B_Xpnpep2
  gRNA
aacctgataagaggcgagag

SEQ ID NO: 127167 - DNA, 20 bp, Artificial Sequence
  MKO10127167_B_Xpnpep3
  gRNA
ccatcccacaattctcggcc

SEQ ID NO: 127168 - DNA, 20 bp, Artificial Sequence
  MKO10127168_B_Xpnpep3
  gRNA
gcatgtcatgtttacagcga

SEQ ID NO: 127169 - DNA, 20 bp, Artificial Sequence
  MKO10127169_B_Xpnpep3
  gRNA
tgtggatgtgtaaccgggct

SEQ ID NO: 127170 - DNA, 20 bp, Artificial Sequence
  MKO10127170_B_Xpo1
  gRNA
gtactatggactacagattt

SEQ ID NO: 127171 - DNA, 20 bp, Artificial Sequence
  MKO10127171_B_Xpo1
  gRNA
cttccaaggaaccagtgtga

SEQ ID NO: 127172 - DNA, 20 bp, Artificial Sequence
  MKO10127172_B_Xpo1
  gRNA
agaagtactgacacatttaa

SEQ ID NO: 127173 - DNA, 20 bp, Artificial Sequence
  MKO10127173_B_Xpo4
  gRNA
taactgcaagcgagtctttc

SEQ ID NO: 127174 - DNA, 20 bp, Artificial Sequence
  MKO10127174_B_Xpo4
  gRNA
agactcgcttgcagttaccg

SEQ ID NO: 127175 - DNA, 20 bp, Artificial Sequence
  MKO10127175_B_Xpo4
  gRNA
tctgttcccgaacatacttt

SEQ ID NO: 127176 - DNA, 20 bp, Artificial Sequence
  MKO10127176_B_Xpo5
  gRNA
gcaaacattgacgcagaaca

SEQ ID NO: 127177 - DNA, 20 bp, Artificial Sequence
  MKO10127177_B_Xpo5
  gRNA
aaggccaaaatgtctgacga

SEQ ID NO: 127178 - DNA, 20 bp, Artificial Sequence
  MKO10127178_B_Xpo5
  gRNA
attgccatcgtcagacattt

SEQ ID NO: 127179 - DNA, 20 bp, Artificial Sequence
  MKO10127179_B_Xpo6
  gRNA
cctccttccgagccacgctg

SEQ ID NO: 127180 - DNA, 20 bp, Artificial Sequence
  MKO10127180_B_Xpo6
  gRNA
catcagaagaagcctccctc

SEQ ID NO: 127181 - DNA, 20 bp, Artificial Sequence
  MKO10127181_B_Xpo6
  gRNA
agtttattccgaataaagta

SEQ ID NO: 127182 - DNA, 20 bp, Artificial Sequence
  MKO10127182_B_Xpo7
  gRNA
gccttaccaagctcgtgtct

SEQ ID NO: 127183 - DNA, 20 bp, Artificial Sequence
  MKO10127183_B_Xpo7
  gRNA
tacgtacacttcctctctcg

SEQ ID NO: 127184 - DNA, 20 bp, Artificial Sequence
  MKO10127184_B_Xpo7
  gRNA
gtcacgaaagttgccaactt

SEQ ID NO: 127185 - DNA, 20 bp, Artificial Sequence
  MKO10127185_B_Xpot
  gRNA
gatgattgtggattctgctg

SEQ ID NO: 127186 - DNA, 20 bp, Artificial Sequence
  MKO10127186_B_Xpot
  gRNA
taacttgatgctctagtact

SEQ ID NO: 127187 - DNA, 20 bp, Artificial Sequence
  MKO10127187_B_Xpot
  gRNA
ctgctcagcagcagctcatc

SEQ ID NO: 127188 - DNA, 20 bp, Artificial Sequence
  MKO10127188_B_Xpr1
  gRNA
ctgctccacgagatgtttcc

SEQ ID NO: 127189 - DNA, 20 bp, Artificial Sequence
  MKO10127189_B_Xpr1
  gRNA
aaacatctcgtggagcagat

SEQ ID NO: 127190 - DNA, 20 bp, Artificial Sequence
  MKO10127190_B_Xpr1
  gRNA
ctcaacttaccttcaactga

SEQ ID NO: 127191 - DNA, 20 bp, Artificial Sequence
  MKO10127191_B_Xrcc1
  gRNA
tgagccacttcggctctcag

SEQ ID NO: 127192 - DNA, 20 bp, Artificial Sequence
  MKO10127192_B_Xrcc1
  gRNA
ctgttccaggactcgccata

SEQ ID NO: 127193 - DNA, 20 bp, Artificial Sequence
  MKO10127193_B_Xrcc1
  gRNA
gtgctagtgggcagctcggc

SEQ ID NO: 127194 - DNA, 20 bp, Artificial Sequence
  MKO10127194_B_Xrcc2
  gRNA
acgagcttctgccttcaagt

SEQ ID NO: 127195 - DNA, 20 bp, Artificial Sequence
  MKO10127195_B_Xrcc2
  gRNA
gtgaatcttcatcagcaaac

SEQ ID NO: 127196 - DNA, 20 bp, Artificial Sequence
  MKO10127196_B_Xrcc2
  gRNA
actcagtgacaagccgctct

SEQ ID NO: 127197 - DNA, 20 bp, Artificial Sequence
  MKO10127197_B_Xrcc3
  gRNA
ccggtgagccgctgcaagtc

SEQ ID NO: 127198 - DNA, 20 bp, Artificial Sequence
  MKO10127198_B_Xrcc3
  gRNA
gagcaggagcttcgccctga

SEQ ID NO: 127199 - DNA, 20 bp, Artificial Sequence
  MKO10127199_B_Xrcc3
  gRNA
ccgcgtgttcaatgaagatg

SEQ ID NO: 127200 - DNA, 20 bp, Artificial Sequence
  MKO10127200_B_Xrcc4
  gRNA
gctaaatgaagtccagcagc

SEQ ID NO: 127201 - DNA, 20 bp, Artificial Sequence
  MKO10127201_B_Xrcc4
  gRNA
aggatgctacctttcaggtt

SEQ ID NO: 127202 - DNA, 20 bp, Artificial Sequence
  MKO10127202_B_Xrcc4
  gRNA
gaacatcattccagtctctc

SEQ ID NO: 127203 - DNA, 20 bp, Artificial Sequence
  MKO10127203_B_Xrcc5
  gRNA
ggcactgataatgcccttgc

SEQ ID NO: 127204 - DNA, 20 bp, Artificial Sequence
  MKO10127204_B_Xrcc5
  gRNA
cctcagcagcccgttcagcc

SEQ ID NO: 127205 - DNA, 20 bp, Artificial Sequence
  MKO10127205_B_Xrcc5
  gRNA
aaaggatacagtcggcttgc

SEQ ID NO: 127206 - DNA, 20 bp, Artificial Sequence
  MKO10127206_B_Xrcc6bp1
  gRNA
ttcccgtgggccggcggctc

SEQ ID NO: 127207 - DNA, 20 bp, Artificial Sequence
  MKO10127207_B_Xrcc6bp1
  gRNA
gagtcgggtcgctgcagcag

SEQ ID NO: 127208 - DNA, 20 bp, Artificial Sequence
  MKO10127208_B_Xrcc6bp1
  gRNA
gtttccatcgcagacttcgc

SEQ ID NO: 127209 - DNA, 20 bp, Artificial Sequence
  MKO10127209_B_Xrcc6
  gRNA
tggctcgaaccttccttagc

SEQ ID NO: 127210 - DNA, 20 bp, Artificial Sequence
  MKO10127210_B_Xrcc6
  gRNA
ctgagattcgaacatagccc

SEQ ID NO: 127211 - DNA, 20 bp, Artificial Sequence
  MKO10127211_B_Xrcc6
  gRNA
atcgctgcttatgatcttac

SEQ ID NO: 127212 - DNA, 20 bp, Artificial Sequence
  MKO10127212_B_Xrn1
  gRNA
tgtttcgaattattaaacct

SEQ ID NO: 127213 - DNA, 20 bp, Artificial Sequence
  MKO10127213_B_Xrn1
  gRNA
cttcagatgttcatgcaatc

SEQ ID NO: 127214 - DNA, 20 bp, Artificial Sequence
  MKO10127214_B_Xrn1
  gRNA
accttgccatgatttgtctg

SEQ ID NO: 127215 - DNA, 20 bp, Artificial Sequence
  MKO10127215_B_Xrn2
  gRNA
taaacctaatccaaatgatg

SEQ ID NO: 127216 - DNA, 20 bp, Artificial Sequence
  MKO10127216_B_Xrn2
  gRNA
accaagaagacttctctaca

SEQ ID NO: 127217 - DNA, 20 bp, Artificial Sequence
  MKO10127217_B_Xrn2
  gRNA
tgagaagcagcgagtcagag

SEQ ID NO: 127218 - DNA, 20 bp, Artificial Sequence
  MKO10127218_B_Xrra1
  gRNA
tgcgttcaatggcatcaaga

SEQ ID NO: 127219 - DNA, 20 bp, Artificial Sequence
  MKO10127219_B_Xrra1
  gRNA
tctgaaaacctgctacctct

SEQ ID NO: 127220 - DNA, 20 bp, Artificial Sequence
  MKO10127220_B_Xrra1
  gRNA
agctgaagcaccactctgcc

SEQ ID NO: 127221 - DNA, 20 bp, Artificial Sequence
  MKO10127221_B_Xxylt1
  gRNA
ggccacgtcaagatctacca

SEQ ID NO: 127222 - DNA, 20 bp, Artificial Sequence
  MKO10127222_B_Xxylt1
  gRNA
ggttacctttgggcatgatc

SEQ ID NO: 127223 - DNA, 20 bp, Artificial Sequence
  MKO10127223_B_Xxylt1
  gRNA
gatcccgaggatcatccagc

SEQ ID NO: 127224 - DNA, 20 bp, Artificial Sequence
  MKO10127224_B_Xylb
  gRNA
gagctggtgacaagcttgac

SEQ ID NO: 127225 - DNA, 20 bp, Artificial Sequence
  MKO10127225_B_Xylb
  gRNA
tcacctctccggtcctgatg

SEQ ID NO: 127226 - DNA, 20 bp, Artificial Sequence
  MKO10127226_B_Xylb
  gRNA
aacctggcctgctccagata

SEQ ID NO: 127227 - DNA, 20 bp, Artificial Sequence
  MKO10127227_B_Xylt1
  gRNA
agcgttccaattacctgcat

SEQ ID NO: 127228 - DNA, 20 bp, Artificial Sequence
  MKO10127228_B_Xylt1
  gRNA
catgcgctgtagctgtcgag

SEQ ID NO: 127229 - DNA, 20 bp, Artificial Sequence
  MKO10127229_B_Xylt1
  gRNA
agtcagaatcgcctttgtcc

SEQ ID NO: 127230 - DNA, 20 bp, Artificial Sequence
  MKO10127230_B_Xylt2
  gRNA
ccttcagaagacgcttcagc

SEQ ID NO: 127231 - DNA, 20 bp, Artificial Sequence
  MKO10127231_B_Xylt2
  gRNA
ggttactgcccgcaccacct

SEQ ID NO: 127232 - DNA, 20 bp, Artificial Sequence
  MKO10127232_B_Xylt2
  gRNA
cgtactggagggccaccaac

SEQ ID NO: 127233 - DNA, 20 bp, Artificial Sequence
  MKO10127233_B_Yae1d1
  gRNA
gaacgcgagccctggagacc

SEQ ID NO: 127234 - DNA, 20 bp, Artificial Sequence
  MKO10127234_B_Yae1d1
  gRNA
attacctcagtgttcctcta

SEQ ID NO: 127235 - DNA, 20 bp, Artificial Sequence
  MKO10127235_B_Yae1d1
  gRNA
gcaaagcacttactcttcaa

SEQ ID NO: 127236 - DNA, 20 bp, Artificial Sequence
  MKO10127236_B_Yaf2
  gRNA
agtgcatgatgtgcgatgtg

SEQ ID NO: 127237 - DNA, 20 bp, Artificial Sequence
  MKO10127237_B_Yaf2
  gRNA
tgacctgctgtgcgaccagc

SEQ ID NO: 127238 - DNA, 20 bp, Artificial Sequence
  MKO10127238_B_Yaf2
  gRNA
gccacgccctgtctcccagc

SEQ ID NO: 127239 - DNA, 20 bp, Artificial Sequence
  MKO10127239_B_Yap1
  gRNA
cgcagtacctgcatcagtac

SEQ ID NO: 127240 - DNA, 20 bp, Artificial Sequence
  MKO10127240_B_Yap1
  gRNA
aacgttcagttgcgaaagca

SEQ ID NO: 127241 - DNA, 20 bp, Artificial Sequence
  MKO10127241_B_Yap1
  gRNA
gatgatgtaccactgccagc

SEQ ID NO: 127242 - DNA, 20 bp, Artificial Sequence
  MKO10127242_B_Yars2
  gRNA
cctctaattacaagtacaac

SEQ ID NO: 127243 - DNA, 20 bp, Artificial Sequence
  MKO10127243_B_Yars2
  gRNA
agcaagatgattccgtagaa

SEQ ID NO: 127244 - DNA, 20 bp, Artificial Sequence
  MKO10127244_B_Yars2
  gRNA
ccagtgcctctatgctgcta

SEQ ID NO: 127245 - DNA, 20 bp, Artificial Sequence
  MKO10127245_B_Yars
  gRNA
aacctcagcccccgctttct

SEQ ID NO: 127246 - DNA, 20 bp, Artificial Sequence
  MKO10127246_B_Yars
  gRNA
cttcaaaaagtcagcgatct

SEQ ID NO: 127247 - DNA, 20 bp, Artificial Sequence
  MKO10127247_B_Yars
  gRNA
tcgaagttctagaagctccc

SEQ ID NO: 127248 - DNA, 20 bp, Artificial Sequence
  MKO10127248_B_Ybey
  gRNA
cccacagctccaaagccgag

SEQ ID NO: 127249 - DNA, 20 bp, Artificial Sequence
  MKO10127249_B_Ybey
  gRNA
aaatccatcttcctgcgaag

SEQ ID NO: 127250 - DNA, 20 bp, Artificial Sequence
  MKO10127250_B_Ybey
  gRNA
tcagaagagtgccacttcgc

SEQ ID NO: 127251 - DNA, 20 bp, Artificial Sequence
  MKO10127251_B_Ybx1
  gRNA
ccataaagaagaataacccc

SEQ ID NO: 127252 - DNA, 20 bp, Artificial Sequence
  MKO10127252_B_Ybx1
  gRNA
acggatacggtttcatcaac

SEQ ID NO: 127253 - DNA, 20 bp, Artificial Sequence
  MKO10127253_B_Ybx1
  gRNA
gtgtacaaatacgtcttcct

SEQ ID NO: 127254 - DNA, 20 bp, Artificial Sequence
  MKO10127254_B_Ybx2
  gRNA
atggttacggattcatcaac

SEQ ID NO: 127255 - DNA, 20 bp, Artificial Sequence
  MKO10127255_B_Ybx2
  gRNA
gactgtggagtttgatgtcg

SEQ ID NO: 127256 - DNA, 20 bp, Artificial Sequence
  MKO10127256_B_Ybx2
  gRNA
ctattaagagaaacaacccc

SEQ ID NO: 127257 - DNA, 20 bp, Artificial Sequence
  MKO10127257_B_Ybx3
  gRNA
acactgcgcagatacttgcg

SEQ ID NO: 127258 - DNA, 20 bp, Artificial Sequence
  MKO10127258_B_Ybx3
  gRNA
aaatggttcaacgtcagaaa

SEQ ID NO: 127259 - DNA, 20 bp, Artificial Sequence
  MKO10127259_B_Ybx3
  gRNA
agaagatgtgtttgtacacc

SEQ ID NO: 127260 - DNA, 20 bp, Artificial Sequence
  MKO10127260_B_Ydjc
  gRNA
gggcaggtcccccacgcacg

SEQ ID NO: 127261 - DNA, 20 bp, Artificial Sequence
  MKO10127261_B_Ydjc
  gRNA
tatgccggccacaagtgctc

SEQ ID NO: 127262 - DNA, 20 bp, Artificial Sequence
  MKO10127262_B_Ydjc
  gRNA
aagctcaactcagccgcttc

SEQ ID NO: 127263 - DNA, 20 bp, Artificial Sequence
  MKO10127263_B_Yeats2
  gRNA
caggacacgtctagtatcag

SEQ ID NO: 127264 - DNA, 20 bp, Artificial Sequence
  MKO10127264_B_Yeats2
  gRNA
attaaagacatttgatccga

SEQ ID NO: 127265 - DNA, 20 bp, Artificial Sequence
  MKO10127265_B_Yeats2
  gRNA
tttagcgactgattgaagcc

SEQ ID NO: 127266 - DNA, 20 bp, Artificial Sequence
  MKO10127266_B_Yeats4
  gRNA
ttcagagttctatgacgaaa

SEQ ID NO: 127267 - DNA, 20 bp, Artificial Sequence
  MKO10127267_B_Yeats4
  gRNA
agctttcgtgtaatttaaac

SEQ ID NO: 127268 - DNA, 20 bp, Artificial Sequence
  MKO10127268_B_Yeats4
  gRNA
tttaaattacacgaaagcta

SEQ ID NO: 127269 - DNA, 20 bp, Artificial Sequence
  MKO10127269_B_Yes1
  gRNA
actccctctcaatccgtgat

SEQ ID NO: 127270 - DNA, 20 bp, Artificial Sequence
  MKO10127270_B_Yes1
  gRNA
gaagcaagatcaattgctac

SEQ ID NO: 127271 - DNA, 20 bp, Artificial Sequence
  MKO10127271_B_Yes1
  gRNA
aaaatacctcgctgattccc

SEQ ID NO: 127272 - DNA, 20 bp, Artificial Sequence
  MKO10127272_B_Yif1a
  gRNA
ggggcattgagatctttccg

SEQ ID NO: 127273 - DNA, 20 bp, Artificial Sequence
  MKO10127273_B_Yif1a
  gRNA
cttcatcacatacgtgctgc

SEQ ID NO: 127274 - DNA, 20 bp, Artificial Sequence
  MKO10127274_B_Yif1a
  gRNA
gcctatgtcgctaagaagct

SEQ ID NO: 127275 - DNA, 20 bp, Artificial Sequence
  MKO10127275_B_Yif1b
  gRNA
cgcagccggggcgtccccgc

SEQ ID NO: 127276 - DNA, 20 bp, Artificial Sequence
  MKO10127276_B_Yif1b
  gRNA
ctggagcattgatgtcgaag

SEQ ID NO: 127277 - DNA, 20 bp, Artificial Sequence
  MKO10127277_B_Yif1b
  gRNA
gctcaagtattactttgcag

SEQ ID NO: 127278 - DNA, 20 bp, Artificial Sequence
  MKO10127278_B_Yipf1
  gRNA
aaggttcccactaattgcta

SEQ ID NO: 127279 - DNA, 20 bp, Artificial Sequence
  MKO10127279_B_Yipf1
  gRNA
atagtattcgaatgtccaga

SEQ ID NO: 127280 - DNA, 20 bp, Artificial Sequence
  MKO10127280_B_Yipf1
  gRNA
cagcacataccatagagatc

SEQ ID NO: 127281 - DNA, 20 bp, Artificial Sequence
  MKO10127281_B_Yipf2
  gRNA
tggctagtagtagctgcatc

SEQ ID NO: 127282 - DNA, 20 bp, Artificial Sequence
  MKO10127282_B_Yipf2
  gRNA
gtggttgtgggttcaggcat

SEQ ID NO: 127283 - DNA, 20 bp, Artificial Sequence
  MKO10127283_B_Yipf2
  gRNA
agttactggcaatctcactt

SEQ ID NO: 127284 - DNA, 20 bp, Artificial Sequence
  MKO10127284_B_Yipf3
  gRNA
gtgagctgcaccagcgcctg

SEQ ID NO: 127285 - DNA, 20 bp, Artificial Sequence
  MKO10127285_B_Yipf3
  gRNA
gggaagttgaccatcttgat

SEQ ID NO: 127286 - DNA, 20 bp, Artificial Sequence
  MKO10127286_B_Yipf3
  gRNA
agcctgcccaggtccgaagc

SEQ ID NO: 127287 - DNA, 20 bp, Artificial Sequence
  MKO10127287_B_Yipf4
  gRNA
gatccaaccaccaaaagtat

SEQ ID NO: 127288 - DNA, 20 bp, Artificial Sequence
  MKO10127288_B_Yipf4
  gRNA
ccagatgtcaaattaaacct

SEQ ID NO: 127289 - DNA, 20 bp, Artificial Sequence
  MKO10127289_B_Yipf4
  gRNA
tgtaatagcccctatacttt

SEQ ID NO: 127290 - DNA, 20 bp, Artificial Sequence
  MKO10127290_B_Yipf5
  gRNA
acaacacctcagccattcta

SEQ ID NO: 127291 - DNA, 20 bp, Artificial Sequence
  MKO10127291_B_Yipf5
  gRNA
taggctggcaaaatccagtt

SEQ ID NO: 127292 - DNA, 20 bp, Artificial Sequence
  MKO10127292_B_Yipf5
  gRNA
taacggtgctacaccccctg

SEQ ID NO: 127293 - DNA, 20 bp, Artificial Sequence
  MKO10127293_B_Yipf6
  gRNA
catgtttccgccaagaagtt

SEQ ID NO: 127294 - DNA, 20 bp, Artificial Sequence
  MKO10127294_B_Yipf6
  gRNA
gatgcgagatctaaaagctg

SEQ ID NO: 127295 - DNA, 20 bp, Artificial Sequence
  MKO10127295_B_Yipf6
  gRNA
tctcattgtaggggacctgt

SEQ ID NO: 127296 - DNA, 20 bp, Artificial Sequence
  MKO10127296_B_Yipf7
  gRNA
gttgctcatcaagttcagta

SEQ ID NO: 127297 - DNA, 20 bp, Artificial Sequence
  MKO10127297_B_Yipf7
  gRNA
gtctttagaaaacggtcaga

SEQ ID NO: 127298 - DNA, 20 bp, Artificial Sequence
  MKO10127298_B_Yipf7
  gRNA
ctctcctacaggggtaccat

SEQ ID NO: 127299 - DNA, 20 bp, Artificial Sequence
  MKO10127299_B_Ykt6
  gRNA
ctttacaagtcaactgattg

SEQ ID NO: 127300 - DNA, 20 bp, Artificial Sequence
  MKO10127300_B_Ykt6
  gRNA
atctttgccatgtctacgtc

SEQ ID NO: 127301 - DNA, 20 bp, Artificial Sequence
  MKO10127301_B_Ykt6
  gRNA
cctgcttaccagaatgattt

SEQ ID NO: 127302 - DNA, 20 bp, Artificial Sequence
  MKO10127302_B_Ylpm1
  gRNA
ggcatcccttgtggagctcc

SEQ ID NO: 127303 - DNA, 20 bp, Artificial Sequence
  MKO10127303_B_Ylpm1
  gRNA
ccccggagcttcttctttga

SEQ ID NO: 127304 - DNA, 20 bp, Artificial Sequence
  MKO10127304_B_Ylpm1
  gRNA
atgattacctggggttcctc

SEQ ID NO: 127305 - DNA, 20 bp, Artificial Sequence
  MKO10127305_B_Yme1l1
  gRNA
atgttgcctgtacaagctag

SEQ ID NO: 127306 - DNA, 20 bp, Artificial Sequence
  MKO10127306_B_Yme1l1
  gRNA
gtgattaccttcacaaatga

SEQ ID NO: 127307 - DNA, 20 bp, Artificial Sequence
  MKO10127307_B_Yme1l1
  gRNA
gcatgaagctcccagtagtg

SEQ ID NO: 127308 - DNA, 20 bp, Artificial Sequence
  MKO10127308_B_Yod1
  gRNA
ttccacgacatagtacacac

SEQ ID NO: 127309 - DNA, 20 bp, Artificial Sequence
  MKO10127309_B_Yod1
  gRNA
tgccggtgatagcggcgatt

SEQ ID NO: 127310 - DNA, 20 bp, Artificial Sequence
  MKO10127310_B_Yod1
  gRNA
acccgccacatagtgtcggc

SEQ ID NO: 127311 - DNA, 20 bp, Artificial Sequence
  MKO10127311_B_Ypel1
  gRNA
ggagataagctcatcgtgat

SEQ ID NO: 127312 - DNA, 20 bp, Artificial Sequence
  MKO10127312_B_Ypel1
  gRNA
tcgcccctggcttccctgaa

SEQ ID NO: 127313 - DNA, 20 bp, Artificial Sequence
  MKO10127313_B_Ypel1
  gRNA
gtatttctgactgctctcaa

SEQ ID NO: 127314 - DNA, 20 bp, Artificial Sequence
  MKO10127314_B_Ypel2
  gRNA
ctttggcacagagttaatgt

SEQ ID NO: 127315 - DNA, 20 bp, Artificial Sequence
  MKO10127315_B_Ypel2
  gRNA
tgaattagcacacatgatca

SEQ ID NO: 127316 - DNA, 20 bp, Artificial Sequence
  MKO10127316_B_Ypel2
  gRNA
acactcacactgagttgaag

SEQ ID NO: 127317 - DNA, 20 bp, Artificial Sequence
  MKO10127317_B_Ypel3
  gRNA
tgtccccacagagtgaatgt

SEQ ID NO: 127318 - DNA, 20 bp, Artificial Sequence
  MKO10127318_B_Ypel3
  gRNA
ccagtccttccagggcagtc

SEQ ID NO: 127319 - DNA, 20 bp, Artificial Sequence
  MKO10127319_B_Ypel3
  gRNA
tgagaactgcaagaccactt

SEQ ID NO: 127320 - DNA, 20 bp, Artificial Sequence
  MKO10127320_B_Ypel4
  gRNA
agtggacgcaactgtaagtg

SEQ ID NO: 127321 - DNA, 20 bp, Artificial Sequence
  MKO10127321_B_Ypel4
  gRNA
cgtccactgtcgagcacact

SEQ ID NO: 127322 - DNA, 20 bp, Artificial Sequence
  MKO10127322_B_Ypel4
  gRNA
aaagacaacggctgggattg

SEQ ID NO: 127323 - DNA, 20 bp, Artificial Sequence
  MKO10127323_B_Ypel5
  gRNA
gctcagaactcatctctact

SEQ ID NO: 127324 - DNA, 20 bp, Artificial Sequence
  MKO10127324_B_Ypel5
  gRNA
gcactagttcgagagagtga

SEQ ID NO: 127325 - DNA, 20 bp, Artificial Sequence
  MKO10127325_B_Ypel5
  gRNA
agctcacatctcgaaccatg

SEQ ID NO: 127326 - DNA, 20 bp, Artificial Sequence
  MKO10127326_B_Yrdc
  gRNA
tcctgaccatgccttcatgc

SEQ ID NO: 127327 - DNA, 20 bp, Artificial Sequence
  MKO10127327_B_Yrdc
  gRNA
ttggcactagtgagtgcaag

SEQ ID NO: 127328 - DNA, 20 bp, Artificial Sequence
  MKO10127328_B_Yrdc
  gRNA
tcttgactcacacgagtaaa

SEQ ID NO: 127329 - DNA, 20 bp, Artificial Sequence
  MKO10127329_B_Ythdc1
  gRNA
cccattgtctttgatagaag

SEQ ID NO: 127330 - DNA, 20 bp, Artificial Sequence
  MKO10127330_B_Ythdc1
  gRNA
gggcaacaacactgagaatg

SEQ ID NO: 127331 - DNA, 20 bp, Artificial Sequence
  MKO10127331_B_Ythdc1
  gRNA
ttgcttacagatgagcttag

SEQ ID NO: 127332 - DNA, 20 bp, Artificial Sequence
  MKO10127332_B_Ythdc2
  gRNA
caccgactaagtcaatctct

SEQ ID NO: 127333 - DNA, 20 bp, Artificial Sequence
  MKO10127333_B_Ythdc2
  gRNA
gagttcagtacgttctttat

SEQ ID NO: 127334 - DNA, 20 bp, Artificial Sequence
  MKO10127334_B_Ythdc2
  gRNA
cgcttgtcttgctcatttct

SEQ ID NO: 127335 - DNA, 20 bp, Artificial Sequence
  MKO10127335_B_Ythdf1
  gRNA
gactttgagccctacctttc

SEQ ID NO: 127336 - DNA, 20 bp, Artificial Sequence
  MKO10127336_B_Ythdf1
  gRNA
acaaaaggacaagataataa

SEQ ID NO: 127337 - DNA, 20 bp, Artificial Sequence
  MKO10127337_B_Ythdf1
  gRNA
ggcagtgcacccccaactat

SEQ ID NO: 127338 - DNA, 20 bp, Artificial Sequence
  MKO10127338_B_Ythdf2
  gRNA
gccgcctatcgttccatgaa

SEQ ID NO: 127339 - DNA, 20 bp, Artificial Sequence
  MKO10127339_B_Ythdf2
  gRNA
tcgcagagaccaaaaggtca

SEQ ID NO: 127340 - DNA, 20 bp, Artificial Sequence
  MKO10127340_B_Ythdf2
  gRNA
ctactcaccggccttgcctg

SEQ ID NO: 127341 - DNA, 20 bp, Artificial Sequence
  MKO10127341_B_Ythdf3
  gRNA
aagaatgtcagccactagcg

SEQ ID NO: 127342 - DNA, 20 bp, Artificial Sequence
  MKO10127342_B_Ythdf3
  gRNA
cttaagtagccagacaaatc

SEQ ID NO: 127343 - DNA, 20 bp, Artificial Sequence
  MKO10127343_B_Ythdf3
  gRNA
tcttgcttcagagacctaaa

SEQ ID NO: 127344 - DNA, 20 bp, Artificial Sequence
  MKO10127344_B_Ywhab
  gRNA
ctttgtaagactcttcattc

SEQ ID NO: 127345 - DNA, 20 bp, Artificial Sequence
  MKO10127345_B_Ywhab
  gRNA
ccctgatcatgcagctgctc

SEQ ID NO: 127346 - DNA, 20 bp, Artificial Sequence
  MKO10127346_B_Ywhab
  gRNA
tatctttctgaagttgcatc

SEQ ID NO: 127347 - DNA, 20 bp, Artificial Sequence
  MKO10127347_B_Ywhae
  gRNA
tgatgacgcaattgcagaac

SEQ ID NO: 127348 - DNA, 20 bp, Artificial Sequence
  MKO10127348_B_Ywhae
  gRNA
gttgcatataaaaatgtgat

SEQ ID NO: 127349 - DNA, 20 bp, Artificial Sequence
  MKO10127349_B_Ywhae
  gRNA
gttaatctgttgtgacattc

SEQ ID NO: 127350 - DNA, 20 bp, Artificial Sequence
  MKO10127350_B_Ywhag
  gRNA
aaaccgagtagttgagcgcc

SEQ ID NO: 127351 - DNA, 20 bp, Artificial Sequence
  MKO10127351_B_Ywhag
  gRNA
agcgaccagcaagacgacga

SEQ ID NO: 127352 - DNA, 20 bp, Artificial Sequence
  MKO10127352_B_Ywhag
  gRNA
cgagctcgacactctgaacg

SEQ ID NO: 127353 - DNA, 20 bp, Artificial Sequence
  MKO10127353_B_Ywhah
  gRNA
atcgagagcagctgctgcag

SEQ ID NO: 127354 - DNA, 20 bp, Artificial Sequence
  MKO10127354_B_Ywhah
  gRNA
tttcgatcttcgttagatag

SEQ ID NO: 127355 - DNA, 20 bp, Artificial Sequence
  MKO10127355_B_Ywhah
  gRNA
ctcagctatagcatcatcga

SEQ ID NO: 127356 - DNA, 20 bp, Artificial Sequence
  MKO10127356_B_Ywhaq
  gRNA
ggcgtttgatataagcaaga

SEQ ID NO: 127357 - DNA, 20 bp, Artificial Sequence
  MKO10127357_B_Ywhaq
  gRNA
ctctaagcaactgcatgatg

SEQ ID NO: 127358 - DNA, 20 bp, Artificial Sequence
  MKO10127358_B_Ywhaq
  gRNA
cagtgtatcaagctctgcga

SEQ ID NO: 127359 - DNA, 20 bp, Artificial Sequence
  MKO10127359_B_Ywhaz
  gRNA
gccgacacaccccatcagac

SEQ ID NO: 127360 - DNA, 20 bp, Artificial Sequence
  MKO10127360_B_Ywhaz
  gRNA
taatgtatcaagttcagcaa

SEQ ID NO: 127361 - DNA, 20 bp, Artificial Sequence
  MKO10127361_B_Ywhaz
  gRNA
ctgcttctgcttcatctcct

SEQ ID NO: 127362 - DNA, 20 bp, Artificial Sequence
  MKO10127362_B_Yy1
  gRNA
gtccacgtctgtgcagagtg

SEQ ID NO: 127363 - DNA, 20 bp, Artificial Sequence
  MKO10127363_B_Yy1
  gRNA
tgagggcaagctattgttct

SEQ ID NO: 127364 - DNA, 20 bp, Artificial Sequence
  MKO10127364_B_Yy1
  gRNA
aaagctaaaacgacaccagc

SEQ ID NO: 127365 - DNA, 20 bp, Artificial Sequence
  MKO10127365_B_Yy2
  gRNA
tacatctccatatacttcga

SEQ ID NO: 127366 - DNA, 20 bp, Artificial Sequence
  MKO10127366_B_Yy2
  gRNA
ttgacgacctttatagaggc

SEQ ID NO: 127367 - DNA, 20 bp, Artificial Sequence
  MKO10127367_B_Yy2
  gRNA
cgccagaaagcccgtaaaag

SEQ ID NO: 127368 - DNA, 20 bp, Artificial Sequence
  MKO10127368_B_Zadh2
  gRNA
gagacctcctcgtccggaac

SEQ ID NO: 127369 - DNA, 20 bp, Artificial Sequence
  MKO10127369_B_Zadh2
  gRNA
ctgtcgactatatgtacacg

SEQ ID NO: 127370 - DNA, 20 bp, Artificial Sequence
  MKO10127370_B_Zadh2
  gRNA
ggttccgataacgtggcact

SEQ ID NO: 127371 - DNA, 20 bp, Artificial Sequence
  MKO10127371_B_Zak
  gRNA
gtcgaacttaatttgcacaa

SEQ ID NO: 127372 - DNA, 20 bp, Artificial Sequence
  MKO10127372_B_Zak
  gRNA
attctggaacctcccaacta

SEQ ID NO: 127373 - DNA, 20 bp, Artificial Sequence
  MKO10127373_B_Zak
  gRNA
tgctgttaatgtaatcatac

SEQ ID NO: 127374 - DNA, 20 bp, Artificial Sequence
  MKO10127374_B_Zan
  gRNA
cccatgacagcccgaacatg

SEQ ID NO: 127375 - DNA, 20 bp, Artificial Sequence
  MKO10127375_B_Zan
  gRNA
ggggccagaagtgcccgtca

SEQ ID NO: 127376 - DNA, 20 bp, Artificial Sequence
  MKO10127376_B_Zan
  gRNA
tccctcgaagtgtgcaccat

SEQ ID NO: 127377 - DNA, 20 bp, Artificial Sequence
  MKO10127377_B_Zap70
  gRNA
ggcaagtactgcatccccga

SEQ ID NO: 127378 - DNA, 20 bp, Artificial Sequence
  MKO10127378_B_Zap70
  gRNA
tcccaacagcagcgccagcg

SEQ ID NO: 127379 - DNA, 20 bp, Artificial Sequence
  MKO10127379_B_Zap70
  gRNA
ctgccagagcgtgtcaaact

SEQ ID NO: 127380 - DNA, 20 bp, Artificial Sequence
  MKO10127380_B_Zar1l
  gRNA
ccacagagctcctggcggtg

SEQ ID NO: 127381 - DNA, 20 bp, Artificial Sequence
  MKO10127381_B_Zar1l
  gRNA
ccacaccgccaggagctctg

SEQ ID NO: 127382 - DNA, 20 bp, Artificial Sequence
  MKO10127382_B_Zar1l
  gRNA
agtagaagaaatccagtgtc

SEQ ID NO: 127383 - DNA, 20 bp, Artificial Sequence
  MKO10127383_B_Zar1
  gRNA
cccagtcagacttcgccacg

SEQ ID NO: 127384 - DNA, 20 bp, Artificial Sequence
  MKO10127384_B_Zar1
  gRNA
gtgatgtcctccactctgta

SEQ ID NO: 127385 - DNA, 20 bp, Artificial Sequence
  MKO10127385_B_Zar1
  gRNA
cagttcttagagcagaagta

SEQ ID NO: 127386 - DNA, 20 bp, Artificial Sequence
  MKO10127386_B_Zbbx
  gRNA
tccgagaagccttgacacag

SEQ ID NO: 127387 - DNA, 20 bp, Artificial Sequence
  MKO10127387_B_Zbbx
  gRNA
tgctgctcatcagtttataa

SEQ ID NO: 127388 - DNA, 20 bp, Artificial Sequence
  MKO10127388_B_Zbbx
  gRNA
tctgtgaattcgatattaat

SEQ ID NO: 127389 - DNA, 20 bp, Artificial Sequence
  MKO10127389_B_Zbed3
  gRNA
cggcctctgtcccgcgcccg

SEQ ID NO: 127390 - DNA, 20 bp, Artificial Sequence
  MKO10127390_B_Zbed3
  gRNA
acagcgcccgcgtccacatc

SEQ ID NO: 127391 - DNA, 20 bp, Artificial Sequence
  MKO10127391_B_Zbed3
  gRNA
cagaggccgccttgttccgc

SEQ ID NO: 127392 - DNA, 20 bp, Artificial Sequence
  MKO10127392_B_Zbed4
  gRNA
ggaccctgagtcacagccat

SEQ ID NO: 127393 - DNA, 20 bp, Artificial Sequence
  MKO10127393_B_Zbed4
  gRNA
ttcccctcgagatagcacta

SEQ ID NO: 127394 - DNA, 20 bp, Artificial Sequence
  MKO10127394_B_Zbed4
  gRNA
ctgcctcctcctctgtgaac

SEQ ID NO: 127395 - DNA, 20 bp, Artificial Sequence
  MKO10127395_B_Zbed6
  gRNA
ctcctgaatgatacgatgcc

SEQ ID NO: 127396 - DNA, 20 bp, Artificial Sequence
  MKO10127396_B_Zbed6
  gRNA
gcccctgcttcgttagcttc

SEQ ID NO: 127397 - DNA, 20 bp, Artificial Sequence
  MKO10127397_B_Zbed6
  gRNA
aattatatggaatcttcgcc

SEQ ID NO: 127398 - DNA, 20 bp, Artificial Sequence
  MKO10127398_B_Zbp1
  gRNA
cttggccttcctgacgtgag

SEQ ID NO: 127399 - DNA, 20 bp, Artificial Sequence
  MKO10127399_B_Zbp1
  gRNA
cctcctgtgctcaagtcaac

SEQ ID NO: 127400 - DNA, 20 bp, Artificial Sequence
  MKO10127400_B_Zbp1
  gRNA
gctcctgttgacttgagcac

SEQ ID NO: 127401 - DNA, 20 bp, Artificial Sequence
  MKO10127401_B_Zbtb10
  gRNA
gtagctatgtagccaaatac

SEQ ID NO: 127402 - DNA, 20 bp, Artificial Sequence
  MKO10127402_B_Zbtb10
  gRNA
gcctgcagtggtcaagatgc

SEQ ID NO: 127403 - DNA, 20 bp, Artificial Sequence
  MKO10127403_B_Zbtb10
  gRNA
acacgtaaaaagacattccc

SEQ ID NO: 127404 - DNA, 20 bp, Artificial Sequence
  MKO10127404_B_Zbtb11
  gRNA
aatattcactattagccgag

SEQ ID NO: 127405 - DNA, 20 bp, Artificial Sequence
  MKO10127405_B_Zbtb11
  gRNA
gggctatatccggctacaca

SEQ ID NO: 127406 - DNA, 20 bp, Artificial Sequence
  MKO10127406_B_Zbtb11
  gRNA
aatggaactacaacaccacc

SEQ ID NO: 127407 - DNA, 20 bp, Artificial Sequence
  MKO10127407_B_Zbtb12
  gRNA
cgatacccagacccccggct

SEQ ID NO: 127408 - DNA, 20 bp, Artificial Sequence
  MKO10127408_B_Zbtb12
  gRNA
caccacggtggacgttcatg

SEQ ID NO: 127409 - DNA, 20 bp, Artificial Sequence
  MKO10127409_B_Zbtb12
  gRNA
tgacatctgcatcgtcaaag

SEQ ID NO: 127410 - DNA, 20 bp, Artificial Sequence
  MKO10127410_B_Zbtb14
  gRNA
aacactgaacgaacagcgcc

SEQ ID NO: 127411 - DNA, 20 bp, Artificial Sequence
  MKO10127411_B_Zbtb14
  gRNA
gactcccgaatccaaagatc

SEQ ID NO: 127412 - DNA, 20 bp, Artificial Sequence
  MKO10127412_B_Zbtb14
  gRNA
tcacacatgtgacacgcaaa

SEQ ID NO: 127413 - DNA, 20 bp, Artificial Sequence
  MKO10127413_B_Zbtb16
  gRNA
acatacgggtgtgaactctg

SEQ ID NO: 127414 - DNA, 20 bp, Artificial Sequence
  MKO10127414_B_Zbtb16
  gRNA
ttctcagtcgcaaactgtcc

SEQ ID NO: 127415 - DNA, 20 bp, Artificial Sequence
  MKO10127415_B_Zbtb16
  gRNA
gttctcaaaggaggatgccc

SEQ ID NO: 127416 - DNA, 20 bp, Artificial Sequence
  MKO10127416_B_Zbtb17
  gRNA
agaacatcgtccacgttctc

SEQ ID NO: 127417 - DNA, 20 bp, Artificial Sequence
  MKO10127417_B_Zbtb17
  gRNA
gccggaccccacaagcagca

SEQ ID NO: 127418 - DNA, 20 bp, Artificial Sequence
  MKO10127418_B_Zbtb17
  gRNA
gagccttagccctgagaacg

SEQ ID NO: 127419 - DNA, 20 bp, Artificial Sequence
  MKO10127419_B_Zbtb18
  gRNA
gccgcattgggtgcacgtgt

SEQ ID NO: 127420 - DNA, 20 bp, Artificial Sequence
  MKO10127420_B_Zbtb18
  gRNA
agctgctagcacgtcctcaa

SEQ ID NO: 127421 - DNA, 20 bp, Artificial Sequence
  MKO10127421_B_Zbtb18
  gRNA
ggctcaggttgtgcgagtac

SEQ ID NO: 127422 - DNA, 20 bp, Artificial Sequence
  MKO10127422_B_Zbtb1
  gRNA
catatgatctcgcacctgtc

SEQ ID NO: 127423 - DNA, 20 bp, Artificial Sequence
  MKO10127423_B_Zbtb1
  gRNA
cgtcgagacacacgttcttt

SEQ ID NO: 127424 - DNA, 20 bp, Artificial Sequence
  MKO10127424_B_Zbtb1
  gRNA
tgaatcatcaggcgcctggt

SEQ ID NO: 127425 - DNA, 20 bp, Artificial Sequence
  MKO10127425_B_Zbtb20
  gRNA
cctccggcaggcacgccccc

SEQ ID NO: 127426 - DNA, 20 bp, Artificial Sequence
  MKO10127426_B_Zbtb20
  gRNA
gtactcacaatcagatgacc

SEQ ID NO: 127427 - DNA, 20 bp, Artificial Sequence
  MKO10127427_B_Zbtb20
  gRNA
ttgtcagtgaatgtgtcgag

SEQ ID NO: 127428 - DNA, 20 bp, Artificial Sequence
  MKO10127428_B_Zbtb21
  gRNA
agaacgttgtcaaaagcgtc

SEQ ID NO: 127429 - DNA, 20 bp, Artificial Sequence
  MKO10127429_B_Zbtb21
  gRNA
aagaaagatgtgtgcttgcc

SEQ ID NO: 127430 - DNA, 20 bp, Artificial Sequence
  MKO10127430_B_Zbtb21
  gRNA
ttatgatgcacagtgtacag

SEQ ID NO: 127431 - DNA, 20 bp, Artificial Sequence
  MKO10127431_B_Zbtb22
  gRNA
ctgcggatcgaccctcccga

SEQ ID NO: 127432 - DNA, 20 bp, Artificial Sequence
  MKO10127432_B_Zbtb22
  gRNA
gacactgtgagcgtcggcac

SEQ ID NO: 127433 - DNA, 20 bp, Artificial Sequence
  MKO10127433_B_Zbtb22
  gRNA
gccgatgagctatgcgatga

SEQ ID NO: 127434 - DNA, 20 bp, Artificial Sequence
  MKO10127434_B_Zbtb24
  gRNA
agccattatcgtgtccatac

SEQ ID NO: 127435 - DNA, 20 bp, Artificial Sequence
  MKO10127435_B_Zbtb24
  gRNA
ggctgcattctggtagtgag

SEQ ID NO: 127436 - DNA, 20 bp, Artificial Sequence
  MKO10127436_B_Zbtb24
  gRNA
ccatacacctgcaccgtgtg

SEQ ID NO: 127437 - DNA, 20 bp, Artificial Sequence
  MKO10127437_B_Zbtb25
  gRNA
tgtgactgcacagttgctat

SEQ ID NO: 127438 - DNA, 20 bp, Artificial Sequence
  MKO10127438_B_Zbtb25
  gRNA
tcacctgagcactcgagccg

SEQ ID NO: 127439 - DNA, 20 bp, Artificial Sequence
  MKO10127439_B_Zbtb25
  gRNA
acagatataaccgttgccaa

SEQ ID NO: 127440 - DNA, 20 bp, Artificial Sequence
  MKO10127440_B_Zbtb26
  gRNA
atctattggggatgtatcag

SEQ ID NO: 127441 - DNA, 20 bp, Artificial Sequence
  MKO10127441_B_Zbtb26
  gRNA
ttgctcttgtcctgttatag

SEQ ID NO: 127442 - DNA, 20 bp, Artificial Sequence
  MKO10127442_B_Zbtb26
  gRNA
gccacaacctgatgcaacac

SEQ ID NO: 127443 - DNA, 20 bp, Artificial Sequence
  MKO10127443_B_Zbtb2
  gRNA
tgttgtttgtccatcagacc

SEQ ID NO: 127444 - DNA, 20 bp, Artificial Sequence
  MKO10127444_B_Zbtb2
  gRNA
tgtacatgtgctcacgccag

SEQ ID NO: 127445 - DNA, 20 bp, Artificial Sequence
  MKO10127445_B_Zbtb2
  gRNA
tcgctgatcatccccgcctc

SEQ ID NO: 127446 - DNA, 20 bp, Artificial Sequence
  MKO10127446_B_Zbtb32
  gRNA
ccagacgtttctatctgcca

SEQ ID NO: 127447 - DNA, 20 bp, Artificial Sequence
  MKO10127447_B_Zbtb32
  gRNA
cagatagaaacgtctgggca

SEQ ID NO: 127448 - DNA, 20 bp, Artificial Sequence
  MKO10127448_B_Zbtb32
  gRNA
taccctctcctgctcgctct

SEQ ID NO: 127449 - DNA, 20 bp, Artificial Sequence
  MKO10127449_B_Zbtb33
  gRNA
ctcagaacaagtcaacgttc

SEQ ID NO: 127450 - DNA, 20 bp, Artificial Sequence
  MKO10127450_B_Zbtb33
  gRNA
gttcatagtcaagatccttc

SEQ ID NO: 127451 - DNA, 20 bp, Artificial Sequence
  MKO10127451_B_Zbtb33
  gRNA
aactccttgaatgaacagcg

SEQ ID NO: 127452 - DNA, 20 bp, Artificial Sequence
  MKO10127452_B_Zbtb34
  gRNA
accttgaattgcattcttcc

SEQ ID NO: 127453 - DNA, 20 bp, Artificial Sequence
  MKO10127453_B_Zbtb34
  gRNA
ccaacaagtccccttgctcg

SEQ ID NO: 127454 - DNA, 20 bp, Artificial Sequence
  MKO10127454_B_Zbtb34
  gRNA
ataaccgggattgttcatca

SEQ ID NO: 127455 - DNA, 20 bp, Artificial Sequence
  MKO10127455_B_Zbtb37
  gRNA
tatgccgtggactaagtgag

SEQ ID NO: 127456 - DNA, 20 bp, Artificial Sequence
  MKO10127456_B_Zbtb37
  gRNA
tccaacagatttagtccctc

SEQ ID NO: 127457 - DNA, 20 bp, Artificial Sequence
  MKO10127457_B_Zbtb37
  gRNA
acctgggagctaagttgctt

SEQ ID NO: 127458 - DNA, 20 bp, Artificial Sequence
  MKO10127458_B_Zbtb38
  gRNA
tgggtatctgcaccggccga

SEQ ID NO: 127459 - DNA, 20 bp, Artificial Sequence
  MKO10127459_B_Zbtb38
  gRNA
gcttgatcaccgacgagaac

SEQ ID NO: 127460 - DNA, 20 bp, Artificial Sequence
  MKO10127460_B_Zbtb38
  gRNA
cttgtcagacgcggaccaca

SEQ ID NO: 127461 - DNA, 20 bp, Artificial Sequence
  MKO10127461_B_Zbtb39
  gRNA
ggtagttgaactcgcttgtg

SEQ ID NO: 127462 - DNA, 20 bp, Artificial Sequence
  MKO10127462_B_Zbtb39
  gRNA
ctgaccctgcaccggcggga

SEQ ID NO: 127463 - DNA, 20 bp, Artificial Sequence
  MKO10127463_B_Zbtb39
  gRNA
caagcgagttcaactaccac

SEQ ID NO: 127464 - DNA, 20 bp, Artificial Sequence
  MKO10127464_B_Zbtb3
  gRNA
agggcagtatcatcgagggc

SEQ ID NO: 127465 - DNA, 20 bp, Artificial Sequence
  MKO10127465_B_Zbtb3
  gRNA
gctgccagcacatcttctag

SEQ ID NO: 127466 - DNA, 20 bp, Artificial Sequence
  MKO10127466_B_Zbtb3
  gRNA
gaggggctgcacccctagaa

SEQ ID NO: 127467 - DNA, 20 bp, Artificial Sequence
  MKO10127467_B_Zbtb40
  gRNA
aacacagctcagacctattg

SEQ ID NO: 127468 - DNA, 20 bp, Artificial Sequence
  MKO10127468_B_Zbtb40
  gRNA
agacgctttcatgctctagc

SEQ ID NO: 127469 - DNA, 20 bp, Artificial Sequence
  MKO10127469_B_Zbtb40
  gRNA
ttagctagtacctgtggtgc

SEQ ID NO: 127470 - DNA, 20 bp, Artificial Sequence
  MKO10127470_B_Zbtb41
  gRNA
cgccatatagaatgtactca

SEQ ID NO: 127471 - DNA, 20 bp, Artificial Sequence
  MKO10127471_B_Zbtb41
  gRNA
tgacgaccacatatatcaca

SEQ ID NO: 127472 - DNA, 20 bp, Artificial Sequence
  MKO10127472_B_Zbtb41
  gRNA
atcatgtgttcttccaagtg

SEQ ID NO: 127473 - DNA, 20 bp, Artificial Sequence
  MKO10127473_B_Zbtb42
  gRNA
gcccgcgagcagccgcgaca

SEQ ID NO: 127474 - DNA, 20 bp, Artificial Sequence
  MKO10127474_B_Zbtb42
  gRNA
cttcatgtacgagggccgct

SEQ ID NO: 127475 - DNA, 20 bp, Artificial Sequence
  MKO10127475_B_Zbtb42
  gRNA
ggggatcggtccgcgctctg

SEQ ID NO: 127476 - DNA, 20 bp, Artificial Sequence
  MKO10127476_B_Zbtb43
  gRNA
atcgtactttgctctgtcct

SEQ ID NO: 127477 - DNA, 20 bp, Artificial Sequence
  MKO10127477_B_Zbtb43
  gRNA
ccgttgtagttactgctact

SEQ ID NO: 127478 - DNA, 20 bp, Artificial Sequence
  MKO10127478_B_Zbtb43
  gRNA
ccacgtgaagcctgagcgct

SEQ ID NO: 127479 - DNA, 20 bp, Artificial Sequence
  MKO10127479_B_Zbtb44
  gRNA
caaaatcttccgggctcaca

SEQ ID NO: 127480 - DNA, 20 bp, Artificial Sequence
  MKO10127480_B_Zbtb44
  gRNA
agcgtttaccttcgtgcttt

SEQ ID NO: 127481 - DNA, 20 bp, Artificial Sequence
  MKO10127481_B_Zbtb44
  gRNA
aacggtctgtctggaccatt

SEQ ID NO: 127482 - DNA, 20 bp, Artificial Sequence
  MKO10127482_B_Zbtb45
  gRNA
cgattacctgctcaagcata

SEQ ID NO: 127483 - DNA, 20 bp, Artificial Sequence
  MKO10127483_B_Zbtb45
  gRNA
gtgagcgcgaaaagttctgt

SEQ ID NO: 127484 - DNA, 20 bp, Artificial Sequence
  MKO10127484_B_Zbtb45
  gRNA
ccaccgtctgcgccacttgc

SEQ ID NO: 127485 - DNA, 20 bp, Artificial Sequence
  MKO10127485_B_Zbtb46
  gRNA
tgctggtgaagggccgtacc

SEQ ID NO: 127486 - DNA, 20 bp, Artificial Sequence
  MKO10127486_B_Zbtb46
  gRNA
cttcatgtactccgcccatc

SEQ ID NO: 127487 - DNA, 20 bp, Artificial Sequence
  MKO10127487_B_Zbtb46
  gRNA
gcacataagaacgtcttgct

SEQ ID NO: 127488 - DNA, 20 bp, Artificial Sequence
  MKO10127488_B_Zbtb48
  gRNA
cccttcgagtgtcccaaatg

SEQ ID NO: 127489 - DNA, 20 bp, Artificial Sequence
  MKO10127489_B_Zbtb48
  gRNA
gcacttactgcgtggggttt

SEQ ID NO: 127490 - DNA, 20 bp, Artificial Sequence
  MKO10127490_B_Zbtb48
  gRNA
cgtccctgtcgtcctccact

SEQ ID NO: 127491 - DNA, 20 bp, Artificial Sequence
  MKO10127491_B_Zbtb49
  gRNA
accttcagactcacttacgc

SEQ ID NO: 127492 - DNA, 20 bp, Artificial Sequence
  MKO10127492_B_Zbtb49
  gRNA
ccgcacgtgtcacacaagtg

SEQ ID NO: 127493 - DNA, 20 bp, Artificial Sequence
  MKO10127493_B_Zbtb49
  gRNA
gccggcgtaagtgagtctga

SEQ ID NO: 127494 - DNA, 20 bp, Artificial Sequence
  MKO10127494_B_Zbtb4
  gRNA
gccctacaagacctacagtc

SEQ ID NO: 127495 - DNA, 20 bp, Artificial Sequence
  MKO10127495_B_Zbtb4
  gRNA
gctgggtatctcccgtctac

SEQ ID NO: 127496 - DNA, 20 bp, Artificial Sequence
  MKO10127496_B_Zbtb4
  gRNA
gtcgacgagggtccaacact

SEQ ID NO: 127497 - DNA, 20 bp, Artificial Sequence
  MKO10127497_B_Zbtb5
  gRNA
tcccgggaatgaactcccgc

SEQ ID NO: 127498 - DNA, 20 bp, Artificial Sequence
  MKO10127498_B_Zbtb5
  gRNA
caacgttatggatgtcttat

SEQ ID NO: 127499 - DNA, 20 bp, Artificial Sequence
  MKO10127499_B_Zbtb5
  gRNA
gtccccgaccctgtcggtgc

SEQ ID NO: 127500 - DNA, 20 bp, Artificial Sequence
  MKO10127500_B_Zbtb6
  gRNA
ttcgaggacacatgggtata

SEQ ID NO: 127501 - DNA, 20 bp, Artificial Sequence
  MKO10127501_B_Zbtb6
  gRNA
ccaaaatcaccttgtgcccc

SEQ ID NO: 127502 - DNA, 20 bp, Artificial Sequence
  MKO10127502_B_Zbtb6
  gRNA
ctcagtatcgttaatataaa

SEQ ID NO: 127503 - DNA, 20 bp, Artificial Sequence
  MKO10127503_B_Zbtb7a
  gRNA
aatggggtcccctcgcgccg

SEQ ID NO: 127504 - DNA, 20 bp, Artificial Sequence
  MKO10127504_B_Zbtb7a
  gRNA
tcagtggggcccgccccgtc

SEQ ID NO: 127505 - DNA, 20 bp, Artificial Sequence
  MKO10127505_B_Zbtb7a
  gRNA
cggtgcccccgacgacgacc

SEQ ID NO: 127506 - DNA, 20 bp, Artificial Sequence
  MKO10127506_B_Zbtb7b
  gRNA
cgacctttccaatggccacc

SEQ ID NO: 127507 - DNA, 20 bp, Artificial Sequence
  MKO10127507_B_Zbtb7b
  gRNA
tgagcgagcccgacagtacc

SEQ ID NO: 127508 - DNA, 20 bp, Artificial Sequence
  MKO10127508_B_Zbtb7b
  gRNA
ttacctaagttcgctgcacc

SEQ ID NO: 127509 - DNA, 20 bp, Artificial Sequence
  MKO10127509_B_Zbtb7c
  gRNA
aaagtcgatctcatacacgt

SEQ ID NO: 127510 - DNA, 20 bp, Artificial Sequence
  MKO10127510_B_Zbtb7c
  gRNA
ccgagaacgtggccgccact

SEQ ID NO: 127511 - DNA, 20 bp, Artificial Sequence
  MKO10127511_B_Zbtb7c
  gRNA
gtggtcgcaagcccgcggcc

SEQ ID NO: 127512 - DNA, 20 bp, Artificial Sequence
  MKO10127512_B_Zbtb8a
  gRNA
cttgtgggaaacggttcagc

SEQ ID NO: 127513 - DNA, 20 bp, Artificial Sequence
  MKO10127513_B_Zbtb8a
  gRNA
acggtcgctgaggactcctc

SEQ ID NO: 127514 - DNA, 20 bp, Artificial Sequence
  MKO10127514_B_Zbtb8a
  gRNA
gtatacatacagttcggaaa

SEQ ID NO: 127515 - DNA, 20 bp, Artificial Sequence
  MKO10127515_B_Zbtb8b
  gRNA
ggcttcctcaggtgacgtgc

SEQ ID NO: 127516 - DNA, 20 bp, Artificial Sequence
  MKO10127516_B_Zbtb8b
  gRNA
ggtaagttgggccgaatgtg

SEQ ID NO: 127517 - DNA, 20 bp, Artificial Sequence
  MKO10127517_B_Zbtb8b
  gRNA
cgacagcctttgcagataat

SEQ ID NO: 127518 - DNA, 20 bp, Artificial Sequence
  MKO10127518_B_Zbtb8os
  gRNA
accttgggtttctacttcca

SEQ ID NO: 127519 - DNA, 20 bp, Artificial Sequence
  MKO10127519_B_Zbtb8os
  gRNA
atctgtcatgtaaccaaaca

SEQ ID NO: 127520 - DNA, 20 bp, Artificial Sequence
  MKO10127520_B_Zbtb8os
  gRNA
ctgatgagtacttcataccc

SEQ ID NO: 127521 - DNA, 20 bp, Artificial Sequence
  MKO10127521_B_Zbtb9
  gRNA
acgcatgcagagctctcgca

SEQ ID NO: 127522 - DNA, 20 bp, Artificial Sequence
  MKO10127522_B_Zbtb9
  gRNA
gactttaccgaatgtcatcg

SEQ ID NO: 127523 - DNA, 20 bp, Artificial Sequence
  MKO10127523_B_Zbtb9
  gRNA
tgaacgtcaacatgatgtgt

SEQ ID NO: 127524 - DNA, 20 bp, Artificial Sequence
  MKO10127524_B_Zbtbd6
  gRNA
ggtggacgagaccctgttac

SEQ ID NO: 127525 - DNA, 20 bp, Artificial Sequence
  MKO10127525_B_Zbtbd6
  gRNA
tgtggtaattgagccactaa

SEQ ID NO: 127526 - DNA, 20 bp, Artificial Sequence
  MKO10127526_B_Zbtbd6
  gRNA
ccgctgtgccgcccctgtgt

SEQ ID NO: 127527 - DNA, 20 bp, Artificial Sequence
  MKO10127527_B_Zc2hc1a
  gRNA
tttacctgtggccgagaagc

SEQ ID NO: 127528 - DNA, 20 bp, Artificial Sequence
  MKO10127528_B_Zc2hc1a
  gRNA
tccagtgtccgtattgccag

SEQ ID NO: 127529 - DNA, 20 bp, Artificial Sequence
  MKO10127529_B_Zc2hc1a
  gRNA
gaccttcttcccgttggctc

SEQ ID NO: 127530 - DNA, 20 bp, Artificial Sequence
  MKO10127530_B_Zc2hc1b
  gRNA
ccccgtccaacctccaaccc

SEQ ID NO: 127531 - DNA, 20 bp, Artificial Sequence
  MKO10127531_B_Zc2hc1b
  gRNA
atgctttgcaacagatgttc

SEQ ID NO: 127532 - DNA, 20 bp, Artificial Sequence
  MKO10127532_B_Zc2hc1b
  gRNA
gggtaaatctcctcagccca

SEQ ID NO: 127533 - DNA, 20 bp, Artificial Sequence
  MKO10127533_B_Zc2hc1c
  gRNA
ccgagtggacccagatccaa

SEQ ID NO: 127534 - DNA, 20 bp, Artificial Sequence
  MKO10127534_B_Zc2hc1c
  gRNA
gtcgcgcatgccggagggta

SEQ ID NO: 127535 - DNA, 20 bp, Artificial Sequence
  MKO10127535_B_Zc2hc1c
  gRNA
tcaagtcggtccgggacacc

SEQ ID NO: 127536 - DNA, 20 bp, Artificial Sequence
  MKO10127536_B_Zc3h10
  gRNA
cacgccgctgtcagccgctc

SEQ ID NO: 127537 - DNA, 20 bp, Artificial Sequence
  MKO10127537_B_Zc3h10
  gRNA
tcgaaatgggggccgtcagg

SEQ ID NO: 127538 - DNA, 20 bp, Artificial Sequence
  MKO10127538_B_Zc3h10
  gRNA
tcacccgccgacctacccaa

SEQ ID NO: 127539 - DNA, 20 bp, Artificial Sequence
  MKO10127539_B_Zc3h11a
  gRNA
ccatctcctgacgtccataa

SEQ ID NO: 127540 - DNA, 20 bp, Artificial Sequence
  MKO10127540_B_Zc3h11a
  gRNA
ggaagagtccatcaacatag

SEQ ID NO: 127541 - DNA, 20 bp, Artificial Sequence
  MKO10127541_B_Zc3h11a
  gRNA
ctagtgcagcttcacagtga

SEQ ID NO: 127542 - DNA, 20 bp, Artificial Sequence
  MKO10127542_B_Zc3h12a
  gRNA
cgagtggggcccgactcccc

SEQ ID NO: 127543 - DNA, 20 bp, Artificial Sequence
  MKO10127543_B_Zc3h12a
  gRNA
ttaccgtgtttgtgccatct

SEQ ID NO: 127544 - DNA, 20 bp, Artificial Sequence
  MKO10127544_B_Zc3h12a
  gRNA
gctcatcggccacagagcgc

SEQ ID NO: 127545 - DNA, 20 bp, Artificial Sequence
  MKO10127545_B_Zc3h12b
  gRNA
ggccaaccaaccccagcgtt

SEQ ID NO: 127546 - DNA, 20 bp, Artificial Sequence
  MKO10127546_B_Zc3h12b
  gRNA
ctcggaccatggcgtccaag

SEQ ID NO: 127547 - DNA, 20 bp, Artificial Sequence
  MKO10127547_B_Zc3h12b
  gRNA
tcaagatattctacgtaaac

SEQ ID NO: 127548 - DNA, 20 bp, Artificial Sequence
  MKO10127548_B_Zc3h12c
  gRNA
cgccctgacgccctcatcac

SEQ ID NO: 127549 - DNA, 20 bp, Artificial Sequence
  MKO10127549_B_Zc3h12c
  gRNA
gccgtgatggtgtgaatacc

SEQ ID NO: 127550 - DNA, 20 bp, Artificial Sequence
  MKO10127550_B_Zc3h12c
  gRNA
agcacaccactcgcctgccc

SEQ ID NO: 127551 - DNA, 20 bp, Artificial Sequence
  MKO10127551_B_Zc3h12d
  gRNA
accccatcccgcaaggtgaa

SEQ ID NO: 127552 - DNA, 20 bp, Artificial Sequence
  MKO10127552_B_Zc3h12d
  gRNA
accatagggacagtgttgcc

SEQ ID NO: 127553 - DNA, 20 bp, Artificial Sequence
  MKO10127553_B_Zc3h12d
  gRNA
ccacagccagacgaattccc

SEQ ID NO: 127554 - DNA, 20 bp, Artificial Sequence
  MKO10127554_B_Zc3h13
  gRNA
aagactggcagctgcctcta

SEQ ID NO: 127555 - DNA, 20 bp, Artificial Sequence
  MKO10127555_B_Zc3h13
  gRNA
ttatgttcatgagttatcat

SEQ ID NO: 127556 - DNA, 20 bp, Artificial Sequence
  MKO10127556_B_Zc3h13
  gRNA
ctttagaaagaatcttcaag

SEQ ID NO: 127557 - DNA, 20 bp, Artificial Sequence
  MKO10127557_B_Zc3h14
  gRNA
tactcacttgcaaggtgaaa

SEQ ID NO: 127558 - DNA, 20 bp, Artificial Sequence
  MKO10127558_B_Zc3h14
  gRNA
tcaccagcaccgtcttctaa

SEQ ID NO: 127559 - DNA, 20 bp, Artificial Sequence
  MKO10127559_B_Zc3h14
  gRNA
cagagctggccattagaaga

SEQ ID NO: 127560 - DNA, 20 bp, Artificial Sequence
  MKO10127560_B_Zc3h15
  gRNA
gaatgcgcacaccacagatt

SEQ ID NO: 127561 - DNA, 20 bp, Artificial Sequence
  MKO10127561_B_Zc3h15
  gRNA
gtcactcatcaagtgaaatt

SEQ ID NO: 127562 - DNA, 20 bp, Artificial Sequence
  MKO10127562_B_Zc3h15
  gRNA
gctgcacaaaaaataagcaa

SEQ ID NO: 127563 - DNA, 20 bp, Artificial Sequence
  MKO10127563_B_Zc3h18
  gRNA
tcacgcacccaagggttggc

SEQ ID NO: 127564 - DNA, 20 bp, Artificial Sequence
  MKO10127564_B_Zc3h18
  gRNA
tggggcgaggcctcaccttc

SEQ ID NO: 127565 - DNA, 20 bp, Artificial Sequence
  MKO10127565_B_Zc3h18
  gRNA
cccagcgggatccccatgcg

SEQ ID NO: 127566 - DNA, 20 bp, Artificial Sequence
  MKO10127566_B_Zc3h3
  gRNA
acctggtattgccccgcctc

SEQ ID NO: 127567 - DNA, 20 bp, Artificial Sequence
  MKO10127567_B_Zc3h3
  gRNA
acccacctctccaccaagga

SEQ ID NO: 127568 - DNA, 20 bp, Artificial Sequence
  MKO10127568_B_Zc3h3
  gRNA
tggcagccacccatgttccc

SEQ ID NO: 127569 - DNA, 20 bp, Artificial Sequence
  MKO10127569_B_Zc3h4
  gRNA
gagatcctcctcgactccca

SEQ ID NO: 127570 - DNA, 20 bp, Artificial Sequence
  MKO10127570_B_Zc3h4
  gRNA
actacgagaatgagcagtat

SEQ ID NO: 127571 - DNA, 20 bp, Artificial Sequence
  MKO10127571_B_Zc3h4
  gRNA
tacaggggccgtgggagtcg

SEQ ID NO: 127572 - DNA, 20 bp, Artificial Sequence
  MKO10127572_B_Zc3h6
  gRNA
atcataatccctgtaggagc

SEQ ID NO: 127573 - DNA, 20 bp, Artificial Sequence
  MKO10127573_B_Zc3h6
  gRNA
tccattcctgaaaagacata

SEQ ID NO: 127574 - DNA, 20 bp, Artificial Sequence
  MKO10127574_B_Zc3h6
  gRNA
atttgaagaaacacaagatc

SEQ ID NO: 127575 - DNA, 20 bp, Artificial Sequence
  MKO10127575_B_Zc3h7a
  gRNA
atatttatcgggaatgtgac

SEQ ID NO: 127576 - DNA, 20 bp, Artificial Sequence
  MKO10127576_B_Zc3h7a
  gRNA
tccttaccgcatactgctcc

SEQ ID NO: 127577 - DNA, 20 bp, Artificial Sequence
  MKO10127577_B_Zc3h7a
  gRNA
tcaagaattagctcagaaat

SEQ ID NO: 127578 - DNA, 20 bp, Artificial Sequence
  MKO10127578_B_Zc3h7b
  gRNA
tgtggcgccccagctcgttg

SEQ ID NO: 127579 - DNA, 20 bp, Artificial Sequence
  MKO10127579_B_Zc3h7b
  gRNA
gaaagcctataagagacccc

SEQ ID NO: 127580 - DNA, 20 bp, Artificial Sequence
  MKO10127580_B_Zc3h7b
  gRNA
acctacctggggtctcttat

SEQ ID NO: 127581 - DNA, 20 bp, Artificial Sequence
  MKO10127581_B_Zc3h8
  gRNA
tttacttagtttaagcacct

SEQ ID NO: 127582 - DNA, 20 bp, Artificial Sequence
  MKO10127582_B_Zc3h8
  gRNA
tgctgaagaacagtggctcc

SEQ ID NO: 127583 - DNA, 20 bp, Artificial Sequence
  MKO10127583_B_Zc3h8
  gRNA
ggagccactgttcttcagca

SEQ ID NO: 127584 - DNA, 20 bp, Artificial Sequence
  MKO10127584_B_Zc3hav1l
  gRNA
gtgtgcaaatcctttgtgcg

SEQ ID NO: 127585 - DNA, 20 bp, Artificial Sequence
  MKO10127585_B_Zc3hav1l
  gRNA
ttcgcagctgcccttcattg

SEQ ID NO: 127586 - DNA, 20 bp, Artificial Sequence
  MKO10127586_B_Zc3hav1l
  gRNA
cttggacgttgataggtgtg

SEQ ID NO: 127587 - DNA, 20 bp, Artificial Sequence
  MKO10127587_B_Zc3hav1
  gRNA
cggagagctcatgattcttc

SEQ ID NO: 127588 - DNA, 20 bp, Artificial Sequence
  MKO10127588_B_Zc3hav1
  gRNA
gagggccgcaaacagatctg

SEQ ID NO: 127589 - DNA, 20 bp, Artificial Sequence
  MKO10127589_B_Zc3hav1
  gRNA
tcatccatcctaggagatac

SEQ ID NO: 127590 - DNA, 20 bp, Artificial Sequence
  MKO10127590_B_Zc3hc1
  gRNA
gaggcgatccatcaactgac

SEQ ID NO: 127591 - DNA, 20 bp, Artificial Sequence
  MKO10127591_B_Zc3hc1
  gRNA
gccacattccagtcagttga

SEQ ID NO: 127592 - DNA, 20 bp, Artificial Sequence
  MKO10127592_B_Zc3hc1
  gRNA
gtacctggagaggggctgtc

SEQ ID NO: 127593 - DNA, 20 bp, Artificial Sequence
  MKO10127593_B_Zc4h2
  gRNA
tgctgctgctcaacaactcc

SEQ ID NO: 127594 - DNA, 20 bp, Artificial Sequence
  MKO10127594_B_Zc4h2
  gRNA
gcatccacgtgttctttcag

SEQ ID NO: 127595 - DNA, 20 bp, Artificial Sequence
  MKO10127595_B_Zc4h2
  gRNA
agctcactcaccttcatagg

SEQ ID NO: 127596 - DNA, 20 bp, Artificial Sequence
  MKO10127596_B_Zcchc10
  gRNA
cgagctggagtccgagtccg

SEQ ID NO: 127597 - DNA, 20 bp, Artificial Sequence
  MKO10127597_B_Zcchc10
  gRNA
agatggcgactcccatgcat

SEQ ID NO: 127598 - DNA, 20 bp, Artificial Sequence
  MKO10127598_B_Zcchc10
  gRNA
actgtcactgctagaggtac

SEQ ID NO: 127599 - DNA, 20 bp, Artificial Sequence
  MKO10127599_B_Zcchc11
  gRNA
acatttcctccacaatgtcc

SEQ ID NO: 127600 - DNA, 20 bp, Artificial Sequence
  MKO10127600_B_Zcchc11
  gRNA
ctgctttgacacctgagcag

SEQ ID NO: 127601 - DNA, 20 bp, Artificial Sequence
  MKO10127601_B_Zcchc11
  gRNA
ttatttcagaatgttcactg

SEQ ID NO: 127602 - DNA, 20 bp, Artificial Sequence
  MKO10127602_B_Zcchc12
  gRNA
agatgactctcctgatgatt

SEQ ID NO: 127603 - DNA, 20 bp, Artificial Sequence
  MKO10127603_B_Zcchc12
  gRNA
tcgatactgctgatcattat

SEQ ID NO: 127604 - DNA, 20 bp, Artificial Sequence
  MKO10127604_B_Zcchc12
  gRNA
tgagtacagaccttcgattc

SEQ ID NO: 127605 - DNA, 20 bp, Artificial Sequence
  MKO10127605_B_Zcchc13
  gRNA
gacctcttgctgttcgccct

SEQ ID NO: 127606 - DNA, 20 bp, Artificial Sequence
  MKO10127606_B_Zcchc13
  gRNA
tccgatgtttgttatcgctg

SEQ ID NO: 127607 - DNA, 20 bp, Artificial Sequence
  MKO10127607_B_Zcchc13
  gRNA
cacatctgtagcacttaatt

SEQ ID NO: 127608 - DNA, 20 bp, Artificial Sequence
  MKO10127608_B_Zcchc14
  gRNA
cgttccacatagaaggaatc

SEQ ID NO: 127609 - DNA, 20 bp, Artificial Sequence
  MKO10127609_B_Zcchc14
  gRNA
tcgtgtgtgacaaccccttc

SEQ ID NO: 127610 - DNA, 20 bp, Artificial Sequence
  MKO10127610_B_Zcchc14
  gRNA
tgttgaaaagatagacctga

SEQ ID NO: 127611 - DNA, 20 bp, Artificial Sequence
  MKO10127611_B_Zcchc16
  gRNA
ggtacaacttgccctgttat

SEQ ID NO: 127612 - DNA, 20 bp, Artificial Sequence
  MKO10127612_B_Zcchc16
  gRNA
ctcttgtgaagtgaccagcc

SEQ ID NO: 127613 - DNA, 20 bp, Artificial Sequence
  MKO10127613_B_Zcchc16
  gRNA
gaccacctatttgagggctc

SEQ ID NO: 127614 - DNA, 20 bp, Artificial Sequence
  MKO10127614_B_Zcchc17
  gRNA
cggtccttccaggattacac

SEQ ID NO: 127615 - DNA, 20 bp, Artificial Sequence
  MKO10127615_B_Zcchc17
  gRNA
gttgctatggtgacagacta

SEQ ID NO: 127616 - DNA, 20 bp, Artificial Sequence
  MKO10127616_B_Zcchc17
  gRNA
tcttctgcccagtgtaatcc

SEQ ID NO: 127617 - DNA, 20 bp, Artificial Sequence
  MKO10127617_B_Zcchc18
  gRNA
agcgcctgatgagaaccctt

SEQ ID NO: 127618 - DNA, 20 bp, Artificial Sequence
  MKO10127618_B_Zcchc18
  gRNA
aaaccctctgtaccatacta

SEQ ID NO: 127619 - DNA, 20 bp, Artificial Sequence
  MKO10127619_B_Zcchc18
  gRNA
cacaccttagtatggtacag

SEQ ID NO: 127620 - DNA, 20 bp, Artificial Sequence
  MKO10127620_B_Zcchc24
  gRNA
caacgtgtacccgcacaagc

SEQ ID NO: 127621 - DNA, 20 bp, Artificial Sequence
  MKO10127621_B_Zcchc24
  gRNA
ggccatcagcgatgttattg

SEQ ID NO: 127622 - DNA, 20 bp, Artificial Sequence
  MKO10127622_B_Zcchc24
  gRNA
cgctgagcagcagcgtgtat

SEQ ID NO: 127623 - DNA, 20 bp, Artificial Sequence
  MKO10127623_B_Zcchc2
  gRNA
cctcatcgagctcagcgaga

SEQ ID NO: 127624 - DNA, 20 bp, Artificial Sequence
  MKO10127624_B_Zcchc2
  gRNA
gaaaaagggctgacaagtac

SEQ ID NO: 127625 - DNA, 20 bp, Artificial Sequence
  MKO10127625_B_Zcchc2
  gRNA
gtagaaattcctgtagttct

SEQ ID NO: 127626 - DNA, 20 bp, Artificial Sequence
  MKO10127626_B_Zcchc3
  gRNA
gcgtctgacgcctcacccgt

SEQ ID NO: 127627 - DNA, 20 bp, Artificial Sequence
  MKO10127627_B_Zcchc3
  gRNA
agggcgacttccgcgagccg

SEQ ID NO: 127628 - DNA, 20 bp, Artificial Sequence
  MKO10127628_B_Zcchc3
  gRNA
cggcgcgacgaaactggcag

SEQ ID NO: 127629 - DNA, 20 bp, Artificial Sequence
  MKO10127629_B_Zcchc4
  gRNA
gacatttctgtcgcccagct

SEQ ID NO: 127630 - DNA, 20 bp, Artificial Sequence
  MKO10127630_B_Zcchc4
  gRNA
gcaggcctccttgctaccct

SEQ ID NO: 127631 - DNA, 20 bp, Artificial Sequence
  MKO10127631_B_Zcchc4
  gRNA
aatgccagcctcctctatcc

SEQ ID NO: 127632 - DNA, 20 bp, Artificial Sequence
  MKO10127632_B_Zcchc5
  gRNA
cgattacttgtagcttgaac

SEQ ID NO: 127633 - DNA, 20 bp, Artificial Sequence
  MKO10127633_B_Zcchc5
  gRNA
ttcctgttctcgcaactatc

SEQ ID NO: 127634 - DNA, 20 bp, Artificial Sequence
  MKO10127634_B_Zcchc5
  gRNA
cataaccccttggggacgcc

SEQ ID NO: 127635 - DNA, 20 bp, Artificial Sequence
  MKO10127635_B_Zcchc6
  gRNA
cgctgccaactgcatgtatc

SEQ ID NO: 127636 - DNA, 20 bp, Artificial Sequence
  MKO10127636_B_Zcchc6
  gRNA
actagaaattaagcgtgtca

SEQ ID NO: 127637 - DNA, 20 bp, Artificial Sequence
  MKO10127637_B_Zcchc6
  gRNA
caaagcatcgcacagtttgc

SEQ ID NO: 127638 - DNA, 20 bp, Artificial Sequence
  MKO10127638_B_Zcchc7
  gRNA
atctcacgtacttgtggtaa

SEQ ID NO: 127639 - DNA, 20 bp, Artificial Sequence
  MKO10127639_B_Zcchc7
  gRNA
catcagtgacaaagacatcg

SEQ ID NO: 127640 - DNA, 20 bp, Artificial Sequence
  MKO10127640_B_Zcchc7
  gRNA
tccaggcttgcccagaaatc

SEQ ID NO: 127641 - DNA, 20 bp, Artificial Sequence
  MKO10127641_B_Zcchc8
  gRNA
aaacttagtaaaacgatttg

SEQ ID NO: 127642 - DNA, 20 bp, Artificial Sequence
  MKO10127642_B_Zcchc8
  gRNA
gcaataccaccaagaaatag

SEQ ID NO: 127643 - DNA, 20 bp, Artificial Sequence
  MKO10127643_B_Zcchc8
  gRNA
ataaatagaatttgtagtaa

SEQ ID NO: 127644 - DNA, 20 bp, Artificial Sequence
  MKO10127644_B_Zcchc9
  gRNA
tgcagactatgaagacgtgc

SEQ ID NO: 127645 - DNA, 20 bp, Artificial Sequence
  MKO10127645_B_Zcchc9
  gRNA
ggtggcagctgtaaactctg

SEQ ID NO: 127646 - DNA, 20 bp, Artificial Sequence
  MKO10127646_B_Zcchc9
  gRNA
tatcagggcaggatctggac

SEQ ID NO: 127647 - DNA, 20 bp, Artificial Sequence
  MKO10127647_B_Zcrb1
  gRNA
gcctgtcctaaaaacatgct

SEQ ID NO: 127648 - DNA, 20 bp, Artificial Sequence
  MKO10127648_B_Zcrb1
  gRNA
cagagcaataaataataaac

SEQ ID NO: 127649 - DNA, 20 bp, Artificial Sequence
  MKO10127649_B_Zcrb1
  gRNA
taatgaaagacaaagatact

SEQ ID NO: 127650 - DNA, 20 bp, Artificial Sequence
  MKO10127650_B_Zcwpw1
  gRNA
tcttaccagtgcagaatttg

SEQ ID NO: 127651 - DNA, 20 bp, Artificial Sequence
  MKO10127651_B_Zcwpw1
  gRNA
ccatacccaagcactcctgc

SEQ ID NO: 127652 - DNA, 20 bp, Artificial Sequence
  MKO10127652_B_Zcwpw1
  gRNA
acacatcagacctaccaaat

SEQ ID NO: 127653 - DNA, 20 bp, Artificial Sequence
  MKO10127653_B_Zdbf2
  gRNA
tgaccagacagagcagacgt

SEQ ID NO: 127654 - DNA, 20 bp, Artificial Sequence
  MKO10127654_B_Zdbf2
  gRNA
agtaatgaagaacaatggac

SEQ ID NO: 127655 - DNA, 20 bp, Artificial Sequence
  MKO10127655_B_Zdbf2
  gRNA
gatggaagctcagagctatc

SEQ ID NO: 127656 - DNA, 20 bp, Artificial Sequence
  MKO10127656_B_Zdhhc11
  gRNA
agatgggtacctttatagag

SEQ ID NO: 127657 - DNA, 20 bp, Artificial Sequence
  MKO10127657_B_Zdhhc11
  gRNA
gatccaggatattgcctgaa

SEQ ID NO: 127658 - DNA, 20 bp, Artificial Sequence
  MKO10127658_B_Zdhhc11
  gRNA
aatatcctggatcacctacc

SEQ ID NO: 127659 - DNA, 20 bp, Artificial Sequence
  MKO10127659_B_Zdhhc12
  gRNA
cctccccagagctacgccaa

SEQ ID NO: 127660 - DNA, 20 bp, Artificial Sequence
  MKO10127660_B_Zdhhc12
  gRNA
gtgctcttcctgcacgacac

SEQ ID NO: 127661 - DNA, 20 bp, Artificial Sequence
  MKO10127661_B_Zdhhc12
  gRNA
aagctccctgctgctttatc

SEQ ID NO: 127662 - DNA, 20 bp, Artificial Sequence
  MKO10127662_B_Zdhhc13
  gRNA
gctgtgatagatcagttggg

SEQ ID NO: 127663 - DNA, 20 bp, Artificial Sequence
  MKO10127663_B_Zdhhc13
  gRNA
ttactcgagtcctctataag

SEQ ID NO: 127664 - DNA, 20 bp, Artificial Sequence
  MKO10127664_B_Zdhhc13
  gRNA
taccggatggcccagtgaag

SEQ ID NO: 127665 - DNA, 20 bp, Artificial Sequence
  MKO10127665_B_Zdhhc14
  gRNA
atctcgctggactgtcctta

SEQ ID NO: 127666 - DNA, 20 bp, Artificial Sequence
  MKO10127666_B_Zdhhc14
  gRNA
agcctgtgtgataactgcgt

SEQ ID NO: 127667 - DNA, 20 bp, Artificial Sequence
  MKO10127667_B_Zdhhc14
  gRNA
ccccacacagttgcctaccc

SEQ ID NO: 127668 - DNA, 20 bp, Artificial Sequence
  MKO10127668_B_Zdhhc15
  gRNA
ttaccagtgtacacaagaac

SEQ ID NO: 127669 - DNA, 20 bp, Artificial Sequence
  MKO10127669_B_Zdhhc15
  gRNA
tgtgaagatagacttccagt

SEQ ID NO: 127670 - DNA, 20 bp, Artificial Sequence
  MKO10127670_B_Zdhhc15
  gRNA
catattcttaccttctggtt

SEQ ID NO: 127671 - DNA, 20 bp, Artificial Sequence
  MKO10127671_B_Zdhhc16
  gRNA
ggaggcttatgctgccattg

SEQ ID NO: 127672 - DNA, 20 bp, Artificial Sequence
  MKO10127672_B_Zdhhc16
  gRNA
accactgcagcatctgtaat

SEQ ID NO: 127673 - DNA, 20 bp, Artificial Sequence
  MKO10127673_B_Zdhhc16
  gRNA
acctattacagatgctgcag

SEQ ID NO: 127674 - DNA, 20 bp, Artificial Sequence
  MKO10127674_B_Zdhhc17
  gRNA
gcagacccctccttaattga

SEQ ID NO: 127675 - DNA, 20 bp, Artificial Sequence
  MKO10127675_B_Zdhhc17
  gRNA
ctccatagccatggttatag

SEQ ID NO: 127676 - DNA, 20 bp, Artificial Sequence
  MKO10127676_B_Zdhhc17
  gRNA
gcatccttccccatcaatta

SEQ ID NO: 127677 - DNA, 20 bp, Artificial Sequence
  MKO10127677_B_Zdhhc18
  gRNA
gccccgggccaccatctgtg

SEQ ID NO: 127678 - DNA, 20 bp, Artificial Sequence
  MKO10127678_B_Zdhhc18
  gRNA
ccaactcacgaagggtcagg

SEQ ID NO: 127679 - DNA, 20 bp, Artificial Sequence
  MKO10127679_B_Zdhhc18
  gRNA
gatgccagggtccgtgaaac

SEQ ID NO: 127680 - DNA, 20 bp, Artificial Sequence
  MKO10127680_B_Zdhhc19
  gRNA
cacgtcaggctccaccaaag

SEQ ID NO: 127681 - DNA, 20 bp, Artificial Sequence
  MKO10127681_B_Zdhhc19
  gRNA
tgacattcctatttcgcaca

SEQ ID NO: 127682 - DNA, 20 bp, Artificial Sequence
  MKO10127682_B_Zdhhc19
  gRNA
ccgcagcgggcacagccacc

SEQ ID NO: 127683 - DNA, 20 bp, Artificial Sequence
  MKO10127683_B_Zdhhc1
  gRNA
gcactgcaacctatgcgacg

SEQ ID NO: 127684 - DNA, 20 bp, Artificial Sequence
  MKO10127684_B_Zdhhc1
  gRNA
ggtggccacttatgtcttcg

SEQ ID NO: 127685 - DNA, 20 bp, Artificial Sequence
  MKO10127685_B_Zdhhc1
  gRNA
gaactccacgaagacataag

SEQ ID NO: 127686 - DNA, 20 bp, Artificial Sequence
  MKO10127686_B_Zdhhc20
  gRNA
tgacagtttacctctttgga

SEQ ID NO: 127687 - DNA, 20 bp, Artificial Sequence
  MKO10127687_B_Zdhhc20
  gRNA
atcactgctcagcatgtgac

SEQ ID NO: 127688 - DNA, 20 bp, Artificial Sequence
  MKO10127688_B_Zdhhc20
  gRNA
ctaggtactatttccagaac

SEQ ID NO: 127689 - DNA, 20 bp, Artificial Sequence
  MKO10127689_B_Zdhhc21
  gRNA
aggccctcactaaggcaacc

SEQ ID NO: 127690 - DNA, 20 bp, Artificial Sequence
  MKO10127690_B_Zdhhc21
  gRNA
tcctgacgcagtggccgcag

SEQ ID NO: 127691 - DNA, 20 bp, Artificial Sequence
  MKO10127691_B_Zdhhc21
  gRNA
ctcttctatacacaactgat

SEQ ID NO: 127692 - DNA, 20 bp, Artificial Sequence
  MKO10127692_B_Zdhhc22
  gRNA
tgtgttcccgagtcacgctg

SEQ ID NO: 127693 - DNA, 20 bp, Artificial Sequence
  MKO10127693_B_Zdhhc22
  gRNA
tgacgaacatgtcagaaccg

SEQ ID NO: 127694 - DNA, 20 bp, Artificial Sequence
  MKO10127694_B_Zdhhc22
  gRNA
ggtcgtgcctcagcgtgact

SEQ ID NO: 127695 - DNA, 20 bp, Artificial Sequence
  MKO10127695_B_Zdhhc23
  gRNA
gagtgggccccacgcgccct

SEQ ID NO: 127696 - DNA, 20 bp, Artificial Sequence
  MKO10127696_B_Zdhhc23
  gRNA
tgcgaatacatagatcgaaa

SEQ ID NO: 127697 - DNA, 20 bp, Artificial Sequence
  MKO10127697_B_Zdhhc23
  gRNA
ttgaggataaatagctgcgt

SEQ ID NO: 127698 - DNA, 20 bp, Artificial Sequence
  MKO10127698_B_Zdhhc24
  gRNA
ggcctcgctgggccctagtc

SEQ ID NO: 127699 - DNA, 20 bp, Artificial Sequence
  MKO10127699_B_Zdhhc24
  gRNA
tgaccatcactgtcgcctat

SEQ ID NO: 127700 - DNA, 20 bp, Artificial Sequence
  MKO10127700_B_Zdhhc24
  gRNA
gtggcaggtgcactgttgtg

SEQ ID NO: 127701 - DNA, 20 bp, Artificial Sequence
  MKO10127701_B_Zdhhc25
  gRNA
cgttcttgcggatgcagcgc

SEQ ID NO: 127702 - DNA, 20 bp, Artificial Sequence
  MKO10127702_B_Zdhhc25
  gRNA
agagtggcagtcggtacagt

SEQ ID NO: 127703 - DNA, 20 bp, Artificial Sequence
  MKO10127703_B_Zdhhc25
  gRNA
gtgtgacgcgagtgccaacg

SEQ ID NO: 127704 - DNA, 20 bp, Artificial Sequence
  MKO10127704_B_Zdhhc2
  gRNA
attcatgggcaatgtaaaaa

SEQ ID NO: 127705 - DNA, 20 bp, Artificial Sequence
  MKO10127705_B_Zdhhc2
  gRNA
ctagtgtccatggaaaacat

SEQ ID NO: 127706 - DNA, 20 bp, Artificial Sequence
  MKO10127706_B_Zdhhc2
  gRNA
gccaagaggagaagcccatc

SEQ ID NO: 127707 - DNA, 20 bp, Artificial Sequence
  MKO10127707_B_Zdhhc3
  gRNA
ttccttgcacgccctcatca

SEQ ID NO: 127708 - DNA, 20 bp, Artificial Sequence
  MKO10127708_B_Zdhhc3
  gRNA
taccgtctcatctgtgcaga

SEQ ID NO: 127709 - DNA, 20 bp, Artificial Sequence
  MKO10127709_B_Zdhhc3
  gRNA
ccgacacagttgttgaccca

SEQ ID NO: 127710 - DNA, 20 bp, Artificial Sequence
  MKO10127710_B_Zdhhc4
  gRNA
gtatgcagaatacacctgcg

SEQ ID NO: 127711 - DNA, 20 bp, Artificial Sequence
  MKO10127711_B_Zdhhc4
  gRNA
cagcagaagccgtcagcgtc

SEQ ID NO: 127712 - DNA, 20 bp, Artificial Sequence
  MKO10127712_B_Zdhhc4
  gRNA
cgtcatctaggtaagtttcc

SEQ ID NO: 127713 - DNA, 20 bp, Artificial Sequence
  MKO10127713_B_Zdhhc5
  gRNA
ttacctcggggaaaaattcc

SEQ ID NO: 127714 - DNA, 20 bp, Artificial Sequence
  MKO10127714_B_Zdhhc5
  gRNA
cacccatgatgtgagctgtc

SEQ ID NO: 127715 - DNA, 20 bp, Artificial Sequence
  MKO10127715_B_Zdhhc5
  gRNA
gggacgcacaaccaatgaac

SEQ ID NO: 127716 - DNA, 20 bp, Artificial Sequence
  MKO10127716_B_Zdhhc6
  gRNA
accacagcagttgttgatcc

SEQ ID NO: 127717 - DNA, 20 bp, Artificial Sequence
  MKO10127717_B_Zdhhc6
  gRNA
tgccgccaccttgtttgcct

SEQ ID NO: 127718 - DNA, 20 bp, Artificial Sequence
  MKO10127718_B_Zdhhc6
  gRNA
caggaggaagagcgtgaacg

SEQ ID NO: 127719 - DNA, 20 bp, Artificial Sequence
  MKO10127719_B_Zdhhc7
  gRNA
ccgtgggtgaacaactgcgt

SEQ ID NO: 127720 - DNA, 20 bp, Artificial Sequence
  MKO10127720_B_Zdhhc7
  gRNA
gctctccatgtactccttcg

SEQ ID NO: 127721 - DNA, 20 bp, Artificial Sequence
  MKO10127721_B_Zdhhc7
  gRNA
ccgacgcagttgttcaccca

SEQ ID NO: 127722 - DNA, 20 bp, Artificial Sequence
  MKO10127722_B_Zdhhc8
  gRNA
ccagctattcctgtctacaa

SEQ ID NO: 127723 - DNA, 20 bp, Artificial Sequence
  MKO10127723_B_Zdhhc8
  gRNA
ctacctcgggggaagactcc

SEQ ID NO: 127724 - DNA, 20 bp, Artificial Sequence
  MKO10127724_B_Zdhhc8
  gRNA
gtaccacgtgaaagccagtg

SEQ ID NO: 127725 - DNA, 20 bp, Artificial Sequence
  MKO10127725_B_Zdhhc9
  gRNA
ggccacatagacgatgttaa

SEQ ID NO: 127726 - DNA, 20 bp, Artificial Sequence
  MKO10127726_B_Zdhhc9
  gRNA
agtgctcgaggaatcactcc

SEQ ID NO: 127727 - DNA, 20 bp, Artificial Sequence
  MKO10127727_B_Zdhhc9
  gRNA
tggtcgctggccctgtggca

SEQ ID NO: 127728 - DNA, 20 bp, Artificial Sequence
  MKO10127728_B_Zeb1
  gRNA
gtaccgccatgagaagaacg

SEQ ID NO: 127729 - DNA, 20 bp, Artificial Sequence
  MKO10127729_B_Zeb1
  gRNA
gggcgcctcaggataaatga

SEQ ID NO: 127730 - DNA, 20 bp, Artificial Sequence
  MKO10127730_B_Zeb1
  gRNA
ggggcggtgccaagaactgc

SEQ ID NO: 127731 - DNA, 20 bp, Artificial Sequence
  MKO10127731_B_Zeb2os
  gRNA
acacgcgccacctatctttg

SEQ ID NO: 127732 - DNA, 20 bp, Artificial Sequence
  MKO10127732_B_Zeb2os
  gRNA
aaaacctcgccaagagtgtc

SEQ ID NO: 127733 - DNA, 20 bp, Artificial Sequence
  MKO10127733_B_Zeb2os
  gRNA
cacaagctttgcggaaaacc

SEQ ID NO: 127734 - DNA, 20 bp, Artificial Sequence
  MKO10127734_B_Zeb2
  gRNA
tgatagccttgcaaaccctc

SEQ ID NO: 127735 - DNA, 20 bp, Artificial Sequence
  MKO10127735_B_Zeb2
  gRNA
cctaccgcacccagctcgag

SEQ ID NO: 127736 - DNA, 20 bp, Artificial Sequence
  MKO10127736_B_Zeb2
  gRNA
ggtgaactatgacaacgtag

SEQ ID NO: 127737 - DNA, 20 bp, Artificial Sequence
  MKO10127737_B_Zer1
  gRNA
ggcggtctcgggagatgtcc

SEQ ID NO: 127738 - DNA, 20 bp, Artificial Sequence
  MKO10127738_B_Zer1
  gRNA
tgcgagtgagccgagtactg

SEQ ID NO: 127739 - DNA, 20 bp, Artificial Sequence
  MKO10127739_B_Zer1
  gRNA
ctgtgccaacatcttctatg

SEQ ID NO: 127740 - DNA, 20 bp, Artificial Sequence
  MKO10127740_B_Zfand1
  gRNA
tttcttccatttgtgtgtga

SEQ ID NO: 127741 - DNA, 20 bp, Artificial Sequence
  MKO10127741_B_Zfand1
  gRNA
gaacaaccatcacacacaaa

SEQ ID NO: 127742 - DNA, 20 bp, Artificial Sequence
  MKO10127742_B_Zfand1
  gRNA
agtccttgcttctgtgttca

SEQ ID NO: 127743 - DNA, 20 bp, Artificial Sequence
  MKO10127743_B_Zfand2a
  gRNA
tatgacccacgtaggaaaaa

SEQ ID NO: 127744 - DNA, 20 bp, Artificial Sequence
  MKO10127744_B_Zfand2a
  gRNA
tgctcccagcctggcaattg

SEQ ID NO: 127745 - DNA, 20 bp, Artificial Sequence
  MKO10127745_B_Zfand2a
  gRNA
gccagccaactgactcccga

SEQ ID NO: 127746 - DNA, 20 bp, Artificial Sequence
  MKO10127746_B_Zfand2b
  gRNA
gcaccgcccccagtccaagc

SEQ ID NO: 127747 - DNA, 20 bp, Artificial Sequence
  MKO10127747_B_Zfand2b
  gRNA
catcttctgcgcagaccatg

SEQ ID NO: 127748 - DNA, 20 bp, Artificial Sequence
  MKO10127748_B_Zfand2b
  gRNA
tgcgcagaagatgcccgagc

SEQ ID NO: 127749 - DNA, 20 bp, Artificial Sequence
  MKO10127749_B_Zfand3
  gRNA
agattcacagtccgagaacg

SEQ ID NO: 127750 - DNA, 20 bp, Artificial Sequence
  MKO10127750_B_Zfand3
  gRNA
tgtaacttcaccgagtacag

SEQ ID NO: 127751 - DNA, 20 bp, Artificial Sequence
  MKO10127751_B_Zfand3
  gRNA
cttggggtggaatcatcatc

SEQ ID NO: 127752 - DNA, 20 bp, Artificial Sequence
  MKO10127752_B_Zfand4
  gRNA
ttgtaccttgaagctggtat

SEQ ID NO: 127753 - DNA, 20 bp, Artificial Sequence
  MKO10127753_B_Zfand4
  gRNA
cgtttcgatgaagagttcca

SEQ ID NO: 127754 - DNA, 20 bp, Artificial Sequence
  MKO10127754_B_Zfand4
  gRNA
tcagctgaatttcttccgtg

SEQ ID NO: 127755 - DNA, 20 bp, Artificial Sequence
  MKO10127755_B_Zfand5
  gRNA
ctcaaatagaaatgtgcctg

SEQ ID NO: 127756 - DNA, 20 bp, Artificial Sequence
  MKO10127756_B_Zfand5
  gRNA
aacaactgtgaaggtgctgc

SEQ ID NO: 127757 - DNA, 20 bp, Artificial Sequence
  MKO10127757_B_Zfand5
  gRNA
tttatgtgtagaaagaaagt

SEQ ID NO: 127758 - DNA, 20 bp, Artificial Sequence
  MKO10127758_B_Zfand6
  gRNA
ccacagatgtactgtccact

SEQ ID NO: 127759 - DNA, 20 bp, Artificial Sequence
  MKO10127759_B_Zfand6
  gRNA
catggaggatcacattcaag

SEQ ID NO: 127760 - DNA, 20 bp, Artificial Sequence
  MKO10127760_B_Zfand6
  gRNA
gacttgctttgctcttcaga

SEQ ID NO: 127761 - DNA, 20 bp, Artificial Sequence
  MKO10127761_B_Zfat
  gRNA
tgcagatgtgcttgcgcagc

SEQ ID NO: 127762 - DNA, 20 bp, Artificial Sequence
  MKO10127762_B_Zfat
  gRNA
atgacgtcatcattcccctc

SEQ ID NO: 127763 - DNA, 20 bp, Artificial Sequence
  MKO10127763_B_Zfat
  gRNA
gtcacgagttctgactgatt

SEQ ID NO: 127764 - DNA, 20 bp, Artificial Sequence
  MKO10127764_B_Zfc3h1
  gRNA
ttccgcacagttctcgcttt

SEQ ID NO: 127765 - DNA, 20 bp, Artificial Sequence
  MKO10127765_B_Zfc3h1
  gRNA
ttcagtcggctagtaagaaa

SEQ ID NO: 127766 - DNA, 20 bp, Artificial Sequence
  MKO10127766_B_Zfc3h1
  gRNA
cgctgttcagccaaaagctt

SEQ ID NO: 127767 - DNA, 20 bp, Artificial Sequence
  MKO10127767_B_Zfhx2
  gRNA
gttccgctgcctggtgtgcc

SEQ ID NO: 127768 - DNA, 20 bp, Artificial Sequence
  MKO10127768_B_Zfhx2
  gRNA
agttctgaccgtgatctggt

SEQ ID NO: 127769 - DNA, 20 bp, Artificial Sequence
  MKO10127769_B_Zfhx2
  gRNA
cctgttgttccgtcttgttc

SEQ ID NO: 127770 - DNA, 20 bp, Artificial Sequence
  MKO10127770_B_Zfhx3
  gRNA
agactccgctctcttcgaag

SEQ ID NO: 127771 - DNA, 20 bp, Artificial Sequence
  MKO10127771_B_Zfhx3
  gRNA
ccttggtggagtagttgcac

SEQ ID NO: 127772 - DNA, 20 bp, Artificial Sequence
  MKO10127772_B_Zfhx3
  gRNA
agaggagatcaaacccgagc

SEQ ID NO: 127773 - DNA, 12 bp, Artificial Sequence
  MKO10127773_B_Zfhx4
  gRNA
aagctcattcgc

SEQ ID NO: 127774 - DNA, 20 bp, Artificial Sequence
  MKO10127774_B_Zfhx4
  gRNA
agtcacaggcgttacacttt

SEQ ID NO: 127775 - DNA, 20 bp, Artificial Sequence
  MKO10127775_B_Zfhx4
  gRNA
agggtctcctgcatcttcac

SEQ ID NO: 127776 - DNA, 20 bp, Artificial Sequence
  MKO10127776_B_Zfml
  gRNA
ggtccctcgaggattaaacc

SEQ ID NO: 127777 - DNA, 20 bp, Artificial Sequence
  MKO10127777_B_Zfml
  gRNA
actgccgacagctctcaatg

SEQ ID NO: 127778 - DNA, 20 bp, Artificial Sequence
  MKO10127778_B_Zfml
  gRNA
tttcaaatagataccctgat

SEQ ID NO: 127779 - DNA, 20 bp, Artificial Sequence
  MKO10127779_B_Zfp101
  gRNA
gtactcaccatttccagctt

SEQ ID NO: 127780 - DNA, 20 bp, Artificial Sequence
  MKO10127780_B_Zfp101
  gRNA
gtggctgtgaacttcacctc

SEQ ID NO: 127781 - DNA, 20 bp, Artificial Sequence
  MKO10127781_B_Zfp101
  gRNA
caacaaagtccactctcctg

SEQ ID NO: 127782 - DNA, 20 bp, Artificial Sequence
  MKO10127782_B_Zfp105
  gRNA
ctactcgttggcagggactc

SEQ ID NO: 127783 - DNA, 20 bp, Artificial Sequence
  MKO10127783_B_Zfp105
  gRNA
cgttctcatagtacacttgt

SEQ ID NO: 127784 - DNA, 20 bp, Artificial Sequence
  MKO10127784_B_Zfp105
  gRNA
tgatgaaagtgtcataagtc

SEQ ID NO: 127785 - DNA, 20 bp, Artificial Sequence
  MKO10127785_B_Zfp106
  gRNA
catagtgcacagttaccgtc

SEQ ID NO: 127786 - DNA, 20 bp, Artificial Sequence
  MKO10127786_B_Zfp106
  gRNA
tctcgggctgaatgcatgac

SEQ ID NO: 127787 - DNA, 20 bp, Artificial Sequence
  MKO10127787_B_Zfp106
  gRNA
gtcatgagtgccgagtgtgc

SEQ ID NO: 127788 - DNA, 20 bp, Artificial Sequence
  MKO10127788_B_Zfp108
  gRNA
accggggcacagcgcacaga

SEQ ID NO: 127789 - DNA, 20 bp, Artificial Sequence
  MKO10127789_B_Zfp108
  gRNA
cgtggccgtggtcttcagca

SEQ ID NO: 127790 - DNA, 20 bp, Artificial Sequence
  MKO10127790_B_Zfp108
  gRNA
ctcctccttgctgaagacca

SEQ ID NO: 127791 - DNA, 20 bp, Artificial Sequence
  MKO10127791_B_Zfp109
  gRNA
gagaacaatgaccaagttac

SEQ ID NO: 127792 - DNA, 20 bp, Artificial Sequence
  MKO10127792_B_Zfp109
  gRNA
cgtcctcacccactgccagg

SEQ ID NO: 127793 - DNA, 20 bp, Artificial Sequence
  MKO10127793_B_Zfp109
  gRNA
agccaagagccgtcgtggct

SEQ ID NO: 127794 - DNA, 20 bp, Artificial Sequence
  MKO10127794_B_Zfp110
  gRNA
accatcgtccttagacaccg

SEQ ID NO: 127795 - DNA, 20 bp, Artificial Sequence
  MKO10127795_B_Zfp110
  gRNA
ctgcattggccagcagtctt

SEQ ID NO: 127796 - DNA, 20 bp, Artificial Sequence
  MKO10127796_B_Zfp110
  gRNA
tttctcctttagttgatcag

SEQ ID NO: 127797 - DNA, 20 bp, Artificial Sequence
  MKO10127797_B_Zfp111
  gRNA
cacaggaggcagtgacattc

SEQ ID NO: 127798 - DNA, 20 bp, Artificial Sequence
  MKO10127798_B_Zfp111
  gRNA
cgtcctcacccactgccagg

SEQ ID NO: 127799 - DNA, 20 bp, Artificial Sequence
  MKO10127799_B_Zfp111
  gRNA
gaaaaacttcagtcgtagct

SEQ ID NO: 127800 - DNA, 20 bp, Artificial Sequence
  MKO10127800_B_Zfp112
  gRNA
cacccgagagcccacctgca

SEQ ID NO: 127801 - DNA, 20 bp, Artificial Sequence
  MKO10127801_B_Zfp112
  gRNA
ggagaaaatgaccaaattgc

SEQ ID NO: 127802 - DNA, 20 bp, Artificial Sequence
  MKO10127802_B_Zfp112
  gRNA
gaccacagccacatccctga

SEQ ID NO: 127803 - DNA, 20 bp, Artificial Sequence
  MKO10127803_B_Zfp113
  gRNA
ctatgggaacgtgttctcac

SEQ ID NO: 127804 - DNA, 20 bp, Artificial Sequence
  MKO10127804_B_Zfp113
  gRNA
cccctcgcccatggaaaccc

SEQ ID NO: 127805 - DNA, 20 bp, Artificial Sequence
  MKO10127805_B_Zfp113
  gRNA
gcttctaaaggccaagtctc

SEQ ID NO: 127806 - DNA, 20 bp, Artificial Sequence
  MKO10127806_B_Zfp114
  gRNA
cgtcctcacccactgccagg

SEQ ID NO: 127807 - DNA, 20 bp, Artificial Sequence
  MKO10127807_B_Zfp114
  gRNA
cacaggaggcagtgacattc

SEQ ID NO: 127808 - DNA, 20 bp, Artificial Sequence
  MKO10127808_B_Zfp114
  gRNA
tcctcatgtgtactacgtac

SEQ ID NO: 127809 - DNA, 20 bp, Artificial Sequence
  MKO10127809_B_Zfp119a
  gRNA
gctcttgtggttccgtgtcc

SEQ ID NO: 127810 - DNA, 20 bp, Artificial Sequence
  MKO10127810_B_Zfp119a
  gRNA
cccgctctcctcacagctcc

SEQ ID NO: 127811 - DNA, 20 bp, Artificial Sequence
  MKO10127811_B_Zfp119a
  gRNA
ttaggatgcagtgacctatg

SEQ ID NO: 127812 - DNA, 20 bp, Artificial Sequence
  MKO10127812_B_Zfp119b
  gRNA
gaggatcaacatcagagttc

SEQ ID NO: 127813 - DNA, 20 bp, Artificial Sequence
  MKO10127813_B_Zfp119b
  gRNA
taaacttctctcaagaagaa

SEQ ID NO: 127814 - DNA, 20 bp, Artificial Sequence
  MKO10127814_B_Zfp119b
  gRNA
gtttacatgcacatcctcat

SEQ ID NO: 127815 - DNA, 20 bp, Artificial Sequence
  MKO10127815_B_Zfp11
  gRNA
tttctccggtgtggatgacc

SEQ ID NO: 127816 - DNA, 20 bp, Artificial Sequence
  MKO10127816_B_Zfp11
  gRNA
cagagagaagccgtacaagc

SEQ ID NO: 127817 - DNA, 20 bp, Artificial Sequence
  MKO10127817_B_Zfp11
  gRNA
tggcgccggtgtgaacaatg

SEQ ID NO: 127818 - DNA, 20 bp, Artificial Sequence
  MKO10127818_B_Zfp120
  gRNA
aatgtccttcagaaatatta

SEQ ID NO: 127819 - DNA, 20 bp, Artificial Sequence
  MKO10127819_B_Zfp120
  gRNA
gtgcaaagtcttcaaaatat

SEQ ID NO: 127820 - DNA, 20 bp, Artificial Sequence
  MKO10127820_B_Zfp120
  gRNA
tttgctggatccttctcaga

SEQ ID NO: 127821 - DNA, 20 bp, Artificial Sequence
  MKO10127821_B_Zfp128
  gRNA
catcacgatacagagtcctc

SEQ ID NO: 127822 - DNA, 20 bp, Artificial Sequence
  MKO10127822_B_Zfp128
  gRNA
ttggcctggaatggaccacc

SEQ ID NO: 127823 - DNA, 20 bp, Artificial Sequence
  MKO10127823_B_Zfp128
  gRNA
acctgcagttatctcccagc

SEQ ID NO: 127824 - DNA, 20 bp, Artificial Sequence
  MKO10127824_B_Zfp12
  gRNA
gacatacagggatgtgatgc

SEQ ID NO: 127825 - DNA, 20 bp, Artificial Sequence
  MKO10127825_B_Zfp12
  gRNA
ctgcgactggaatgacgctg

SEQ ID NO: 127826 - DNA, 20 bp, Artificial Sequence
  MKO10127826_B_Zfp12
  gRNA
ctcagcgtcattccagtcgc

SEQ ID NO: 127827 - DNA, 20 bp, Artificial Sequence
  MKO10127827_B_Zfp131
  gRNA
gaacaccttcgaaaacatac

SEQ ID NO: 127828 - DNA, 20 bp, Artificial Sequence
  MKO10127828_B_Zfp131
  gRNA
gagcctttggttgaaattga

SEQ ID NO: 127829 - DNA, 20 bp, Artificial Sequence
  MKO10127829_B_Zfp131
  gRNA
cagccttgtgggccttaaaa

SEQ ID NO: 127830 - DNA, 20 bp, Artificial Sequence
  MKO10127830_B_Zfp13
  gRNA
actcctgtactgtcccgagg

SEQ ID NO: 127831 - DNA, 20 bp, Artificial Sequence
  MKO10127831_B_Zfp13
  gRNA
cgtccccctcgggacagtac

SEQ ID NO: 127832 - DNA, 20 bp, Artificial Sequence
  MKO10127832_B_Zfp13
  gRNA
ccacagtgttgcacattacc

SEQ ID NO: 127833 - DNA, 20 bp, Artificial Sequence
  MKO10127833_B_Zfp142
  gRNA
gctccaacgtcaaactattc

SEQ ID NO: 127834 - DNA, 20 bp, Artificial Sequence
  MKO10127834_B_Zfp142
  gRNA
gaagcaagtacacctttgcc

SEQ ID NO: 127835 - DNA, 20 bp, Artificial Sequence
  MKO10127835_B_Zfp142
  gRNA
gggtcagcatgtgcttcgat

SEQ ID NO: 127836 - DNA, 20 bp, Artificial Sequence
  MKO10127836_B_Zfp143
  gRNA
gtactgctccaaagcactaa

SEQ ID NO: 127837 - DNA, 20 bp, Artificial Sequence
  MKO10127837_B_Zfp143
  gRNA
cccagataccattagtgctt

SEQ ID NO: 127838 - DNA, 20 bp, Artificial Sequence
  MKO10127838_B_Zfp143
  gRNA
caagctgtgacactcgcaga

SEQ ID NO: 127839 - DNA, 20 bp, Artificial Sequence
  MKO10127839_B_Zfp146
  gRNA
gctctgtaagattcgatttg

SEQ ID NO: 127840 - DNA, 20 bp, Artificial Sequence
  MKO10127840_B_Zfp146
  gRNA
ccccgcttaagattctctgc

SEQ ID NO: 127841 - DNA, 20 bp, Artificial Sequence
  MKO10127841_B_Zfp146
  gRNA
catctctaaccgtgcatgtg

SEQ ID NO: 127842 - DNA, 20 bp, Artificial Sequence
  MKO10127842_B_Zfp148
  gRNA
ccatttcgctgtgatgaatg

SEQ ID NO: 127843 - DNA, 20 bp, Artificial Sequence
  MKO10127843_B_Zfp148
  gRNA
taaacagataagtgtaaagc

SEQ ID NO: 127844 - DNA, 20 bp, Artificial Sequence
  MKO10127844_B_Zfp148
  gRNA
agacacgagaagatccatac

SEQ ID NO: 127845 - DNA, 20 bp, Artificial Sequence
  MKO10127845_B_Zfp14
  gRNA
taacactatggccctggctc

SEQ ID NO: 127846 - DNA, 20 bp, Artificial Sequence
  MKO10127846_B_Zfp14
  gRNA
cagtgaaataaaattgctat

SEQ ID NO: 127847 - DNA, 20 bp, Artificial Sequence
  MKO10127847_B_Zfp14
  gRNA
aaggtgcgcccgctgtctga

SEQ ID NO: 127848 - DNA, 20 bp, Artificial Sequence
  MKO10127848_B_Zfp157
  gRNA
tgctgcttgctgcactgcga

SEQ ID NO: 127849 - DNA, 20 bp, Artificial Sequence
  MKO10127849_B_Zfp157
  gRNA
gagactcacccaaggatacc

SEQ ID NO: 127850 - DNA, 20 bp, Artificial Sequence
  MKO10127850_B_Zfp157
  gRNA
gcataggagacacttcagtc

SEQ ID NO: 127851 - DNA, 20 bp, Artificial Sequence
  MKO10127851_B_Zfp160
  gRNA
atacaaagggccctggactg

SEQ ID NO: 127852 - DNA, 20 bp, Artificial Sequence
  MKO10127852_B_Zfp160
  gRNA
atgcacagagagctttgcac

SEQ ID NO: 127853 - DNA, 20 bp, Artificial Sequence
  MKO10127853_B_Zfp160
  gRNA
gccagggatggctgtcactc

SEQ ID NO: 127854 - DNA, 20 bp, Artificial Sequence
  MKO10127854_B_Zfp169
  gRNA
agagccctctctttcgtccc

SEQ ID NO: 127855 - DNA, 20 bp, Artificial Sequence
  MKO10127855_B_Zfp169
  gRNA
tgaaggccacagccacgtca

SEQ ID NO: 127856 - DNA, 20 bp, Artificial Sequence
  MKO10127856_B_Zfp169
  gRNA
tccagctgcgtgatgagttt

SEQ ID NO: 127857 - DNA, 20 bp, Artificial Sequence
  MKO10127857_B_Zfp174
  gRNA
accgatgccagacctgtgcc

SEQ ID NO: 127858 - DNA, 20 bp, Artificial Sequence
  MKO10127858_B_Zfp174
  gRNA
ctggaagagccttcctgcga

SEQ ID NO: 127859 - DNA, 20 bp, Artificial Sequence
  MKO10127859_B_Zfp174
  gRNA
ccccaaaatggcagctagaa

SEQ ID NO: 127860 - DNA, 20 bp, Artificial Sequence
  MKO10127860_B_Zfp180
  gRNA
agacttcaagattgtaactg

SEQ ID NO: 127861 - DNA, 20 bp, Artificial Sequence
  MKO10127861_B_Zfp180
  gRNA
ctcatcatcttgttgctcca

SEQ ID NO: 127862 - DNA, 20 bp, Artificial Sequence
  MKO10127862_B_Zfp180
  gRNA
ccacttcaatgatcatctct

SEQ ID NO: 127863 - DNA, 20 bp, Artificial Sequence
  MKO10127863_B_Zfp182
  gRNA
tccagcttgataatgagatc

SEQ ID NO: 127864 - DNA, 20 bp, Artificial Sequence
  MKO10127864_B_Zfp182
  gRNA
aatacctgaactctccacag

SEQ ID NO: 127865 - DNA, 20 bp, Artificial Sequence
  MKO10127865_B_Zfp182
  gRNA
tgtagctgtggatttcactc

SEQ ID NO: 127866 - DNA, 20 bp, Artificial Sequence
  MKO10127866_B_Zfp184
  gRNA
aaacgttgatgggccgttga

SEQ ID NO: 127867 - DNA, 20 bp, Artificial Sequence
  MKO10127867_B_Zfp184
  gRNA
atgcacgaatcctcagtcca

SEQ ID NO: 127868 - DNA, 20 bp, Artificial Sequence
  MKO10127868_B_Zfp184
  gRNA
caacttacccgaaaactaga

SEQ ID NO: 127869 - DNA, 20 bp, Artificial Sequence
  MKO10127869_B_Zfp185
  gRNA
taccggattatgtaaccagc

SEQ ID NO: 127870 - DNA, 20 bp, Artificial Sequence
  MKO10127870_B_Zfp185
  gRNA
ttgcgctcctcttcaccaga

SEQ ID NO: 127871 - DNA, 20 bp, Artificial Sequence
  MKO10127871_B_Zfp185
  gRNA
ccagggagaactgtaccatc

SEQ ID NO: 127872 - DNA, 20 bp, Artificial Sequence
  MKO10127872_B_Zfp189
  gRNA
caactcacctttggctccag

SEQ ID NO: 127873 - DNA, 20 bp, Artificial Sequence
  MKO10127873_B_Zfp189
  gRNA
ctacggaaagctggtctcgc

SEQ ID NO: 127874 - DNA, 20 bp, Artificial Sequence
  MKO10127874_B_Zfp189
  gRNA
tcaggaggagtggggttatc

SEQ ID NO: 127875 - DNA, 20 bp, Artificial Sequence
  MKO10127875_B_Zfp191
  gRNA
gcacttcccgtttctgccga

SEQ ID NO: 127876 - DNA, 20 bp, Artificial Sequence
  MKO10127876_B_Zfp191
  gRNA
tcagctggagagtctcatga

SEQ ID NO: 127877 - DNA, 20 bp, Artificial Sequence
  MKO10127877_B_Zfp191
  gRNA
gatgatgccacgacagaaaa

SEQ ID NO: 127878 - DNA, 20 bp, Artificial Sequence
  MKO10127878_B_Zfp1
  gRNA
catgtacagaatcctctgcg

SEQ ID NO: 127879 - DNA, 20 bp, Artificial Sequence
  MKO10127879_B_Zfp1
  gRNA
ccagaaaatgatggggtccc

SEQ ID NO: 127880 - DNA, 20 bp, Artificial Sequence
  MKO10127880_B_Zfp1
  gRNA
gaacgatgaggtttgactgg

SEQ ID NO: 127881 - DNA, 20 bp, Artificial Sequence
  MKO10127881_B_Zfp202
  gRNA
gtatcatctagtctgggaat

SEQ ID NO: 127882 - DNA, 20 bp, Artificial Sequence
  MKO10127882_B_Zfp202
  gRNA
gtagaccttcccacagaaca

SEQ ID NO: 127883 - DNA, 20 bp, Artificial Sequence
  MKO10127883_B_Zfp202
  gRNA
gtgagaagagcaaccatctc

SEQ ID NO: 127884 - DNA, 20 bp, Artificial Sequence
  MKO10127884_B_Zfp207
  gRNA
ggtgggatataaccttgctg

SEQ ID NO: 127885 - DNA, 20 bp, Artificial Sequence
  MKO10127885_B_Zfp207
  gRNA
agaagaagcagctcaagccg

SEQ ID NO: 127886 - DNA, 20 bp, Artificial Sequence
  MKO10127886_B_Zfp207
  gRNA
atgttacctggaggcattcc

SEQ ID NO: 127887 - DNA, 20 bp, Artificial Sequence
  MKO10127887_B_Zfp212
  gRNA
agaagttcttgtttcgaagc

SEQ ID NO: 127888 - DNA, 20 bp, Artificial Sequence
  MKO10127888_B_Zfp212
  gRNA
ggaaagcaactatgagacgc

SEQ ID NO: 127889 - DNA, 20 bp, Artificial Sequence
  MKO10127889_B_Zfp212
  gRNA
ggtggaagaaggtacccacc

SEQ ID NO: 127890 - DNA, 20 bp, Artificial Sequence
  MKO10127890_B_Zfp213
  gRNA
gtctgtcgctctttaagaac

SEQ ID NO: 127891 - DNA, 20 bp, Artificial Sequence
  MKO10127891_B_Zfp213
  gRNA
gctgcctgggagacccgagc

SEQ ID NO: 127892 - DNA, 20 bp, Artificial Sequence
  MKO10127892_B_Zfp213
  gRNA
gttcttaaagagcgacagac

SEQ ID NO: 127893 - DNA, 20 bp, Artificial Sequence
  MKO10127893_B_Zfp217
  gRNA
tgcccctgatgaccaccgag

SEQ ID NO: 127894 - DNA, 20 bp, Artificial Sequence
  MKO10127894_B_Zfp217
  gRNA
acagtaactacactctctcg

SEQ ID NO: 127895 - DNA, 20 bp, Artificial Sequence
  MKO10127895_B_Zfp217
  gRNA
attcatctcagaacgcatac

SEQ ID NO: 127896 - DNA, 20 bp, Artificial Sequence
  MKO10127896_B_Zfp219
  gRNA
caccacctcgcccgtttcgc

SEQ ID NO: 127897 - DNA, 20 bp, Artificial Sequence
  MKO10127897_B_Zfp219
  gRNA
tggagggacacgatctgaag

SEQ ID NO: 127898 - DNA, 20 bp, Artificial Sequence
  MKO10127898_B_Zfp219
  gRNA
tgcagaagaaaacgggctgc

SEQ ID NO: 127899 - DNA, 20 bp, Artificial Sequence
  MKO10127899_B_Zfp229
  gRNA
tgttctgagagacgactgtt

SEQ ID NO: 127900 - DNA, 20 bp, Artificial Sequence
  MKO10127900_B_Zfp229
  gRNA
ctgacctggaatgtatttac

SEQ ID NO: 127901 - DNA, 20 bp, Artificial Sequence
  MKO10127901_B_Zfp229
  gRNA
gggagaaatggctggttctc

SEQ ID NO: 127902 - DNA, 20 bp, Artificial Sequence
  MKO10127902_B_Zfp235
  gRNA
ctcctcttcactgaagacta

SEQ ID NO: 127903 - DNA, 20 bp, Artificial Sequence
  MKO10127903_B_Zfp235
  gRNA
gagaacaatgaccaagttac

SEQ ID NO: 127904 - DNA, 20 bp, Artificial Sequence
  MKO10127904_B_Zfp235
  gRNA
ctcttgactcaacaggatta

SEQ ID NO: 127905 - DNA, 20 bp, Artificial Sequence
  MKO10127905_B_Zfp236
  gRNA
cccaatttcagcgtcacatg

SEQ ID NO: 127906 - DNA, 20 bp, Artificial Sequence
  MKO10127906_B_Zfp236
  gRNA
ccctcatgtgacgctgaaat

SEQ ID NO: 127907 - DNA, 20 bp, Artificial Sequence
  MKO10127907_B_Zfp236
  gRNA
gcaggtgtgcgctcgggtgt

SEQ ID NO: 127908 - DNA, 20 bp, Artificial Sequence
  MKO10127908_B_Zfp239
  gRNA
cctgcccacacttgccgcag

SEQ ID NO: 127909 - DNA, 20 bp, Artificial Sequence
  MKO10127909_B_Zfp239
  gRNA
ttacttagtgaagctccttg

SEQ ID NO: 127910 - DNA, 20 bp, Artificial Sequence
  MKO10127910_B_Zfp239
  gRNA
ccgcactcctcgcacgcata

SEQ ID NO: 127911 - DNA, 20 bp, Artificial Sequence
  MKO10127911_B_Zfp248
  gRNA
cgaagttgctataattctcc

SEQ ID NO: 127912 - DNA, 20 bp, Artificial Sequence
  MKO10127912_B_Zfp248
  gRNA
tctatcttgaagattacatc

SEQ ID NO: 127913 - DNA, 20 bp, Artificial Sequence
  MKO10127913_B_Zfp248
  gRNA
ctactgtacctgggtggcac

SEQ ID NO: 127914 - DNA, 20 bp, Artificial Sequence
  MKO10127914_B_Zfp251
  gRNA
gtcttgagacgttgccagac

SEQ ID NO: 127915 - DNA, 20 bp, Artificial Sequence
  MKO10127915_B_Zfp251
  gRNA
caagtcctgctccccgactc

SEQ ID NO: 127916 - DNA, 20 bp, Artificial Sequence
  MKO10127916_B_Zfp251
  gRNA
cttcagccccgagaagatcc

SEQ ID NO: 127917 - DNA, 20 bp, Artificial Sequence
  MKO10127917_B_Zfp259
  gRNA
gttccagccacagtgttcgc

SEQ ID NO: 127918 - DNA, 20 bp, Artificial Sequence
  MKO10127918_B_Zfp259
  gRNA
ctcatcaattctctctgcga

SEQ ID NO: 127919 - DNA, 20 bp, Artificial Sequence
  MKO10127919_B_Zfp259
  gRNA
ccagtacttaccagtgtgaa

SEQ ID NO: 127920 - DNA, 20 bp, Artificial Sequence
  MKO10127920_B_Zfp260
  gRNA
cctctcttacagtgcatatg

SEQ ID NO: 127921 - DNA, 20 bp, Artificial Sequence
  MKO10127921_B_Zfp260
  gRNA
gagaagtcccctgagtgtac

SEQ ID NO: 127922 - DNA, 20 bp, Artificial Sequence
  MKO10127922_B_Zfp260
  gRNA
aaacaccagaatatccatag

SEQ ID NO: 127923 - DNA, 20 bp, Artificial Sequence
  MKO10127923_B_Zfp263
  gRNA
gcggggagcagaagtgcttt

SEQ ID NO: 127924 - DNA, 20 bp, Artificial Sequence
  MKO10127924_B_Zfp263
  gRNA
gggcttcgctcagtctccat

SEQ ID NO: 127925 - DNA, 20 bp, Artificial Sequence
  MKO10127925_B_Zfp263
  gRNA
tcaagcacccacgtggagca

SEQ ID NO: 127926 - DNA, 20 bp, Artificial Sequence
  MKO10127926_B_Zfp266
  gRNA
tcagaagaatctataccgag

SEQ ID NO: 127927 - DNA, 20 bp, Artificial Sequence
  MKO10127927_B_Zfp266
  gRNA
agctctgaatcgtcaattgt

SEQ ID NO: 127928 - DNA, 20 bp, Artificial Sequence
  MKO10127928_B_Zfp266
  gRNA
tacgagaacttgacttcagt

SEQ ID NO: 127929 - DNA, 20 bp, Artificial Sequence
  MKO10127929_B_Zfp26
  gRNA
cctcactggacccagttcag

SEQ ID NO: 127930 - DNA, 20 bp, Artificial Sequence
  MKO10127930_B_Zfp26
  gRNA
cctctgaactgggtccagtg

SEQ ID NO: 127931 - DNA, 20 bp, Artificial Sequence
  MKO10127931_B_Zfp26
  gRNA
cttctccttgactgcagttc

SEQ ID NO: 127932 - DNA, 20 bp, Artificial Sequence
  MKO10127932_B_Zfp273
  gRNA
acacatctgtgaatgacaga

SEQ ID NO: 127933 - DNA, 20 bp, Artificial Sequence
  MKO10127933_B_Zfp273
  gRNA
gatcctcacccaggaacaca

SEQ ID NO: 127934 - DNA, 20 bp, Artificial Sequence
  MKO10127934_B_Zfp273
  gRNA
ttcctacacacctagatgga

SEQ ID NO: 127935 - DNA, 20 bp, Artificial Sequence
  MKO10127935_B_Zfp275
  gRNA
ggcagtccctcttgagatgc

SEQ ID NO: 127936 - DNA, 20 bp, Artificial Sequence
  MKO10127936_B_Zfp275
  gRNA
cttccccaagacggagcccc

SEQ ID NO: 127937 - DNA, 20 bp, Artificial Sequence
  MKO10127937_B_Zfp275
  gRNA
cagtttgaacccggagcagc

SEQ ID NO: 127938 - DNA, 20 bp, Artificial Sequence
  MKO10127938_B_Zfp276
  gRNA
agccaagtgtggctgcgtac

SEQ ID NO: 127939 - DNA, 20 bp, Artificial Sequence
  MKO10127939_B_Zfp276
  gRNA
gacgttgactctctgtaaga

SEQ ID NO: 127940 - DNA, 20 bp, Artificial Sequence
  MKO10127940_B_Zfp276
  gRNA
agggcaactgggtgagacgc

SEQ ID NO: 127941 - DNA, 20 bp, Artificial Sequence
  MKO10127941_B_Zfp277
  gRNA
cacgctgcaaaaatcagtga

SEQ ID NO: 127942 - DNA, 20 bp, Artificial Sequence
  MKO10127942_B_Zfp277
  gRNA
agatggagacccttctaaag

SEQ ID NO: 127943 - DNA, 20 bp, Artificial Sequence
  MKO10127943_B_Zfp277
  gRNA
gcacttaccaaatggagctg

SEQ ID NO: 127944 - DNA, 20 bp, Artificial Sequence
  MKO10127944_B_Zfp27
  gRNA
tatgcttacccactgagcgc

SEQ ID NO: 127945 - DNA, 20 bp, Artificial Sequence
  MKO10127945_B_Zfp27
  gRNA
gagatttgacctgccgctaa

SEQ ID NO: 127946 - DNA, 20 bp, Artificial Sequence
  MKO10127946_B_Zfp27
  gRNA
gtacacgtgacgtctcctac

SEQ ID NO: 127947 - DNA, 20 bp, Artificial Sequence
  MKO10127947_B_Zfp280b
  gRNA
taaaaactgtagtcggcact

SEQ ID NO: 127948 - DNA, 20 bp, Artificial Sequence
  MKO10127948_B_Zfp280b
  gRNA
ggtccggtgacgtgtgcact

SEQ ID NO: 127949 - DNA, 20 bp, Artificial Sequence
  MKO10127949_B_Zfp280b
  gRNA
gccaatccactgtcctgacg

SEQ ID NO: 127950 - DNA, 20 bp, Artificial Sequence
  MKO10127950_B_Zfp280c
  gRNA
gataactctgttcaagaaaa

SEQ ID NO: 127951 - DNA, 20 bp, Artificial Sequence
  MKO10127951_B_Zfp280c
  gRNA
gatgatgagctgatctttgt

SEQ ID NO: 127952 - DNA, 20 bp, Artificial Sequence
  MKO10127952_B_Zfp280c
  gRNA
tcttcaaagggactaaagaa

SEQ ID NO: 127953 - DNA, 20 bp, Artificial Sequence
  MKO10127953_B_Zfp280d
  gRNA
tattcctcttgaatgagagc

SEQ ID NO: 127954 - DNA, 20 bp, Artificial Sequence
  MKO10127954_B_Zfp280d
  gRNA
gaaagtgaaagaagtcgaag

SEQ ID NO: 127955 - DNA, 20 bp, Artificial Sequence
  MKO10127955_B_Zfp280d
  gRNA
aagtcagatctgcaacttga

SEQ ID NO: 127956 - DNA, 20 bp, Artificial Sequence
  MKO10127956_B_Zfp281
  gRNA
cgctgctcagtaatacatcg

SEQ ID NO: 127957 - DNA, 20 bp, Artificial Sequence
  MKO10127957_B_Zfp281
  gRNA
cggggtatgaaaatcggcag

SEQ ID NO: 127958 - DNA, 20 bp, Artificial Sequence
  MKO10127958_B_Zfp281
  gRNA
ataacacgcactgcggggga

SEQ ID NO: 127959 - DNA, 20 bp, Artificial Sequence
  MKO10127959_B_Zfp282
  gRNA
gggcttcttctcgctttacc

SEQ ID NO: 127960 - DNA, 20 bp, Artificial Sequence
  MKO10127960_B_Zfp282
  gRNA
gaaggagctctacagcaatc

SEQ ID NO: 127961 - DNA, 20 bp, Artificial Sequence
  MKO10127961_B_Zfp282
  gRNA
ggcacaggacatatcctccc

SEQ ID NO: 127962 - DNA, 20 bp, Artificial Sequence
  MKO10127962_B_Zfp286
  gRNA
caaacccgataactataatt

SEQ ID NO: 127963 - DNA, 20 bp, Artificial Sequence
  MKO10127963_B_Zfp286
  gRNA
tgttcttacagagcgagacc

SEQ ID NO: 127964 - DNA, 20 bp, Artificial Sequence
  MKO10127964_B_Zfp286
  gRNA
atcttccgaattatagttat

SEQ ID NO: 127965 - DNA, 20 bp, Artificial Sequence
  MKO10127965_B_Zfp287
  gRNA
tctaagacgggaatcacagt

SEQ ID NO: 127966 - DNA, 20 bp, Artificial Sequence
  MKO10127966_B_Zfp287
  gRNA
ttcccgtcttagaagagccg

SEQ ID NO: 127967 - DNA, 20 bp, Artificial Sequence
  MKO10127967_B_Zfp287
  gRNA
ttatacaattccttctgaac

SEQ ID NO: 127968 - DNA, 20 bp, Artificial Sequence
  MKO10127968_B_Zfp28
  gRNA
ttccctcacccagggatgct

SEQ ID NO: 127969 - DNA, 20 bp, Artificial Sequence
  MKO10127969_B_Zfp28
  gRNA
gatgagaaaaggccagcacc

SEQ ID NO: 127970 - DNA, 20 bp, Artificial Sequence
  MKO10127970_B_Zfp28
  gRNA
gctttatgtctagtccctgt

SEQ ID NO: 127971 - DNA, 20 bp, Artificial Sequence
  MKO10127971_B_Zfp292
  gRNA
acaatttcagaccttggtac

SEQ ID NO: 127972 - DNA, 20 bp, Artificial Sequence
  MKO10127972_B_Zfp292
  gRNA
tctcctgagctagagtagct

SEQ ID NO: 127973 - DNA, 20 bp, Artificial Sequence
  MKO10127973_B_Zfp292
  gRNA
ttgagctatcagataagcag

SEQ ID NO: 127974 - DNA, 20 bp, Artificial Sequence
  MKO10127974_B_Zfp296
  gRNA
ggcggttgagcttgctactc

SEQ ID NO: 127975 - DNA, 20 bp, Artificial Sequence
  MKO10127975_B_Zfp296
  gRNA
atggaaagatcttcccgcaa

SEQ ID NO: 127976 - DNA, 20 bp, Artificial Sequence
  MKO10127976_B_Zfp296
  gRNA
caagtctccgaccccatctc

SEQ ID NO: 127977 - DNA, 20 bp, Artificial Sequence
  MKO10127977_B_Zfp2
  gRNA
gaatcctctgatgcttaagc

SEQ ID NO: 127978 - DNA, 20 bp, Artificial Sequence
  MKO10127978_B_Zfp2
  gRNA
ttcctgtgacaccttgtaat

SEQ ID NO: 127979 - DNA, 20 bp, Artificial Sequence
  MKO10127979_B_Zfp2
  gRNA
ctgttgcccctttaaccaac

SEQ ID NO: 127980 - DNA, 20 bp, Artificial Sequence
  MKO10127980_B_Zfp300
  gRNA
gtgatcgcctctttagagaa

SEQ ID NO: 127981 - DNA, 20 bp, Artificial Sequence
  MKO10127981_B_Zfp300
  gRNA
gaataaaagtatgcaattac

SEQ ID NO: 127982 - DNA, 20 bp, Artificial Sequence
  MKO10127982_B_Zfp300
  gRNA
tcaggaagaatggaatcaac

SEQ ID NO: 127983 - DNA, 20 bp, Artificial Sequence
  MKO10127983_B_Zfp30
  gRNA
tctgtacagatccctctcgt

SEQ ID NO: 127984 - DNA, 20 bp, Artificial Sequence
  MKO10127984_B_Zfp30
  gRNA
aggagccgtggatgattgtg

SEQ ID NO: 127985 - DNA, 20 bp, Artificial Sequence
  MKO10127985_B_Zfp30
  gRNA
gattccagaatcgcaagaac

SEQ ID NO: 127986 - DNA, 20 bp, Artificial Sequence
  MKO10127986_B_Zfp316
  gRNA
agtgacgacatctccctcct

SEQ ID NO: 127987 - DNA, 20 bp, Artificial Sequence
  MKO10127987_B_Zfp316
  gRNA
tctgtaccgggaagtaatgc

SEQ ID NO: 127988 - DNA, 20 bp, Artificial Sequence
  MKO10127988_B_Zfp316
  gRNA
gagatacccgggaggtctgt

SEQ ID NO: 127989 - DNA, 20 bp, Artificial Sequence
  MKO10127989_B_Zfp317
  gRNA
tgattcttgtcagcagagtt

SEQ ID NO: 127990 - DNA, 20 bp, Artificial Sequence
  MKO10127990_B_Zfp317
  gRNA
agcatctgatgatgtaagat

SEQ ID NO: 127991 - DNA, 20 bp, Artificial Sequence
  MKO10127991_B_Zfp317
  gRNA
gacatttcaagatattgctg

SEQ ID NO: 127992 - DNA, 20 bp, Artificial Sequence
  MKO10127992_B_Zfp318
  gRNA
ctcgtagtcgtcccaatctc

SEQ ID NO: 127993 - DNA, 20 bp, Artificial Sequence
  MKO10127993_B_Zfp318
  gRNA
acgactacgagcagcttgtt

SEQ ID NO: 127994 - DNA, 20 bp, Artificial Sequence
  MKO10127994_B_Zfp318
  gRNA
agatcccgagtttcgagaac

SEQ ID NO: 127995 - DNA, 20 bp, Artificial Sequence
  MKO10127995_B_Zfp319
  gRNA
cgccacatgtacgcgcattc

SEQ ID NO: 127996 - DNA, 20 bp, Artificial Sequence
  MKO10127996_B_Zfp319
  gRNA
ctcgcagacagcgcacttgt

SEQ ID NO: 127997 - DNA, 20 bp, Artificial Sequence
  MKO10127997_B_Zfp319
  gRNA
ttgcaggagtatgccgtaca

SEQ ID NO: 127998 - DNA, 20 bp, Artificial Sequence
  MKO10127998_B_Zfp322a
  gRNA
gtgagaaaagttaccgacac

SEQ ID NO: 127999 - DNA, 20 bp, Artificial Sequence
  MKO10127999_B_Zfp322a
  gRNA
gtgtgagagaacatataccg

SEQ ID NO: 128000 - DNA, 20 bp, Artificial Sequence
  MKO10128000_B_Zfp322a
  gRNA
tttcacctgtatggcttcgc

SEQ ID NO: 128001 - DNA, 20 bp, Artificial Sequence
  MKO10128001_B_Zfp324
  gRNA
cttgtaccgccatgtaatgc

SEQ ID NO: 128002 - DNA, 20 bp, Artificial Sequence
  MKO10128002_B_Zfp324
  gRNA
tcattccactgcaacgagtg

SEQ ID NO: 128003 - DNA, 20 bp, Artificial Sequence
  MKO10128003_B_Zfp324
  gRNA
gttggatgatcacacgaggc

SEQ ID NO: 128004 - DNA, 20 bp, Artificial Sequence
  MKO10128004_B_Zfp326
  gRNA
cttcccagctagacccgccc

SEQ ID NO: 128005 - DNA, 20 bp, Artificial Sequence
  MKO10128005_B_Zfp326
  gRNA
tcaggaatggatcgtgatta

SEQ ID NO: 128006 - DNA, 20 bp, Artificial Sequence
  MKO10128006_B_Zfp326
  gRNA
gacactcaccgttaaagtcc

SEQ ID NO: 128007 - DNA, 20 bp, Artificial Sequence
  MKO10128007_B_Zfp329
  gRNA
cttcaaacggaactcctctc

SEQ ID NO: 128008 - DNA, 20 bp, Artificial Sequence
  MKO10128008_B_Zfp329
  gRNA
gaagtctctgatgtactacc

SEQ ID NO: 128009 - DNA, 20 bp, Artificial Sequence
  MKO10128009_B_Zfp329
  gRNA
acaacttgattgtacatcga

SEQ ID NO: 128010 - DNA, 20 bp, Artificial Sequence
  MKO10128010_B_Zfp330
  gRNA
gtacagtactggccttgcta

SEQ ID NO: 128011 - DNA, 20 bp, Artificial Sequence
  MKO10128011_B_Zfp330
  gRNA
aggaatgcgacaaatgtcag

SEQ ID NO: 128012 - DNA, 20 bp, Artificial Sequence
  MKO10128012_B_Zfp330
  gRNA
ttaccacactgtgcacaaat

SEQ ID NO: 128013 - DNA, 20 bp, Artificial Sequence
  MKO10128013_B_Zfp334
  gRNA
gacctacagtaacctcatcg

SEQ ID NO: 128014 - DNA, 20 bp, Artificial Sequence
  MKO10128014_B_Zfp334
  gRNA
ggctgtggacttcacccgcg

SEQ ID NO: 128015 - DNA, 20 bp, Artificial Sequence
  MKO10128015_B_Zfp334
  gRNA
accagatgtgatcttaaaac

SEQ ID NO: 128016 - DNA, 20 bp, Artificial Sequence
  MKO10128016_B_Zfp335
  gRNA
taccgtcatccgggccttgc

SEQ ID NO: 128017 - DNA, 20 bp, Artificial Sequence
  MKO10128017_B_Zfp335
  gRNA
caaccctgctccgccacatg

SEQ ID NO: 128018 - DNA, 20 bp, Artificial Sequence
  MKO10128018_B_Zfp335
  gRNA
agattcgatgatcttgtcaa

SEQ ID NO: 128019 - DNA, 20 bp, Artificial Sequence
  MKO10128019_B_Zfp341
  gRNA
caccgttccgttcccagcca

SEQ ID NO: 128020 - DNA, 20 bp, Artificial Sequence
  MKO10128020_B_Zfp341
  gRNA
cctggcactgttcacgcttg

SEQ ID NO: 128021 - DNA, 20 bp, Artificial Sequence
  MKO10128021_B_Zfp341
  gRNA
ctggaggcattggctggtcc

SEQ ID NO: 128022 - DNA, 20 bp, Artificial Sequence
  MKO10128022_B_Zfp345
  gRNA
atgtgcatgtgaacttcacg

SEQ ID NO: 128023 - DNA, 20 bp, Artificial Sequence
  MKO10128023_B_Zfp345
  gRNA
tatagcagcgagattcctgt

SEQ ID NO: 128024 - DNA, 20 bp, Artificial Sequence
  MKO10128024_B_Zfp345
  gRNA
cttcatatttctagaagata

SEQ ID NO: 128025 - DNA, 20 bp, Artificial Sequence
  MKO10128025_B_Zfp346
  gRNA
gcagaccttacactgggtgc

SEQ ID NO: 128026 - DNA, 20 bp, Artificial Sequence
  MKO10128026_B_Zfp346
  gRNA
cagaggctgcagaatttgtc

SEQ ID NO: 128027 - DNA, 20 bp, Artificial Sequence
  MKO10128027_B_Zfp346
  gRNA
tagtgcgactgtgccacagc

SEQ ID NO: 128028 - DNA, 20 bp, Artificial Sequence
  MKO10128028_B_Zfp352
  gRNA
ggtcttgtcctcttagaccc

SEQ ID NO: 128029 - DNA, 20 bp, Artificial Sequence
  MKO10128029_B_Zfp352
  gRNA
gggcgctgttgagctgtgta

SEQ ID NO: 128030 - DNA, 20 bp, Artificial Sequence
  MKO10128030_B_Zfp352
  gRNA
ccaattggacttgtcacctg

SEQ ID NO: 128031 - DNA, 20 bp, Artificial Sequence
  MKO10128031_B_Zfp354a
  gRNA
gatgtcgcttcccattgctc

SEQ ID NO: 128032 - DNA, 20 bp, Artificial Sequence
  MKO10128032_B_Zfp354a
  gRNA
tcaccgagagagaagcctcc

SEQ ID NO: 128033 - DNA, 20 bp, Artificial Sequence
  MKO10128033_B_Zfp354a
  gRNA
gtgatctccctgctgcagca

SEQ ID NO: 128034 - DNA, 20 bp, Artificial Sequence
  MKO10128034_B_Zfp354b
  gRNA
gtcggtgacgtttgaagacg

SEQ ID NO: 128035 - DNA, 20 bp, Artificial Sequence
  MKO10128035_B_Zfp354b
  gRNA
ttcttctccttgttgcaaca

SEQ ID NO: 128036 - DNA, 20 bp, Artificial Sequence
  MKO10128036_B_Zfp354b
  gRNA
tgagcatggctccagagcaa

SEQ ID NO: 128037 - DNA, 20 bp, Artificial Sequence
  MKO10128037_B_Zfp354c
  gRNA
tcacctaggcaggtgtcttc

SEQ ID NO: 128038 - DNA, 20 bp, Artificial Sequence
  MKO10128038_B_Zfp354c
  gRNA
gcctcttacccagcgaggcc

SEQ ID NO: 128039 - DNA, 20 bp, Artificial Sequence
  MKO10128039_B_Zfp354c
  gRNA
ggaaatggctgtggatttgc

SEQ ID NO: 128040 - DNA, 20 bp, Artificial Sequence
  MKO10128040_B_Zfp358
  gRNA
ggcgctcgccagaatgcacg

SEQ ID NO: 128041 - DNA, 20 bp, Artificial Sequence
  MKO10128041_B_Zfp358
  gRNA
cgccgtgcgtgcgcaggtgt

SEQ ID NO: 128042 - DNA, 20 bp, Artificial Sequence
  MKO10128042_B_Zfp358
  gRNA
gaggtcgaaactcgaagaca

SEQ ID NO: 128043 - DNA, 20 bp, Artificial Sequence
  MKO10128043_B_Zfp35
  gRNA
caagaccatcactttctgtc

SEQ ID NO: 128044 - DNA, 20 bp, Artificial Sequence
  MKO10128044_B_Zfp35
  gRNA
cttcagtcagcgctctgatc

SEQ ID NO: 128045 - DNA, 20 bp, Artificial Sequence
  MKO10128045_B_Zfp35
  gRNA
ggtgagactaagatcaagat

SEQ ID NO: 128046 - DNA, 20 bp, Artificial Sequence
  MKO10128046_B_Zfp362
  gRNA
gcacccacctggtatgttgc

SEQ ID NO: 128047 - DNA, 20 bp, Artificial Sequence
  MKO10128047_B_Zfp362
  gRNA
tgttgtcccgtaccccatcc

SEQ ID NO: 128048 - DNA, 20 bp, Artificial Sequence
  MKO10128048_B_Zfp362
  gRNA
ctccggtgagaccgcaaagg

SEQ ID NO: 128049 - DNA, 20 bp, Artificial Sequence
  MKO10128049_B_Zfp365
  gRNA
tcacagacatcccatcgaac

SEQ ID NO: 128050 - DNA, 20 bp, Artificial Sequence
  MKO10128050_B_Zfp365
  gRNA
ggccttggcgggctgcatcc

SEQ ID NO: 128051 - DNA, 20 bp, Artificial Sequence
  MKO10128051_B_Zfp365
  gRNA
catctgggcttcctgttcga

SEQ ID NO: 128052 - DNA, 20 bp, Artificial Sequence
  MKO10128052_B_Zfp366
  gRNA
gccaatgttccagtccgacg

SEQ ID NO: 128053 - DNA, 20 bp, Artificial Sequence
  MKO10128053_B_Zfp366
  gRNA
ccccttcagcgtgaacttac

SEQ ID NO: 128054 - DNA, 20 bp, Artificial Sequence
  MKO10128054_B_Zfp366
  gRNA
gaacctgacccgccacatga

SEQ ID NO: 128055 - DNA, 20 bp, Artificial Sequence
  MKO10128055_B_Zfp367
  gRNA
tctctcttcagccgggcata

SEQ ID NO: 128056 - DNA, 20 bp, Artificial Sequence
  MKO10128056_B_Zfp367
  gRNA
agaagagtggcgcccagcgc

SEQ ID NO: 128057 - DNA, 20 bp, Artificial Sequence
  MKO10128057_B_Zfp367
  gRNA
cacagtctgggtagtcacac

SEQ ID NO: 128058 - DNA, 20 bp, Artificial Sequence
  MKO10128058_B_Zfp369
  gRNA
ctcaataacatgatttcagt

SEQ ID NO: 128059 - DNA, 20 bp, Artificial Sequence
  MKO10128059_B_Zfp369
  gRNA
cctaccgctagagaacactg

SEQ ID NO: 128060 - DNA, 20 bp, Artificial Sequence
  MKO10128060_B_Zfp369
  gRNA
ctgtcctcagtgttctctag

SEQ ID NO: 128061 - DNA, 20 bp, Artificial Sequence
  MKO10128061_B_Zfp36l1
  gRNA
attcggacatgggccggaag

SEQ ID NO: 128062 - DNA, 20 bp, Artificial Sequence
  MKO10128062_B_Zfp36l1
  gRNA
agagtgaccgagtgcctgcg

SEQ ID NO: 128063 - DNA, 20 bp, Artificial Sequence
  MKO10128063_B_Zfp36l1
  gRNA
cctgagcgccgatgacctct

SEQ ID NO: 128064 - DNA, 20 bp, Artificial Sequence
  MKO10128064_B_Zfp36l2
  gRNA
caagaagtcgatatcgtaga

SEQ ID NO: 128065 - DNA, 20 bp, Artificial Sequence
  MKO10128065_B_Zfp36l2
  gRNA
gacccacaacttcgccgccg

SEQ ID NO: 128066 - DNA, 20 bp, Artificial Sequence
  MKO10128066_B_Zfp36l2
  gRNA
gaccgctcgttcagcgagaa

SEQ ID NO: 128067 - DNA, 20 bp, Artificial Sequence
  MKO10128067_B_Zfp36l3
  gRNA
ccgcccgctcaacactaatg

SEQ ID NO: 128068 - DNA, 20 bp, Artificial Sequence
  MKO10128068_B_Zfp36l3
  gRNA
aggctatgttcgccattccg

SEQ ID NO: 128069 - DNA, 20 bp, Artificial Sequence
  MKO10128069_B_Zfp36l3
  gRNA
ttgaccgacaggaagcccga

SEQ ID NO: 128070 - DNA, 20 bp, Artificial Sequence
  MKO10128070_B_Zfp36
  gRNA
gtagatggcagagagatcca

SEQ ID NO: 128071 - DNA, 20 bp, Artificial Sequence
  MKO10128071_B_Zfp36
  gRNA
gaaagcgggcgttgtcgcta

SEQ ID NO: 128072 - DNA, 20 bp, Artificial Sequence
  MKO10128072_B_Zfp36
  gRNA
catgacctgtcatccgacca

SEQ ID NO: 128073 - DNA, 20 bp, Artificial Sequence
  MKO10128073_B_Zfp37
  gRNA
tcatagtgcatcccatacca

SEQ ID NO: 128074 - DNA, 20 bp, Artificial Sequence
  MKO10128074_B_Zfp37
  gRNA
acaagacatagtctccgtgt

SEQ ID NO: 128075 - DNA, 20 bp, Artificial Sequence
  MKO10128075_B_Zfp37
  gRNA
cacggagactatgtcttgtt

SEQ ID NO: 128076 - DNA, 20 bp, Artificial Sequence
  MKO10128076_B_Zfp382
  gRNA
gtacctagatagctctgact

SEQ ID NO: 128077 - DNA, 20 bp, Artificial Sequence
  MKO10128077_B_Zfp382
  gRNA
gtcacgtccttgaatgacac

SEQ ID NO: 128078 - DNA, 20 bp, Artificial Sequence
  MKO10128078_B_Zfp382
  gRNA
aaacctcaacgccatgtcca

SEQ ID NO: 128079 - DNA, 20 bp, Artificial Sequence
  MKO10128079_B_Zfp383
  gRNA
ggtgttcagtgacgtgtctc

SEQ ID NO: 128080 - DNA, 20 bp, Artificial Sequence
  MKO10128080_B_Zfp383
  gRNA
tttgtacaagtctctctgcg

SEQ ID NO: 128081 - DNA, 20 bp, Artificial Sequence
  MKO10128081_B_Zfp383
  gRNA
cttctcacttacccgagcac

SEQ ID NO: 128082 - DNA, 20 bp, Artificial Sequence
  MKO10128082_B_Zfp384
  gRNA
actcacctgccctgagactg

SEQ ID NO: 128083 - DNA, 20 bp, Artificial Sequence
  MKO10128083_B_Zfp384
  gRNA
aaggagtctcctgttctcag

SEQ ID NO: 128084 - DNA, 20 bp, Artificial Sequence
  MKO10128084_B_Zfp384
  gRNA
ggcagggacagttagcaaag

SEQ ID NO: 128085 - DNA, 20 bp, Artificial Sequence
  MKO10128085_B_Zfp385a
  gRNA
tcagatccgcttcaattctc

SEQ ID NO: 128086 - DNA, 20 bp, Artificial Sequence
  MKO10128086_B_Zfp385a
  gRNA
cagggtgtaaccaagggtga

SEQ ID NO: 128087 - DNA, 20 bp, Artificial Sequence
  MKO10128087_B_Zfp385a
  gRNA
tgaagttcccccttcaccct

SEQ ID NO: 128088 - DNA, 20 bp, Artificial Sequence
  MKO10128088_B_Zfp385b
  gRNA
tccttccaaggacagcgcaa

SEQ ID NO: 128089 - DNA, 20 bp, Artificial Sequence
  MKO10128089_B_Zfp385b
  gRNA
ttactcactgtgttaaagtt

SEQ ID NO: 128090 - DNA, 20 bp, Artificial Sequence
  MKO10128090_B_Zfp385b
  gRNA
gcagtcattaaccacacatt

SEQ ID NO: 128091 - DNA, 20 bp, Artificial Sequence
  MKO10128091_B_Zfp385c
  gRNA
ccgcagatgacagatgttac

SEQ ID NO: 128092 - DNA, 20 bp, Artificial Sequence
  MKO10128092_B_Zfp385c
  gRNA
cctcgaaacccgaccacaaa

SEQ ID NO: 128093 - DNA, 20 bp, Artificial Sequence
  MKO10128093_B_Zfp385c
  gRNA
agacaccactgtcccgtttg

SEQ ID NO: 128094 - DNA, 20 bp, Artificial Sequence
  MKO10128094_B_Zfp386
  gRNA
caagtcgagtcttcctatcc

SEQ ID NO: 128095 - DNA, 20 bp, Artificial Sequence
  MKO10128095_B_Zfp386
  gRNA
gctgaccaagaattgagtag

SEQ ID NO: 128096 - DNA, 20 bp, Artificial Sequence
  MKO10128096_B_Zfp386
  gRNA
ataaaactttaaacgttact

SEQ ID NO: 128097 - DNA, 20 bp, Artificial Sequence
  MKO10128097_B_Zfp395
  gRNA
gctggttcgtctaacaggaa

SEQ ID NO: 128098 - DNA, 20 bp, Artificial Sequence
  MKO10128098_B_Zfp395
  gRNA
tgaatccaggaagtcggatg

SEQ ID NO: 128099 - DNA, 20 bp, Artificial Sequence
  MKO10128099_B_Zfp395
  gRNA
acgaaccagccccacgaaag

SEQ ID NO: 128100 - DNA, 20 bp, Artificial Sequence
  MKO10128100_B_Zfp397
  gRNA
gctcagctctcactagacat

SEQ ID NO: 128101 - DNA, 20 bp, Artificial Sequence
  MKO10128101_B_Zfp397
  gRNA
caggtcccagataatctaca

SEQ ID NO: 128102 - DNA, 20 bp, Artificial Sequence
  MKO10128102_B_Zfp397
  gRNA
attcaaccagcatccaagtc

SEQ ID NO: 128103 - DNA, 20 bp, Artificial Sequence
  MKO10128103_B_Zfp398
  gRNA
agcggcggtcgcctcagcca

SEQ ID NO: 128104 - DNA, 20 bp, Artificial Sequence
  MKO10128104_B_Zfp398
  gRNA
gctcactctctttagactcc

SEQ ID NO: 128105 - DNA, 20 bp, Artificial Sequence
  MKO10128105_B_Zfp398
  gRNA
aatccaagacagaatatctg

SEQ ID NO: 128106 - DNA, 20 bp, Artificial Sequence
  MKO10128106_B_Zfp39
  gRNA
gtcccaaagcagagccgagc

SEQ ID NO: 128107 - DNA, 20 bp, Artificial Sequence
  MKO10128107_B_Zfp39
  gRNA
ctccagtaactgtaggtgac

SEQ ID NO: 128108 - DNA, 20 bp, Artificial Sequence
  MKO10128108_B_Zfp39
  gRNA
ttcactcacccaaggactcc

SEQ ID NO: 128109 - DNA, 20 bp, Artificial Sequence
  MKO10128109_B_Zfp3
  gRNA
tagtaagctctatactcccc

SEQ ID NO: 128110 - DNA, 20 bp, Artificial Sequence
  MKO10128110_B_Zfp3
  gRNA
gccagcgcatgtgctgcctc

SEQ ID NO: 128111 - DNA, 20 bp, Artificial Sequence
  MKO10128111_B_Zfp3
  gRNA
cgctatggactctcatatgc

SEQ ID NO: 128112 - DNA, 20 bp, Artificial Sequence
  MKO10128112_B_Zfp407
  gRNA
gcacggagttggcaccccaa

SEQ ID NO: 128113 - DNA, 20 bp, Artificial Sequence
  MKO10128113_B_Zfp407
  gRNA
cagcgatgaaagaccactac

SEQ ID NO: 128114 - DNA, 20 bp, Artificial Sequence
  MKO10128114_B_Zfp407
  gRNA
gagtacaagtgtcacgtctg

SEQ ID NO: 128115 - DNA, 20 bp, Artificial Sequence
  MKO10128115_B_Zfp408
  gRNA
tccccgcaagaggattcagc

SEQ ID NO: 128116 - DNA, 20 bp, Artificial Sequence
  MKO10128116_B_Zfp408
  gRNA
cccggcagcaaagttccact

SEQ ID NO: 128117 - DNA, 20 bp, Artificial Sequence
  MKO10128117_B_Zfp408
  gRNA
ctcctcaatacctcctcgtg

SEQ ID NO: 128118 - DNA, 20 bp, Artificial Sequence
  MKO10128118_B_Zfp40
  gRNA
ctctcaaagagctctataca

SEQ ID NO: 128119 - DNA, 20 bp, Artificial Sequence
  MKO10128119_B_Zfp40
  gRNA
ttctctgatagatgtgcccc

SEQ ID NO: 128120 - DNA, 20 bp, Artificial Sequence
  MKO10128120_B_Zfp40
  gRNA
cctgagacagaaactcagaa

SEQ ID NO: 128121 - DNA, 20 bp, Artificial Sequence
  MKO10128121_B_Zfp410
  gRNA
cattctgaggcctcggtcac

SEQ ID NO: 128122 - DNA, 20 bp, Artificial Sequence
  MKO10128122_B_Zfp410
  gRNA
ttgagcttcttctccgcttg

SEQ ID NO: 128123 - DNA, 20 bp, Artificial Sequence
  MKO10128123_B_Zfp410
  gRNA
ggcccatgacagtctgattg

SEQ ID NO: 128124 - DNA, 20 bp, Artificial Sequence
  MKO10128124_B_Zfp414
  gRNA
gcttgtaatgcagcttgccg

SEQ ID NO: 128125 - DNA, 20 bp, Artificial Sequence
  MKO10128125_B_Zfp414
  gRNA
ctgtgctagatcacgaacac

SEQ ID NO: 128126 - DNA, 20 bp, Artificial Sequence
  MKO10128126_B_Zfp414
  gRNA
gggcaaccgaaggtcctcat

SEQ ID NO: 128127 - DNA, 20 bp, Artificial Sequence
  MKO10128127_B_Zfp418
  gRNA
acagggctgtgtaacctttg

SEQ ID NO: 128128 - DNA, 20 bp, Artificial Sequence
  MKO10128128_B_Zfp418
  gRNA
gatggcggcgctgaagcacc

SEQ ID NO: 128129 - DNA, 20 bp, Artificial Sequence
  MKO10128129_B_Zfp418
  gRNA
ggttcccagatctacagaaa

SEQ ID NO: 128130 - DNA, 20 bp, Artificial Sequence
  MKO10128130_B_Zfp41
  gRNA
ctcaaagtcatctttaaacg

SEQ ID NO: 128131 - DNA, 20 bp, Artificial Sequence
  MKO10128131_B_Zfp41
  gRNA
gcggggctttcttggcttct

SEQ ID NO: 128132 - DNA, 20 bp, Artificial Sequence
  MKO10128132_B_Zfp41
  gRNA
ctcgtttaaagatgactttg

SEQ ID NO: 128133 - DNA, 20 bp, Artificial Sequence
  MKO10128133_B_Zfp420
  gRNA
ttctctgtagagtaaccccg

SEQ ID NO: 128134 - DNA, 20 bp, Artificial Sequence
  MKO10128134_B_Zfp420
  gRNA
gagcaacaatccacgtgcaa

SEQ ID NO: 128135 - DNA, 20 bp, Artificial Sequence
  MKO10128135_B_Zfp420
  gRNA
tagttgagactcacgtgtaa

SEQ ID NO: 128136 - DNA, 20 bp, Artificial Sequence
  MKO10128136_B_Zfp422
  gRNA
cagcccgccagcgacagaaa

SEQ ID NO: 128137 - DNA, 20 bp, Artificial Sequence
  MKO10128137_B_Zfp422
  gRNA
gcttcgagaaataccccctt

SEQ ID NO: 128138 - DNA, 20 bp, Artificial Sequence
  MKO10128138_B_Zfp422
  gRNA
atttctcgaagcgccagcca

SEQ ID NO: 128139 - DNA, 20 bp, Artificial Sequence
  MKO10128139_B_Zfp423
  gRNA
actcttaccgatcatgtggt

SEQ ID NO: 128140 - DNA, 20 bp, Artificial Sequence
  MKO10128140_B_Zfp423
  gRNA
tcggaaaaccagccgtgcgc

SEQ ID NO: 128141 - DNA, 20 bp, Artificial Sequence
  MKO10128141_B_Zfp423
  gRNA
ccaggccagcgagaagtccg

SEQ ID NO: 128142 - DNA, 20 bp, Artificial Sequence
  MKO10128142_B_Zfp426
  gRNA
catatccagtagaatgcaaa

SEQ ID NO: 128143 - DNA, 20 bp, Artificial Sequence
  MKO10128143_B_Zfp426
  gRNA
tgattgcctgacagatgatc

SEQ ID NO: 128144 - DNA, 20 bp, Artificial Sequence
  MKO10128144_B_Zfp426
  gRNA
gatttacctgatcatctgtc

SEQ ID NO: 128145 - DNA, 20 bp, Artificial Sequence
  MKO10128145_B_Zfp428
  gRNA
gatgatgaagacctttcccc

SEQ ID NO: 128146 - DNA, 20 bp, Artificial Sequence
  MKO10128146_B_Zfp428
  gRNA
cgagtttccccagtgcgaga

SEQ ID NO: 128147 - DNA, 20 bp, Artificial Sequence
  MKO10128147_B_Zfp428
  gRNA
gtcatattcggggtcatcag

SEQ ID NO: 128148 - DNA, 20 bp, Artificial Sequence
  MKO10128148_B_Zfp429
  gRNA
accttcttgtcagagacaac

SEQ ID NO: 128149 - DNA, 20 bp, Artificial Sequence
  MKO10128149_B_Zfp429
  gRNA
ttcaggaaatgttgtccttc

SEQ ID NO: 128150 - DNA, 20 bp, Artificial Sequence
  MKO10128150_B_Zfp429
  gRNA
aatgctcacccaggaacaca

SEQ ID NO: 128151 - DNA, 20 bp, Artificial Sequence
  MKO10128151_B_Zfp42
  gRNA
ccacagtacacaccgccctc

SEQ ID NO: 128152 - DNA, 20 bp, Artificial Sequence
  MKO10128152_B_Zfp42
  gRNA
ctgtggtgtcttatcgatgc

SEQ ID NO: 128153 - DNA, 20 bp, Artificial Sequence
  MKO10128153_B_Zfp42
  gRNA
ggagcaaaacctttctcgcc

SEQ ID NO: 128154 - DNA, 20 bp, Artificial Sequence
  MKO10128154_B_Zfp433
  gRNA
aaagttatagaagacataga

SEQ ID NO: 128155 - DNA, 20 bp, Artificial Sequence
  MKO10128155_B_Zfp433
  gRNA
ttctgtgttcttctatactt

SEQ ID NO: 128156 - DNA, 20 bp, Artificial Sequence
  MKO10128156_B_Zfp433
  gRNA
aggtataacatctgtcattg

SEQ ID NO: 128157 - DNA, 20 bp, Artificial Sequence
  MKO10128157_B_Zfp438
  gRNA
gcaatttgacttcatctgcc

SEQ ID NO: 128158 - DNA, 20 bp, Artificial Sequence
  MKO10128158_B_Zfp438
  gRNA
actgtcttaccttgatcttt

SEQ ID NO: 128159 - DNA, 20 bp, Artificial Sequence
  MKO10128159_B_Zfp438
  gRNA
tcagtaccaccaaaagatca

SEQ ID NO: 128160 - DNA, 20 bp, Artificial Sequence
  MKO10128160_B_Zfp442
  gRNA
gtgcataaaaaaacgcacac

SEQ ID NO: 128161 - DNA, 20 bp, Artificial Sequence
  MKO10128161_B_Zfp442
  gRNA
tgtgcatgtgaacttcactc

SEQ ID NO: 128162 - DNA, 20 bp, Artificial Sequence
  MKO10128162_B_Zfp442
  gRNA
tatagcagcaagattcctgt

SEQ ID NO: 128163 - DNA, 20 bp, Artificial Sequence
  MKO10128163_B_Zfp444
  gRNA
ctcattgctgacgacccatc

SEQ ID NO: 128164 - DNA, 20 bp, Artificial Sequence
  MKO10128164_B_Zfp444
  gRNA
ccctgacgctcgactccccg

SEQ ID NO: 128165 - DNA, 20 bp, Artificial Sequence
  MKO10128165_B_Zfp444
  gRNA
cgtcagcaatgagggcacct

SEQ ID NO: 128166 - DNA, 20 bp, Artificial Sequence
  MKO10128166_B_Zfp445
  gRNA
gatgctgatgctgcgcctga

SEQ ID NO: 128167 - DNA, 20 bp, Artificial Sequence
  MKO10128167_B_Zfp445
  gRNA
ttccatgtgaagtctccaag

SEQ ID NO: 128168 - DNA, 20 bp, Artificial Sequence
  MKO10128168_B_Zfp445
  gRNA
tgactatttccagttagaag

SEQ ID NO: 128169 - DNA, 20 bp, Artificial Sequence
  MKO10128169_B_Zfp446
  gRNA
cgatctatcccggccttcag

SEQ ID NO: 128170 - DNA, 20 bp, Artificial Sequence
  MKO10128170_B_Zfp446
  gRNA
cgagggacatcttgaacatc

SEQ ID NO: 128171 - DNA, 20 bp, Artificial Sequence
  MKO10128171_B_Zfp446
  gRNA
accactgtgtcgtacttctc

SEQ ID NO: 128172 - DNA, 20 bp, Artificial Sequence
  MKO10128172_B_Zfp449
  gRNA
tgtaaaggtcagagctacgc

SEQ ID NO: 128173 - DNA, 20 bp, Artificial Sequence
  MKO10128173_B_Zfp449
  gRNA
gcttgacatgaacttcccat

SEQ ID NO: 128174 - DNA, 20 bp, Artificial Sequence
  MKO10128174_B_Zfp449
  gRNA
tgttccttagaacgcatctt

SEQ ID NO: 128175 - DNA, 20 bp, Artificial Sequence
  MKO10128175_B_Zfp451
  gRNA
tgctttaactttggctcgcc

SEQ ID NO: 128176 - DNA, 20 bp, Artificial Sequence
  MKO10128176_B_Zfp451
  gRNA
agactatatagatcaccaga

SEQ ID NO: 128177 - DNA, 20 bp, Artificial Sequence
  MKO10128177_B_Zfp451
  gRNA
tagatcaatgtattccaaaa

SEQ ID NO: 128178 - DNA, 20 bp, Artificial Sequence
  MKO10128178_B_Zfp454
  gRNA
tgagcttcacacgcagatcg

SEQ ID NO: 128179 - DNA, 20 bp, Artificial Sequence
  MKO10128179_B_Zfp454
  gRNA
ccttcactagcaggtctctt

SEQ ID NO: 128180 - DNA, 20 bp, Artificial Sequence
  MKO10128180_B_Zfp454
  gRNA
aagcacggccacatccttga

SEQ ID NO: 128181 - DNA, 20 bp, Artificial Sequence
  MKO10128181_B_Zfp455
  gRNA
ctacacacctgggtacacag

SEQ ID NO: 128182 - DNA, 20 bp, Artificial Sequence
  MKO10128182_B_Zfp455
  gRNA
aatgctcacccaggaacaca

SEQ ID NO: 128183 - DNA, 20 bp, Artificial Sequence
  MKO10128183_B_Zfp455
  gRNA
ttcaggaaatgttgtccttc

SEQ ID NO: 128184 - DNA, 20 bp, Artificial Sequence
  MKO10128184_B_Zfp456
  gRNA
attgcctggagcctgctcag

SEQ ID NO: 128185 - DNA, 20 bp, Artificial Sequence
  MKO10128185_B_Zfp456
  gRNA
tgctgtctctaagccattcc

SEQ ID NO: 128186 - DNA, 20 bp, Artificial Sequence
  MKO10128186_B_Zfp456
  gRNA
ctacatacctgggtacacag

SEQ ID NO: 128187 - DNA, 20 bp, Artificial Sequence
  MKO10128187_B_Zfp457
  gRNA
attgccaaggtcctgctcag

SEQ ID NO: 128188 - DNA, 20 bp, Artificial Sequence
  MKO10128188_B_Zfp457
  gRNA
ctcacctgggtgcacagtga

SEQ ID NO: 128189 - DNA, 20 bp, Artificial Sequence
  MKO10128189_B_Zfp457
  gRNA
tgcttcttctaagccatacc

SEQ ID NO: 128190 - DNA, 20 bp, Artificial Sequence
  MKO10128190_B_Zfp458
  gRNA
aatgtctgggtcctgctcag

SEQ ID NO: 128191 - DNA, 20 bp, Artificial Sequence
  MKO10128191_B_Zfp458
  gRNA
ttcaggacatgttgtcattc

SEQ ID NO: 128192 - DNA, 20 bp, Artificial Sequence
  MKO10128192_B_Zfp458
  gRNA
tgcttcttctaagccatacc

SEQ ID NO: 128193 - DNA, 20 bp, Artificial Sequence
  MKO10128193_B_Zfp459
  gRNA
ctcttctgcagagaaatcaa

SEQ ID NO: 128194 - DNA, 20 bp, Artificial Sequence
  MKO10128194_B_Zfp459
  gRNA
tgctgactctaagccacagc

SEQ ID NO: 128195 - DNA, 20 bp, Artificial Sequence
  MKO10128195_B_Zfp459
  gRNA
tccagaaatgtcaccagctg

SEQ ID NO: 128196 - DNA, 20 bp, Artificial Sequence
  MKO10128196_B_Zfp462
  gRNA
ctacaagtgtaaattctgcg

SEQ ID NO: 128197 - DNA, 20 bp, Artificial Sequence
  MKO10128197_B_Zfp462
  gRNA
tgtcttcaaccggctgttgt

SEQ ID NO: 128198 - DNA, 20 bp, Artificial Sequence
  MKO10128198_B_Zfp462
  gRNA
cgccatatgcagacccatca

SEQ ID NO: 128199 - DNA, 20 bp, Artificial Sequence
  MKO10128199_B_Zfp467
  gRNA
acagccaactgacccaagtc

SEQ ID NO: 128200 - DNA, 20 bp, Artificial Sequence
  MKO10128200_B_Zfp467
  gRNA
ggcattactgaacccatccc

SEQ ID NO: 128201 - DNA, 20 bp, Artificial Sequence
  MKO10128201_B_Zfp467
  gRNA
cccactcacccaaggagttc

SEQ ID NO: 128202 - DNA, 20 bp, Artificial Sequence
  MKO10128202_B_Zfp46
  gRNA
atatggccatgtacctcact

SEQ ID NO: 128203 - DNA, 20 bp, Artificial Sequence
  MKO10128203_B_Zfp46
  gRNA
caagagagttcataccgact

SEQ ID NO: 128204 - DNA, 20 bp, Artificial Sequence
  MKO10128204_B_Zfp46
  gRNA
tccgcactgcacacattcgt

SEQ ID NO: 128205 - DNA, 20 bp, Artificial Sequence
  MKO10128205_B_Zfp472
  gRNA
tgttgttacctatagagatc

SEQ ID NO: 128206 - DNA, 20 bp, Artificial Sequence
  MKO10128206_B_Zfp472
  gRNA
atttacctcaggtttccctt

SEQ ID NO: 128207 - DNA, 20 bp, Artificial Sequence
  MKO10128207_B_Zfp472
  gRNA
gtggctgtgaacttcactct

SEQ ID NO: 128208 - DNA, 20 bp, Artificial Sequence
  MKO10128208_B_Zfp473
  gRNA
ctcccacttaccagtactgg

SEQ ID NO: 128209 - DNA, 20 bp, Artificial Sequence
  MKO10128209_B_Zfp473
  gRNA
tcagcgtcacatcccagaac

SEQ ID NO: 128210 - DNA, 20 bp, Artificial Sequence
  MKO10128210_B_Zfp473
  gRNA
acgaccttaaaggaggttgc

SEQ ID NO: 128211 - DNA, 20 bp, Artificial Sequence
  MKO10128211_B_Zfp474
  gRNA
tgcgccacttctccaagcac

SEQ ID NO: 128212 - DNA, 20 bp, Artificial Sequence
  MKO10128212_B_Zfp474
  gRNA
ttccggatatgctatatttg

SEQ ID NO: 128213 - DNA, 20 bp, Artificial Sequence
  MKO10128213_B_Zfp474
  gRNA
aactccctagagagctgcgt

SEQ ID NO: 128214 - DNA, 20 bp, Artificial Sequence
  MKO10128214_B_Zfp488
  gRNA
caggtcagctgtcaggcgaa

SEQ ID NO: 128215 - DNA, 20 bp, Artificial Sequence
  MKO10128215_B_Zfp488
  gRNA
ccgtttgccacgagtacttc

SEQ ID NO: 128216 - DNA, 20 bp, Artificial Sequence
  MKO10128216_B_Zfp488
  gRNA
ctttcgcctgacagctgacc

SEQ ID NO: 128217 - DNA, 20 bp, Artificial Sequence
  MKO10128217_B_Zfp493
  gRNA
tgcagaggagcgtgaatgtc

SEQ ID NO: 128218 - DNA, 20 bp, Artificial Sequence
  MKO10128218_B_Zfp493
  gRNA
gcctgtgtcttcacattcca

SEQ ID NO: 128219 - DNA, 20 bp, Artificial Sequence
  MKO10128219_B_Zfp493
  gRNA
actgctgtcattcagagatg

SEQ ID NO: 128220 - DNA, 20 bp, Artificial Sequence
  MKO10128220_B_Zfp503
  gRNA
cacgcccgtcagccccatcg

SEQ ID NO: 128221 - DNA, 20 bp, Artificial Sequence
  MKO10128221_B_Zfp503
  gRNA
ggcgggtaccccgtctgccg

SEQ ID NO: 128222 - DNA, 20 bp, Artificial Sequence
  MKO10128222_B_Zfp503
  gRNA
cgcctcgtgcgctcatgatc

SEQ ID NO: 128223 - DNA, 20 bp, Artificial Sequence
  MKO10128223_B_Zfp507
  gRNA
catcacacctatactgtttc

SEQ ID NO: 128224 - DNA, 20 bp, Artificial Sequence
  MKO10128224_B_Zfp507
  gRNA
cttgctcgtagttgtagttc

SEQ ID NO: 128225 - DNA, 20 bp, Artificial Sequence
  MKO10128225_B_Zfp507
  gRNA
ctcattcgaagctactgaca

SEQ ID NO: 128226 - DNA, 20 bp, Artificial Sequence
  MKO10128226_B_Zfp511
  gRNA
aacagatgacagtgacgcca

SEQ ID NO: 128227 - DNA, 20 bp, Artificial Sequence
  MKO10128227_B_Zfp511
  gRNA
cttctatggcggcaaacact

SEQ ID NO: 128228 - DNA, 20 bp, Artificial Sequence
  MKO10128228_B_Zfp511
  gRNA
tttgctggatgtccacatcc

SEQ ID NO: 128229 - DNA, 20 bp, Artificial Sequence
  MKO10128229_B_Zfp512
  gRNA
gatgtcaggcgcaggtgaaa

SEQ ID NO: 128230 - DNA, 20 bp, Artificial Sequence
  MKO10128230_B_Zfp512
  gRNA
tagggcccagtgctccataa

SEQ ID NO: 128231 - DNA, 20 bp, Artificial Sequence
  MKO10128231_B_Zfp512
  gRNA
cttcttagctcccacgatcc

SEQ ID NO: 128232 - DNA, 20 bp, Artificial Sequence
  MKO10128232_B_Zfp513
  gRNA
acgtcatatgctgcgacaca

SEQ ID NO: 128233 - DNA, 20 bp, Artificial Sequence
  MKO10128233_B_Zfp513
  gRNA
acaatgccccgacgatcaga

SEQ ID NO: 128234 - DNA, 20 bp, Artificial Sequence
  MKO10128234_B_Zfp513
  gRNA
actgaagattccttcgacga

SEQ ID NO: 128235 - DNA, 20 bp, Artificial Sequence
  MKO10128235_B_Zfp516
  gRNA
gcccaccttcgggcacacac

SEQ ID NO: 128236 - DNA, 20 bp, Artificial Sequence
  MKO10128236_B_Zfp516
  gRNA
gggagagaccatactacccc

SEQ ID NO: 128237 - DNA, 20 bp, Artificial Sequence
  MKO10128237_B_Zfp516
  gRNA
tggtacctgtgtgtgcccga

SEQ ID NO: 128238 - DNA, 20 bp, Artificial Sequence
  MKO10128238_B_Zfp518a
  gRNA
agtagtacttgctccctcgt

SEQ ID NO: 128239 - DNA, 20 bp, Artificial Sequence
  MKO10128239_B_Zfp518a
  gRNA
tttctcaccagtaacaccgt

SEQ ID NO: 128240 - DNA, 20 bp, Artificial Sequence
  MKO10128240_B_Zfp518a
  gRNA
aatacagcttgtttaccgtc

SEQ ID NO: 128241 - DNA, 20 bp, Artificial Sequence
  MKO10128241_B_Zfp518b
  gRNA
agggatgccgctgaccgtta

SEQ ID NO: 128242 - DNA, 20 bp, Artificial Sequence
  MKO10128242_B_Zfp518b
  gRNA
gtgtccggcggtaccatatg

SEQ ID NO: 128243 - DNA, 20 bp, Artificial Sequence
  MKO10128243_B_Zfp518b
  gRNA
atgtaccggaggccattaaa

SEQ ID NO: 128244 - DNA, 20 bp, Artificial Sequence
  MKO10128244_B_Zfp51
  gRNA
tatatgaaagcatcacaagc

SEQ ID NO: 128245 - DNA, 20 bp, Artificial Sequence
  MKO10128245_B_Zfp51
  gRNA
gatggaggagacagtcacta

SEQ ID NO: 128246 - DNA, 20 bp, Artificial Sequence
  MKO10128246_B_Zfp51
  gRNA
aatgcctggactctgatcag

SEQ ID NO: 128247 - DNA, 20 bp, Artificial Sequence
  MKO10128247_B_Zfp521
  gRNA
aagtttggcgggggagtcaa

SEQ ID NO: 128248 - DNA, 20 bp, Artificial Sequence
  MKO10128248_B_Zfp521
  gRNA
cttcgaagctgtgctctatc

SEQ ID NO: 128249 - DNA, 20 bp, Artificial Sequence
  MKO10128249_B_Zfp521
  gRNA
catgtggcaaatcacatgat

SEQ ID NO: 128250 - DNA, 20 bp, Artificial Sequence
  MKO10128250_B_Zfp523
  gRNA
gaccactgcgtacattcacc

SEQ ID NO: 128251 - DNA, 20 bp, Artificial Sequence
  MKO10128251_B_Zfp523
  gRNA
cacctttctgtatcgtcacc

SEQ ID NO: 128252 - DNA, 20 bp, Artificial Sequence
  MKO10128252_B_Zfp523
  gRNA
ggagaccgagctttccgctg

SEQ ID NO: 128253 - DNA, 20 bp, Artificial Sequence
  MKO10128253_B_Zfp524
  gRNA
ccgcaatctttgcacacgtg

SEQ ID NO: 128254 - DNA, 20 bp, Artificial Sequence
  MKO10128254_B_Zfp524
  gRNA
tcttctgttgatcgatgatc

SEQ ID NO: 128255 - DNA, 20 bp, Artificial Sequence
  MKO10128255_B_Zfp524
  gRNA
caagtggctggaccgtttga

SEQ ID NO: 128256 - DNA, 20 bp, Artificial Sequence
  MKO10128256_B_Zfp526
  gRNA
gggggccgtgcaccgcgcgc

SEQ ID NO: 128257 - DNA, 20 bp, Artificial Sequence
  MKO10128257_B_Zfp526
  gRNA
tggcagtatgggcccgtcta

SEQ ID NO: 128258 - DNA, 20 bp, Artificial Sequence
  MKO10128258_B_Zfp526
  gRNA
ggcacgccacaaacaccgaa

SEQ ID NO: 128259 - DNA, 20 bp, Artificial Sequence
  MKO10128259_B_Zfp52
  gRNA
ctgacctgggatgtgtttac

SEQ ID NO: 128260 - DNA, 20 bp, Artificial Sequence
  MKO10128260_B_Zfp52
  gRNA
tggacttctcccaagaggaa

SEQ ID NO: 128261 - DNA, 20 bp, Artificial Sequence
  MKO10128261_B_Zfp52
  gRNA
ggtagagaattatagcaacc

SEQ ID NO: 128262 - DNA, 20 bp, Artificial Sequence
  MKO10128262_B_Zfp532
  gRNA
tcagcttgtgcacgatgaag

SEQ ID NO: 128263 - DNA, 20 bp, Artificial Sequence
  MKO10128263_B_Zfp532
  gRNA
tgaaggtccgccgggagtct

SEQ ID NO: 128264 - DNA, 20 bp, Artificial Sequence
  MKO10128264_B_Zfp532
  gRNA
agccgtgggacgtgtagcac

SEQ ID NO: 128265 - DNA, 20 bp, Artificial Sequence
  MKO10128265_B_Zfp534
  gRNA
acagggtctgttaactttca

SEQ ID NO: 128266 - DNA, 20 bp, Artificial Sequence
  MKO10128266_B_Zfp534
  gRNA
ttcctccagtgagaagtcca

SEQ ID NO: 128267 - DNA, 20 bp, Artificial Sequence
  MKO10128267_B_Zfp534
  gRNA
cgtggccttggacttctcac

SEQ ID NO: 128268 - DNA, 20 bp, Artificial Sequence
  MKO10128268_B_Zfp536
  gRNA
ctcgagaatgcacgaccacc

SEQ ID NO: 128269 - DNA, 20 bp, Artificial Sequence
  MKO10128269_B_Zfp536
  gRNA
atgaaggactgcccgtactg

SEQ ID NO: 128270 - DNA, 20 bp, Artificial Sequence
  MKO10128270_B_Zfp536
  gRNA
ccggacttcccatcacctta

SEQ ID NO: 128271 - DNA, 20 bp, Artificial Sequence
  MKO10128271_B_Zfp53
  gRNA
ctgacctgtgacatgattaa

SEQ ID NO: 128272 - DNA, 20 bp, Artificial Sequence
  MKO10128272_B_Zfp53
  gRNA
tggagcagaacaaagagacc

SEQ ID NO: 128273 - DNA, 20 bp, Artificial Sequence
  MKO10128273_B_Zfp53
  gRNA
tgtggctgtggaattccccc

SEQ ID NO: 128274 - DNA, 20 bp, Artificial Sequence
  MKO10128274_B_Zfp541
  gRNA
ccaggggcctttagtagtgc

SEQ ID NO: 128275 - DNA, 20 bp, Artificial Sequence
  MKO10128275_B_Zfp541
  gRNA
ctttctcggtgtaaaacatc

SEQ ID NO: 128276 - DNA, 20 bp, Artificial Sequence
  MKO10128276_B_Zfp541
  gRNA
ctttgactccatccagtctg

SEQ ID NO: 128277 - DNA, 20 bp, Artificial Sequence
  MKO10128277_B_Zfp54
  gRNA
ttcttcagtcaacttgtccc

SEQ ID NO: 128278 - DNA, 20 bp, Artificial Sequence
  MKO10128278_B_Zfp54
  gRNA
tacagcaacctggtatatgt

SEQ ID NO: 128279 - DNA, 20 bp, Artificial Sequence
  MKO10128279_B_Zfp54
  gRNA
gccttctaaagaatacatag

SEQ ID NO: 128280 - DNA, 20 bp, Artificial Sequence
  MKO10128280_B_Zfp551
  gRNA
aagcaaggaccaggtcgccg

SEQ ID NO: 128281 - DNA, 20 bp, Artificial Sequence
  MKO10128281_B_Zfp551
  gRNA
agagtgggtgctccttgata

SEQ ID NO: 128282 - DNA, 20 bp, Artificial Sequence
  MKO10128282_B_Zfp551
  gRNA
accaggccaagctccataac

SEQ ID NO: 128283 - DNA, 20 bp, Artificial Sequence
  MKO10128283_B_Zfp553
  gRNA
gccacactcgccacagatcg

SEQ ID NO: 128284 - DNA, 20 bp, Artificial Sequence
  MKO10128284_B_Zfp553
  gRNA
ggcctacagggtccggccac

SEQ ID NO: 128285 - DNA, 20 bp, Artificial Sequence
  MKO10128285_B_Zfp553
  gRNA
ccagcaggaatccgagatcg

SEQ ID NO: 128286 - DNA, 20 bp, Artificial Sequence
  MKO10128286_B_Zfp558
  gRNA
tggaaaaacagtacaactgg

SEQ ID NO: 128287 - DNA, 20 bp, Artificial Sequence
  MKO10128287_B_Zfp558
  gRNA
tgcttacctggatggatgcc

SEQ ID NO: 128288 - DNA, 20 bp, Artificial Sequence
  MKO10128288_B_Zfp558
  gRNA
gttcttgacaagtttgttag

SEQ ID NO: 128289 - DNA, 20 bp, Artificial Sequence
  MKO10128289_B_Zfp560
  gRNA
gaatctcacctaatgtagcc

SEQ ID NO: 128290 - DNA, 20 bp, Artificial Sequence
  MKO10128290_B_Zfp560
  gRNA
gctatacaacttaaccccag

SEQ ID NO: 128291 - DNA, 20 bp, Artificial Sequence
  MKO10128291_B_Zfp560
  gRNA
gtcaagaaaagagttcacca

SEQ ID NO: 128292 - DNA, 20 bp, Artificial Sequence
  MKO10128292_B_Zfp563
  gRNA
tatcgttacctatagcaatt

SEQ ID NO: 128293 - DNA, 20 bp, Artificial Sequence
  MKO10128293_B_Zfp563
  gRNA
aagatgttgatgaagattct

SEQ ID NO: 128294 - DNA, 20 bp, Artificial Sequence
  MKO10128294_B_Zfp563
  gRNA
catcaacatctttactcctc

SEQ ID NO: 128295 - DNA, 20 bp, Artificial Sequence
  MKO10128295_B_Zfp566
  gRNA
catccttacccattgagagc

SEQ ID NO: 128296 - DNA, 20 bp, Artificial Sequence
  MKO10128296_B_Zfp566
  gRNA
taagaaagcctacgaagatg

SEQ ID NO: 128297 - DNA, 20 bp, Artificial Sequence
  MKO10128297_B_Zfp566
  gRNA
gaattctgtgatgccgtgtc

SEQ ID NO: 128298 - DNA, 20 bp, Artificial Sequence
  MKO10128298_B_Zfp568
  gRNA
catggagcgcttgtcccaga

SEQ ID NO: 128299 - DNA, 20 bp, Artificial Sequence
  MKO10128299_B_Zfp568
  gRNA
ctcgccaggaagaagaagac

SEQ ID NO: 128300 - DNA, 20 bp, Artificial Sequence
  MKO10128300_B_Zfp568
  gRNA
tccaacttgaagatcacatc

SEQ ID NO: 128301 - DNA, 20 bp, Artificial Sequence
  MKO10128301_B_Zfp574
  gRNA
tcccctgcggtctcgcccaa

SEQ ID NO: 128302 - DNA, 20 bp, Artificial Sequence
  MKO10128302_B_Zfp574
  gRNA
gaaaacggactccgcactcc

SEQ ID NO: 128303 - DNA, 20 bp, Artificial Sequence
  MKO10128303_B_Zfp574
  gRNA
cccgttccttcttgctacgc

SEQ ID NO: 128304 - DNA, 20 bp, Artificial Sequence
  MKO10128304_B_Zfp575
  gRNA
gggtggaagcgtgaagtccg

SEQ ID NO: 128305 - DNA, 20 bp, Artificial Sequence
  MKO10128305_B_Zfp575
  gRNA
cgtcggtggcgtggtgcgtg

SEQ ID NO: 128306 - DNA, 20 bp, Artificial Sequence
  MKO10128306_B_Zfp575
  gRNA
aacggtggccgaaggccttg

SEQ ID NO: 128307 - DNA, 20 bp, Artificial Sequence
  MKO10128307_B_Zfp579
  gRNA
ttcagtgcgtgcgctgccag

SEQ ID NO: 128308 - DNA, 20 bp, Artificial Sequence
  MKO10128308_B_Zfp579
  gRNA
gcactgaaaagggcgcgccc

SEQ ID NO: 128309 - DNA, 20 bp, Artificial Sequence
  MKO10128309_B_Zfp579
  gRNA
gggagtggaacagcccgcca

SEQ ID NO: 128310 - DNA, 20 bp, Artificial Sequence
  MKO10128310_B_Zfp57
  gRNA
cgtggcagtgtctttcaccc

SEQ ID NO: 128311 - DNA, 20 bp, Artificial Sequence
  MKO10128311_B_Zfp57
  gRNA
attaccaaacaatggcagct

SEQ ID NO: 128312 - DNA, 20 bp, Artificial Sequence
  MKO10128312_B_Zfp57
  gRNA
tcttcatgaacccgtggtgc

SEQ ID NO: 128313 - DNA, 20 bp, Artificial Sequence
  MKO10128313_B_Zfp580
  gRNA
ctacacgtacacggtgcagc

SEQ ID NO: 128314 - DNA, 20 bp, Artificial Sequence
  MKO10128314_B_Zfp580
  gRNA
ctatagcccttgcgaggacc

SEQ ID NO: 128315 - DNA, 20 bp, Artificial Sequence
  MKO10128315_B_Zfp580
  gRNA
cagctgcaccgtgtacgtgt

SEQ ID NO: 128316 - DNA, 20 bp, Artificial Sequence
  MKO10128316_B_Zfp583
  gRNA
ctgccttacccagtgacacc

SEQ ID NO: 128317 - DNA, 20 bp, Artificial Sequence
  MKO10128317_B_Zfp583
  gRNA
ggagcaagagacacatgtcc

SEQ ID NO: 128318 - DNA, 20 bp, Artificial Sequence
  MKO10128318_B_Zfp583
  gRNA
attggagaactataagagcc

SEQ ID NO: 128319 - DNA, 20 bp, Artificial Sequence
  MKO10128319_B_Zfp58
  gRNA
gcagcagccgctgtgcaccc

SEQ ID NO: 128320 - DNA, 20 bp, Artificial Sequence
  MKO10128320_B_Zfp58
  gRNA
cctcacccaggaaatccaga

SEQ ID NO: 128321 - DNA, 20 bp, Artificial Sequence
  MKO10128321_B_Zfp58
  gRNA
gctggagaattacagccatc

SEQ ID NO: 128322 - DNA, 20 bp, Artificial Sequence
  MKO10128322_B_Zfp592
  gRNA
caagactgccagtagtacga

SEQ ID NO: 128323 - DNA, 20 bp, Artificial Sequence
  MKO10128323_B_Zfp592
  gRNA
cgtactactggcagtcttga

SEQ ID NO: 128324 - DNA, 20 bp, Artificial Sequence
  MKO10128324_B_Zfp592
  gRNA
cctgcactatgcccgaaaag

SEQ ID NO: 128325 - DNA, 20 bp, Artificial Sequence
  MKO10128325_B_Zfp593
  gRNA
tggatcggaaatgggtcttc

SEQ ID NO: 128326 - DNA, 20 bp, Artificial Sequence
  MKO10128326_B_Zfp593
  gRNA
caggtggacgtgtccatctc

SEQ ID NO: 128327 - DNA, 20 bp, Artificial Sequence
  MKO10128327_B_Zfp593
  gRNA
gatccaaagaccacaagaaa

SEQ ID NO: 128328 - DNA, 20 bp, Artificial Sequence
  MKO10128328_B_Zfp595
  gRNA
tccagaaatgtgactagata

SEQ ID NO: 128329 - DNA, 20 bp, Artificial Sequence
  MKO10128329_B_Zfp595
  gRNA
ggctatgtatttctctgcag

SEQ ID NO: 128330 - DNA, 20 bp, Artificial Sequence
  MKO10128330_B_Zfp595
  gRNA
aatgtacagagatgtgatgc

SEQ ID NO: 128331 - DNA, 20 bp, Artificial Sequence
  MKO10128331_B_Zfp597
  gRNA
ggcgtccacgctccccacat

SEQ ID NO: 128332 - DNA, 20 bp, Artificial Sequence
  MKO10128332_B_Zfp597
  gRNA
accactgctatttgaagatc

SEQ ID NO: 128333 - DNA, 20 bp, Artificial Sequence
  MKO10128333_B_Zfp597
  gRNA
ctgctgagggtcttctgagc

SEQ ID NO: 128334 - DNA, 20 bp, Artificial Sequence
  MKO10128334_B_Zfp598
  gRNA
tcactccggcgtgagtgccg

SEQ ID NO: 128335 - DNA, 20 bp, Artificial Sequence
  MKO10128335_B_Zfp598
  gRNA
gctgctccaagtccccgaag

SEQ ID NO: 128336 - DNA, 20 bp, Artificial Sequence
  MKO10128336_B_Zfp598
  gRNA
aggataccttgaggtgcttg

SEQ ID NO: 128337 - DNA, 20 bp, Artificial Sequence
  MKO10128337_B_Zfp599
  gRNA
cagactcacctagggacacc

SEQ ID NO: 128338 - DNA, 20 bp, Artificial Sequence
  MKO10128338_B_Zfp599
  gRNA
gtgtcgcagaagcctcagac

SEQ ID NO: 128339 - DNA, 20 bp, Artificial Sequence
  MKO10128339_B_Zfp599
  gRNA
gaccagccagaaaaatcaca

SEQ ID NO: 128340 - DNA, 20 bp, Artificial Sequence
  MKO10128340_B_Zfp59
  gRNA
atggctgtgaatgaagaaac

SEQ ID NO: 128341 - DNA, 20 bp, Artificial Sequence
  MKO10128341_B_Zfp59
  gRNA
cagcactaattctcaagaca

SEQ ID NO: 128342 - DNA, 20 bp, Artificial Sequence
  MKO10128342_B_Zfp59
  gRNA
ttcttcattcacagccatcc

SEQ ID NO: 128343 - DNA, 20 bp, Artificial Sequence
  MKO10128343_B_Zfp600
  gRNA
tttgctcctcaccaagaatc

SEQ ID NO: 128344 - DNA, 20 bp, Artificial Sequence
  MKO10128344_B_Zfp600
  gRNA
gtccaaaaacacgtccttga

SEQ ID NO: 128345 - DNA, 20 bp, Artificial Sequence
  MKO10128345_B_Zfp600
  gRNA
acagtgtctattaaccttca

SEQ ID NO: 128346 - DNA, 20 bp, Artificial Sequence
  MKO10128346_B_Zfp605
  gRNA
agctagatcagcaagagtca

SEQ ID NO: 128347 - DNA, 20 bp, Artificial Sequence
  MKO10128347_B_Zfp605
  gRNA
agcggaagatgacagaatca

SEQ ID NO: 128348 - DNA, 20 bp, Artificial Sequence
  MKO10128348_B_Zfp605
  gRNA
ctgcagcagccttgtcttct

SEQ ID NO: 128349 - DNA, 20 bp, Artificial Sequence
  MKO10128349_B_Zfp606
  gRNA
tatcctaaaagcagttgtcc

SEQ ID NO: 128350 - DNA, 20 bp, Artificial Sequence
  MKO10128350_B_Zfp606
  gRNA
tatccttgctccactgacca

SEQ ID NO: 128351 - DNA, 20 bp, Artificial Sequence
  MKO10128351_B_Zfp606
  gRNA
tcaccttacccacagaaagt

SEQ ID NO: 128352 - DNA, 20 bp, Artificial Sequence
  MKO10128352_B_Zfp607
  gRNA
cagctccagttctcaacaca

SEQ ID NO: 128353 - DNA, 20 bp, Artificial Sequence
  MKO10128353_B_Zfp607
  gRNA
caggcttacccactgcgacc

SEQ ID NO: 128354 - DNA, 20 bp, Artificial Sequence
  MKO10128354_B_Zfp607
  gRNA
ttcaggggtcagtgacattt

SEQ ID NO: 128355 - DNA, 20 bp, Artificial Sequence
  MKO10128355_B_Zfp608
  gRNA
tagactgcaccaagcacgac

SEQ ID NO: 128356 - DNA, 20 bp, Artificial Sequence
  MKO10128356_B_Zfp608
  gRNA
cgaaccaaaagctgttcgac

SEQ ID NO: 128357 - DNA, 20 bp, Artificial Sequence
  MKO10128357_B_Zfp608
  gRNA
atggaggaacaaaacctacg

SEQ ID NO: 128358 - DNA, 20 bp, Artificial Sequence
  MKO10128358_B_Zfp609
  gRNA
ggaaccagcgtcaaccttga

SEQ ID NO: 128359 - DNA, 20 bp, Artificial Sequence
  MKO10128359_B_Zfp609
  gRNA
ctgcaagctacccccatctg

SEQ ID NO: 128360 - DNA, 20 bp, Artificial Sequence
  MKO10128360_B_Zfp609
  gRNA
cctgccacacgatgccttca

SEQ ID NO: 128361 - DNA, 20 bp, Artificial Sequence
  MKO10128361_B_Zfp60
  gRNA
caactctagttctcaacaca

SEQ ID NO: 128362 - DNA, 20 bp, Artificial Sequence
  MKO10128362_B_Zfp60
  gRNA
atggctgtgaagaaagaaac

SEQ ID NO: 128363 - DNA, 20 bp, Artificial Sequence
  MKO10128363_B_Zfp60
  gRNA
ttctttcttcacagccatcc

SEQ ID NO: 128364 - DNA, 20 bp, Artificial Sequence
  MKO10128364_B_Zfp612
  gRNA
acagaccatcccattccgtc

SEQ ID NO: 128365 - DNA, 20 bp, Artificial Sequence
  MKO10128365_B_Zfp612
  gRNA
gacagcagccatgatcccat

SEQ ID NO: 128366 - DNA, 20 bp, Artificial Sequence
  MKO10128366_B_Zfp612
  gRNA
gaacggactcccagggcctc

SEQ ID NO: 128367 - DNA, 20 bp, Artificial Sequence
  MKO10128367_B_Zfp616
  gRNA
gaagcatttatcaagtagta

SEQ ID NO: 128368 - DNA, 20 bp, Artificial Sequence
  MKO10128368_B_Zfp616
  gRNA
ttcaagaccttattataccc

SEQ ID NO: 128369 - DNA, 20 bp, Artificial Sequence
  MKO10128369_B_Zfp616
  gRNA
caacacgattcaaaccataa

SEQ ID NO: 128370 - DNA, 20 bp, Artificial Sequence
  MKO10128370_B_Zfp617
  gRNA
ctcccatacctatatcatgc

SEQ ID NO: 128371 - DNA, 20 bp, Artificial Sequence
  MKO10128371_B_Zfp617
  gRNA
gaaaatgcatacaaaaatcc

SEQ ID NO: 128372 - DNA, 20 bp, Artificial Sequence
  MKO10128372_B_Zfp617
  gRNA
tgtggctgtgaacttcaccc

SEQ ID NO: 128373 - DNA, 20 bp, Artificial Sequence
  MKO10128373_B_Zfp618
  gRNA
acctcctgtatgtagtcgtc

SEQ ID NO: 128374 - DNA, 20 bp, Artificial Sequence
  MKO10128374_B_Zfp618
  gRNA
gtggacggagccagtgcacc

SEQ ID NO: 128375 - DNA, 20 bp, Artificial Sequence
  MKO10128375_B_Zfp618
  gRNA
acagatactgaagccacctc

SEQ ID NO: 128376 - DNA, 20 bp, Artificial Sequence
  MKO10128376_B_Zfp619
  gRNA
cctatacattaatgtgatgc

SEQ ID NO: 128377 - DNA, 20 bp, Artificial Sequence
  MKO10128377_B_Zfp619
  gRNA
ctgtttatactggtcttcaa

SEQ ID NO: 128378 - DNA, 20 bp, Artificial Sequence
  MKO10128378_B_Zfp619
  gRNA
gaagaccagtataaacagcc

SEQ ID NO: 128379 - DNA, 20 bp, Artificial Sequence
  MKO10128379_B_Zfp61
  gRNA
gccccgagggagagagattc

SEQ ID NO: 128380 - DNA, 20 bp, Artificial Sequence
  MKO10128380_B_Zfp61
  gRNA
caaacgagataaaccatacc

SEQ ID NO: 128381 - DNA, 20 bp, Artificial Sequence
  MKO10128381_B_Zfp61
  gRNA
aattctcaaccatcacatct

SEQ ID NO: 128382 - DNA, 20 bp, Artificial Sequence
  MKO10128382_B_Zfp622
  gRNA
tctccagcaataccgagccc

SEQ ID NO: 128383 - DNA, 20 bp, Artificial Sequence
  MKO10128383_B_Zfp622
  gRNA
gagtagctacccagactaca

SEQ ID NO: 128384 - DNA, 20 bp, Artificial Sequence
  MKO10128384_B_Zfp622
  gRNA
gcaggatcctgctgagcttg

SEQ ID NO: 128385 - DNA, 20 bp, Artificial Sequence
  MKO10128385_B_Zfp623
  gRNA
tccgcatcagatctcgcaca

SEQ ID NO: 128386 - DNA, 20 bp, Artificial Sequence
  MKO10128386_B_Zfp623
  gRNA
tctacagatcgggagtgttg

SEQ ID NO: 128387 - DNA, 20 bp, Artificial Sequence
  MKO10128387_B_Zfp623
  gRNA
gagtttcgagctccgaataa

SEQ ID NO: 128388 - DNA, 20 bp, Artificial Sequence
  MKO10128388_B_Zfp628
  gRNA
gccgcaggcacgaagtgtta

SEQ ID NO: 128389 - DNA, 20 bp, Artificial Sequence
  MKO10128389_B_Zfp628
  gRNA
tcgcacagacgtccaacttg

SEQ ID NO: 128390 - DNA, 20 bp, Artificial Sequence
  MKO10128390_B_Zfp628
  gRNA
gctcacctgtgtggtcccga

SEQ ID NO: 128391 - DNA, 20 bp, Artificial Sequence
  MKO10128391_B_Zfp629
  gRNA
cacctctatgagcctcattc

SEQ ID NO: 128392 - DNA, 20 bp, Artificial Sequence
  MKO10128392_B_Zfp629
  gRNA
gtgtaagagctagtcgatcg

SEQ ID NO: 128393 - DNA, 20 bp, Artificial Sequence
  MKO10128393_B_Zfp629
  gRNA
cgcagtcggagcacacgaag

SEQ ID NO: 128394 - DNA, 20 bp, Artificial Sequence
  MKO10128394_B_Zfp62
  gRNA
ttcttatcagcaatatgagc

SEQ ID NO: 128395 - DNA, 20 bp, Artificial Sequence
  MKO10128395_B_Zfp62
  gRNA
cctcatagtagatcatcttc

SEQ ID NO: 128396 - DNA, 20 bp, Artificial Sequence
  MKO10128396_B_Zfp62
  gRNA
tcaccttgtttagtacaatt

SEQ ID NO: 128397 - DNA, 20 bp, Artificial Sequence
  MKO10128397_B_Zfp637
  gRNA
gttcccaacagctaccctgc

SEQ ID NO: 128398 - DNA, 20 bp, Artificial Sequence
  MKO10128398_B_Zfp637
  gRNA
ggatccgctgatgtgtaacc

SEQ ID NO: 128399 - DNA, 20 bp, Artificial Sequence
  MKO10128399_B_Zfp637
  gRNA
tgtgcacatccgcgtccaca

SEQ ID NO: 128400 - DNA, 20 bp, Artificial Sequence
  MKO10128400_B_Zfp639
  gRNA
ttacacccttctcgctattc

SEQ ID NO: 128401 - DNA, 20 bp, Artificial Sequence
  MKO10128401_B_Zfp639
  gRNA
gacttgcccaaatttgcaga

SEQ ID NO: 128402 - DNA, 20 bp, Artificial Sequence
  MKO10128402_B_Zfp639
  gRNA
ggaataagcagaattgcaga

SEQ ID NO: 128403 - DNA, 20 bp, Artificial Sequence
  MKO10128403_B_Zfp641
  gRNA
acttcttgcagccggatccc

SEQ ID NO: 128404 - DNA, 20 bp, Artificial Sequence
  MKO10128404_B_Zfp641
  gRNA
ggcacgcagtgctgagccgc

SEQ ID NO: 128405 - DNA, 20 bp, Artificial Sequence
  MKO10128405_B_Zfp641
  gRNA
tcagggcctagtaactatca

SEQ ID NO: 128406 - DNA, 20 bp, Artificial Sequence
  MKO10128406_B_Zfp644
  gRNA
cagttcattgactcgatctg

SEQ ID NO: 128407 - DNA, 20 bp, Artificial Sequence
  MKO10128407_B_Zfp644
  gRNA
ggcgactgttgagcgccttc

SEQ ID NO: 128408 - DNA, 20 bp, Artificial Sequence
  MKO10128408_B_Zfp644
  gRNA
catcattctgatcgtaactc

SEQ ID NO: 128409 - DNA, 20 bp, Artificial Sequence
  MKO10128409_B_Zfp646
  gRNA
ttccgaacccctcaccccag

SEQ ID NO: 128410 - DNA, 20 bp, Artificial Sequence
  MKO10128410_B_Zfp646
  gRNA
gtgcccgccgtcagttccga

SEQ ID NO: 128411 - DNA, 20 bp, Artificial Sequence
  MKO10128411_B_Zfp646
  gRNA
ccttgcaatgtacccgcaca

SEQ ID NO: 128412 - DNA, 20 bp, Artificial Sequence
  MKO10128412_B_Zfp647
  gRNA
ccatcatgacgtgtcggtag

SEQ ID NO: 128413 - DNA, 20 bp, Artificial Sequence
  MKO10128413_B_Zfp647
  gRNA
gcctgttgtgatctcccagc

SEQ ID NO: 128414 - DNA, 20 bp, Artificial Sequence
  MKO10128414_B_Zfp647
  gRNA
atcacaacaggcttagatcc

SEQ ID NO: 128415 - DNA, 20 bp, Artificial Sequence
  MKO10128415_B_Zfp648
  gRNA
ctgagtgtcaaactgcgagt

SEQ ID NO: 128416 - DNA, 20 bp, Artificial Sequence
  MKO10128416_B_Zfp648
  gRNA
cacggagaactcgcggccgc

SEQ ID NO: 128417 - DNA, 20 bp, Artificial Sequence
  MKO10128417_B_Zfp648
  gRNA
tcgagactcccccaaattac

SEQ ID NO: 128418 - DNA, 20 bp, Artificial Sequence
  MKO10128418_B_Zfp64
  gRNA
ccatgttcaaagacgaactc

SEQ ID NO: 128419 - DNA, 20 bp, Artificial Sequence
  MKO10128419_B_Zfp64
  gRNA
ccagagttcgtctttgaaca

SEQ ID NO: 128420 - DNA, 20 bp, Artificial Sequence
  MKO10128420_B_Zfp64
  gRNA
tgccagttcaagaccgccta

SEQ ID NO: 128421 - DNA, 20 bp, Artificial Sequence
  MKO10128421_B_Zfp651
  gRNA
tccactcgctgcagcactcg

SEQ ID NO: 128422 - DNA, 20 bp, Artificial Sequence
  MKO10128422_B_Zfp651
  gRNA
cagcgacatactgcgcttga

SEQ ID NO: 128423 - DNA, 20 bp, Artificial Sequence
  MKO10128423_B_Zfp651
  gRNA
gagcacaacaagatagtgca

SEQ ID NO: 128424 - DNA, 20 bp, Artificial Sequence
  MKO10128424_B_Zfp652
  gRNA
cctcttcatgttgggtcggc

SEQ ID NO: 128425 - DNA, 20 bp, Artificial Sequence
  MKO10128425_B_Zfp652
  gRNA
cttcttctcgcaaatttcac

SEQ ID NO: 128426 - DNA, 20 bp, Artificial Sequence
  MKO10128426_B_Zfp652
  gRNA
tgctcatgtgggagcggagc

SEQ ID NO: 128427 - DNA, 20 bp, Artificial Sequence
  MKO10128427_B_Zfp653
  gRNA
accagatgaccacgttcttc

SEQ ID NO: 128428 - DNA, 20 bp, Artificial Sequence
  MKO10128428_B_Zfp653
  gRNA
tctcctccttgagcatatac

SEQ ID NO: 128429 - DNA, 20 bp, Artificial Sequence
  MKO10128429_B_Zfp653
  gRNA
ggaggacctgtatatgctca

SEQ ID NO: 128430 - DNA, 20 bp, Artificial Sequence
  MKO10128430_B_Zfp654
  gRNA
tactaaggtatcgttcatca

SEQ ID NO: 128431 - DNA, 20 bp, Artificial Sequence
  MKO10128431_B_Zfp654
  gRNA
tcggtgcatgttatgcaaca

SEQ ID NO: 128432 - DNA, 20 bp, Artificial Sequence
  MKO10128432_B_Zfp654
  gRNA
gagaatcctcaaactgcctt

SEQ ID NO: 128433 - DNA, 20 bp, Artificial Sequence
  MKO10128433_B_Zfp655
  gRNA
cattcagactggttctccaa

SEQ ID NO: 128434 - DNA, 20 bp, Artificial Sequence
  MKO10128434_B_Zfp655
  gRNA
tcctgcagaaaccgaagctc

SEQ ID NO: 128435 - DNA, 20 bp, Artificial Sequence
  MKO10128435_B_Zfp655
  gRNA
cgggagtgctcatcccagca

SEQ ID NO: 128436 - DNA, 20 bp, Artificial Sequence
  MKO10128436_B_Zfp658
  gRNA
ccaagctcccacatccttgt

SEQ ID NO: 128437 - DNA, 20 bp, Artificial Sequence
  MKO10128437_B_Zfp658
  gRNA
tgacatgaaattgtcccaga

SEQ ID NO: 128438 - DNA, 20 bp, Artificial Sequence
  MKO10128438_B_Zfp658
  gRNA
ggtgtctctggacggagtcc

SEQ ID NO: 128439 - DNA, 20 bp, Artificial Sequence
  MKO10128439_B_Zfp65
  gRNA
tgaatgaatctgtttatgtc

SEQ ID NO: 128440 - DNA, 20 bp, Artificial Sequence
  MKO10128440_B_Zfp65
  gRNA
aatgcctaggtcctgctcag

SEQ ID NO: 128441 - DNA, 20 bp, Artificial Sequence
  MKO10128441_B_Zfp65
  gRNA
ctgtacaaattccactgagc

SEQ ID NO: 128442 - DNA, 20 bp, Artificial Sequence
  MKO10128442_B_Zfp661
  gRNA
gtctccgcctaccagatgtc

SEQ ID NO: 128443 - DNA, 20 bp, Artificial Sequence
  MKO10128443_B_Zfp661
  gRNA
cacctcacctgacatctggt

SEQ ID NO: 128444 - DNA, 20 bp, Artificial Sequence
  MKO10128444_B_Zfp661
  gRNA
ttgaactgaagaatcacatc

SEQ ID NO: 128445 - DNA, 20 bp, Artificial Sequence
  MKO10128445_B_Zfp663
  gRNA
ggggcttacccactgctcgt

SEQ ID NO: 128446 - DNA, 20 bp, Artificial Sequence
  MKO10128446_B_Zfp663
  gRNA
acctgagctgatatgcaagc

SEQ ID NO: 128447 - DNA, 20 bp, Artificial Sequence
  MKO10128447_B_Zfp663
  gRNA
tccagcttgcatatcagctc

SEQ ID NO: 128448 - DNA, 20 bp, Artificial Sequence
  MKO10128448_B_Zfp664
  gRNA
ggactctttgatgcatgcag

SEQ ID NO: 128449 - DNA, 20 bp, Artificial Sequence
  MKO10128449_B_Zfp664
  gRNA
ccccagtgtggactctcatg

SEQ ID NO: 128450 - DNA, 20 bp, Artificial Sequence
  MKO10128450_B_Zfp664
  gRNA
ccgcactcactgcagacgta

SEQ ID NO: 128451 - DNA, 20 bp, Artificial Sequence
  MKO10128451_B_Zfp667
  gRNA
catgcagaaagatttgtacg

SEQ ID NO: 128452 - DNA, 20 bp, Artificial Sequence
  MKO10128452_B_Zfp667
  gRNA
gccaaatatcatcgccttgt

SEQ ID NO: 128453 - DNA, 20 bp, Artificial Sequence
  MKO10128453_B_Zfp667
  gRNA
ctcgtacaaatctttctgca

SEQ ID NO: 128454 - DNA, 20 bp, Artificial Sequence
  MKO10128454_B_Zfp668
  gRNA
catgggtgcgccgatgcttg

SEQ ID NO: 128455 - DNA, 20 bp, Artificial Sequence
  MKO10128455_B_Zfp668
  gRNA
cactcgcgacacacaaactg

SEQ ID NO: 128456 - DNA, 20 bp, Artificial Sequence
  MKO10128456_B_Zfp668
  gRNA
ggtaaccctaacagccccgc

SEQ ID NO: 128457 - DNA, 20 bp, Artificial Sequence
  MKO10128457_B_Zfp672
  gRNA
cgtgcggcctttcaccctga

SEQ ID NO: 128458 - DNA, 20 bp, Artificial Sequence
  MKO10128458_B_Zfp672
  gRNA
cagcagacctacgtgcacac

SEQ ID NO: 128459 - DNA, 20 bp, Artificial Sequence
  MKO10128459_B_Zfp672
  gRNA
tacacctgggaacgcaccga

SEQ ID NO: 128460 - DNA, 20 bp, Artificial Sequence
  MKO10128460_B_Zfp677
  gRNA
caagaaatgacagattctcc

SEQ ID NO: 128461 - DNA, 20 bp, Artificial Sequence
  MKO10128461_B_Zfp677
  gRNA
tctgttggcattcaaagatg

SEQ ID NO: 128462 - DNA, 20 bp, Artificial Sequence
  MKO10128462_B_Zfp677
  gRNA
ttacaacaacctggtctctg

SEQ ID NO: 128463 - DNA, 20 bp, Artificial Sequence
  MKO10128463_B_Zfp687
  gRNA
ctcgattcttatgtgtgcgc

SEQ ID NO: 128464 - DNA, 20 bp, Artificial Sequence
  MKO10128464_B_Zfp687
  gRNA
acttaaagacactgacacgc

SEQ ID NO: 128465 - DNA, 20 bp, Artificial Sequence
  MKO10128465_B_Zfp687
  gRNA
taagtgctggtcaaagtgtg

SEQ ID NO: 128466 - DNA, 20 bp, Artificial Sequence
  MKO10128466_B_Zfp688
  gRNA
gccgcggcgaccccctgagc

SEQ ID NO: 128467 - DNA, 20 bp, Artificial Sequence
  MKO10128467_B_Zfp688
  gRNA
cctgttccatccaagagatg

SEQ ID NO: 128468 - DNA, 20 bp, Artificial Sequence
  MKO10128468_B_Zfp688
  gRNA
cacctctcggagctcctccc

SEQ ID NO: 128469 - DNA, 20 bp, Artificial Sequence
  MKO10128469_B_Zfp689
  gRNA
ggccacgtccacgaacttca

SEQ ID NO: 128470 - DNA, 20 bp, Artificial Sequence
  MKO10128470_B_Zfp689
  gRNA
aggctggacctactcggaaa

SEQ ID NO: 128471 - DNA, 20 bp, Artificial Sequence
  MKO10128471_B_Zfp689
  gRNA
accagcagccctagatccgc

SEQ ID NO: 128472 - DNA, 20 bp, Artificial Sequence
  MKO10128472_B_Zfp68
  gRNA
agggcactgcaaaaccaaac

SEQ ID NO: 128473 - DNA, 20 bp, Artificial Sequence
  MKO10128473_B_Zfp68
  gRNA
ctacagcaacttgctgttct

SEQ ID NO: 128474 - DNA, 20 bp, Artificial Sequence
  MKO10128474_B_Zfp68
  gRNA
actcaccatttctggcttcc

SEQ ID NO: 128475 - DNA, 20 bp, Artificial Sequence
  MKO10128475_B_Zfp691
  gRNA
ccggtgatgtacagccagcg

SEQ ID NO: 128476 - DNA, 20 bp, Artificial Sequence
  MKO10128476_B_Zfp691
  gRNA
ccaggtggatgcgctcgtgc

SEQ ID NO: 128477 - DNA, 20 bp, Artificial Sequence
  MKO10128477_B_Zfp691
  gRNA
tcccgaagctcacctgcccg

SEQ ID NO: 128478 - DNA, 20 bp, Artificial Sequence
  MKO10128478_B_Zfp692
  gRNA
tgctcagtgacgccagccca

SEQ ID NO: 128479 - DNA, 20 bp, Artificial Sequence
  MKO10128479_B_Zfp692
  gRNA
cccaactggctcatctgggg

SEQ ID NO: 128480 - DNA, 20 bp, Artificial Sequence
  MKO10128480_B_Zfp692
  gRNA
tggaatgtgagcagcgagaa

SEQ ID NO: 128481 - DNA, 20 bp, Artificial Sequence
  MKO10128481_B_Zfp697
  gRNA
taagaggggactcacgagag

SEQ ID NO: 128482 - DNA, 20 bp, Artificial Sequence
  MKO10128482_B_Zfp697
  gRNA
gcgctgcggcccttcgcatg

SEQ ID NO: 128483 - DNA, 20 bp, Artificial Sequence
  MKO10128483_B_Zfp697
  gRNA
ttcggtttggccggcgagtg

SEQ ID NO: 128484 - DNA, 20 bp, Artificial Sequence
  MKO10128484_B_Zfp69
  gRNA
tcacctcccgatacaaatcc

SEQ ID NO: 128485 - DNA, 20 bp, Artificial Sequence
  MKO10128485_B_Zfp69
  gRNA
ttacctaaaatgggatcctc

SEQ ID NO: 128486 - DNA, 20 bp, Artificial Sequence
  MKO10128486_B_Zfp69
  gRNA
gcctactgtgatttcccagt

SEQ ID NO: 128487 - DNA, 20 bp, Artificial Sequence
  MKO10128487_B_Zfp703
  gRNA
tgatagggagccggttcgcc

SEQ ID NO: 128488 - DNA, 20 bp, Artificial Sequence
  MKO10128488_B_Zfp703
  gRNA
gttagtccccgagtgtgaca

SEQ ID NO: 128489 - DNA, 20 bp, Artificial Sequence
  MKO10128489_B_Zfp703
  gRNA
accacagccctcccggttaa

SEQ ID NO: 128490 - DNA, 20 bp, Artificial Sequence
  MKO10128490_B_Zfp704
  gRNA
tcttcgatgagcccattccg

SEQ ID NO: 128491 - DNA, 20 bp, Artificial Sequence
  MKO10128491_B_Zfp704
  gRNA
agccctcctgtgcggcctaa

SEQ ID NO: 128492 - DNA, 20 bp, Artificial Sequence
  MKO10128492_B_Zfp704
  gRNA
gtcctctgattgaaacgtga

SEQ ID NO: 128493 - DNA, 20 bp, Artificial Sequence
  MKO10128493_B_Zfp706
  gRNA
gcctgaacatcagccaattc

SEQ ID NO: 128494 - DNA, 20 bp, Artificial Sequence
  MKO10128494_B_Zfp706
  gRNA
gaaacaaggacatgaccaaa

SEQ ID NO: 128495 - DNA, 20 bp, Artificial Sequence
  MKO10128495_B_Zfp706
  gRNA
cagctttggcagcagccttt

SEQ ID NO: 128496 - DNA, 20 bp, Artificial Sequence
  MKO10128496_B_Zfp707
  gRNA
agctaacggcgatgctcctc

SEQ ID NO: 128497 - DNA, 20 bp, Artificial Sequence
  MKO10128497_B_Zfp707
  gRNA
atgagccatgggttgatgac

SEQ ID NO: 128498 - DNA, 20 bp, Artificial Sequence
  MKO10128498_B_Zfp707
  gRNA
agtgtctcagtcctagccag

SEQ ID NO: 128499 - DNA, 20 bp, Artificial Sequence
  MKO10128499_B_Zfp708
  gRNA
ccacatctgtaaatgacaga

SEQ ID NO: 128500 - DNA, 20 bp, Artificial Sequence
  MKO10128500_B_Zfp708
  gRNA
tgtgaagaggaaggcatcag

SEQ ID NO: 128501 - DNA, 20 bp, Artificial Sequence
  MKO10128501_B_Zfp708
  gRNA
tggagcagagttcagatctg

SEQ ID NO: 128502 - DNA, 20 bp, Artificial Sequence
  MKO10128502_B_Zfp709
  gRNA
ctatgagttgaaccaatgtg

SEQ ID NO: 128503 - DNA, 20 bp, Artificial Sequence
  MKO10128503_B_Zfp709
  gRNA
cagtcatacctatagcagcc

SEQ ID NO: 128504 - DNA, 20 bp, Artificial Sequence
  MKO10128504_B_Zfp709
  gRNA
ctctgtgagctttcaagatg

SEQ ID NO: 128505 - DNA, 20 bp, Artificial Sequence
  MKO10128505_B_Zfp710
  gRNA
aaacctgagccggcacatga

SEQ ID NO: 128506 - DNA, 20 bp, Artificial Sequence
  MKO10128506_B_Zfp710
  gRNA
tgctgatccacaccagcgtc

SEQ ID NO: 128507 - DNA, 20 bp, Artificial Sequence
  MKO10128507_B_Zfp710
  gRNA
caaccgcatgtacaacctgc

SEQ ID NO: 128508 - DNA, 20 bp, Artificial Sequence
  MKO10128508_B_Zfp711
  gRNA
ggtgtcctaccatatgatgc

SEQ ID NO: 128509 - DNA, 20 bp, Artificial Sequence
  MKO10128509_B_Zfp711
  gRNA
aacttcttctgacaccattg

SEQ ID NO: 128510 - DNA, 20 bp, Artificial Sequence
  MKO10128510_B_Zfp711
  gRNA
ccgaatgcagcgagagaaaa

SEQ ID NO: 128511 - DNA, 20 bp, Artificial Sequence
  MKO10128511_B_Zfp712
  gRNA
tgcagcttccttcacattcc

SEQ ID NO: 128512 - DNA, 20 bp, Artificial Sequence
  MKO10128512_B_Zfp712
  gRNA
ttcaggaaatgctctctttc

SEQ ID NO: 128513 - DNA, 20 bp, Artificial Sequence
  MKO10128513_B_Zfp712
  gRNA
gaaccttacccaggaacaca

SEQ ID NO: 128514 - DNA, 20 bp, Artificial Sequence
  MKO10128514_B_Zfp715
  gRNA
gctcctctgcacccaatggc

SEQ ID NO: 128515 - DNA, 20 bp, Artificial Sequence
  MKO10128515_B_Zfp715
  gRNA
atggctcaccttgacatctc

SEQ ID NO: 128516 - DNA, 20 bp, Artificial Sequence
  MKO10128516_B_Zfp715
  gRNA
gggtattccattcccagtcc

SEQ ID NO: 128517 - DNA, 20 bp, Artificial Sequence
  MKO10128517_B_Zfp719
  gRNA
catgctcacccactgacaag

SEQ ID NO: 128518 - DNA, 20 bp, Artificial Sequence
  MKO10128518_B_Zfp719
  gRNA
ctgccagatgccccagcagt

SEQ ID NO: 128519 - DNA, 20 bp, Artificial Sequence
  MKO10128519_B_Zfp719
  gRNA
ctacagccacctcttgtcag

SEQ ID NO: 128520 - DNA, 20 bp, Artificial Sequence
  MKO10128520_B_Zfp72
  gRNA
ttccagaaatgtgaccagat

SEQ ID NO: 128521 - DNA, 20 bp, Artificial Sequence
  MKO10128521_B_Zfp72
  gRNA
ttacagcaaccttgtctctc

SEQ ID NO: 128522 - DNA, 20 bp, Artificial Sequence
  MKO10128522_B_Zfp72
  gRNA
gatgctcacccagagagaca

SEQ ID NO: 128523 - DNA, 20 bp, Artificial Sequence
  MKO10128523_B_Zfp735
  gRNA
ttctctccatcaacaatcca

SEQ ID NO: 128524 - DNA, 20 bp, Artificial Sequence
  MKO10128524_B_Zfp735
  gRNA
aatgtctggattctgccaag

SEQ ID NO: 128525 - DNA, 20 bp, Artificial Sequence
  MKO10128525_B_Zfp735
  gRNA
agcagagatgtgtgcttcac

SEQ ID NO: 128526 - DNA, 20 bp, Artificial Sequence
  MKO10128526_B_Zfp738
  gRNA
taacacacccgggagcatag

SEQ ID NO: 128527 - DNA, 20 bp, Artificial Sequence
  MKO10128527_B_Zfp738
  gRNA
ctgtacagatccaactgagc

SEQ ID NO: 128528 - DNA, 20 bp, Artificial Sequence
  MKO10128528_B_Zfp738
  gRNA
tctgacatggaggttggtgc

SEQ ID NO: 128529 - DNA, 20 bp, Artificial Sequence
  MKO10128529_B_Zfp740
  gRNA
taaatcccgcaaccgcaaag

SEQ ID NO: 128530 - DNA, 20 bp, Artificial Sequence
  MKO10128530_B_Zfp740
  gRNA
ctctcgtttcttccgacaag

SEQ ID NO: 128531 - DNA, 20 bp, Artificial Sequence
  MKO10128531_B_Zfp740
  gRNA
cgccactgtgtacccgcttg

SEQ ID NO: 128532 - DNA, 20 bp, Artificial Sequence
  MKO10128532_B_Zfp746
  gRNA
cacggctcttccccaatatc

SEQ ID NO: 128533 - DNA, 20 bp, Artificial Sequence
  MKO10128533_B_Zfp746
  gRNA
ggcctcagccagttggactc

SEQ ID NO: 128534 - DNA, 20 bp, Artificial Sequence
  MKO10128534_B_Zfp746
  gRNA
tggattcttcggcttccccc

SEQ ID NO: 128535 - DNA, 20 bp, Artificial Sequence
  MKO10128535_B_Zfp747
  gRNA
ccgcctgtgttctgtaaacc

SEQ ID NO: 128536 - DNA, 20 bp, Artificial Sequence
  MKO10128536_B_Zfp747
  gRNA
ccaaaccagcgctcatcagc

SEQ ID NO: 128537 - DNA, 20 bp, Artificial Sequence
  MKO10128537_B_Zfp747
  gRNA
tccacccagctgatgagcgc

SEQ ID NO: 128538 - DNA, 20 bp, Artificial Sequence
  MKO10128538_B_Zfp748
  gRNA
acttgtctcttctcattcaa

SEQ ID NO: 128539 - DNA, 20 bp, Artificial Sequence
  MKO10128539_B_Zfp748
  gRNA
gattctcacccaggaacaca

SEQ ID NO: 128540 - DNA, 20 bp, Artificial Sequence
  MKO10128540_B_Zfp748
  gRNA
agtgcctggagcctgctcag

SEQ ID NO: 128541 - DNA, 20 bp, Artificial Sequence
  MKO10128541_B_Zfp74
  gRNA
ctagcatcacattcctatat

SEQ ID NO: 128542 - DNA, 20 bp, Artificial Sequence
  MKO10128542_B_Zfp74
  gRNA
tccaacttgaaaatcacttc

SEQ ID NO: 128543 - DNA, 20 bp, Artificial Sequence
  MKO10128543_B_Zfp74
  gRNA
agaggaaatgaccgagtctg

SEQ ID NO: 128544 - DNA, 20 bp, Artificial Sequence
  MKO10128544_B_Zfp750
  gRNA
catgtatgcaagcaacgccc

SEQ ID NO: 128545 - DNA, 20 bp, Artificial Sequence
  MKO10128545_B_Zfp750
  gRNA
tctaatctgccgatccctta

SEQ ID NO: 128546 - DNA, 20 bp, Artificial Sequence
  MKO10128546_B_Zfp750
  gRNA
gccactcaatctgtccgtga

SEQ ID NO: 128547 - DNA, 20 bp, Artificial Sequence
  MKO10128547_B_Zfp758
  gRNA
acagggtctgttaacattca

SEQ ID NO: 128548 - DNA, 20 bp, Artificial Sequence
  MKO10128548_B_Zfp758
  gRNA
tgtggcagtggacttctcac

SEQ ID NO: 128549 - DNA, 20 bp, Artificial Sequence
  MKO10128549_B_Zfp758
  gRNA
attcatcatagactacattc

SEQ ID NO: 128550 - DNA, 20 bp, Artificial Sequence
  MKO10128550_B_Zfp759
  gRNA
acttgactcttcacatctag

SEQ ID NO: 128551 - DNA, 20 bp, Artificial Sequence
  MKO10128551_B_Zfp759
  gRNA
tatacctgagtacatagaga

SEQ ID NO: 128552 - DNA, 20 bp, Artificial Sequence
  MKO10128552_B_Zfp759
  gRNA
aatacctgggtcctcctcag

SEQ ID NO: 128553 - DNA, 20 bp, Artificial Sequence
  MKO10128553_B_Zfp760
  gRNA
tacatcaacttggtctctgt

SEQ ID NO: 128554 - DNA, 20 bp, Artificial Sequence
  MKO10128554_B_Zfp760
  gRNA
ctgtaacaagtacagctacc

SEQ ID NO: 128555 - DNA, 20 bp, Artificial Sequence
  MKO10128555_B_Zfp760
  gRNA
gtacactattatgtctgatt

SEQ ID NO: 128556 - DNA, 20 bp, Artificial Sequence
  MKO10128556_B_Zfp763
  gRNA
tccaacagagcccactctcc

SEQ ID NO: 128557 - DNA, 20 bp, Artificial Sequence
  MKO10128557_B_Zfp763
  gRNA
atgctaatgtcagaagtctg

SEQ ID NO: 128558 - DNA, 20 bp, Artificial Sequence
  MKO10128558_B_Zfp763
  gRNA
gtggctgtgaacttcagtcc

SEQ ID NO: 128559 - DNA, 20 bp, Artificial Sequence
  MKO10128559_B_Zfp764
  gRNA
gtccgcgaagctcacagcct

SEQ ID NO: 128560 - DNA, 20 bp, Artificial Sequence
  MKO10128560_B_Zfp764
  gRNA
cacctctggatcctgtgcac

SEQ ID NO: 128561 - DNA, 20 bp, Artificial Sequence
  MKO10128561_B_Zfp764
  gRNA
accctgtgcacaggatccag

SEQ ID NO: 128562 - DNA, 20 bp, Artificial Sequence
  MKO10128562_B_Zfp768
  gRNA
tgtgcacagtcccaacgcag

SEQ ID NO: 128563 - DNA, 20 bp, Artificial Sequence
  MKO10128563_B_Zfp768
  gRNA
cagcaccatcgcgtgcatag

SEQ ID NO: 128564 - DNA, 20 bp, Artificial Sequence
  MKO10128564_B_Zfp768
  gRNA
gggggataagtgctgaccgt

SEQ ID NO: 128565 - DNA, 20 bp, Artificial Sequence
  MKO10128565_B_Zfp770
  gRNA
gtcttacctcgccaacgcac

SEQ ID NO: 128566 - DNA, 20 bp, Artificial Sequence
  MKO10128566_B_Zfp770
  gRNA
ctttagacaactcgttcatc

SEQ ID NO: 128567 - DNA, 20 bp, Artificial Sequence
  MKO10128567_B_Zfp770
  gRNA
aaccaagcccctcgcactgt

SEQ ID NO: 128568 - DNA, 20 bp, Artificial Sequence
  MKO10128568_B_Zfp771
  gRNA
caagatgcctggcgaacagc

SEQ ID NO: 128569 - DNA, 20 bp, Artificial Sequence
  MKO10128569_B_Zfp771
  gRNA
gtcgctcgcccgtatgcgtg

SEQ ID NO: 128570 - DNA, 20 bp, Artificial Sequence
  MKO10128570_B_Zfp771
  gRNA
cttcggcggaagttcgtgcc

SEQ ID NO: 128571 - DNA, 20 bp, Artificial Sequence
  MKO10128571_B_Zfp772
  gRNA
agatgactcagctgaagtct

SEQ ID NO: 128572 - DNA, 20 bp, Artificial Sequence
  MKO10128572_B_Zfp772
  gRNA
acttcagctgagtcatctca

SEQ ID NO: 128573 - DNA, 20 bp, Artificial Sequence
  MKO10128573_B_Zfp772
  gRNA
tcaggactgcttatcctttg

SEQ ID NO: 128574 - DNA, 20 bp, Artificial Sequence
  MKO10128574_B_Zfp773
  gRNA
cctctcgcgccttccagttc

SEQ ID NO: 128575 - DNA, 20 bp, Artificial Sequence
  MKO10128575_B_Zfp773
  gRNA
tctgtaccaccaggtgatga

SEQ ID NO: 128576 - DNA, 20 bp, Artificial Sequence
  MKO10128576_B_Zfp773
  gRNA
gtagatagccacatcactaa

SEQ ID NO: 128577 - DNA, 20 bp, Artificial Sequence
  MKO10128577_B_Zfp775
  gRNA
tgcagggatggagagtggcc

SEQ ID NO: 128578 - DNA, 20 bp, Artificial Sequence
  MKO10128578_B_Zfp775
  gRNA
ctaaaacagcgaccgcagtc

SEQ ID NO: 128579 - DNA, 20 bp, Artificial Sequence
  MKO10128579_B_Zfp775
  gRNA
gcacatgcccgaaaccgcct

SEQ ID NO: 128580 - DNA, 20 bp, Artificial Sequence
  MKO10128580_B_Zfp777
  gRNA
ctcgcactccgcccaccgtc

SEQ ID NO: 128581 - DNA, 20 bp, Artificial Sequence
  MKO10128581_B_Zfp777
  gRNA
tggcatcgtgattaagatcg

SEQ ID NO: 128582 - DNA, 20 bp, Artificial Sequence
  MKO10128582_B_Zfp777
  gRNA
agactatgcaatatccaaac

SEQ ID NO: 128583 - DNA, 20 bp, Artificial Sequence
  MKO10128583_B_Zfp780b
  gRNA
caactctaattctcaagaca

SEQ ID NO: 128584 - DNA, 20 bp, Artificial Sequence
  MKO10128584_B_Zfp780b
  gRNA
ttcaggggtcagtgacattt

SEQ ID NO: 128585 - DNA, 20 bp, Artificial Sequence
  MKO10128585_B_Zfp780b
  gRNA
caggcttacccactgcgacc

SEQ ID NO: 128586 - DNA, 20 bp, Artificial Sequence
  MKO10128586_B_Zfp781
  gRNA
aggaataatatctgtcactc

SEQ ID NO: 128587 - DNA, 20 bp, Artificial Sequence
  MKO10128587_B_Zfp781
  gRNA
accacattcattacattcat

SEQ ID NO: 128588 - DNA, 20 bp, Artificial Sequence
  MKO10128588_B_Zfp781
  gRNA
tgaacttcaccaaagaagag

SEQ ID NO: 128589 - DNA, 20 bp, Artificial Sequence
  MKO10128589_B_Zfp784
  gRNA
tcacagagcatgcatcggaa

SEQ ID NO: 128590 - DNA, 20 bp, Artificial Sequence
  MKO10128590_B_Zfp784
  gRNA
cccctgtatgcacccgctcg

SEQ ID NO: 128591 - DNA, 20 bp, Artificial Sequence
  MKO10128591_B_Zfp784
  gRNA
ctcgcatatctgaggagcgt

SEQ ID NO: 128592 - DNA, 20 bp, Artificial Sequence
  MKO10128592_B_Zfp786
  gRNA
caaagggccgctcgggcctg

SEQ ID NO: 128593 - DNA, 20 bp, Artificial Sequence
  MKO10128593_B_Zfp786
  gRNA
agagatgagagtctcgtaat

SEQ ID NO: 128594 - DNA, 20 bp, Artificial Sequence
  MKO10128594_B_Zfp786
  gRNA
ccaaaccagaactaatatcc

SEQ ID NO: 128595 - DNA, 20 bp, Artificial Sequence
  MKO10128595_B_Zfp787
  gRNA
ctcacctgggttctcatgac

SEQ ID NO: 128596 - DNA, 20 bp, Artificial Sequence
  MKO10128596_B_Zfp787
  gRNA
cacaccgcgcaccagccgac

SEQ ID NO: 128597 - DNA, 20 bp, Artificial Sequence
  MKO10128597_B_Zfp787
  gRNA
cgatggcgagggcattattg

SEQ ID NO: 128598 - DNA, 20 bp, Artificial Sequence
  MKO10128598_B_Zfp788
  gRNA
ttctcttaccgacacaagca

SEQ ID NO: 128599 - DNA, 20 bp, Artificial Sequence
  MKO10128599_B_Zfp788
  gRNA
tgtgctcatcttccatgctt

SEQ ID NO: 128600 - DNA, 20 bp, Artificial Sequence
  MKO10128600_B_Zfp788
  gRNA
aagatgagcacacaaatcct

SEQ ID NO: 128601 - DNA, 20 bp, Artificial Sequence
  MKO10128601_B_Zfp78
  gRNA
ctaccggaacttggtctctg

SEQ ID NO: 128602 - DNA, 20 bp, Artificial Sequence
  MKO10128602_B_Zfp78
  gRNA
actggctgaatcctgctcag

SEQ ID NO: 128603 - DNA, 20 bp, Artificial Sequence
  MKO10128603_B_Zfp78
  gRNA
ctccttcccatgttccaata

SEQ ID NO: 128604 - DNA, 20 bp, Artificial Sequence
  MKO10128604_B_Zfp790
  gRNA
tcacctgggcaaaatctgct

SEQ ID NO: 128605 - DNA, 20 bp, Artificial Sequence
  MKO10128605_B_Zfp790
  gRNA
ggtaatgacattcagagatg

SEQ ID NO: 128606 - DNA, 20 bp, Artificial Sequence
  MKO10128606_B_Zfp790
  gRNA
ctacagccaccttgtctcag

SEQ ID NO: 128607 - DNA, 20 bp, Artificial Sequence
  MKO10128607_B_Zfp791
  gRNA
tgtactgatttgaaacatcc

SEQ ID NO: 128608 - DNA, 20 bp, Artificial Sequence
  MKO10128608_B_Zfp791
  gRNA
ttgtagagtttcttctgtac

SEQ ID NO: 128609 - DNA, 20 bp, Artificial Sequence
  MKO10128609_B_Zfp791
  gRNA
aaatcagtacagaatccaag

SEQ ID NO: 128610 - DNA, 20 bp, Artificial Sequence
  MKO10128610_B_Zfp799
  gRNA
ttgaggaacctgtcctatat

SEQ ID NO: 128611 - DNA, 20 bp, Artificial Sequence
  MKO10128611_B_Zfp799
  gRNA
ctgcgattcccgctgtcagt

SEQ ID NO: 128612 - DNA, 20 bp, Artificial Sequence
  MKO10128612_B_Zfp799
  gRNA
tcgtcctgtgtctttgactg

SEQ ID NO: 128613 - DNA, 20 bp, Artificial Sequence
  MKO10128613_B_Zfp7
  gRNA
ttaagccggaattgatctcc

SEQ ID NO: 128614 - DNA, 20 bp, Artificial Sequence
  MKO10128614_B_Zfp7
  gRNA
ggctgtgcacttctctcgag

SEQ ID NO: 128615 - DNA, 20 bp, Artificial Sequence
  MKO10128615_B_Zfp7
  gRNA
gcaccaaggatttgccagac

SEQ ID NO: 128616 - DNA, 20 bp, Artificial Sequence
  MKO10128616_B_Zfp800
  gRNA
cttccatgtagtttatatcc

SEQ ID NO: 128617 - DNA, 20 bp, Artificial Sequence
  MKO10128617_B_Zfp800
  gRNA
ttatgccgtagtctctttag

SEQ ID NO: 128618 - DNA, 20 bp, Artificial Sequence
  MKO10128618_B_Zfp800
  gRNA
gtaatcctctaaagagacta

SEQ ID NO: 128619 - DNA, 20 bp, Artificial Sequence
  MKO10128619_B_Zfp804a
  gRNA
actccaacgtcttcacaagc

SEQ ID NO: 128620 - DNA, 20 bp, Artificial Sequence
  MKO10128620_B_Zfp804a
  gRNA
agctccacgcatctcagcaa

SEQ ID NO: 128621 - DNA, 20 bp, Artificial Sequence
  MKO10128621_B_Zfp804a
  gRNA
gacaatgtagtaacactcca

SEQ ID NO: 128622 - DNA, 20 bp, Artificial Sequence
  MKO10128622_B_Zfp804b
  gRNA
acggagatccattcttgcag

SEQ ID NO: 128623 - DNA, 20 bp, Artificial Sequence
  MKO10128623_B_Zfp804b
  gRNA
caagaatggatctccgtctc

SEQ ID NO: 128624 - DNA, 20 bp, Artificial Sequence
  MKO10128624_B_Zfp804b
  gRNA
ttatgaccacgctcataagc

SEQ ID NO: 128625 - DNA, 20 bp, Artificial Sequence
  MKO10128625_B_Zfp808
  gRNA
tctagaatgcagtgacttat

SEQ ID NO: 128626 - DNA, 20 bp, Artificial Sequence
  MKO10128626_B_Zfp808
  gRNA
gacaatgttcttcaatattt

SEQ ID NO: 128627 - DNA, 20 bp, Artificial Sequence
  MKO10128627_B_Zfp808
  gRNA
aaagttctagaagacacaga

SEQ ID NO: 128628 - DNA, 20 bp, Artificial Sequence
  MKO10128628_B_Zfp809
  gRNA
atgacgggatgttgtccctt

SEQ ID NO: 128629 - DNA, 20 bp, Artificial Sequence
  MKO10128629_B_Zfp809
  gRNA
gcctagcagaagcttcaagc

SEQ ID NO: 128630 - DNA, 20 bp, Artificial Sequence
  MKO10128630_B_Zfp809
  gRNA
acctaagttgatcttcaatt

SEQ ID NO: 128631 - DNA, 20 bp, Artificial Sequence
  MKO10128631_B_Zfp810
  gRNA
ctcattcacagggcactgca

SEQ ID NO: 128632 - DNA, 20 bp, Artificial Sequence
  MKO10128632_B_Zfp810
  gRNA
ctgactcacccaaggacacc

SEQ ID NO: 128633 - DNA, 20 bp, Artificial Sequence
  MKO10128633_B_Zfp810
  gRNA
ccatacagcaaatgaagaac

SEQ ID NO: 128634 - DNA, 20 bp, Artificial Sequence
  MKO10128634_B_Zfp811
  gRNA
acactaggacatcatgtctc

SEQ ID NO: 128635 - DNA, 20 bp, Artificial Sequence
  MKO10128635_B_Zfp811
  gRNA
tctgctggatctatcccaaa

SEQ ID NO: 128636 - DNA, 20 bp, Artificial Sequence
  MKO10128636_B_Zfp811
  gRNA
ttgagaaatgtggtttccat

SEQ ID NO: 128637 - DNA, 20 bp, Artificial Sequence
  MKO10128637_B_Zfp819
  gRNA
ggagcaggacgggccgtgtg

SEQ ID NO: 128638 - DNA, 20 bp, Artificial Sequence
  MKO10128638_B_Zfp819
  gRNA
aggttgatttcccacatcag

SEQ ID NO: 128639 - DNA, 20 bp, Artificial Sequence
  MKO10128639_B_Zfp819
  gRNA
cctcaagatgaagaaagtta

SEQ ID NO: 128640 - DNA, 20 bp, Artificial Sequence
  MKO10128640_B_Zfp81
  gRNA
caacaaagcccactctccta

SEQ ID NO: 128641 - DNA, 20 bp, Artificial Sequence
  MKO10128641_B_Zfp81
  gRNA
gtggctgtgaacttcacctt

SEQ ID NO: 128642 - DNA, 20 bp, Artificial Sequence
  MKO10128642_B_Zfp81
  gRNA
tcaaatttctcctaatattt

SEQ ID NO: 128643 - DNA, 20 bp, Artificial Sequence
  MKO10128643_B_Zfp820
  gRNA
cactgacctgaggaacattt

SEQ ID NO: 128644 - DNA, 20 bp, Artificial Sequence
  MKO10128644_B_Zfp820
  gRNA
aatgtcttgattgtgctcag

SEQ ID NO: 128645 - DNA, 20 bp, Artificial Sequence
  MKO10128645_B_Zfp820
  gRNA
acagggtcagttaacattca

SEQ ID NO: 128646 - DNA, 20 bp, Artificial Sequence
  MKO10128646_B_Zfp821
  gRNA
agtcctgatctcgtagttgt

SEQ ID NO: 128647 - DNA, 20 bp, Artificial Sequence
  MKO10128647_B_Zfp821
  gRNA
gctgattgcacatgtgtacc

SEQ ID NO: 128648 - DNA, 20 bp, Artificial Sequence
  MKO10128648_B_Zfp821
  gRNA
cccgactcccacagtctagc

SEQ ID NO: 128649 - DNA, 20 bp, Artificial Sequence
  MKO10128649_B_Zfp825
  gRNA
agcagcgctcaaagaagaca

SEQ ID NO: 128650 - DNA, 20 bp, Artificial Sequence
  MKO10128650_B_Zfp825
  gRNA
tgtgcgtgtgaacttcactg

SEQ ID NO: 128651 - DNA, 20 bp, Artificial Sequence
  MKO10128651_B_Zfp825
  gRNA
tacctatagcagtgatgttc

SEQ ID NO: 128652 - DNA, 20 bp, Artificial Sequence
  MKO10128652_B_Zfp827
  gRNA
ctccagctacgtgttcagcc

SEQ ID NO: 128653 - DNA, 20 bp, Artificial Sequence
  MKO10128653_B_Zfp827
  gRNA
ttaccttgaatgctgccgac

SEQ ID NO: 128654 - DNA, 20 bp, Artificial Sequence
  MKO10128654_B_Zfp827
  gRNA
ggctggcgttgcacctttgc

SEQ ID NO: 128655 - DNA, 20 bp, Artificial Sequence
  MKO10128655_B_Zfp82
  gRNA
ctctttcccttgctccagta

SEQ ID NO: 128656 - DNA, 20 bp, Artificial Sequence
  MKO10128656_B_Zfp82
  gRNA
caggcttgcaccgtcacgcc

SEQ ID NO: 128657 - DNA, 20 bp, Artificial Sequence
  MKO10128657_B_Zfp82
  gRNA
tgtgtccatagccttctcgc

SEQ ID NO: 128658 - DNA, 20 bp, Artificial Sequence
  MKO10128658_B_Zfp830
  gRNA
tgaagcgatcgttgctgaag

SEQ ID NO: 128659 - DNA, 20 bp, Artificial Sequence
  MKO10128659_B_Zfp830
  gRNA
attcgccaagtacaaccgtc

SEQ ID NO: 128660 - DNA, 20 bp, Artificial Sequence
  MKO10128660_B_Zfp830
  gRNA
aacactcgcttgcctctccg

SEQ ID NO: 128661 - DNA, 20 bp, Artificial Sequence
  MKO10128661_B_Zfp831
  gRNA
atgtggggacctgaccgtcc

SEQ ID NO: 128662 - DNA, 20 bp, Artificial Sequence
  MKO10128662_B_Zfp831
  gRNA
ctttcaggtcgaaatgtaca

SEQ ID NO: 128663 - DNA, 20 bp, Artificial Sequence
  MKO10128663_B_Zfp831
  gRNA
gacttcgagacccatgtctc

SEQ ID NO: 128664 - DNA, 20 bp, Artificial Sequence
  MKO10128664_B_Zfp839
  gRNA
gacgctgtatgaacttcttc

SEQ ID NO: 128665 - DNA, 20 bp, Artificial Sequence
  MKO10128665_B_Zfp839
  gRNA
cctggagatcagcaacgatg

SEQ ID NO: 128666 - DNA, 20 bp, Artificial Sequence
  MKO10128666_B_Zfp839
  gRNA
cagcgctggtgcataccctc

SEQ ID NO: 128667 - DNA, 20 bp, Artificial Sequence
  MKO10128667_B_Zfp846
  gRNA
ctcaaaaaatcctgatgcaa

SEQ ID NO: 128668 - DNA, 20 bp, Artificial Sequence
  MKO10128668_B_Zfp846
  gRNA
ttgcacagagaagatctcca

SEQ ID NO: 128669 - DNA, 20 bp, Artificial Sequence
  MKO10128669_B_Zfp846
  gRNA
tcacagagacctctacagag

SEQ ID NO: 128670 - DNA, 20 bp, Artificial Sequence
  MKO10128670_B_Zfp84
  gRNA
ctacagcaactttgtgtcgc

SEQ ID NO: 128671 - DNA, 20 bp, Artificial Sequence
  MKO10128671_B_Zfp84
  gRNA
ctgtatagcgacctctgctc

SEQ ID NO: 128672 - DNA, 20 bp, Artificial Sequence
  MKO10128672_B_Zfp84
  gRNA
gccatcaataatttcactgc

SEQ ID NO: 128673 - DNA, 20 bp, Artificial Sequence
  MKO10128673_B_Zfp850
  gRNA
ctacagcaacctcattgcag

SEQ ID NO: 128674 - DNA, 20 bp, Artificial Sequence
  MKO10128674_B_Zfp850
  gRNA
gaaacagacaggttgagccc

SEQ ID NO: 128675 - DNA, 20 bp, Artificial Sequence
  MKO10128675_B_Zfp850
  gRNA
catgtcttgagaattagagc

SEQ ID NO: 128676 - DNA, 20 bp, Artificial Sequence
  MKO10128676_B_Zfp85
  gRNA
ccacatctgtgaatgacaga

SEQ ID NO: 128677 - DNA, 20 bp, Artificial Sequence
  MKO10128677_B_Zfp85
  gRNA
tgctttctctaagccatacc

SEQ ID NO: 128678 - DNA, 20 bp, Artificial Sequence
  MKO10128678_B_Zfp85
  gRNA
ttcctacacacctagatgga

SEQ ID NO: 128679 - DNA, 20 bp, Artificial Sequence
  MKO10128679_B_Zfp865
  gRNA
tggggcgacggtggccggat

SEQ ID NO: 128680 - DNA, 20 bp, Artificial Sequence
  MKO10128680_B_Zfp865
  gRNA
gtagcggaaggtcttgccgc

SEQ ID NO: 128681 - DNA, 20 bp, Artificial Sequence
  MKO10128681_B_Zfp865
  gRNA
gaaaccgaacgtcttgccgc

SEQ ID NO: 128682 - DNA, 20 bp, Artificial Sequence
  MKO10128682_B_Zfp866
  gRNA
tgcaggaacctcgctgcgat

SEQ ID NO: 128683 - DNA, 20 bp, Artificial Sequence
  MKO10128683_B_Zfp866
  gRNA
gaagatgactgcaaaaattt

SEQ ID NO: 128684 - DNA, 20 bp, Artificial Sequence
  MKO10128684_B_Zfp866
  gRNA
cattcttctcttcgattgca

SEQ ID NO: 128685 - DNA, 20 bp, Artificial Sequence
  MKO10128685_B_Zfp867
  gRNA
gtttatagccacatcgtcaa

SEQ ID NO: 128686 - DNA, 20 bp, Artificial Sequence
  MKO10128686_B_Zfp867
  gRNA
gatgcgggacagcagaaatt

SEQ ID NO: 128687 - DNA, 20 bp, Artificial Sequence
  MKO10128687_B_Zfp867
  gRNA
gattaccttagatttgtctg

SEQ ID NO: 128688 - DNA, 20 bp, Artificial Sequence
  MKO10128688_B_Zfp868
  gRNA
aaatccgttcatgcatttga

SEQ ID NO: 128689 - DNA, 20 bp, Artificial Sequence
  MKO10128689_B_Zfp868
  gRNA
acagcttacctgatcaggcc

SEQ ID NO: 128690 - DNA, 20 bp, Artificial Sequence
  MKO10128690_B_Zfp868
  gRNA
aagagcctgaaataaatcta

SEQ ID NO: 128691 - DNA, 20 bp, Artificial Sequence
  MKO10128691_B_Zfp869
  gRNA
aagatcctgaagtaaatcta

SEQ ID NO: 128692 - DNA, 20 bp, Artificial Sequence
  MKO10128692_B_Zfp869
  gRNA
aattaccttagatttacttc

SEQ ID NO: 128693 - DNA, 20 bp, Artificial Sequence
  MKO10128693_B_Zfp869
  gRNA
atcatggaggcagccattgt

SEQ ID NO: 128694 - DNA, 20 bp, Artificial Sequence
  MKO10128694_B_Zfp870
  gRNA
gaacgtaccatttccagccc

SEQ ID NO: 128695 - DNA, 20 bp, Artificial Sequence
  MKO10128695_B_Zfp870
  gRNA
cagaaggttataaatgagta

SEQ ID NO: 128696 - DNA, 20 bp, Artificial Sequence
  MKO10128696_B_Zfp870
  gRNA
tgtggctgtgaagttcacgc

SEQ ID NO: 128697 - DNA, 20 bp, Artificial Sequence
  MKO10128697_B_Zfp871
  gRNA
tcaacatagcccactcctcc

SEQ ID NO: 128698 - DNA, 20 bp, Artificial Sequence
  MKO10128698_B_Zfp871
  gRNA
ttgaggaacctggcttctat

SEQ ID NO: 128699 - DNA, 20 bp, Artificial Sequence
  MKO10128699_B_Zfp871
  gRNA
caactgaatccaacgcatga

SEQ ID NO: 128700 - DNA, 20 bp, Artificial Sequence
  MKO10128700_B_Zfp872
  gRNA
tctgctggacgattctcaga

SEQ ID NO: 128701 - DNA, 20 bp, Artificial Sequence
  MKO10128701_B_Zfp872
  gRNA
attggcaagaccagagcatt

SEQ ID NO: 128702 - DNA, 20 bp, Artificial Sequence
  MKO10128702_B_Zfp872
  gRNA
tgcactgatccctaatgctc

SEQ ID NO: 128703 - DNA, 20 bp, Artificial Sequence
  MKO10128703_B_Zfp873
  gRNA
tcatgaagaatgggctttgc

SEQ ID NO: 128704 - DNA, 20 bp, Artificial Sequence
  MKO10128704_B_Zfp873
  gRNA
cagattactgagccgtgtaa

SEQ ID NO: 128705 - DNA, 20 bp, Artificial Sequence
  MKO10128705_B_Zfp873
  gRNA
tttgtatcaagcactgccac

SEQ ID NO: 128706 - DNA, 20 bp, Artificial Sequence
  MKO10128706_B_Zfp874a
  gRNA
tgctgttgctaaaccatact

SEQ ID NO: 128707 - DNA, 20 bp, Artificial Sequence
  MKO10128707_B_Zfp874a
  gRNA
tttcagccaccttgatttcc

SEQ ID NO: 128708 - DNA, 20 bp, Artificial Sequence
  MKO10128708_B_Zfp874a
  gRNA
aatcctcacccaggaaatca

SEQ ID NO: 128709 - DNA, 20 bp, Artificial Sequence
  MKO10128709_B_Zfp874b
  gRNA
cttctacacacctgggatgg

SEQ ID NO: 128710 - DNA, 20 bp, Artificial Sequence
  MKO10128710_B_Zfp874b
  gRNA
tgctgttgctaagccatact

SEQ ID NO: 128711 - DNA, 20 bp, Artificial Sequence
  MKO10128711_B_Zfp874b
  gRNA
actacctgggtcctgctcag

SEQ ID NO: 128712 - DNA, 20 bp, Artificial Sequence
  MKO10128712_B_Zfp879
  gRNA
gccccttacccagcgagacc

SEQ ID NO: 128713 - DNA, 20 bp, Artificial Sequence
  MKO10128713_B_Zfp879
  gRNA
tctaactgagcgatgacctt

SEQ ID NO: 128714 - DNA, 20 bp, Artificial Sequence
  MKO10128714_B_Zfp879
  gRNA
ttactcacctgaacctgggc

SEQ ID NO: 128715 - DNA, 20 bp, Artificial Sequence
  MKO10128715_B_Zfp87
  gRNA
gctggtctcttcacaactga

SEQ ID NO: 128716 - DNA, 20 bp, Artificial Sequence
  MKO10128716_B_Zfp87
  gRNA
gaacctcacccaggaacaca

SEQ ID NO: 128717 - DNA, 20 bp, Artificial Sequence
  MKO10128717_B_Zfp87
  gRNA
ttcaggaaatgctgtcattc

SEQ ID NO: 128718 - DNA, 20 bp, Artificial Sequence
  MKO10128718_B_Zfp882
  gRNA
tgctgaattcttcccaaaag

SEQ ID NO: 128719 - DNA, 20 bp, Artificial Sequence
  MKO10128719_B_Zfp882
  gRNA
gattgaaaccttgtctatgc

SEQ ID NO: 128720 - DNA, 20 bp, Artificial Sequence
  MKO10128720_B_Zfp882
  gRNA
ccgcacttcttacatgtgcc

SEQ ID NO: 128721 - DNA, 20 bp, Artificial Sequence
  MKO10128721_B_Zfp90
  gRNA
aatggccccgagacctccga

SEQ ID NO: 128722 - DNA, 20 bp, Artificial Sequence
  MKO10128722_B_Zfp90
  gRNA
ctcacctggggcttggccgt

SEQ ID NO: 128723 - DNA, 20 bp, Artificial Sequence
  MKO10128723_B_Zfp90
  gRNA
tacaaccacctggtgtcgct

SEQ ID NO: 128724 - DNA, 20 bp, Artificial Sequence
  MKO10128724_B_Zfp91
  gRNA
ttcaagcatacctttcaagg

SEQ ID NO: 128725 - DNA, 20 bp, Artificial Sequence
  MKO10128725_B_Zfp91
  gRNA
ccagaagaacatcagtctcc

SEQ ID NO: 128726 - DNA, 20 bp, Artificial Sequence
  MKO10128726_B_Zfp91
  gRNA
gaaaaactaacaactgataa

SEQ ID NO: 128727 - DNA, 20 bp, Artificial Sequence
  MKO10128727_B_Zfp92
  gRNA
tacagccatctggtgtcagt

SEQ ID NO: 128728 - DNA, 20 bp, Artificial Sequence
  MKO10128728_B_Zfp92
  gRNA
gggctttgcccttagaagag

SEQ ID NO: 128729 - DNA, 20 bp, Artificial Sequence
  MKO10128729_B_Zfp92
  gRNA
ccagcatcacttgcttgtag

SEQ ID NO: 128730 - DNA, 20 bp, Artificial Sequence
  MKO10128730_B_Zfp930
  gRNA
ctttactacacttcttacat

SEQ ID NO: 128731 - DNA, 20 bp, Artificial Sequence
  MKO10128731_B_Zfp930
  gRNA
tccagcaaggcccactcttc

SEQ ID NO: 128732 - DNA, 20 bp, Artificial Sequence
  MKO10128732_B_Zfp930
  gRNA
ccttgctggatcatacccag

SEQ ID NO: 128733 - DNA, 20 bp, Artificial Sequence
  MKO10128733_B_Zfp931
  gRNA
accacaatgtttacattcat

SEQ ID NO: 128734 - DNA, 20 bp, Artificial Sequence
  MKO10128734_B_Zfp931
  gRNA
cgtgcatgtgaacttcactc

SEQ ID NO: 128735 - DNA, 20 bp, Artificial Sequence
  MKO10128735_B_Zfp931
  gRNA
tatagctgtgagattcctat

SEQ ID NO: 128736 - DNA, 20 bp, Artificial Sequence
  MKO10128736_B_Zfp932
  gRNA
tgaacttcactcaagaagaa

SEQ ID NO: 128737 - DNA, 20 bp, Artificial Sequence
  MKO10128737_B_Zfp932
  gRNA
aaattaccttccatgtcttc

SEQ ID NO: 128738 - DNA, 20 bp, Artificial Sequence
  MKO10128738_B_Zfp932
  gRNA
tgtgaaagctccagaagaca

SEQ ID NO: 128739 - DNA, 20 bp, Artificial Sequence
  MKO10128739_B_Zfp933
  gRNA
ctgtcttacctatggcactg

SEQ ID NO: 128740 - DNA, 20 bp, Artificial Sequence
  MKO10128740_B_Zfp933
  gRNA
tacaggaacctcagtgccat

SEQ ID NO: 128741 - DNA, 20 bp, Artificial Sequence
  MKO10128741_B_Zfp933
  gRNA
tgtcaaagctctagaagacg

SEQ ID NO: 128742 - DNA, 20 bp, Artificial Sequence
  MKO10128742_B_Zfp934
  gRNA
ttgcgagcaagctgaaagat

SEQ ID NO: 128743 - DNA, 20 bp, Artificial Sequence
  MKO10128743_B_Zfp934
  gRNA
gtcgccacgttgtagatcgc

SEQ ID NO: 128744 - DNA, 20 bp, Artificial Sequence
  MKO10128744_B_Zfp934
  gRNA
ctagaatgcagtgacttatg

SEQ ID NO: 128745 - DNA, 20 bp, Artificial Sequence
  MKO10128745_B_Zfp935
  gRNA
gaatatagagatgaccgtat

SEQ ID NO: 128746 - DNA, 20 bp, Artificial Sequence
  MKO10128746_B_Zfp935
  gRNA
catatttacctatagcattg

SEQ ID NO: 128747 - DNA, 20 bp, Artificial Sequence
  MKO10128747_B_Zfp935
  gRNA
aaagttctagaagacacaga

SEQ ID NO: 128748 - DNA, 20 bp, Artificial Sequence
  MKO10128748_B_Zfp936
  gRNA
ctggttcaatgctgtagctg

SEQ ID NO: 128749 - DNA, 20 bp, Artificial Sequence
  MKO10128749_B_Zfp936
  gRNA
ttgtaaagtctcttctgaga

SEQ ID NO: 128750 - DNA, 20 bp, Artificial Sequence
  MKO10128750_B_Zfp936
  gRNA
atgtgcatgtacacttcact

SEQ ID NO: 128751 - DNA, 20 bp, Artificial Sequence
  MKO10128751_B_Zfp937
  gRNA
tgtgcatgtgaacttcactc

SEQ ID NO: 128752 - DNA, 20 bp, Artificial Sequence
  MKO10128752_B_Zfp937
  gRNA
gaactttgaaaatgttcttc

SEQ ID NO: 128753 - DNA, 20 bp, Artificial Sequence
  MKO10128753_B_Zfp937
  gRNA
attatatttaggctacagtt

SEQ ID NO: 128754 - DNA, 20 bp, Artificial Sequence
  MKO10128754_B_Zfp938
  gRNA
tctctacaaagatgtcatgc

SEQ ID NO: 128755 - DNA, 20 bp, Artificial Sequence
  MKO10128755_B_Zfp938
  gRNA
tgtcaaagttctagaagaca

SEQ ID NO: 128756 - DNA, 20 bp, Artificial Sequence
  MKO10128756_B_Zfp938
  gRNA
ggaaaatctcctgtccgtcc

SEQ ID NO: 128757 - DNA, 20 bp, Artificial Sequence
  MKO10128757_B_Zfp939
  gRNA
tcctctgtccgcagctttgc

SEQ ID NO: 128758 - DNA, 20 bp, Artificial Sequence
  MKO10128758_B_Zfp939
  gRNA
ttccagttggagcatggatt

SEQ ID NO: 128759 - DNA, 20 bp, Artificial Sequence
  MKO10128759_B_Zfp939
  gRNA
gcacaaactcacccaagaac

SEQ ID NO: 128760 - DNA, 20 bp, Artificial Sequence
  MKO10128760_B_Zfp93
  gRNA
tgtggctgttgtcttcagcg

SEQ ID NO: 128761 - DNA, 20 bp, Artificial Sequence
  MKO10128761_B_Zfp93
  gRNA
gagaacaatgaccaagttac

SEQ ID NO: 128762 - DNA, 20 bp, Artificial Sequence
  MKO10128762_B_Zfp93
  gRNA
ctccagacagccgtcatcct

SEQ ID NO: 128763 - DNA, 20 bp, Artificial Sequence
  MKO10128763_B_Zfp940
  gRNA
gagacaaggggaccttatcc

SEQ ID NO: 128764 - DNA, 20 bp, Artificial Sequence
  MKO10128764_B_Zfp940
  gRNA
gaatcttacccactgagacg

SEQ ID NO: 128765 - DNA, 20 bp, Artificial Sequence
  MKO10128765_B_Zfp940
  gRNA
ctcatccctcaaaatcatcc

SEQ ID NO: 128766 - DNA, 20 bp, Artificial Sequence
  MKO10128766_B_Zfp941
  gRNA
gccacatcatcaaatgtcat

SEQ ID NO: 128767 - DNA, 20 bp, Artificial Sequence
  MKO10128767_B_Zfp941
  gRNA
tcagaaaaggtctcccgtcg

SEQ ID NO: 128768 - DNA, 20 bp, Artificial Sequence
  MKO10128768_B_Zfp941
  gRNA
tcgctccaggacgaatgcta

SEQ ID NO: 128769 - DNA, 20 bp, Artificial Sequence
  MKO10128769_B_Zfp942
  gRNA
tcagggtctgttaagattca

SEQ ID NO: 128770 - DNA, 20 bp, Artificial Sequence
  MKO10128770_B_Zfp942
  gRNA
aagaagaatgaatgcttccc

SEQ ID NO: 128771 - DNA, 20 bp, Artificial Sequence
  MKO10128771_B_Zfp942
  gRNA
tgtggcagtggacttctcac

SEQ ID NO: 128772 - DNA, 20 bp, Artificial Sequence
  MKO10128772_B_Zfp943
  gRNA
aagaagaatgaatgcttctc

SEQ ID NO: 128773 - DNA, 20 bp, Artificial Sequence
  MKO10128773_B_Zfp943
  gRNA
catacaatgccctctgagca

SEQ ID NO: 128774 - DNA, 20 bp, Artificial Sequence
  MKO10128774_B_Zfp943
  gRNA
tagctctgtaagatgtactt

SEQ ID NO: 128775 - DNA, 20 bp, Artificial Sequence
  MKO10128775_B_Zfp944
  gRNA
aagaagaatggatgtttccc

SEQ ID NO: 128776 - DNA, 20 bp, Artificial Sequence
  MKO10128776_B_Zfp944
  gRNA
acagggtcagttaacattca

SEQ ID NO: 128777 - DNA, 20 bp, Artificial Sequence
  MKO10128777_B_Zfp944
  gRNA
cgtggctgtggacttctcac

SEQ ID NO: 128778 - DNA, 20 bp, Artificial Sequence
  MKO10128778_B_Zfp945
  gRNA
ataggaactgttaacattca

SEQ ID NO: 128779 - DNA, 20 bp, Artificial Sequence
  MKO10128779_B_Zfp945
  gRNA
accctggatggtgaagagag

SEQ ID NO: 128780 - DNA, 20 bp, Artificial Sequence
  MKO10128780_B_Zfp945
  gRNA
aagaagaatgacagcttctt

SEQ ID NO: 128781 - DNA, 20 bp, Artificial Sequence
  MKO10128781_B_Zfp946
  gRNA
ttctctgctaaatgtttcca

SEQ ID NO: 128782 - DNA, 20 bp, Artificial Sequence
  MKO10128782_B_Zfp946
  gRNA
cgtggctgtggaattctcac

SEQ ID NO: 128783 - DNA, 20 bp, Artificial Sequence
  MKO10128783_B_Zfp946
  gRNA
aagctaaacagacatagaac

SEQ ID NO: 128784 - DNA, 20 bp, Artificial Sequence
  MKO10128784_B_Zfp947
  gRNA
cgtggctatgcacttctcac

SEQ ID NO: 128785 - DNA, 20 bp, Artificial Sequence
  MKO10128785_B_Zfp947
  gRNA
ttctctcctaaatgctcctc

SEQ ID NO: 128786 - DNA, 20 bp, Artificial Sequence
  MKO10128786_B_Zfp947
  gRNA
cactgacctgaggagcattt

SEQ ID NO: 128787 - DNA, 20 bp, Artificial Sequence
  MKO10128787_B_Zfp948
  gRNA
tttgtacattgacgtgatgg

SEQ ID NO: 128788 - DNA, 20 bp, Artificial Sequence
  MKO10128788_B_Zfp948
  gRNA
atctccagtaaacatgtcca

SEQ ID NO: 128789 - DNA, 20 bp, Artificial Sequence
  MKO10128789_B_Zfp948
  gRNA
ctgaccttggacatgtttac

SEQ ID NO: 128790 - DNA, 20 bp, Artificial Sequence
  MKO10128790_B_Zfp949
  gRNA
acgctcagaagatgctgtac

SEQ ID NO: 128791 - DNA, 20 bp, Artificial Sequence
  MKO10128791_B_Zfp949
  gRNA
cctgcaaacaagactctgcc

SEQ ID NO: 128792 - DNA, 20 bp, Artificial Sequence
  MKO10128792_B_Zfp949
  gRNA
cctggcagagtcttgtttgc

SEQ ID NO: 128793 - DNA, 20 bp, Artificial Sequence
  MKO10128793_B_Zfp94
  gRNA
cgtggccgtggtcttcagtg

SEQ ID NO: 128794 - DNA, 20 bp, Artificial Sequence
  MKO10128794_B_Zfp94
  gRNA
ctcctcctcactgaagacca

SEQ ID NO: 128795 - DNA, 20 bp, Artificial Sequence
  MKO10128795_B_Zfp94
  gRNA
gagtatggagacccgactaa

SEQ ID NO: 128796 - DNA, 20 bp, Artificial Sequence
  MKO10128796_B_Zfp951
  gRNA
ctagaatgcagtgacatatg

SEQ ID NO: 128797 - DNA, 20 bp, Artificial Sequence
  MKO10128797_B_Zfp951
  gRNA
cagtcttacctatagctctg

SEQ ID NO: 128798 - DNA, 20 bp, Artificial Sequence
  MKO10128798_B_Zfp951
  gRNA
tctcaaacttctagaagaca

SEQ ID NO: 128799 - DNA, 20 bp, Artificial Sequence
  MKO10128799_B_Zfp952
  gRNA
gcaggagcctgtgacctttg

SEQ ID NO: 128800 - DNA, 20 bp, Artificial Sequence
  MKO10128800_B_Zfp952
  gRNA
aagacaactaccaaaatctc

SEQ ID NO: 128801 - DNA, 20 bp, Artificial Sequence
  MKO10128801_B_Zfp952
  gRNA
tatgcatcaaaagcagagaa

SEQ ID NO: 128802 - DNA, 20 bp, Artificial Sequence
  MKO10128802_B_Zfp953
  gRNA
gcagacatctctatgtactc

SEQ ID NO: 128803 - DNA, 20 bp, Artificial Sequence
  MKO10128803_B_Zfp953
  gRNA
tgtttcctctacgccatacc

SEQ ID NO: 128804 - DNA, 20 bp, Artificial Sequence
  MKO10128804_B_Zfp953
  gRNA
ctgtataatttccactgagc

SEQ ID NO: 128805 - DNA, 20 bp, Artificial Sequence
  MKO10128805_B_Zfp954
  gRNA
gcagggctgcgtgtcctttg

SEQ ID NO: 128806 - DNA, 20 bp, Artificial Sequence
  MKO10128806_B_Zfp954
  gRNA
gattcatgattcaactcagg

SEQ ID NO: 128807 - DNA, 20 bp, Artificial Sequence
  MKO10128807_B_Zfp954
  gRNA
cctgtaccagactgtgatga

SEQ ID NO: 128808 - DNA, 20 bp, Artificial Sequence
  MKO10128808_B_Zfp955a
  gRNA
cacagctccagagaaactcg

SEQ ID NO: 128809 - DNA, 20 bp, Artificial Sequence
  MKO10128809_B_Zfp955a
  gRNA
ttagggtccagtgacctttg

SEQ ID NO: 128810 - DNA, 20 bp, Artificial Sequence
  MKO10128810_B_Zfp955a
  gRNA
gatgcatcggaagcagaaga

SEQ ID NO: 128811 - DNA, 20 bp, Artificial Sequence
  MKO10128811_B_Zfp955b
  gRNA
caaattacctcaagtttctc

SEQ ID NO: 128812 - DNA, 20 bp, Artificial Sequence
  MKO10128812_B_Zfp955b
  gRNA
cacagctccagagaaacttg

SEQ ID NO: 128813 - DNA, 20 bp, Artificial Sequence
  MKO10128813_B_Zfp955b
  gRNA
gatgcatcggaagcagaaga

SEQ ID NO: 128814 - DNA, 20 bp, Artificial Sequence
  MKO10128814_B_Zfp956
  gRNA
cgtgaggtgctaggctctct

SEQ ID NO: 128815 - DNA, 20 bp, Artificial Sequence
  MKO10128815_B_Zfp956
  gRNA
cactcggggcagattccagc

SEQ ID NO: 128816 - DNA, 20 bp, Artificial Sequence
  MKO10128816_B_Zfp956
  gRNA
ctggttccaggactggcata

SEQ ID NO: 128817 - DNA, 20 bp, Artificial Sequence
  MKO10128817_B_Zfp957
  gRNA
acccctccctatagcaacac

SEQ ID NO: 128818 - DNA, 20 bp, Artificial Sequence
  MKO10128818_B_Zfp957
  gRNA
ctctccccagcaacgaattt

SEQ ID NO: 128819 - DNA, 20 bp, Artificial Sequence
  MKO10128819_B_Zfp957
  gRNA
tcggcacaaaagtgcttcta

SEQ ID NO: 128820 - DNA, 20 bp, Artificial Sequence
  MKO10128820_B_Zfp958
  gRNA
ctaatattgactccatttat

SEQ ID NO: 128821 - DNA, 20 bp, Artificial Sequence
  MKO10128821_B_Zfp958
  gRNA
gacctttgatgatgtgcatg

SEQ ID NO: 128822 - DNA, 20 bp, Artificial Sequence
  MKO10128822_B_Zfp958
  gRNA
gaaaatgttcttcaatagtt

SEQ ID NO: 128823 - DNA, 20 bp, Artificial Sequence
  MKO10128823_B_Zfp959
  gRNA
ttaggatgcaatgacctatg

SEQ ID NO: 128824 - DNA, 20 bp, Artificial Sequence
  MKO10128824_B_Zfp959
  gRNA
tgtcaaagttctagaagaca

SEQ ID NO: 128825 - DNA, 20 bp, Artificial Sequence
  MKO10128825_B_Zfp959
  gRNA
tgtagagtgactcactctat

SEQ ID NO: 128826 - DNA, 20 bp, Artificial Sequence
  MKO10128826_B_Zfp960
  gRNA
caatcttacctatggcagtg

SEQ ID NO: 128827 - DNA, 20 bp, Artificial Sequence
  MKO10128827_B_Zfp960
  gRNA
agtgacgtactatgatgtcc

SEQ ID NO: 128828 - DNA, 20 bp, Artificial Sequence
  MKO10128828_B_Zfp960
  gRNA
ctgtcttctaggctataact

SEQ ID NO: 128829 - DNA, 20 bp, Artificial Sequence
  MKO10128829_B_Zfp961
  gRNA
gataaagcctttacgtgcct

SEQ ID NO: 128830 - DNA, 20 bp, Artificial Sequence
  MKO10128830_B_Zfp961
  gRNA
tgcgctttacccaagaagag

SEQ ID NO: 128831 - DNA, 20 bp, Artificial Sequence
  MKO10128831_B_Zfp961
  gRNA
tacagaagtcaaattcctat

SEQ ID NO: 128832 - DNA, 20 bp, Artificial Sequence
  MKO10128832_B_Zfp963
  gRNA
atgccttataggaaacagat

SEQ ID NO: 128833 - DNA, 20 bp, Artificial Sequence
  MKO10128833_B_Zfp963
  gRNA
ttaggcctcagtgagctttg

SEQ ID NO: 128834 - DNA, 20 bp, Artificial Sequence
  MKO10128834_B_Zfp963
  gRNA
tatcattacctatcgtagcg

SEQ ID NO: 128835 - DNA, 20 bp, Artificial Sequence
  MKO10128835_B_Zfp964
  gRNA
agttctcatgtaccgctgaa

SEQ ID NO: 128836 - DNA, 20 bp, Artificial Sequence
  MKO10128836_B_Zfp964
  gRNA
gaagaccattgtataaatcc

SEQ ID NO: 128837 - DNA, 20 bp, Artificial Sequence
  MKO10128837_B_Zfp964
  gRNA
tacaatggtcttccaagttc

SEQ ID NO: 128838 - DNA, 20 bp, Artificial Sequence
  MKO10128838_B_Zfp97
  gRNA
caatcttacctatggcagtg

SEQ ID NO: 128839 - DNA, 20 bp, Artificial Sequence
  MKO10128839_B_Zfp97
  gRNA
agtgacgtactatgatgtcc

SEQ ID NO: 128840 - DNA, 20 bp, Artificial Sequence
  MKO10128840_B_Zfp97
  gRNA
ctgtcttctaggctataact

SEQ ID NO: 128841 - DNA, 20 bp, Artificial Sequence
  MKO10128841_B_Zfp9
  gRNA
atcattaacaggttatcgtg

SEQ ID NO: 128842 - DNA, 20 bp, Artificial Sequence
  MKO10128842_B_Zfp9
  gRNA
ctcagggacccgtgacatta

SEQ ID NO: 128843 - DNA, 20 bp, Artificial Sequence
  MKO10128843_B_Zfp9
  gRNA
agcctgttgctcctgatgtt

SEQ ID NO: 128844 - DNA, 20 bp, Artificial Sequence
  MKO10128844_B_Zfpl1
  gRNA
ccaccacttaccattaaagc

SEQ ID NO: 128845 - DNA, 20 bp, Artificial Sequence
  MKO10128845_B_Zfpl1
  gRNA
tgcgcctgctttctatagcc

SEQ ID NO: 128846 - DNA, 20 bp, Artificial Sequence
  MKO10128846_B_Zfpl1
  gRNA
cctgcaggcgctgtgtttcg

SEQ ID NO: 128847 - DNA, 20 bp, Artificial Sequence
  MKO10128847_B_Zfpm1
  gRNA
cttgggggctcctctatggc

SEQ ID NO: 128848 - DNA, 20 bp, Artificial Sequence
  MKO10128848_B_Zfpm1
  gRNA
cggcttcttcagttaggacc

SEQ ID NO: 128849 - DNA, 20 bp, Artificial Sequence
  MKO10128849_B_Zfpm1
  gRNA
tggatgagagctgctggcta

SEQ ID NO: 128850 - DNA, 20 bp, Artificial Sequence
  MKO10128850_B_Zfpm2
  gRNA
ggacttgaacaataattcct

SEQ ID NO: 128851 - DNA, 20 bp, Artificial Sequence
  MKO10128851_B_Zfpm2
  gRNA
tgctgactgctggtcctaaa

SEQ ID NO: 128852 - DNA, 20 bp, Artificial Sequence
  MKO10128852_B_Zfpm2
  gRNA
gtcacatccagaagccattt

SEQ ID NO: 128853 - DNA, 20 bp, Artificial Sequence
  MKO10128853_B_Zfr2
  gRNA
tcccctcatgtgcgcagcat

SEQ ID NO: 128854 - DNA, 20 bp, Artificial Sequence
  MKO10128854_B_Zfr2
  gRNA
tggtcacagctaccgagaga

SEQ ID NO: 128855 - DNA, 20 bp, Artificial Sequence
  MKO10128855_B_Zfr2
  gRNA
tacctggtgggcggatgcag

SEQ ID NO: 128856 - DNA, 20 bp, Artificial Sequence
  MKO10128856_B_Zfr
  gRNA
ttactatcataagctacagc

SEQ ID NO: 128857 - DNA, 20 bp, Artificial Sequence
  MKO10128857_B_Zfr
  gRNA
atactcaagcgcagcaagct

SEQ ID NO: 128858 - DNA, 20 bp, Artificial Sequence
  MKO10128858_B_Zfr
  gRNA
gaagatgccaaaatggcgac

SEQ ID NO: 128859 - DNA, 20 bp, Artificial Sequence
  MKO10128859_B_Zfx
  gRNA
acaatagtattcgcgttccc

SEQ ID NO: 128860 - DNA, 20 bp, Artificial Sequence
  MKO10128860_B_Zfx
  gRNA
cacttgctgttcatgcactg

SEQ ID NO: 128861 - DNA, 20 bp, Artificial Sequence
  MKO10128861_B_Zfx
  gRNA
gcttgcttagtggatgatgc

SEQ ID NO: 128862 - DNA, 20 bp, Artificial Sequence
  MKO10128862_B_Zfy1
  gRNA
cctagcaaagcagatcttga

SEQ ID NO: 128863 - DNA, 20 bp, Artificial Sequence
  MKO10128863_B_Zfy1
  gRNA
gtcagccagtgattctcaaa

SEQ ID NO: 128864 - DNA, 20 bp, Artificial Sequence
  MKO10128864_B_Zfy1
  gRNA
tgacatataaatgttgactc

SEQ ID NO: 128865 - DNA, 20 bp, Artificial Sequence
  MKO10128865_B_Zfy2
  gRNA
cctagcaaaacagatcatga

SEQ ID NO: 128866 - DNA, 20 bp, Artificial Sequence
  MKO10128866_B_Zfy2
  gRNA
aagctgaagtcactgatcag

SEQ ID NO: 128867 - DNA, 20 bp, Artificial Sequence
  MKO10128867_B_Zfy2
  gRNA
agtttctgactctgcattca

SEQ ID NO: 128868 - DNA, 20 bp, Artificial Sequence
  MKO10128868_B_Zfyve16
  gRNA
ctctggttaccttcaacatt

SEQ ID NO: 128869 - DNA, 20 bp, Artificial Sequence
  MKO10128869_B_Zfyve16
  gRNA
gacttaagacaagaaccacc

SEQ ID NO: 128870 - DNA, 20 bp, Artificial Sequence
  MKO10128870_B_Zfyve16
  gRNA
gtatctgcaacttcaccatt

SEQ ID NO: 128871 - DNA, 20 bp, Artificial Sequence
  MKO10128871_B_Zfyve19
  gRNA
caagttcaccctcttcaaga

SEQ ID NO: 128872 - DNA, 20 bp, Artificial Sequence
  MKO10128872_B_Zfyve19
  gRNA
cactcgcctccttcttgaag

SEQ ID NO: 128873 - DNA, 20 bp, Artificial Sequence
  MKO10128873_B_Zfyve19
  gRNA
ctgtcttagcttcagcgctc

SEQ ID NO: 128874 - DNA, 20 bp, Artificial Sequence
  MKO10128874_B_Zfyve1
  gRNA
gagcaggtgaagtactcgtc

SEQ ID NO: 128875 - DNA, 20 bp, Artificial Sequence
  MKO10128875_B_Zfyve1
  gRNA
tcaccttgcaggtatagacg

SEQ ID NO: 128876 - DNA, 20 bp, Artificial Sequence
  MKO10128876_B_Zfyve1
  gRNA
aaaatgaactgtgcgccatc

SEQ ID NO: 128877 - DNA, 20 bp, Artificial Sequence
  MKO10128877_B_Zfyve20
  gRNA
tattgacttcaacaacatag

SEQ ID NO: 128878 - DNA, 20 bp, Artificial Sequence
  MKO10128878_B_Zfyve20
  gRNA
tatgaatcattcagttatgg

SEQ ID NO: 128879 - DNA, 20 bp, Artificial Sequence
  MKO10128879_B_Zfyve20
  gRNA
actgagacttcaaagattag

SEQ ID NO: 128880 - DNA, 20 bp, Artificial Sequence
  MKO10128880_B_Zfyve21
  gRNA
tcgttacaggtgcttggttc

SEQ ID NO: 128881 - DNA, 20 bp, Artificial Sequence
  MKO10128881_B_Zfyve21
  gRNA
aagacgacaaaccatggtct

SEQ ID NO: 128882 - DNA, 20 bp, Artificial Sequence
  MKO10128882_B_Zfyve21
  gRNA
tctggtgatgaagtcaaact

SEQ ID NO: 128883 - DNA, 20 bp, Artificial Sequence
  MKO10128883_B_Zfyve26
  gRNA
cttaccttaaggatggtctc

SEQ ID NO: 128884 - DNA, 20 bp, Artificial Sequence
  MKO10128884_B_Zfyve26
  gRNA
ctcctgacccagcccacgcg

SEQ ID NO: 128885 - DNA, 20 bp, Artificial Sequence
  MKO10128885_B_Zfyve26
  gRNA
tcaaccctcagagattagcc

SEQ ID NO: 128886 - DNA, 20 bp, Artificial Sequence
  MKO10128886_B_Zfyve27
  gRNA
tcgggacctgagtgggccgg

SEQ ID NO: 128887 - DNA, 20 bp, Artificial Sequence
  MKO10128887_B_Zfyve27
  gRNA
atcccgctggggctcgcctc

SEQ ID NO: 128888 - DNA, 20 bp, Artificial Sequence
  MKO10128888_B_Zfyve27
  gRNA
ccttaccctcgttcaaagtg

SEQ ID NO: 128889 - DNA, 20 bp, Artificial Sequence
  MKO10128889_B_Zfyve28
  gRNA
cagccagttccgctcctgtc

SEQ ID NO: 128890 - DNA, 20 bp, Artificial Sequence
  MKO10128890_B_Zfyve28
  gRNA
aacttgacgcagaaatcccg

SEQ ID NO: 128891 - DNA, 20 bp, Artificial Sequence
  MKO10128891_B_Zfyve28
  gRNA
cagggagtactatgtgcagc

SEQ ID NO: 128892 - DNA, 20 bp, Artificial Sequence
  MKO10128892_B_Zfyve9
  gRNA
atgaaccttattcctgaaga

SEQ ID NO: 128893 - DNA, 20 bp, Artificial Sequence
  MKO10128893_B_Zfyve9
  gRNA
gtgacagattacacacactc

SEQ ID NO: 128894 - DNA, 20 bp, Artificial Sequence
  MKO10128894_B_Zfyve9
  gRNA
atagtagaacagtattcagc

SEQ ID NO: 128895 - DNA, 20 bp, Artificial Sequence
  MKO10128895_B_Zg16
  gRNA
tagattctattagcctgcac

SEQ ID NO: 128896 - DNA, 20 bp, Artificial Sequence
  MKO10128896_B_Zg16
  gRNA
tcacttactggaattagcag

SEQ ID NO: 128897 - DNA, 20 bp, Artificial Sequence
  MKO10128897_B_Zg16
  gRNA
aggcacaaagaaggactaag

SEQ ID NO: 128898 - DNA, 20 bp, Artificial Sequence
  MKO10128898_B_Zglp1
  gRNA
acacccctctgcaatgcctg

SEQ ID NO: 128899 - DNA, 20 bp, Artificial Sequence
  MKO10128899_B_Zglp1
  gRNA
ccgttgttccagttgctggc

SEQ ID NO: 128900 - DNA, 20 bp, Artificial Sequence
  MKO10128900_B_Zglp1
  gRNA
ccctccaggtacaagaaata

SEQ ID NO: 128901 - DNA, 20 bp, Artificial Sequence
  MKO10128901_B_Zgpat
  gRNA
agaagattgagcggacccaa

SEQ ID NO: 128902 - DNA, 20 bp, Artificial Sequence
  MKO10128902_B_Zgpat
  gRNA
gtcccagtgtccaccgtgct

SEQ ID NO: 128903 - DNA, 20 bp, Artificial Sequence
  MKO10128903_B_Zgpat
  gRNA
catgctgtagtgttgcctag

SEQ ID NO: 128904 - DNA, 20 bp, Artificial Sequence
  MKO10128904_B_Zhx1
  gRNA
tccagatcttgagctgatat

SEQ ID NO: 128905 - DNA, 20 bp, Artificial Sequence
  MKO10128905_B_Zhx1
  gRNA
tccgtgaacttcttcatcgc

SEQ ID NO: 128906 - DNA, 20 bp, Artificial Sequence
  MKO10128906_B_Zhx1
  gRNA
gttatcacctgtgctaaccc

SEQ ID NO: 128907 - DNA, 20 bp, Artificial Sequence
  MKO10128907_B_Zhx2
  gRNA
tttggaggccgccgtcagcc

SEQ ID NO: 128908 - DNA, 20 bp, Artificial Sequence
  MKO10128908_B_Zhx2
  gRNA
ccacgctaccaagtctggcg

SEQ ID NO: 128909 - DNA, 20 bp, Artificial Sequence
  MKO10128909_B_Zhx2
  gRNA
agtgatgggcacgacgtggt

SEQ ID NO: 128910 - DNA, 20 bp, Artificial Sequence
  MKO10128910_B_Zhx3
  gRNA
gaaccacttccgcacctctc

SEQ ID NO: 128911 - DNA, 20 bp, Artificial Sequence
  MKO10128911_B_Zhx3
  gRNA
taccgagttgacgtccagac

SEQ ID NO: 128912 - DNA, 20 bp, Artificial Sequence
  MKO10128912_B_Zhx3
  gRNA
gctgcctcgctgctcgcatc

SEQ ID NO: 128913 - DNA, 20 bp, Artificial Sequence
  MKO10128913_B_Zic1
  gRNA
acttatcgcacatcttgcaa

SEQ ID NO: 128914 - DNA, 20 bp, Artificial Sequence
  MKO10128914_B_Zic1
  gRNA
cgactcataccccgagctgg

SEQ ID NO: 128915 - DNA, 20 bp, Artificial Sequence
  MKO10128915_B_Zic1
  gRNA
gcgcgctgtggccggctgtg

SEQ ID NO: 128916 - DNA, 20 bp, Artificial Sequence
  MKO10128916_B_Zic2
  gRNA
tgctgccagaacccgcgcct

SEQ ID NO: 128917 - DNA, 20 bp, Artificial Sequence
  MKO10128917_B_Zic2
  gRNA
gcttcgccaacagcagcgac

SEQ ID NO: 128918 - DNA, 20 bp, Artificial Sequence
  MKO10128918_B_Zic2
  gRNA
catgtgcttccgcaacgagc

SEQ ID NO: 128919 - DNA, 20 bp, Artificial Sequence
  MKO10128919_B_Zic3
  gRNA
tgctagtttgaactgcagaa

SEQ ID NO: 128920 - DNA, 20 bp, Artificial Sequence
  MKO10128920_B_Zic3
  gRNA
cctttcaaatgtgaattcga

SEQ ID NO: 128921 - DNA, 20 bp, Artificial Sequence
  MKO10128921_B_Zic3
  gRNA
aggaagtccagggttgtggc

SEQ ID NO: 128922 - DNA, 20 bp, Artificial Sequence
  MKO10128922_B_Zic4
  gRNA
ctcacggccgctttctaacg

SEQ ID NO: 128923 - DNA, 20 bp, Artificial Sequence
  MKO10128923_B_Zic4
  gRNA
gcgtcgccctcgttagaaag

SEQ ID NO: 128924 - DNA, 20 bp, Artificial Sequence
  MKO10128924_B_Zic4
  gRNA
aatgaaatacaagacttccc

SEQ ID NO: 128925 - DNA, 20 bp, Artificial Sequence
  MKO10128925_B_Zic5
  gRNA
cctttcaaatgtgaatttga

SEQ ID NO: 128926 - DNA, 20 bp, Artificial Sequence
  MKO10128926_B_Zic5
  gRNA
tcacggctccgtagccgtgc

SEQ ID NO: 128927 - DNA, 20 bp, Artificial Sequence
  MKO10128927_B_Zic5
  gRNA
ccggagggacctttccgcca

SEQ ID NO: 128928 - DNA, 20 bp, Artificial Sequence
  MKO10128928_B_Zik1
  gRNA
agttctgcagcataacactg

SEQ ID NO: 128929 - DNA, 20 bp, Artificial Sequence
  MKO10128929_B_Zik1
  gRNA
catatccatttctgcagtca

SEQ ID NO: 128930 - DNA, 20 bp, Artificial Sequence
  MKO10128930_B_Zik1
  gRNA
ggtgtccatgactgcagaaa

SEQ ID NO: 128931 - DNA, 20 bp, Artificial Sequence
  MKO10128931_B_Zim1
  gRNA
gccaaagagaacgatgttcc

SEQ ID NO: 128932 - DNA, 20 bp, Artificial Sequence
  MKO10128932_B_Zim1
  gRNA
tggcttaccttgtaccaggt

SEQ ID NO: 128933 - DNA, 20 bp, Artificial Sequence
  MKO10128933_B_Zim1
  gRNA
tcaagccaaagttgatcacc

SEQ ID NO: 128934 - DNA, 20 bp, Artificial Sequence
  MKO10128934_B_Zkscan14
  gRNA
ctgaagcactccccgcattc

SEQ ID NO: 128935 - DNA, 20 bp, Artificial Sequence
  MKO10128935_B_Zkscan14
  gRNA
atgtggctgaatctctgacc

SEQ ID NO: 128936 - DNA, 20 bp, Artificial Sequence
  MKO10128936_B_Zkscan14
  gRNA
agattcagccacatccttga

SEQ ID NO: 128937 - DNA, 20 bp, Artificial Sequence
  MKO10128937_B_Zkscan16
  gRNA
ttccgcagtttgcaaagagg

SEQ ID NO: 128938 - DNA, 20 bp, Artificial Sequence
  MKO10128938_B_Zkscan16
  gRNA
atctcaaagagagctatata

SEQ ID NO: 128939 - DNA, 20 bp, Artificial Sequence
  MKO10128939_B_Zkscan16
  gRNA
agcagacttacacgtggctc

SEQ ID NO: 128940 - DNA, 20 bp, Artificial Sequence
  MKO10128940_B_Zkscan17
  gRNA
tcgccatcgtcaatcaccac

SEQ ID NO: 128941 - DNA, 20 bp, Artificial Sequence
  MKO10128941_B_Zkscan17
  gRNA
gaaccgagtctccccattta

SEQ ID NO: 128942 - DNA, 20 bp, Artificial Sequence
  MKO10128942_B_Zkscan17
  gRNA
tgcacaacgaacgcatcttg

SEQ ID NO: 128943 - DNA, 20 bp, Artificial Sequence
  MKO10128943_B_Zkscan1
  gRNA
actattgaccgcagattccc

SEQ ID NO: 128944 - DNA, 20 bp, Artificial Sequence
  MKO10128944_B_Zkscan1
  gRNA
tgttattaaagtttgcgctc

SEQ ID NO: 128945 - DNA, 20 bp, Artificial Sequence
  MKO10128945_B_Zkscan1
  gRNA
atagtgcagatgccatcgcc

SEQ ID NO: 128946 - DNA, 20 bp, Artificial Sequence
  MKO10128946_B_Zkscan2
  gRNA
cataggccattacctaagaa

SEQ ID NO: 128947 - DNA, 20 bp, Artificial Sequence
  MKO10128947_B_Zkscan2
  gRNA
cgatgaggaagtgacaaccc

SEQ ID NO: 128948 - DNA, 20 bp, Artificial Sequence
  MKO10128948_B_Zkscan2
  gRNA
ttcctgtccctagtgatgag

SEQ ID NO: 128949 - DNA, 20 bp, Artificial Sequence
  MKO10128949_B_Zkscan3
  gRNA
gcaggaactcctttgctcca

SEQ ID NO: 128950 - DNA, 20 bp, Artificial Sequence
  MKO10128950_B_Zkscan3
  gRNA
tgaatcctgctctgtccatc

SEQ ID NO: 128951 - DNA, 20 bp, Artificial Sequence
  MKO10128951_B_Zkscan3
  gRNA
cagatgaacctctacaaaga

SEQ ID NO: 128952 - DNA, 20 bp, Artificial Sequence
  MKO10128952_B_Zkscan4
  gRNA
cttctgcagaccgagcgttt

SEQ ID NO: 128953 - DNA, 20 bp, Artificial Sequence
  MKO10128953_B_Zkscan4
  gRNA
ttcacagcaaaagtgccgcc

SEQ ID NO: 128954 - DNA, 20 bp, Artificial Sequence
  MKO10128954_B_Zkscan4
  gRNA
gagcttcaacatcttccccc

SEQ ID NO: 128955 - DNA, 20 bp, Artificial Sequence
  MKO10128955_B_Zkscan5
  gRNA
ctctaagtgtataactgccc

SEQ ID NO: 128956 - DNA, 20 bp, Artificial Sequence
  MKO10128956_B_Zkscan5
  gRNA
cggcgaagtcagcgacctga

SEQ ID NO: 128957 - DNA, 20 bp, Artificial Sequence
  MKO10128957_B_Zkscan5
  gRNA
agctggctgagagcatcgcg

SEQ ID NO: 128958 - DNA, 20 bp, Artificial Sequence
  MKO10128958_B_Zkscan6
  gRNA
gtcaaattctccttctcgaa

SEQ ID NO: 128959 - DNA, 20 bp, Artificial Sequence
  MKO10128959_B_Zkscan6
  gRNA
ctcactggaagtggcacctc

SEQ ID NO: 128960 - DNA, 20 bp, Artificial Sequence
  MKO10128960_B_Zkscan6
  gRNA
gttccttctgagtagaatcc

SEQ ID NO: 128961 - DNA, 20 bp, Artificial Sequence
  MKO10128961_B_Zkscan7
  gRNA
ggtaagagatgagcacggcc

SEQ ID NO: 128962 - DNA, 20 bp, Artificial Sequence
  MKO10128962_B_Zkscan7
  gRNA
ggaggatctaagagtgcacc

SEQ ID NO: 128963 - DNA, 20 bp, Artificial Sequence
  MKO10128963_B_Zkscan7
  gRNA
caagccctgattggaggttg

SEQ ID NO: 128964 - DNA, 20 bp, Artificial Sequence
  MKO10128964_B_Zkscan8
  gRNA
aaggattgtacgtgaatact

SEQ ID NO: 128965 - DNA, 20 bp, Artificial Sequence
  MKO10128965_B_Zkscan8
  gRNA
agctacttactggccgccct

SEQ ID NO: 128966 - DNA, 20 bp, Artificial Sequence
  MKO10128966_B_Zkscan8
  gRNA
atacagaaacatgttctccc

SEQ ID NO: 128967 - DNA, 20 bp, Artificial Sequence
  MKO10128967_B_Zmat1
  gRNA
gttattgtgaagcctcctcc

SEQ ID NO: 128968 - DNA, 20 bp, Artificial Sequence
  MKO10128968_B_Zmat1
  gRNA
gcttcacaataacagacttc

SEQ ID NO: 128969 - DNA, 20 bp, Artificial Sequence
  MKO10128969_B_Zmat1
  gRNA
aacaaagcgaagtgcctggt

SEQ ID NO: 128970 - DNA, 20 bp, Artificial Sequence
  MKO10128970_B_Zmat2
  gRNA
agatgaatatgagaagctcg

SEQ ID NO: 128971 - DNA, 20 bp, Artificial Sequence
  MKO10128971_B_Zmat2
  gRNA
aaccagtgcagcctgtcaag

SEQ ID NO: 128972 - DNA, 20 bp, Artificial Sequence
  MKO10128972_B_Zmat2
  gRNA
ccccctacagacaaaaaact

SEQ ID NO: 128973 - DNA, 20 bp, Artificial Sequence
  MKO10128973_B_Zmat3
  gRNA
ccatgccaagagactccgtc

SEQ ID NO: 128974 - DNA, 20 bp, Artificial Sequence
  MKO10128974_B_Zmat3
  gRNA
tttcaccagggactccgcag

SEQ ID NO: 128975 - DNA, 20 bp, Artificial Sequence
  MKO10128975_B_Zmat3
  gRNA
ccagacggagtctcttggca

SEQ ID NO: 128976 - DNA, 20 bp, Artificial Sequence
  MKO10128976_B_Zmat4
  gRNA
tgtattacatgcttcacccc

SEQ ID NO: 128977 - DNA, 20 bp, Artificial Sequence
  MKO10128977_B_Zmat4
  gRNA
aaggcaaaatccacgccaaa

SEQ ID NO: 128978 - DNA, 20 bp, Artificial Sequence
  MKO10128978_B_Zmat4
  gRNA
ggtgaagcatgtaatacagc

SEQ ID NO: 128979 - DNA, 20 bp, Artificial Sequence
  MKO10128979_B_Zmat5
  gRNA
gacagtacggaccaccctcc

SEQ ID NO: 128980 - DNA, 20 bp, Artificial Sequence
  MKO10128980_B_Zmat5
  gRNA
catgtcagaacaagatctgc

SEQ ID NO: 128981 - DNA, 20 bp, Artificial Sequence
  MKO10128981_B_Zmat5
  gRNA
ccgtactgtccaaagtccag

SEQ ID NO: 128982 - DNA, 20 bp, Artificial Sequence
  MKO10128982_B_Zmiz1
  gRNA
gagaccctcgagccttccag

SEQ ID NO: 128983 - DNA, 20 bp, Artificial Sequence
  MKO10128983_B_Zmiz1
  gRNA
tcaccgtcaggcagcccatg

SEQ ID NO: 128984 - DNA, 20 bp, Artificial Sequence
  MKO10128984_B_Zmiz1
  gRNA
ctccctctccgtggtcacca

SEQ ID NO: 128985 - DNA, 20 bp, Artificial Sequence
  MKO10128985_B_Zmiz2
  gRNA
ctcctgcagggcagccaccg

SEQ ID NO: 128986 - DNA, 20 bp, Artificial Sequence
  MKO10128986_B_Zmiz2
  gRNA
accacagacagtgacccagc

SEQ ID NO: 128987 - DNA, 20 bp, Artificial Sequence
  MKO10128987_B_Zmiz2
  gRNA
agcaagagctacgtacagca

SEQ ID NO: 128988 - DNA, 20 bp, Artificial Sequence
  MKO10128988_B_Zmpste24
  gRNA
aacaactaatgtgaacagcc

SEQ ID NO: 128989 - DNA, 20 bp, Artificial Sequence
  MKO10128989_B_Zmpste24
  gRNA
actgcccagaaagtctccag

SEQ ID NO: 128990 - DNA, 20 bp, Artificial Sequence
  MKO10128990_B_Zmpste24
  gRNA
aaaagtattgtacagactcc

SEQ ID NO: 128991 - DNA, 20 bp, Artificial Sequence
  MKO10128991_B_Zmym1
  gRNA
agtaaataatcatgttgacc

SEQ ID NO: 128992 - DNA, 20 bp, Artificial Sequence
  MKO10128992_B_Zmym1
  gRNA
acgctcatgatgacatctgt

SEQ ID NO: 128993 - DNA, 20 bp, Artificial Sequence
  MKO10128993_B_Zmym1
  gRNA
gaagatctaagtattctggg

SEQ ID NO: 128994 - DNA, 20 bp, Artificial Sequence
  MKO10128994_B_Zmym2
  gRNA
ctgctttaacagataccgaa

SEQ ID NO: 128995 - DNA, 20 bp, Artificial Sequence
  MKO10128995_B_Zmym2
  gRNA
gcaattcattatcagaccat

SEQ ID NO: 128996 - DNA, 20 bp, Artificial Sequence
  MKO10128996_B_Zmym2
  gRNA
tagccatccaagcttcctga

SEQ ID NO: 128997 - DNA, 20 bp, Artificial Sequence
  MKO10128997_B_Zmym3
  gRNA
tatgctgcagcgagtggcat

SEQ ID NO: 128998 - DNA, 20 bp, Artificial Sequence
  MKO10128998_B_Zmym3
  gRNA
atcctacttactgctctcag

SEQ ID NO: 128999 - DNA, 20 bp, Artificial Sequence
  MKO10128999_B_Zmym3
  gRNA
tccacaacctcaggctttgg

SEQ ID NO: 129000 - DNA, 20 bp, Artificial Sequence
  MKO10129000_B_Zmym4
  gRNA
cttatcatgaacgtgaaaaa

SEQ ID NO: 129001 - DNA, 20 bp, Artificial Sequence
  MKO10129001_B_Zmym4
  gRNA
cttaccctaaagtttgtttc

SEQ ID NO: 129002 - DNA, 20 bp, Artificial Sequence
  MKO10129002_B_Zmym4
  gRNA
aaaacccagaaacaaacttt

SEQ ID NO: 129003 - DNA, 20 bp, Artificial Sequence
  MKO10129003_B_Zmym5
  gRNA
tcccggtaggatcgatgtca

SEQ ID NO: 129004 - DNA, 20 bp, Artificial Sequence
  MKO10129004_B_Zmym5
  gRNA
tttgcagttcatcacaatcc

SEQ ID NO: 129005 - DNA, 20 bp, Artificial Sequence
  MKO10129005_B_Zmym5
  gRNA
tatattcgtcagcacaattc

SEQ ID NO: 129006 - DNA, 20 bp, Artificial Sequence
  MKO10129006_B_Zmym6
  gRNA
cccgaagccactctatgcct

SEQ ID NO: 129007 - DNA, 20 bp, Artificial Sequence
  MKO10129007_B_Zmym6
  gRNA
gttgttaccatatataccag

SEQ ID NO: 129008 - DNA, 20 bp, Artificial Sequence
  MKO10129008_B_Zmym6
  gRNA
cttaccgagagaagtgtcac

SEQ ID NO: 129009 - DNA, 20 bp, Artificial Sequence
  MKO10129009_B_Zmynd10
  gRNA
cttgcataggggtactgtcc

SEQ ID NO: 129010 - DNA, 20 bp, Artificial Sequence
  MKO10129010_B_Zmynd10
  gRNA
tcttcgacaggtacaccatg

SEQ ID NO: 129011 - DNA, 20 bp, Artificial Sequence
  MKO10129011_B_Zmynd10
  gRNA
catggttgattagcagttcc

SEQ ID NO: 129012 - DNA, 20 bp, Artificial Sequence
  MKO10129012_B_Zmynd11
  gRNA
tgacgtccctaccatacaag

SEQ ID NO: 129013 - DNA, 20 bp, Artificial Sequence
  MKO10129013_B_Zmynd11
  gRNA
aggtatatgtcccgagtcca

SEQ ID NO: 129014 - DNA, 20 bp, Artificial Sequence
  MKO10129014_B_Zmynd11
  gRNA
catgttacctcttgtatggt

SEQ ID NO: 129015 - DNA, 20 bp, Artificial Sequence
  MKO10129015_B_Zmynd12
  gRNA
cgcttccgcatgaacgtgca

SEQ ID NO: 129016 - DNA, 20 bp, Artificial Sequence
  MKO10129016_B_Zmynd12
  gRNA
cagtggtcctgtgcatcaga

SEQ ID NO: 129017 - DNA, 20 bp, Artificial Sequence
  MKO10129017_B_Zmynd12
  gRNA
catgcccttctacaactcag

SEQ ID NO: 129018 - DNA, 20 bp, Artificial Sequence
  MKO10129018_B_Zmynd15
  gRNA
aagccccgacagcttaccgt

SEQ ID NO: 129019 - DNA, 20 bp, Artificial Sequence
  MKO10129019_B_Zmynd15
  gRNA
atgacgtgagccaccgattc

SEQ ID NO: 129020 - DNA, 20 bp, Artificial Sequence
  MKO10129020_B_Zmynd15
  gRNA
cgtctcctacggtaagctgt

SEQ ID NO: 129021 - DNA, 20 bp, Artificial Sequence
  MKO10129021_B_Zmynd19
  gRNA
gaagacccacctttgtttgc

SEQ ID NO: 129022 - DNA, 20 bp, Artificial Sequence
  MKO10129022_B_Zmynd19
  gRNA
ctcatcgatcagtgtgtatt

SEQ ID NO: 129023 - DNA, 20 bp, Artificial Sequence
  MKO10129023_B_Zmynd19
  gRNA
aggataatgacactcatagt

SEQ ID NO: 129024 - DNA, 20 bp, Artificial Sequence
  MKO10129024_B_Zmynd8
  gRNA
tggatgagtcttggggcgaa

SEQ ID NO: 129025 - DNA, 20 bp, Artificial Sequence
  MKO10129025_B_Zmynd8
  gRNA
caggtaggacagttgttcaa

SEQ ID NO: 129026 - DNA, 20 bp, Artificial Sequence
  MKO10129026_B_Zmynd8
  gRNA
attccagaagcctgttccat

SEQ ID NO: 129027 - DNA, 20 bp, Artificial Sequence
  MKO10129027_B_Znf512b
  gRNA
gggccgtatgctccattctc

SEQ ID NO: 129028 - DNA, 20 bp, Artificial Sequence
  MKO10129028_B_Znf512b
  gRNA
cccagggtgctatctcagat

SEQ ID NO: 129029 - DNA, 20 bp, Artificial Sequence
  MKO10129029_B_Znf512b
  gRNA
ccactgagtacagatcctag

SEQ ID NO: 129030 - DNA, 20 bp, Artificial Sequence
  MKO10129030_B_Znfx1
  gRNA
tccgcccactcgcacaatgc

SEQ ID NO: 129031 - DNA, 20 bp, Artificial Sequence
  MKO10129031_B_Znfx1
  gRNA
cctcatgagtgggcccgtgc

SEQ ID NO: 129032 - DNA, 20 bp, Artificial Sequence
  MKO10129032_B_Znfx1
  gRNA
ctcccgaaggacaccgtgca

SEQ ID NO: 129033 - DNA, 20 bp, Artificial Sequence
  MKO10129033_B_Znhit1
  gRNA
gacgctggggccgagatggg

SEQ ID NO: 129034 - DNA, 20 bp, Artificial Sequence
  MKO10129034_B_Znhit1
  gRNA
accactttaaacttcgcttc

SEQ ID NO: 129035 - DNA, 20 bp, Artificial Sequence
  MKO10129035_B_Znhit1
  gRNA
tccggaagcgaagtttaaag

SEQ ID NO: 129036 - DNA, 20 bp, Artificial Sequence
  MKO10129036_B_Znhit2
  gRNA
gcggtaaaagtcttcggcgc

SEQ ID NO: 129037 - DNA, 20 bp, Artificial Sequence
  MKO10129037_B_Znhit2
  gRNA
agcgtaggcgaacagcacgt

SEQ ID NO: 129038 - DNA, 20 bp, Artificial Sequence
  MKO10129038_B_Znhit2
  gRNA
tgccgcgaacagagatcttg

SEQ ID NO: 129039 - DNA, 20 bp, Artificial Sequence
  MKO10129039_B_Znhit3
  gRNA
ttgctctcctcagacctcac

SEQ ID NO: 129040 - DNA, 20 bp, Artificial Sequence
  MKO10129040_B_Znhit3
  gRNA
tgatttcctcaacagtgatg

SEQ ID NO: 129041 - DNA, 20 bp, Artificial Sequence
  MKO10129041_B_Znhit3
  gRNA
acctttgtgcttctgaaaac

SEQ ID NO: 129042 - DNA, 20 bp, Artificial Sequence
  MKO10129042_B_Znhit6
  gRNA
cgtggcaagaacggcagaca

SEQ ID NO: 129043 - DNA, 20 bp, Artificial Sequence
  MKO10129043_B_Znhit6
  gRNA
caggaaaagcgcatgcagcg

SEQ ID NO: 129044 - DNA, 20 bp, Artificial Sequence
  MKO10129044_B_Znhit6
  gRNA
tcttacaggtgtgagacttg

SEQ ID NO: 129045 - DNA, 20 bp, Artificial Sequence
  MKO10129045_B_Znrd1as
  gRNA
accaggatcttcttctccag

SEQ ID NO: 129046 - DNA, 20 bp, Artificial Sequence
  MKO10129046_B_Znrd1as
  gRNA
agaaggccagcagtctccac

SEQ ID NO: 129047 - DNA, 20 bp, Artificial Sequence
  MKO10129047_B_Znrd1as
  gRNA
aacatctactttaatcctac

SEQ ID NO: 129048 - DNA, 20 bp, Artificial Sequence
  MKO10129048_B_Znrd1
  gRNA
gacaggcgctgccctcgatg

SEQ ID NO: 129049 - DNA, 20 bp, Artificial Sequence
  MKO10129049_B_Znrd1
  gRNA
accactggtccctgtaattc

SEQ ID NO: 129050 - DNA, 20 bp, Artificial Sequence
  MKO10129050_B_Znrd1
  gRNA
cagcttgttgaacactactg

SEQ ID NO: 129051 - DNA, 20 bp, Artificial Sequence
  MKO10129051_B_Znrf1
  gRNA
ccccatttgttccaagtctg

SEQ ID NO: 129052 - DNA, 20 bp, Artificial Sequence
  MKO10129052_B_Znrf1
  gRNA
gcctgtgcatctatcacaaa

SEQ ID NO: 129053 - DNA, 20 bp, Artificial Sequence
  MKO10129053_B_Znrf1
  gRNA
actccagctgcatagactca

SEQ ID NO: 129054 - DNA, 20 bp, Artificial Sequence
  MKO10129054_B_Znrf2
  gRNA
aagccaagaataacgtataa

SEQ ID NO: 129055 - DNA, 20 bp, Artificial Sequence
  MKO10129055_B_Znrf2
  gRNA
tgcctgtgtatatatcataa

SEQ ID NO: 129056 - DNA, 20 bp, Artificial Sequence
  MKO10129056_B_Znrf2
  gRNA
accctttatgatatatacac

SEQ ID NO: 129057 - DNA, 20 bp, Artificial Sequence
  MKO10129057_B_Znrf3
  gRNA
gtctcttagatgcacccact

SEQ ID NO: 129058 - DNA, 20 bp, Artificial Sequence
  MKO10129058_B_Znrf3
  gRNA
aaatccagaagccatcgacc

SEQ ID NO: 129059 - DNA, 20 bp, Artificial Sequence
  MKO10129059_B_Znrf3
  gRNA
agcagaaagtagctcgagca

SEQ ID NO: 129060 - DNA, 20 bp, Artificial Sequence
  MKO10129060_B_Znrf4
  gRNA
tcggggcagggttccgcgtg

SEQ ID NO: 129061 - DNA, 20 bp, Artificial Sequence
  MKO10129061_B_Znrf4
  gRNA
cagcacgaacagcgtagatg

SEQ ID NO: 129062 - DNA, 20 bp, Artificial Sequence
  MKO10129062_B_Znrf4
  gRNA
catctacgctgttcgtgctg

SEQ ID NO: 129063 - DNA, 20 bp, Artificial Sequence
  MKO10129063_B_Zp1
  gRNA
agcggtgccaggtagcctcc

SEQ ID NO: 129064 - DNA, 20 bp, Artificial Sequence
  MKO10129064_B_Zp1
  gRNA
ggggcatccgttgggggcat

SEQ ID NO: 129065 - DNA, 20 bp, Artificial Sequence
  MKO10129065_B_Zp1
  gRNA
tccttaccttctctagaacg

SEQ ID NO: 129066 - DNA, 20 bp, Artificial Sequence
  MKO10129066_B_Zp2
  gRNA
tttgaactgcacttatgctc

SEQ ID NO: 129067 - DNA, 20 bp, Artificial Sequence
  MKO10129067_B_Zp2
  gRNA
tactacatacccaccacaga

SEQ ID NO: 129068 - DNA, 20 bp, Artificial Sequence
  MKO10129068_B_Zp2
  gRNA
aaaatggaatccttctgtgg

SEQ ID NO: 129069 - DNA, 20 bp, Artificial Sequence
  MKO10129069_B_Zp3r
  gRNA
ctacagagccaaacgtgtac

SEQ ID NO: 129070 - DNA, 20 bp, Artificial Sequence
  MKO10129070_B_Zp3r
  gRNA
tgactctcttgaagccgtga

SEQ ID NO: 129071 - DNA, 20 bp, Artificial Sequence
  MKO10129071_B_Zp3r
  gRNA
gagtcaacaaccttcccatc

SEQ ID NO: 129072 - DNA, 20 bp, Artificial Sequence
  MKO10129072_B_Zp3
  gRNA
gaggagttcgggtctggcaa

SEQ ID NO: 129073 - DNA, 20 bp, Artificial Sequence
  MKO10129073_B_Zp3
  gRNA
ggaatacatccaccgtgaac

SEQ ID NO: 129074 - DNA, 20 bp, Artificial Sequence
  MKO10129074_B_Zp3
  gRNA
ggctttctctcttcgcctga

SEQ ID NO: 129075 - DNA, 20 bp, Artificial Sequence
  MKO10129075_B_Zpbp2
  gRNA
ggggtccactgtttctttat

SEQ ID NO: 129076 - DNA, 20 bp, Artificial Sequence
  MKO10129076_B_Zpbp2
  gRNA
ctaaatcttaggcgagagat

SEQ ID NO: 129077 - DNA, 20 bp, Artificial Sequence
  MKO10129077_B_Zpbp2
  gRNA
accccacctatttatggact

SEQ ID NO: 129078 - DNA, 20 bp, Artificial Sequence
  MKO10129078_B_Zpbp
  gRNA
cttaatcaaggatatttcac

SEQ ID NO: 129079 - DNA, 20 bp, Artificial Sequence
  MKO10129079_B_Zpbp
  gRNA
tcagtgaatcttgagtcaag

SEQ ID NO: 129080 - DNA, 20 bp, Artificial Sequence
  MKO10129080_B_Zpbp
  gRNA
actgcacaagtgacctccac

SEQ ID NO: 129081 - DNA, 20 bp, Artificial Sequence
  MKO10129081_B_Zpld1
  gRNA
taataggtgtccacaattcc

SEQ ID NO: 129082 - DNA, 20 bp, Artificial Sequence
  MKO10129082_B_Zpld1
  gRNA
tttctgaatatcccgagaaa

SEQ ID NO: 129083 - DNA, 20 bp, Artificial Sequence
  MKO10129083_B_Zpld1
  gRNA
aaaattaatcttcatcgtaa

SEQ ID NO: 129084 - DNA, 20 bp, Artificial Sequence
  MKO10129084_B_Zranb1
  gRNA
atgacaaagactcggtgctt

SEQ ID NO: 129085 - DNA, 20 bp, Artificial Sequence
  MKO10129085_B_Zranb1
  gRNA
ctgaactgacagagcaaatc

SEQ ID NO: 129086 - DNA, 20 bp, Artificial Sequence
  MKO10129086_B_Zranb1
  gRNA
gtaacatttacattaccagc

SEQ ID NO: 129087 - DNA, 20 bp, Artificial Sequence
  MKO10129087_B_Zranb2
  gRNA
tcccccagctttcatcatct

SEQ ID NO: 129088 - DNA, 20 bp, Artificial Sequence
  MKO10129088_B_Zranb2
  gRNA
tcgaccacatctgttacagc

SEQ ID NO: 129089 - DNA, 20 bp, Artificial Sequence
  MKO10129089_B_Zranb2
  gRNA
tcttctaatttagcatactt

SEQ ID NO: 129090 - DNA, 20 bp, Artificial Sequence
  MKO10129090_B_Zranb3
  gRNA
cactgaacacgcagaacttc

SEQ ID NO: 129091 - DNA, 20 bp, Artificial Sequence
  MKO10129091_B_Zranb3
  gRNA
tcccacaaaaatttggaact

SEQ ID NO: 129092 - DNA, 20 bp, Artificial Sequence
  MKO10129092_B_Zranb3
  gRNA
atgacgacattgatttcctc

SEQ ID NO: 129093 - DNA, 20 bp, Artificial Sequence
  MKO10129093_B_Zrsr1
  gRNA
agcttctctaaattcgttgt

SEQ ID NO: 129094 - DNA, 20 bp, Artificial Sequence
  MKO10129094_B_Zrsr1
  gRNA
tttctaccatgacgtgctgc

SEQ ID NO: 129095 - DNA, 20 bp, Artificial Sequence
  MKO10129095_B_Zrsr1
  gRNA
tacacattgccccgcagatg

SEQ ID NO: 129096 - DNA, 20 bp, Artificial Sequence
  MKO10129096_B_Zrsr2
  gRNA
aagaagaggaagctcgaaaa

SEQ ID NO: 129097 - DNA, 20 bp, Artificial Sequence
  MKO10129097_B_Zrsr2
  gRNA
tacagaattggcacagaaag

SEQ ID NO: 129098 - DNA, 20 bp, Artificial Sequence
  MKO10129098_B_Zrsr2
  gRNA
ttcctatacctcagtttctg

SEQ ID NO: 129099 - DNA, 20 bp, Artificial Sequence
  MKO10129099_B_Zscan10
  gRNA
ggcttaccaagagggtttgc

SEQ ID NO: 129100 - DNA, 20 bp, Artificial Sequence
  MKO10129100_B_Zscan10
  gRNA
gctcattggccaatttgaac

SEQ ID NO: 129101 - DNA, 20 bp, Artificial Sequence
  MKO10129101_B_Zscan10
  gRNA
cttctctgaggtatcctcaa

SEQ ID NO: 129102 - DNA, 20 bp, Artificial Sequence
  MKO10129102_B_Zscan12
  gRNA
cccggggtccagaagtttcc

SEQ ID NO: 129103 - DNA, 20 bp, Artificial Sequence
  MKO10129103_B_Zscan12
  gRNA
acttgcaggccgtgaagccc

SEQ ID NO: 129104 - DNA, 20 bp, Artificial Sequence
  MKO10129104_B_Zscan12
  gRNA
cggcctgcaagttcacaccc

SEQ ID NO: 129105 - DNA, 20 bp, Artificial Sequence
  MKO10129105_B_Zscan18
  gRNA
tgtgcggtggaaaacctgcc

SEQ ID NO: 129106 - DNA, 20 bp, Artificial Sequence
  MKO10129106_B_Zscan18
  gRNA
cagctccccttctaccagct

SEQ ID NO: 129107 - DNA, 20 bp, Artificial Sequence
  MKO10129107_B_Zscan18
  gRNA
tccacaggggcctctacagt

SEQ ID NO: 129108 - DNA, 20 bp, Artificial Sequence
  MKO10129108_B_Zscan20
  gRNA
gtccccacgatcacctcctg

SEQ ID NO: 129109 - DNA, 20 bp, Artificial Sequence
  MKO10129109_B_Zscan20
  gRNA
tcgtggggacagtgcgtgcc

SEQ ID NO: 129110 - DNA, 20 bp, Artificial Sequence
  MKO10129110_B_Zscan20
  gRNA
tctccaatgctcgccatctt

SEQ ID NO: 129111 - DNA, 20 bp, Artificial Sequence
  MKO10129111_B_Zscan21
  gRNA
cacagcagagcacccgaagc

SEQ ID NO: 129112 - DNA, 20 bp, Artificial Sequence
  MKO10129112_B_Zscan21
  gRNA
ttgggtctcagtactgctta

SEQ ID NO: 129113 - DNA, 20 bp, Artificial Sequence
  MKO10129113_B_Zscan21
  gRNA
ccagccctaaatatgagttt

SEQ ID NO: 129114 - DNA, 20 bp, Artificial Sequence
  MKO10129114_B_Zscan22
  gRNA
caggtgggcaacgcgactga

SEQ ID NO: 129115 - DNA, 20 bp, Artificial Sequence
  MKO10129115_B_Zscan22
  gRNA
aagcgcaatcgtgcagcctc

SEQ ID NO: 129116 - DNA, 20 bp, Artificial Sequence
  MKO10129116_B_Zscan22
  gRNA
ctaaggggtgcttcgagtca

SEQ ID NO: 129117 - DNA, 20 bp, Artificial Sequence
  MKO10129117_B_Zscan25
  gRNA
attccttgcagccacgtccc

SEQ ID NO: 129118 - DNA, 20 bp, Artificial Sequence
  MKO10129118_B_Zscan25
  gRNA
tacgtggactcacaggattg

SEQ ID NO: 129119 - DNA, 20 bp, Artificial Sequence
  MKO10129119_B_Zscan25
  gRNA
ccagctcagattgactgctt

SEQ ID NO: 129120 - DNA, 20 bp, Artificial Sequence
  MKO10129120_B_Zscan26
  gRNA
ttggcgagccagcccctcgc

SEQ ID NO: 129121 - DNA, 20 bp, Artificial Sequence
  MKO10129121_B_Zscan26
  gRNA
gcaagggatggcactggcct

SEQ ID NO: 129122 - DNA, 20 bp, Artificial Sequence
  MKO10129122_B_Zscan26
  gRNA
gtgccctgtcatgttcaatc

SEQ ID NO: 129123 - DNA, 20 bp, Artificial Sequence
  MKO10129123_B_Zscan29
  gRNA
atccaacctggacaccacat

SEQ ID NO: 129124 - DNA, 20 bp, Artificial Sequence
  MKO10129124_B_Zscan29
  gRNA
tcctcaccgctcctttgaaa

SEQ ID NO: 129125 - DNA, 20 bp, Artificial Sequence
  MKO10129125_B_Zscan29
  gRNA
gacacccctgaaatcatcac

SEQ ID NO: 129126 - DNA, 20 bp, Artificial Sequence
  MKO10129126_B_Zscan2
  gRNA
taccactgtgccgaaaagtc

SEQ ID NO: 129127 - DNA, 20 bp, Artificial Sequence
  MKO10129127_B_Zscan2
  gRNA
gctccgcgctcattacgcac

SEQ ID NO: 129128 - DNA, 20 bp, Artificial Sequence
  MKO10129128_B_Zscan2
  gRNA
gatgcaccagcgagcgcact

SEQ ID NO: 129129 - DNA, 20 bp, Artificial Sequence
  MKO10129129_B_Zscan4b
  gRNA
ggccaataatctatcttgtg

SEQ ID NO: 129130 - DNA, 20 bp, Artificial Sequence
  MKO10129130_B_Zscan4b
  gRNA
aatgctactgaagtaaatgt

SEQ ID NO: 129131 - DNA, 20 bp, Artificial Sequence
  MKO10129131_B_Zscan4b
  gRNA
agatacttcagtcagatctg

SEQ ID NO: 129132 - DNA, 20 bp, Artificial Sequence
  MKO10129132_B_Zscan4c
  gRNA
caggtccatgtttcaatgca

SEQ ID NO: 129133 - DNA, 20 bp, Artificial Sequence
  MKO10129133_B_Zscan4c
  gRNA
agatagttcagtcagatctg

SEQ ID NO: 129134 - DNA, 20 bp, Artificial Sequence
  MKO10129134_B_Zscan4c
  gRNA
aatgctactgaagcaaatgt

SEQ ID NO: 129135 - DNA, 20 bp, Artificial Sequence
  MKO10129135_B_Zscan4d
  gRNA
tgtccttgcagtgcccaatg

SEQ ID NO: 129136 - DNA, 20 bp, Artificial Sequence
  MKO10129136_B_Zscan4d
  gRNA
taggtccatgtttcaatgca

SEQ ID NO: 129137 - DNA, 20 bp, Artificial Sequence
  MKO10129137_B_Zscan4d
  gRNA
ggccaataatctatcttgtg

SEQ ID NO: 129138 - DNA, 20 bp, Artificial Sequence
  MKO10129138_B_Zscan4e
  gRNA
caggtccatgtttcaatgca

SEQ ID NO: 129139 - DNA, 20 bp, Artificial Sequence
  MKO10129139_B_Zscan4e
  gRNA
ggccaataatctatcttgtg

SEQ ID NO: 129140 - DNA, 20 bp, Artificial Sequence
  MKO10129140_B_Zscan4e
  gRNA
aatgctactgaagtaaatgt

SEQ ID NO: 129141 - DNA, 20 bp, Artificial Sequence
  MKO10129141_B_Zscan4f
  gRNA
ggccaataatctatcttgtg

SEQ ID NO: 129142 - DNA, 20 bp, Artificial Sequence
  MKO10129142_B_Zscan4f
  gRNA
caggtccatgtttcaatgca

SEQ ID NO: 129143 - DNA, 20 bp, Artificial Sequence
  MKO10129143_B_Zscan4f
  gRNA
agatagttcagtcagatctg

SEQ ID NO: 129144 - DNA, 20 bp, Artificial Sequence
  MKO10129144_B_Zscan5b
  gRNA
gggacaggaaacgccacaac

SEQ ID NO: 129145 - DNA, 20 bp, Artificial Sequence
  MKO10129145_B_Zscan5b
  gRNA
tgccgccagatagccctgtc

SEQ ID NO: 129146 - DNA, 20 bp, Artificial Sequence
  MKO10129146_B_Zscan5b
  gRNA
ctccttcggcatcccagcgt

SEQ ID NO: 129147 - DNA, 20 bp, Artificial Sequence
  MKO10129147_B_Zswim1
  gRNA
gaactggccgacaactggat

SEQ ID NO: 129148 - DNA, 20 bp, Artificial Sequence
  MKO10129148_B_Zswim1
  gRNA
agcgtcgctacagcaccctc

SEQ ID NO: 129149 - DNA, 20 bp, Artificial Sequence
  MKO10129149_B_Zswim1
  gRNA
gctcttacagcactgcagcg

SEQ ID NO: 129150 - DNA, 20 bp, Artificial Sequence
  MKO10129150_B_Zswim2
  gRNA
cttggacctgatgtatcccc

SEQ ID NO: 129151 - DNA, 20 bp, Artificial Sequence
  MKO10129151_B_Zswim2
  gRNA
agacggctaccttaagcaga

SEQ ID NO: 129152 - DNA, 20 bp, Artificial Sequence
  MKO10129152_B_Zswim2
  gRNA
ttcccccctcttcagaaacg

SEQ ID NO: 129153 - DNA, 20 bp, Artificial Sequence
  MKO10129153_B_Zswim3
  gRNA
cgcttccataacctcaacaa

SEQ ID NO: 129154 - DNA, 20 bp, Artificial Sequence
  MKO10129154_B_Zswim3
  gRNA
agatgtccacaatcttgcgc

SEQ ID NO: 129155 - DNA, 20 bp, Artificial Sequence
  MKO10129155_B_Zswim3
  gRNA
atgtctacacaaactcccgc

SEQ ID NO: 129156 - DNA, 20 bp, Artificial Sequence
  MKO10129156_B_Zswim4
  gRNA
gcccacgggtgaatggtacc

SEQ ID NO: 129157 - DNA, 20 bp, Artificial Sequence
  MKO10129157_B_Zswim4
  gRNA
ttctgtgcctgcacccgctg

SEQ ID NO: 129158 - DNA, 20 bp, Artificial Sequence
  MKO10129158_B_Zswim4
  gRNA
tgcgggagatgcttcgagca

SEQ ID NO: 129159 - DNA, 20 bp, Artificial Sequence
  MKO10129159_B_Zswim5
  gRNA
cactctctctctaccggatc

SEQ ID NO: 129160 - DNA, 20 bp, Artificial Sequence
  MKO10129160_B_Zswim5
  gRNA
actgcagaagtggagcgacc

SEQ ID NO: 129161 - DNA, 20 bp, Artificial Sequence
  MKO10129161_B_Zswim5
  gRNA
ggagagcgcattggtaatgt

SEQ ID NO: 129162 - DNA, 20 bp, Artificial Sequence
  MKO10129162_B_Zswim6
  gRNA
gcaccgggaccccgtcggtg

SEQ ID NO: 129163 - DNA, 20 bp, Artificial Sequence
  MKO10129163_B_Zswim6
  gRNA
gtattgacgatgagaactgc

SEQ ID NO: 129164 - DNA, 20 bp, Artificial Sequence
  MKO10129164_B_Zswim6
  gRNA
gacagaacctgcaatacaac

SEQ ID NO: 129165 - DNA, 20 bp, Artificial Sequence
  MKO10129165_B_Zswim7
  gRNA
tgggcacgagcagtaatgac

SEQ ID NO: 129166 - DNA, 20 bp, Artificial Sequence
  MKO10129166_B_Zswim7
  gRNA
actcttccgtaacactgaga

SEQ ID NO: 129167 - DNA, 20 bp, Artificial Sequence
  MKO10129167_B_Zswim7
  gRNA
gcaactgacagacctattga

SEQ ID NO: 129168 - DNA, 20 bp, Artificial Sequence
  MKO10129168_B_Zswim8
  gRNA
tccaaaaagcaattcggagt

SEQ ID NO: 129169 - DNA, 20 bp, Artificial Sequence
  MKO10129169_B_Zswim8
  gRNA
gtaccactgtggcgctcaga

SEQ ID NO: 129170 - DNA, 20 bp, Artificial Sequence
  MKO10129170_B_Zswim8
  gRNA
cgaatgtcctcttcattctc

SEQ ID NO: 129171 - DNA, 20 bp, Artificial Sequence
  MKO10129171_B_Zufsp
  gRNA
atagctattggtattgatga

SEQ ID NO: 129172 - DNA, 20 bp, Artificial Sequence
  MKO10129172_B_Zufsp
  gRNA
attctctatcactagaacac

SEQ ID NO: 129173 - DNA, 20 bp, Artificial Sequence
  MKO10129173_B_Zufsp
  gRNA
ctctatgactgtcccatgtg

SEQ ID NO: 129174 - DNA, 20 bp, Artificial Sequence
  MKO10129174_B_Zw10
  gRNA
gcagaacatactgtaccacc

SEQ ID NO: 129175 - DNA, 20 bp, Artificial Sequence
  MKO10129175_B_Zw10
  gRNA
gttatactcttcaatagcag

SEQ ID NO: 129176 - DNA, 20 bp, Artificial Sequence
  MKO10129176_B_Zw10
  gRNA
tacaaacctgaagcagcagc

SEQ ID NO: 129177 - DNA, 20 bp, Artificial Sequence
  MKO10129177_B_Zwilch
  gRNA
gctcatacctcatagatgaa

SEQ ID NO: 129178 - DNA, 20 bp, Artificial Sequence
  MKO10129178_B_Zwilch
  gRNA
ccgtcacatctcacccaaag

SEQ ID NO: 129179 - DNA, 20 bp, Artificial Sequence
  MKO10129179_B_Zwilch
  gRNA
aggccactggccttacctgt

SEQ ID NO: 129180 - DNA, 20 bp, Artificial Sequence
  MKO10129180_B_Zwint
  gRNA
gccttacagggttctggctg

SEQ ID NO: 129181 - DNA, 20 bp, Artificial Sequence
  MKO10129181_B_Zwint
  gRNA
tcttcagaagccagagcatc

SEQ ID NO: 129182 - DNA, 20 bp, Artificial Sequence
  MKO10129182_B_Zwint
  gRNA
cataaactcctccatgatct

SEQ ID NO: 129183 - DNA, 20 bp, Artificial Sequence
  MKO10129183_B_Zxdb
  gRNA
ggagacatcgtccatgtcca

SEQ ID NO: 129184 - DNA, 20 bp, Artificial Sequence
  MKO10129184_B_Zxdb
  gRNA
agcagcggcggcggcagagg

SEQ ID NO: 129185 - DNA, 20 bp, Artificial Sequence
  MKO10129185_B_Zxdb
  gRNA
gtgctggtagccagccaccg

SEQ ID NO: 129186 - DNA, 20 bp, Artificial Sequence
  MKO10129186_B_Zxdc
  gRNA
cccataatcgagcccacttc

SEQ ID NO: 129187 - DNA, 20 bp, Artificial Sequence
  MKO10129187_B_Zxdc
  gRNA
gacttgccacaaccttcaac

SEQ ID NO: 129188 - DNA, 20 bp, Artificial Sequence
  MKO10129188_B_Zxdc
  gRNA
attcacttgcgaagtcacac

SEQ ID NO: 129189 - DNA, 20 bp, Artificial Sequence
  MKO10129189_B_Zyg11a
  gRNA
tggccagttcctggcgtgtt

SEQ ID NO: 129190 - DNA, 20 bp, Artificial Sequence
  MKO10129190_B_Zyg11a
  gRNA
atctctgccaacagacgaac

SEQ ID NO: 129191 - DNA, 20 bp, Artificial Sequence
  MKO10129191_B_Zyg11a
  gRNA
tcacaaagcacgacctgttc

SEQ ID NO: 129192 - DNA, 20 bp, Artificial Sequence
  MKO10129192_B_Zyg11b
  gRNA
ttagctcccgaacgacatcc

SEQ ID NO: 129193 - DNA, 20 bp, Artificial Sequence
  MKO10129193_B_Zyg11b
  gRNA
acatcagcgaggagccggac

SEQ ID NO: 129194 - DNA, 20 bp, Artificial Sequence
  MKO10129194_B_Zyg11b
  gRNA
ttctgctcagcacgccaaga

SEQ ID NO: 129195 - DNA, 20 bp, Artificial Sequence
  MKO10129195_B_Zyx
  gRNA
gccccttacccgggctttga

SEQ ID NO: 129196 - DNA, 20 bp, Artificial Sequence
  MKO10129196_B_Zyx
  gRNA
ggcaggtttggtactaggct

SEQ ID NO: 129197 - DNA, 20 bp, Artificial Sequence
  MKO10129197_B_Zyx
  gRNA
actggagcaaacttaggtgc

SEQ ID NO: 129198 - DNA, 20 bp, Artificial Sequence
  MKO10129198_B_Zzef1
  gRNA
cccctgaagattggctccac

SEQ ID NO: 129199 - DNA, 20 bp, Artificial Sequence
  MKO10129199_B_Zzef1
  gRNA
ctccagtggagccaatcttc

SEQ ID NO: 129200 - DNA, 20 bp, Artificial Sequence
  MKO10129200_B_Zzef1
  gRNA
gcacatcacgaacttcctgc

SEQ ID NO: 129201 - DNA, 20 bp, Artificial Sequence
  MKO10129201_B_Zzz3
  gRNA
aacaccgcaaaagacatact

SEQ ID NO: 129202 - DNA, 20 bp, Artificial Sequence
  MKO10129202_B_Zzz3
  gRNA
ctgagcctcaagtacagcaa

SEQ ID NO: 129203 - DNA, 20 bp, Artificial Sequence
  MKO10129203_B_Zzz3
  gRNA
ccgagaccttcaaccagctg

SEQ ID NO: 129204 - DNA, 20 bp, Artificial Sequence
  MKO10129204_B_a
  gRNA
caagcgtctcctcgagtgcc

SEQ ID NO: 129205 - DNA, 20 bp, Artificial Sequence
  MKO10129205_B_a
  gRNA
ggaagacctcttccgcttct

SEQ ID NO: 129206 - DNA, 20 bp, Artificial Sequence
  MKO10129206_B_a
  gRNA
gcagaaaagaagccgagaag

SEQ ID NO: 129207 - DNA, 20 bp, Artificial Sequence
  MKO10129207_B_l7Rn6
  gRNA
acagatcctcccatgccctc

SEQ ID NO: 129208 - DNA, 20 bp, Artificial Sequence
  MKO10129208_B_l7Rn6
  gRNA
aatgttcatcccagcaaatg

SEQ ID NO: 129209 - DNA, 20 bp, Artificial Sequence
  MKO10129209_B_l7Rn6
  gRNA
tagcacagaaccccctcttt

SEQ ID NO: 129210 - protein, 8 aa, Artificial Sequence
  cOVA peptide
SIINFEKL

SEQ ID NO: 129211 - DNA, 19 bp, Artificial Sequence
  primer
cccgaggggacccagagag

SEQ ID NO: 129212 - DNA, 22 bp, Artificial Sequence
  primer
caattcccactcctttcaagac

SEQ ID NO: 129213 - DNA, 6686 bp, Artificial Sequence
  vector pSC017_pLKO-U6-sgBsmBI-EFS-Thy11CO-spA
  gRNA
ttaatgtagtcttatgcaatactcttgtagtcttgcaacatggtaacgatgagttagcaacatgccttacaaggagagaaaaagcaccgtgcatgccgattggtggaagtaaggtggtacgatcgtgccttattaggaaggcaacagacgggtctgacatggattggacgaaccactgaattgccgcattgcagagatattgtatttaagtgcctagctcgatacataaacgggtctctctggttagaccagatctgagcctgggagctctctggctaactagggaacccactgcttaagcctcaataaagcttgccttgagtgcttcaagtagtgtgtgcccgtctgttgtgtgactctggtaactagagatccctcagacccttttagtcagtgtggaaaatctctagcagtggcgcccgaacagggacttgaaagcgaaagggaaaccagaggagctctctcgacgcaggactcggcttgctgaagcgcgcacggcaagaggcgaggggcggcgactggtgagtacgccaaaaattttgactagcggaggctagaaggagagagatgggtgcgagagcgtcagtattaagcgggggagaattagatcgcgatgggaaaaaattcggttaaggccagggggaaagaaaaaatataaattaaaacatatagtatgggcaagcagggagctagaacgattcgcagttaatcctggcctgttagaaacatcagaaggctgtagacaaatactgggacagctacaaccatcccttcagacaggatcagaagaacttagatcattatataatacagtagcaaccctctattgtgtgcatcaaaggatagagataaaagacaccaaggaagctttagacaagatagaggaagagcaaaacaaaagtaagaccaccgcacagcaagcggccgctgatcttcagacctggaggaggagatatgagggacaattggagaagtgaattatataaatataaagtagtaaaaattgaaccattaggagtagcacccaccaaggcaaagagaagagtggtgcagagagaaaaaagagcagtgggaataggagctttgttccttgggttcttgggagcagcaggaagcactatgggcgcagcgtcaatgacgctgacggtacaggccagacaattattgtctggtatagtgcagcagcagaacaatttgctgagggctattgaggcgcaacagcatctgttgcaactcacagtctggggcatcaagcagctccaggcaagaatcctggctgtggaaagatacctaaaggatcaacagctcctggggatttggggttgctctggaaaactcatttgcaccactgctgtgccttggaatgctagttggagtaataaatctctggaacagatttggaatcacacgacctggatggagtgggacagagaaattaacaattacacaagcttaatacactccttaattgaagaatcgcaaaaccagcaagaaaagaatgaacaagaattattggaattagataaatgggcaagtttgtggaattggtttaacataacaaattggctgtggtatataaaattattcataatgatagtaggaggcttggtaggtttaagaatagtttttgctgtactttctatagtgaatagagttaggcagggatattcaccattatcgtttcagacccacctcccaaccccgaggggacccagagagggcctatttcccatgattccttcatatttgcatatacgatacaaggctgttagagagataattagaattaatttgactgtaaacacaaagatattagtacaaaatacgtgacgtagaaagtaataatttcttgggtagtttgcagttttaaaattatgttttaaaatggactatcatatgcttaccgtaacttgaaagtatttcgatttcttggctttatatatcttgtggaaaggacgaaacaccggagacggacgtctctgttttagagctagaaatagcaagttaaaataaggctagtccgttatcaacttgaaaaagtggcaccgagtcggtgcttttttaagcttggcgtaactagatcttgagacaaatggcagtattcatccacaattttaaaagaaaaggggggattggggggtacagtgcaggggaaagaatagtagacataatagcaacagacatacaaactaaagaattacaaaaacaaattacaaaaattcaaaattttcgggtttattacagggacagcagagatccactttggcgccggctcgagggggcccggggaattcgctagctaggtcttgaaaggagtgggaattggctccggtgcccgtcagtgggcagagcgcacatcgcccacagtccccgagaagttggggggaggggtcggcaattgatccggtgcctagagaaggtggcgcggggtaaactgggaaagtgatgtcgtgtactggctccgcctttttcccgagggtgggggagaaccgtatataagtgcagtagtcgccgtgaacgttctttttcgcaacgggtttgccgccagaacacaggaccggttctagacgtacggccaccatgaacccagccatcagcgtcgctctcctgctctcagtcttgcaggtgtcccgagggcagaaggtgaccagcctgacagcctgcctggtgaaccaaaaccttcgcctggactgccgccatgagaataacaccaaggataactccatccagcatgagttcagcctgacccgagagaagaggaagcacgtgctctcaggcacccttgggatacccgagcacacgtaccgctcccgcgtcaccctctccaaccagccctatatcaaggtccttaccctagccaacttcaccaccaaggatgagggcgactacttttgtgagcttcgcgtaagtggcgcgaatcccatgagctccaataaaagtatcagtgtgtatagagacaagctggtcaagtgtggcggcataagcctgctggttcagaacacatcctggatgctgctgctgctgctttccctctccctcctccaagccctggacttcatttctctgtgaagcgctaataaaagatctttattttcattagatctgtgtgttggttttttgtgtgacgtgcggtcgactttaagaccaatgacttacaaggcagctgtagatcttagccactttttaaaagaaaaggggggactggaagggctaattcactcccaacgaagacaagatctgctttttgcttgtactgggtctctctggttagaccagatctgagcctgggagctctctggctaactagggaacccactgcttaagcctcaataaagcttgccttgagtgcttcaagtagtgtgtgcccgtctgttgtgtgactctggtaactagagatccctcagacccttttagtcagtgtggaaaatctctagcagtacgtatagtagttcatgtcatcttattattcagtatttataacttgcaaagaaatgaatatcagagagtgagaggaacttgtttattgcagcttataatggttacaaataaagcaatagcatcacaaatttcacaaataaagcatttttttcactgcattctagttgtggtttgtccaaactcatcaatgtatcttatcatgtctggctctagctatcccgcccctaactccgcccatcccgcccctaactccgcccagttccgcccattctccgccccatggctgactaattttttttatttatgcagaggccgaggccgcctcggcctctgagctattccagaagtagtgaggaggcttttttggaggcctagggacgtacccaattcgccctatagtgagtcgtattacgcgcgctcactggccgtcgttttacaacgtcgtgactgggaaaaccctggcgttacccaacttaatcgccttgcagcacatccccctttcgccagctggcgtaatagcgaagaggcccgcaccgatcgcccttcccaacagttgcgcagcctgaatggcgaatgggacgcgccctgtagcggcgcattaagcgcggcgggtgtggtggttacgcgcagcgtgaccgctacacttgccagcgccctagcgcccgctcctttcgctttcttcccttcctttctcgccacgttcgccggctttccccgtcaagctctaaatcgggggctccctttagggttccgatttagtgctttacggcacctcgaccccaaaaaacttgattagggtgatggttcacgtagtgggccatcgccctgatagacggtttttcgccctttgacgttggagtccacgttctttaatagtggactcttgttccaaactggaacaacactcaaccctatctcggtctattcttttgatttataagggattttgccgatttcggcctattggttaaaaaatgagctgatttaacaaaaatttaacgcgaattttaacaaaatattaacgcttacaatttaggtggcacttttcggggaaatgtgcgcggaacccctatttgtttatttttctaaatacattcaaatatgtatccgctcatgagacaataaccctgataaatgcttcaataatattgaaaaaggaagagtatgagtattcaacatttccgtgtcgcccttattcccttttttgcggcattttgccttcctgtttttgctcacccagaaacgctggtgaaagtaaaagatgctgaagatcagttgggtgcacgagtgggttacatcgaactggatctcaacagcggtaagatccttgagagttttcgccccgaagaacgttttccaatgatgagcacttttaaagttctgctatgtggcgcggtattatcccgtattgacgccgggcaagagcaactcggtcgccgcatacactattctcagaatgacttggttgagtactcaccagtcacagaaaagcatcttacggatggcatgacagtaagagaattatgcagtgctgccataaccatgagtgataacactgcggccaacttacttctgacaacgatcggaggaccgaaggagctaaccgcttttttgcacaacatgggggatcatgtaactcgccttgatcgttgggaaccggagctgaatgaagccataccaaacgacgagcgtgacaccacgatgcctgtagcaatggcaacaacgttgcgcaaactattaactggcgaactacttactctagcttcccggcaacaattaatagactggatggaggcggataaagttgcaggaccacttctgcgctcggcccttccggctggctggtttattgctgataaatctggagccggtgagcgtgggtctcgcggtatcattgcagcactggggccagatggtaagccctcccgtatcgtagttatctacacgacggggagtcaggcaactatggatgaacgaaatagacagatcgctgagataggtgcctcactgattaagcattggtaactgtcagaccaagtttactcatatatactttagattgatttaaaacttcatttttaatttaaaaggatctaggtgaagatcctttttgataatctcatgaccaaaatcccttaacgtgagttttcgttccactgagcgtcagaccccgtagaaaagatcaaaggatcttcttgagatcctttttttctgcgcgtaatctgctgcttgcaaacaaaaaaaccaccgctaccagcggtggtttgtttgccggatcaagagctaccaactctttttccgaaggtaactggcttcagcagagcgcagataccaaatactgttcttctagtgtagccgtagttaggccaccacttcaagaactctgtagcaccgcctacatacctcgctctgctaatcctgttaccagtggctgctgccagtggcgataagtcgtgtcttaccgggttggactcaagacgatagttaccggataaggcgcagcggtcgggctgaacggggggttcgtgcacacagcccagcttggagcgaacgacctacaccgaactgagatacctacagcgtgagctatgagaaagcgccacgcttcccgaagggagaaaggcggacaggtatccggtaagcggcagggtcggaacaggagagcgcacgagggagcttccagggggaaacgcctggtatctttatagtcctgtcgggtttcgccacctctgacttgagcgtcgatttttgtgatgctcgtcaggggggcggagcctatggaaaaacgccagcaacgcggcctttttacggttcctggccttttgctggccttttgctcacatgttctttcctgcgttatcccctgattctgtggataaccgtattaccgcctttgagtgagctgataccgctcgccgcagccgaacgaccgagcgcagcgagtcagtgagcgaggaagcggaagagcgcccaatacgcaaaccgcctctccccgcgcgttggccgattcattaatgcagctggcacgacaggtttcccgactggaaagcgggcagtgagcgcaacgcaattaatgtgagttagctcactcattaggcaccccaggctttacactttatgcttccggctcgtatgttgtgtggaattgtgagcggataacaatttcacacaggaaacagctatgaccatgattacgccaagcgcgcaattaaccctcactaaagggaacaaaagctggagctgcaagc

SEQ ID NO: 129214 - DNA, 6696 bp, Artificial Sequence
  pSC008_pLKO-U6-BsmBI-chRNA(+85)-EFS-Thy11
  vector
ttaatgtagtcttatgcaatactcttgtagtcttgcaacatggtaacgatgagttagcaacatgccttacaaggagagaaaaagcaccgtgcatgccgattggtggaagtaaggtggtacgatcgtgccttattaggaaggcaacagacgggtctgacatggattggacgaaccactgaattgccgcattgcagagatattgtatttaagtgcctagctcgatacataaacgggtctctctggttagaccagatctgagcctgggagctctctggctaactagggaacccactgcttaagcctcaataaagcttgccttgagtgcttcaagtagtgtgtgcccgtctgttgtgtgactctggtaactagagatccctcagacccttttagtcagtgtggaaaatctctagcagtggcgcccgaacagggacttgaaagcgaaagggaaaccagaggagctctctcgacgcaggactcggcttgctgaagcgcgcacggcaagaggcgaggggcggcgactggtgagtacgccaaaaattttgactagcggaggctagaaggagagagatgggtgcgagagcgtcagtattaagcgggggagaattagatcgcgatgggaaaaaattcggttaaggccagggggaaagaaaaaatataaattaaaacatatagtatgggcaagcagggagctagaacgattcgcagttaatcctggcctgttagaaacatcagaaggctgtagacaaatactgggacagctacaaccatcccttcagacaggatcagaagaacttagatcattatataatacagtagcaaccctctattgtgtgcatcaaaggatagagataaaagacaccaaggaagctttagacaagatagaggaagagcaaaacaaaagtaagaccaccgcacagcaagcggccgctgatcttcagacctggaggaggagatatgagggacaattggagaagtgaattatataaatataaagtagtaaaaattgaaccattaggagtagcacccaccaaggcaaagagaagagtggtgcagagagaaaaaagagcagtgggaataggagctttgttccttgggttcttgggagcagcaggaagcactatgggcgcagcgtcaatgacgctgacggtacaggccagacaattattgtctggtatagtgcagcagcagaacaatttgctgagggctattgaggcgcaacagcatctgttgcaactcacagtctggggcatcaagcagctccaggcaagaatcctggctgtggaaagatacctaaaggatcaacagctcctggggatttggggttgctctggaaaactcatttgcaccactgctgtgccttggaatgctagttggagtaataaatctctggaacagatttggaatcacacgacctggatggagtgggacagagaaattaacaattacacaagcttaatacactccttaattgaagaatcgcaaaaccagcaagaaaagaatgaacaagaattattggaattagataaatgggcaagtttgtggaattggtttaacataacaaattggctgtggtatataaaattattcataatgatagtaggaggcttggtaggtttaagaatagtttttgctgtactttctatagtgaatagagttaggcagggatattcaccattatcgtttcagacccacctcccaaccccgaggggacccagagagggcctatttcccatgattccttcatatttgcatatacgatacaaggctgttagagagataattagaattaatttgactgtaaacacaaagatattagtacaaaatacgtgacgtagaaagtaataatttcttgggtagtttgcagttttaaaattatgttttaaaatggactatcatatgcttaccgtaacttgaaagtatttcgatttcttggctttatatatcttgtggaaaggacgaaacaccggagacggacgtctctgttttagagctagaaatagcaagttaaaataaggctagtccgttatcaacttgaaaaagtggcaccgagtcggtgcttttttaagcttggcgtaactagatcttgagacaaatggcagtattcatccacaattttaaaagaaaaggggggattggggggtacagtgcaggggaaagaatagtagacataatagcaacagacatacaaactaaagaattacaaaaacaaattacaaaaattcaaaattttcgggtttattacagggacagcagagatccactttggcgccggctcgagggggcccggggaattcgctagctaggtcttgaaaggagtgggaattggctccggtgcccgtcagtgggcagagcgcacatcgcccacagtccccgagaagttggggggaggggtcggcaattgatccggtgcctagagaaggtggcgcggggtaaactgggaaagtgatgtcgtgtactggctccgcctttttcccgagggtgggggagaaccgtatataagtgcagtagtcgccgtgaacgttctttttcgcaacgggtttgccgccagaacacaggaccggttctagacgtacggccaccatgaacccagccatcagcgtcgctctcctgctctcagtcttgcaggtgtcccgagggcagaaggtgaccagcctgacagcctgcctggtgaaccaaaaccttcgcctggactgccgccatgagaataacaccaaggataactccatccagcatgagttcagcctgacccgagagaagaggaagcacgtgctctcaggcacccttgggatacccgagcacacgtaccgctcccgcgtcaccctctccaaccagccctatatcaaggtccttaccctagccaacttcaccaccaaggatgagggcgactacttttgtgagcttcgcgtctcgggcgcgaatcccatgagctccaataaaagtatcagtgtgtatagagacaagctggtcaagtgtggcggcataagcctgctggttcagaacacatcctggatgctgctgctgctgctttccctctccctcctccaagccctggacttcatttctctgtgaagcgctaataaaagatctttattttcattagatctgtgtgttggttttttgtgtggtaactcgagacgtgcggtcgactttaagaccaatgacttacaaggcagctgtagatcttagccactttttaaaagaaaaggggggactggaagggctaattcactcccaacgaagacaagatctgctttttgcttgtactgggtctctctggttagaccagatctgagcctgggagctctctggctaactagggaacccactgcttaagcctcaataaagcttgccttgagtgcttcaagtagtgtgtgcccgtctgttgtgtgactctggtaactagagatccctcagacccttttagtcagtgtggaaaatctctagcagtacgtatagtagttcatgtcatcttattattcagtatttataacttgcaaagaaatgaatatcagagagtgagaggaacttgtttattgcagcttataatggttacaaataaagcaatagcatcacaaatttcacaaataaagcatttttttcactgcattctagttgtggtttgtccaaactcatcaatgtatcttatcatgtctggctctagctatcccgcccctaactccgcccatcccgcccctaactccgcccagttccgcccattctccgccccatggctgactaattttttttatttatgcagaggccgaggccgcctcggcctctgagctattccagaagtagtgaggaggcttttttggaggcctagggacgtacccaattcgccctatagtgagtcgtattacgcgcgctcactggccgtcgttttacaacgtcgtgactgggaaaaccctggcgttacccaacttaatcgccttgcagcacatccccctttcgccagctggcgtaatagcgaagaggcccgcaccgatcgcccttcccaacagttgcgcagcctgaatggcgaatgggacgcgccctgtagcggcgcattaagcgcggcgggtgtggtggttacgcgcagcgtgaccgctacacttgccagcgccctagcgcccgctcctttcgctttcttcccttcctttctcgccacgttcgccggctttccccgtcaagctctaaatcgggggctccctttagggttccgatttagtgctttacggcacctcgaccccaaaaaacttgattagggtgatggttcacgtagtgggccatcgccctgatagacggtttttcgccctttgacgttggagtccacgttctttaatagtggactcttgttccaaactggaacaacactcaaccctatctcggtctattcttttgatttataagggattttgccgatttcggcctattggttaaaaaatgagctgatttaacaaaaatttaacgcgaattttaacaaaatattaacgcttacaatttaggtggcacttttcggggaaatgtgcgcggaacccctatttgtttatttttctaaatacattcaaatatgtatccgctcatgagacaataaccctgataaatgcttcaataatattgaaaaaggaagagtatgagtattcaacatttccgtgtcgcccttattcccttttttgcggcattttgccttcctgtttttgctcacccagaaacgctggtgaaagtaaaagatgctgaagatcagttgggtgcacgagtgggttacatcgaactggatctcaacagcggtaagatccttgagagttttcgccccgaagaacgttttccaatgatgagcacttttaaagttctgctatgtggcgcggtattatcccgtattgacgccgggcaagagcaactcggtcgccgcatacactattctcagaatgacttggttgagtactcaccagtcacagaaaagcatcttacggatggcatgacagtaagagaattatgcagtgctgccataaccatgagtgataacactgcggccaacttacttctgacaacgatcggaggaccgaaggagctaaccgcttttttgcacaacatgggggatcatgtaactcgccttgatcgttgggaaccggagctgaatgaagccataccaaacgacgagcgtgacaccacgatgcctgtagcaatggcaacaacgttgcgcaaactattaactggcgaactacttactctagcttcccggcaacaattaatagactggatggaggcggataaagttgcaggaccacttctgcgctcggcccttccggctggctggtttattgctgataaatctggagccggtgagcgtgggtctcgcggtatcattgcagcactggggccagatggtaagccctcccgtatcgtagttatctacacgacggggagtcaggcaactatggatgaacgaaatagacagatcgctgagataggtgcctcactgattaagcattggtaactgtcagaccaagtttactcatatatactttagattgatttaaaacttcatttttaatttaaaaggatctaggtgaagatcctttttgataatctcatgaccaaaatcccttaacgtgagttttcgttccactgagcgtcagaccccgtagaaaagatcaaaggatcttcttgagatcctttttttctgcgcgtaatctgctgcttgcaaacaaaaaaaccaccgctaccagcggtggtttgtttgccggatcaagagctaccaactctttttccgaaggtaactggcttcagcagagcgcagataccaaatactgttcttctagtgtagccgtagttaggccaccacttcaagaactctgtagcaccgcctacatacctcgctctgctaatcctgttaccagtggctgctgccagtggcgataagtcgtgtcttaccgggttggactcaagacgatagttaccggataaggcgcagcggtcgggctgaacggggggttcgtgcacacagcccagcttggagcgaacgacctacaccgaactgagatacctacagcgtgagctatgagaaagcgccacgcttcccgaagggagaaaggcggacaggtatccggtaagcggcagggtcggaacaggagagcgcacgagggagcttccagggggaaacgcctggtatctttatagtcctgtcgggtttcgccacctctgacttgagcgtcgatttttgtgatgctcgtcaggggggcggagcctatggaaaaacgccagcaacgcggcctttttacggttcctggccttttgctggccttttgctcacatgttctttcctgcgttatcccctgattctgtggataaccgtattaccgcctttgagtgagctgataccgctcgccgcagccgaacgaccgagcgcagcgagtcagtgagcgaggaagcggaagagcgcccaatacgcaaaccgcctctccccgcgcgttggccgattcattaatgcagctggcacgacaggtttcccgactggaaagcgggcagtgagcgcaacgcaattaatgtgagttagctcactcattaggcaccccaggctttacactttatgcttccggctcgtatgttgtgtggaattgtgagcggataacaatttcacacaggaaacagctatgaccatgattacgccaagcgcgcaattaaccctcactaaagggaacaaaagctggagctgcaagc

SEQ ID NO: 129215 - DNA, 7021 bp, Artificial Sequence
  pSC021_pLKO-U6-sgBsmBI-PGK-Thy11CO-spA.sbd
  vector
ttaatgtagtcttatgcaatactcttgtagtcttgcaacatggtaacgatgagttagcaacatgccttacaaggagagaaaaagcaccgtgcatgccgattggtggaagtaaggtggtacgatcgtgccttattaggaaggcaacagacgggtctgacatggattggacgaaccactgaattgccgcattgcagagatattgtatttaagtgcctagctcgatacataaacgggtctctctggttagaccagatctgagcctgggagctctctggctaactagggaacccactgcttaagcctcaataaagcttgccttgagtgcttcaagtagtgtgtgcccgtctgttgtgtgactctggtaactagagatccctcagacccttttagtcagtgtggaaaatctctagcagtggcgcccgaacagggacttgaaagcgaaagggaaaccagaggagctctctcgacgcaggactcggcttgctgaagcgcgcacggcaagaggcgaggggcggcgactggtgagtacgccaaaaattttgactagcggaggctagaaggagagagatgggtgcgagagcgtcagtattaagcgggggagaattagatcgcgatgggaaaaaattcggttaaggccagggggaaagaaaaaatataaattaaaacatatagtatgggcaagcagggagctagaacgattcgcagttaatcctggcctgttagaaacatcagaaggctgtagacaaatactgggacagctacaaccatcccttcagacaggatcagaagaacttagatcattatataatacagtagcaaccctctattgtgtgcatcaaaggatagagataaaagacaccaaggaagctttagacaagatagaggaagagcaaaacaaaagtaagaccaccgcacagcaagcggccgctgatcttcagacctggaggaggagatatgagggacaattggagaagtgaattatataaatataaagtagtaaaaattgaaccattaggagtagcacccaccaaggcaaagagaagagtggtgcagagagaaaaaagagcagtgggaataggagctttgttccttgggttcttgggagcagcaggaagcactatgggcgcagcgtcaatgacgctgacggtacaggccagacaattattgtctggtatagtgcagcagcagaacaatttgctgagggctattgaggcgcaacagcatctgttgcaactcacagtctggggcatcaagcagctccaggcaagaatcctggctgtggaaagatacctaaaggatcaacagctcctggggatttggggttgctctggaaaactcatttgcaccactgctgtgccttggaatgctagttggagtaataaatctctggaacagatttggaatcacacgacctggatggagtgggacagagaaattaacaattacacaagcttaatacactccttaattgaagaatcgcaaaaccagcaagaaaagaatgaacaagaattattggaattagataaatgggcaagtttgtggaattggtttaacataacaaattggctgtggtatataaaattattcataatgatagtaggaggcttggtaggtttaagaatagtttttgctgtactttctatagtgaatagagttaggcagggatattcaccattatcgtttcagacccacctcccaaccccgaggggacccagagagggcctatttcccatgattccttcatatttgcatatacgatacaaggctgttagagagataattagaattaatttgactgtaaacacaaagatattagtacaaaatacgtgacgtagaaagtaataatttcttgggtagtttgcagttttaaaattatgttttaaaatggactatcatatgcttaccgtaacttgaaagtatttcgatttcttggctttatatatcttgtggaaaggacgaaacaccggagacggacgtctctgttttagagctagaaatagcaagttaaaataaggctagtccgttatcaacttgaaaaagtggcaccgagtcggtgcttttttaagcttggcgtaactagatcttgagacaaatggcagtattcatccacaattttaaaagaaaaggggggattggggggtacagtgcaggggaaagaatagtagacataatagcaacagacatacaaactaaagaattacaaaaacaaattacaaaaattcaaaattttcgggtttattacagggacagcagagatccactttggcgccggctcgagggggcccggggaattcgctagcgtctgaagaggagtttacgtccagccaagcttaggatctcgacctcgaaattctaccgggtaggggaggcgcttttcccaaggcagtctggagcatgcgctttagcagccccgctggcacttggcgctacacaagtggcctctggcctcgcacacattccacatccaccggtagcgccaaccggctccgttctttggtggccccttcgcgccaccttctactcctcccctagtcaggaagttcccccccgccccgcagctcgcgtcgtgcaggacgtgacaaatggaagtagcatgtcacactagtctcgtgcagatggacagcaccgctgagcaatggaagcgggtaggcctttggggcagcggccaatagcagctttgctccttcgctttctgggctcagcagctgggaagggtgggtccgggggcgggctcaggggcgggctcaggggcggggcgggcgcccgaaggtcctccggaggcccggcattctgcacgcttcaaaagcgcacgtctgccgcgctgttctcctcttcctcatctccgggcctttcgacctgcatccatctagatctcgagcagctgaagcttaaccggttctagacgtacggccaccatgaacccagccatcagcgtcgctctcctgctctcagtcttgcaggtgtcccgagggcagaaggtgaccagcctgacagcctgcctggtgaaccaaaaccttcgcctggactgccgccatgagaataacaccaaggataactccatccagcatgagttcagcctgacccgagagaagaggaagcacgtgctctcaggcacccttgggatacccgagcacacgtaccgctcccgcgtcaccctctccaaccagccctatatcaaggtccttaccctagccaacttcaccaccaaggatgagggcgactacttttgtgagcttcgcgtaagtggcgcgaatcccatgagctccaataaaagtatcagtgtgtatagagacaagctggtcaagtgtggcggcataagcctgctggttcagaacacatcctggatgctgctgctgctgctttccctctccctcctccaagccctggacttcatttctctgtgaagcgctaataaaagatctttattttcattagatctgtgtgttggttttttgtgtgacgtgcggtcgactttaagaccaatgacttacaaggcagctgtagatcttagccactttttaaaagaaaaggggggactggaagggctaattcactcccaacgaagacaagatctgctttttgcttgtactgggtctctctggttagaccagatctgagcctgggagctctctggctaactagggaacccactgcttaagcctcaataaagcttgccttgagtgcttcaagtagtgtgtgcccgtctgttgtgtgactctggtaactagagatccctcagacccttttagtcagtgtggaaaatctctagcagtacgtatagtagttcatgtcatcttattattcagtatttataacttgcaaagaaatgaatatcagagagtgagaggaacttgtttattgcagcttataatggttacaaataaagcaatagcatcacaaatttcacaaataaagcatttttttcactgcattctagttgtggtttgtccaaactcatcaatgtatcttatcatgtctggctctagctatcccgcccctaactccgcccatcccgcccctaactccgcccagttccgcccattctccgccccatggctgactaattttttttatttatgcagaggccgaggccgcctcggcctctgagctattccagaagtagtgaggaggcttttttggaggcctagggacgtacccaattcgccctatagtgagtcgtattacgcgcgctcactggccgtcgttttacaacgtcgtgactgggaaaaccctggcgttacccaacttaatcgccttgcagcacatccccctttcgccagctggcgtaatagcgaagaggcccgcaccgatcgcccttcccaacagttgcgcagcctgaatggcgaatgggacgcgccctgtagcggcgcattaagcgcggcgggtgtggtggttacgcgcagcgtgaccgctacacttgccagcgccctagcgcccgctcctttcgctttcttcccttcctttctcgccacgttcgccggctttccccgtcaagctctaaatcgggggctccctttagggttccgatttagtgctttacggcacctcgaccccaaaaaacttgattagggtgatggttcacgtagtgggccatcgccctgatagacggtttttcgccctttgacgttggagtccacgttctttaatagtggactcttgttccaaactggaacaacactcaaccctatctcggtctattcttttgatttataagggattttgccgatttcggcctattggttaaaaaatgagctgatttaacaaaaatttaacgcgaattttaacaaaatattaacgcttacaatttaggtggcacttttcggggaaatgtgcgcggaacccctatttgtttatttttctaaatacattcaaatatgtatccgctcatgagacaataaccctgataaatgcttcaataatattgaaaaaggaagagtatgagtattcaacatttccgtgtcgcccttattcccttttttgcggcattttgccttcctgtttttgctcacccagaaacgctggtgaaagtaaaagatgctgaagatcagttgggtgcacgagtgggttacatcgaactggatctcaacagcggtaagatccttgagagttttcgccccgaagaacgttttccaatgatgagcacttttaaagttctgctatgtggcgcggtattatcccgtattgacgccgggcaagagcaactcggtcgccgcatacactattctcagaatgacttggttgagtactcaccagtcacagaaaagcatcttacggatggcatgacagtaagagaattatgcagtgctgccataaccatgagtgataacactgcggccaacttacttctgacaacgatcggaggaccgaaggagctaaccgcttttttgcacaacatgggggatcatgtaactcgccttgatcgttgggaaccggagctgaatgaagccataccaaacgacgagcgtgacaccacgatgcctgtagcaatggcaacaacgttgcgcaaactattaactggcgaactacttactctagcttcccggcaacaattaatagactggatggaggcggataaagttgcaggaccacttctgcgctcggcccttccggctggctggtttattgctgataaatctggagccggtgagcgtgggtctcgcggtatcattgcagcactggggccagatggtaagccctcccgtatcgtagttatctacacgacggggagtcaggcaactatggatgaacgaaatagacagatcgctgagataggtgcctcactgattaagcattggtaactgtcagaccaagtttactcatatatactttagattgatttaaaacttcatttttaatttaaaaggatctaggtgaagatcctttttgataatctcatgaccaaaatcccttaacgtgagttttcgttccactgagcgtcagaccccgtagaaaagatcaaaggatcttcttgagatcctttttttctgcgcgtaatctgctgcttgcaaacaaaaaaaccaccgctaccagcggtggtttgtttgccggatcaagagctaccaactctttttccgaaggtaactggcttcagcagagcgcagataccaaatactgttcttctagtgtagccgtagttaggccaccacttcaagaactctgtagcaccgcctacatacctcgctctgctaatcctgttaccagtggctgctgccagtggcgataagtcgtgtcttaccgggttggactcaagacgatagttaccggataaggcgcagcggtcgggctgaacggggggttcgtgcacacagcccagcttggagcgaacgacctacaccgaactgagatacctacagcgtgagctatgagaaagcgccacgcttcccgaagggagaaaggcggacaggtatccggtaagcggcagggtcggaacaggagagcgcacgagggagcttccagggggaaacgcctggtatctttatagtcctgtcgggtttcgccacctctgacttgagcgtcgatttttgtgatgctcgtcaggggggcggagcctatggaaaaacgccagcaacgcggcctttttacggttcctggccttttgctggccttttgctcacatgttctttcctgcgttatcccctgattctgtggataaccgtattaccgcctttgagtgagctgataccgctcgccgcagccgaacgaccgagcgcagcgagtcagtgagcgaggaagcggaagagcgcccaatacgcaaaccgcctctccccgcgcgttggccgattcattaatgcagctggcacgacaggtttcccgactggaaagcgggcagtgagcgcaacgcaattaatgtgagttagctcactcattaggcaccccaggctttacactttatgcttccggctcgtatgttgtgtggaattgtgagcggataacaatttcacacaggaaacagctatgaccatgattacgccaagcgcgcaattaaccctcactaaagggaacaaaagctggagctgcaagc

SEQ ID NO: 129216 - DNA, 9271 bp, Artificial Sequence
  pMD02: lenti-pLKO-U6-sgBsmBI-EFS-mCherry-2A-cOVA
  vector
ttaatgtagtcttatgcaatactcttgtagtcttgcaacatggtaacgatgagttagcaacatgccttacaaggagagaaaaagcaccgtgcatgccgattggtggaagtaaggtggtacgatcgtgccttattaggaaggcaacagacgggtctgacatggattggacgaaccactgaattgccgcattgcagagatattgtatttaagtgcctagctcgatacataaacgggtctctctggttagaccagatctgagcctgggagctctctggctaactagggaacccactgcttaagcctcaataaagcttgccttgagtgcttcaagtagtgtgtgcccgtctgttgtgtgactctggtaactagagatccctcagacccttttagtcagtgtggaaaatctctagcagtggcgcccgaacagggacttgaaagcgaaagggaaaccagaggagctctctcgacgcaggactcggcttgctgaagcgcgcacggcaagaggcgaggggcggcgactggtgagtacgccaaaaattttgactagcggaggctagaaggagagagatgggtgcgagagcgtcagtattaagcgggggagaattagatcgcgatgggaaaaaattcggttaaggccagggggaaagaaaaaatataaattaaaacatatagtatgggcaagcagggagctagaacgattcgcagttaatcctggcctgttagaaacatcagaaggctgtagacaaatactgggacagctacaaccatcccttcagacaggatcagaagaacttagatcattatataatacagtagcaaccctctattgtgtgcatcaaaggatagagataaaagacaccaaggaagctttagacaagatagaggaagagcaaaacaaaagtaagaccaccgcacagcaagcggccgctgatcttcagacctggaggaggagatatgagggacaattggagaagtgaattatataaatataaagtagtaaaaattgaaccattaggagtagcacccaccaaggcaaagagaagagtggtgcagagagaaaaaagagcagtgggaataggagctttgttccttgggttcttgggagcagcaggaagcactatgggcgcagcgtcaatgacgctgacggtacaggccagacaattattgtctggtatagtgcagcagcagaacaatttgctgagggctattgaggcgcaacagcatctgttgcaactcacagtctggggcatcaagcagctccaggcaagaatcctggctgtggaaagatacctaaaggatcaacagctcctggggatttggggttgctctggaaaactcatttgcaccactgctgtgccttggaatgctagttggagtaataaatctctggaacagatttggaatcacacgacctggatggagtgggacagagaaattaacaattacacaagcttaatacactccttaattgaagaatcgcaaaaccagcaagaaaagaatgaacaagaattattggaattagataaatgggcaagtttgtggaattggtttaacataacaaattggctgtggtatataaaattattcataatgatagtaggaggcttggtaggtttaagaatagtttttgctgtactttctatagtgaatagagttaggcagggatattcaccattatcgtttcagacccacctcccaaccccgaggggacccagagagggcctatttcccatgattccttcatatttgcatatacgatacaaggctgttagagagataattagaattaatttgactgtaaacacaaagatattagtacaaaatacgtgacgtagaaagtaataatttcttgggtagtttgcagttttaaaattatgttttaaaatggactatcatatgcttaccgtaacttgaaagtatttcgatttcttggctttatatatcttgtggaaaggacgaaacaccggagacggacgtctctgttttagagctagaaatagcaagttaaaataaggctagtccgttatcaacttgaaaaagtggcaccgagtcggtgcttttttaagcttggcgtaactagatcttgagacaaatggcagtattcatccacaattttaaaagaaaaggggggattggggggtacagtgcaggggaaagaatagtagacataatagcaacagacatacaaactaaagaattacaaaaacaaattacaaaaattcaaaattttcgggtttattacagggacagcagagatccactttggcgccggctcgagggggcccgggtgcaaagatggataaagttttaaacagagaggaatctttgcagctaatggaccttctaggtcttgaaaggagtgggaattggctccggtgcccgtcagtgggcagagcgcacatcgcccacagtccccgagaagttggggggaggggtcggcaattgatccggtgcctagagaaggtggcgcggggtaaactgggaaagtgatgtcgtgtactggctccgcctttttcccgagggtgggggagaaccgtatataagtgcagtagtcgccgtgaacgttctttttcgcaacgggtttgccgccagaacacaggtaagtgccgtgtgtggttcccgcgggcctggcctctttacgggttatggcccttgcgtgccttgaattacttccactggctgcagtacgtgattcttgatcccgagcttcgggttggaagtgggtgggagagttcgaggccttgcgcttaaggagccccttcgcctcgtgcttgagttgaggcctggcctgggcgctggggccgccgcgtgcgaatctggtggcaccttcgcgcctgtctcgctgctttcgataagtctctagccatttaaaatttttgatgacctgctgcgacgctttttttctggcaagatagtcttgtaaatgcgggccaagatctgcacactggtatttcggtttttggggccgcgggcggcgacggggcccgtgcgtcccagcgcacatgttcggcgaggcggggcctgcgagcgcggccaccgagaatcggacgggggtagtctcaagctggccggcctgctctggtgcctggcctcgcgccgccgtgtatcgccccgccctgggcggcaaggctggcccggtcggcaccagttgcgtgagcggaaagatggccgcttcccggccctgctgcagggagctcaaaatggaggacgcggcgctcgggagagcgggcgggtgagtcacccacacaaaggaaaagggcctttccgtcctcagccgtcgcttcatgtgactccacggagtaccgggcgccgtccaggcacctcgattagttctcgagcttttggagtacgtcgtctttaggttggggggaggggttttatgcgatggagtttccccacactgagtgggtggagactgaagttaggccagcttggcacttgatgtaattctccttggaatttgccctttttgagtttggatcttggttcattctcaagcctcagacagtggttcaaagtttttttcttccatttcaggtgtcgtgacgtacggccaccatggtgagcaagggcgaggaggataacatggccatcatcaaggagttcatgcgcttcaaggtgcacatggagggctccgtgaacggccacgagttcgagatcgagggcgagggcgagggccgcccctacgagggcacccagaccgccaagctgaaggtgaccaagggtggccccctgcccttcgcctgggacatcctgtcccctcagttcatgtacggctccaaggcctacgtgaagcaccccgccgacatccccgactacttgaagctgtccttccccgagggcttcaagtgggagcgcgtgatgaacttcgaggacggcggcgtggtgaccgtgacccaggactcctccctgcaggacggcgagttcatctacaaggtgaagctgcgcggcaccaacttcccctccgacggccccgtaatgcagaagaagaccatgggctgggaggcctcctccgagcggatgtaccccgaggacggcgccctgaagggcgagatcaagcagaggctgaagctgaaggacggcggccactacgacgctgaggtcaagaccacctacaaggccaagaagcccgtgcagctgcccggcgcctacaacgtcaacatcaagttggacatcacctcccacaacgaggactacaccatcgtggaacagtacgaacgcgccgagggccgccactccaccggcggcatggacgagctgtacaagggcagtggagagggcagaggaagtctgctaacatgcggtgacgtcgaggagaatcctggcccaatgggctccatcggcgcagcaagcatggaattttgttttgatgtattcaaggagctcatcaattcctgggtagaaagtcagacaaatggaattatcagaaatgtccttcagccaagctccgtggattctcaaactgcaatggttctggttaatgccattgtcttcaaaggactgtgggagaaaacatttaaggatgaagacacacaagcaatgcctttcagagtgactgagcaagaaagcaaacctgtgcagatgatgtaccagattggtttatttagagtggcatcaatggcttctgagaaaatgaagatcctggagcttccatttgccagtgggacaatgagcatgttggtgctgttgcctgatgaagtctcaggccttgagcagcttgagagtataatcaactttgaaaaactgactgaatggaccagttctaatgttatggaagagaggaagatcaaagtgtacttacctcgcatgaagatggaggaaaaatacaacctcacatctgtcttaatggctatgggcattactgacgtgtttagctcttcagccaatctgtctggcatctcctcagcagagagcctgaagatatctcaagctgtccatgcagcacatgcagaaatcaatgaagcaggcagagaggtggtagggtcagcagaggctggagtggatgctgcaagcgtctctgaagaatttagggctgaccatccattcctcttctgtatcaagcacatcgcaaccaacgccgttctcttctttggcagatgtgtttccccttaaacgcgttaagtcgacaatcaacctctggattacaaaatttgtgaaagattgactggtattcttaactatgttgctccttttacgctatgtggatacgctgctttaatgcctttgtatcatgctattgcttcccgtatggctttcattttctcctccttgtataaatcctggttgctgtctctttatgaggagttgtggcccgttgtcaggcaacgtggcgtggtgtgcactgtgtttgctgacgcaacccccactggttggggcattgccaccacctgtcagctcctttccgggactttcgctttccccctccctattgccacggcggaactcatcgccgcctgccttgcccgctgctggacaggggctcggctgttgggcactgacaattccgtggtgttgtcggggaaatcatcgtcctttccttggctgctcgcctgtgttgccacctggattctgcgcgggacgtccttctgctacgtcccttcggccctcaatccagcggaccttccttcccgcggcctgctgccggctctgcggcctcttccgcgtcttcgccttcgccctcagacgagtcggatctccctttgggccgcctccccgcgtcgactttaagaccaatgacttacaaggcagctgtagatcttagccactttttaaaagaaaaggggggactggaagggctaattcactcccaacgaagacaagatctgctttttgcttgtactgggtctctctggttagaccagatctgagcctgggagctctctggctaactagggaacccactgcttaagcctcaataaagcttgccttgagtgcttcaagtagtgtgtgcccgtctgttgtgtgactctggtaactagagatccctcagacccttttagtcagtgtggaaaatctctagcagtacgtatagtagttcatgtcatcttattattcagtatttataacttgcaaagaaatgaatatcagagagtgagaggaacttgtttattgcagcttataatggttacaaataaagcaatagcatcacaaatttcacaaataaagcatttttttcactgcattctagttgtggtttgtccaaactcatcaatgtatcttatcatgtctggctctagctatcccgcccctaactccgcccatcccgcccctaactccgcccagttccgcccattctccgccccatggctgactaattttttttatttatgcagaggccgaggccgcctcggcctctgagctattccagaagtagtgaggaggcttttttggaggcctagggacgtacccaattcgccctatagtgagtcgtattacgcgcgctcactggccgtcgttttacaacgtcgtgactgggaaaaccctggcgttacccaacttaatcgccttgcagcacatccccctttcgccagctggcgtaatagcgaagaggcccgcaccgatcgcccttcccaacagttgcgcagcctgaatggcgaatgggacgcgccctgtagcggcgcattaagcgcggcgggtgtggtggttacgcgcagcgtgaccgctacacttgccagcgccctagcgcccgctcctttcgctttcttcccttcctttctcgccacgttcgccggctttccccgtcaagctctaaatcgggggctccctttagggttccgatttagtgctttacggcacctcgaccccaaaaaacttgattagggtgatggttcacgtagtgggccatcgccctgatagacggtttttcgccctttgacgttggagtccacgttctttaatagtggactcttgttccaaactggaacaacactcaaccctatctcggtctattcttttgatttataagggattttgccgatttcggcctattggttaaaaaatgagctgatttaacaaaaatttaacgcgaattttaacaaaatattaacgcttacaatttaggtggcacttttcggggaaatgtgcgcggaacccctatttgtttatttttctaaatacattcaaatatgtatccgctcatgagacaataaccctgataaatgcttcaataatattgaaaaaggaagagtatgagtattcaacatttccgtgtcgcccttattcccttttttgcggcattttgccttcctgtttttgctcacccagaaacgctggtgaaagtaaaagatgctgaagatcagttgggtgcacgagtgggttacatcgaactggatctcaacagcggtaagatccttgagagttttcgccccgaagaacgttttccaatgatgagcacttttaaagttctgctatgtggcgcggtattatcccgtattgacgccgggcaagagcaactcggtcgccgcatacactattctcagaatgacttggttgagtactcaccagtcacagaaaagcatcttacggatggcatgacagtaagagaattatgcagtgctgccataaccatgagtgataacactgcggccaacttacttctgacaacgatcggaggaccgaaggagctaaccgcttttttgcacaacatgggggatcatgtaactcgccttgatcgttgggaaccggagctgaatgaagccataccaaacgacgagcgtgacaccacgatgcctgtagcaatggcaacaacgttgcgcaaactattaactggcgaactacttactctagcttcccggcaacaattaatagactggatggaggcggataaagttgcaggaccacttctgcgctcggcccttccggctggctggtttattgctgataaatctggagccggtgagcgtgggtctcgcggtatcattgcagcactggggccagatggtaagccctcccgtatcgtagttatctacacgacggggagtcaggcaactatggatgaacgaaatagacagatcgctgagataggtgcctcactgattaagcattggtaactgtcagaccaagtttactcatatatactttagattgatttaaaacttcatttttaatttaaaaggatctaggtgaagatcctttttgataatctcatgaccaaaatcccttaacgtgagttttcgttccactgagcgtcagaccccgtagaaaagatcaaaggatcttcttgagatcctttttttctgcgcgtaatctgctgcttgcaaacaaaaaaaccaccgctaccagcggtggtttgtttgccggatcaagagctaccaactctttttccgaaggtaactggcttcagcagagcgcagataccaaatactgttcttctagtgtagccgtagttaggccaccacttcaagaactctgtagcaccgcctacatacctcgctctgctaatcctgttaccagtggctgctgccagtggcgataagtcgtgtcttaccgggttggactcaagacgatagttaccggataaggcgcagcggtcgggctgaacggggggttcgtgcacacagcccagcttggagcgaacgacctacaccgaactgagatacctacagcgtgagctatgagaaagcgccacgcttcccgaagggagaaaggcggacaggtatccggtaagcggcagggtcggaacaggagagcgcacgagggagcttccagggggaaacgcctggtatctttatagtcctgtcgggtttcgccacctctgacttgagcgtcgatttttgtgatgctcgtcaggggggcggagcctatggaaaaacgccagcaacgcggcctttttacggttcctggccttttgctggccttttgctcacatgttctttcctgcgttatcccctgattctgtggataaccgtattaccgcctttgagtgagctgataccgctcgccgcagccgaacgaccgagcgcagcgagtcagtgagcgaggaagcggaagagcgcccaatacgcaaaccgcctctccccgcgcgttggccgattcattaatgcagctggcacgacaggtttcccgactggaaagcgggcagtgagcgcaacgcaattaatgtgagttagctcactcattaggcaccccaggctttacactttatgcttccggctcgtatgttgtgtggaattgtgagcggataacaatttcacacaggaaacagctatgaccatgattacgccaagcgcgcaattaaccctcactaaagggaacaaaagctggagctgcaagc

SEQ ID NO: 129217 - DNA, 5196 bp, Artificial Sequence
  pLY005SB_pAAV-U6sg(BbsI)-EFS-SB100X
  vector
cctgcaggcagctgcgcgctcgctcgctcactgaggccgcccgggcaaagcccgggcgtcgggcgacctttggtcgcccggcctcagtgagcgagcgagcgcgcagagagggagtggccaactccatcactaggggttcctgcggccgcacgcgttctagactatacagttgaagtcggaagtttacatacacttaagttggagtcattaaaactcgtttttcaactactccacaaatttcttgttaacaaacaatagttttggcaagtcagttaggacatctactttgtgcatgacacaagtcatttttccaacaattgtttacagacagattatttcacttataattcactgtatcacaattccagtgggtcagaagtttacatacactaagttgactgtgcctttaaacagcttggaaaattccagaaaatgatgtcatggctttagagaggatccgagggcctatttcccatgattccttcatatttgcatatacgatacaaggctgttagagagataattagaattaatttgactgtaaacacaaagatattagtacaaaatacgtgacgtagaaagtaataatttcttgggtagtttgcagttttaaaattatgttttaaaatggactatcatatgcttaccgtaacttgaaagtatttcgatttcttggctttatatatcttgtggaaaggacgaaacaccgggtcttcgagaagacctgttttagagctagaaatagcaagttaaaataaggctagtccgttatcaacttgaaaaagtggcaccgagtcggtgcttttttggctagctggccgcgtttaaacgtcgactaggtcttgaaaggagtgggaattggctccggtgcccgtcagtgggcagagcgcacatcgcccacagtccccgagaagttggggggaggggtcggcaattgatccggtgcctagagaaggtggcgcggggtaaactgggaaagtgatgtcgtgtactggctccgcctttttcccgagggtgggggagaaccgtatataagtgcagtagtcgccgtgaacgttctttttcgcaacgggtttgccgccagaacacaggctcgagatgggaaaatcaaaagaaatcagccaagacctcagaaaaagaattgtagacctccacaagtctggttcatccttgggagcaatttccaaacgcctggcggtaccacgttcatctgtacaaacaatagtacgcaagtataaacaccatgggaccacgcagccgtcataccgctcaggaaggagacgcgttctgtctcctagagatgaacgtactttggtgcgaaaagtgcaaatcaatcccagaacaacagcaaaggaccttgtgaagatgctggaggaaacaggtacaaaagtatctatatccacagtaaaacgagtcctatatcgacataacctgaaaggccactcagcaaggaagaagccactgctccaaaaccgacataagaaagccagactacggtttgcaactgcacatggggacaaagatcgtactttttggagaaatgtcctctggtctgatgaaacaaaaatagaactgtttggccataatgaccatcgttatgtttggaggaagaagggggaggcttgcaagccgaagaacaccatcccaaccgtgaagcacgggggtggcagcatcatgttgtgggggtgctttgctgcaggagggactggtgcacttcacaaaatagatggcatcatggacgcggtgcagtatgtggatatattgaagcaacatctcaagacatcagtcaggaagttaaagcttggtcgcaaatgggttttccaacacgacaatgaccccaagcatacttccaaagttgtggcaaaatggcttaaggacaacaaagtcaaggtattggagtggccatcacaaagccctgacctcaatcctatagaaaatttgtgggcagaactgaaaaagcgtgtgcgagcaaggaggcctacaaacctgactcagttacaccagctctgtcaggaggaatgggccaaaattcacccaaattattgtgggaagcttgtggaaggctacccgaaacgtttgacccaagttaaacaatttaaaggcaatgctaccaaatactaggggccctaaccgcgggaataaaagatctttattttcattagatctgtgtgttggttttttgtgtgaattcttgagtgtatgtaaacttctgacccactgggaatgtgatgaaagaaataaaagctgaaatgaatcattctctctactattattctgatatttcacattcttaaaataaagtggtgatcctaactgacctaagacagggaatttttactaggattaaatgtcaggaattgtgaaaaagtgagtttaaatgtatttggctaaggtgtatgtaaacttccgacttcaactgtataggcatgcggtaaccacgtgcggaccgagcggccgcaggaacccctagtgatggagttggccactccctctctgcgcgctcgctcgctcactgaggccgggcgaccaaaggtcgcccgacgcccgggctttgcccgggcggcctcagtgagcgagcgagcgcgcagctgcctgcaggggcgcctgatgcggtattttctccttacgcatctgtgcggtatttcacaccgcatacgtcaaagcaaccatagtacgcgccctgtagcggcgcattaagcgcggcgggtgtggtggttacgcgcagcgtgaccgctacacttgccagcgccctagcgcccgctcctttcgctttcttcccttcctttctcgccacgttcgccggctttccccgtcaagctctaaatcgggggctccctttagggttccgatttagtgctttacggcacctcgaccccaaaaaacttgatttgggtgatggttcacgtagtgggccatcgccctgatagacggtttttcgccctttgacgttggagtccacgttctttaatagtggactcttgttccaaactggaacaacactcaaccctatctcgggctattcttttgatttataagggattttgccgatttcggcctattggttaaaaaatgagctgatttaacaaaaatttaacgcgaattttaacaaaatattaacgtttacaattttatggtgcactctcagtacaatctgctctgatgccgcatagttaagccagccccgacacccgccaacacccgctgacgcgccctgacgggcttgtctgctcccggcatccgcttacagacaagctgtgaccgtctccgggagctgcatgtgtcagaggttttcaccgtcatcaccgaaacgcgcgagacgaaagggcctcgtgatacgcctatttttataggttaatgtcatgataataatggtttcttagacgtcaggtggcacttttcggggaaatgtgcgcggaacccctatttgtttatttttctaaatacattcaaatatgtatccgctcatgagacaataaccctgataaatgcttcaataatattgaaaaaggaagagtatgagtattcaacatttccgtgtcgcccttattcccttttttgcggcattttgccttcctgtttttgctcacccagaaacgctggtgaaagtaaaagatgctgaagatcagttgggtgcacgagtgggttacatcgaactggatctcaacagcggtaagatccttgagagttttcgccccgaagaacgttttccaatgatgagcacttttaaagttctgctatgtggcgcggtattatcccgtattgacgccgggcaagagcaactcggtcgccgcatacactattctcagaatgacttggttgagtactcaccagtcacagaaaagcatcttacggatggcatgacagtaagagaattatgcagtgctgccataaccatgagtgataacactgcggccaacttacttctgacaacgatcggaggaccgaaggagctaaccgcttttttgcacaacatgggggatcatgtaactcgccttgatcgttgggaaccggagctgaatgaagccataccaaacgacgagcgtgacaccacgatgcctgtagcaatggcaacaacgttgcgcaaactattaactggcgaactacttactctagcttcccggcaacaattaatagactggatggaggcggataaagttgcaggaccacttctgcgctcggcccttccggctggctggtttattgctgataaatctggagccggtgagcgtgggtctcgcggtatcattgcagcactggggccagatggtaagccctcccgtatcgtagttatctacacgacggggagtcaggcaactatggatgaacgaaatagacagatcgctgagataggtgcctcactgattaagcattggtaactgtcagaccaagtttactcatatatactttagattgatttaaaacttcatttttaatttaaaaggatctaggtgaagatcctttttgataatctcatgaccaaaatcccttaacgtgagttttcgttccactgagcgtcagaccccgtagaaaagatcaaaggatcttcttgagatcctttttttctgcgcgtaatctgctgcttgcaaacaaaaaaaccaccgctaccagcggtggtttgtttgccggatcaagagctaccaactctttttccgaaggtaactggcttcagcagagcgcagataccaaatactgtccttctagtgtagccgtagttaggccaccacttcaagaactctgtagcaccgcctacatacctcgctctgctaatcctgttaccagtggctgctgccagtggcgataagtcgtgtcttaccgggttggactcaagacgatagttaccggataaggcgcagcggtcgggctgaacggggggttcgtgcacacagcccagcttggagcgaacgacctacaccgaactgagatacctacagcgtgagctatgagaaagcgccacgcttcccgaagggagaaaggcggacaggtatccggtaagcggcagggtcggaacaggagagcgcacgagggagcttccagggggaaacgcctggtatctttatagtcctgtcgggtttcgccacctctgacttgagcgtcgatttttgtgatgctcgtcaggggggcggagcctatggaaaaacgccagcaacgcggcctttttacggttcctggccttttgctggccttttgctcacatgt

SEQ ID NO: 129218 - DNA, 5745 bp, Artificial Sequence
  pLY017SB_pAAV-U6sg(BbsI)-EFS-Thy1
  vector
cctgcaggcagctgcgcgctcgctcgctcactgaggccgcccgggcaaagcccgggcgtcgggcgacctttggtcgcccggcctcagtgagcgagcgagcgcgcagagagggagtggccaactccatcactaggggttcctgcggccgcacgcgttctagactatacagttgaagtcggaagtttacatacacttaagttggagtcattaaaactcgtttttcaactactccacaaatttcttgttaacaaacaatagttttggcaagtcagttaggacatctactttgtgcatgacacaagtcatttttccaacaattgtttacagacagattatttcacttataattcactgtatcacaattccagtgggtcagaagtttacatacactaagttgactgtgcctttaaacagcttggaaaattccagaaaatgatgtcatggctttagagaggatccgagggcctatttcccatgattccttcatatttgcatatacgatacaaggctgttagagagataattagaattaatttgactgtaaacacaaagatattagtacaaaatacgtgacgtagaaagtaataatttcttgggtagtttgcagttttaaaattatgttttaaaatggactatcatatgcttaccgtaacttgaaagtatttcgatttcttggctttatatatcttgtggaaaggacgaaacaccgggtcttcgagaagacctgttttagagctagaaatagcaagttaaaataaggctagtccgttatcaacttgaaaaagtggcaccgagtcggtgcttttttggctagctggccgcgtttaaacgtcgactaggtcttgaaaggagtgggaattggctccggtgcccgtcagtgggcagagcgcacatcgcccacagtccccgagaagttggggggaggggtcggcaattgatccggtgcctagagaaggtggcgcggggtaaactgggaaagtgatgtcgtgtactggctccgcctttttcccgagggtgggggagaaccgtatataagtgcagtagtcgccgtgaacgttctttttcgcaacgggtttgccgccagaacacaggctcgagatgaacccagccatcagcgtcgctctcctgctctcagtcttgcaggtgtcccgagggcagaaggtgaccagcctgacagcctgcctggtgaaccaaaaccttcgcctggactgccgccatgagaataacaccaaggataactccatccagcatgagttcagcctgacccgagagaagaggaagcacgtgctctcaggcacccttgggatacccgagcacacgtaccgctcccgcgtcaccctctccaaccagccctatatcaaggtccttaccctagccaacttcaccaccaaggatgagggcgactacttttgtgagcttcgcgtgtcgggcgcgaatcccatgagctccaataaaagtatcagtgtgtatagagacaagctggtcaagtgtggcggcataagcctgctggttcagaacacatcctggatgctgctgctgctgctttccctctccctcctccaagccctggacttcatttctctgggcagtggagagggcagaggaagtctgctaacatgcggtgacgtcgaggagaatcctggcccaatgggaaaatcaaaagaaatcagccaagacctcagaaaaagaattgtagacctccacaagtctggttcatccttgggagcaatttccaaacgcctggcggtaccacgttcatctgtacaaacaatagtacgcaagtataaacaccatgggaccacgcagccgtcataccgctcaggaaggagacgcgttctgtctcctagagatgaacgtactttggtgcgaaaagtgcaaatcaatcccagaacaacagcaaaggaccttgtgaagatgctggaggaaacaggtacaaaagtatctatatccacagtaaaacgagtcctatatcgacataacctgaaaggccactcagcaaggaagaagccactgctccaaaaccgacataagaaagccagactacggtttgcaactgcacatggggacaaagatcgtactttttggagaaatgtcctctggtctgatgaaacaaaaatagaactgtttggccataatgaccatcgttatgtttggaggaagaagggggaggcttgcaagccgaagaacaccatcccaaccgtgaagcacgggggtggcagcatcatgttgtgggggtgctttgctgcaggagggactggtgcacttcacaaaatagatggcatcatggacgcggtgcagtatgtggatatattgaagcaacatctcaagacatcagtcaggaagttaaagcttggtcgcaaatgggttttccaacacgacaatgaccccaagcatacttccaaagttgtggcaaaatggcttaaggacaacaaagtcaaggtattggagtggccatcacaaagccctgacctcaatcctatagaaaatttgtgggcagaactgaaaaagcgtgtgcgagcaaggaggcctacaaacctgactcagttacaccagctctgtcaggaggaatgggccaaaattcacccaaattattgtgggaagcttgtggaaggctacccgaaacgtttgacccaagttaaacaatttaaaggcaatgctaccaaatactaggggccctaaccgcgggaataaaagatctttattttcattagatctgtgtgttggttttttgtgtgaattcttgagtgtatgtaaacttctgacccactgggaatgtgatgaaagaaataaaagctgaaatgaatcattctctctactattattctgatatttcacattcttaaaataaagtggtgatcctaactgacctaagacagggaatttttactaggattaaatgtcaggaattgtgaaaaagtgagtttaaatgtatttggctaaggtgtatgtaaacttccgacttcaactgtataggcatgcggtaaccacgtgcggaccgagcggccgcaggaacccctagtgatggagttggccactccctctctgcgcgctcgctcgctcactgaggccgggcgaccaaaggtcgcccgacgcccgggctttgcccgggcggcctcagtgagcgagcgagcgcgcagctgcctgcaggggcgcctgatgcggtattttctccttacgcatctgtgcggtatttcacaccgcatacgtcaaagcaaccatagtacgcgccctgtagcggcgcattaagcgcggcgggtgtggtggttacgcgcagcgtgaccgctacacttgccagcgccctagcgcccgctcctttcgctttcttcccttcctttctcgccacgttcgccggctttccccgtcaagctctaaatcgggggctccctttagggttccgatttagtgctttacggcacctcgaccccaaaaaacttgatttgggtgatggttcacgtagtgggccatcgccctgatagacggtttttcgccctttgacgttggagtccacgttctttaatagtggactcttgttccaaactggaacaacactcaaccctatctcgggctattcttttgatttataagggattttgccgatttcggcctattggttaaaaaatgagctgatttaacaaaaatttaacgcgaattttaacaaaatattaacgtttacaattttatggtgcactctcagtacaatctgctctgatgccgcatagttaagccagccccgacacccgccaacacccgctgacgcgccctgacgggcttgtctgctcccggcatccgcttacagacaagctgtgaccgtctccgggagctgcatgtgtcagaggttttcaccgtcatcaccgaaacgcgcgagacgaaagggcctcgtgatacgcctatttttataggttaatgtcatgataataatggtttcttagacgtcaggtggcacttttcggggaaatgtgcgcggaacccctatttgtttatttttctaaatacattcaaatatgtatccgctcatgagacaataaccctgataaatgcttcaataatattgaaaaaggaagagtatgagtattcaacatttccgtgtcgcccttattcccttttttgcggcattttgccttcctgtttttgctcacccagaaacgctggtgaaagtaaaagatgctgaagatcagttgggtgcacgagtgggttacatcgaactggatctcaacagcggtaagatccttgagagttttcgccccgaagaacgttttccaatgatgagcacttttaaagttctgctatgtggcgcggtattatcccgtattgacgccgggcaagagcaactcggtcgccgcatacactattctcagaatgacttggttgagtactcaccagtcacagaaaagcatcttacggatggcatgacagtaagagaattatgcagtgctgccataaccatgagtgataacactgcggccaacttacttctgacaacgatcggaggaccgaaggagctaaccgcttttttgcacaacatgggggatcatgtaactcgccttgatcgttgggaaccggagctgaatgaagccataccaaacgacgagcgtgacaccacgatgcctgtagcaatggcaacaacgttgcgcaaactattaactggcgaactacttactctagcttcccggcaacaattaatagactggatggaggcggataaagttgcaggaccacttctgcgctcggcccttccggctggctggtttattgctgataaatctggagccggtgagcgtgggtctcgcggtatcattgcagcactggggccagatggtaagccctcccgtatcgtagttatctacacgacggggagtcaggcaactatggatgaacgaaatagacagatcgctgagataggtgcctcactgattaagcattggtaactgtcagaccaagtttactcatatatactttagattgatttaaaacttcatttttaatttaaaaggatctaggtgaagatcctttttgataatctcatgaccaaaatcccttaacgtgagttttcgttccactgagcgtcagaccccgtagaaaagatcaaaggatcttcttgagatcctttttttctgcgcgtaatctgctgcttgcaaacaaaaaaaccaccgctaccagcggtggtttgtttgccggatcaagagctaccaactctttttccgaaggtaactggcttcagcagagcgcagataccaaatactgtccttctagtgtagccgtagttaggccaccacttcaagaactctgtagcaccgcctacatacctcgctctgctaatcctgttaccagtggctgctgccagtggcgataagtcgtgtcttaccgggttggactcaagacgatagttaccggataaggcgcagcggtcgggctgaacggggggttcgtgcacacagcccagcttggagcgaacgacctacaccgaactgagatacctacagcgtgagctatgagaaagcgccacgcttcccgaagggagaaaggcggacaggtatccggtaagcggcagggtcggaacaggagagcgcacgagggagcttccagggggaaacgcctggtatctttatagtcctgtcgggtttcgccacctctgacttgagcgtcgatttttgtgatgctcgtcaggggggcggagcctatggaaaaacgccagcaacgcggcctttttacggttcctggccttttgctggccttttgctcacatgt

SEQ ID NO: 129219 - DNA, 3274 bp, Artificial Sequence
  pSC026b_pAAV-U6sgbbSapI-XD011bb
  vector
cctgcaggcagctgcgcgctcgctcgctcactgaggccgcccgggcaaagcccgggcgtcgggcgacctttggtcgcccggcctcagtgagcgagcgagcgcgcagagagggagtggccaactccatcactaggggttcctgcggccgcacgcgttctagaagagggcctatttcccatgattccttcatatttgcatatacgatacaaggctgttagagagataattggaattaatttgactgtaaacacaaagatattagtacaaaatacgtgacgtagaaagtaataatttcttgggtagtttgcagttttaaaattatgttttaaaatggactatcatatgcttaccgtaacttgaaagtatttcgatttcttggctttatatatcttgtggaaaggacgaaacaccggaagagcgagctcttctgttttagagctagaaatagcaagttaaaataaggctagtccgttatcaacttgaaaaagtggcaccgagtcggtgcttttttggtaccgtgcggaccgagcggccgcaggaacccctagtgatggagttggccactccctctctgcgcgctcgctcgctcactgaggccgggcgaccaaaggtcgcccgacgcccgggctttgcccgggcggcctcagtgagcgagcgagcgcgcagctgcctgcaggggcgcctgatgcggtattttctccttacgcatctgtgcggtatttcacaccgcatacgtcaaagcaaccatagtacgcgccctgtagcggcgcattaagcgcggcgggtgtggtggttacgcgcagcgtgaccgctacacttgccagcgccctagcgcccgctcctttcgctttcttcccttcctttctcgccacgttcgccggctttccccgtcaagctctaaatcgggggctccctttagggttccgatttagtgctttacggcacctcgaccccaaaaaacttgatttgggtgatggttcacgtagtgggccatcgccctgatagacggtttttcgccctttgacgttggagtccacgttctttaatagtggactcttgttccaaactggaacaacactcaaccctatctcgggctattcttttgatttataagggattttgccgatttcggcctattggttaaaaaatgagctgatttaacaaaaatttaacgcgaattttaacaaaatattaacgtttacaattttatggtgcactctcagtacaatctgctctgatgccgcatagttaagccagccccgacacccgccaacacccgctgacgcgccctgacgggcttgtctgctcccggcatccgcttacagacaagctgtgaccgtctccgggagctgcatgtgtcagaggttttcaccgtcatcaccgaaacgcgcgagacgaaagggcctcgtgatacgcctatttttataggttaatgtcatgataataatggtttcttagacgtcaggtggcacttttcggggaaatgtgcgcggaacccctatttgtttatttttctaaatacattcaaatatgtatccgctcatgagacaataaccctgataaatgcttcaataatattgaaaaaggaagagtatgagtattcaacatttccgtgtcgcccttattcccttttttgcggcattttgccttcctgtttttgctcacccagaaacgctggtgaaagtaaaagatgctgaagatcagttgggtgcacgagtgggttacatcgaactggatctcaacagcggtaagatccttgagagttttcgccccgaagaacgttttccaatgatgagcacttttaaagttctgctatgtggcgcggtattatcccgtattgacgccgggcaagagcaactcggtcgccgcatacactattctcagaatgacttggttgagtactcaccagtcacagaaaagcatcttacggatggcatgacagtaagagaattatgcagtgctgccataaccatgagtgataacactgcggccaacttacttctgacaacgatcggaggaccgaaggagctaaccgcttttttgcacaacatgggggatcatgtaactcgccttgatcgttgggaaccggagctgaatgaagccataccaaacgacgagcgtgacaccacgatgcctgtagcaatggcaacaacgttgcgcaaactattaactggcgaactacttactctagcttcccggcaacaattaatagactggatggaggcggataaagttgcaggaccacttctgcgctcggcccttccggctggctggtttattgctgataaatctggagccggtgagcgtgggtctcgcggtatcattgcagcactggggccagatggtaagccctcccgtatcgtagttatctacacgacggggagtcaggcaactatggatgaacgaaatagacagatcgctgagataggtgcctcactgattaagcattggtaactgtcagaccaagtttactcatatatactttagattgatttaaaacttcatttttaatttaaaaggatctaggtgaagatcctttttgataatctcatgaccaaaatcccttaacgtgagttttcgttccactgagcgtcagaccccgtagaaaagatcaaaggatcttcttgagatcctttttttctgcgcgtaatctgctgcttgcaaacaaaaaaaccaccgctaccagcggtggtttgtttgccggatcaagagctaccaactctttttccgaaggtaactggcttcagcagagcgcagataccaaatactgtccttctagtgtagccgtagttaggccaccacttcaagaactctgtagcaccgcctacatacctcgctctgctaatcctgttaccagtggctgctgccagtggcgataagtcgtgtcttaccgggttggactcaagacgatagttaccggataaggcgcagcggtcgggctgaacggggggttcgtgcacacagcccagcttggagcgaacgacctacaccgaactgagatacctacagcgtgagctatgagaaagcgccacgcttcccgaagggagaaaggcggacaggtatccggtaagcggcagggtcggaacaggagagcgcacgagggagcttccagggggaaacgcctggtatctttatagtcctgtcgggtttcgccacctctgacttgagcgtcgatttttgtgatgctcgtcaggggggcggagcctatggaaaaacgccagcaacgcggcctttttacggttcctggccttttgctggccttttgctcacatgt

SEQ ID NO: 129220 - DNA, 4128 bp, Artificial Sequence
  pSC025d_pAAV-U6sgbbSapI-EFS-Thy1
  vector
cctgcaggcagctgcgcgctcgctcgctcactgaggccgcccgggcaaagcccgggcgtcgggcgacctttggtcgcccggcctcagtgagcgagcgagcgcgcagagagggagtggccaactccatcactaggggttcctgcggccgcacgcgttctagaagagggcctatttcccatgattccttcatatttgcatatacgatacaaggctgttagagagataattggaattaatttgactgtaaacacaaagatattagtacaaaatacgtgacgtagaaagtaataatttcttgggtagtttgcagttttaaaattatgttttaaaatggactatcatatgcttaccgtaacttgaaagtatttcgatttcttggctttatatatcttgtggaaaggacgaaacaccggaagagcgagctcttctgttttagagctagaaatagcaagttaaaataaggctagtccgttatcaacttgaaaaagtggcaccgagtcggtgcttttttggtacctaggtcttgaaaggagtgggaattggctccggtgcccgtcagtgggcagagcgcacatcgcccacagtccccgagaagttggggggaggggtcggcaattgatccggtgcctagagaaggtggcgcggggtaaactgggaaagtgatgtcgtgtactggctccgcctttttcccgagggtgggggagaaccgtatataagtgcagtagtcgccgtgaacgttctttttcgcaacgggtttgccgccagaacacaggcaccggttctagacgtacggccaccatgaacccagccatcagcgtcgctctcctgctctcagtcttgcaggtgtcccgagggcagaaggtgaccagcctgacagcctgcctggtgaaccaaaaccttcgcctggactgccgccatgagaataacaccaaggataactccatccagcatgagttcagcctgacccgagagaagaggaagcacgtgctctcaggcacccttgggatacccgagcacacgtaccgctcccgcgtcaccctctccaaccagccctatatcaaggtccttaccctagccaacttcaccaccaaggatgagggcgactacttttgtgagcttcgcgtaagtggcgcgaatcccatgagctccaataaaagtatcagtgtgtatagagacaagctggtcaagtgtggcggcataagcctgctggttcagaacacatcctggatgctgctgctgctgctttccctctccctcctccaagccctggacttcatttctctgtgaagcgcttaagaattcgatatcaagcttaataaaagatctttattttcattagatctgtgtgttggttttttgtgtggtaaccacgtgcggaccgagcggccgcaggaacccctagtgatggagttggccactccctctctgcgcgctcgctcgctcactgaggccgggcgaccaaaggtcgcccgacgcccgggctttgcccgggcggcctcagtgagcgagcgagcgcgcagctgcctgcaggggcgcctgatgcggtattttctccttacgcatctgtgcggtatttcacaccgcatacgtcaaagcaaccatagtacgcgccctgtagcggcgcattaagcgcggcgggtgtggtggttacgcgcagcgtgaccgctacacttgccagcgccctagcgcccgctcctttcgctttcttcccttcctttctcgccacgttcgccggctttccccgtcaagctctaaatcgggggctccctttagggttccgatttagtgctttacggcacctcgaccccaaaaaacttgatttgggtgatggttcacgtagtgggccatcgccctgatagacggtttttcgccctttgacgttggagtccacgttctttaatagtggactcttgttccaaactggaacaacactcaaccctatctcgggctattcttttgatttataagggattttgccgatttcggcctattggttaaaaaatgagctgatttaacaaaaatttaacgcgaattttaacaaaatattaacgtttacaattttatggtgcactctcagtacaatctgctctgatgccgcatagttaagccagccccgacacccgccaacacccgctgacgcgccctgacgggcttgtctgctcccggcatccgcttacagacaagctgtgaccgtctccgggagctgcatgtgtcagaggttttcaccgtcatcaccgaaacgcgcgagacgaaagggcctcgtgatacgcctatttttataggttaatgtcatgataataatggtttcttagacgtcaggtggcacttttcggggaaatgtgcgcggaacccctatttgtttatttttctaaatacattcaaatatgtatccgctcatgagacaataaccctgataaatgcttcaataatattgaaaaaggaagagtatgagtattcaacatttccgtgtcgcccttattcccttttttgcggcattttgccttcctgtttttgctcacccagaaacgctggtgaaagtaaaagatgctgaagatcagttgggtgcacgagtgggttacatcgaactggatctcaacagcggtaagatccttgagagttttcgccccgaagaacgttttccaatgatgagcacttttaaagttctgctatgtggcgcggtattatcccgtattgacgccgggcaagagcaactcggtcgccgcatacactattctcagaatgacttggttgagtactcaccagtcacagaaaagcatcttacggatggcatgacagtaagagaattatgcagtgctgccataaccatgagtgataacactgcggccaacttacttctgacaacgatcggaggaccgaaggagctaaccgcttttttgcacaacatgggggatcatgtaactcgccttgatcgttgggaaccggagctgaatgaagccataccaaacgacgagcgtgacaccacgatgcctgtagcaatggcaacaacgttgcgcaaactattaactggcgaactacttactctagcttcccggcaacaattaatagactggatggaggcggataaagttgcaggaccacttctgcgctcggcccttccggctggctggtttattgctgataaatctggagccggtgagcgtgggtctcgcggtatcattgcagcactggggccagatggtaagccctcccgtatcgtagttatctacacgacggggagtcaggcaactatggatgaacgaaatagacagatcgctgagataggtgcctcactgattaagcattggtaactgtcagaccaagtttactcatatatactttagattgatttaaaacttcatttttaatttaaaaggatctaggtgaagatcctttttgataatctcatgaccaaaatcccttaacgtgagttttcgttccactgagcgtcagaccccgtagaaaagatcaaaggatcttcttgagatcctttttttctgcgcgtaatctgctgcttgcaaacaaaaaaaccaccgctaccagcggtggtttgtttgccggatcaagagctaccaactctttttccgaaggtaactggcttcagcagagcgcagataccaaatactgtccttctagtgtagccgtagttaggccaccacttcaagaactctgtagcaccgcctacatacctcgctctgctaatcctgttaccagtggctgctgccagtggcgataagtcgtgtcttaccgggttggactcaagacgatagttaccggataaggcgcagcggtcgggctgaacggggggttcgtgcacacagcccagcttggagcgaacgacctacaccgaactgagatacctacagcgtgagctatgagaaagcgccacgcttcccgaagggagaaaggcggacaggtatccggtaagcggcagggtcggaacaggagagcgcacgagggagcttccagggggaaacgcctggtatctttatagtcctgtcgggtttcgccacctctgacttgagcgtcgatttttgtgatgctcgtcaggggggcggagcctatggaaaaacgccagcaacgcggcctttttacggttcctggccttttgctggccttttgctcacatgt

SEQ ID NO: 129221 - DNA, 4397 bp, Artificial Sequence
  pSC031_pAAV-U6sgbbSapI-EFS-GFP-NLS
  vector
cctgcaggcagctgcgcgctcgctcgctcactgaggccgcccgggcaaagcccgggcgtcgggcgacctttggtcgcccggcctcagtgagcgagcgagcgcgcagagagggagtggccaactccatcactaggggttcctgcggccgcacgcgttctagaagagggcctatttcccatgattccttcatatttgcatatacgatacaaggctgttagagagataattggaattaatttgactgtaaacacaaagatattagtacaaaatacgtgacgtagaaagtaataatttcttgggtagtttgcagttttaaaattatgttttaaaatggactatcatatgcttaccgtaacttgaaagtatttcgatttcttggctttatatatcttgtggaaaggacgaaacaccggaagagcgagctcttctgttttagagctagaaatagcaagttaaaataaggctagtccgttatcaacttgaaaaagtggcaccgagtcggtgcttttttggtacctaggtcttgaaaggagtgggaattggctccggtgcccgtcagtgggcagagcgcacatcgcccacagtccccgagaagttggggggaggggtcggcaattgatccggtgcctagagaaggtggcgcggggtaaactgggaaagtgatgtcgtgtactggctccgcctttttcccgagggtgggggagaaccgtatataagtgcagtagtcgccgtgaacgttctttttcgcaacgggtttgccgccagaacacaggaccggttctagacgtacggccaccatggtgagcaagggcgaggagctgttcaccggggtggtgcccatcctggtcgagctggacggcgacgtaaacggccacaagttcagcgtgtccggcgagggcgagggcgatgccacctacggcaagctgaccctgaagttcatctgcaccaccggcaagctgcccgtgccctggcccaccctcgtgaccaccctgacctacggcgtgcagtgcttcagccgctaccccgaccacatgaagcagcacgacttcttcaagtccgccatgcccgaaggctacgtccaggagcgcaccatcttcttcaaggacgacggcaactacaagacccgcgccgaggtgaagttcgagggcgacaccctggtgaaccgcatcgagctgaagggcatcgacttcaaggaggacggcaacatcctggggcacaagctggagtacaactacaacagccacaacgtctatatcatggccgacaagcagaagaacggcatcaaggtgaacttcaagatccgccacaacatcgaggacggcagcgtgcagctcgccgaccactaccagcagaacacccccatcggcgacggccccgtgctgctgcccgacaaccactacctgagcacccagtccgccctgagcaaagaccccaacgagaagcgcgatcacatggtcctgctggagttcgtgaccgccgccgggatcactctcggcatggacgagctgtacaagaagcgtcctgctgctactaagaaagctggtcaagctaagaaaaagaaataagaattcgatatcaagcttaataaaagatctttattttcattagatctgtgtgttggttttttgtgtggtaaccacgtgcggaccgagcggccgcaggaacccctagtgatggagttggccactccctctctgcgcgctcgctcgctcactgaggccgggcgaccaaaggtcgcccgacgcccgggctttgcccgggcggcctcagtgagcgagcgagcgcgcagctgcctgcaggggcgcctgatgcggtattttctccttacgcatctgtgcggtatttcacaccgcatacgtcaaagcaaccatagtacgcgccctgtagcggcgcattaagcgcggcgggtgtggtggttacgcgcagcgtgaccgctacacttgccagcgccctagcgcccgctcctttcgctttcttcccttcctttctcgccacgttcgccggctttccccgtcaagctctaaatcgggggctccctttagggttccgatttagtgctttacggcacctcgaccccaaaaaacttgatttgggtgatggttcacgtagtgggccatcgccctgatagacggtttttcgccctttgacgttggagtccacgttctttaatagtggactcttgttccaaactggaacaacactcaaccctatctcgggctattcttttgatttataagggattttgccgatttcggcctattggttaaaaaatgagctgatttaacaaaaatttaacgcgaattttaacaaaatattaacgtttacaattttatggtgcactctcagtacaatctgctctgatgccgcatagttaagccagccccgacacccgccaacacccgctgacgcgccctgacgggcttgtctgctcccggcatccgcttacagacaagctgtgaccgtctccgggagctgcatgtgtcagaggttttcaccgtcatcaccgaaacgcgcgagacgaaagggcctcgtgatacgcctatttttataggttaatgtcatgataataatggtttcttagacgtcaggtggcacttttcggggaaatgtgcgcggaacccctatttgtttatttttctaaatacattcaaatatgtatccgctcatgagacaataaccctgataaatgcttcaataatattgaaaaaggaagagtatgagtattcaacatttccgtgtcgcccttattcccttttttgcggcattttgccttcctgtttttgctcacccagaaacgctggtgaaagtaaaagatgctgaagatcagttgggtgcacgagtgggttacatcgaactggatctcaacagcggtaagatccttgagagttttcgccccgaagaacgttttccaatgatgagcacttttaaagttctgctatgtggcgcggtattatcccgtattgacgccgggcaagagcaactcggtcgccgcatacactattctcagaatgacttggttgagtactcaccagtcacagaaaagcatcttacggatggcatgacagtaagagaattatgcagtgctgccataaccatgagtgataacactgcggccaacttacttctgacaacgatcggaggaccgaaggagctaaccgcttttttgcacaacatgggggatcatgtaactcgccttgatcgttgggaaccggagctgaatgaagccataccaaacgacgagcgtgacaccacgatgcctgtagcaatggcaacaacgttgcgcaaactattaactggcgaactacttactctagcttcccggcaacaattaatagactggatggaggcggataaagttgcaggaccacttctgcgctcggcccttccggctggctggtttattgctgataaatctggagccggtgagcgtgggtctcgcggtatcattgcagcactggggccagatggtaagccctcccgtatcgtagttatctacacgacggggagtcaggcaactatggatgaacgaaatagacagatcgctgagataggtgcctcactgattaagcattggtaactgtcagaccaagtttactcatatatactttagattgatttaaaacttcatttttaatttaaaaggatctaggtgaagatcctttttgataatctcatgaccaaaatcccttaacgtgagttttcgttccactgagcgtcagaccccgtagaaaagatcaaaggatcttcttgagatcctttttttctgcgcgtaatctgctgcttgcaaacaaaaaaaccaccgctaccagcggtggtttgtttgccggatcaagagctaccaactctttttccgaaggtaactggcttcagcagagcgcagataccaaatactgtccttctagtgtagccgtagttaggccaccacttcaagaactctgtagcaccgcctacatacctcgctctgctaatcctgttaccagtggctgctgccagtggcgataagtcgtgtcttaccgggttggactcaagacgatagttaccggataaggcgcagcggtcgggctgaacggggggttcgtgcacacagcccagcttggagcgaacgacctacaccgaactgagatacctacagcgtgagctatgagaaagcgccacgcttcccgaagggagaaaggcggacaggtatccggtaagcggcagggtcggaacaggagagcgcacgagggagcttccagggggaaacgcctggtatctttatagtcctgtcgggtttcgccacctctgacttgagcgtcgatttttgtgatgctcgtcaggggggcggagcctatggaaaaacgccagcaacgcggcctttttacggttcctggccttttgctggccttttgctcacatgt

SEQ ID NO: 129222 - DNA, 20 bp, Artificial Sequence
  mmSKRIPTE0000001_Msh2_1
  gRNA
tatccagattcgtcttacga

SEQ ID NO: 129223 - DNA, 20 bp, Artificial Sequence
  mmSKRIPTE0000002_Msh2_2
  gRNA
agaaatacgaaggtatcgtg

SEQ ID NO: 129224 - DNA, 20 bp, Artificial Sequence
  mmSKRIPTE0000003_Msh2_3
  gRNA
cggtagactcccacccaccg

SEQ ID NO: 129225 - DNA, 20 bp, Artificial Sequence
  mmSKRIPTE0000004_Msh2_4
  gRNA
ccttaataaatgcagcccgg

SEQ ID NO: 129226 - DNA, 20 bp, Artificial Sequence
  mmSKRIPTE0000005_Msh2_5
  gRNA
aacatacattcgtcagaccg

SEQ ID NO: 129227 - DNA, 20 bp, Artificial Sequence
  mmSKRIPTE0000006_Msh2_6
  gRNA
cgcccaggtttccggcaacg

SEQ ID NO: 129228 - DNA, 20 bp, Artificial Sequence
  mmSKRIPTE0000007_Msh2_7
  gRNA
gcgccgtgtaaaagtcgccg

SEQ ID NO: 129229 - DNA, 20 bp, Artificial Sequence
  mmSKRIPTE0000008_Msh2_8
  gRNA
tataccgctcactaaaggtg

SEQ ID NO: 129230 - DNA, 20 bp, Artificial Sequence
  mmSKRIPTE0000009_Msh2_9
  gRNA
acgtcgacatatattacttg

SEQ ID NO: 129231 - DNA, 20 bp, Artificial Sequence
  mmSKRIPTE0000010_Flot1_1
  gRNA
tctatctctactacggccgc

SEQ ID NO: 129232 - DNA, 20 bp, Artificial Sequence
  mmSKRIPTE0000011_Flot1_2
  gRNA
caccagtgggatacacaacg

SEQ ID NO: 129233 - DNA, 20 bp, Artificial Sequence
  mmSKRIPTE0000012_Flot1_3
  gRNA
gtgccctctacagatgcgag

SEQ ID NO: 129234 - DNA, 20 bp, Artificial Sequence
  mmSKRIPTE0000013_Flot1_4
  gRNA
tggcctgagcggtctcattg

SEQ ID NO: 129235 - DNA, 20 bp, Artificial Sequence
  mmSKRIPTE0000014_Flot1_5
  gRNA
caaagctctcccgcgcccag

SEQ ID NO: 129236 - DNA, 20 bp, Artificial Sequence
  mmSKRIPTE0000015_Flot1_6
  gRNA
tgtagtgctgcggacccgag

SEQ ID NO: 129237 - DNA, 20 bp, Artificial Sequence
  mmSKRIPTE0000016_Flot1_7
  gRNA
tataaggcaggaccgtagcg

SEQ ID NO: 129238 - DNA, 20 bp, Artificial Sequence
  mmSKRIPTE0000017_Flot1_8
  gRNA
acgacatcgaggtcaacacc

SEQ ID NO: 129239 - DNA, 20 bp, Artificial Sequence
  mmSKRIPTE0000018_Flot1_9
  gRNA
ctcagccaataagatcacgc

SEQ ID NO: 129240 - DNA, 20 bp, Artificial Sequence
  mmSKRIPTE0000019_Smad6_1
  gRNA
ttgcgcaacaatcagcgccg

SEQ ID NO: 129241 - DNA, 20 bp, Artificial Sequence
  mmSKRIPTE0000020_Smad6_2
  gRNA
caaacctcgctgggaccgcg

SEQ ID NO: 129242 - DNA, 20 bp, Artificial Sequence
  mmSKRIPTE0000021_Smad6_3
  gRNA
ttctcctcaaacgcacactg

SEQ ID NO: 129243 - DNA, 20 bp, Artificial Sequence
  mmSKRIPTE0000022_Smad6_4
  gRNA
ggaggcagccaatgactccg

SEQ ID NO: 129244 - DNA, 20 bp, Artificial Sequence
  mmSKRIPTE0000023_Smad6_5
  gRNA
tagacactttggcggctccg

SEQ ID NO: 129245 - DNA, 20 bp, Artificial Sequence
  mmSKRIPTE0000024_Smad6_6
  gRNA
aagcgacccagcgcagcgtg

SEQ ID NO: 129246 - DNA, 20 bp, Artificial Sequence
  mmSKRIPTE0000025_Smad6_7
  gRNA
aatgcaatccaccgaagcag

SEQ ID NO: 129247 - DNA, 20 bp, Artificial Sequence
  mmSKRIPTE0000026_Smad6_8
  gRNA
ggcaagtctctcctgaacgc

SEQ ID NO: 129248 - DNA, 20 bp, Artificial Sequence
  mmSKRIPTE0000027_Smad6_9
  gRNA
agtccagagaaagagccgcc

SEQ ID NO: 129249 - DNA, 20 bp, Artificial Sequence
  mmSKRIPTE0000028_Tbk1_1
  gRNA
aaccgactgtggttaaaccg

SEQ ID NO: 129250 - DNA, 20 bp, Artificial Sequence
  mmSKRIPTE0000029_Tbk1_2
  gRNA
tctaaacggcagcgaccccg

SEQ ID NO: 129251 - DNA, 20 bp, Artificial Sequence
  mmSKRIPTE0000030_Tbk1_3
  gRNA
cacaaatccaaggagtcgtg

SEQ ID NO: 129252 - DNA, 20 bp, Artificial Sequence
  mmSKRIPTE0000031_Tbk1_4
  gRNA
gtatcaagactatactaacg

SEQ ID NO: 129253 - DNA, 20 bp, Artificial Sequence
  mmSKRIPTE0000032_Tbk1_5
  gRNA
gtcctacttcaagctaaccg

SEQ ID NO: 129254 - DNA, 20 bp, Artificial Sequence
  mmSKRIPTE0000033_Tbk1_6
  gRNA
gagcttaattggtaacaatg

SEQ ID NO: 129255 - DNA, 20 bp, Artificial Sequence
  mmSKRIPTE0000034_Tbk1_7
  gRNA
gcactcggtcacgtgctccg

SEQ ID NO: 129256 - DNA, 20 bp, Artificial Sequence
  mmSKRIPTE0000035_Tbk1_8
  gRNA
taattcttgatagagcagca

SEQ ID NO: 129257 - DNA, 20 bp, Artificial Sequence
  mmSKRIPTE0000036_Tbk1_9
  gRNA
cgggaacaactcaataccgt

SEQ ID NO: 129258 - DNA, 20 bp, Artificial Sequence
  mmSKRIPTE0000037_Tbx1_1
  gRNA
aagttggtgtaagctaaccg

SEQ ID NO: 129259 - DNA, 20 bp, Artificial Sequence
  mmSKRIPTE0000038_Tbx1_2
  gRNA
tctccgccgtgtctagtccg

SEQ ID NO: 129260 - DNA, 20 bp, Artificial Sequence
  mmSKRIPTE0000039_Tbx1_3
  gRNA
cgcctacgaccactacctcg

SEQ ID NO: 129261 - DNA, 20 bp, Artificial Sequence
  mmSKRIPTE0000040_Tbx1_4
  gRNA
acactaccacccggactcgc

SEQ ID NO: 129262 - DNA, 20 bp, Artificial Sequence
  mmSKRIPTE0000041_Tbx1_5
  gRNA
gtggatcagctccagccacg

SEQ ID NO: 129263 - DNA, 20 bp, Artificial Sequence
  mmSKRIPTE0000042_Tbx1_6
  gRNA
tctaattcgaatgggccggg

SEQ ID NO: 129264 - DNA, 20 bp, Artificial Sequence
  mmSKRIPTE0000043_Tbx1_7
  gRNA
tctgaagcactgacgcccgg

SEQ ID NO: 129265 - DNA, 20 bp, Artificial Sequence
  mmSKRIPTE0000044_Tbx1_8
  gRNA
gcgtccttggatggccctcg

SEQ ID NO: 129266 - DNA, 20 bp, Artificial Sequence
  mmSKRIPTE0000045_Tbx1_9
  gRNA
gcagcgcacggatcgtagcg

SEQ ID NO: 129267 - DNA, 20 bp, Artificial Sequence
  mmSKRIPTE0000046_Ptpn2_1
  gRNA
tggttgccgacatggcggcg

SEQ ID NO: 129268 - DNA, 20 bp, Artificial Sequence
  mmSKRIPTE0000047_Ptpn2_2
  gRNA
tctacggaaacgtattcgag

SEQ ID NO: 129269 - DNA, 20 bp, Artificial Sequence
  mmSKRIPTE0000048_Ptpn2_3
  gRNA
cgcgagcggaactaccacag

SEQ ID NO: 129270 - DNA, 20 bp, Artificial Sequence
  mmSKRIPTE0000049_Ptpn2_4
  gRNA
gttgagccaagccggccttg

SEQ ID NO: 129271 - DNA, 20 bp, Artificial Sequence
  mmSKRIPTE0000050_Ptpn2_5
  gRNA
ccgtggtgcattaatctcaa

SEQ ID NO: 129272 - DNA, 20 bp, Artificial Sequence
  mmSKRIPTE0000051_Ptpn2_6
  gRNA
tccacgacgtccgacccacg

SEQ ID NO: 129273 - DNA, 20 bp, Artificial Sequence
  mmSKRIPTE0000052_Ptpn2_7
  gRNA
cgctctccccggatagagcg

SEQ ID NO: 129274 - DNA, 20 bp, Artificial Sequence
  mmSKRIPTE0000053_Ptpn2_8
  gRNA
tgcgggtagtcactacactc

SEQ ID NO: 129275 - DNA, 20 bp, Artificial Sequence
  mmSKRIPTE0000054_Ptpn2_9
  gRNA
atagctagccccagagtttg

SEQ ID NO: 129276 - DNA, 20 bp, Artificial Sequence
  mmSKRIPTE0000055_Cd74_1
  gRNA
tgacccaggagactacccgc

SEQ ID NO: 129277 - DNA, 20 bp, Artificial Sequence
  mmSKRIPTE0000056_Cd74_2
  gRNA
taacattcacgacacccctg

SEQ ID NO: 129278 - DNA, 20 bp, Artificial Sequence
  mmSKRIPTE0000057_Cd74_3
  gRNA
tccccagtccatgtacgtag

SEQ ID NO: 129279 - DNA, 20 bp, Artificial Sequence
  mmSKRIPTE0000058_Cd74_4
  gRNA
aacccttatatcctatccgt

SEQ ID NO: 129280 - DNA, 20 bp, Artificial Sequence
  mmSKRIPTE0000059_Cd74_5
  gRNA
gtactacctgagcttagcag

SEQ ID NO: 129281 - DNA, 20 bp, Artificial Sequence
  mmSKRIPTE0000060_Cd74_6
  gRNA
ttaccgttctcgtcgcactt

SEQ ID NO: 129282 - DNA, 20 bp, Artificial Sequence
  mmSKRIPTE0000061_Cd74_7
  gRNA
ggtccctcccagtatacatg

SEQ ID NO: 129283 - DNA, 20 bp, Artificial Sequence
  mmSKRIPTE0000062_Cd74_8
  gRNA
ctcaaaccctcccaatagtg

SEQ ID NO: 129284 - DNA, 20 bp, Artificial Sequence
  mmSKRIPTE0000063_Cd74_9
  gRNA
ggatgccctacccttaacct

SEQ ID NO: 129285 - DNA, 20 bp, Artificial Sequence
  mmSKRIPTE0000064_Fkbp1a_1
  gRNA
aagaacgagccctcacagcg

SEQ ID NO: 129286 - DNA, 20 bp, Artificial Sequence
  mmSKRIPTE0000065_Fkbp1a_2
  gRNA
ttattactgcggcgtctccg

SEQ ID NO: 129287 - DNA, 20 bp, Artificial Sequence
  mmSKRIPTE0000066_Fkbp1a_3
  gRNA
aaagcgcggccagacctgcg

SEQ ID NO: 129288 - DNA, 20 bp, Artificial Sequence
  mmSKRIPTE0000067_Fkbp1a_4
  gRNA
accccatgtcccgttcggcg

SEQ ID NO: 129289 - DNA, 20 bp, Artificial Sequence
  mmSKRIPTE0000068_Fkbp1a_5
  gRNA
cgtccgccctgaacggtgtg

SEQ ID NO: 129290 - DNA, 20 bp, Artificial Sequence
  mmSKRIPTE0000069_Fkbp1a_6
  gRNA
actatgcctatggagccacc

SEQ ID NO: 129291 - DNA, 20 bp, Artificial Sequence
  mmSKRIPTE0000070_Fkbp1a_7
  gRNA
gcgctcacatccctgaagcg

SEQ ID NO: 129292 - DNA, 20 bp, Artificial Sequence
  mmSKRIPTE0000071_Fkbp1a_8
  gRNA
gggggcattaggcgtaactc

SEQ ID NO: 129293 - DNA, 20 bp, Artificial Sequence
  mmSKRIPTE0000072_Fkbp1a_9
  gRNA
acaataatgacttcgcaagt

SEQ ID NO: 129294 - DNA, 20 bp, Artificial Sequence
  mmSKRIPTE0000073_Tgfb2_1
  gRNA
gtaattattagacggcacga

SEQ ID NO: 129295 - DNA, 20 bp, Artificial Sequence
  mmSKRIPTE0000074_Tgfb2_2
  gRNA
cggctccggatagtcttccg

SEQ ID NO: 129296 - DNA, 20 bp, Artificial Sequence
  mmSKRIPTE0000075_Tgfb2_3
  gRNA
tctccgagtgagccgctccg

SEQ ID NO: 129297 - DNA, 20 bp, Artificial Sequence
  mmSKRIPTE0000076_Tgfb2_4
  gRNA
aacgaagcgatcaggacccg

SEQ ID NO: 129298 - DNA, 20 bp, Artificial Sequence
  mmSKRIPTE0000077_Tgfb2_5
  gRNA
atacagttcaatccgctgct

SEQ ID NO: 129299 - DNA, 20 bp, Artificial Sequence
  mmSKRIPTE0000078_Tgfb2_6
  gRNA
cgcctacgtggatcaccctg

SEQ ID NO: 129300 - DNA, 20 bp, Artificial Sequence
  mmSKRIPTE0000079_Tgfb2_7
  gRNA
agttcaaagaccgagcggct

SEQ ID NO: 129301 - DNA, 20 bp, Artificial Sequence
  mmSKRIPTE0000080_Tgfb2_8
  gRNA
atgactcagaataacacgag

SEQ ID NO: 129302 - DNA, 20 bp, Artificial Sequence
  mmSKRIPTE0000081_Tgfb2_9
  gRNA
aaacaggaaaatccgttcag

SEQ ID NO: 129303 - DNA, 20 bp, Artificial Sequence
  mmSKRIPTE0000082_Fyn_1
  gRNA
cggtgacggtgacggcactg

SEQ ID NO: 129304 - DNA, 20 bp, Artificial Sequence
  mmSKRIPTE0000083_Fyn_2
  gRNA
gtggatactatatcacaacg

SEQ ID NO: 129305 - DNA, 20 bp, Artificial Sequence
  mmSKRIPTE0000084_Fyn_3
  gRNA
caactggtacagcattactc

SEQ ID NO: 129306 - DNA, 20 bp, Artificial Sequence
  mmSKRIPTE0000085_Fyn_4
  gRNA
gtcacggagtacatgagcaa

SEQ ID NO: 129307 - DNA, 20 bp, Artificial Sequence
  mmSKRIPTE0000086_Fyn_5
  gRNA
ttccacactagatgacgagt

SEQ ID NO: 129308 - DNA, 20 bp, Artificial Sequence
  mmSKRIPTE0000087_Fyn_6
  gRNA
cctcacatatggccaacacg

SEQ ID NO: 129309 - DNA, 20 bp, Artificial Sequence
  mmSKRIPTE0000088_Fyn_7
  gRNA
ttgaacagctcgtaagtttg

SEQ ID NO: 129310 - DNA, 20 bp, Artificial Sequence
  mmSKRIPTE0000089_Fyn_8
  gRNA
catgtgcgtcgaatctcctg

SEQ ID NO: 129311 - DNA, 20 bp, Artificial Sequence
  mmSKRIPTE0000090_Fyn_9
  gRNA
aataggctatcacagcacga

SEQ ID NO: 129312 - DNA, 20 bp, Artificial Sequence
  mmSKRIPTE0000091_Itgb3_1
  gRNA
gtctcattaagtcccccggt

SEQ ID NO: 129313 - DNA, 20 bp, Artificial Sequence
  mmSKRIPTE0000092_Itgb3_2
  gRNA
cgatacaggcttgtccacga

SEQ ID NO: 129314 - DNA, 20 bp, Artificial Sequence
  mmSKRIPTE0000093_Itgb3_3
  gRNA
atgaggcccgatcactctag

SEQ ID NO: 129315 - DNA, 20 bp, Artificial Sequence
  mmSKRIPTE0000094_Itgb3_4
  gRNA
gccctgggtaccctaaatcg

SEQ ID NO: 129316 - DNA, 20 bp, Artificial Sequence
  mmSKRIPTE0000095_Itgb3_5
  gRNA
tcaagattggagacacggtg

SEQ ID NO: 129317 - DNA, 20 bp, Artificial Sequence
  mmSKRIPTE0000096_Itgb3_6
  gRNA
ttctccttcaggttacatcg

SEQ ID NO: 129318 - DNA, 20 bp, Artificial Sequence
  mmSKRIPTE0000097_Itgb3_7
  gRNA
ccgtaatcgagatgccccag

SEQ ID NO: 129319 - DNA, 20 bp, Artificial Sequence
  mmSKRIPTE0000098_Itgb3_8
  gRNA
gcggtctcctctagtgaacg

SEQ ID NO: 129320 - DNA, 20 bp, Artificial Sequence
  mmSKRIPTE0000099_Itgb3_9
  gRNA
ctcctgcgtccgctacaaag

SEQ ID NO: 129321 - DNA, 20 bp, Artificial Sequence
  mmSKRIPTE0000100_Bad_1
  gRNA
gccacagttcgtacccagcg

SEQ ID NO: 129322 - DNA, 20 bp, Artificial Sequence
  mmSKRIPTE0000101_Bad_2
  gRNA
tgcgtgcaatagccacggag

SEQ ID NO: 129323 - DNA, 20 bp, Artificial Sequence
  mmSKRIPTE0000102_Bad_3
  gRNA
agggatagagatccggattg

SEQ ID NO: 129324 - DNA, 20 bp, Artificial Sequence
  mmSKRIPTE0000103_Bad_4
  gRNA
tttcgaagtaaatcccgggt

SEQ ID NO: 129325 - DNA, 20 bp, Artificial Sequence
  mmSKRIPTE0000104_Bad_5
  gRNA
cgggcgcccttagaactgga

SEQ ID NO: 129326 - DNA, 20 bp, Artificial Sequence
  mmSKRIPTE0000105_Bad_6
  gRNA
gaaggcataaaccgggactg

SEQ ID NO: 129327 - DNA, 20 bp, Artificial Sequence
  mmSKRIPTE0000106_Bad_7
  gRNA
gaggaagaagaggcaacccg

SEQ ID NO: 129328 - DNA, 20 bp, Artificial Sequence
  mmSKRIPTE0000107_Bad_8
  gRNA
cccgacatgccctagatcaa

SEQ ID NO: 129329 - DNA, 20 bp, Artificial Sequence
  mmSKRIPTE0000108_Bad_9
  gRNA
tttggggagttgagctaccg

SEQ ID NO: 129330 - DNA, 20 bp, Artificial Sequence
  mmSKRIPTE0000109_Adam8_1
  gRNA
gaactgttacaatcaccccg

SEQ ID NO: 129331 - DNA, 20 bp, Artificial Sequence
  mmSKRIPTE0000110_Adam8_2
  gRNA
gctttatcttcctagcggtg

SEQ ID NO: 129332 - DNA, 20 bp, Artificial Sequence
  mmSKRIPTE0000111_Adam8_3
  gRNA
gtctgcaggatcaaccggtg

SEQ ID NO: 129333 - DNA, 20 bp, Artificial Sequence
  mmSKRIPTE0000112_Adam8_4
  gRNA
gagcactcggaagctctccg

SEQ ID NO: 129334 - DNA, 20 bp, Artificial Sequence
  mmSKRIPTE0000113_Adam8_5
  gRNA
aggcatcgtcatctaccgaa

SEQ ID NO: 129335 - DNA, 20 bp, Artificial Sequence
  mmSKRIPTE0000114_Adam8_6
  gRNA
ctacctagaagttacttcgg

SEQ ID NO: 129336 - DNA, 20 bp, Artificial Sequence
  mmSKRIPTE0000115_Adam8_7
  gRNA
ctccaaacgtccacaaacga

SEQ ID NO: 129337 - DNA, 20 bp, Artificial Sequence
  mmSKRIPTE0000116_Adam8_8
  gRNA
tggccaatcactggaccgcg

SEQ ID NO: 129338 - DNA, 20 bp, Artificial Sequence
  mmSKRIPTE0000117_Adam8_9
  gRNA
gtgcaacttatcacgtgagt

SEQ ID NO: 129339 - DNA, 20 bp, Artificial Sequence
  mmSKRIPTE0000118_Psen1_1
  gRNA
agtcagcttctatacccgga

SEQ ID NO: 129340 - DNA, 20 bp, Artificial Sequence
  mmSKRIPTE0000119_Psen1_2
  gRNA
gggtggcctctcgatcagag

SEQ ID NO: 129341 - DNA, 20 bp, Artificial Sequence
  mmSKRIPTE0000120_Psen1_3
  gRNA
tacgcctgctgcagtcgaag

SEQ ID NO: 129342 - DNA, 20 bp, Artificial Sequence
  mmSKRIPTE0000121_Psen1_4
  gRNA
ccacccgcactactggactg

SEQ ID NO: 129343 - DNA, 20 bp, Artificial Sequence
  mmSKRIPTE0000122_Psen1_5
  gRNA
atactccgccctctggaacg

SEQ ID NO: 129344 - DNA, 20 bp, Artificial Sequence
  mmSKRIPTE0000123_Psen1_6
  gRNA
actgtccaggaggttccgtg

SEQ ID NO: 129345 - DNA, 20 bp, Artificial Sequence
  mmSKRIPTE0000124_Psen1_7
  gRNA
gaggataacaacaagctacg

SEQ ID NO: 129346 - DNA, 20 bp, Artificial Sequence
  mmSKRIPTE0000125_Psen1_8
  gRNA
gtgtaagtggatatacgcag

SEQ ID NO: 129347 - DNA, 20 bp, Artificial Sequence
  mmSKRIPTE0000126_Psen1_9
  gRNA
gcattctggaagtaggacaa

SEQ ID NO: 129348 - DNA, 20 bp, Artificial Sequence
  mmSKRIPTE0000127_Gata3_1
  gRNA
ctgagtagcaaggagcgtag

SEQ ID NO: 129349 - DNA, 20 bp, Artificial Sequence
  mmSKRIPTE0000128_Gata3_2
  gRNA
ctactacggaaactccgtca

SEQ ID NO: 129350 - DNA, 20 bp, Artificial Sequence
  mmSKRIPTE0000129_Gata3_3
  gRNA
gcgccaaggtggactcaccg

SEQ ID NO: 129351 - DNA, 20 bp, Artificial Sequence
  mmSKRIPTE0000130_Gata3_4
  gRNA
caaacatacgctaatctccg

SEQ ID NO: 129352 - DNA, 20 bp, Artificial Sequence
  mmSKRIPTE0000131_Gata3_5
  gRNA
gtaccatctcgccgccacag

SEQ ID NO: 129353 - DNA, 20 bp, Artificial Sequence
  mmSKRIPTE0000132_Gata3_6
  gRNA
acacgcacgcgaagacccgg

SEQ ID NO: 129354 - DNA, 20 bp, Artificial Sequence
  mmSKRIPTE0000133_Gata3_7
  gRNA
tccaagacgtccatccacca

SEQ ID NO: 129355 - DNA, 20 bp, Artificial Sequence
  mmSKRIPTE0000134_Gata3_8
  gRNA
aaggaaagcgtgtgaaaacg

SEQ ID NO: 129356 - DNA, 20 bp, Artificial Sequence
  mmSKRIPTE0000135_Gata3_9
  gRNA
ctcgccaactctaagacgaa

SEQ ID NO: 129357 - DNA, 20 bp, Artificial Sequence
  mmSKRIPTE0000136_Asxl2_1
  gRNA
gtacagtagtgacggccgcg

SEQ ID NO: 129358 - DNA, 20 bp, Artificial Sequence
  mmSKRIPTE0000137_Asxl2_2
  gRNA
tcgtgcgcaagggctcgatg

SEQ ID NO: 129359 - DNA, 20 bp, Artificial Sequence
  mmSKRIPTE0000138_Asxl2_3
  gRNA
tggcgattctcagtgatacg

SEQ ID NO: 129360 - DNA, 20 bp, Artificial Sequence
  mmSKRIPTE0000139_Asxl2_4
  gRNA
atgctgcacacaaactcccg

SEQ ID NO: 129361 - DNA, 20 bp, Artificial Sequence
  mmSKRIPTE0000140_Asxl2_5
  gRNA
gtgcgtgcgtacaaaaaccc

SEQ ID NO: 129362 - DNA, 20 bp, Artificial Sequence
  mmSKRIPTE0000141_Asxl2_6
  gRNA
tggcaggcatccgcaccatg

SEQ ID NO: 129363 - DNA, 20 bp, Artificial Sequence
  mmSKRIPTE0000142_Asxl2_7
  gRNA
acgtttaatacacataactg

SEQ ID NO: 129364 - DNA, 20 bp, Artificial Sequence
  mmSKRIPTE0000143_Asxl2_8
  gRNA
tcctgatgacaatagtatcg

SEQ ID NO: 129365 - DNA, 20 bp, Artificial Sequence
  mmSKRIPTE0000144_Asxl2_9
  gRNA
agtcagtcagaaccgacatg

SEQ ID NO: 129366 - DNA, 20 bp, Artificial Sequence
  mmSKRIPTE0000145_Otulin_1
  gRNA
acgcttacggaagcgctctg

SEQ ID NO: 129367 - DNA, 20 bp, Artificial Sequence
  mmSKRIPTE0000146_Otulin_2
  gRNA
acttccataaggcgagtccg

SEQ ID NO: 129368 - DNA, 20 bp, Artificial Sequence
  mmSKRIPTE0000147_Otulin_3
  gRNA
cggcagactaaagagacgcg

SEQ ID NO: 129369 - DNA, 20 bp, Artificial Sequence
  mmSKRIPTE0000148_Otulin_4
  gRNA
atggttccccgactcatccg

SEQ ID NO: 129370 - DNA, 20 bp, Artificial Sequence
  mmSKRIPTE0000149_Otulin_5
  gRNA
actttggtgtgatttcagcg

SEQ ID NO: 129371 - DNA, 20 bp, Artificial Sequence
  mmSKRIPTE0000150_Otulin_6
  gRNA
ggtagccgacctgaaaccga

SEQ ID NO: 129372 - DNA, 20 bp, Artificial Sequence
  mmSKRIPTE0000151_Otulin_7
  gRNA
acgcccgcgttcatgaaatg

SEQ ID NO: 129373 - DNA, 20 bp, Artificial Sequence
  mmSKRIPTE0000152_Otulin_8
  gRNA
acttggctgaaatagacgta

SEQ ID NO: 129374 - DNA, 20 bp, Artificial Sequence
  mmSKRIPTE0000153_Otulin_9
  gRNA
gctgcaggtcaaaggtcgcg

SEQ ID NO: 129375 - DNA, 20 bp, Artificial Sequence
  mmSKRIPTE0000154_Fbn1_1
  gRNA
ttaatggcactgattgcgcg

SEQ ID NO: 129376 - DNA, 20 bp, Artificial Sequence
  mmSKRIPTE0000155_Fbn1_2
  gRNA
acacggtacttggcgccgcg

SEQ ID NO: 129377 - DNA, 20 bp, Artificial Sequence
  mmSKRIPTE0000156_Fbn1_3
  gRNA
tgattgtagtcacgacaacg

SEQ ID NO: 129378 - DNA, 20 bp, Artificial Sequence
  mmSKRIPTE0000157_Fbn1_4
  gRNA
gaattacccagcatcccgcg

SEQ ID NO: 129379 - DNA, 20 bp, Artificial Sequence
  mmSKRIPTE0000158_Fbn1_5
  gRNA
tgcgcggacgatacttgaag

SEQ ID NO: 129380 - DNA, 20 bp, Artificial Sequence
  mmSKRIPTE0000159_Fbn1_6
  gRNA
ttggaccgtgcacacacgat

SEQ ID NO: 129381 - DNA, 20 bp, Artificial Sequence
  mmSKRIPTE0000160_Fbn1_7
  gRNA
gtcatgaatcctcggccgtg

SEQ ID NO: 129382 - DNA, 20 bp, Artificial Sequence
  mmSKRIPTE0000161_Fbn1_8
  gRNA
cgcgtggcgcagttactcgg

SEQ ID NO: 129383 - DNA, 20 bp, Artificial Sequence
  mmSKRIPTE0000162_Fbn1_9
  gRNA
gaagagtgtttgtgttaacg

SEQ ID NO: 129384 - DNA, 20 bp, Artificial Sequence
  mmSKRIPTE0000163_Foxo3_1
  gRNA
ctgtgttggagcctagtccg

SEQ ID NO: 129385 - DNA, 20 bp, Artificial Sequence
  mmSKRIPTE0000164_Foxo3_2
  gRNA
cagtcggggagagacgcgat

SEQ ID NO: 129386 - DNA, 20 bp, Artificial Sequence
  mmSKRIPTE0000165_Foxo3_3
  gRNA
ctcaacctaggatgacggcg

SEQ ID NO: 129387 - DNA, 20 bp, Artificial Sequence
  mmSKRIPTE0000166_Foxo3_4
  gRNA
atagatttggaatcctcact

SEQ ID NO: 129388 - DNA, 20 bp, Artificial Sequence
  mmSKRIPTE0000167_Foxo3_5
  gRNA
attcgctcgcgtctcccggg

SEQ ID NO: 129389 - DNA, 20 bp, Artificial Sequence
  mmSKRIPTE0000168_Foxo3_6
  gRNA
tcaccaactcgacgacacaa

SEQ ID NO: 129390 - DNA, 20 bp, Artificial Sequence
  mmSKRIPTE0000169_Foxo3_7
  gRNA
tttcatagagagtctccgga

SEQ ID NO: 129391 - DNA, 20 bp, Artificial Sequence
  mmSKRIPTE0000170_Foxo3_8
  gRNA
caggagcgtggccgactctg

SEQ ID NO: 129392 - DNA, 20 bp, Artificial Sequence
  mmSKRIPTE0000171_Foxo3_9
  gRNA
ggcgccggagctttgcaacg

SEQ ID NO: 129393 - DNA, 20 bp, Artificial Sequence
  mmSKRIPTE0000172_Myh9_1
  gRNA
catcgtacagaacgtcagtg

SEQ ID NO: 129394 - DNA, 20 bp, Artificial Sequence
  mmSKRIPTE0000173_Myh9_2
  gRNA
ggggagggtaacactactag

SEQ ID NO: 129395 - DNA, 20 bp, Artificial Sequence
  mmSKRIPTE0000174_Myh9_3
  gRNA
actacacgagctgaaccacg

SEQ ID NO: 129396 - DNA, 20 bp, Artificial Sequence
  mmSKRIPTE0000175_Myh9_4
  gRNA
gctggtactcacgaatcgag

SEQ ID NO: 129397 - DNA, 20 bp, Artificial Sequence
  mmSKRIPTE0000176_Myh9_5
  gRNA
cagcctaggaacgacatccg

SEQ ID NO: 129398 - DNA, 20 bp, Artificial Sequence
  mmSKRIPTE0000177_Myh9_6
  gRNA
cctcatgggtacccacggaa

SEQ ID NO: 129399 - DNA, 20 bp, Artificial Sequence
  mmSKRIPTE0000178_Myh9_7
  gRNA
actcgccgaattgttcggaa

SEQ ID NO: 129400 - DNA, 20 bp, Artificial Sequence
  mmSKRIPTE0000179_Myh9_8
  gRNA
atgagtttatcaattacaca

SEQ ID NO: 129401 - DNA, 20 bp, Artificial Sequence
  mmSKRIPTE0000180_Myh9_9
  gRNA
attcgcttaattacgctgca

SEQ ID NO: 129402 - DNA, 20 bp, Artificial Sequence
  mmSKRIPTE0000181_Dock7_1
  gRNA
gttgtgattagaatcgccaa

SEQ ID NO: 129403 - DNA, 20 bp, Artificial Sequence
  mmSKRIPTE0000182_Dock7_2
  gRNA
taagtgtattaaaagccgcc

SEQ ID NO: 129404 - DNA, 20 bp, Artificial Sequence
  mmSKRIPTE0000183_Dock7_3
  gRNA
ctcatgttaccgttgacgtg

SEQ ID NO: 129405 - DNA, 20 bp, Artificial Sequence
  mmSKRIPTE0000184_Dock7_4
  gRNA
tgttaacaacacaggactcg

SEQ ID NO: 129406 - DNA, 20 bp, Artificial Sequence
  mmSKRIPTE0000185_Dock7_5
  gRNA
ttgatgctaaatcgacccct

SEQ ID NO: 129407 - DNA, 20 bp, Artificial Sequence
  mmSKRIPTE0000186_Dock7_6
  gRNA
ttgctggcgatgtcgtgtcg

SEQ ID NO: 129408 - DNA, 20 bp, Artificial Sequence
  mmSKRIPTE0000187_Dock7_7
  gRNA
tatccgactggggtttcgag

SEQ ID NO: 129409 - DNA, 20 bp, Artificial Sequence
  mmSKRIPTE0000188_Dock7_8
  gRNA
acggccttctcatatcagcg

SEQ ID NO: 129410 - DNA, 20 bp, Artificial Sequence
  mmSKRIPTE0000189_Dock7_9
  gRNA
cagggtaccgtaatgcgccg

SEQ ID NO: 129411 - DNA, 20 bp, Artificial Sequence
  mmSKRIPTE0000190_Setd1a_1
  gRNA
cggctccaccagttacggca

SEQ ID NO: 129412 - DNA, 20 bp, Artificial Sequence
  mmSKRIPTE0000191_Setd1a_2
  gRNA
gcagcccctgtgtaacacgc

SEQ ID NO: 129413 - DNA, 20 bp, Artificial Sequence
  mmSKRIPTE0000192_Setd1a_3
  gRNA
tgaagtggactccgtcatag

SEQ ID NO: 129414 - DNA, 20 bp, Artificial Sequence
  mmSKRIPTE0000193_Setd1a_4
  gRNA
actcacccgctcgtggcgag

SEQ ID NO: 129415 - DNA, 20 bp, Artificial Sequence
  mmSKRIPTE0000194_Setd1a_5
  gRNA
cttaaacttaggaaccggga

SEQ ID NO: 129416 - DNA, 20 bp, Artificial Sequence
  mmSKRIPTE0000195_Setd1a_6
  gRNA
cggagccgtatccatgagtg

SEQ ID NO: 129417 - DNA, 20 bp, Artificial Sequence
  mmSKRIPTE0000196_Setd1a_7
  gRNA
ttcacaaagtcatagatgtg

SEQ ID NO: 129418 - DNA, 20 bp, Artificial Sequence
  mmSKRIPTE0000197_Setd1a_8
  gRNA
actcttggcccagtctacga

SEQ ID NO: 129419 - DNA, 20 bp, Artificial Sequence
  mmSKRIPTE0000198_Setd1a_9
  gRNA
ggactcaaagtatacccccg

SEQ ID NO: 129420 - DNA, 20 bp, Artificial Sequence
  mmSKRIPTE0000199_Jarid2_1
  gRNA
cgggcacggtaggttcaccg

SEQ ID NO: 129421 - DNA, 20 bp, Artificial Sequence
  mmSKRIPTE0000200_Jarid2_2
  gRNA
tcggctgtcctattgccgcg

SEQ ID NO: 129422 - DNA, 20 bp, Artificial Sequence
  mmSKRIPTE0000201_Jarid2_3
  gRNA
catagcaagcagacactccg

SEQ ID NO: 129423 - DNA, 20 bp, Artificial Sequence
  mmSKRIPTE0000202_Jarid2_4
  gRNA
cagaactcacctcatcgtag

SEQ ID NO: 129424 - DNA, 20 bp, Artificial Sequence
  mmSKRIPTE0000203_Jarid2_5
  gRNA
tccccgcaagagagcgaccg

SEQ ID NO: 129425 - DNA, 20 bp, Artificial Sequence
  mmSKRIPTE0000204_Jarid2_6
  gRNA
ccgtcgacgagaccccggaa

SEQ ID NO: 129426 - DNA, 20 bp, Artificial Sequence
  mmSKRIPTE0000205_Jarid2_7
  gRNA
gcaacagcacagtggcggat

SEQ ID NO: 129427 - DNA, 20 bp, Artificial Sequence
  mmSKRIPTE0000206_Jarid2_8
  gRNA
ctgtacaggaattctgacgg

SEQ ID NO: 129428 - DNA, 20 bp, Artificial Sequence
  mmSKRIPTE0000207_Jarid2_9
  gRNA
ctcgcgaagggggagaaccg

SEQ ID NO: 129429 - DNA, 20 bp, Artificial Sequence
  mmSKRIPTE0000208_Clec4d_1
  gRNA
gagagtaacgtgcatccgag

SEQ ID NO: 129430 - DNA, 20 bp, Artificial Sequence
  mmSKRIPTE0000209_Clec4d_2
  gRNA
caatgtaagtgcttactcag

SEQ ID NO: 129431 - DNA, 20 bp, Artificial Sequence
  mmSKRIPTE0000210_Clec4d_3
  gRNA
tccctcatcttatggcagag

SEQ ID NO: 129432 - DNA, 20 bp, Artificial Sequence
  mmSKRIPTE0000211_Clec4d_4
  gRNA
aaacaacagcgaagacgcaa

SEQ ID NO: 129433 - DNA, 20 bp, Artificial Sequence
  mmSKRIPTE0000212_Clec4d_5
  gRNA
taggctgataaggaggaacg

SEQ ID NO: 129434 - DNA, 20 bp, Artificial Sequence
  mmSKRIPTE0000213_Clec4d_6
  gRNA
acgctggacgagaggaagtg

SEQ ID NO: 129435 - DNA, 20 bp, Artificial Sequence
  mmSKRIPTE0000214_Clec4d_7
  gRNA
gtatattggttggggctaag

SEQ ID NO: 129436 - DNA, 20 bp, Artificial Sequence
  mmSKRIPTE0000215_Clec4d_8
  gRNA
gtgtggggactttaactgtg

SEQ ID NO: 129437 - DNA, 20 bp, Artificial Sequence
  mmSKRIPTE0000216_Clec4d_9
  gRNA
ctcacagtgtaatgtaccag

SEQ ID NO: 129438 - DNA, 20 bp, Artificial Sequence
  mmSKRIPTE0000217_Creb1_1
  gRNA
cttcaaatgcaagaattgcg

SEQ ID NO: 129439 - DNA, 20 bp, Artificial Sequence
  mmSKRIPTE0000218_Creb1_2
  gRNA
caaaatcctctcgtccaccg

SEQ ID NO: 129440 - DNA, 20 bp, Artificial Sequence
  mmSKRIPTE0000219_Creb1_3
  gRNA
cggaggctccatctttaccg

SEQ ID NO: 129441 - DNA, 20 bp, Artificial Sequence
  mmSKRIPTE0000220_Creb1_4
  gRNA
aggttccgccagtagcgcgg

SEQ ID NO: 129442 - DNA, 20 bp, Artificial Sequence
  mmSKRIPTE0000221_Creb1_5
  gRNA
gtgctggaactcattgacgg

SEQ ID NO: 129443 - DNA, 20 bp, Artificial Sequence
  mmSKRIPTE0000222_Creb1_6
  gRNA
gtgaacacattaaccaacga

SEQ ID NO: 129444 - DNA, 20 bp, Artificial Sequence
  mmSKRIPTE0000223_Creb1_7
  gRNA
aatggtagtacccggctgag

SEQ ID NO: 129445 - DNA, 20 bp, Artificial Sequence
  mmSKRIPTE0000224_Creb1_8
  gRNA
cgaacaaagaataatggcgg

SEQ ID NO: 129446 - DNA, 20 bp, Artificial Sequence
  mmSKRIPTE0000225_Creb1_9
  gRNA
gaccaccacagaaaactctg

SEQ ID NO: 129447 - DNA, 20 bp, Artificial Sequence
  mmSKRIPTE0000226_Hk1_1
  gRNA
agaaccgtctacgccaactg

SEQ ID NO: 129448 - DNA, 20 bp, Artificial Sequence
  mmSKRIPTE0000227_Hk1_2
  gRNA
ctgttggtcatcgtagccgc

SEQ ID NO: 129449 - DNA, 20 bp, Artificial Sequence
  mmSKRIPTE0000228_Hk1_3
  gRNA
ctttgtccacgtgatcagta

SEQ ID NO: 129450 - DNA, 20 bp, Artificial Sequence
  mmSKRIPTE0000229_Hk1_4
  gRNA
cacgtttgattgtctcactg

SEQ ID NO: 129451 - DNA, 20 bp, Artificial Sequence
  mmSKRIPTE0000230_Hk1_5
  gRNA
attacattatggaaacggca

SEQ ID NO: 129452 - DNA, 20 bp, Artificial Sequence
  mmSKRIPTE0000231_Hk1_6
  gRNA
gtaatatgccagtagttgcg

SEQ ID NO: 129453 - DNA, 20 bp, Artificial Sequence
  mmSKRIPTE0000232_Hk1_7
  gRNA
ccgacaatccaaaatagacg

SEQ ID NO: 129454 - DNA, 20 bp, Artificial Sequence
  mmSKRIPTE0000233_Hk1_8
  gRNA
ttccccacgtaaggagcgcg

SEQ ID NO: 129455 - DNA, 20 bp, Artificial Sequence
  mmSKRIPTE0000234_Hk1_9
  gRNA
tgccactgccactctccgag

SEQ ID NO: 129456 - DNA, 20 bp, Artificial Sequence
  mmSKRIPTE0000235_Ccl24_1
  gRNA
acgccgtggcaatagcaccg

SEQ ID NO: 129457 - DNA, 20 bp, Artificial Sequence
  mmSKRIPTE0000236_Ccl24_2
  gRNA
ccgagtggttagctaccagt

SEQ ID NO: 129458 - DNA, 20 bp, Artificial Sequence
  mmSKRIPTE0000237_Ccl24_3
  gRNA
gtcagtatccagcctgccgt

SEQ ID NO: 129459 - DNA, 20 bp, Artificial Sequence
  mmSKRIPTE0000238_Ccl24_4
  gRNA
agccacacaagagataacac

SEQ ID NO: 129460 - DNA, 20 bp, Artificial Sequence
  mmSKRIPTE0000239_Ccl24_5
  gRNA
tcctcacccaggaaactagg

SEQ ID NO: 129461 - DNA, 20 bp, Artificial Sequence
  mmSKRIPTE0000240_Ccl24_6
  gRNA
gcccagaagtctcacctatg

SEQ ID NO: 129462 - DNA, 20 bp, Artificial Sequence
  mmSKRIPTE0000241_Ccl24_7
  gRNA
ctccagggtcccgaactcca

SEQ ID NO: 129463 - DNA, 20 bp, Artificial Sequence
  mmSKRIPTE0000242_Ccl24_8
  gRNA
aggatacatgaagccctgcg

SEQ ID NO: 129464 - DNA, 20 bp, Artificial Sequence
  mmSKRIPTE0000243_Ccl24_9
  gRNA
gaaaatcgttgagcattctg

SEQ ID NO: 129465 - DNA, 20 bp, Artificial Sequence
  mmSKRIPTE0000244_Ephb1_1
  gRNA
aggcatcttaccaataagcg

SEQ ID NO: 129466 - DNA, 20 bp, Artificial Sequence
  mmSKRIPTE0000245_Ephb1_2
  gRNA
tactaatcacggcttatacg

SEQ ID NO: 129467 - DNA, 20 bp, Artificial Sequence
  mmSKRIPTE0000246_Ephb1_3
  gRNA
tggcccattctcatacctca

SEQ ID NO: 129468 - DNA, 20 bp, Artificial Sequence
  mmSKRIPTE0000247_Ephb1_4
  gRNA
acaggtatgctccagacccg

SEQ ID NO: 129469 - DNA, 20 bp, Artificial Sequence
  mmSKRIPTE0000248_Ephb1_5
  gRNA
aacccgaaaacatcacgtcg

SEQ ID NO: 129470 - DNA, 20 bp, Artificial Sequence
  mmSKRIPTE0000249_Ephb1_6
  gRNA
tctgaggatgagtgcacccg

SEQ ID NO: 129471 - DNA, 20 bp, Artificial Sequence
  mmSKRIPTE0000250_Ephb1_7
  gRNA
aagtagattcccatacatcg

SEQ ID NO: 129472 - DNA, 20 bp, Artificial Sequence
  mmSKRIPTE0000251_Ephb1_8
  gRNA
aattctacgtggtgccagtg

SEQ ID NO: 129473 - DNA, 20 bp, Artificial Sequence
  mmSKRIPTE0000252_Ephb1_9
  gRNA
gctacagcggagcctacggg

SEQ ID NO: 129474 - DNA, 20 bp, Artificial Sequence
  mmSKRIPTE0000253_Tyro3_1
  gRNA
gtgactcggatagccctccg

SEQ ID NO: 129475 - DNA, 20 bp, Artificial Sequence
  mmSKRIPTE0000254_Tyro3_2
  gRNA
actatagctaagaagcggcg

SEQ ID NO: 129476 - DNA, 20 bp, Artificial Sequence
  mmSKRIPTE0000255_Tyro3_3
  gRNA
acaatcctcaccgctacaag

SEQ ID NO: 129477 - DNA, 20 bp, Artificial Sequence
  mmSKRIPTE0000256_Tyro3_4
  gRNA
tatgctccaccaacgtgaca

SEQ ID NO: 129478 - DNA, 20 bp, Artificial Sequence
  mmSKRIPTE0000257_Tyro3_5
  gRNA
ctttgcccaacatccgaccg

SEQ ID NO: 129479 - DNA, 20 bp, Artificial Sequence
  mmSKRIPTE0000258_Tyro3_6
  gRNA
tcagcagcgaggagtccccg

SEQ ID NO: 129480 - DNA, 20 bp, Artificial Sequence
  mmSKRIPTE0000259_Tyro3_7
  gRNA
taggaggttctatccaaggt

SEQ ID NO: 129481 - DNA, 20 bp, Artificial Sequence
  mmSKRIPTE0000260_Tyro3_8
  gRNA
cttcactgccactttcacga

SEQ ID NO: 129482 - DNA, 20 bp, Artificial Sequence
  mmSKRIPTE0000261_Tyro3_9
  gRNA
ctgagtcggtacgaatggca

SEQ ID NO: 129483 - DNA, 20 bp, Artificial Sequence
  mmSKRIPTE0000262_Kdr_1
  gRNA
caccgtgtactccagcgacg

SEQ ID NO: 129484 - DNA, 20 bp, Artificial Sequence
  mmSKRIPTE0000263_Kdr_2
  gRNA
actaggaacgtgataaccag

SEQ ID NO: 129485 - DNA, 20 bp, Artificial Sequence
  mmSKRIPTE0000264_Kdr_3
  gRNA
ttcacagactgtaagtacgc

SEQ ID NO: 129486 - DNA, 20 bp, Artificial Sequence
  mmSKRIPTE0000265_Kdr_4
  gRNA
tggcaagaagggacgcacga

SEQ ID NO: 129487 - DNA, 20 bp, Artificial Sequence
  mmSKRIPTE0000266_Kdr_5
  gRNA
tgagactataggcaaatacc

SEQ ID NO: 129488 - DNA, 20 bp, Artificial Sequence
  mmSKRIPTE0000267_Kdr_6
  gRNA
gcagtcggtccgtcccagag

SEQ ID NO: 129489 - DNA, 20 bp, Artificial Sequence
  mmSKRIPTE0000268_Kdr_7
  gRNA
aatagtttatctgaccagag

SEQ ID NO: 129490 - DNA, 20 bp, Artificial Sequence
  mmSKRIPTE0000269_Kdr_8
  gRNA
acacaattcagagcgatgtg

SEQ ID NO: 129491 - DNA, 20 bp, Artificial Sequence
  mmSKRIPTE0000270_Kdr_9
  gRNA
aaggctttctcaccgatctg

SEQ ID NO: 129492 - DNA, 20 bp, Artificial Sequence
  mmSKRIPTE0000271_Bmp4_1
  gRNA
caaaggcacaggattgtccg

SEQ ID NO: 129493 - DNA, 20 bp, Artificial Sequence
  mmSKRIPTE0000272_Bmp4_2
  gRNA
cgtcattccggattacatga

SEQ ID NO: 129494 - DNA, 20 bp, Artificial Sequence
  mmSKRIPTE0000273_Bmp4_3
  gRNA
aaagcccagtaaatagacga

SEQ ID NO: 129495 - DNA, 20 bp, Artificial Sequence
  mmSKRIPTE0000274_Bmp4_4
  gRNA
cgtcgctccgaatggcacta

SEQ ID NO: 129496 - DNA, 20 bp, Artificial Sequence
  mmSKRIPTE0000275_Bmp4_5
  gRNA
tccatcacaatgtgacacgg

SEQ ID NO: 129497 - DNA, 20 bp, Artificial Sequence
  mmSKRIPTE0000276_Bmp4_6
  gRNA
cactcccttgaggtaacgat

SEQ ID NO: 129498 - DNA, 20 bp, Artificial Sequence
  mmSKRIPTE0000277_Bmp4_7
  gRNA
tgaaatggaagtccgacggg

SEQ ID NO: 129499 - DNA, 20 bp, Artificial Sequence
  mmSKRIPTE0000278_Bmp4_8
  gRNA
gccgagattcagggccacgc

SEQ ID NO: 129500 - DNA, 20 bp, Artificial Sequence
  mmSKRIPTE0000279_Bmp4_9
  gRNA
tgggtccacgtgactcctag

SEQ ID NO: 129501 - DNA, 20 bp, Artificial Sequence
  mmSKRIPTE0000280_Vav1_1
  gRNA
caggtcgtgcctagtcagag

SEQ ID NO: 129502 - DNA, 20 bp, Artificial Sequence
  mmSKRIPTE0000281_Vav1_2
  gRNA
tgactgtaactgtcgccccg

SEQ ID NO: 129503 - DNA, 20 bp, Artificial Sequence
  mmSKRIPTE0000282_Vav1_3
  gRNA
tgaggtcgtaagagtccccg

SEQ ID NO: 129504 - DNA, 20 bp, Artificial Sequence
  mmSKRIPTE0000283_Vav1_4
  gRNA
gtaccatcagcagatcccgt

SEQ ID NO: 129505 - DNA, 20 bp, Artificial Sequence
  mmSKRIPTE0000284_Vav1_5
  gRNA
gggaggaacccacgtcaaag

SEQ ID NO: 129506 - DNA, 20 bp, Artificial Sequence
  mmSKRIPTE0000285_Vav1_6
  gRNA
cttctggtaagggctgctat

SEQ ID NO: 129507 - DNA, 20 bp, Artificial Sequence
  mmSKRIPTE0000286_Vav1_7
  gRNA
gagacctgtccgctctagtg

SEQ ID NO: 129508 - DNA, 20 bp, Artificial Sequence
  mmSKRIPTE0000287_Vav1_8
  gRNA
cggcggtggtgaaggaacga

SEQ ID NO: 129509 - DNA, 20 bp, Artificial Sequence
  mmSKRIPTE0000288_Vav1_9
  gRNA
gggcccgactggataaaggc

SEQ ID NO: 129510 - DNA, 20 bp, Artificial Sequence
  mmSKRIPTE0000289_L3mbtl3_1
  gRNA
gctgggataccagcgacagt

SEQ ID NO: 129511 - DNA, 20 bp, Artificial Sequence
  mmSKRIPTE0000290_L3mbtl3_2
  gRNA
agataacaacatagtcagcg

SEQ ID NO: 129512 - DNA, 20 bp, Artificial Sequence
  mmSKRIPTE0000291_L3mbtl3_3
  gRNA
ccacccgtttggtcggagcg

SEQ ID NO: 129513 - DNA, 20 bp, Artificial Sequence
  mmSKRIPTE0000292_L3mbtl3_4
  gRNA
agttggcaccactaaccgat

SEQ ID NO: 129514 - DNA, 20 bp, Artificial Sequence
  mmSKRIPTE0000293_L3mbtl3_5
  gRNA
tctccagatattcaccccgt

SEQ ID NO: 129515 - DNA, 20 bp, Artificial Sequence
  mmSKRIPTE0000294_L3mbtl3_6
  gRNA
aggcaaacttgagagcggcg

SEQ ID NO: 129516 - DNA, 20 bp, Artificial Sequence
  mmSKRIPTE0000295_L3mbtl3_7
  gRNA
aggcactacatctaatgcag

SEQ ID NO: 129517 - DNA, 20 bp, Artificial Sequence
  mmSKRIPTE0000296_L3mbtl3_8
  gRNA
ggaagtctgatgacgcacga

SEQ ID NO: 129518 - DNA, 20 bp, Artificial Sequence
  mmSKRIPTE0000297_L3mbtl3_9
  gRNA
agtttaccttcgtgtccccg

SEQ ID NO: 129519 - DNA, 20 bp, Artificial Sequence
  mmSKRIPTE0000298_Map4k2_1
  gRNA
ttgaggcctaggcgtcatcg

SEQ ID NO: 129520 - DNA, 20 bp, Artificial Sequence
  mmSKRIPTE0000299_Map4k2_2
  gRNA
atcctctcaatgaaccggtg

SEQ ID NO: 129521 - DNA, 20 bp, Artificial Sequence
  mmSKRIPTE0000300_Map4k2_3
  gRNA
ggaacgtactgccggtatag

SEQ ID NO: 129522 - DNA, 20 bp, Artificial Sequence
  mmSKRIPTE0000301_Map4k2_4
  gRNA
gtcatgcgcccagatatgtg

SEQ ID NO: 129523 - DNA, 20 bp, Artificial Sequence
  mmSKRIPTE0000302_Map4k2_5
  gRNA
tgacggtgtcacgggcctag

SEQ ID NO: 129524 - DNA, 20 bp, Artificial Sequence
  mmSKRIPTE0000303_Map4k2_6
  gRNA
agctaagagataagacgcgt

SEQ ID NO: 129525 - DNA, 20 bp, Artificial Sequence
  mmSKRIPTE0000304_Map4k2_7
  gRNA
agcatcagcttacactcgag

SEQ ID NO: 129526 - DNA, 20 bp, Artificial Sequence
  mmSKRIPTE0000305_Map4k2_8
  gRNA
tgggttcaccctgtgactcg

SEQ ID NO: 129527 - DNA, 20 bp, Artificial Sequence
  mmSKRIPTE0000306_Map4k2_9
  gRNA
ccgaagcctcgataccaacg

SEQ ID NO: 129528 - DNA, 20 bp, Artificial Sequence
  mmSKRIPTE0000307_Il16_1
  gRNA
tggtgcagaatcaatcggca

SEQ ID NO: 129529 - DNA, 20 bp, Artificial Sequence
  mmSKRIPTE0000308_Il16_2
  gRNA
tcagcaaggagataaccgac

SEQ ID NO: 129530 - DNA, 20 bp, Artificial Sequence
  mmSKRIPTE0000309_Il16_3
  gRNA
cagggttaggtctttccgag

SEQ ID NO: 129531 - DNA, 20 bp, Artificial Sequence
  mmSKRIPTE0000310_Il16_4
  gRNA
ggtatccaactaacccccag

SEQ ID NO: 129532 - DNA, 20 bp, Artificial Sequence
  mmSKRIPTE0000311_Il16_5
  gRNA
tgtcatcttagctgacccag

SEQ ID NO: 129533 - DNA, 20 bp, Artificial Sequence
  mmSKRIPTE0000312_Il16_6
  gRNA
acacaatccgaggatactca

SEQ ID NO: 129534 - DNA, 20 bp, Artificial Sequence
  mmSKRIPTE0000313_Il16_7
  gRNA
acagcttagtgataataccc

SEQ ID NO: 129535 - DNA, 20 bp, Artificial Sequence
  mmSKRIPTE0000314_Il16_8
  gRNA
gtttgctgcatagtcgcaag

SEQ ID NO: 129536 - DNA, 20 bp, Artificial Sequence
  mmSKRIPTE0000315_Il16_9
  gRNA
ggactatgaaagccacccca

SEQ ID NO: 129537 - DNA, 20 bp, Artificial Sequence
  mmSKRIPTE0000316_Eomes_1
  gRNA
tactcgctggagagtgctcg

SEQ ID NO: 129538 - DNA, 20 bp, Artificial Sequence
  mmSKRIPTE0000317_Eomes_2
  gRNA
ggcgtgacaagccaccgctg

SEQ ID NO: 129539 - DNA, 20 bp, Artificial Sequence
  mmSKRIPTE0000318_Eomes_3
  gRNA
gctgtccatggagtagcgcg

SEQ ID NO: 129540 - DNA, 20 bp, Artificial Sequence
  mmSKRIPTE0000319_Eomes_4
  gRNA
tacccacctgcggacctgcg

SEQ ID NO: 129541 - DNA, 20 bp, Artificial Sequence
  mmSKRIPTE0000320_Eomes_5
  gRNA
ccgttataatatcgggcttg

SEQ ID NO: 129542 - DNA, 20 bp, Artificial Sequence
  mmSKRIPTE0000321_Eomes_6
  gRNA
gaacgccgtaccgacctcca

SEQ ID NO: 129543 - DNA, 20 bp, Artificial Sequence
  mmSKRIPTE0000322_Eomes_7
  gRNA
ctcaccccaacagagcgaag

SEQ ID NO: 129544 - DNA, 20 bp, Artificial Sequence
  mmSKRIPTE0000323_Eomes_8
  gRNA
ctgagcctgagagtcaagcg

SEQ ID NO: 129545 - DNA, 20 bp, Artificial Sequence
  mmSKRIPTE0000324_Eomes_9
  gRNA
gactgcaacactatcatctg

SEQ ID NO: 129546 - DNA, 20 bp, Artificial Sequence
  mmSKRIPTE0000325_Thbs1_1
  gRNA
ttaccaagcgtattgcagag

SEQ ID NO: 129547 - DNA, 20 bp, Artificial Sequence
  mmSKRIPTE0000326_Thbs1_2
  gRNA
cggggctcagtaacccggag

SEQ ID NO: 129548 - DNA, 20 bp, Artificial Sequence
  mmSKRIPTE0000327_Thbs1_3
  gRNA
gtcacaccgaataggctcga

SEQ ID NO: 129549 - DNA, 20 bp, Artificial Sequence
  mmSKRIPTE0000328_Thbs1_4
  gRNA
gcattaaactcatcataacc

SEQ ID NO: 129550 - DNA, 20 bp, Artificial Sequence
  mmSKRIPTE0000329_Thbs1_5
  gRNA
gacatgaaatacgagtgtcg

SEQ ID NO: 129551 - DNA, 20 bp, Artificial Sequence
  mmSKRIPTE0000330_Thbs1_6
  gRNA
caggttgtcatcacaccacg

SEQ ID NO: 129552 - DNA, 20 bp, Artificial Sequence
  mmSKRIPTE0000331_Thbs1_7
  gRNA
gcaactctcccttctagacg

SEQ ID NO: 129553 - DNA, 20 bp, Artificial Sequence
  mmSKRIPTE0000332_Thbs1_8
  gRNA
cggccatcacctaaggtcaa

SEQ ID NO: 129554 - DNA, 20 bp, Artificial Sequence
  mmSKRIPTE0000333_Thbs1_9
  gRNA
taacccagaacccgaagggt

SEQ ID NO: 129555 - DNA, 20 bp, Artificial Sequence
  mmSKRIPTE0000334_Ltf_1
  gRNA
ttactacacgagtaactccg

SEQ ID NO: 129556 - DNA, 20 bp, Artificial Sequence
  mmSKRIPTE0000335_Ltf_2
  gRNA
tcttagcacgatactcaacg

SEQ ID NO: 129557 - DNA, 20 bp, Artificial Sequence
  mmSKRIPTE0000336_Ltf_3
  gRNA
tctgctgcattgatataccg

SEQ ID NO: 129558 - DNA, 20 bp, Artificial Sequence
  mmSKRIPTE0000337_Ltf_4
  gRNA
gcattgtcgcaatcatggta

SEQ ID NO: 129559 - DNA, 20 bp, Artificial Sequence
  mmSKRIPTE0000338_Ltf_5
  gRNA
atagccacaacacagtcacg

SEQ ID NO: 129560 - DNA, 20 bp, Artificial Sequence
  mmSKRIPTE0000339_Ltf_6
  gRNA
gccccggactcactactatg

SEQ ID NO: 129561 - DNA, 20 bp, Artificial Sequence
  mmSKRIPTE0000340_Ltf_7
  gRNA
tgtgcacccatggttccatg

SEQ ID NO: 129562 - DNA, 20 bp, Artificial Sequence
  mmSKRIPTE0000341_Ltf_8
  gRNA
agctaacactccaacccgag

SEQ ID NO: 129563 - DNA, 20 bp, Artificial Sequence
  mmSKRIPTE0000342_Ltf_9
  gRNA
atgaggtgtccccgaccatg

SEQ ID NO: 129564 - DNA, 20 bp, Artificial Sequence
  mmSKRIPTE0000343_Prkch_1
  gRNA
aggtcgacactaagacggca

SEQ ID NO: 129565 - DNA, 20 bp, Artificial Sequence
  mmSKRIPTE0000344_Prkch_2
  gRNA
acgattctaggtcggaaagg

SEQ ID NO: 129566 - DNA, 20 bp, Artificial Sequence
  mmSKRIPTE0000345_Prkch_3
  gRNA
cacctgtcatactcatagtg

SEQ ID NO: 129567 - DNA, 20 bp, Artificial Sequence
  mmSKRIPTE0000346_Prkch_4
  gRNA
ccgtgctcgtttctacgccg

SEQ ID NO: 129568 - DNA, 20 bp, Artificial Sequence
  mmSKRIPTE0000347_Prkch_5
  gRNA
cggtcctaaacaaaacgtgt

SEQ ID NO: 129569 - DNA, 20 bp, Artificial Sequence
  mmSKRIPTE0000348_Prkch_6
  gRNA
actgttgacgcgacagccgt

SEQ ID NO: 129570 - DNA, 20 bp, Artificial Sequence
  mmSKRIPTE0000349_Prkch_7
  gRNA
ctggttctcagctcaccgag

SEQ ID NO: 129571 - DNA, 20 bp, Artificial Sequence
  mmSKRIPTE0000350_Prkch_8
  gRNA
agttcatggccacgtacctg

SEQ ID NO: 129572 - DNA, 20 bp, Artificial Sequence
  mmSKRIPTE0000351_Prkch_9
  gRNA
agaaagaggagatattagtg

SEQ ID NO: 129573 - DNA, 20 bp, Artificial Sequence
  mmSKRIPTE0000352_Tlr9_1
  gRNA
tataaccagaacttctgccg

SEQ ID NO: 129574 - DNA, 20 bp, Artificial Sequence
  mmSKRIPTE0000353_Tlr9_2
  gRNA
tgtcagacaatcgcatcagt

SEQ ID NO: 129575 - DNA, 20 bp, Artificial Sequence
  mmSKRIPTE0000354_Tlr9_3
  gRNA
cagctcgttatacacccagt

SEQ ID NO: 129576 - DNA, 20 bp, Artificial Sequence
  mmSKRIPTE0000355_Tlr9_4
  gRNA
tagatcactacaagatagag

SEQ ID NO: 129577 - DNA, 20 bp, Artificial Sequence
  mmSKRIPTE0000356_Tlr9_5
  gRNA
ctccaacagtaagtctacga

SEQ ID NO: 129578 - DNA, 20 bp, Artificial Sequence
  mmSKRIPTE0000357_Tlr9_6
  gRNA
ccacaacattctcaagacgg

SEQ ID NO: 129579 - DNA, 20 bp, Artificial Sequence
  mmSKRIPTE0000358_Tlr9_7
  gRNA
aagataggtagttgtctcgg

SEQ ID NO: 129580 - DNA, 20 bp, Artificial Sequence
  mmSKRIPTE0000359_Tlr9_8
  gRNA
gatgctgccgcagagaaacg

SEQ ID NO: 129581 - DNA, 20 bp, Artificial Sequence
  mmSKRIPTE0000360_Tlr9_9
  gRNA
attgcgcacttgccaaatag

SEQ ID NO: 129582 - DNA, 20 bp, Artificial Sequence
  mmSKRIPTE0000361_Fnip1_1
  gRNA
tattcagtaaccgaacacgt

SEQ ID NO: 129583 - DNA, 20 bp, Artificial Sequence
  mmSKRIPTE0000362_Fnip1_2
  gRNA
aagctcttcagcaagcggag

SEQ ID NO: 129584 - DNA, 20 bp, Artificial Sequence
  mmSKRIPTE0000363_Fnip1_3
  gRNA
gcactcctgatcaggcggag

SEQ ID NO: 129585 - DNA, 20 bp, Artificial Sequence
  mmSKRIPTE0000364_Fnip1_4
  gRNA
aaaattcatcagatccggtg

SEQ ID NO: 129586 - DNA, 20 bp, Artificial Sequence
  mmSKRIPTE0000365_Fnip1_5
  gRNA
tggcgacgagccgtatcacg

SEQ ID NO: 129587 - DNA, 20 bp, Artificial Sequence
  mmSKRIPTE0000366_Fnip1_6
  gRNA
gatactactgccagtccgtg

SEQ ID NO: 129588 - DNA, 20 bp, Artificial Sequence
  mmSKRIPTE0000367_Fnip1_7
  gRNA
tggctcacgggtccgtcacg

SEQ ID NO: 129589 - DNA, 20 bp, Artificial Sequence
  mmSKRIPTE0000368_Fnip1_8
  gRNA
tttaccatcagctagtggca

SEQ ID NO: 129590 - DNA, 20 bp, Artificial Sequence
  mmSKRIPTE0000369_Fnip1_9
  gRNA
cgatcagtcgaatctgactt

SEQ ID NO: 129591 - DNA, 20 bp, Artificial Sequence
  mmSKRIPTE0000370_Cblb_1
  gRNA
gagctggtcatagtcctgcg

SEQ ID NO: 129592 - DNA, 20 bp, Artificial Sequence
  mmSKRIPTE0000371_Cblb_2
  gRNA
ctgctatagattcagacgtg

SEQ ID NO: 129593 - DNA, 20 bp, Artificial Sequence
  mmSKRIPTE0000372_Cblb_3
  gRNA
gcacttcgtgccttaccgcg

SEQ ID NO: 129594 - DNA, 20 bp, Artificial Sequence
  mmSKRIPTE0000373_Cblb_4
  gRNA
gatgggatgtcgcatcctcg

SEQ ID NO: 129595 - DNA, 20 bp, Artificial Sequence
  mmSKRIPTE0000374_Cblb_5
  gRNA
agagattgcccagaataacg

SEQ ID NO: 129596 - DNA, 20 bp, Artificial Sequence
  mmSKRIPTE0000375_Cblb_6
  gRNA
aggactcagtccaagcgtag

SEQ ID NO: 129597 - DNA, 20 bp, Artificial Sequence
  mmSKRIPTE0000376_Cblb_7
  gRNA
aaagccccatgggcccgaag

SEQ ID NO: 129598 - DNA, 20 bp, Artificial Sequence
  mmSKRIPTE0000377_Cblb_8
  gRNA
gctagtaaaccattaaccgc

SEQ ID NO: 129599 - DNA, 20 bp, Artificial Sequence
  mmSKRIPTE0000378_Cblb_9
  gRNA
aagtaagttcacttgcaggg

SEQ ID NO: 129600 - DNA, 20 bp, Artificial Sequence
  mmSKRIPTE0000379_Abl1_1
  gRNA
gagcgggatccctttgtacg

SEQ ID NO: 129601 - DNA, 20 bp, Artificial Sequence
  mmSKRIPTE0000380_Abl1_2
  gRNA
gtgaggtgctacgaggacca

SEQ ID NO: 129602 - DNA, 20 bp, Artificial Sequence
  mmSKRIPTE0000381_Abl1_3
  gRNA
gcagtggaaacaccacaacg

SEQ ID NO: 129603 - DNA, 20 bp, Artificial Sequence
  mmSKRIPTE0000382_Abl1_4
  gRNA
tcggaggacacgtacagctg

SEQ ID NO: 129604 - DNA, 20 bp, Artificial Sequence
  mmSKRIPTE0000383_Abl1_5
  gRNA
agatctccaacatggtcccg

SEQ ID NO: 129605 - DNA, 20 bp, Artificial Sequence
  mmSKRIPTE0000384_Abl1_6
  gRNA
cttgggttataatcacaatg

SEQ ID NO: 129606 - DNA, 20 bp, Artificial Sequence
  mmSKRIPTE0000385_Abl1_7
  gRNA
aaacacggggcagagtgccg

SEQ ID NO: 129607 - DNA, 20 bp, Artificial Sequence
  mmSKRIPTE0000386_Abl1_8
  gRNA
ccttacgcgcatctcctcag

SEQ ID NO: 129608 - DNA, 20 bp, Artificial Sequence
  mmSKRIPTE0000387_Abl1_9
  gRNA
agatcagcgacattgtccgg

SEQ ID NO: 129609 - DNA, 20 bp, Artificial Sequence
  mmSKRIPTE0000388_Ada_1
  gRNA
caaacccaaagtaagcaccg

SEQ ID NO: 129610 - DNA, 20 bp, Artificial Sequence
  mmSKRIPTE0000389_Ada_2
  gRNA
actgacggtacgcttgtgca

SEQ ID NO: 129611 - DNA, 20 bp, Artificial Sequence
  mmSKRIPTE0000390_Ada_3
  gRNA
actgtccccagaatcaggct

SEQ ID NO: 129612 - DNA, 20 bp, Artificial Sequence
  mmSKRIPTE0000391_Ada_4
  gRNA
cccacgaaacctccaccatg

SEQ ID NO: 129613 - DNA, 20 bp, Artificial Sequence
  mmSKRIPTE0000392_Ada_5
  gRNA
ccgatggctctcagagaccg

SEQ ID NO: 129614 - DNA, 20 bp, Artificial Sequence
  mmSKRIPTE0000393_Ada_6
  gRNA
atgtcgagcgagagacgatg

SEQ ID NO: 129615 - DNA, 20 bp, Artificial Sequence
  mmSKRIPTE0000394_Ada_7
  gRNA
ggggtgacgtcccctctgtg

SEQ ID NO: 129616 - DNA, 20 bp, Artificial Sequence
  mmSKRIPTE0000395_Ada_8
  gRNA
ccacctcataggcttccacg

SEQ ID NO: 129617 - DNA, 20 bp, Artificial Sequence
  mmSKRIPTE0000396_Ada_9
  gRNA
attcatcggaccgtccacgc

SEQ ID NO: 129618 - DNA, 20 bp, Artificial Sequence
  mmSKRIPTE0000397_Zfp335_1
  gRNA
tgaatgctacaccttgagcg

SEQ ID NO: 129619 - DNA, 20 bp, Artificial Sequence
  mmSKRIPTE0000398_Zfp335_2
  gRNA
gtacacgcggtggtaacagg

SEQ ID NO: 129620 - DNA, 20 bp, Artificial Sequence
  mmSKRIPTE0000399_Zfp335_3
  gRNA
ccgactgacagcgaagcgcg

SEQ ID NO: 129621 - DNA, 20 bp, Artificial Sequence
  mmSKRIPTE0000400_Zfp335_4
  gRNA
ccacacatgtgcgataaggt

SEQ ID NO: 129622 - DNA, 20 bp, Artificial Sequence
  mmSKRIPTE0000401_Zfp335_5
  gRNA
gaagtggcatgacgtcacgc

SEQ ID NO: 129623 - DNA, 20 bp, Artificial Sequence
  mmSKRIPTE0000402_Zfp335_6
  gRNA
gcactcgtctgaccctagag

SEQ ID NO: 129624 - DNA, 20 bp, Artificial Sequence
  mmSKRIPTE0000403_Zfp335_7
  gRNA
tccctaccgcaccttccgcg

SEQ ID NO: 129625 - DNA, 20 bp, Artificial Sequence
  mmSKRIPTE0000404_Zfp335_8
  gRNA
ttgaggctcagtcatccgag

SEQ ID NO: 129626 - DNA, 20 bp, Artificial Sequence
  mmSKRIPTE0000405_Zfp335_9
  gRNA
aacgtggcccaaatcccgat

SEQ ID NO: 129627 - DNA, 20 bp, Artificial Sequence
  mmSKRIPTE0000406_Skil_1
  gRNA
gaacttagtagccaccgtcg

SEQ ID NO: 129628 - DNA, 20 bp, Artificial Sequence
  mmSKRIPTE0000407_Skil_2
  gRNA
cgaatgcatgacgaacgtct

SEQ ID NO: 129629 - DNA, 20 bp, Artificial Sequence
  mmSKRIPTE0000408_Skil_3
  gRNA
cattctagaaagctcaaccg

SEQ ID NO: 129630 - DNA, 20 bp, Artificial Sequence
  mmSKRIPTE0000409_Skil_4
  gRNA
ttacccagacgtctcacttg

SEQ ID NO: 129631 - DNA, 20 bp, Artificial Sequence
  mmSKRIPTE0000410_Skil_5
  gRNA
ccccagtctgaaacacacgc

SEQ ID NO: 129632 - DNA, 20 bp, Artificial Sequence
  mmSKRIPTE0000411_Skil_6
  gRNA
aatcgtttaaagcaccagtg

SEQ ID NO: 129633 - DNA, 20 bp, Artificial Sequence
  mmSKRIPTE0000412_Skil_7
  gRNA
ggggctttgagtcagccaag

SEQ ID NO: 129634 - DNA, 20 bp, Artificial Sequence
  mmSKRIPTE0000413_Skil_8
  gRNA
ggtcaacgtgatcagcccac

SEQ ID NO: 129635 - DNA, 20 bp, Artificial Sequence
  mmSKRIPTE0000414_Skil_9
  gRNA
agtcggtgacatgctctcct

SEQ ID NO: 129636 - DNA, 20 bp, Artificial Sequence
  mmSKRIPTE0000415_Ripk2_1
  gRNA
aaggacttaaggactcgccg

SEQ ID NO: 129637 - DNA, 20 bp, Artificial Sequence
  mmSKRIPTE0000416_Ripk2_2
  gRNA
accaagctgaggatacgtag

SEQ ID NO: 129638 - DNA, 20 bp, Artificial Sequence
  mmSKRIPTE0000417_Ripk2_3
  gRNA
attgaacggagttagctgtg

SEQ ID NO: 129639 - DNA, 20 bp, Artificial Sequence
  mmSKRIPTE0000418_Ripk2_4
  gRNA
agtctgacgcacgtccagga

SEQ ID NO: 129640 - DNA, 20 bp, Artificial Sequence
  mmSKRIPTE0000419_Ripk2_5
  gRNA
gacctgcactacctcagccg

SEQ ID NO: 129641 - DNA, 20 bp, Artificial Sequence
  mmSKRIPTE0000420_Ripk2_6
  gRNA
gagatcatgagacctcgatg

SEQ ID NO: 129642 - DNA, 20 bp, Artificial Sequence
  mmSKRIPTE0000421_Ripk2_7
  gRNA
tgccgacgagaccgtgccag

SEQ ID NO: 129643 - DNA, 20 bp, Artificial Sequence
  mmSKRIPTE0000422_Ripk2_8
  gRNA
ctataaattcctcctaggag

SEQ ID NO: 129644 - DNA, 20 bp, Artificial Sequence
  mmSKRIPTE0000423_Ripk2_9
  gRNA
cgttcatggctccggctgcg

SEQ ID NO: 129645 - DNA, 20 bp, Artificial Sequence
  mmSKRIPTE0000424_Igbp1_1
  gRNA
cctttaaggctaaaaccgcg

SEQ ID NO: 129646 - DNA, 20 bp, Artificial Sequence
  mmSKRIPTE0000425_Igbp1_2
  gRNA
tacggagtattacccgaccg

SEQ ID NO: 129647 - DNA, 20 bp, Artificial Sequence
  mmSKRIPTE0000426_Igbp1_3
  gRNA
tcatggcacacctagtggga

SEQ ID NO: 129648 - DNA, 20 bp, Artificial Sequence
  mmSKRIPTE0000427_Igbp1_4
  gRNA
aggcagtcagccgtacacga

SEQ ID NO: 129649 - DNA, 20 bp, Artificial Sequence
  mmSKRIPTE0000428_Igbp1_5
  gRNA
cagtagtcgaagcagtacac

SEQ ID NO: 129650 - DNA, 20 bp, Artificial Sequence
  mmSKRIPTE0000429_Igbp1_6
  gRNA
ggtctgttcaaagaaccgga

SEQ ID NO: 129651 - DNA, 20 bp, Artificial Sequence
  mmSKRIPTE0000430_Igbp1_7
  gRNA
tactaaagatgggctccacg

SEQ ID NO: 129652 - DNA, 20 bp, Artificial Sequence
  mmSKRIPTE0000431_Igbp1_8
  gRNA
actgagccatgttgaacctg

SEQ ID NO: 129653 - DNA, 20 bp, Artificial Sequence
  mmSKRIPTE0000432_Igbp1_9
  gRNA
acgactttaaaacaagcggc

SEQ ID NO: 129654 - DNA, 20 bp, Artificial Sequence
  mmSKRIPTE0000433_Adcyap1_1
  gRNA
agtagttggacgccccagcg

SEQ ID NO: 129655 - DNA, 20 bp, Artificial Sequence
  mmSKRIPTE0000434_Adcyap1_2
  gRNA
attccagcgcagaaactcga

SEQ ID NO: 129656 - DNA, 20 bp, Artificial Sequence
  mmSKRIPTE0000435_Adcyap1_3
  gRNA
ggcgtaagcgtcacgcagcg

SEQ ID NO: 129657 - DNA, 20 bp, Artificial Sequence
  mmSKRIPTE0000436_Adcyap1_4
  gRNA
gggaaacaaagaatgcgacg

SEQ ID NO: 129658 - DNA, 20 bp, Artificial Sequence
  mmSKRIPTE0000437_Adcyap1_5
  gRNA
ggagaacctaggcggcagcg

SEQ ID NO: 129659 - DNA, 20 bp, Artificial Sequence
  mmSKRIPTE0000438_Adcyap1_6
  gRNA
aaggcgtgtgcatcattcga

SEQ ID NO: 129660 - DNA, 20 bp, Artificial Sequence
  mmSKRIPTE0000439_Adcyap1_7
  gRNA
gtagacgcacaaaactagga

SEQ ID NO: 129661 - DNA, 20 bp, Artificial Sequence
  mmSKRIPTE0000440_Adcyap1_8
  gRNA
agtcacagtattcccgccag

SEQ ID NO: 129662 - DNA, 20 bp, Artificial Sequence
  mmSKRIPTE0000441_Adcyap1_9
  gRNA
ctgtgaagatgccgtccgag

SEQ ID NO: 129663 - DNA, 20 bp, Artificial Sequence
  mmSKRIPTE0000442_Nfe2l2_1
  gRNA
gcaatggctagtccgagcag

SEQ ID NO: 129664 - DNA, 20 bp, Artificial Sequence
  mmSKRIPTE0000443_Nfe2l2_2
  gRNA
atttgcttagaggacacccg

SEQ ID NO: 129665 - DNA, 20 bp, Artificial Sequence
  mmSKRIPTE0000444_Nfe2l2_3
  gRNA
gagccaggactacgacggca

SEQ ID NO: 129666 - DNA, 20 bp, Artificial Sequence
  mmSKRIPTE0000445_Nfe2l2_4
  gRNA
gagaacggaaggttacaacg

SEQ ID NO: 129667 - DNA, 20 bp, Artificial Sequence
  mmSKRIPTE0000446_Nfe2l2_5
  gRNA
ctcggaccccactctcgtcg

SEQ ID NO: 129668 - DNA, 20 bp, Artificial Sequence
  mmSKRIPTE0000447_Nfe2l2_6
  gRNA
gagcttggaatcgcgtacag

SEQ ID NO: 129669 - DNA, 20 bp, Artificial Sequence
  mmSKRIPTE0000448_Nfe2l2_7
  gRNA
agaaggtttctatcaatcga

SEQ ID NO: 129670 - DNA, 20 bp, Artificial Sequence
  mmSKRIPTE0000449_Nfe2l2_8
  gRNA
ggtccttgttccgcccccag

SEQ ID NO: 129671 - DNA, 20 bp, Artificial Sequence
  mmSKRIPTE0000450_Nfe2l2_9
  gRNA
gattgctgtgcgtccagacg

SEQ ID NO: 129672 - DNA, 20 bp, Artificial Sequence
  mmSKRIPTE0000451_Tek_1
  gRNA
ctcaaggagtggtagcatcg

SEQ ID NO: 129673 - DNA, 20 bp, Artificial Sequence
  mmSKRIPTE0000452_Tek_2
  gRNA
cccgcattaagatatcgcat

SEQ ID NO: 129674 - DNA, 20 bp, Artificial Sequence
  mmSKRIPTE0000453_Tek_3
  gRNA
cttactccgaacaatcagcc

SEQ ID NO: 129675 - DNA, 20 bp, Artificial Sequence
  mmSKRIPTE0000454_Tek_4
  gRNA
aaggcgctctcgcgccagtg

SEQ ID NO: 129676 - DNA, 20 bp, Artificial Sequence
  mmSKRIPTE0000455_Tek_5
  gRNA
ctactgcggcatgacgtgcg

SEQ ID NO: 129677 - DNA, 20 bp, Artificial Sequence
  mmSKRIPTE0000456_Tek_6
  gRNA
ccgagctagagtcaacacca

SEQ ID NO: 129678 - DNA, 20 bp, Artificial Sequence
  mmSKRIPTE0000457_Tek_7
  gRNA
tactggtgtaagtcttaccc

SEQ ID NO: 129679 - DNA, 20 bp, Artificial Sequence
  mmSKRIPTE0000458_Tek_8
  gRNA
ggactgatatatcagcgtag

SEQ ID NO: 129680 - DNA, 20 bp, Artificial Sequence
  mmSKRIPTE0000459_Tek_9
  gRNA
cccctggcatagatactgtg

SEQ ID NO: 129681 - DNA, 20 bp, Artificial Sequence
  mmSKRIPTE0000460_Stat2_1
  gRNA
cggaccaagatagcgaacag

SEQ ID NO: 129682 - DNA, 20 bp, Artificial Sequence
  mmSKRIPTE0000461_Stat2_2
  gRNA
cacaccgtagagcagcggca

SEQ ID NO: 129683 - DNA, 20 bp, Artificial Sequence
  mmSKRIPTE0000462_Stat2_3
  gRNA
aatcactgaagtcggcggtg

SEQ ID NO: 129684 - DNA, 20 bp, Artificial Sequence
  mmSKRIPTE0000463_Stat2_4
  gRNA
gcacgctcagaagagcggag

SEQ ID NO: 129685 - DNA, 20 bp, Artificial Sequence
  mmSKRIPTE0000464_Stat2_5
  gRNA
tcggcgttccgggatcggtg

SEQ ID NO: 129686 - DNA, 20 bp, Artificial Sequence
  mmSKRIPTE0000465_Stat2_6
  gRNA
gccaatgagagtgacacgcg

SEQ ID NO: 129687 - DNA, 20 bp, Artificial Sequence
  mmSKRIPTE0000466_Stat2_7
  gRNA
cacaactgctattactaatg

SEQ ID NO: 129688 - DNA, 20 bp, Artificial Sequence
  mmSKRIPTE0000467_Stat2_8
  gRNA
aagtttattatgacgtacga

SEQ ID NO: 129689 - DNA, 20 bp, Artificial Sequence
  mmSKRIPTE0000468_Stat2_9
  gRNA
ggttggccgattaaccaccc

SEQ ID NO: 129690 - DNA, 20 bp, Artificial Sequence
  mmSKRIPTE0000469_Tgfb3_1
  gRNA
ggtcccgctacttcgtccag

SEQ ID NO: 129691 - DNA, 20 bp, Artificial Sequence
  mmSKRIPTE0000470_Tgfb3_2
  gRNA
atccggtcgaagtatctgtg

SEQ ID NO: 129692 - DNA, 20 bp, Artificial Sequence
  mmSKRIPTE0000471_Tgfb3_3
  gRNA
tgctacatgccaagtatccg

SEQ ID NO: 129693 - DNA, 20 bp, Artificial Sequence
  mmSKRIPTE0000472_Tgfb3_4
  gRNA
gtgagtcctctggttcgacg

SEQ ID NO: 129694 - DNA, 20 bp, Artificial Sequence
  mmSKRIPTE0000473_Tgfb3_5
  gRNA
gaaatgggagttccaccgag

SEQ ID NO: 129695 - DNA, 20 bp, Artificial Sequence
  mmSKRIPTE0000474_Tgfb3_6
  gRNA
ccaggccgatacgtcatggg

SEQ ID NO: 129696 - DNA, 20 bp, Artificial Sequence
  mmSKRIPTE0000475_Tgfb3_7
  gRNA
tcactgacactgtgcgcgag

SEQ ID NO: 129697 - DNA, 20 bp, Artificial Sequence
  mmSKRIPTE0000476_Tgfb3_8
  gRNA
taagagggctgcattacccg

SEQ ID NO: 129698 - DNA, 20 bp, Artificial Sequence
  mmSKRIPTE0000477_Tgfb3_9
  gRNA
gggacgtgggtcatcaccga

SEQ ID NO: 129699 - DNA, 20 bp, Artificial Sequence
  mmSKRIPTE0000478_Apc_1
  gRNA
gcggttacctcgcttagatg

SEQ ID NO: 129700 - DNA, 20 bp, Artificial Sequence
  mmSKRIPTE0000479_Apc_2
  gRNA
ttgagcgtagtttcactccg

SEQ ID NO: 129701 - DNA, 20 bp, Artificial Sequence
  mmSKRIPTE0000480_Apc_3
  gRNA
aggcacacgtgaccgacatg

SEQ ID NO: 129702 - DNA, 20 bp, Artificial Sequence
  mmSKRIPTE0000481_Apc_4
  gRNA
agttaaagtacaccgtgttg

SEQ ID NO: 129703 - DNA, 20 bp, Artificial Sequence
  mmSKRIPTE0000482_Apc_5
  gRNA
aactctctccagaatgcgca

SEQ ID NO: 129704 - DNA, 20 bp, Artificial Sequence
  mmSKRIPTE0000483_Apc_6
  gRNA
taccatggaaattatcacct

SEQ ID NO: 129705 - DNA, 20 bp, Artificial Sequence
  mmSKRIPTE0000484_Apc_7
  gRNA
caacggtttaaggcagtcca

SEQ ID NO: 129706 - DNA, 20 bp, Artificial Sequence
  mmSKRIPTE0000485_Apc_8
  gRNA
gctgttaaagagcagaaccg

SEQ ID NO: 129707 - DNA, 20 bp, Artificial Sequence
  mmSKRIPTE0000486_Apc_9
  gRNA
gaagatgtgtgtagtcaatg

SEQ ID NO: 129708 - DNA, 20 bp, Artificial Sequence
  mmSKRIPTE0000487_Ak7_1
  gRNA
atcccaacaccctatcctcg

SEQ ID NO: 129709 - DNA, 20 bp, Artificial Sequence
  mmSKRIPTE0000488_Ak7_2
  gRNA
agcgaggaaaccgtaagcga

SEQ ID NO: 129710 - DNA, 20 bp, Artificial Sequence
  mmSKRIPTE0000489_Ak7_3
  gRNA
ttagagcagcgtcacctgtg

SEQ ID NO: 129711 - DNA, 20 bp, Artificial Sequence
  mmSKRIPTE0000490_Ak7_4
  gRNA
gggaggcctcttaccctgcg

SEQ ID NO: 129712 - DNA, 20 bp, Artificial Sequence
  mmSKRIPTE0000491_Ak7_5
  gRNA
tgtgctgattggaaatgccg

SEQ ID NO: 129713 - DNA, 20 bp, Artificial Sequence
  mmSKRIPTE0000492_Ak7_6
  gRNA
tctcctccttagcaaccgac

SEQ ID NO: 129714 - DNA, 20 bp, Artificial Sequence
  mmSKRIPTE0000493_Ak7_7
  gRNA
tgtgctcagacgtcctaacg

SEQ ID NO: 129715 - DNA, 20 bp, Artificial Sequence
  mmSKRIPTE0000494_Ak7_8
  gRNA
gatgtcatgcacgaatctgt

SEQ ID NO: 129716 - DNA, 20 bp, Artificial Sequence
  mmSKRIPTE0000495_Ak7_9
  gRNA
tcaaaactccacttagcacg

SEQ ID NO: 129717 - DNA, 20 bp, Artificial Sequence
  mmSKRIPTE0000496_Nfil3_1
  gRNA
ctaacacacatctctcggcg

SEQ ID NO: 129718 - DNA, 20 bp, Artificial Sequence
  mmSKRIPTE0000497_Nfil3_2
  gRNA
ggacgagcatgagcctgcga

SEQ ID NO: 129719 - DNA, 20 bp, Artificial Sequence
  mmSKRIPTE0000498_Nfil3_3
  gRNA
gatttcttgggcatacgccg

SEQ ID NO: 129720 - DNA, 20 bp, Artificial Sequence
  mmSKRIPTE0000499_Nfil3_4
  gRNA
gcacctcccaaactaccggg

SEQ ID NO: 129721 - DNA, 20 bp, Artificial Sequence
  mmSKRIPTE0000500_Nfil3_5
  gRNA
tctgttccacttgatcggat

SEQ ID NO: 129722 - DNA, 20 bp, Artificial Sequence
  mmSKRIPTE0000501_Nfil3_6
  gRNA
actcaggaaagccccgcaca

SEQ ID NO: 129723 - DNA, 20 bp, Artificial Sequence
  mmSKRIPTE0000502_Nfil3_7
  gRNA
cgaagccgagatcggttgtg

SEQ ID NO: 129724 - DNA, 20 bp, Artificial Sequence
  mmSKRIPTE0000503_Nfil3_8
  gRNA
tcgtcctacagaccggatgg

SEQ ID NO: 129725 - DNA, 20 bp, Artificial Sequence
  mmSKRIPTE0000504_Nfil3_9
  gRNA
aaaacaaatcctcggcgtgt

SEQ ID NO: 129726 - DNA, 20 bp, Artificial Sequence
  mmSKRIPTE0000505_Nov_1
  gRNA
atgatcacagcaacatacgt

SEQ ID NO: 129727 - DNA, 20 bp, Artificial Sequence
  mmSKRIPTE0000506_Nov_2
  gRNA
tccagggacgcaaaaccggt

SEQ ID NO: 129728 - DNA, 20 bp, Artificial Sequence
  mmSKRIPTE0000507_Nov_3
  gRNA
agagtgtctcttaattacgt

SEQ ID NO: 129729 - DNA, 20 bp, Artificial Sequence
  mmSKRIPTE0000508_Nov_4
  gRNA
gcattgagcagacgacggag

SEQ ID NO: 129730 - DNA, 20 bp, Artificial Sequence
  mmSKRIPTE0000509_Nov_5
  gRNA
cgcaggtcggtgatatactg

SEQ ID NO: 129731 - DNA, 20 bp, Artificial Sequence
  mmSKRIPTE0000510_Nov_6
  gRNA
gtgactagggctgaagacga

SEQ ID NO: 129732 - DNA, 20 bp, Artificial Sequence
  mmSKRIPTE0000511_Nov_7
  gRNA
caagttgacctaccccaaca

SEQ ID NO: 129733 - DNA, 20 bp, Artificial Sequence
  mmSKRIPTE0000512_Nov_8
  gRNA
atctgtagttcacaatggga

SEQ ID NO: 129734 - DNA, 20 bp, Artificial Sequence
  mmSKRIPTE0000513_Nov_9
  gRNA
gatggggtcatttaccgcaa

SEQ ID NO: 129735 - DNA, 20 bp, Artificial Sequence
  mmSKRIPTE0000514_Src_1
  gRNA
atgtgggacatacggtagtg

SEQ ID NO: 129736 - DNA, 20 bp, Artificial Sequence
  mmSKRIPTE0000515_Src_2
  gRNA
tctagtaccgagtccctcgt

SEQ ID NO: 129737 - DNA, 20 bp, Artificial Sequence
  mmSKRIPTE0000516_Src_3
  gRNA
agccaagtatgttacatgcg

SEQ ID NO: 129738 - DNA, 20 bp, Artificial Sequence
  mmSKRIPTE0000517_Src_4
  gRNA
actttggcaagatcactaga

SEQ ID NO: 129739 - DNA, 20 bp, Artificial Sequence
  mmSKRIPTE0000518_Src_5
  gRNA
gccctcggaaaacgtgcacg

SEQ ID NO: 129740 - DNA, 20 bp, Artificial Sequence
  mmSKRIPTE0000519_Src_6
  gRNA
tccctgtcggggagagacgt

SEQ ID NO: 129741 - DNA, 20 bp, Artificial Sequence
  mmSKRIPTE0000520_Src_7
  gRNA
gatgtagcgtacactcattg

SEQ ID NO: 129742 - DNA, 20 bp, Artificial Sequence
  mmSKRIPTE0000521_Src_8
  gRNA
gattcgtaaactggaaagcg

SEQ ID NO: 129743 - DNA, 20 bp, Artificial Sequence
  mmSKRIPTE0000522_Src_9
  gRNA
aggggcgacagaaatccccg

SEQ ID NO: 129744 - DNA, 20 bp, Artificial Sequence
  mmSKRIPTE0000523_Pde5a_1
  gRNA
ctgtgtcatctgattccacg

SEQ ID NO: 129745 - DNA, 20 bp, Artificial Sequence
  mmSKRIPTE0000524_Pde5a_2
  gRNA
catactgcccgtctatcggg

SEQ ID NO: 129746 - DNA, 20 bp, Artificial Sequence
  mmSKRIPTE0000525_Pde5a_3
  gRNA
agggtttagtaatcgcagag

SEQ ID NO: 129747 - DNA, 20 bp, Artificial Sequence
  mmSKRIPTE0000526_Pde5a_4
  gRNA
acgctcatataaattaatcg

SEQ ID NO: 129748 - DNA, 20 bp, Artificial Sequence
  mmSKRIPTE0000527_Pde5a_5
  gRNA
acaccgtggaacctccatcg

SEQ ID NO: 129749 - DNA, 20 bp, Artificial Sequence
  mmSKRIPTE0000528_Pde5a_6
  gRNA
actgtgcctaacatacggag

SEQ ID NO: 129750 - DNA, 20 bp, Artificial Sequence
  mmSKRIPTE0000529_Pde5a_7
  gRNA
agccatgacttggatcatcg

SEQ ID NO: 129751 - DNA, 20 bp, Artificial Sequence
  mmSKRIPTE0000530_Pde5a_8
  gRNA
caaacagtcttcggatacgt

SEQ ID NO: 129752 - DNA, 20 bp, Artificial Sequence
  mmSKRIPTE0000531_Pde5a_9
  gRNA
atccgtttagagtggaacaa

SEQ ID NO: 129753 - DNA, 20 bp, Artificial Sequence
  mmSKRIPTE0000532_Fancd2_1
  gRNA
agtaacgtcacgccacggcg

SEQ ID NO: 129754 - DNA, 20 bp, Artificial Sequence
  mmSKRIPTE0000533_Fancd2_2
  gRNA
tatgatacgtataacccgtg

SEQ ID NO: 129755 - DNA, 20 bp, Artificial Sequence
  mmSKRIPTE0000534_Fancd2_3
  gRNA
cagctccagttagagccgag

SEQ ID NO: 129756 - DNA, 20 bp, Artificial Sequence
  mmSKRIPTE0000535_Fancd2_4
  gRNA
actccaataccttgtctacg

SEQ ID NO: 129757 - DNA, 20 bp, Artificial Sequence
  mmSKRIPTE0000536_Fancd2_5
  gRNA
aactttcaactggttccgag

SEQ ID NO: 129758 - DNA, 20 bp, Artificial Sequence
  mmSKRIPTE0000537_Fancd2_6
  gRNA
agcgggaaagtcgaaaacga

SEQ ID NO: 129759 - DNA, 20 bp, Artificial Sequence
  mmSKRIPTE0000538_Fancd2_7
  gRNA
gtaatggtttgaatagatcg

SEQ ID NO: 129760 - DNA, 20 bp, Artificial Sequence
  mmSKRIPTE0000539_Fancd2_8
  gRNA
gcctgtcatcattgtccccg

SEQ ID NO: 129761 - DNA, 20 bp, Artificial Sequence
  mmSKRIPTE0000540_Fancd2_9
  gRNA
caaccacttcctatacaggg

SEQ ID NO: 129762 - DNA, 20 bp, Artificial Sequence
  mmSKRIPTE0000541_Psen2_1
  gRNA
tggctggagctactaccgca

SEQ ID NO: 129763 - DNA, 20 bp, Artificial Sequence
  mmSKRIPTE0000542_Psen2_2
  gRNA
gaagcaggccatctgaacgc

SEQ ID NO: 129764 - DNA, 20 bp, Artificial Sequence
  mmSKRIPTE0000543_Psen2_3
  gRNA
ggttctaacagagcagcgtg

SEQ ID NO: 129765 - DNA, 20 bp, Artificial Sequence
  mmSKRIPTE0000544_Psen2_4
  gRNA
agacaggtagcaccgaaggg

SEQ ID NO: 129766 - DNA, 20 bp, Artificial Sequence
  mmSKRIPTE0000545_Psen2_5
  gRNA
gatggaagtatctctctcga

SEQ ID NO: 129767 - DNA, 20 bp, Artificial Sequence
  mmSKRIPTE0000546_Psen2_6
  gRNA
aatcctgagactagcccgaa

SEQ ID NO: 129768 - DNA, 20 bp, Artificial Sequence
  mmSKRIPTE0000547_Psen2_7
  gRNA
ggaccgctacgcatgcagtg

SEQ ID NO: 129769 - DNA, 20 bp, Artificial Sequence
  mmSKRIPTE0000548_Psen2_8
  gRNA
tagcggccactgctaccaca

SEQ ID NO: 129770 - DNA, 20 bp, Artificial Sequence
  mmSKRIPTE0000549_Psen2_9
  gRNA
ggtggcatgttcatgcgatg

SEQ ID NO: 129771 - DNA, 20 bp, Artificial Sequence
  mmSKRIPTE0000550_Trdc_1
  gRNA
gtatctagcttaaagccggt

SEQ ID NO: 129772 - DNA, 20 bp, Artificial Sequence
  mmSKRIPTE0000551_Trdc_2
  gRNA
gccctaacaactcaataccg

SEQ ID NO: 129773 - DNA, 20 bp, Artificial Sequence
  mmSKRIPTE0000552_Trdc_3
  gRNA
agcgaaaagtagcctcaatg

SEQ ID NO: 129774 - DNA, 20 bp, Artificial Sequence
  mmSKRIPTE0000553_Trdc_4
  gRNA
agtccatgctgttccccgtg

SEQ ID NO: 129775 - DNA, 20 bp, Artificial Sequence
  mmSKRIPTE0000554_Trdc_5
  gRNA
cagtgtgaagtgactaccag

SEQ ID NO: 129776 - DNA, 20 bp, Artificial Sequence
  mmSKRIPTE0000555_Trdc_6
  gRNA
agttattagatacagactcg

SEQ ID NO: 129777 - DNA, 20 bp, Artificial Sequence
  mmSKRIPTE0000556_Trdc_7
  gRNA
tatggctggaaacgaaacca

SEQ ID NO: 129778 - DNA, 20 bp, Artificial Sequence
  mmSKRIPTE0000557_Trdc_8
  gRNA
actaatacacagtaatgact

SEQ ID NO: 129779 - DNA, 20 bp, Artificial Sequence
  mmSKRIPTE0000558_Trdc_9
  gRNA
tttctcgttgagactccaag

SEQ ID NO: 129780 - DNA, 20 bp, Artificial Sequence
  mmSKRIPTE0000559_Bcl6_1
  gRNA
cagcaacatctactcgccca

SEQ ID NO: 129781 - DNA, 20 bp, Artificial Sequence
  mmSKRIPTE0000560_Bcl6_2
  gRNA
catggcctaccgaggtcgtg

SEQ ID NO: 129782 - DNA, 20 bp, Artificial Sequence
  mmSKRIPTE0000561_Bcl6_3
  gRNA
ccaacctctagtgtacacat

SEQ ID NO: 129783 - DNA, 20 bp, Artificial Sequence
  mmSKRIPTE0000562_Bcl6_4
  gRNA
taccatgtacgtaaaccccg

SEQ ID NO: 129784 - DNA, 20 bp, Artificial Sequence
  mmSKRIPTE0000563_Bcl6_5
  gRNA
gtcctaaaataagaccggag

SEQ ID NO: 129785 - DNA, 20 bp, Artificial Sequence
  mmSKRIPTE0000564_Bcl6_6
  gRNA
caaggtgcaataccgcgtgt

SEQ ID NO: 129786 - DNA, 20 bp, Artificial Sequence
  mmSKRIPTE0000565_Bcl6_7
  gRNA
ccgtgtaaaaaggcaccgtg

SEQ ID NO: 129787 - DNA, 20 bp, Artificial Sequence
  mmSKRIPTE0000566_Bcl6_8
  gRNA
gggacaaggccgtacccgtg

SEQ ID NO: 129788 - DNA, 20 bp, Artificial Sequence
  mmSKRIPTE0000567_Bcl6_9
  gRNA
ggggtggaaactctatacac

SEQ ID NO: 129789 - DNA, 20 bp, Artificial Sequence
  mmSKRIPTE0000568_Prkce_1
  gRNA
gctctggctgtgtaggacga

SEQ ID NO: 129790 - DNA, 20 bp, Artificial Sequence
  mmSKRIPTE0000569_Prkce_2
  gRNA
acggacccgaagaaccagcg

SEQ ID NO: 129791 - DNA, 20 bp, Artificial Sequence
  mmSKRIPTE0000570_Prkce_3
  gRNA
agtaggaatatcgtcctgcg

SEQ ID NO: 129792 - DNA, 20 bp, Artificial Sequence
  mmSKRIPTE0000571_Prkce_4
  gRNA
gccatgaacccaaacaaacg

SEQ ID NO: 129793 - DNA, 20 bp, Artificial Sequence
  mmSKRIPTE0000572_Prkce_5
  gRNA
ccggagggatgcatgtcgag

SEQ ID NO: 129794 - DNA, 20 bp, Artificial Sequence
  mmSKRIPTE0000573_Prkce_6
  gRNA
acttctgagcttccgtacgg

SEQ ID NO: 129795 - DNA, 20 bp, Artificial Sequence
  mmSKRIPTE0000574_Prkce_7
  gRNA
catccgttcaacaatacgct

SEQ ID NO: 129796 - DNA, 20 bp, Artificial Sequence
  mmSKRIPTE0000575_Prkce_8
  gRNA
acaaggggaagggactacgt

SEQ ID NO: 129797 - DNA, 20 bp, Artificial Sequence
  mmSKRIPTE0000576_Prkce_9
  gRNA
ctctagaaagaaacgctacg

SEQ ID NO: 129798 - DNA, 20 bp, Artificial Sequence
  mmSKRIPTE0000577_Stap1_1
  gRNA
tgctggcaacacgttcaggt

SEQ ID NO: 129799 - DNA, 20 bp, Artificial Sequence
  mmSKRIPTE0000578_Stap1_2
  gRNA
tctttacaggttgattcggg

SEQ ID NO: 129800 - DNA, 20 bp, Artificial Sequence
  mmSKRIPTE0000579_Stap1_3
  gRNA
gtataacccaaacagaaacg

SEQ ID NO: 129801 - DNA, 20 bp, Artificial Sequence
  mmSKRIPTE0000580_Stap1_4
  gRNA
gaatgtcaaataaagcaacg

SEQ ID NO: 129802 - DNA, 20 bp, Artificial Sequence
  mmSKRIPTE0000581_Stap1_5
  gRNA
ctactccatcactatccggc

SEQ ID NO: 129803 - DNA, 20 bp, Artificial Sequence
  mmSKRIPTE0000582_Stap1_6
  gRNA
atcgtaagtagagcctgatg

SEQ ID NO: 129804 - DNA, 20 bp, Artificial Sequence
  mmSKRIPTE0000583_Stap1_7
  gRNA
cgttgatcatgacataagag

SEQ ID NO: 129805 - DNA, 20 bp, Artificial Sequence
  mmSKRIPTE0000584_Stap1_8
  gRNA
ccacattattctgagaacgt

SEQ ID NO: 129806 - DNA, 20 bp, Artificial Sequence
  mmSKRIPTE0000585_Stap1_9
  gRNA
ctttcctggaagatcctgcg

SEQ ID NO: 129807 - DNA, 20 bp, Artificial Sequence
  mmSKRIPTE0000586_Myo1e_1
  gRNA
catcggggactacatcggga

SEQ ID NO: 129808 - DNA, 20 bp, Artificial Sequence
  mmSKRIPTE0000587_Myo1e_2
  gRNA
gaagtggctgcacgttatcg

SEQ ID NO: 129809 - DNA, 20 bp, Artificial Sequence
  mmSKRIPTE0000588_Myo1e_3
  gRNA
ttatggcctgatacgccctg

SEQ ID NO: 129810 - DNA, 20 bp, Artificial Sequence
  mmSKRIPTE0000589_Myo1e_4
  gRNA
aatttcggactactgaaccg

SEQ ID NO: 129811 - DNA, 20 bp, Artificial Sequence
  mmSKRIPTE0000590_Myo1e_5
  gRNA
taaatctggtgtaagtagcg

SEQ ID NO: 129812 - DNA, 20 bp, Artificial Sequence
  mmSKRIPTE0000591_Myo1e_6
  gRNA
tggtggacgggtagactacg

SEQ ID NO: 129813 - DNA, 20 bp, Artificial Sequence
  mmSKRIPTE0000592_Myo1e_7
  gRNA
gagcctcattgctgtccccg

SEQ ID NO: 129814 - DNA, 20 bp, Artificial Sequence
  mmSKRIPTE0000593_Myo1e_8
  gRNA
gctctgccaatggtaccggt

SEQ ID NO: 129815 - DNA, 20 bp, Artificial Sequence
  mmSKRIPTE0000594_Myo1e_9
  gRNA
agtgggcaactatgccgccg

SEQ ID NO: 129816 - DNA, 20 bp, Artificial Sequence
  mmSKRIPTE0000595_Wnt3a_1
  gRNA
agcactaagaggtatccgag

SEQ ID NO: 129817 - DNA, 20 bp, Artificial Sequence
  mmSKRIPTE0000596_Wnt3a_2
  gRNA
cggatgcaggctatcatacg

SEQ ID NO: 129818 - DNA, 20 bp, Artificial Sequence
  mmSKRIPTE0000597_Wnt3a_3
  gRNA
gagccctgtcgggtcaagag

SEQ ID NO: 129819 - DNA, 20 bp, Artificial Sequence
  mmSKRIPTE0000598_Wnt3a_4
  gRNA
gtatgaacttcggagacatg

SEQ ID NO: 129820 - DNA, 20 bp, Artificial Sequence
  mmSKRIPTE0000599_Wnt3a_5
  gRNA
ggagcagggttcattccgag

SEQ ID NO: 129821 - DNA, 20 bp, Artificial Sequence
  mmSKRIPTE0000600_Wnt3a_6
  gRNA
ggaaccgtaagcccaccagg

SEQ ID NO: 129822 - DNA, 20 bp, Artificial Sequence
  mmSKRIPTE0000601_Wnt3a_7
  gRNA
tttcaccgggatgtccagtg

SEQ ID NO: 129823 - DNA, 20 bp, Artificial Sequence
  mmSKRIPTE0000602_Wnt3a_8
  gRNA
cggtggtgcagttccaacgc

SEQ ID NO: 129824 - DNA, 20 bp, Artificial Sequence
  mmSKRIPTE0000603_Wnt3a_9
  gRNA
accttgaagtacgtgtaacg

SEQ ID NO: 129825 - DNA, 20 bp, Artificial Sequence
  mmSKRIPTE0000604_Ppargc1b_1
  gRNA
gacgtgggtgcagaaccgcg

SEQ ID NO: 129826 - DNA, 20 bp, Artificial Sequence
  mmSKRIPTE0000605_Ppargc1b_2
  gRNA
taatgcgtcccagagtatga

SEQ ID NO: 129827 - DNA, 20 bp, Artificial Sequence
  mmSKRIPTE0000606_Ppargc1b_3
  gRNA
gtaccggataagtagccccg

SEQ ID NO: 129828 - DNA, 20 bp, Artificial Sequence
  mmSKRIPTE0000607_Ppargc1b_4
  gRNA
aggagcccaagaacctacgt

SEQ ID NO: 129829 - DNA, 20 bp, Artificial Sequence
  mmSKRIPTE0000608_Ppargc1b_5
  gRNA
tggacgagctttcactggtg

SEQ ID NO: 129830 - DNA, 20 bp, Artificial Sequence
  mmSKRIPTE0000609_Ppargc1b_6
  gRNA
tagactaaatctgccacccg

SEQ ID NO: 129831 - DNA, 20 bp, Artificial Sequence
  mmSKRIPTE0000610_Ppargc1b_7
  gRNA
ccagctaagtatccagatag

SEQ ID NO: 129832 - DNA, 20 bp, Artificial Sequence
  mmSKRIPTE0000611_Ppargc1b_8
  gRNA
caactatctctctgacacgc

SEQ ID NO: 129833 - DNA, 20 bp, Artificial Sequence
  mmSKRIPTE0000612_Ppargc1b_9
  gRNA
ggaccccagatcacttacga

SEQ ID NO: 129834 - DNA, 20 bp, Artificial Sequence
  mmSKRIPTE0000613_Rnf41_1
  gRNA
agggctaacccgagacagcg

SEQ ID NO: 129835 - DNA, 20 bp, Artificial Sequence
  mmSKRIPTE0000614_Rnf41_2
  gRNA
cccactgctgctacgcaacg

SEQ ID NO: 129836 - DNA, 20 bp, Artificial Sequence
  mmSKRIPTE0000615_Rnf41_3
  gRNA
agcagaacaagctattcgag

SEQ ID NO: 129837 - DNA, 20 bp, Artificial Sequence
  mmSKRIPTE0000616_Rnf41_4
  gRNA
ccgagttaaatagagaggcg

SEQ ID NO: 129838 - DNA, 20 bp, Artificial Sequence
  mmSKRIPTE0000617_Rnf41_5
  gRNA
cagttcagtagggaacccgt

SEQ ID NO: 129839 - DNA, 20 bp, Artificial Sequence
  mmSKRIPTE0000618_Rnf41_6
  gRNA
tggacagacttggatcggat

SEQ ID NO: 129840 - DNA, 20 bp, Artificial Sequence
  mmSKRIPTE0000619_Rnf41_7
  gRNA
gcctggtttctccggacgcg

SEQ ID NO: 129841 - DNA, 20 bp, Artificial Sequence
  mmSKRIPTE0000620_Rnf41_8
  gRNA
cccaaaccctctaaccagtg

SEQ ID NO: 129842 - DNA, 20 bp, Artificial Sequence
  mmSKRIPTE0000621_Rnf41_9
  gRNA
tgggcgagcttctaaccctg

SEQ ID NO: 129843 - DNA, 20 bp, Artificial Sequence
  mmSKRIPTE0000622_Gpi1_1
  gRNA
ctgccggcaaggtcgcctag

SEQ ID NO: 129844 - DNA, 20 bp, Artificial Sequence
  mmSKRIPTE0000623_Gpi1_2
  gRNA
actgccctctcgattagccg

SEQ ID NO: 129845 - DNA, 20 bp, Artificial Sequence
  mmSKRIPTE0000624_Gpi1_3
  gRNA
gcggccgcatgggatgacat

SEQ ID NO: 129846 - DNA, 20 bp, Artificial Sequence
  mmSKRIPTE0000625_Gpi1_4
  gRNA
ggtatcagggacgtccagtg

SEQ ID NO: 129847 - DNA, 20 bp, Artificial Sequence
  mmSKRIPTE0000626_Gpi1_5
  gRNA
agggcgatgctgataacggt

SEQ ID NO: 129848 - DNA, 20 bp, Artificial Sequence
  mmSKRIPTE0000627_Gpi1_6
  gRNA
ggaggattgatcgttatgag

SEQ ID NO: 129849 - DNA, 20 bp, Artificial Sequence
  mmSKRIPTE0000628_Gpi1_7
  gRNA
acttaccgtgttcgtagaca

SEQ ID NO: 129850 - DNA, 20 bp, Artificial Sequence
  mmSKRIPTE0000629_Gpi1_8
  gRNA
aagagaccctccgactgtgt

SEQ ID NO: 129851 - DNA, 20 bp, Artificial Sequence
  mmSKRIPTE0000630_Gpi1_9
  gRNA
tgtcggcttatgacgaaaca

SEQ ID NO: 129852 - DNA, 20 bp, Artificial Sequence
  mmSKRIPTE0000631_Jam3_1
  gRNA
taactacatccggacgagtg

SEQ ID NO: 129853 - DNA, 20 bp, Artificial Sequence
  mmSKRIPTE0000632_Jam3_2
  gRNA
cagtttccatagcgaccacg

SEQ ID NO: 129854 - DNA, 20 bp, Artificial Sequence
  mmSKRIPTE0000633_Jam3_3
  gRNA
ccgaaaccgctattccaccg

SEQ ID NO: 129855 - DNA, 20 bp, Artificial Sequence
  mmSKRIPTE0000634_Jam3_4
  gRNA
tcaccctaatccccataatg

SEQ ID NO: 129856 - DNA, 20 bp, Artificial Sequence
  mmSKRIPTE0000635_Jam3_5
  gRNA
gatctggaatgtgacacgat

SEQ ID NO: 129857 - DNA, 20 bp, Artificial Sequence
  mmSKRIPTE0000636_Jam3_6
  gRNA
atccagcaaccgaaacccag

SEQ ID NO: 129858 - DNA, 20 bp, Artificial Sequence
  mmSKRIPTE0000637_Jam3_7
  gRNA
cccgctaagttcatcgacag

SEQ ID NO: 129859 - DNA, 20 bp, Artificial Sequence
  mmSKRIPTE0000638_Jam3_8
  gRNA
atcacgtctttcatacaggg

SEQ ID NO: 129860 - DNA, 20 bp, Artificial Sequence
  mmSKRIPTE0000639_Jam3_9
  gRNA
aatcaacagaggcaacacgg

SEQ ID NO: 129861 - DNA, 20 bp, Artificial Sequence
  mmSKRIPTE0000640_Actr3_1
  gRNA
gaaccaagtcagttccagcg

SEQ ID NO: 129862 - DNA, 20 bp, Artificial Sequence
  mmSKRIPTE0000641_Actr3_2
  gRNA
tggatggggtctaatcatcg

SEQ ID NO: 129863 - DNA, 20 bp, Artificial Sequence
  mmSKRIPTE0000642_Actr3_3
  gRNA
acagataaatttacgaaccg

SEQ ID NO: 129864 - DNA, 20 bp, Artificial Sequence
  mmSKRIPTE0000643_Actr3_4
  gRNA
cggcatgggcaaaacaaacg

SEQ ID NO: 129865 - DNA, 20 bp, Artificial Sequence
  mmSKRIPTE0000644_Actr3_5
  gRNA
cctcgcactgcctttccgcg

SEQ ID NO: 129866 - DNA, 20 bp, Artificial Sequence
  mmSKRIPTE0000645_Actr3_6
  gRNA
tccctaccaagggccctgag

SEQ ID NO: 129867 - DNA, 20 bp, Artificial Sequence
  mmSKRIPTE0000646_Actr3_7
  gRNA
ctcccacttccggttccggg

SEQ ID NO: 129868 - DNA, 20 bp, Artificial Sequence
  mmSKRIPTE0000647_Actr3_8
  gRNA
acctgttaaagagttactag

SEQ ID NO: 129869 - DNA, 20 bp, Artificial Sequence
  mmSKRIPTE0000648_Actr3_9
  gRNA
gtgacaatttagacacggta

SEQ ID NO: 129870 - DNA, 20 bp, Artificial Sequence
  mmSKRIPTE0000649_Ltb_1
  gRNA
ataacgacccgtacccgatg

SEQ ID NO: 129871 - DNA, 20 bp, Artificial Sequence
  mmSKRIPTE0000650_Ltb_2
  gRNA
ggtgctatctatcacccgaa

SEQ ID NO: 129872 - DNA, 20 bp, Artificial Sequence
  mmSKRIPTE0000651_Ltb_3
  gRNA
aggtaatagacgccgtcctg

SEQ ID NO: 129873 - DNA, 20 bp, Artificial Sequence
  mmSKRIPTE0000652_Ltb_4
  gRNA
tggccttagagccaggacgt

SEQ ID NO: 129874 - DNA, 20 bp, Artificial Sequence
  mmSKRIPTE0000653_Ltb_5
  gRNA
caggctaggattgcctggag

SEQ ID NO: 129875 - DNA, 20 bp, Artificial Sequence
  mmSKRIPTE0000654_Ltb_6
  gRNA
cagaccagacattccctctg

SEQ ID NO: 129876 - DNA, 20 bp, Artificial Sequence
  mmSKRIPTE0000655_Ltb_7
  gRNA
tcgggccgtgatctctaggt

SEQ ID NO: 129877 - DNA, 20 bp, Artificial Sequence
  mmSKRIPTE0000656_Ltb_8
  gRNA
caaaggactctcgcttactg

SEQ ID NO: 129878 - DNA, 20 bp, Artificial Sequence
  mmSKRIPTE0000657_Ltb_9
  gRNA
cagactcagaactaggaccg

SEQ ID NO: 129879 - DNA, 20 bp, Artificial Sequence
  mmSKRIPTE0000658_Gata2_1
  gRNA
tggagcgataggtcctaccg

SEQ ID NO: 129880 - DNA, 20 bp, Artificial Sequence
  mmSKRIPTE0000659_Gata2_2
  gRNA
gctgcgcattcaatacggcg

SEQ ID NO: 129881 - DNA, 20 bp, Artificial Sequence
  mmSKRIPTE0000660_Gata2_3
  gRNA
gttccatcggagcttcactg

SEQ ID NO: 129882 - DNA, 20 bp, Artificial Sequence
  mmSKRIPTE0000661_Gata2_4
  gRNA
gcagggggtagtgtagcccg

SEQ ID NO: 129883 - DNA, 20 bp, Artificial Sequence
  mmSKRIPTE0000662_Gata2_5
  gRNA
gtcagtggcctgttaacctg

SEQ ID NO: 129884 - DNA, 20 bp, Artificial Sequence
  mmSKRIPTE0000663_Gata2_6
  gRNA
gatacttgtcaaccttggag

SEQ ID NO: 129885 - DNA, 20 bp, Artificial Sequence
  mmSKRIPTE0000664_Gata2_7
  gRNA
atggcccctctatcagacca

SEQ ID NO: 129886 - DNA, 20 bp, Artificial Sequence
  mmSKRIPTE0000665_Gata2_8
  gRNA
ggccctcaggcaataacccg

SEQ ID NO: 129887 - DNA, 20 bp, Artificial Sequence
  mmSKRIPTE0000666_Gata2_9
  gRNA
cggtcccacctccgaaacag

SEQ ID NO: 129888 - DNA, 20 bp, Artificial Sequence
  mmSKRIPTE0000667_Ercc2_1
  gRNA
ttagtactagagatcgactg

SEQ ID NO: 129889 - DNA, 20 bp, Artificial Sequence
  mmSKRIPTE0000668_Ercc2_2
  gRNA
ggcatgcgagaatggccgtg

SEQ ID NO: 129890 - DNA, 20 bp, Artificial Sequence
  mmSKRIPTE0000669_Ercc2_3
  gRNA
ggctacggcagtaatcccca

SEQ ID NO: 129891 - DNA, 20 bp, Artificial Sequence
  mmSKRIPTE0000670_Ercc2_4
  gRNA
gatgatgggagcattaggtg

SEQ ID NO: 129892 - DNA, 20 bp, Artificial Sequence
  mmSKRIPTE0000671_Ercc2_5
  gRNA
gcgggccctgagcatctacg

SEQ ID NO: 129893 - DNA, 20 bp, Artificial Sequence
  mmSKRIPTE0000672_Ercc2_6
  gRNA
ccgtccgtagtggtgtactg

SEQ ID NO: 129894 - DNA, 20 bp, Artificial Sequence
  mmSKRIPTE0000673_Ercc2_7
  gRNA
tcttcaccgagtatcgagcc

SEQ ID NO: 129895 - DNA, 20 bp, Artificial Sequence
  mmSKRIPTE0000674_Ercc2_8
  gRNA
tggccccgtattccggcgaa

SEQ ID NO: 129896 - DNA, 20 bp, Artificial Sequence
  mmSKRIPTE0000675_Ercc2_9
  gRNA
gctcctgaatattcaacgag

SEQ ID NO: 129897 - DNA, 20 bp, Artificial Sequence
  mmSKRIPTE0000676_Irf8_1
  gRNA
gcgtaacctcgtcttccacg

SEQ ID NO: 129898 - DNA, 20 bp, Artificial Sequence
  mmSKRIPTE0000677_Irf8_2
  gRNA
ggtcaggcctatctcgagcg

SEQ ID NO: 129899 - DNA, 20 bp, Artificial Sequence
  mmSKRIPTE0000678_Irf8_3
  gRNA
gtgactaagagaattccgaa

SEQ ID NO: 129900 - DNA, 20 bp, Artificial Sequence
  mmSKRIPTE0000679_Irf8_4
  gRNA
agtttaccgaattgtccccg

SEQ ID NO: 129901 - DNA, 20 bp, Artificial Sequence
  mmSKRIPTE0000680_Irf8_5
  gRNA
aggattgagtgcgatcaccg

SEQ ID NO: 129902 - DNA, 20 bp, Artificial Sequence
  mmSKRIPTE0000681_Irf8_6
  gRNA
ccctaacataaagagcctag

SEQ ID NO: 129903 - DNA, 20 bp, Artificial Sequence
  mmSKRIPTE0000682_Irf8_7
  gRNA
gtcggggactagatcatacg

SEQ ID NO: 129904 - DNA, 20 bp, Artificial Sequence
  mmSKRIPTE0000683_Irf8_8
  gRNA
aagtgaccactcaggctcgg

SEQ ID NO: 129905 - DNA, 20 bp, Artificial Sequence
  mmSKRIPTE0000684_Irf8_9
  gRNA
ggttacgcagtcgctctgtg

SEQ ID NO: 129906 - DNA, 20 bp, Artificial Sequence
  mmSKRIPTE0000685_Tirap_1
  gRNA
tacctcgccaccaacacacg

SEQ ID NO: 129907 - DNA, 20 bp, Artificial Sequence
  mmSKRIPTE0000686_Tirap_2
  gRNA
gctgggaatcttgagcgacg

SEQ ID NO: 129908 - DNA, 20 bp, Artificial Sequence
  mmSKRIPTE0000687_Tirap_3
  gRNA
ctatccagttcagcgcagag

SEQ ID NO: 129909 - DNA, 20 bp, Artificial Sequence
  mmSKRIPTE0000688_Tirap_4
  gRNA
cgagtctgcaacccgcagcg

SEQ ID NO: 129910 - DNA, 20 bp, Artificial Sequence
  mmSKRIPTE0000689_Tirap_5
  gRNA
atcaggggagcgttgtcccg

SEQ ID NO: 129911 - DNA, 20 bp, Artificial Sequence
  mmSKRIPTE0000690_Tirap_6
  gRNA
tacatgaatcggagttccgg

SEQ ID NO: 129912 - DNA, 20 bp, Artificial Sequence
  mmSKRIPTE0000691_Tirap_7
  gRNA
acttgcaccaggggtcccga

SEQ ID NO: 129913 - DNA, 20 bp, Artificial Sequence
  mmSKRIPTE0000692_Tirap_8
  gRNA
tggataccactcctcaagag

SEQ ID NO: 129914 - DNA, 20 bp, Artificial Sequence
  mmSKRIPTE0000693_Tirap_9
  gRNA
ctagtccctaatggctcgga

SEQ ID NO: 129915 - DNA, 20 bp, Artificial Sequence
  mmSKRIPTE0000694_Elf4_1
  gRNA
agtaactgcctaagcgagag

SEQ ID NO: 129916 - DNA, 20 bp, Artificial Sequence
  mmSKRIPTE0000695_Elf4_2
  gRNA
ctaggctcagttacgaacag

SEQ ID NO: 129917 - DNA, 20 bp, Artificial Sequence
  mmSKRIPTE0000696_Elf4_3
  gRNA
acattaaccaaagtcgccag

SEQ ID NO: 129918 - DNA, 20 bp, Artificial Sequence
  mmSKRIPTE0000697_Elf4_4
  gRNA
ggtctgaggagtttatggat

SEQ ID NO: 129919 - DNA, 20 bp, Artificial Sequence
  mmSKRIPTE0000698_Elf4_5
  gRNA
accagctagaaaatcctgag

SEQ ID NO: 129920 - DNA, 20 bp, Artificial Sequence
  mmSKRIPTE0000699_Elf4_6
  gRNA
acttcttggctgttgccgtg

SEQ ID NO: 129921 - DNA, 20 bp, Artificial Sequence
  mmSKRIPTE0000700_Elf4_7
  gRNA
agatgggctatggtacagct

SEQ ID NO: 129922 - DNA, 20 bp, Artificial Sequence
  mmSKRIPTE0000701_Elf4_8
  gRNA
agtttgataacaacccacca

SEQ ID NO: 129923 - DNA, 20 bp, Artificial Sequence
  mmSKRIPTE0000702_Elf4_9
  gRNA
gatctggatgaggtccacaa

SEQ ID NO: 129924 - DNA, 20 bp, Artificial Sequence
  mmSKRIPTE0000703_Btk_1
  gRNA
ccaatggtggtggcgtagtg

SEQ ID NO: 129925 - DNA, 20 bp, Artificial Sequence
  mmSKRIPTE0000704_Btk_2
  gRNA
ttatctcgtgctcgccacca

SEQ ID NO: 129926 - DNA, 20 bp, Artificial Sequence
  mmSKRIPTE0000705_Btk_3
  gRNA
aatccggtacaatagtgacc

SEQ ID NO: 129927 - DNA, 20 bp, Artificial Sequence
  mmSKRIPTE0000706_Btk_4
  gRNA
agatagagcgtccaccgctg

SEQ ID NO: 129928 - DNA, 20 bp, Artificial Sequence
  mmSKRIPTE0000707_Btk_5
  gRNA
taatggcggatcaccccttg

SEQ ID NO: 129929 - DNA, 20 bp, Artificial Sequence
  mmSKRIPTE0000708_Btk_6
  gRNA
aggtatctaatcaccctctg

SEQ ID NO: 129930 - DNA, 20 bp, Artificial Sequence
  mmSKRIPTE0000709_Btk_7
  gRNA
gcctcgtggtaacagtgggt

SEQ ID NO: 129931 - DNA, 20 bp, Artificial Sequence
  mmSKRIPTE0000710_Btk_8
  gRNA
gtggaggggccaatatgatg

SEQ ID NO: 129932 - DNA, 20 bp, Artificial Sequence
  mmSKRIPTE0000711_Btk_9
  gRNA
aaaaacgcgccttctactgc

SEQ ID NO: 129933 - DNA, 20 bp, Artificial Sequence
  mmSKRIPTE0000712_Zbtb7a_1
  gRNA
tcttgcagcagctatcgcac

SEQ ID NO: 129934 - DNA, 20 bp, Artificial Sequence
  mmSKRIPTE0000713_Zbtb7a_2
  gRNA
gccatagtggccgttctgtg

SEQ ID NO: 129935 - DNA, 20 bp, Artificial Sequence
  mmSKRIPTE0000714_Zbtb7a_3
  gRNA
acgccctccatccacctgcg

SEQ ID NO: 129936 - DNA, 20 bp, Artificial Sequence
  mmSKRIPTE0000715_Zbtb7a_4
  gRNA
cgaaggaggtaggagccgcg

SEQ ID NO: 129937 - DNA, 20 bp, Artificial Sequence
  mmSKRIPTE0000716_Zbtb7a_5
  gRNA
gagggcgatgcaaattaccc

SEQ ID NO: 129938 - DNA, 20 bp, Artificial Sequence
  mmSKRIPTE0000717_Zbtb7a_6
  gRNA
gacagagaactgcttactcg

SEQ ID NO: 129939 - DNA, 20 bp, Artificial Sequence
  mmSKRIPTE0000718_Zbtb7a_7
  gRNA
ttgtggtgaaccaaacactg

SEQ ID NO: 129940 - DNA, 20 bp, Artificial Sequence
  mmSKRIPTE0000719_Zbtb7a_8
  gRNA
gcaggttgcgctggtcagtg

SEQ ID NO: 129941 - DNA, 20 bp, Artificial Sequence
  mmSKRIPTE0000720_Zbtb7a_9
  gRNA
gggaacctccagtcttgcgg

SEQ ID NO: 129942 - DNA, 20 bp, Artificial Sequence
  mmSKRIPTE0000721_Creb3_1
  gRNA
aggcgcgtggtacagtacac

SEQ ID NO: 129943 - DNA, 20 bp, Artificial Sequence
  mmSKRIPTE0000722_Creb3_2
  gRNA
gttcggaggttggatctgcg

SEQ ID NO: 129944 - DNA, 20 bp, Artificial Sequence
  mmSKRIPTE0000723_Creb3_3
  gRNA
gctgatgatcgtcctcgctg

SEQ ID NO: 129945 - DNA, 20 bp, Artificial Sequence
  mmSKRIPTE0000724_Creb3_4
  gRNA
tgtctccaaatctattcacg

SEQ ID NO: 129946 - DNA, 20 bp, Artificial Sequence
  mmSKRIPTE0000725_Creb3_5
  gRNA
cctcttaccaacatactccg

SEQ ID NO: 129947 - DNA, 20 bp, Artificial Sequence
  mmSKRIPTE0000726_Creb3_6
  gRNA
agaacatcccgcgatactga

SEQ ID NO: 129948 - DNA, 20 bp, Artificial Sequence
  mmSKRIPTE0000727_Creb3_7
  gRNA
ctaccacagaccacgcccga

SEQ ID NO: 129949 - DNA, 20 bp, Artificial Sequence
  mmSKRIPTE0000728_Creb3_8
  gRNA
gcaaacctttcagaaagcga

SEQ ID NO: 129950 - DNA, 20 bp, Artificial Sequence
  mmSKRIPTE0000729_Creb3_9
  gRNA
tctatcgtcagagctaccca

SEQ ID NO: 129951 - DNA, 20 bp, Artificial Sequence
  mmSKRIPTE0000730_March1_1
  gRNA
tgtgttgatagatcggacag

SEQ ID NO: 129952 - DNA, 20 bp, Artificial Sequence
  mmSKRIPTE0000731_March1_2
  gRNA
tgcagtcatccaccgccaag

SEQ ID NO: 129953 - DNA, 20 bp, Artificial Sequence
  mmSKRIPTE0000732_March1_3
  gRNA
tacgccttcaagtagtgcag

SEQ ID NO: 129954 - DNA, 20 bp, Artificial Sequence
  mmSKRIPTE0000733_March1_4
  gRNA
tgtctctggcatcatttcgt

SEQ ID NO: 129955 - DNA, 20 bp, Artificial Sequence
  mmSKRIPTE0000734_March1_5
  gRNA
cgtcatcgccgtcacctgtg

SEQ ID NO: 129956 - DNA, 20 bp, Artificial Sequence
  mmSKRIPTE0000735_March1_6
  gRNA
agtaccactacaccctctag

SEQ ID NO: 129957 - DNA, 20 bp, Artificial Sequence
  mmSKRIPTE0000736_March1_7
  gRNA
actcagtaagggtcatagtg

SEQ ID NO: 129958 - DNA, 20 bp, Artificial Sequence
  mmSKRIPTE0000737_March1_8
  gRNA
gtaaagtctacgtccaactg

SEQ ID NO: 129959 - DNA, 20 bp, Artificial Sequence
  mmSKRIPTE0000738_March1_9
  gRNA
ggactggtggacaaagcgca

SEQ ID NO: 129960 - DNA, 20 bp, Artificial Sequence
  mmSKRIPTE0000739_Stk10_1
  gRNA
atactgccaaacctccagtg

SEQ ID NO: 129961 - DNA, 20 bp, Artificial Sequence
  mmSKRIPTE0000740_Stk10_2
  gRNA
cgagacgctgaagctacgag

SEQ ID NO: 129962 - DNA, 20 bp, Artificial Sequence
  mmSKRIPTE0000741_Stk10_3
  gRNA
atagcaagcctaacaccccg

SEQ ID NO: 129963 - DNA, 20 bp, Artificial Sequence
  mmSKRIPTE0000742_Stk10_4
  gRNA
ggagactgtagtccgccggg

SEQ ID NO: 129964 - DNA, 20 bp, Artificial Sequence
  mmSKRIPTE0000743_Stk10_5
  gRNA
gacacgccacccacacggtg

SEQ ID NO: 129965 - DNA, 20 bp, Artificial Sequence
  mmSKRIPTE0000744_Stk10_6
  gRNA
ggagcttcacgatatacggg

SEQ ID NO: 129966 - DNA, 20 bp, Artificial Sequence
  mmSKRIPTE0000745_Stk10_7
  gRNA
aagggacgtttgtaggatcg

SEQ ID NO: 129967 - DNA, 20 bp, Artificial Sequence
  mmSKRIPTE0000746_Stk10_8
  gRNA
gaggtacggtgcccaatgtg

SEQ ID NO: 129968 - DNA, 20 bp, Artificial Sequence
  mmSKRIPTE0000747_Stk10_9
  gRNA
gtatgcatttccaagcaccg

SEQ ID NO: 129969 - DNA, 20 bp, Artificial Sequence
  mmSKRIPTE0000748_Prkcb_1
  gRNA
aattaggggtaaacgcaccg

SEQ ID NO: 129970 - DNA, 20 bp, Artificial Sequence
  mmSKRIPTE0000749_Prkcb_2
  gRNA
ctagaagattagatccacga

SEQ ID NO: 129971 - DNA, 20 bp, Artificial Sequence
  mmSKRIPTE0000750_Prkcb_3
  gRNA
cagtacgacagttatcagtg

SEQ ID NO: 129972 - DNA, 20 bp, Artificial Sequence
  mmSKRIPTE0000751_Prkcb_4
  gRNA
atgaacctaaagtagcaacg

SEQ ID NO: 129973 - DNA, 20 bp, Artificial Sequence
  mmSKRIPTE0000752_Prkcb_5
  gRNA
taaatattagctgcctcccg

SEQ ID NO: 129974 - DNA, 20 bp, Artificial Sequence
  mmSKRIPTE0000753_Prkcb_6
  gRNA
ttaagcttgaccacgagatg

SEQ ID NO: 129975 - DNA, 20 bp, Artificial Sequence
  mmSKRIPTE0000754_Prkcb_7
  gRNA
gactcgatactagacaagtg

SEQ ID NO: 129976 - DNA, 20 bp, Artificial Sequence
  mmSKRIPTE0000755_Prkcb_8
  gRNA
ccacggtggtaacacctgag

SEQ ID NO: 129977 - DNA, 20 bp, Artificial Sequence
  mmSKRIPTE0000756_Prkcb_9
  gRNA
gatcccccagccattaacgt

SEQ ID NO: 129978 - DNA, 20 bp, Artificial Sequence
  mmSKRIPTE0000757_Bmp6_1
  gRNA
tctcaaagctacacgacgag

SEQ ID NO: 129979 - DNA, 20 bp, Artificial Sequence
  mmSKRIPTE0000758_Bmp6_2
  gRNA
acgttcataacaggctggcg

SEQ ID NO: 129980 - DNA, 20 bp, Artificial Sequence
  mmSKRIPTE0000759_Bmp6_3
  gRNA
gtccccactgactagcgcgc

SEQ ID NO: 129981 - DNA, 20 bp, Artificial Sequence
  mmSKRIPTE0000760_Bmp6_4
  gRNA
cggtcatgagatgagccccg

SEQ ID NO: 129982 - DNA, 20 bp, Artificial Sequence
  mmSKRIPTE0000761_Bmp6_5
  gRNA
ttatctctcatggtcatccg

SEQ ID NO: 129983 - DNA, 20 bp, Artificial Sequence
  mmSKRIPTE0000762_Bmp6_6
  gRNA
cgggtggagaagagacgacg

SEQ ID NO: 129984 - DNA, 20 bp, Artificial Sequence
  mmSKRIPTE0000763_Bmp6_7
  gRNA
tgtccgtggtgcacaatatg

SEQ ID NO: 129985 - DNA, 20 bp, Artificial Sequence
  mmSKRIPTE0000764_Bmp6_8
  gRNA
tccttgtcgtactccactag

SEQ ID NO: 129986 - DNA, 20 bp, Artificial Sequence
  mmSKRIPTE0000765_Bmp6_9
  gRNA
aatttgattctacatctcgt

SEQ ID NO: 129987 - DNA, 20 bp, Artificial Sequence
  mmSKRIPTE0000766_Wnt2b_1
  gRNA
caggacgtgtctacacgggc

SEQ ID NO: 129988 - DNA, 20 bp, Artificial Sequence
  mmSKRIPTE0000767_Wnt2b_2
  gRNA
tggcgccccgtagaacggag

SEQ ID NO: 129989 - DNA, 20 bp, Artificial Sequence
  mmSKRIPTE0000768_Wnt2b_3
  gRNA
tactgaccgttgcctaacga

SEQ ID NO: 129990 - DNA, 20 bp, Artificial Sequence
  mmSKRIPTE0000769_Wnt2b_4
  gRNA
ttccctgtttaagtcgatcg

SEQ ID NO: 129991 - DNA, 20 bp, Artificial Sequence
  mmSKRIPTE0000770_Wnt2b_5
  gRNA
gtgacccatatacccgcggt

SEQ ID NO: 129992 - DNA, 20 bp, Artificial Sequence
  mmSKRIPTE0000771_Wnt2b_6
  gRNA
tgttgatgacgtctatcagt

SEQ ID NO: 129993 - DNA, 20 bp, Artificial Sequence
  mmSKRIPTE0000772_Wnt2b_7
  gRNA
ggaatctccgaacagcctag

SEQ ID NO: 129994 - DNA, 20 bp, Artificial Sequence
  mmSKRIPTE0000773_Wnt2b_8
  gRNA
ggcgatctaggagacgcctg

SEQ ID NO: 129995 - DNA, 20 bp, Artificial Sequence
  mmSKRIPTE0000774_Wnt2b_9
  gRNA
gcctgcgttatgcaacccca

SEQ ID NO: 129996 - DNA, 20 bp, Artificial Sequence
  mmSKRIPTE0000775_Dhx9_1
  gRNA
aacaagaagtacaagcggtg

SEQ ID NO: 129997 - DNA, 20 bp, Artificial Sequence
  mmSKRIPTE0000776_Dhx9_2
  gRNA
acctaataatgagactcatg

SEQ ID NO: 129998 - DNA, 20 bp, Artificial Sequence
  mmSKRIPTE0000777_Dhx9_3
  gRNA
ttagccaggattcgtccaag

SEQ ID NO: 129999 - DNA, 20 bp, Artificial Sequence
  mmSKRIPTE0000778_Dhx9_4
  gRNA
gagtaataagtactacaccc

SEQ ID NO: 130000 - DNA, 20 bp, Artificial Sequence
  mmSKRIPTE0000779_Dhx9_5
  gRNA
taaaggtgagtatgccaccg

SEQ ID NO: 130001 - DNA, 20 bp, Artificial Sequence
  mmSKRIPTE0000780_Dhx9_6
  gRNA
aagaacacacctcacccgca

SEQ ID NO: 130002 - DNA, 20 bp, Artificial Sequence
  mmSKRIPTE0000781_Dhx9_7
  gRNA
aatgtactgtggaacttgtg

SEQ ID NO: 130003 - DNA, 20 bp, Artificial Sequence
  mmSKRIPTE0000782_Dhx9_8
  gRNA
cctggacctacttgggaccg

SEQ ID NO: 130004 - DNA, 20 bp, Artificial Sequence
  mmSKRIPTE0000783_Dhx9_9
  gRNA
ccttatgatagcatacattg

SEQ ID NO: 130005 - DNA, 20 bp, Artificial Sequence
  mmSKRIPTE0000784_Itpkb_1
  gRNA
ctgtacttatacatcgtcgt

SEQ ID NO: 130006 - DNA, 20 bp, Artificial Sequence
  mmSKRIPTE0000785_Itpkb_2
  gRNA
gagtttgtcccgtagtggga

SEQ ID NO: 130007 - DNA, 20 bp, Artificial Sequence
  mmSKRIPTE0000786_Itpkb_3
  gRNA
aggaggcgcatgcttgacgt

SEQ ID NO: 130008 - DNA, 20 bp, Artificial Sequence
  mmSKRIPTE0000787_Itpkb_4
  gRNA
cgtaggacataaacaccccg

SEQ ID NO: 130009 - DNA, 20 bp, Artificial Sequence
  mmSKRIPTE0000788_Itpkb_5
  gRNA
ctgatggcattagccactag

SEQ ID NO: 130010 - DNA, 20 bp, Artificial Sequence
  mmSKRIPTE0000789_Itpkb_6
  gRNA
ctgcttgctaatccaaggcg

SEQ ID NO: 130011 - DNA, 20 bp, Artificial Sequence
  mmSKRIPTE0000790_Itpkb_7
  gRNA
ggcctggcatgggatcatcg

SEQ ID NO: 130012 - DNA, 20 bp, Artificial Sequence
  mmSKRIPTE0000791_Itpkb_8
  gRNA
tgatgcccctgactcccgtg

SEQ ID NO: 130013 - DNA, 20 bp, Artificial Sequence
  mmSKRIPTE0000792_Itpkb_9
  gRNA
cattgcccgtgaattcagag

SEQ ID NO: 130014 - DNA, 20 bp, Artificial Sequence
  mmSKRIPTE0000793_Myo1c_1
  gRNA
tcaccgagaattcagccgtg

SEQ ID NO: 130015 - DNA, 20 bp, Artificial Sequence
  mmSKRIPTE0000794_Myo1c_2
  gRNA
gttcccgtcaggtataggtg

SEQ ID NO: 130016 - DNA, 20 bp, Artificial Sequence
  mmSKRIPTE0000795_Myo1c_3
  gRNA
ttcaggacctagactcctgt

SEQ ID NO: 130017 - DNA, 20 bp, Artificial Sequence
  mmSKRIPTE0000796_Myo1c_4
  gRNA
tagatctgtaggtctcggta

SEQ ID NO: 130018 - DNA, 20 bp, Artificial Sequence
  mmSKRIPTE0000797_Myo1c_5
  gRNA
cagcatatggaacgctaccg

SEQ ID NO: 130019 - DNA, 20 bp, Artificial Sequence
  mmSKRIPTE0000798_Myo1c_6
  gRNA
ccccgagtagacaagcggag

SEQ ID NO: 130020 - DNA, 20 bp, Artificial Sequence
  mmSKRIPTE0000799_Myo1c_7
  gRNA
gagaacccacagtagtgccg

SEQ ID NO: 130021 - DNA, 20 bp, Artificial Sequence
  mmSKRIPTE0000800_Myo1c_8
  gRNA
cctcatcaaagcgacctgag

SEQ ID NO: 130022 - DNA, 20 bp, Artificial Sequence
  mmSKRIPTE0000801_Myo1c_9
  gRNA
acgacgccaagcagccgggt

SEQ ID NO: 130023 - DNA, 20 bp, Artificial Sequence
  mmSKRIPTE0000802_Tnrc6c_1
  gRNA
agtcatcattaaacctgacg

SEQ ID NO: 130024 - DNA, 20 bp, Artificial Sequence
  mmSKRIPTE0000803_Tnrc6c_2
  gRNA
atgcacattacagaggcggt

SEQ ID NO: 130025 - DNA, 20 bp, Artificial Sequence
  mmSKRIPTE0000804_Tnrc6c_3
  gRNA
cttaggagcagggcgcgtcg

SEQ ID NO: 130026 - DNA, 20 bp, Artificial Sequence
  mmSKRIPTE0000805_Tnrc6c_4
  gRNA
atgcatgtctacaggccgag

SEQ ID NO: 130027 - DNA, 20 bp, Artificial Sequence
  mmSKRIPTE0000806_Tnrc6c_5
  gRNA
acaaacggactgccaaactg

SEQ ID NO: 130028 - DNA, 20 bp, Artificial Sequence
  mmSKRIPTE0000807_Tnrc6c_6
  gRNA
acacatgataccgtaaggag

SEQ ID NO: 130029 - DNA, 20 bp, Artificial Sequence
  mmSKRIPTE0000808_Tnrc6c_7
  gRNA
atgctgagggttaattggcg

SEQ ID NO: 130030 - DNA, 20 bp, Artificial Sequence
  mmSKRIPTE0000809_Tnrc6c_8
  gRNA
gccagccacagatcttacgg

SEQ ID NO: 130031 - DNA, 20 bp, Artificial Sequence
  mmSKRIPTE0000810_Tnrc6c_9
  gRNA
tgcccgatttgcctgcagag

SEQ ID NO: 130032 - DNA, 20 bp, Artificial Sequence
  mmSKRIPTE0000811_Ifih1_1
  gRNA
cacctgtggtaacaccagcg

SEQ ID NO: 130033 - DNA, 20 bp, Artificial Sequence
  mmSKRIPTE0000812_Ifih1_2
  gRNA
cgtagacgacatattaccag

SEQ ID NO: 130034 - DNA, 20 bp, Artificial Sequence
  mmSKRIPTE0000813_Ifih1_3
  gRNA
tgtgggtttgacatagcgcg

SEQ ID NO: 130035 - DNA, 20 bp, Artificial Sequence
  mmSKRIPTE0000814_Ifih1_4
  gRNA
ctcctatccctgaagcgatg

SEQ ID NO: 130036 - DNA, 20 bp, Artificial Sequence
  mmSKRIPTE0000815_Ifih1_5
  gRNA
tatttccaaagttatcggga

SEQ ID NO: 130037 - DNA, 20 bp, Artificial Sequence
  mmSKRIPTE0000816_Ifih1_6
  gRNA
atgccgcctagatctttaga

SEQ ID NO: 130038 - DNA, 20 bp, Artificial Sequence
  mmSKRIPTE0000817_Ifih1_7
  gRNA
ggatgtgtgagtacgttgag

SEQ ID NO: 130039 - DNA, 20 bp, Artificial Sequence
  mmSKRIPTE0000818_Ifih1_8
  gRNA
gtggctcaggagttaccgaa

SEQ ID NO: 130040 - DNA, 20 bp, Artificial Sequence
  mmSKRIPTE0000819_Ifih1_9
  gRNA
tgtcacgaacgagatagcca

SEQ ID NO: 130041 - DNA, 20 bp, Artificial Sequence
  mmSKRIPTE0000820_Zfpm1_1
  gRNA
agggatccgacgacctaggt

SEQ ID NO: 130042 - DNA, 20 bp, Artificial Sequence
  mmSKRIPTE0000821_Zfpm1_2
  gRNA
gtgcacaaccggctacagca

SEQ ID NO: 130043 - DNA, 20 bp, Artificial Sequence
  mmSKRIPTE0000822_Zfpm1_3
  gRNA
tacaggagctcatcgatcgg

SEQ ID NO: 130044 - DNA, 20 bp, Artificial Sequence
  mmSKRIPTE0000823_Zfpm1_4
  gRNA
aaggccactactactatacg

SEQ ID NO: 130045 - DNA, 20 bp, Artificial Sequence
  mmSKRIPTE0000824_Zfpm1_5
  gRNA
aaaagacgagcgctagtttg

SEQ ID NO: 130046 - DNA, 20 bp, Artificial Sequence
  mmSKRIPTE0000825_Zfpm1_6
  gRNA
gtgggtcctacgattagacg

SEQ ID NO: 130047 - DNA, 20 bp, Artificial Sequence
  mmSKRIPTE0000826_Zfpm1_7
  gRNA
tatgtgttcagtccggacgc

SEQ ID NO: 130048 - DNA, 20 bp, Artificial Sequence
  mmSKRIPTE0000827_Zfpm1_8
  gRNA
gtggaagcttacgcgacatg

SEQ ID NO: 130049 - DNA, 20 bp, Artificial Sequence
  mmSKRIPTE0000828_Zfpm1_9
  gRNA
cctagcgcaaggcttacctg

SEQ ID NO: 130050 - DNA, 20 bp, Artificial Sequence
  mmSKRIPTE0000829_Dapk2_1
  gRNA
tgcaggctactactacctcg

SEQ ID NO: 130051 - DNA, 20 bp, Artificial Sequence
  mmSKRIPTE0000830_Dapk2_2
  gRNA
ggagagctggacgtgcaccg

SEQ ID NO: 130052 - DNA, 20 bp, Artificial Sequence
  mmSKRIPTE0000831_Dapk2_3
  gRNA
atcttgagtctccaatagtg

SEQ ID NO: 130053 - DNA, 20 bp, Artificial Sequence
  mmSKRIPTE0000832_Dapk2_4
  gRNA
catatttgggctcctcatcg

SEQ ID NO: 130054 - DNA, 20 bp, Artificial Sequence
  mmSKRIPTE0000833_Dapk2_5
  gRNA
gggtccatagatgaaacgag

SEQ ID NO: 130055 - DNA, 20 bp, Artificial Sequence
  mmSKRIPTE0000834_Dapk2_6
  gRNA
gcgccaggactcatgacacg

SEQ ID NO: 130056 - DNA, 20 bp, Artificial Sequence
  mmSKRIPTE0000835_Dapk2_7
  gRNA
ttactgctcaacattcaggt

SEQ ID NO: 130057 - DNA, 20 bp, Artificial Sequence
  mmSKRIPTE0000836_Dapk2_8
  gRNA
aggcggtggaaggtacgtca

SEQ ID NO: 130058 - DNA, 20 bp, Artificial Sequence
  mmSKRIPTE0000837_Dapk2_9
  gRNA
ggctaaccctactcaagtgt

SEQ ID NO: 130059 - DNA, 20 bp, Artificial Sequence
  mmSKRIPTE0000838_Slc11a1_1
  gRNA
aaggtcgtggaggatccggt

SEQ ID NO: 130060 - DNA, 20 bp, Artificial Sequence
  mmSKRIPTE0000839_Slc11a1_2
  gRNA
gcgtcctcatgattagtgag

SEQ ID NO: 130061 - DNA, 20 bp, Artificial Sequence
  mmSKRIPTE0000840_Slc11a1_3
  gRNA
ctgaggataagctcctatcg

SEQ ID NO: 130062 - DNA, 20 bp, Artificial Sequence
  mmSKRIPTE0000841_Slc11a1_4
  gRNA
caggccgggagtcagtacga

SEQ ID NO: 130063 - DNA, 20 bp, Artificial Sequence
  mmSKRIPTE0000842_Slc11a1_5
  gRNA
cctagcatgataccgtccag

SEQ ID NO: 130064 - DNA, 20 bp, Artificial Sequence
  mmSKRIPTE0000843_Slc11a1_6
  gRNA
aggtggacctgccagttgcg

SEQ ID NO: 130065 - DNA, 20 bp, Artificial Sequence
  mmSKRIPTE0000844_Slc11a1_7
  gRNA
agggaggtttaattacaaca

SEQ ID NO: 130066 - DNA, 20 bp, Artificial Sequence
  mmSKRIPTE0000845_Slc11a1_8
  gRNA
aaatggccctggtccctcgg

SEQ ID NO: 130067 - DNA, 20 bp, Artificial Sequence
  mmSKRIPTE0000846_Slc11a1_9
  gRNA
aggaacgaaggtcaaaactg

SEQ ID NO: 130068 - DNA, 20 bp, Artificial Sequence
  mmSKRIPTE0000847_Prkd1_1
  gRNA
ggttgagaatggtcatcacg

SEQ ID NO: 130069 - DNA, 20 bp, Artificial Sequence
  mmSKRIPTE0000848_Prkd1_2
  gRNA
catatttgtgatcagcacgt

SEQ ID NO: 130070 - DNA, 20 bp, Artificial Sequence
  mmSKRIPTE0000849_Prkd1_3
  gRNA
gtccgtagctacattagctg

SEQ ID NO: 130071 - DNA, 20 bp, Artificial Sequence
  mmSKRIPTE0000850_Prkd1_4
  gRNA
gtccatagaaaccacattcg

SEQ ID NO: 130072 - DNA, 20 bp, Artificial Sequence
  mmSKRIPTE0000851_Prkd1_5
  gRNA
gatctggaagtcttcgaagg

SEQ ID NO: 130073 - DNA, 20 bp, Artificial Sequence
  mmSKRIPTE0000852_Prkd1_6
  gRNA
gaggcatgagtgacacggtg

SEQ ID NO: 130074 - DNA, 20 bp, Artificial Sequence
  mmSKRIPTE0000853_Prkd1_7
  gRNA
agacacagtcattaacacgg

SEQ ID NO: 130075 - DNA, 20 bp, Artificial Sequence
  mmSKRIPTE0000854_Prkd1_8
  gRNA
ctgcaaagttggtggacccg

SEQ ID NO: 130076 - DNA, 20 bp, Artificial Sequence
  mmSKRIPTE0000855_Prkd1_9
  gRNA
tttccgggaaagtccgcgcg

SEQ ID NO: 130077 - DNA, 20 bp, Artificial Sequence
  mmSKRIPTE0000856_Jag2_1
  gRNA
tctcagtatcgaaagccggg

SEQ ID NO: 130078 - DNA, 20 bp, Artificial Sequence
  mmSKRIPTE0000857_Jag2_2
  gRNA
gccgtccacctgatccacgc

SEQ ID NO: 130079 - DNA, 20 bp, Artificial Sequence
  mmSKRIPTE0000858_Jag2_3
  gRNA
aggatgtaatttgctccacg

SEQ ID NO: 130080 - DNA, 20 bp, Artificial Sequence
  mmSKRIPTE0000859_Jag2_4
  gRNA
ccactcacgtaagtgccccg

SEQ ID NO: 130081 - DNA, 20 bp, Artificial Sequence
  mmSKRIPTE0000860_Jag2_5
  gRNA
actgaaagggaatgacgacg

SEQ ID NO: 130082 - DNA, 20 bp, Artificial Sequence
  mmSKRIPTE0000861_Jag2_6
  gRNA
aggccaaggtgacgcccacg

SEQ ID NO: 130083 - DNA, 20 bp, Artificial Sequence
  mmSKRIPTE0000862_Jag2_7
  gRNA
actgtttcgtatagacaacc

SEQ ID NO: 130084 - DNA, 20 bp, Artificial Sequence
  mmSKRIPTE0000863_Jag2_8
  gRNA
tgacactctggcatcccgcg

SEQ ID NO: 130085 - DNA, 20 bp, Artificial Sequence
  mmSKRIPTE0000864_Jag2_9
  gRNA
ccacagtggtcatattcacg

SEQ ID NO: 130086 - DNA, 20 bp, Artificial Sequence
  mmSKRIPTE0000865_Lgals1_1
  gRNA
gacgtcgactagacccagcg

SEQ ID NO: 130087 - DNA, 20 bp, Artificial Sequence
  mmSKRIPTE0000866_Lgals1_2
  gRNA
aggtggcctcggacgccaag

SEQ ID NO: 130088 - DNA, 20 bp, Artificial Sequence
  mmSKRIPTE0000867_Lgals1_3
  gRNA
tgcaattggctgaactcccg

SEQ ID NO: 130089 - DNA, 20 bp, Artificial Sequence
  mmSKRIPTE0000868_Lgals1_4
  gRNA
aggaccacttaggactagct

SEQ ID NO: 130090 - DNA, 20 bp, Artificial Sequence
  mmSKRIPTE0000869_Lgals1_5
  gRNA
agacgcttaaggtttcaggg

SEQ ID NO: 130091 - DNA, 20 bp, Artificial Sequence
  mmSKRIPTE0000870_Lgals1_6
  gRNA
tggaccagctcagagccccg

SEQ ID NO: 130092 - DNA, 20 bp, Artificial Sequence
  mmSKRIPTE0000871_Lgals1_7
  gRNA
tccagttaaaaaggtcggag

SEQ ID NO: 130093 - DNA, 20 bp, Artificial Sequence
  mmSKRIPTE0000872_Lgals1_8
  gRNA
ccagcccgggagcatcacag

SEQ ID NO: 130094 - DNA, 20 bp, Artificial Sequence
  mmSKRIPTE0000873_Lgals1_9
  gRNA
ggggaatgtctcaaagttcg

SEQ ID NO: 130095 - DNA, 20 bp, Artificial Sequence
  mmSKRIPTE0000874_Lcn2_1
  gRNA
gacttccggagcgatcaggt

SEQ ID NO: 130096 - DNA, 20 bp, Artificial Sequence
  mmSKRIPTE0000875_Lcn2_2
  gRNA
agtcctgactgagatcgctg

SEQ ID NO: 130097 - DNA, 20 bp, Artificial Sequence
  mmSKRIPTE0000876_Lcn2_3
  gRNA
tcaactggccattaccggtg

SEQ ID NO: 130098 - DNA, 20 bp, Artificial Sequence
  mmSKRIPTE0000877_Lcn2_4
  gRNA
gacctcaaagtggatcccga

SEQ ID NO: 130099 - DNA, 20 bp, Artificial Sequence
  mmSKRIPTE0000878_Lcn2_5
  gRNA
gcacagggtgaaatgccccg

SEQ ID NO: 130100 - DNA, 20 bp, Artificial Sequence
  mmSKRIPTE0000879_Lcn2_6
  gRNA
gactaccccgcccaacaggg

SEQ ID NO: 130101 - DNA, 20 bp, Artificial Sequence
  mmSKRIPTE0000880_Lcn2_7
  gRNA
agtgagtcctgaatccggtg

SEQ ID NO: 130102 - DNA, 20 bp, Artificial Sequence
  mmSKRIPTE0000881_Lcn2_8
  gRNA
ggaatctggactcctcatca

SEQ ID NO: 130103 - DNA, 20 bp, Artificial Sequence
  mmSKRIPTE0000882_Lcn2_9
  gRNA
acattgtagctctgtacctg

SEQ ID NO: 130104 - DNA, 20 bp, Artificial Sequence
  mmSKRIPTE0000883_Prkd2_1
  gRNA
tcggatctggaaatcctcga

SEQ ID NO: 130105 - DNA, 20 bp, Artificial Sequence
  mmSKRIPTE0000884_Prkd2_2
  gRNA
acgaacctgaggaaacggat

SEQ ID NO: 130106 - DNA, 20 bp, Artificial Sequence
  mmSKRIPTE0000885_Prkd2_3
  gRNA
ctgaggatcagtatggcgag

SEQ ID NO: 130107 - DNA, 20 bp, Artificial Sequence
  mmSKRIPTE0000886_Prkd2_4
  gRNA
ctaaggatgttacctaagtg

SEQ ID NO: 130108 - DNA, 20 bp, Artificial Sequence
  mmSKRIPTE0000887_Prkd2_5
  gRNA
agggagcgttaccgaaggcg

SEQ ID NO: 130109 - DNA, 20 bp, Artificial Sequence
  mmSKRIPTE0000888_Prkd2_6
  gRNA
tggcctaatggctagcagca

SEQ ID NO: 130110 - DNA, 20 bp, Artificial Sequence
  mmSKRIPTE0000889_Prkd2_7
  gRNA
tcggcacgtctgcgggaaca

SEQ ID NO: 130111 - DNA, 20 bp, Artificial Sequence
  mmSKRIPTE0000890_Prkd2_8
  gRNA
aggacgacgacgagggtggt

SEQ ID NO: 130112 - DNA, 20 bp, Artificial Sequence
  mmSKRIPTE0000891_Prkd2_9
  gRNA
tcacaggtcgtgaaagtcgg

SEQ ID NO: 130113 - DNA, 20 bp, Artificial Sequence
  mmSKRIPTE0000892_Axl_1
  gRNA
aggccaaactccctatccag

SEQ ID NO: 130114 - DNA, 20 bp, Artificial Sequence
  mmSKRIPTE0000893_Axl_2
  gRNA
tcagccgatttccttgacgc

SEQ ID NO: 130115 - DNA, 20 bp, Artificial Sequence
  mmSKRIPTE0000894_Axl_3
  gRNA
catggcgctaacgttctcag

SEQ ID NO: 130116 - DNA, 20 bp, Artificial Sequence
  mmSKRIPTE0000895_Axl_4
  gRNA
atttccggaatgcgccacag

SEQ ID NO: 130117 - DNA, 20 bp, Artificial Sequence
  mmSKRIPTE0000896_Axl_5
  gRNA
gtaaggatgaaacttcggag

SEQ ID NO: 130118 - DNA, 20 bp, Artificial Sequence
  mmSKRIPTE0000897_Axl_6
  gRNA
ggtgtaccccacacaaggag

SEQ ID NO: 130119 - DNA, 20 bp, Artificial Sequence
  mmSKRIPTE0000898_Axl_7
  gRNA
ctacaccagcaagagcgatg

SEQ ID NO: 130120 - DNA, 20 bp, Artificial Sequence
  mmSKRIPTE0000899_Axl_8
  gRNA
gggtaccggctggcatatcg

SEQ ID NO: 130121 - DNA, 20 bp, Artificial Sequence
  mmSKRIPTE0000900_Axl_9
  gRNA
ctcccacattgtcacaccga

SEQ ID NO: 130122 - DNA, 20 bp, Artificial Sequence
  mmSKRIPTE0000901_Etv2_1
  gRNA
tgcgacgaacctaagagtcg

SEQ ID NO: 130123 - DNA, 20 bp, Artificial Sequence
  mmSKRIPTE0000902_Etv2_2
  gRNA
cctggagctgctccacgacg

SEQ ID NO: 130124 - DNA, 20 bp, Artificial Sequence
  mmSKRIPTE0000903_Etv2_3
  gRNA
gttctcgcgatttaggaccc

SEQ ID NO: 130125 - DNA, 20 bp, Artificial Sequence
  mmSKRIPTE0000904_Etv2_4
  gRNA
tctgtccagtctcgcgacca

SEQ ID NO: 130126 - DNA, 20 bp, Artificial Sequence
  mmSKRIPTE0000905_Etv2_5
  gRNA
ccagacacgcaggttcgaca

SEQ ID NO: 130127 - DNA, 20 bp, Artificial Sequence
  mmSKRIPTE0000906_Etv2_6
  gRNA
ccatatcatcctgataggcg

SEQ ID NO: 130128 - DNA, 20 bp, Artificial Sequence
  mmSKRIPTE0000907_Etv2_7
  gRNA
ggctggagcatgaaatgtcg

SEQ ID NO: 130129 - DNA, 20 bp, Artificial Sequence
  mmSKRIPTE0000908_Etv2_8
  gRNA
caagtacacataccgcttcg

SEQ ID NO: 130130 - DNA, 20 bp, Artificial Sequence
  mmSKRIPTE0000909_Etv2_9
  gRNA
gttcggactacaccaccacg

SEQ ID NO: 130131 - DNA, 20 bp, Artificial Sequence
  mmSKRIPTE0000910_Nlrx1_1
  gRNA
acaacaccacggtctgcacg

SEQ ID NO: 130132 - DNA, 20 bp, Artificial Sequence
  mmSKRIPTE0000911_Nlrx1_2
  gRNA
gggtactggcaagagcacgt

SEQ ID NO: 130133 - DNA, 20 bp, Artificial Sequence
  mmSKRIPTE0000912_Nlrx1_3
  gRNA
gaagttagcttagagcgtgt

SEQ ID NO: 130134 - DNA, 20 bp, Artificial Sequence
  mmSKRIPTE0000913_Nlrx1_4
  gRNA
tgagatgcaaggacccgttg

SEQ ID NO: 130135 - DNA, 20 bp, Artificial Sequence
  mmSKRIPTE0000914_Nlrx1_5
  gRNA
gtcggctaaaccactcggtg

SEQ ID NO: 130136 - DNA, 20 bp, Artificial Sequence
  mmSKRIPTE0000915_Nlrx1_6
  gRNA
accatgcgcccaaacactcg

SEQ ID NO: 130137 - DNA, 20 bp, Artificial Sequence
  mmSKRIPTE0000916_Nlrx1_7
  gRNA
cgccgtcccttctgtcagcg

SEQ ID NO: 130138 - DNA, 20 bp, Artificial Sequence
  mmSKRIPTE0000917_Nlrx1_8
  gRNA
ggcgggcacggtgaacacga

SEQ ID NO: 130139 - DNA, 20 bp, Artificial Sequence
  mmSKRIPTE0000918_Nlrx1_9
  gRNA
tctctctgcccacaaccggg

SEQ ID NO: 130140 - DNA, 20 bp, Artificial Sequence
  mmSKRIPTE0000919_Traf3ip2_1
  gRNA
tagccgagattccggatgag

SEQ ID NO: 130141 - DNA, 20 bp, Artificial Sequence
  mmSKRIPTE0000920_Traf3ip2_2
  gRNA
aatgaaccgaagcattcccg

SEQ ID NO: 130142 - DNA, 20 bp, Artificial Sequence
  mmSKRIPTE0000921_Traf3ip2_3
  gRNA
ctttcctagagattcgagtg

SEQ ID NO: 130143 - DNA, 20 bp, Artificial Sequence
  mmSKRIPTE0000922_Traf3ip2_4
  gRNA
cattgacctgatgctcacga

SEQ ID NO: 130144 - DNA, 20 bp, Artificial Sequence
  mmSKRIPTE0000923_Traf3ip2_5
  gRNA
gtatgcaaatctctacggag

SEQ ID NO: 130145 - DNA, 20 bp, Artificial Sequence
  mmSKRIPTE0000924_Traf3ip2_6
  gRNA
gagtttaactctataaggag

SEQ ID NO: 130146 - DNA, 20 bp, Artificial Sequence
  mmSKRIPTE0000925_Traf3ip2_7
  gRNA
gaggtcctgcaggtaacacg

SEQ ID NO: 130147 - DNA, 20 bp, Artificial Sequence
  mmSKRIPTE0000926_Traf3ip2_8
  gRNA
aggataacttacgtggcacc

SEQ ID NO: 130148 - DNA, 20 bp, Artificial Sequence
  mmSKRIPTE0000927_Traf3ip2_9
  gRNA
tacgtgagttgtttgcatcg

SEQ ID NO: 130149 - DNA, 20 bp, Artificial Sequence
  mmSKRIPTE0000928_Ptk2b_1
  gRNA
cttcagctcagtatctgtcg

SEQ ID NO: 130150 - DNA, 20 bp, Artificial Sequence
  mmSKRIPTE0000929_Ptk2b_2
  gRNA
tctggacaaaaaaaccgggt

SEQ ID NO: 130151 - DNA, 20 bp, Artificial Sequence
  mmSKRIPTE0000930_Ptk2b_3
  gRNA
aggttggtgctcaggcaccg

SEQ ID NO: 130152 - DNA, 20 bp, Artificial Sequence
  mmSKRIPTE0000931_Ptk2b_4
  gRNA
gtatcatttccctgccgaag

SEQ ID NO: 130153 - DNA, 20 bp, Artificial Sequence
  mmSKRIPTE0000932_Ptk2b_5
  gRNA
cccacctcctggtcttcgca

SEQ ID NO: 130154 - DNA, 20 bp, Artificial Sequence
  mmSKRIPTE0000933_Ptk2b_6
  gRNA
aggatccggggatagcagcg

SEQ ID NO: 130155 - DNA, 20 bp, Artificial Sequence
  mmSKRIPTE0000934_Ptk2b_7
  gRNA
cctcccttcaagcatgcccg

SEQ ID NO: 130156 - DNA, 20 bp, Artificial Sequence
  mmSKRIPTE0000935_Ptk2b_8
  gRNA
gggtgtcagcctcaccacgg

SEQ ID NO: 130157 - DNA, 20 bp, Artificial Sequence
  mmSKRIPTE0000936_Ptk2b_9
  gRNA
gcgtcacgtgatctgcccaa

SEQ ID NO: 130158 - DNA, 20 bp, Artificial Sequence
  mmSKRIPTE0000937_Rab8b_1
  gRNA
atctcacataggtagcgacg

SEQ ID NO: 130159 - DNA, 20 bp, Artificial Sequence
  mmSKRIPTE0000938_Rab8b_2
  gRNA
aaatcccataaagcctcgcg

SEQ ID NO: 130160 - DNA, 20 bp, Artificial Sequence
  mmSKRIPTE0000939_Rab8b_3
  gRNA
gcttcaacagactagccaca

SEQ ID NO: 130161 - DNA, 20 bp, Artificial Sequence
  mmSKRIPTE0000940_Rab8b_4
  gRNA
cttctatagcccgtgaacag

SEQ ID NO: 130162 - DNA, 20 bp, Artificial Sequence
  mmSKRIPTE0000941_Rab8b_5
  gRNA
gactcgggtccttacccgtg

SEQ ID NO: 130163 - DNA, 20 bp, Artificial Sequence
  mmSKRIPTE0000942_Rab8b_6
  gRNA
tgagtaaactgcttgcacgg

SEQ ID NO: 130164 - DNA, 20 bp, Artificial Sequence
  mmSKRIPTE0000943_Rab8b_7
  gRNA
aggaccggatggtatcaaca

SEQ ID NO: 130165 - DNA, 20 bp, Artificial Sequence
  mmSKRIPTE0000944_Rab8b_8
  gRNA
ccatctgcgagagttaacaa

SEQ ID NO: 130166 - DNA, 20 bp, Artificial Sequence
  mmSKRIPTE0000945_Rab8b_9
  gRNA
aaacgccatagttcccatgg

SEQ ID NO: 130167 - DNA, 20 bp, Artificial Sequence
  mmSKRIPTE0000946_Col3a1_1
  gRNA
ctgtccaccagtgcttacgt

SEQ ID NO: 130168 - DNA, 20 bp, Artificial Sequence
  mmSKRIPTE0000947_Col3a1_2
  gRNA
gttagtgtaagcaacctgca

SEQ ID NO: 130169 - DNA, 20 bp, Artificial Sequence
  mmSKRIPTE0000948_Col3a1_3
  gRNA
acatcatatgagtcgaattg

SEQ ID NO: 130170 - DNA, 20 bp, Artificial Sequence
  mmSKRIPTE0000949_Col3a1_4
  gRNA
atgcttaccttgataccctg

SEQ ID NO: 130171 - DNA, 20 bp, Artificial Sequence
  mmSKRIPTE0000950_Col3a1_5
  gRNA
taccactcttgagttcgggg

SEQ ID NO: 130172 - DNA, 20 bp, Artificial Sequence
  mmSKRIPTE0000951_Col3a1_6
  gRNA
ttgaggtagttaacataggg

SEQ ID NO: 130173 - DNA, 20 bp, Artificial Sequence
  mmSKRIPTE0000952_Col3a1_7
  gRNA
ttggcacagcagtccaacgt

SEQ ID NO: 130174 - DNA, 20 bp, Artificial Sequence
  mmSKRIPTE0000953_Col3a1_8
  gRNA
gtatcgtaaataatctcatg

SEQ ID NO: 130175 - DNA, 20 bp, Artificial Sequence
  mmSKRIPTE0000954_Col3a1_9
  gRNA
tctaaccccagcaaatcctg

SEQ ID NO: 130176 - DNA, 20 bp, Artificial Sequence
  mmSKRIPTE0000955_Ptprc_1
  gRNA
tagagggactccaaacgcag

SEQ ID NO: 130177 - DNA, 20 bp, Artificial Sequence
  mmSKRIPTE0000956_Ptprc_2
  gRNA
taatttatggcggatcactg

SEQ ID NO: 130178 - DNA, 20 bp, Artificial Sequence
  mmSKRIPTE0000957_Ptprc_3
  gRNA
ctcaaaagttcggagagtgt

SEQ ID NO: 130179 - DNA, 20 bp, Artificial Sequence
  mmSKRIPTE0000958_Ptprc_4
  gRNA
ttgattatagcagaccgggt

SEQ ID NO: 130180 - DNA, 20 bp, Artificial Sequence
  mmSKRIPTE0000959_Ptprc_5
  gRNA
gagttcctggatgctatgtg

SEQ ID NO: 130181 - DNA, 20 bp, Artificial Sequence
  mmSKRIPTE0000960_Ptprc_6
  gRNA
gcaagcaggagatttcgcta

SEQ ID NO: 130182 - DNA, 20 bp, Artificial Sequence
  mmSKRIPTE0000961_Ptprc_7
  gRNA
gtagcagaaatcttatatcg

SEQ ID NO: 130183 - DNA, 20 bp, Artificial Sequence
  mmSKRIPTE0000962_Ptprc_8
  gRNA
agcactattggtaggctccg

SEQ ID NO: 130184 - DNA, 20 bp, Artificial Sequence
  mmSKRIPTE0000963_Ptprc_9
  gRNA
tgagaaagcaacctccggtg

SEQ ID NO: 130185 - DNA, 20 bp, Artificial Sequence
  mmSKRIPTE0000964_Ankrd54_1
  gRNA
catacctcctcgaagcagtg

SEQ ID NO: 130186 - DNA, 20 bp, Artificial Sequence
  mmSKRIPTE0000965_Ankrd54_2
  gRNA
ccgtccgttcgctgacagcg

SEQ ID NO: 130187 - DNA, 20 bp, Artificial Sequence
  mmSKRIPTE0000966_Ankrd54_3
  gRNA
tctgctacaacagcacgtgt

SEQ ID NO: 130188 - DNA, 20 bp, Artificial Sequence
  mmSKRIPTE0000967_Ankrd54_4
  gRNA
ggcaacacgccattgcacct

SEQ ID NO: 130189 - DNA, 20 bp, Artificial Sequence
  mmSKRIPTE0000968_Ankrd54_5
  gRNA
cctgtgaggaactctcatat

SEQ ID NO: 130190 - DNA, 20 bp, Artificial Sequence
  mmSKRIPTE0000969_Ankrd54_6
  gRNA
acatacctggggtatattcg

SEQ ID NO: 130191 - DNA, 20 bp, Artificial Sequence
  mmSKRIPTE0000970_Ankrd54_7
  gRNA
ggaagcgggtcccataacca

SEQ ID NO: 130192 - DNA, 20 bp, Artificial Sequence
  mmSKRIPTE0000971_Ankrd54_8
  gRNA
agtgatcgcagtgatcgtag

SEQ ID NO: 130193 - DNA, 20 bp, Artificial Sequence
  mmSKRIPTE0000972_Ankrd54_9
  gRNA
cgatgtagttacagtaccag

SEQ ID NO: 130194 - DNA, 20 bp, Artificial Sequence
  mmSKRIPTE0000973_Ptprs_1
  gRNA
cttctaaggaagccgcctag

SEQ ID NO: 130195 - DNA, 20 bp, Artificial Sequence
  mmSKRIPTE0000974_Ptprs_2
  gRNA
gaccaatactggcctaaccg

SEQ ID NO: 130196 - DNA, 20 bp, Artificial Sequence
  mmSKRIPTE0000975_Ptprs_3
  gRNA
tgtcctactaggtagtccag

SEQ ID NO: 130197 - DNA, 20 bp, Artificial Sequence
  mmSKRIPTE0000976_Ptprs_4
  gRNA
gacgccgaggtagatccgag

SEQ ID NO: 130198 - DNA, 20 bp, Artificial Sequence
  mmSKRIPTE0000977_Ptprs_5
  gRNA
gaactggtactcgtcctgca

SEQ ID NO: 130199 - DNA, 20 bp, Artificial Sequence
  mmSKRIPTE0000978_Ptprs_6
  gRNA
accgccagaaactcacaacg

SEQ ID NO: 130200 - DNA, 20 bp, Artificial Sequence
  mmSKRIPTE0000979_Ptprs_7
  gRNA
ccgtggcttaggatcacccg

SEQ ID NO: 130201 - DNA, 20 bp, Artificial Sequence
  mmSKRIPTE0000980_Ptprs_8
  gRNA
ccacctcgagacttccgaag

SEQ ID NO: 130202 - DNA, 20 bp, Artificial Sequence
  mmSKRIPTE0000981_Ptprs_9
  gRNA
tcgtacacgttctcatcccg

SEQ ID NO: 130203 - DNA, 20 bp, Artificial Sequence
  mmSKRIPTE0000982_Klf4_1
  gRNA
agttataagtaagaagcgcg

SEQ ID NO: 130204 - DNA, 20 bp, Artificial Sequence
  mmSKRIPTE0000983_Klf4_2
  gRNA
gccatgtcagactcgccagg

SEQ ID NO: 130205 - DNA, 20 bp, Artificial Sequence
  mmSKRIPTE0000984_Klf4_3
  gRNA
gtagtggcgccctacagcgg

SEQ ID NO: 130206 - DNA, 20 bp, Artificial Sequence
  mmSKRIPTE0000985_Klf4_4
  gRNA
gagttgagagctgtacggat

SEQ ID NO: 130207 - DNA, 20 bp, Artificial Sequence
  mmSKRIPTE0000986_Klf4_5
  gRNA
cgcgacactcacgttagtcg

SEQ ID NO: 130208 - DNA, 20 bp, Artificial Sequence
  mmSKRIPTE0000987_Klf4_6
  gRNA
aggcagataagtaggtccga

SEQ ID NO: 130209 - DNA, 20 bp, Artificial Sequence
  mmSKRIPTE0000988_Klf4_7
  gRNA
cagtggccgcgacaacggtg

SEQ ID NO: 130210 - DNA, 20 bp, Artificial Sequence
  mmSKRIPTE0000989_Klf4_8
  gRNA
tacccctacactgagtcccg

SEQ ID NO: 130211 - DNA, 20 bp, Artificial Sequence
  mmSKRIPTE0000990_Klf4_9
  gRNA
gagtcggccttaagtgcgtg

SEQ ID NO: 130212 - DNA, 20 bp, Artificial Sequence
  mmSKRIPTE0000991_Fam20c_1
  gRNA
acgagtgcagccataaggtg

SEQ ID NO: 130213 - DNA, 20 bp, Artificial Sequence
  mmSKRIPTE0000992_Fam20c_2
  gRNA
gatgccttactgcgggacct

SEQ ID NO: 130214 - DNA, 20 bp, Artificial Sequence
  mmSKRIPTE0000993_Fam20c_3
  gRNA
actatggtgccgtaggactg

SEQ ID NO: 130215 - DNA, 20 bp, Artificial Sequence
  mmSKRIPTE0000994_Fam20c_4
  gRNA
agaagatcaccagcgtcggt

SEQ ID NO: 130216 - DNA, 20 bp, Artificial Sequence
  mmSKRIPTE0000995_Fam20c_5
  gRNA
attcggtggccactgtcgta

SEQ ID NO: 130217 - DNA, 20 bp, Artificial Sequence
  mmSKRIPTE0000996_Fam20c_6
  gRNA
gggaggcccgaccagatcga

SEQ ID NO: 130218 - DNA, 20 bp, Artificial Sequence
  mmSKRIPTE0000997_Fam20c_7
  gRNA
gtcctgggcaggcgacaaag

SEQ ID NO: 130219 - DNA, 20 bp, Artificial Sequence
  mmSKRIPTE0000998_Fam20c_8
  gRNA
gtagggtgtcactaccggga

SEQ ID NO: 130220 - DNA, 20 bp, Artificial Sequence
  mmSKRIPTE0000999_Fam20c_9
  gRNA
ttccagtgattccgaatacg

SEQ ID NO: 130221 - DNA, 20 bp, Artificial Sequence
  mmSKRIPTE0001000_Efnb2_1
  gRNA
aggtggctagtgtccgtgtg

SEQ ID NO: 130222 - DNA, 20 bp, Artificial Sequence
  mmSKRIPTE0001001_Efnb2_2
  gRNA
ggtacgctgtatggtccggg

SEQ ID NO: 130223 - DNA, 20 bp, Artificial Sequence
  mmSKRIPTE0001002_Efnb2_3
  gRNA
atggcttggaggtccgcgtg

SEQ ID NO: 130224 - DNA, 20 bp, Artificial Sequence
  mmSKRIPTE0001003_Efnb2_4
  gRNA
cctaattggagttgagcgtg

SEQ ID NO: 130225 - DNA, 20 bp, Artificial Sequence
  mmSKRIPTE0001004_Efnb2_5
  gRNA
cggttctgcgagattcccgc

SEQ ID NO: 130226 - DNA, 20 bp, Artificial Sequence
  mmSKRIPTE0001005_Efnb2_6
  gRNA
taaaagctatctttacgaca

SEQ ID NO: 130227 - DNA, 20 bp, Artificial Sequence
  mmSKRIPTE0001006_Efnb2_7
  gRNA
agacccacctgtaaaccatg

SEQ ID NO: 130228 - DNA, 20 bp, Artificial Sequence
  mmSKRIPTE0001007_Efnb2_8
  gRNA
tcatgaccatctaaactgtg

SEQ ID NO: 130229 - DNA, 20 bp, Artificial Sequence
  mmSKRIPTE0001008_Efnb2_9
  gRNA
cattgcacccagttgctgag

SEQ ID NO: 130230 - DNA, 20 bp, Artificial Sequence
  mmSKRIPTE0001009_Mst1r_1
  gRNA
ctactctgcaggcattacag

SEQ ID NO: 130231 - DNA, 20 bp, Artificial Sequence
  mmSKRIPTE0001010_Mst1r_2
  gRNA
gttcaccaccaagtccgatg

SEQ ID NO: 130232 - DNA, 20 bp, Artificial Sequence
  mmSKRIPTE0001011_Mst1r_3
  gRNA
aagtctctgagtcgtaagcg

SEQ ID NO: 130233 - DNA, 20 bp, Artificial Sequence
  mmSKRIPTE0001012_Mst1r_4
  gRNA
tggcagcatagcaggtacaa

SEQ ID NO: 130234 - DNA, 20 bp, Artificial Sequence
  mmSKRIPTE0001013_Mst1r_5
  gRNA
cgtgatgcttcgatgctggg

SEQ ID NO: 130235 - DNA, 20 bp, Artificial Sequence
  mmSKRIPTE0001014_Mst1r_6
  gRNA
ctctgggagctactaacacg

SEQ ID NO: 130236 - DNA, 20 bp, Artificial Sequence
  mmSKRIPTE0001015_Mst1r_7
  gRNA
ccacagcggaatatagacag

SEQ ID NO: 130237 - DNA, 20 bp, Artificial Sequence
  mmSKRIPTE0001016_Mst1r_8
  gRNA
tgatctttaactcccgaaga

SEQ ID NO: 130238 - DNA, 20 bp, Artificial Sequence
  mmSKRIPTE0001017_Mst1r_9
  gRNA
agatcggggcaagacctggt

SEQ ID NO: 130239 - DNA, 20 bp, Artificial Sequence
  mmSKRIPTE0001018_Myd88_1
  gRNA
ttgctagaatctagactacg

SEQ ID NO: 130240 - DNA, 20 bp, Artificial Sequence
  mmSKRIPTE0001019_Myd88_2
  gRNA
taaattctcacaccttcgag

SEQ ID NO: 130241 - DNA, 20 bp, Artificial Sequence
  mmSKRIPTE0001020_Myd88_3
  gRNA
tctatggtagagaacgtgaa

SEQ ID NO: 130242 - DNA, 20 bp, Artificial Sequence
  mmSKRIPTE0001021_Myd88_4
  gRNA
ccacaggcgagcgtactgga

SEQ ID NO: 130243 - DNA, 20 bp, Artificial Sequence
  mmSKRIPTE0001022_Myd88_5
  gRNA
gtgtggtattaggaccacgt

SEQ ID NO: 130244 - DNA, 20 bp, Artificial Sequence
  mmSKRIPTE0001023_Myd88_6
  gRNA
tcgcgcttaacgtgggagtg

SEQ ID NO: 130245 - DNA, 20 bp, Artificial Sequence
  mmSKRIPTE0001024_Myd88_7
  gRNA
gctgaagtcgcgcatcggtg

SEQ ID NO: 130246 - DNA, 20 bp, Artificial Sequence
  mmSKRIPTE0001025_Myd88_8
  gRNA
agccatctagaagccctagg

SEQ ID NO: 130247 - DNA, 20 bp, Artificial Sequence
  mmSKRIPTE0001026_Myd88_9
  gRNA
ctttgtgccaaggatcaacg

SEQ ID NO: 130248 - DNA, 20 bp, Artificial Sequence
  mmSKRIPTE0001027_Pbx1_1
  gRNA
aaagacaaccattatcatag

SEQ ID NO: 130249 - DNA, 20 bp, Artificial Sequence
  mmSKRIPTE0001028_Pbx1_2
  gRNA
ctttctagacgacaacacgt

SEQ ID NO: 130250 - DNA, 20 bp, Artificial Sequence
  mmSKRIPTE0001029_Pbx1_3
  gRNA
aaatcgcagtcatcaatcag

SEQ ID NO: 130251 - DNA, 20 bp, Artificial Sequence
  mmSKRIPTE0001030_Pbx1_4
  gRNA
tcgaaggaggttcatcacgt

SEQ ID NO: 130252 - DNA, 20 bp, Artificial Sequence
  mmSKRIPTE0001031_Pbx1_5
  gRNA
aagggtatccacctagacag

SEQ ID NO: 130253 - DNA, 20 bp, Artificial Sequence
  mmSKRIPTE0001032_Pbx1_6
  gRNA
ttagaatgcaagcgctacca

SEQ ID NO: 130254 - DNA, 20 bp, Artificial Sequence
  mmSKRIPTE0001033_Pbx1_7
  gRNA
cagataagcccggacctatg

SEQ ID NO: 130255 - DNA, 20 bp, Artificial Sequence
  mmSKRIPTE0001034_Pbx1_8
  gRNA
acatagtagatgacagacgt

SEQ ID NO: 130256 - DNA, 20 bp, Artificial Sequence
  mmSKRIPTE0001035_Pbx1_9
  gRNA
gctctgtagttcgaatgaag

SEQ ID NO: 130257 - DNA, 20 bp, Artificial Sequence
  mmSKRIPTE0001036_Ror2_1
  gRNA
acactggtctgacagttgcg

SEQ ID NO: 130258 - DNA, 20 bp, Artificial Sequence
  mmSKRIPTE0001037_Ror2_2
  gRNA
taggtcgcacagccccctcg

SEQ ID NO: 130259 - DNA, 20 bp, Artificial Sequence
  mmSKRIPTE0001038_Ror2_3
  gRNA
accatagctccgatgccgtg

SEQ ID NO: 130260 - DNA, 20 bp, Artificial Sequence
  mmSKRIPTE0001039_Ror2_4
  gRNA
agagaatacatactacacgg

SEQ ID NO: 130261 - DNA, 20 bp, Artificial Sequence
  mmSKRIPTE0001040_Ror2_5
  gRNA
gtcacacagagcacgtctac

SEQ ID NO: 130262 - DNA, 20 bp, Artificial Sequence
  mmSKRIPTE0001041_Ror2_6
  gRNA
cctccgcccataaagcaggg

SEQ ID NO: 130263 - DNA, 20 bp, Artificial Sequence
  mmSKRIPTE0001042_Ror2_7
  gRNA
gcagaataaaaacgtacgcg

SEQ ID NO: 130264 - DNA, 20 bp, Artificial Sequence
  mmSKRIPTE0001043_Ror2_8
  gRNA
catgcgcatcgggatcccgg

SEQ ID NO: 130265 - DNA, 20 bp, Artificial Sequence
  mmSKRIPTE0001044_Ror2_9
  gRNA
gaataaagccaaaacgtcga

SEQ ID NO: 130266 - DNA, 20 bp, Artificial Sequence
  mmSKRIPTE0001045_Ssbp3_1
  gRNA
acaccccatgcccgacaatg

SEQ ID NO: 130267 - DNA, 20 bp, Artificial Sequence
  mmSKRIPTE0001046_Ssbp3_2
  gRNA
tgctgacgacggcagacgtg

SEQ ID NO: 130268 - DNA, 20 bp, Artificial Sequence
  mmSKRIPTE0001047_Ssbp3_3
  gRNA
aggaacatactagacctgag

SEQ ID NO: 130269 - DNA, 20 bp, Artificial Sequence
  mmSKRIPTE0001048_Ssbp3_4
  gRNA
caggctactcctacaaggtg

SEQ ID NO: 130270 - DNA, 20 bp, Artificial Sequence
  mmSKRIPTE0001049_Ssbp3_5
  gRNA
tggtggttgagtcaagtgag

SEQ ID NO: 130271 - DNA, 20 bp, Artificial Sequence
  mmSKRIPTE0001050_Ssbp3_6
  gRNA
tctccacagctacagaagcg

SEQ ID NO: 130272 - DNA, 20 bp, Artificial Sequence
  mmSKRIPTE0001051_Ssbp3_7
  gRNA
cactgccagttgtgtacgga

SEQ ID NO: 130273 - DNA, 20 bp, Artificial Sequence
  mmSKRIPTE0001052_Ssbp3_8
  gRNA
gctatggcaataccacagca

SEQ ID NO: 130274 - DNA, 20 bp, Artificial Sequence
  mmSKRIPTE0001053_Ssbp3_9
  gRNA
cctggttcaatggcgaacaa

SEQ ID NO: 130275 - DNA, 20 bp, Artificial Sequence
  mmSKRIPTE0001054_Inppl1_1
  gRNA
agaatccggtcacaccacga

SEQ ID NO: 130276 - DNA, 20 bp, Artificial Sequence
  mmSKRIPTE0001055_Inppl1_2
  gRNA
taactggggtaacgttacga

SEQ ID NO: 130277 - DNA, 20 bp, Artificial Sequence
  mmSKRIPTE0001056_Inppl1_3
  gRNA
ctgccggcgagaaataaggg

SEQ ID NO: 130278 - DNA, 20 bp, Artificial Sequence
  mmSKRIPTE0001057_Inppl1_4
  gRNA
gttgaaagttcggagcggtg

SEQ ID NO: 130279 - DNA, 20 bp, Artificial Sequence
  mmSKRIPTE0001058_Inppl1_5
  gRNA
gagcctcaactaccgaacgc

SEQ ID NO: 130280 - DNA, 20 bp, Artificial Sequence
  mmSKRIPTE0001059_Inppl1_6
  gRNA
gtcaacccgagtcgccctag

SEQ ID NO: 130281 - DNA, 20 bp, Artificial Sequence
  mmSKRIPTE0001060_Inppl1_7
  gRNA
ggccatcttaagtggccgcg

SEQ ID NO: 130282 - DNA, 20 bp, Artificial Sequence
  mmSKRIPTE0001061_Inppl1_8
  gRNA
ctagaggggaagagccgtcg

SEQ ID NO: 130283 - DNA, 20 bp, Artificial Sequence
  mmSKRIPTE0001062_Inppl1_9
  gRNA
aggggccggccatagtccga

SEQ ID NO: 130284 - DNA, 20 bp, Artificial Sequence
  mmSKRIPTE0001063_Irf2_1
  gRNA
ccgtacgagaattactactg

SEQ ID NO: 130285 - DNA, 20 bp, Artificial Sequence
  mmSKRIPTE0001064_Irf2_2
  gRNA
agagatacgcatctaccgag

SEQ ID NO: 130286 - DNA, 20 bp, Artificial Sequence
  mmSKRIPTE0001065_Irf2_3
  gRNA
tggactaggcaaagtatctg

SEQ ID NO: 130287 - DNA, 20 bp, Artificial Sequence
  mmSKRIPTE0001066_Irf2_4
  gRNA
gtggaagctctgaaacctag

SEQ ID NO: 130288 - DNA, 20 bp, Artificial Sequence
  mmSKRIPTE0001067_Irf2_5
  gRNA
gttctggatcaattcacgga

SEQ ID NO: 130289 - DNA, 20 bp, Artificial Sequence
  mmSKRIPTE0001068_Irf2_6
  gRNA
ctgttgtgaccgtattgtca

SEQ ID NO: 130290 - DNA, 20 bp, Artificial Sequence
  mmSKRIPTE0001069_Irf2_7
  gRNA
gttaataatctgcaacgggt

SEQ ID NO: 130291 - DNA, 20 bp, Artificial Sequence
  mmSKRIPTE0001070_Irf2_8
  gRNA
cccactccccttacctgcgt

SEQ ID NO: 130292 - DNA, 20 bp, Artificial Sequence
  mmSKRIPTE0001071_Irf2_9
  gRNA
ggattcaaccaattagacag

SEQ ID NO: 130293 - DNA, 20 bp, Artificial Sequence
  mmSKRIPTE0001072_Hand2_1
  gRNA
gggttaatatatgtcgtcag

SEQ ID NO: 130294 - DNA, 20 bp, Artificial Sequence
  mmSKRIPTE0001073_Hand2_2
  gRNA
gtggaaacatcttcgactag

SEQ ID NO: 130295 - DNA, 20 bp, Artificial Sequence
  mmSKRIPTE0001074_Hand2_3
  gRNA
cttagctcgcctcggcctag

SEQ ID NO: 130296 - DNA, 20 bp, Artificial Sequence
  mmSKRIPTE0001075_Hand2_4
  gRNA
cccaagattcttgtccggag

SEQ ID NO: 130297 - DNA, 20 bp, Artificial Sequence
  mmSKRIPTE0001076_Hand2_5
  gRNA
agggccatactgtagtcggg

SEQ ID NO: 130298 - DNA, 20 bp, Artificial Sequence
  mmSKRIPTE0001077_Hand2_6
  gRNA
cggcgaatggactctcggag

SEQ ID NO: 130299 - DNA, 20 bp, Artificial Sequence
  mmSKRIPTE0001078_Hand2_7
  gRNA
atgaagaggacactcccgtg

SEQ ID NO: 130300 - DNA, 20 bp, Artificial Sequence
  mmSKRIPTE0001079_Hand2_8
  gRNA
tggtcagtactaagggatcg

SEQ ID NO: 130301 - DNA, 20 bp, Artificial Sequence
  mmSKRIPTE0001080_Hand2_9
  gRNA
ctagaggacactgagcgcta

SEQ ID NO: 130302 - DNA, 20 bp, Artificial Sequence
  mmSKRIPTE0001081_P4htm_1
  gRNA
cttgcacagtggccgcaccg

SEQ ID NO: 130303 - DNA, 20 bp, Artificial Sequence
  mmSKRIPTE0001082_P4htm_2
  gRNA
tggggatggatatagcccgc

SEQ ID NO: 130304 - DNA, 20 bp, Artificial Sequence
  mmSKRIPTE0001083_P4htm_3
  gRNA
cccgcacacagtgatgcgtg

SEQ ID NO: 130305 - DNA, 20 bp, Artificial Sequence
  mmSKRIPTE0001084_P4htm_4
  gRNA
gttcgaggttgacatacacg

SEQ ID NO: 130306 - DNA, 20 bp, Artificial Sequence
  mmSKRIPTE0001085_P4htm_5
  gRNA
atgtcttggatgatgctgaa

SEQ ID NO: 130307 - DNA, 20 bp, Artificial Sequence
  mmSKRIPTE0001086_P4htm_6
  gRNA
ctcgcctgggaaatggacgg

SEQ ID NO: 130308 - DNA, 20 bp, Artificial Sequence
  mmSKRIPTE0001087_P4htm_7
  gRNA
acactcaagaatcttgtagg

SEQ ID NO: 130309 - DNA, 20 bp, Artificial Sequence
  mmSKRIPTE0001088_P4htm_8
  gRNA
ggggtagcatttgactacag

SEQ ID NO: 130310 - DNA, 20 bp, Artificial Sequence
  mmSKRIPTE0001089_P4htm_9
  gRNA
gtgtcggctcatcatccacc

SEQ ID NO: 130311 - DNA, 20 bp, Artificial Sequence
  mmSKRIPTE0001090_Notch1_1
  gRNA
ctgcccaccaggcttcgtcg

SEQ ID NO: 130312 - DNA, 20 bp, Artificial Sequence
  mmSKRIPTE0001091_Notch1_2
  gRNA
cagtatcaagtatacgcctg

SEQ ID NO: 130313 - DNA, 20 bp, Artificial Sequence
  mmSKRIPTE0001092_Notch1_3
  gRNA
acagcgtccactgctcacgt

SEQ ID NO: 130314 - DNA, 20 bp, Artificial Sequence
  mmSKRIPTE0001093_Notch1_4
  gRNA
aggagcctgagggcccacga

SEQ ID NO: 130315 - DNA, 20 bp, Artificial Sequence
  mmSKRIPTE0001094_Notch1_5
  gRNA
ccgactgagtcctcgccgag

SEQ ID NO: 130316 - DNA, 20 bp, Artificial Sequence
  mmSKRIPTE0001095_Notch1_6
  gRNA
ttgcagtatccctcctaaag

SEQ ID NO: 130317 - DNA, 20 bp, Artificial Sequence
  mmSKRIPTE0001096_Notch1_7
  gRNA
actttctgtaaccaccagtg

SEQ ID NO: 130318 - DNA, 20 bp, Artificial Sequence
  mmSKRIPTE0001097_Notch1_8
  gRNA
acatacccgtccactccggt

SEQ ID NO: 130319 - DNA, 20 bp, Artificial Sequence
  mmSKRIPTE0001098_Notch1_9
  gRNA
gtatacaccttcataacctg

SEQ ID NO: 130320 - DNA, 20 bp, Artificial Sequence
  mmSKRIPTE0001099_Cx3cl1_1
  gRNA
tttcgcatttcgtcatgccg

SEQ ID NO: 130321 - DNA, 20 bp, Artificial Sequence
  mmSKRIPTE0001100_Cx3cl1_2
  gRNA
cagctcctagtagtcactcg

SEQ ID NO: 130322 - DNA, 20 bp, Artificial Sequence
  mmSKRIPTE0001101_Cx3cl1_3
  gRNA
gtcaggggtcaccaccagtg

SEQ ID NO: 130323 - DNA, 20 bp, Artificial Sequence
  mmSKRIPTE0001102_Cx3cl1_4
  gRNA
tcagcgaggagatagcctgt

SEQ ID NO: 130324 - DNA, 20 bp, Artificial Sequence
  mmSKRIPTE0001103_Cx3cl1_5
  gRNA
caaagccactgggattcgtg

SEQ ID NO: 130325 - DNA, 20 bp, Artificial Sequence
  mmSKRIPTE0001104_Cx3cl1_6
  gRNA
gtttcctggatggctcaccg

SEQ ID NO: 130326 - DNA, 20 bp, Artificial Sequence
  mmSKRIPTE0001105_Cx3cl1_7
  gRNA
actcctggtttagctgatag

SEQ ID NO: 130327 - DNA, 20 bp, Artificial Sequence
  mmSKRIPTE0001106_Cx3cl1_8
  gRNA
gctacgtagcagaagccact

SEQ ID NO: 130328 - DNA, 20 bp, Artificial Sequence
  mmSKRIPTE0001107_Cx3cl1_9
  gRNA
gccattggtttagacaacgc

SEQ ID NO: 130329 - DNA, 20 bp, Artificial Sequence
  mmSKRIPTE0001108_Tnfsf9_1
  gRNA
gttcagtgcaggcggccacg

SEQ ID NO: 130330 - DNA, 20 bp, Artificial Sequence
  mmSKRIPTE0001109_Tnfsf9_2
  gRNA
acctgggggagaactcccga

SEQ ID NO: 130331 - DNA, 20 bp, Artificial Sequence
  mmSKRIPTE0001110_Tnfsf9_3
  gRNA
ccgtgctttataggctaccg

SEQ ID NO: 130332 - DNA, 20 bp, Artificial Sequence
  mmSKRIPTE0001111_Tnfsf9_4
  gRNA
tggggcgcacagtatctgag

SEQ ID NO: 130333 - DNA, 20 bp, Artificial Sequence
  mmSKRIPTE0001112_Tnfsf9_5
  gRNA
agggtctagagtgttaagag

SEQ ID NO: 130334 - DNA, 20 bp, Artificial Sequence
  mmSKRIPTE0001113_Tnfsf9_6
  gRNA
gaagcatcgctgcaccgaca

SEQ ID NO: 130335 - DNA, 20 bp, Artificial Sequence
  mmSKRIPTE0001114_Tnfsf9_7
  gRNA
tgaggagcgccgcatccgag

SEQ ID NO: 130336 - DNA, 20 bp, Artificial Sequence
  mmSKRIPTE0001115_Tnfsf9_8
  gRNA
agacgtgcactgaccgaccg

SEQ ID NO: 130337 - DNA, 20 bp, Artificial Sequence
  mmSKRIPTE0001116_Tnfsf9_9
  gRNA
aagttccgggagtcgagggg

SEQ ID NO: 130338 - DNA, 20 bp, Artificial Sequence
  mmSKRIPTE0001117_Camk4_1
  gRNA
ccccggtggttaacaagggt

SEQ ID NO: 130339 - DNA, 20 bp, Artificial Sequence
  mmSKRIPTE0001118_Camk4_2
  gRNA
ttcaaggaggagattaacgt

SEQ ID NO: 130340 - DNA, 20 bp, Artificial Sequence
  mmSKRIPTE0001119_Camk4_3
  gRNA
gagttgcgccaacaatgacc

SEQ ID NO: 130341 - DNA, 20 bp, Artificial Sequence
  mmSKRIPTE0001120_Camk4_4
  gRNA
cctaggctgtatactctgcg

SEQ ID NO: 130342 - DNA, 20 bp, Artificial Sequence
  mmSKRIPTE0001121_Camk4_5
  gRNA
aagcgtaccgcagtaccccg

SEQ ID NO: 130343 - DNA, 20 bp, Artificial Sequence
  mmSKRIPTE0001122_Camk4_6
  gRNA
gtactaaatggtgttcccag

SEQ ID NO: 130344 - DNA, 20 bp, Artificial Sequence
  mmSKRIPTE0001123_Camk4_7
  gRNA
gactttgagcatcttcgccg

SEQ ID NO: 130345 - DNA, 20 bp, Artificial Sequence
  mmSKRIPTE0001124_Camk4_8
  gRNA
tagggcatgacgatgacacg

SEQ ID NO: 130346 - DNA, 20 bp, Artificial Sequence
  mmSKRIPTE0001125_Camk4_9
  gRNA
gctagccaagtcgtaggggt

SEQ ID NO: 130347 - DNA, 20 bp, Artificial Sequence
  mmSKRIPTE0001126_Foxl1_1
  gRNA
aagtacgtgccaaacacacg

SEQ ID NO: 130348 - DNA, 20 bp, Artificial Sequence
  mmSKRIPTE0001127_Foxl1_2
  gRNA
aacgccgccaaagcctacga

SEQ ID NO: 130349 - DNA, 20 bp, Artificial Sequence
  mmSKRIPTE0001128_Foxl1_3
  gRNA
gtacacgtacaacagcggcg

SEQ ID NO: 130350 - DNA, 20 bp, Artificial Sequence
  mmSKRIPTE0001129_Foxl1_4
  gRNA
aaggctcagcgggctccgtg

SEQ ID NO: 130351 - DNA, 20 bp, Artificial Sequence
  mmSKRIPTE0001130_Foxl1_5
  gRNA
tctgctggagacgaaccgtg

SEQ ID NO: 130352 - DNA, 20 bp, Artificial Sequence
  mmSKRIPTE0001131_Foxl1_6
  gRNA
ggactgtgaggtccgcgtcg

SEQ ID NO: 130353 - DNA, 20 bp, Artificial Sequence
  mmSKRIPTE0001132_Foxl1_7
  gRNA
aggagactcaggtccgagtg

SEQ ID NO: 130354 - DNA, 20 bp, Artificial Sequence
  mmSKRIPTE0001133_Foxl1_8
  gRNA
agaagggacaaagcgcgcag

SEQ ID NO: 130355 - DNA, 20 bp, Artificial Sequence
  mmSKRIPTE0001134_Foxl1_9
  gRNA
aagtccttaggactccccgg

SEQ ID NO: 130356 - DNA, 20 bp, Artificial Sequence
  mmSKRIPTE0001135_Peli1_1
  gRNA
cttccaaatactaattcgag

SEQ ID NO: 130357 - DNA, 20 bp, Artificial Sequence
  mmSKRIPTE0001136_Peli1_2
  gRNA
tgaaaagtgtgcgtaccatg

SEQ ID NO: 130358 - DNA, 20 bp, Artificial Sequence
  mmSKRIPTE0001137_Peli1_3
  gRNA
tcttctgtgaacccattacg

SEQ ID NO: 130359 - DNA, 20 bp, Artificial Sequence
  mmSKRIPTE0001138_Peli1_4
  gRNA
ataaatccgagctgtaaagg

SEQ ID NO: 130360 - DNA, 20 bp, Artificial Sequence
  mmSKRIPTE0001139_Peli1_5
  gRNA
ccatgggtatatctaaactg

SEQ ID NO: 130361 - DNA, 20 bp, Artificial Sequence
  mmSKRIPTE0001140_Peli1_6
  gRNA
gctttgtactgactgcgtgt

SEQ ID NO: 130362 - DNA, 20 bp, Artificial Sequence
  mmSKRIPTE0001141_Peli1_7
  gRNA
aaagtgaggacacaccgcag

SEQ ID NO: 130363 - DNA, 20 bp, Artificial Sequence
  mmSKRIPTE0001142_Peli1_8
  gRNA
agtgtaacttctcaccctcg

SEQ ID NO: 130364 - DNA, 20 bp, Artificial Sequence
  mmSKRIPTE0001143_Peli1_9
  gRNA
catctagagctgtaaagggt

SEQ ID NO: 130365 - DNA, 20 bp, Artificial Sequence
  mmSKRIPTE0001144_Zfat_1
  gRNA
acgtagcgacgtcggtcgcg

SEQ ID NO: 130366 - DNA, 20 bp, Artificial Sequence
  mmSKRIPTE0001145_Zfat_2
  gRNA
tctttgtgagcggatccgga

SEQ ID NO: 130367 - DNA, 20 bp, Artificial Sequence
  mmSKRIPTE0001146_Zfat_3
  gRNA
tattcttggtaccctctccg

SEQ ID NO: 130368 - DNA, 20 bp, Artificial Sequence
  mmSKRIPTE0001147_Zfat_4
  gRNA
gctgcgctcccatatccgag

SEQ ID NO: 130369 - DNA, 20 bp, Artificial Sequence
  mmSKRIPTE0001148_Zfat_5
  gRNA
gagaggttatggcgaatctg

SEQ ID NO: 130370 - DNA, 20 bp, Artificial Sequence
  mmSKRIPTE0001149_Zfat_6
  gRNA
gtacaccaacgtgggcagcg

SEQ ID NO: 130371 - DNA, 20 bp, Artificial Sequence
  mmSKRIPTE0001150_Zfat_7
  gRNA
actctatgcttatggaacga

SEQ ID NO: 130372 - DNA, 20 bp, Artificial Sequence
  mmSKRIPTE0001151_Zfat_8
  gRNA
actttccaggaggcacactg

SEQ ID NO: 130373 - DNA, 20 bp, Artificial Sequence
  mmSKRIPTE0001152_Zfat_9
  gRNA
gcactgtgccttgcgtgccg

SEQ ID NO: 130374 - DNA, 20 bp, Artificial Sequence
  mmSKRIPTE0001153_Dhtkd1_1
  gRNA
ctgatgttccgtaaaatgcg

SEQ ID NO: 130375 - DNA, 20 bp, Artificial Sequence
  mmSKRIPTE0001154_Dhtkd1_2
  gRNA
gatgtcggttataccgccat

SEQ ID NO: 130376 - DNA, 20 bp, Artificial Sequence
  mmSKRIPTE0001155_Dhtkd1_3
  gRNA
cggtctttgaccagaacgtg

SEQ ID NO: 130377 - DNA, 20 bp, Artificial Sequence
  mmSKRIPTE0001156_Dhtkd1_4
  gRNA
agaatggtcgaccagccggg

SEQ ID NO: 130378 - DNA, 20 bp, Artificial Sequence
  mmSKRIPTE0001157_Dhtkd1_5
  gRNA
cgcagaaggaagcgtcaccg

SEQ ID NO: 130379 - DNA, 20 bp, Artificial Sequence
  mmSKRIPTE0001158_Dhtkd1_6
  gRNA
tctccaactcataacctcga

SEQ ID NO: 130380 - DNA, 20 bp, Artificial Sequence
  mmSKRIPTE0001159_Dhtkd1_7
  gRNA
ggcgcggttaccagacggag

SEQ ID NO: 130381 - DNA, 20 bp, Artificial Sequence
  mmSKRIPTE0001160_Dhtkd1_8
  gRNA
ccgatgccatatccaatctg

SEQ ID NO: 130382 - DNA, 20 bp, Artificial Sequence
  mmSKRIPTE0001161_Dhtkd1_9
  gRNA
gactgattgttgctaatgtg

SEQ ID NO: 130383 - DNA, 20 bp, Artificial Sequence
  mmSKRIPTE0001162_Kif16b_1
  gRNA
gataccttgatttagctgcg

SEQ ID NO: 130384 - DNA, 20 bp, Artificial Sequence
  mmSKRIPTE0001163_Kif16b_2
  gRNA
ctgtgtctttgagaacgccg

SEQ ID NO: 130385 - DNA, 20 bp, Artificial Sequence
  mmSKRIPTE0001164_Kif16b_3
  gRNA
gttccgctttaaccatccga

SEQ ID NO: 130386 - DNA, 20 bp, Artificial Sequence
  mmSKRIPTE0001165_Kif16b_4
  gRNA
tggaaatctccccggcctcg

SEQ ID NO: 130387 - DNA, 20 bp, Artificial Sequence
  mmSKRIPTE0001166_Kif16b_5
  gRNA
aacgtgtgagagacctactt

SEQ ID NO: 130388 - DNA, 20 bp, Artificial Sequence
  mmSKRIPTE0001167_Kif16b_6
  gRNA
atgatgtattgtacccgtgt

SEQ ID NO: 130389 - DNA, 20 bp, Artificial Sequence
  mmSKRIPTE0001168_Kif16b_7
  gRNA
aacttaaaggtaagtgacga

SEQ ID NO: 130390 - DNA, 20 bp, Artificial Sequence
  mmSKRIPTE0001169_Kif16b_8
  gRNA
aagatcgatgaagctgattg

SEQ ID NO: 130391 - DNA, 20 bp, Artificial Sequence
  mmSKRIPTE0001170_Kif16b_9
  gRNA
tctgaggggaagtgtccgcg

SEQ ID NO: 130392 - DNA, 20 bp, Artificial Sequence
  mmSKRIPTE0001171_Ncf1_1
  gRNA
ttgacgtagaccagccagcg

SEQ ID NO: 130393 - DNA, 20 bp, Artificial Sequence
  mmSKRIPTE0001172_Ncf1_2
  gRNA
catacggttcacctggtccg

SEQ ID NO: 130394 - DNA, 20 bp, Artificial Sequence
  mmSKRIPTE0001173_Ncf1_3
  gRNA
gcgacagatcagaggccgcg

SEQ ID NO: 130395 - DNA, 20 bp, Artificial Sequence
  mmSKRIPTE0001174_Ncf1_4
  gRNA
acacccgctattgcctcaga

SEQ ID NO: 130396 - DNA, 20 bp, Artificial Sequence
  mmSKRIPTE0001175_Ncf1_5
  gRNA
gatccggatcccaactacgc

SEQ ID NO: 130397 - DNA, 20 bp, Artificial Sequence
  mmSKRIPTE0001176_Ncf1_6
  gRNA
taccacagtacaacgggcgt

SEQ ID NO: 130398 - DNA, 20 bp, Artificial Sequence
  mmSKRIPTE0001177_Ncf1_7
  gRNA
tgaggggcattagagccgag

SEQ ID NO: 130399 - DNA, 20 bp, Artificial Sequence
  mmSKRIPTE0001178_Ncf1_8
  gRNA
gcgagcaccttacaactggg

SEQ ID NO: 130400 - DNA, 20 bp, Artificial Sequence
  mmSKRIPTE0001179_Ncf1_9
  gRNA
gcgggctgtggtttgacgcg

SEQ ID NO: 130401 - DNA, 20 bp, Artificial Sequence
  mmSKRIPTE0001180_Tnfsf13b_1
  gRNA
atggagctgcagagctaccg

SEQ ID NO: 130402 - DNA, 20 bp, Artificial Sequence
  mmSKRIPTE0001181_Tnfsf13b_2
  gRNA
aatgcacagatttcacgcaa

SEQ ID NO: 130403 - DNA, 20 bp, Artificial Sequence
  mmSKRIPTE0001182_Tnfsf13b_3
  gRNA
gattaggattcagtccagcg

SEQ ID NO: 130404 - DNA, 20 bp, Artificial Sequence
  mmSKRIPTE0001183_Tnfsf13b_4
  gRNA
tggccgcggctggagttgtg

SEQ ID NO: 130405 - DNA, 20 bp, Artificial Sequence
  mmSKRIPTE0001184_Tnfsf13b_5
  gRNA
ttataaagcgaaattcctga

SEQ ID NO: 130406 - DNA, 20 bp, Artificial Sequence
  mmSKRIPTE0001185_Tnfsf13b_6
  gRNA
acagctgtccagtaacggac

SEQ ID NO: 130407 - DNA, 20 bp, Artificial Sequence
  mmSKRIPTE0001186_Tnfsf13b_7
  gRNA
cagtgaaaacgtcggaccag

SEQ ID NO: 130408 - DNA, 20 bp, Artificial Sequence
  mmSKRIPTE0001187_Tnfsf13b_8
  gRNA
agaaactggactaaattagg

SEQ ID NO: 130409 - DNA, 20 bp, Artificial Sequence
  mmSKRIPTE0001188_Tnfsf13b_9
  gRNA
cctgtggtcacttactccaa

SEQ ID NO: 130410 - DNA, 20 bp, Artificial Sequence
  mmSKRIPTE0001189_Il17c_1
  gRNA
acgagcgctccatctcacca

SEQ ID NO: 130411 - DNA, 20 bp, Artificial Sequence
  mmSKRIPTE0001190_Il17c_2
  gRNA
aggattgtgatgcgccacag

SEQ ID NO: 130412 - DNA, 20 bp, Artificial Sequence
  mmSKRIPTE0001191_Il17c_3
  gRNA
cgacagccctgctcccgaga

SEQ ID NO: 130413 - DNA, 20 bp, Artificial Sequence
  mmSKRIPTE0001192_Il17c_4
  gRNA
cccgaagccataggaccctg

SEQ ID NO: 130414 - DNA, 20 bp, Artificial Sequence
  mmSKRIPTE0001193_Il17c_5
  gRNA
gtggcagaatgcttgtgtcg

SEQ ID NO: 130415 - DNA, 20 bp, Artificial Sequence
  mmSKRIPTE0001194_Il17c_6
  gRNA
gctaactcgaagtgccaggt

SEQ ID NO: 130416 - DNA, 20 bp, Artificial Sequence
  mmSKRIPTE0001195_Il17c_7
  gRNA
agtgatctagggctccgggg

SEQ ID NO: 130417 - DNA, 20 bp, Artificial Sequence
  mmSKRIPTE0001196_Il17c_8
  gRNA
gcacgcggatgaactcggtg

SEQ ID NO: 130418 - DNA, 20 bp, Artificial Sequence
  mmSKRIPTE0001197_Il17c_9
  gRNA
accaagatcccccgtcctgg

SEQ ID NO: 130419 - DNA, 20 bp, Artificial Sequence
  mmSKRIPTE0001198_Bcl11a_1
  gRNA
gtgagcaccgtaatacagtg

SEQ ID NO: 130420 - DNA, 20 bp, Artificial Sequence
  mmSKRIPTE0001199_Bcl11a_2
  gRNA
caacttacaaataccctgcg

SEQ ID NO: 130421 - DNA, 20 bp, Artificial Sequence
  mmSKRIPTE0001200_Bcl11a_3
  gRNA
cttcccatgaggcttaacga

SEQ ID NO: 130422 - DNA, 20 bp, Artificial Sequence
  mmSKRIPTE0001201_Bcl11a_4
  gRNA
aggctacacatgcgatccag

SEQ ID NO: 130423 - DNA, 20 bp, Artificial Sequence
  mmSKRIPTE0001202_Bcl11a_5
  gRNA
tgaagggataccaacccgcg

SEQ ID NO: 130424 - DNA, 20 bp, Artificial Sequence
  mmSKRIPTE0001203_Bcl11a_6
  gRNA
tgtttatcaacgtcatctag

SEQ ID NO: 130425 - DNA, 20 bp, Artificial Sequence
  mmSKRIPTE0001204_Bcl11a_7
  gRNA
cctctgcttagaaaaaggtg

SEQ ID NO: 130426 - DNA, 20 bp, Artificial Sequence
  mmSKRIPTE0001205_Bcl11a_8
  gRNA
cggagaacgtgtattcgcag

SEQ ID NO: 130427 - DNA, 20 bp, Artificial Sequence
  mmSKRIPTE0001206_Bcl11a_9
  gRNA
aggctgaggcttacgagatg

SEQ ID NO: 130428 - DNA, 20 bp, Artificial Sequence
  mmSKRIPTE0001207_Dhx58_1
  gRNA
atactactggaaacacctcg

SEQ ID NO: 130429 - DNA, 20 bp, Artificial Sequence
  mmSKRIPTE0001208_Dhx58_2
  gRNA
agaactcgtagataactacc

SEQ ID NO: 130430 - DNA, 20 bp, Artificial Sequence
  mmSKRIPTE0001209_Dhx58_3
  gRNA
atttgtacccggacccagaa

SEQ ID NO: 130431 - DNA, 20 bp, Artificial Sequence
  mmSKRIPTE0001210_Dhx58_4
  gRNA
gtggaacagatggaagcacg

SEQ ID NO: 130432 - DNA, 20 bp, Artificial Sequence
  mmSKRIPTE0001211_Dhx58_5
  gRNA
tggagttggaagatgaacgc

SEQ ID NO: 130433 - DNA, 20 bp, Artificial Sequence
  mmSKRIPTE0001212_Dhx58_6
  gRNA
tgaagatgataccccgagtg

SEQ ID NO: 130434 - DNA, 20 bp, Artificial Sequence
  mmSKRIPTE0001213_Dhx58_7
  gRNA
agccccatatctaccaccag

SEQ ID NO: 130435 - DNA, 20 bp, Artificial Sequence
  mmSKRIPTE0001214_Dhx58_8
  gRNA
gagagtattagtcactcacc

SEQ ID NO: 130436 - DNA, 20 bp, Artificial Sequence
  mmSKRIPTE0001215_Dhx58_9
  gRNA
tttgatggtgaggcataaca

SEQ ID NO: 130437 - DNA, 20 bp, Artificial Sequence
  mmSKRIPTE0001216_Stk3_1
  gRNA
ccaactttcacgtaactccg

SEQ ID NO: 130438 - DNA, 20 bp, Artificial Sequence
  mmSKRIPTE0001217_Stk3_2
  gRNA
aggtctcttaatatcgacac

SEQ ID NO: 130439 - DNA, 20 bp, Artificial Sequence
  mmSKRIPTE0001218_Stk3_3
  gRNA
atgctgatatacatccgatg

SEQ ID NO: 130440 - DNA, 20 bp, Artificial Sequence
  mmSKRIPTE0001219_Stk3_4
  gRNA
ccgaacgcaagggatcacac

SEQ ID NO: 130441 - DNA, 20 bp, Artificial Sequence
  mmSKRIPTE0001220_Stk3_5
  gRNA
aaagtgggcggaacctagcg

SEQ ID NO: 130442 - DNA, 20 bp, Artificial Sequence
  mmSKRIPTE0001221_Stk3_6
  gRNA
cgtccaagaggtaacgacgg

SEQ ID NO: 130443 - DNA, 20 bp, Artificial Sequence
  mmSKRIPTE0001222_Stk3_7
  gRNA
ctttcaaaacgacatcagag

SEQ ID NO: 130444 - DNA, 20 bp, Artificial Sequence
  mmSKRIPTE0001223_Stk3_8
  gRNA
gaacacgggcaaaagacgaa

SEQ ID NO: 130445 - DNA, 20 bp, Artificial Sequence
  mmSKRIPTE0001224_Stk3_9
  gRNA
aaccgcgttgaggagcggga

SEQ ID NO: 130446 - DNA, 20 bp, Artificial Sequence
  mmSKRIPTE0001225_Rarg_1
  gRNA
tcagcaatatgcgaacagcg

SEQ ID NO: 130447 - DNA, 20 bp, Artificial Sequence
  mmSKRIPTE0001226_Rarg_2
  gRNA
tactggccctttaaacacga

SEQ ID NO: 130448 - DNA, 20 bp, Artificial Sequence
  mmSKRIPTE0001227_Rarg_3
  gRNA
agattgtggagtttgcgaag

SEQ ID NO: 130449 - DNA, 20 bp, Artificial Sequence
  mmSKRIPTE0001228_Rarg_4
  gRNA
acactatgacattctcggat

SEQ ID NO: 130450 - DNA, 20 bp, Artificial Sequence
  mmSKRIPTE0001229_Rarg_5
  gRNA
acatacgtctactagctgag

SEQ ID NO: 130451 - DNA, 20 bp, Artificial Sequence
  mmSKRIPTE0001230_Rarg_6
  gRNA
tcctgtcctatcgtgtcgtg

SEQ ID NO: 130452 - DNA, 20 bp, Artificial Sequence
  mmSKRIPTE0001231_Rarg_7
  gRNA
tgcagtcgtacatcgcgacc

SEQ ID NO: 130453 - DNA, 20 bp, Artificial Sequence
  mmSKRIPTE0001232_Rarg_8
  gRNA
tgggcaagtacaccacggtg

SEQ ID NO: 130454 - DNA, 20 bp, Artificial Sequence
  mmSKRIPTE0001233_Rarg_9
  gRNA
tggggcccaaccccacaacg

SEQ ID NO: 130455 - DNA, 20 bp, Artificial Sequence
  mmSKRIPTE0001234_Abcf3_1
  gRNA
gtacaacactctacgcctgt

SEQ ID NO: 130456 - DNA, 20 bp, Artificial Sequence
  mmSKRIPTE0001235_Abcf3_2
  gRNA
agaacgggacgcaagcgccg

SEQ ID NO: 130457 - DNA, 20 bp, Artificial Sequence
  mmSKRIPTE0001236_Abcf3_3
  gRNA
tcgtaccttaaccaacagcg

SEQ ID NO: 130458 - DNA, 20 bp, Artificial Sequence
  mmSKRIPTE0001237_Abcf3_4
  gRNA
acggctagacggttaccggg

SEQ ID NO: 130459 - DNA, 20 bp, Artificial Sequence
  mmSKRIPTE0001238_Abcf3_5
  gRNA
atgtcatccgtctgtccctg

SEQ ID NO: 130460 - DNA, 20 bp, Artificial Sequence
  mmSKRIPTE0001239_Abcf3_6
  gRNA
tcttgagtcccgcatctgtg

SEQ ID NO: 130461 - DNA, 20 bp, Artificial Sequence
  mmSKRIPTE0001240_Abcf3_7
  gRNA
ctgcccatgaacgagcagag

SEQ ID NO: 130462 - DNA, 20 bp, Artificial Sequence
  mmSKRIPTE0001241_Abcf3_8
  gRNA
actgtgcctaggacgtggac

SEQ ID NO: 130463 - DNA, 20 bp, Artificial Sequence
  mmSKRIPTE0001242_Abcf3_9
  gRNA
actattgcaagaagtgtccg

SEQ ID NO: 130464 - DNA, 20 bp, Artificial Sequence
  mmSKRIPTE0001243_Plcg1_1
  gRNA
aggaccccgtgaatcatgtg

SEQ ID NO: 130465 - DNA, 20 bp, Artificial Sequence
  mmSKRIPTE0001244_Plcg1_2
  gRNA
tcgtaaccgagaggatcggt

SEQ ID NO: 130466 - DNA, 20 bp, Artificial Sequence
  mmSKRIPTE0001245_Plcg1_3
  gRNA
tttcagtaccttgccctccg

SEQ ID NO: 130467 - DNA, 20 bp, Artificial Sequence
  mmSKRIPTE0001246_Plcg1_4
  gRNA
tgaggcggatgcctaaccag

SEQ ID NO: 130468 - DNA, 20 bp, Artificial Sequence
  mmSKRIPTE0001247_Plcg1_5
  gRNA
tggctaccgcagatccacat

SEQ ID NO: 130469 - DNA, 20 bp, Artificial Sequence
  mmSKRIPTE0001248_Plcg1_6
  gRNA
gctacgctaccccatcaacg

SEQ ID NO: 130470 - DNA, 20 bp, Artificial Sequence
  mmSKRIPTE0001249_Plcg1_7
  gRNA
tgagagcgctaggagtaact

SEQ ID NO: 130471 - DNA, 20 bp, Artificial Sequence
  mmSKRIPTE0001250_Plcg1_8
  gRNA
ccgccccagagtgaccacca

SEQ ID NO: 130472 - DNA, 20 bp, Artificial Sequence
  mmSKRIPTE0001251_Plcg1_9
  gRNA
tatgccatctctttccggtg

SEQ ID NO: 130473 - DNA, 20 bp, Artificial Sequence
  mmSKRIPTE0001252_Trpm4_1
  gRNA
acacagtggccggatccgtg

SEQ ID NO: 130474 - DNA, 20 bp, Artificial Sequence
  mmSKRIPTE0001253_Trpm4_2
  gRNA
tggacctctccgatgatgcg

SEQ ID NO: 130475 - DNA, 20 bp, Artificial Sequence
  mmSKRIPTE0001254_Trpm4_3
  gRNA
aggtgcagccgatggcgcag

SEQ ID NO: 130476 - DNA, 20 bp, Artificial Sequence
  mmSKRIPTE0001255_Trpm4_4
  gRNA
ctgaaccacagaagatgccg

SEQ ID NO: 130477 - DNA, 20 bp, Artificial Sequence
  mmSKRIPTE0001256_Trpm4_5
  gRNA
cccaggaggaaatggacggt

SEQ ID NO: 130478 - DNA, 20 bp, Artificial Sequence
  mmSKRIPTE0001257_Trpm4_6
  gRNA
acacactgcgagtatcaccg

SEQ ID NO: 130479 - DNA, 20 bp, Artificial Sequence
  mmSKRIPTE0001258_Trpm4_7
  gRNA
cgaagatctgcagatacggt

SEQ ID NO: 130480 - DNA, 20 bp, Artificial Sequence
  mmSKRIPTE0001259_Trpm4_8
  gRNA
aacggccgttccgtgctcag

SEQ ID NO: 130481 - DNA, 20 bp, Artificial Sequence
  mmSKRIPTE0001260_Trpm4_9
  gRNA
ttcatcagaagacggctccg

SEQ ID NO: 130482 - DNA, 20 bp, Artificial Sequence
  mmSKRIPTE0001261_Il3_1
  gRNA
gtactcaagattatcgacat

SEQ ID NO: 130483 - DNA, 20 bp, Artificial Sequence
  mmSKRIPTE0001262_Il3_2
  gRNA
ggctccgtctctcctaaccg

SEQ ID NO: 130484 - DNA, 20 bp, Artificial Sequence
  mmSKRIPTE0001263_Il3_3
  gRNA
gcagagtcattcgcagatgt

SEQ ID NO: 130485 - DNA, 20 bp, Artificial Sequence
  mmSKRIPTE0001264_Il3_4
  gRNA
acagcctgctaaacacgtgg

SEQ ID NO: 130486 - DNA, 20 bp, Artificial Sequence
  mmSKRIPTE0001265_Il3_5
  gRNA
agatctcgaatgaagacccc

SEQ ID NO: 130487 - DNA, 20 bp, Artificial Sequence
  mmSKRIPTE0001266_Il3_6
  gRNA
ggaggaccagaacgagacaa

SEQ ID NO: 130488 - DNA, 20 bp, Artificial Sequence
  mmSKRIPTE0001267_Il3_7
  gRNA
ctgtctccagatcgttaagg

SEQ ID NO: 130489 - DNA, 20 bp, Artificial Sequence
  mmSKRIPTE0001268_Il3_8
  gRNA
caaactataagtctggtcat

SEQ ID NO: 130490 - DNA, 20 bp, Artificial Sequence
  mmSKRIPTE0001269_Il3_9
  gRNA
tgcgggctgaggtggtctag

SEQ ID NO: 130491 - DNA, 20 bp, Artificial Sequence
  mmSKRIPTE0001270_Six1_1
  gRNA
atttcgcgctagttggacaa

SEQ ID NO: 130492 - DNA, 20 bp, Artificial Sequence
  mmSKRIPTE0001271_Six1_2
  gRNA
gccgaaaattcccgttgccg

SEQ ID NO: 130493 - DNA, 20 bp, Artificial Sequence
  mmSKRIPTE0001272_Six1_3
  gRNA
tcggcccgggaggttcgtag

SEQ ID NO: 130494 - DNA, 20 bp, Artificial Sequence
  mmSKRIPTE0001273_Six1_4
  gRNA
gtggctgaaagcgcactacg

SEQ ID NO: 130495 - DNA, 20 bp, Artificial Sequence
  mmSKRIPTE0001274_Six1_5
  gRNA
ctctaaacgtgtaccaacga

SEQ ID NO: 130496 - DNA, 20 bp, Artificial Sequence
  mmSKRIPTE0001275_Six1_6
  gRNA
gttggtgacagattgcacaa

SEQ ID NO: 130497 - DNA, 20 bp, Artificial Sequence
  mmSKRIPTE0001276_Six1_7
  gRNA
aatagtttgagctcctggcg

SEQ ID NO: 130498 - DNA, 20 bp, Artificial Sequence
  mmSKRIPTE0001277_Six1_8
  gRNA
agagaccagtcgaacctcgg

SEQ ID NO: 130499 - DNA, 20 bp, Artificial Sequence
  mmSKRIPTE0001278_Six1_9
  gRNA
gcgaagggtgaaacttcccg

SEQ ID NO: 130500 - DNA, 20 bp, Artificial Sequence
  mmSKRIPTE0001279_Clu_1
  gRNA
ttgtatcccaaagcacgaag

SEQ ID NO: 130501 - DNA, 20 bp, Artificial Sequence
  mmSKRIPTE0001280_Clu_2
  gRNA
atgaccgcattggttgctgt

SEQ ID NO: 130502 - DNA, 20 bp, Artificial Sequence
  mmSKRIPTE0001281_Clu_3
  gRNA
aagggacacgtatcgcaagg

SEQ ID NO: 130503 - DNA, 20 bp, Artificial Sequence
  mmSKRIPTE0001282_Clu_4
  gRNA
gttccgctaatgctggactg

SEQ ID NO: 130504 - DNA, 20 bp, Artificial Sequence
  mmSKRIPTE0001283_Clu_5
  gRNA
gggcacgtggcctatccctg

SEQ ID NO: 130505 - DNA, 20 bp, Artificial Sequence
  mmSKRIPTE0001284_Clu_6
  gRNA
cctctgttctgatagcgccg

SEQ ID NO: 130506 - DNA, 20 bp, Artificial Sequence
  mmSKRIPTE0001285_Clu_7
  gRNA
aggaccgccttaggacacca

SEQ ID NO: 130507 - DNA, 20 bp, Artificial Sequence
  mmSKRIPTE0001286_Clu_8
  gRNA
gtgggacaaaggtcccacct

SEQ ID NO: 130508 - DNA, 20 bp, Artificial Sequence
  mmSKRIPTE0001287_Clu_9
  gRNA
taattacgcgcgcagagcag

SEQ ID NO: 130509 - DNA, 20 bp, Artificial Sequence
  mmSKRIPTE0001288_Irak4_1
  gRNA
ccgagtccatctacacagcg

SEQ ID NO: 130510 - DNA, 20 bp, Artificial Sequence
  mmSKRIPTE0001289_Irak4_2
  gRNA
tgacatctacagcttcggcg

SEQ ID NO: 130511 - DNA, 20 bp, Artificial Sequence
  mmSKRIPTE0001290_Irak4_3
  gRNA
catacatggtactatacgtg

SEQ ID NO: 130512 - DNA, 20 bp, Artificial Sequence
  mmSKRIPTE0001291_Irak4_4
  gRNA
gtggcatggtccacagcatg

SEQ ID NO: 130513 - DNA, 20 bp, Artificial Sequence
  mmSKRIPTE0001292_Irak4_5
  gRNA
ttgtatctgtcgtcgccgga

SEQ ID NO: 130514 - DNA, 20 bp, Artificial Sequence
  mmSKRIPTE0001293_Irak4_6
  gRNA
taagaggctaggcggcggaa

SEQ ID NO: 130515 - DNA, 20 bp, Artificial Sequence
  mmSKRIPTE0001294_Irak4_7
  gRNA
ggcggtgaagaagctcggag

SEQ ID NO: 130516 - DNA, 20 bp, Artificial Sequence
  mmSKRIPTE0001295_Irak4_8
  gRNA
cgtgggtaactccggcacac

SEQ ID NO: 130517 - DNA, 20 bp, Artificial Sequence
  mmSKRIPTE0001296_Irak4_9
  gRNA
cctggagcactgatattgat

SEQ ID NO: 130518 - DNA, 20 bp, Artificial Sequence
  mmSKRIPTE0001297_Bag6_1
  gRNA
gcaagcacgagaccgaccag

SEQ ID NO: 130519 - DNA, 20 bp, Artificial Sequence
  mmSKRIPTE0001298_Bag6_2
  gRNA
tttcctacagcgctactgcg

SEQ ID NO: 130520 - DNA, 20 bp, Artificial Sequence
  mmSKRIPTE0001299_Bag6_3
  gRNA
ctttcagtcgtagtatagcg

SEQ ID NO: 130521 - DNA, 20 bp, Artificial Sequence
  mmSKRIPTE0001300_Bag6_4
  gRNA
tcttattgcaagaccacgag

SEQ ID NO: 130522 - DNA, 20 bp, Artificial Sequence
  mmSKRIPTE0001301_Bag6_5
  gRNA
ataatagggacccattcctg

SEQ ID NO: 130523 - DNA, 20 bp, Artificial Sequence
  mmSKRIPTE0001302_Bag6_6
  gRNA
aaatccggatgacccgtggg

SEQ ID NO: 130524 - DNA, 20 bp, Artificial Sequence
  mmSKRIPTE0001303_Bag6_7
  gRNA
gtcgtgttgctggaataccg

SEQ ID NO: 130525 - DNA, 20 bp, Artificial Sequence
  mmSKRIPTE0001304_Bag6_8
  gRNA
tcaccaccgacccaagaccg

SEQ ID NO: 130526 - DNA, 20 bp, Artificial Sequence
  mmSKRIPTE0001305_Bag6_9
  gRNA
caaatccactgtctgcgggg

SEQ ID NO: 130527 - DNA, 20 bp, Artificial Sequence
  mmSKRIPTE0001306_Traf2_1
  gRNA
actttcagtttccggctccg

SEQ ID NO: 130528 - DNA, 20 bp, Artificial Sequence
  mmSKRIPTE0001307_Traf2_2
  gRNA
agagcggtgattagtcagag

SEQ ID NO: 130529 - DNA, 20 bp, Artificial Sequence
  mmSKRIPTE0001308_Traf2_3
  gRNA
ggggaccttgaaagaatacg

SEQ ID NO: 130530 - DNA, 20 bp, Artificial Sequence
  mmSKRIPTE0001309_Traf2_4
  gRNA
cggcctatttgacaaatcga

SEQ ID NO: 130531 - DNA, 20 bp, Artificial Sequence
  mmSKRIPTE0001310_Traf2_5
  gRNA
aatgctttaccgtctcccga

SEQ ID NO: 130532 - DNA, 20 bp, Artificial Sequence
  mmSKRIPTE0001311_Traf2_6
  gRNA
actctgaccgtcatgtgatg

SEQ ID NO: 130533 - DNA, 20 bp, Artificial Sequence
  mmSKRIPTE0001312_Traf2_7
  gRNA
acgttgcttcatcgacagta

SEQ ID NO: 130534 - DNA, 20 bp, Artificial Sequence
  mmSKRIPTE0001313_Traf2_8
  gRNA
gtgatgcaatctaagtggtg

SEQ ID NO: 130535 - DNA, 20 bp, Artificial Sequence
  mmSKRIPTE0001314_Traf2_9
  gRNA
aggttccaagttcacgtgga

SEQ ID NO: 130536 - DNA, 20 bp, Artificial Sequence
  mmSKRIPTE0001315_Padi2_1
  gRNA
gcacgtacaccgcctccacg

SEQ ID NO: 130537 - DNA, 20 bp, Artificial Sequence
  mmSKRIPTE0001316_Padi2_2
  gRNA
cctcccatatggcagccgcg

SEQ ID NO: 130538 - DNA, 20 bp, Artificial Sequence
  mmSKRIPTE0001317_Padi2_3
  gRNA
ttagcggctatatgacccgg

SEQ ID NO: 130539 - DNA, 20 bp, Artificial Sequence
  mmSKRIPTE0001318_Padi2_4
  gRNA
caggaagtcgcgtaccacct

SEQ ID NO: 130540 - DNA, 20 bp, Artificial Sequence
  mmSKRIPTE0001319_Padi2_5
  gRNA
caaacgggttaacgccaccg

SEQ ID NO: 130541 - DNA, 20 bp, Artificial Sequence
  mmSKRIPTE0001320_Padi2_6
  gRNA
accatctctatgcatccacg

SEQ ID NO: 130542 - DNA, 20 bp, Artificial Sequence
  mmSKRIPTE0001321_Padi2_7
  gRNA
gcaggtgcggtaattgacag

SEQ ID NO: 130543 - DNA, 20 bp, Artificial Sequence
  mmSKRIPTE0001322_Padi2_8
  gRNA
aggagcatcagcgcatacac

SEQ ID NO: 130544 - DNA, 20 bp, Artificial Sequence
  mmSKRIPTE0001323_Padi2_9
  gRNA
aggactatttcatacccggc

SEQ ID NO: 130545 - DNA, 20 bp, Artificial Sequence
  mmSKRIPTE0001324_Tollip_1
  gRNA
ctgaagagccgattgcctcg

SEQ ID NO: 130546 - DNA, 20 bp, Artificial Sequence
  mmSKRIPTE0001325_Tollip_2
  gRNA
tccatggagaaggcgcgctg

SEQ ID NO: 130547 - DNA, 20 bp, Artificial Sequence
  mmSKRIPTE0001326_Tollip_3
  gRNA
tctcgtctatcggacatctg

SEQ ID NO: 130548 - DNA, 20 bp, Artificial Sequence
  mmSKRIPTE0001327_Tollip_4
  gRNA
aggtcctcttcattacagcg

SEQ ID NO: 130549 - DNA, 20 bp, Artificial Sequence
  mmSKRIPTE0001328_Tollip_5
  gRNA
gaggttatggcacctccttg

SEQ ID NO: 130550 - DNA, 20 bp, Artificial Sequence
  mmSKRIPTE0001329_Tollip_6
  gRNA
ggacggaagagcaacccgcg

SEQ ID NO: 130551 - DNA, 20 bp, Artificial Sequence
  mmSKRIPTE0001330_Tollip_7
  gRNA
ggtgagttcactgtccggag

SEQ ID NO: 130552 - DNA, 20 bp, Artificial Sequence
  mmSKRIPTE0001331_Tollip_8
  gRNA
tagaacgagtccacacctgg

SEQ ID NO: 130553 - DNA, 20 bp, Artificial Sequence
  mmSKRIPTE0001332_Tollip_9
  gRNA
cctcactggaaggtgtacat

SEQ ID NO: 130554 - DNA, 20 bp, Artificial Sequence
  mmSKRIPTE0001333_Batf3_1
  gRNA
agactcggcgccgaacacgt

SEQ ID NO: 130555 - DNA, 20 bp, Artificial Sequence
  mmSKRIPTE0001334_Batf3_2
  gRNA
cagtaggatgacttatgcag

SEQ ID NO: 130556 - DNA, 20 bp, Artificial Sequence
  mmSKRIPTE0001335_Batf3_3
  gRNA
cctgttcaaccagagcggat

SEQ ID NO: 130557 - DNA, 20 bp, Artificial Sequence
  mmSKRIPTE0001336_Batf3_4
  gRNA
gtggtagacagctggccacg

SEQ ID NO: 130558 - DNA, 20 bp, Artificial Sequence
  mmSKRIPTE0001337_Batf3_5
  gRNA
ggacagctgtctcctatcgg

SEQ ID NO: 130559 - DNA, 20 bp, Artificial Sequence
  mmSKRIPTE0001338_Batf3_6
  gRNA
ctatggcagagttaagaccg

SEQ ID NO: 130560 - DNA, 20 bp, Artificial Sequence
  mmSKRIPTE0001339_Batf3_7
  gRNA
tctcctgaggacgtttgcag

SEQ ID NO: 130561 - DNA, 20 bp, Artificial Sequence
  mmSKRIPTE0001340_Batf3_8
  gRNA
aaaaatactatgagacaacg

SEQ ID NO: 130562 - DNA, 20 bp, Artificial Sequence
  mmSKRIPTE0001341_Batf3_9
  gRNA
caaggttccgagccggacaa

SEQ ID NO: 130563 - DNA, 20 bp, Artificial Sequence
  mmSKRIPTE0001342_Pknox1_1
  gRNA
tgagccccacctcacgacga

SEQ ID NO: 130564 - DNA, 20 bp, Artificial Sequence
  mmSKRIPTE0001343_Pknox1_2
  gRNA
ttcactgtcaggtcgcctgg

SEQ ID NO: 130565 - DNA, 20 bp, Artificial Sequence
  mmSKRIPTE0001344_Pknox1_3
  gRNA
tgaccgaggtttgatgactg

SEQ ID NO: 130566 - DNA, 20 bp, Artificial Sequence
  mmSKRIPTE0001345_Pknox1_4
  gRNA
ttagaagtaccatctcaacc

SEQ ID NO: 130567 - DNA, 20 bp, Artificial Sequence
  mmSKRIPTE0001346_Pknox1_5
  gRNA
acaggattggtatcacgtga

SEQ ID NO: 130568 - DNA, 20 bp, Artificial Sequence
  mmSKRIPTE0001347_Pknox1_6
  gRNA
actgttccttaatctcgtca

SEQ ID NO: 130569 - DNA, 20 bp, Artificial Sequence
  mmSKRIPTE0001348_Pknox1_7
  gRNA
gcagttgcaattgagtcgtg

SEQ ID NO: 130570 - DNA, 20 bp, Artificial Sequence
  mmSKRIPTE0001349_Pknox1_8
  gRNA
cgggatcatcatatccaaca

SEQ ID NO: 130571 - DNA, 20 bp, Artificial Sequence
  mmSKRIPTE0001350_Pknox1_9
  gRNA
gcaaggccaagtggtcacgc

SEQ ID NO: 130572 - DNA, 20 bp, Artificial Sequence
  mmSKRIPTE0001351_Ecm1_1
  gRNA
ctgctagttcccatgcacga

SEQ ID NO: 130573 - DNA, 20 bp, Artificial Sequence
  mmSKRIPTE0001352_Ecm1_2
  gRNA
attgtaatgagtgttcgagg

SEQ ID NO: 130574 - DNA, 20 bp, Artificial Sequence
  mmSKRIPTE0001353_Ecm1_3
  gRNA
gatatggaagctcgcagcag

SEQ ID NO: 130575 - DNA, 20 bp, Artificial Sequence
  mmSKRIPTE0001354_Ecm1_4
  gRNA
caacagctagctagttactg

SEQ ID NO: 130576 - DNA, 20 bp, Artificial Sequence
  mmSKRIPTE0001355_Ecm1_5
  gRNA
gcacatggaaggccgtaagt

SEQ ID NO: 130577 - DNA, 20 bp, Artificial Sequence
  mmSKRIPTE0001356_Ecm1_6
  gRNA
taccaactacctgaggaacg

SEQ ID NO: 130578 - DNA, 20 bp, Artificial Sequence
  mmSKRIPTE0001357_Ecm1_7
  gRNA
gcgaagcactcatcacgggc

SEQ ID NO: 130579 - DNA, 20 bp, Artificial Sequence
  mmSKRIPTE0001358_Ecm1_8
  gRNA
ggtgctgcataacctactag

SEQ ID NO: 130580 - DNA, 20 bp, Artificial Sequence
  mmSKRIPTE0001359_Ecm1_9
  gRNA
tctttccacgaattcctccg

SEQ ID NO: 130581 - DNA, 20 bp, Artificial Sequence
  mmSKRIPTE0001360_Hoxa3_1
  gRNA
tggctataaaacgtcacgtg

SEQ ID NO: 130582 - DNA, 20 bp, Artificial Sequence
  mmSKRIPTE0001361_Hoxa3_2
  gRNA
gattacgatccgtgtcaaag

SEQ ID NO: 130583 - DNA, 20 bp, Artificial Sequence
  mmSKRIPTE0001362_Hoxa3_3
  gRNA
gaagagtacttgtagcaacg

SEQ ID NO: 130584 - DNA, 20 bp, Artificial Sequence
  mmSKRIPTE0001363_Hoxa3_4
  gRNA
caatatttagcagcacgacg

SEQ ID NO: 130585 - DNA, 20 bp, Artificial Sequence
  mmSKRIPTE0001364_Hoxa3_5
  gRNA
catactttatggctcccgag

SEQ ID NO: 130586 - DNA, 20 bp, Artificial Sequence
  mmSKRIPTE0001365_Hoxa3_6
  gRNA
cggacatggagttgtcgcca

SEQ ID NO: 130587 - DNA, 20 bp, Artificial Sequence
  mmSKRIPTE0001366_Hoxa3_7
  gRNA
gcgtgtgggcgatctcgatg

SEQ ID NO: 130588 - DNA, 20 bp, Artificial Sequence
  mmSKRIPTE0001367_Hoxa3_8
  gRNA
tagattgaatcctcgaagga

SEQ ID NO: 130589 - DNA, 20 bp, Artificial Sequence
  mmSKRIPTE0001368_Hoxa3_9
  gRNA
gcggcagccacttgaaaccg

SEQ ID NO: 130590 - DNA, 20 bp, Artificial Sequence
  mmSKRIPTE0001369_Tnfrsf11a_1
  gRNA
acgagtgcttcagacccgcg

SEQ ID NO: 130591 - DNA, 20 bp, Artificial Sequence
  mmSKRIPTE0001370_Tnfrsf11a_2
  gRNA
gcgaacaggatgactcaccg

SEQ ID NO: 130592 - DNA, 20 bp, Artificial Sequence
  mmSKRIPTE0001371_Tnfrsf11a_3
  gRNA
ggcattatgagcatctcgga

SEQ ID NO: 130593 - DNA, 20 bp, Artificial Sequence
  mmSKRIPTE0001372_Tnfrsf11a_4
  gRNA
caggatgacaattctcggtg

SEQ ID NO: 130594 - DNA, 20 bp, Artificial Sequence
  mmSKRIPTE0001373_Tnfrsf11a_5
  gRNA
gagatgatcagcgtccagca

SEQ ID NO: 130595 - DNA, 20 bp, Artificial Sequence
  mmSKRIPTE0001374_Tnfrsf11a_6
  gRNA
agacgcaaggagacctctcg

SEQ ID NO: 130596 - DNA, 20 bp, Artificial Sequence
  mmSKRIPTE0001375_Tnfrsf11a_7
  gRNA
cctcacactgatcccgactg

SEQ ID NO: 130597 - DNA, 20 bp, Artificial Sequence
  mmSKRIPTE0001376_Tnfrsf11a_8
  gRNA
ccatggcggtgtctgaaaag

SEQ ID NO: 130598 - DNA, 20 bp, Artificial Sequence
  mmSKRIPTE0001377_Tnfrsf11a_9
  gRNA
gccagcagcctgcaccagtg

SEQ ID NO: 130599 - DNA, 20 bp, Artificial Sequence
  mmSKRIPTE0001378_Itk_1
  gRNA
ccccgagtaaataacctacg

SEQ ID NO: 130600 - DNA, 20 bp, Artificial Sequence
  mmSKRIPTE0001379_Itk_2
  gRNA
ttgcagatacatccccgctg

SEQ ID NO: 130601 - DNA, 20 bp, Artificial Sequence
  mmSKRIPTE0001380_Itk_3
  gRNA
catccatttctaacgccctg

SEQ ID NO: 130602 - DNA, 20 bp, Artificial Sequence
  mmSKRIPTE0001381_Itk_4
  gRNA
gtaagccttctcataccccg

SEQ ID NO: 130603 - DNA, 20 bp, Artificial Sequence
  mmSKRIPTE0001382_Itk_5
  gRNA
gcaacatggagtcttacttg

SEQ ID NO: 130604 - DNA, 20 bp, Artificial Sequence
  mmSKRIPTE0001383_Itk_6
  gRNA
ggaatcgggtggtctttcaa

SEQ ID NO: 130605 - DNA, 20 bp, Artificial Sequence
  mmSKRIPTE0001384_Itk_7
  gRNA
gtgaaacacgtgtataaccc

SEQ ID NO: 130606 - DNA, 20 bp, Artificial Sequence
  mmSKRIPTE0001385_Itk_8
  gRNA
taccaattctttcagaaacg

SEQ ID NO: 130607 - DNA, 20 bp, Artificial Sequence
  mmSKRIPTE0001386_Itk_9
  gRNA
gatgtggcctcaccacagcg

SEQ ID NO: 130608 - DNA, 20 bp, Artificial Sequence
  mmSKRIPTE0001387_Myo18a_1
  gRNA
gcttgtccttagcacccgag

SEQ ID NO: 130609 - DNA, 20 bp, Artificial Sequence
  mmSKRIPTE0001388_Myo18a_2
  gRNA
gctcactatgaacggcctag

SEQ ID NO: 130610 - DNA, 20 bp, Artificial Sequence
  mmSKRIPTE0001389_Myo18a_3
  gRNA
gcgatgcgcatgtaccgcca

SEQ ID NO: 130611 - DNA, 20 bp, Artificial Sequence
  mmSKRIPTE0001390_Myo18a_4
  gRNA
caacagagtgaacatcctcg

SEQ ID NO: 130612 - DNA, 20 bp, Artificial Sequence
  mmSKRIPTE0001391_Myo18a_5
  gRNA
tctaaggcaccttctgacga

SEQ ID NO: 130613 - DNA, 20 bp, Artificial Sequence
  mmSKRIPTE0001392_Myo18a_6
  gRNA
gccgggtaagtcgcccacag

SEQ ID NO: 130614 - DNA, 20 bp, Artificial Sequence
  mmSKRIPTE0001393_Myo18a_7
  gRNA
caccctactagcagtgatcg

SEQ ID NO: 130615 - DNA, 20 bp, Artificial Sequence
  mmSKRIPTE0001394_Myo18a_8
  gRNA
ggcacaacggtaatgcacaa

SEQ ID NO: 130616 - DNA, 20 bp, Artificial Sequence
  mmSKRIPTE0001395_Myo18a_9
  gRNA
agtacaatcctgttataccc

SEQ ID NO: 130617 - DNA, 20 bp, Artificial Sequence
  mmSKRIPTE0001396_Trim25_1
  gRNA
gctgcttcttaagtaccgcg

SEQ ID NO: 130618 - DNA, 20 bp, Artificial Sequence
  mmSKRIPTE0001397_Trim25_2
  gRNA
ccgagcgacgcacgacccaa

SEQ ID NO: 130619 - DNA, 20 bp, Artificial Sequence
  mmSKRIPTE0001398_Trim25_3
  gRNA
gaacctgtcaccactccgtg

SEQ ID NO: 130620 - DNA, 20 bp, Artificial Sequence
  mmSKRIPTE0001399_Trim25_4
  gRNA
aggcgtccagtcgtccaccg

SEQ ID NO: 130621 - DNA, 20 bp, Artificial Sequence
  mmSKRIPTE0001400_Trim25_5
  gRNA
ggcttgacttagggtcgtag

SEQ ID NO: 130622 - DNA, 20 bp, Artificial Sequence
  mmSKRIPTE0001401_Trim25_6
  gRNA
cagaaactgtggtagaatcg

SEQ ID NO: 130623 - DNA, 20 bp, Artificial Sequence
  mmSKRIPTE0001402_Trim25_7
  gRNA
tcagactgctgataacgcta

SEQ ID NO: 130624 - DNA, 20 bp, Artificial Sequence
  mmSKRIPTE0001403_Trim25_8
  gRNA
catgcacagccacatcaatg

SEQ ID NO: 130625 - DNA, 20 bp, Artificial Sequence
  mmSKRIPTE0001404_Trim25_9
  gRNA
cgggacaaaacaattcccga

SEQ ID NO: 130626 - DNA, 20 bp, Artificial Sequence
  mmSKRIPTE0001405_Fasn_1
  gRNA
tagatggcggtcacacgggt

SEQ ID NO: 130627 - DNA, 20 bp, Artificial Sequence
  mmSKRIPTE0001406_Fasn_2
  gRNA
ccgcaccggtaagcaagtag

SEQ ID NO: 130628 - DNA, 20 bp, Artificial Sequence
  mmSKRIPTE0001407_Fasn_3
  gRNA
cggtttaaatagcgccggcg

SEQ ID NO: 130629 - DNA, 20 bp, Artificial Sequence
  mmSKRIPTE0001408_Fasn_4
  gRNA
actcactcgtggctcagcca

SEQ ID NO: 130630 - DNA, 20 bp, Artificial Sequence
  mmSKRIPTE0001409_Fasn_5
  gRNA
ggttggccatcattgcacgc

SEQ ID NO: 130631 - DNA, 20 bp, Artificial Sequence
  mmSKRIPTE0001410_Fasn_6
  gRNA
taatggagaaacgaccagcg

SEQ ID NO: 130632 - DNA, 20 bp, Artificial Sequence
  mmSKRIPTE0001411_Fasn_7
  gRNA
cggtggtggaaccctcaatg

SEQ ID NO: 130633 - DNA, 20 bp, Artificial Sequence
  mmSKRIPTE0001412_Fasn_8
  gRNA
gcccaggccaatgagcgtcg

SEQ ID NO: 130634 - DNA, 20 bp, Artificial Sequence
  mmSKRIPTE0001413_Fasn_9
  gRNA
tacaaggagctgcggctgcg

SEQ ID NO: 130635 - DNA, 20 bp, Artificial Sequence
  mmSKRIPTE0001414_Dicer1_1
  gRNA
ctcaagtcggaaccgcggtg

SEQ ID NO: 130636 - DNA, 20 bp, Artificial Sequence
  mmSKRIPTE0001415_Dicer1_2
  gRNA
agtgtacctagacacgccac

SEQ ID NO: 130637 - DNA, 20 bp, Artificial Sequence
  mmSKRIPTE0001416_Dicer1_3
  gRNA
cagttagtcccaaaattcga

SEQ ID NO: 130638 - DNA, 20 bp, Artificial Sequence
  mmSKRIPTE0001417_Dicer1_4
  gRNA
tcaatagcttaggagatccg

SEQ ID NO: 130639 - DNA, 20 bp, Artificial Sequence
  mmSKRIPTE0001418_Dicer1_5
  gRNA
aatctgcccaaactcgcagt

SEQ ID NO: 130640 - DNA, 20 bp, Artificial Sequence
  mmSKRIPTE0001419_Dicer1_6
  gRNA
tgctggggagtaagactgcg

SEQ ID NO: 130641 - DNA, 20 bp, Artificial Sequence
  mmSKRIPTE0001420_Dicer1_7
  gRNA
caggcatcgtggacaccgcg

SEQ ID NO: 130642 - DNA, 20 bp, Artificial Sequence
  mmSKRIPTE0001421_Dicer1_8
  gRNA
tctctaaagtaaaatcgtag

SEQ ID NO: 130643 - DNA, 20 bp, Artificial Sequence
  mmSKRIPTE0001422_Dicer1_9
  gRNA
acggctttcatgcggccgcg

SEQ ID NO: 130644 - DNA, 20 bp, Artificial Sequence
  mmSKRIPTE0001423_Lgals8_1
  gRNA
cacttccgttggataaggag

SEQ ID NO: 130645 - DNA, 20 bp, Artificial Sequence
  mmSKRIPTE0001424_Lgals8_2
  gRNA
aacccggggcttcacaccgt

SEQ ID NO: 130646 - DNA, 20 bp, Artificial Sequence
  mmSKRIPTE0001425_Lgals8_3
  gRNA
catcgggttcagattcagct

SEQ ID NO: 130647 - DNA, 20 bp, Artificial Sequence
  mmSKRIPTE0001426_Lgals8_4
  gRNA
cacgaacagctgaacctcga

SEQ ID NO: 130648 - DNA, 20 bp, Artificial Sequence
  mmSKRIPTE0001427_Lgals8_5
  gRNA
ggggcttatgaagagcaacg

SEQ ID NO: 130649 - DNA, 20 bp, Artificial Sequence
  mmSKRIPTE0001428_Lgals8_6
  gRNA
cagtaatggtgccaacatag

SEQ ID NO: 130650 - DNA, 20 bp, Artificial Sequence
  mmSKRIPTE0001429_Lgals8_7
  gRNA
aagtgaacaccaatgcccga

SEQ ID NO: 130651 - DNA, 20 bp, Artificial Sequence
  mmSKRIPTE0001430_Lgals8_8
  gRNA
ctaacagtgacacgatgctg

SEQ ID NO: 130652 - DNA, 20 bp, Artificial Sequence
  mmSKRIPTE0001431_Lgals8_9
  gRNA
ataagccagctcatgctgtg

SEQ ID NO: 130653 - DNA, 20 bp, Artificial Sequence
  mmSKRIPTE0001432_Syk_1
  gRNA
tgtaacgatgcacctgccga

SEQ ID NO: 130654 - DNA, 20 bp, Artificial Sequence
  mmSKRIPTE0001433_Syk_2
  gRNA
gcgcatgatcggaatctgcg

SEQ ID NO: 130655 - DNA, 20 bp, Artificial Sequence
  mmSKRIPTE0001434_Syk_3
  gRNA
tgatggtccacactaaacag

SEQ ID NO: 130656 - DNA, 20 bp, Artificial Sequence
  mmSKRIPTE0001435_Syk_4
  gRNA
cattcgagcagggtacacac

SEQ ID NO: 130657 - DNA, 20 bp, Artificial Sequence
  mmSKRIPTE0001436_Syk_5
  gRNA
gtcttgggctgtactcccgg

SEQ ID NO: 130658 - DNA, 20 bp, Artificial Sequence
  mmSKRIPTE0001437_Syk_6
  gRNA
tcaaggagatacctatccgc

SEQ ID NO: 130659 - DNA, 20 bp, Artificial Sequence
  mmSKRIPTE0001438_Syk_7
  gRNA
acttggaaatggtggcatcg

SEQ ID NO: 130660 - DNA, 20 bp, Artificial Sequence
  mmSKRIPTE0001439_Syk_8
  gRNA
aatggtgttcagtcccacga

SEQ ID NO: 130661 - DNA, 20 bp, Artificial Sequence
  mmSKRIPTE0001440_Syk_9
  gRNA
tcattaccaagagtggacgg

SEQ ID NO: 130662 - DNA, 20 bp, Artificial Sequence
  mmSKRIPTE0001441_Mef2c_1
  gRNA
tgacccataacccgccactg

SEQ ID NO: 130663 - DNA, 20 bp, Artificial Sequence
  mmSKRIPTE0001442_Mef2c_2
  gRNA
aaggtctggtgagtccaatg

SEQ ID NO: 130664 - DNA, 20 bp, Artificial Sequence
  mmSKRIPTE0001443_Mef2c_3
  gRNA
taaagcaagccaccatcgag

SEQ ID NO: 130665 - DNA, 20 bp, Artificial Sequence
  mmSKRIPTE0001444_Mef2c_4
  gRNA
gtgttgtgggtatctcgaag

SEQ ID NO: 130666 - DNA, 20 bp, Artificial Sequence
  mmSKRIPTE0001445_Mef2c_5
  gRNA
actgccagtgcgctccacct

SEQ ID NO: 130667 - DNA, 20 bp, Artificial Sequence
  mmSKRIPTE0001446_Mef2c_6
  gRNA
actatgggggttgaattgtg

SEQ ID NO: 130668 - DNA, 20 bp, Artificial Sequence
  mmSKRIPTE0001447_Mef2c_7
  gRNA
aaggaagctttcgctagacg

SEQ ID NO: 130669 - DNA, 20 bp, Artificial Sequence
  mmSKRIPTE0001448_Mef2c_8
  gRNA
gcttccacttaaaggtctcg

SEQ ID NO: 130670 - DNA, 20 bp, Artificial Sequence
  mmSKRIPTE0001449_Mef2c_9
  gRNA
cgagtacattactaactctg

SEQ ID NO: 130671 - DNA, 20 bp, Artificial Sequence
  mmSKRIPTE0001450_Itga2_1
  gRNA
cgaacttcacttaacccggt

SEQ ID NO: 130672 - DNA, 20 bp, Artificial Sequence
  mmSKRIPTE0001451_Itga2_2
  gRNA
tacaactacaacatccacga

SEQ ID NO: 130673 - DNA, 20 bp, Artificial Sequence
  mmSKRIPTE0001452_Itga2_3
  gRNA
ttgataagtacgatccgcag

SEQ ID NO: 130674 - DNA, 20 bp, Artificial Sequence
  mmSKRIPTE0001453_Itga2_4
  gRNA
tcagagctatcgaattcgca

SEQ ID NO: 130675 - DNA, 20 bp, Artificial Sequence
  mmSKRIPTE0001454_Itga2_5
  gRNA
gtactagaatgtctgtcccg

SEQ ID NO: 130676 - DNA, 20 bp, Artificial Sequence
  mmSKRIPTE0001455_Itga2_6
  gRNA
aacatgacgcttgatgcgga

SEQ ID NO: 130677 - DNA, 20 bp, Artificial Sequence
  mmSKRIPTE0001456_Itga2_7
  gRNA
aataagcgtagtctctgcga

SEQ ID NO: 130678 - DNA, 20 bp, Artificial Sequence
  mmSKRIPTE0001457_Itga2_8
  gRNA
gatgcgatctggtatccaca

SEQ ID NO: 130679 - DNA, 20 bp, Artificial Sequence
  mmSKRIPTE0001458_Itga2_9
  gRNA
gtactatgccgtgttcaggt

SEQ ID NO: 130680 - DNA, 20 bp, Artificial Sequence
  mmSKRIPTE0001459_Nfkb2_1
  gRNA
acatggtggacagatcaacg

SEQ ID NO: 130681 - DNA, 20 bp, Artificial Sequence
  mmSKRIPTE0001460_Nfkb2_2
  gRNA
ctgctatggaaccttcagcg

SEQ ID NO: 130682 - DNA, 20 bp, Artificial Sequence
  mmSKRIPTE0001461_Nfkb2_3
  gRNA
acccggaatgatgatctgcg

SEQ ID NO: 130683 - DNA, 20 bp, Artificial Sequence
  mmSKRIPTE0001462_Nfkb2_4
  gRNA
ccttctctgtctataacgca

SEQ ID NO: 130684 - DNA, 20 bp, Artificial Sequence
  mmSKRIPTE0001463_Nfkb2_5
  gRNA
ctacgaaggagactgccgct

SEQ ID NO: 130685 - DNA, 20 bp, Artificial Sequence
  mmSKRIPTE0001464_Nfkb2_6
  gRNA
aaggtgagctcagatgacac

SEQ ID NO: 130686 - DNA, 20 bp, Artificial Sequence
  mmSKRIPTE0001465_Nfkb2_7
  gRNA
atttcgggatccatgcagcg

SEQ ID NO: 130687 - DNA, 20 bp, Artificial Sequence
  mmSKRIPTE0001466_Nfkb2_8
  gRNA
tggatccttaggctccacga

SEQ ID NO: 130688 - DNA, 20 bp, Artificial Sequence
  mmSKRIPTE0001467_Nfkb2_9
  gRNA
ctaaggatatcacctctgga

SEQ ID NO: 130689 - DNA, 20 bp, Artificial Sequence
  mmSKRIPTE0001468_Ahcy_1
  gRNA
ttgtttaggtggcggcttcg

SEQ ID NO: 130690 - DNA, 20 bp, Artificial Sequence
  mmSKRIPTE0001469_Ahcy_2
  gRNA
gatgactaaacggagtattg

SEQ ID NO: 130691 - DNA, 20 bp, Artificial Sequence
  mmSKRIPTE0001470_Ahcy_3
  gRNA
gtcccaagccataccctgcg

SEQ ID NO: 130692 - DNA, 20 bp, Artificial Sequence
  mmSKRIPTE0001471_Ahcy_4
  gRNA
gctcgaggcgttgagcggag

SEQ ID NO: 130693 - DNA, 20 bp, Artificial Sequence
  mmSKRIPTE0001472_Ahcy_5
  gRNA
cccaagggttcagtcctccg

SEQ ID NO: 130694 - DNA, 20 bp, Artificial Sequence
  mmSKRIPTE0001473_Ahcy_6
  gRNA
gcgcacctgacagaagctgt

SEQ ID NO: 130695 - DNA, 20 bp, Artificial Sequence
  mmSKRIPTE0001474_Ahcy_7
  gRNA
cagcgattctaggggtcccg

SEQ ID NO: 130696 - DNA, 20 bp, Artificial Sequence
  mmSKRIPTE0001475_Ahcy_8
  gRNA
ggccagtccgatgtccgctg

SEQ ID NO: 130697 - DNA, 20 bp, Artificial Sequence
  mmSKRIPTE0001476_Ahcy_9
  gRNA
ggaatgtgagggctaaacgt

SEQ ID NO: 130698 - DNA, 20 bp, Artificial Sequence
  mmSKRIPTE0001477_Acp6_1
  gRNA
gatataagtagaacgaccag

SEQ ID NO: 130699 - DNA, 20 bp, Artificial Sequence
  mmSKRIPTE0001478_Acp6_2
  gRNA
cttaattggagcaggtccgt

SEQ ID NO: 130700 - DNA, 20 bp, Artificial Sequence
  mmSKRIPTE0001479_Acp6_3
  gRNA
cagaacaagcgactctagcg

SEQ ID NO: 130701 - DNA, 20 bp, Artificial Sequence
  mmSKRIPTE0001480_Acp6_4
  gRNA
aacccaaatctgatgaatcg

SEQ ID NO: 130702 - DNA, 20 bp, Artificial Sequence
  mmSKRIPTE0001481_Acp6_5
  gRNA
ctcatcccaaaccaccggtg

SEQ ID NO: 130703 - DNA, 20 bp, Artificial Sequence
  mmSKRIPTE0001482_Acp6_6
  gRNA
ccatgggtaaattcaacccg

SEQ ID NO: 130704 - DNA, 20 bp, Artificial Sequence
  mmSKRIPTE0001483_Acp6_7
  gRNA
tggaatccaccagtacaggc

SEQ ID NO: 130705 - DNA, 20 bp, Artificial Sequence
  mmSKRIPTE0001484_Acp6_8
  gRNA
cgtagggcagtgtcggcctg

SEQ ID NO: 130706 - DNA, 20 bp, Artificial Sequence
  mmSKRIPTE0001485_Acp6_9
  gRNA
gaaatggggaatctacgtag

SEQ ID NO: 130707 - DNA, 20 bp, Artificial Sequence
  mmSKRIPTE0001486_Fgfr3_1
  gRNA
tgaaattggtggctcgacag

SEQ ID NO: 130708 - DNA, 20 bp, Artificial Sequence
  mmSKRIPTE0001487_Fgfr3_2
  gRNA
tcgatgctcacacacaacgc

SEQ ID NO: 130709 - DNA, 20 bp, Artificial Sequence
  mmSKRIPTE0001488_Fgfr3_3
  gRNA
ctgggactctaggagacacg

SEQ ID NO: 130710 - DNA, 20 bp, Artificial Sequence
  mmSKRIPTE0001489_Fgfr3_4
  gRNA
aaggagtagtccatgcctgg

SEQ ID NO: 130711 - DNA, 20 bp, Artificial Sequence
  mmSKRIPTE0001490_Fgfr3_5
  gRNA
agacagcaccctaagaggac

SEQ ID NO: 130712 - DNA, 20 bp, Artificial Sequence
  mmSKRIPTE0001491_Fgfr3_6
  gRNA
gaacatcattaacctgctgg

SEQ ID NO: 130713 - DNA, 20 bp, Artificial Sequence
  mmSKRIPTE0001492_Fgfr3_7
  gRNA
tctgggagatctttacgctg

SEQ ID NO: 130714 - DNA, 20 bp, Artificial Sequence
  mmSKRIPTE0001493_Fgfr3_8
  gRNA
caagctcaaacgcagaagcg

SEQ ID NO: 130715 - DNA, 20 bp, Artificial Sequence
  mmSKRIPTE0001494_Fgfr3_9
  gRNA
tacgtcactgtactcaaggt

SEQ ID NO: 130716 - DNA, 20 bp, Artificial Sequence
  mmSKRIPTE0001495_Crlf2_1
  gRNA
ttccgggtgcatcctccccg

SEQ ID NO: 130717 - DNA, 20 bp, Artificial Sequence
  mmSKRIPTE0001496_Crlf2_2
  gRNA
cgaacatgacgtcatcacag

SEQ ID NO: 130718 - DNA, 20 bp, Artificial Sequence
  mmSKRIPTE0001497_Crlf2_3
  gRNA
cacctgtgagtcgagtggcg

SEQ ID NO: 130719 - DNA, 20 bp, Artificial Sequence
  mmSKRIPTE0001498_Crlf2_4
  gRNA
gcgccggacaggaaatatcg

SEQ ID NO: 130720 - DNA, 20 bp, Artificial Sequence
  mmSKRIPTE0001499_Crlf2_5
  gRNA
ctggccctcctaagggcgat

SEQ ID NO: 130721 - DNA, 20 bp, Artificial Sequence
  mmSKRIPTE0001500_Crlf2_6
  gRNA
aatgtacctcaagaattcgc

SEQ ID NO: 130722 - DNA, 20 bp, Artificial Sequence
  mmSKRIPTE0001501_Crlf2_7
  gRNA
gggctgcctgtcaatcgccg

SEQ ID NO: 130723 - DNA, 20 bp, Artificial Sequence
  mmSKRIPTE0001502_Crlf2_8
  gRNA
tcgcaggtgaggggtctccg

SEQ ID NO: 130724 - DNA, 20 bp, Artificial Sequence
  mmSKRIPTE0001503_Crlf2_9
  gRNA
tggaggcgcagcctagcgag

SEQ ID NO: 130725 - DNA, 20 bp, Artificial Sequence
  mmSKRIPTE0001504_Ptpn11_1
  gRNA
gtgcagagtaagtagcgata

SEQ ID NO: 130726 - DNA, 20 bp, Artificial Sequence
  mmSKRIPTE0001505_Ptpn11_2
  gRNA
agccccctgtagtatacaca

SEQ ID NO: 130727 - DNA, 20 bp, Artificial Sequence
  mmSKRIPTE0001506_Ptpn11_3
  gRNA
ctccatgtgacggtaccccg

SEQ ID NO: 130728 - DNA, 20 bp, Artificial Sequence
  mmSKRIPTE0001507_Ptpn11_4
  gRNA
aaggagctgaaatacgacgt

SEQ ID NO: 130729 - DNA, 20 bp, Artificial Sequence
  mmSKRIPTE0001508_Ptpn11_5
  gRNA
gagtagccttacgagcaggg

SEQ ID NO: 130730 - DNA, 20 bp, Artificial Sequence
  mmSKRIPTE0001509_Ptpn11_6
  gRNA
ggagtattagtaagatcccg

SEQ ID NO: 130731 - DNA, 20 bp, Artificial Sequence
  mmSKRIPTE0001510_Ptpn11_7
  gRNA
aaaaccaacgtagtttacga

SEQ ID NO: 130732 - DNA, 20 bp, Artificial Sequence
  mmSKRIPTE0001511_Ptpn11_8
  gRNA
gtagcagccaatgtgcgctg

SEQ ID NO: 130733 - DNA, 20 bp, Artificial Sequence
  mmSKRIPTE0001512_Ptpn11_9
  gRNA
tggatggctcatacgtacca

SEQ ID NO: 130734 - DNA, 20 bp, Artificial Sequence
  mmSKRIPTE0001513_Pvr_1
  gRNA
ttccaacgtagcctagactc

SEQ ID NO: 130735 - DNA, 20 bp, Artificial Sequence
  mmSKRIPTE0001514_Pvr_2
  gRNA
cactccttagaccggctgtg

SEQ ID NO: 130736 - DNA, 20 bp, Artificial Sequence
  mmSKRIPTE0001515_Pvr_3
  gRNA
tatacactatacgaagatgc

SEQ ID NO: 130737 - DNA, 20 bp, Artificial Sequence
  mmSKRIPTE0001516_Pvr_4
  gRNA
catacgcagatccacgcaca

SEQ ID NO: 130738 - DNA, 20 bp, Artificial Sequence
  mmSKRIPTE0001517_Pvr_5
  gRNA
caccggccaccggagtacag

SEQ ID NO: 130739 - DNA, 20 bp, Artificial Sequence
  mmSKRIPTE0001518_Pvr_6
  gRNA
gagacgccataaatctgctg

SEQ ID NO: 130740 - DNA, 20 bp, Artificial Sequence
  mmSKRIPTE0001519_Pvr_7
  gRNA
cggacccagatccgatacca

SEQ ID NO: 130741 - DNA, 20 bp, Artificial Sequence
  mmSKRIPTE0001520_Pvr_8
  gRNA
cagagatggggattcccgag

SEQ ID NO: 130742 - DNA, 20 bp, Artificial Sequence
  mmSKRIPTE0001521_Pvr_9
  gRNA
ttagtcagggggacacaacg

SEQ ID NO: 130743 - DNA, 20 bp, Artificial Sequence
  mmSKRIPTE0001522_Nlrp9c_1
  gRNA
agatagtgttgtatgccggc

SEQ ID NO: 130744 - DNA, 20 bp, Artificial Sequence
  mmSKRIPTE0001523_Nlrp9c_2
  gRNA
gaaatgttcaacatgtcgag

SEQ ID NO: 130745 - DNA, 20 bp, Artificial Sequence
  mmSKRIPTE0001524_Nlrp9c_3
  gRNA
gtgggggcattattcgagag

SEQ ID NO: 130746 - DNA, 20 bp, Artificial Sequence
  mmSKRIPTE0001525_Nlrp9c_4
  gRNA
caagaaataagtgacactcg

SEQ ID NO: 130747 - DNA, 20 bp, Artificial Sequence
  mmSKRIPTE0001526_Nlrp9c_5
  gRNA
aatctgttaacgtgtgacag

SEQ ID NO: 130748 - DNA, 20 bp, Artificial Sequence
  mmSKRIPTE0001527_Nlrp9c_6
  gRNA
catccagtaatacacacctg

SEQ ID NO: 130749 - DNA, 20 bp, Artificial Sequence
  mmSKRIPTE0001528_Nlrp9c_7
  gRNA
aaaatgatctcagactctag

SEQ ID NO: 130750 - DNA, 20 bp, Artificial Sequence
  mmSKRIPTE0001529_Nlrp9c_8
  gRNA
gatgattagagactgttcca

SEQ ID NO: 130751 - DNA, 20 bp, Artificial Sequence
  mmSKRIPTE0001530_Nlrp9c_9
  gRNA
tcagtcagaggactattcct

SEQ ID NO: 130752 - DNA, 20 bp, Artificial Sequence
  mmSKRIPTE0001531_Inpp5d_1
  gRNA
atcgatgccttagcaatctg

SEQ ID NO: 130753 - DNA, 20 bp, Artificial Sequence
  mmSKRIPTE0001532_Inpp5d_2
  gRNA
ctaacggagctgctcatccg

SEQ ID NO: 130754 - DNA, 20 bp, Artificial Sequence
  mmSKRIPTE0001533_Inpp5d_3
  gRNA
tggggatctcaactaccgcg

SEQ ID NO: 130755 - DNA, 20 bp, Artificial Sequence
  mmSKRIPTE0001534_Inpp5d_4
  gRNA
ccgatgtcctcattataggg

SEQ ID NO: 130756 - DNA, 20 bp, Artificial Sequence
  mmSKRIPTE0001535_Inpp5d_5
  gRNA
gctgaggctaaggtacggtg

SEQ ID NO: 130757 - DNA, 20 bp, Artificial Sequence
  mmSKRIPTE0001536_Inpp5d_6
  gRNA
atggacagtctcatggtgtg

SEQ ID NO: 130758 - DNA, 20 bp, Artificial Sequence
  mmSKRIPTE0001537_Inpp5d_7
  gRNA
gacgcaccgcctcctcacgt

SEQ ID NO: 130759 - DNA, 20 bp, Artificial Sequence
  mmSKRIPTE0001538_Inpp5d_8
  gRNA
aggactcggtcgcaccagga

SEQ ID NO: 130760 - DNA, 20 bp, Artificial Sequence
  mmSKRIPTE0001539_Inpp5d_9
  gRNA
gtcgccttcctcgaccacgg

SEQ ID NO: 130761 - DNA, 20 bp, Artificial Sequence
  mmSKRIPTE0001540_Prdm1_1
  gRNA
tcttaacaatgctcatgctg

SEQ ID NO: 130762 - DNA, 20 bp, Artificial Sequence
  mmSKRIPTE0001541_Prdm1_2
  gRNA
ccattggaactaatgccgta

SEQ ID NO: 130763 - DNA, 20 bp, Artificial Sequence
  mmSKRIPTE0001542_Prdm1_3
  gRNA
acgaagcttacggctaactg

SEQ ID NO: 130764 - DNA, 20 bp, Artificial Sequence
  mmSKRIPTE0001543_Prdm1_4
  gRNA
aagccgaggcatccttacca

SEQ ID NO: 130765 - DNA, 20 bp, Artificial Sequence
  mmSKRIPTE0001544_Prdm1_5
  gRNA
ggataggataaaccacccga

SEQ ID NO: 130766 - DNA, 20 bp, Artificial Sequence
  mmSKRIPTE0001545_Prdm1_6
  gRNA
gtgtagacttcaccgatgag

SEQ ID NO: 130767 - DNA, 20 bp, Artificial Sequence
  mmSKRIPTE0001546_Prdm1_7
  gRNA
gacgagagtagtccccccag

SEQ ID NO: 130768 - DNA, 20 bp, Artificial Sequence
  mmSKRIPTE0001547_Prdm1_8
  gRNA
tgcctaccgatggagcccgg

SEQ ID NO: 130769 - DNA, 20 bp, Artificial Sequence
  mmSKRIPTE0001548_Prdm1_9
  gRNA
attcgggtcagatcctccaa

SEQ ID NO: 130770 - DNA, 20 bp, Artificial Sequence
  mmSKRIPTE0001549_Thra_1
  gRNA
taggctagctagctacgggt

SEQ ID NO: 130771 - DNA, 20 bp, Artificial Sequence
  mmSKRIPTE0001550_Thra_2
  gRNA
gtgcggcgaaagaagcccta

SEQ ID NO: 130772 - DNA, 20 bp, Artificial Sequence
  mmSKRIPTE0001551_Thra_3
  gRNA
cgattgattatgcaaagccg

SEQ ID NO: 130773 - DNA, 20 bp, Artificial Sequence
  mmSKRIPTE0001552_Thra_4
  gRNA
gactgtaagaggcacccgtg

SEQ ID NO: 130774 - DNA, 20 bp, Artificial Sequence
  mmSKRIPTE0001553_Thra_5
  gRNA
ggcacaccgtaaacaaaccg

SEQ ID NO: 130775 - DNA, 20 bp, Artificial Sequence
  mmSKRIPTE0001554_Thra_6
  gRNA
gatccctgggatacccccaa

SEQ ID NO: 130776 - DNA, 20 bp, Artificial Sequence
  mmSKRIPTE0001555_Thra_7
  gRNA
ccgggcgccggaaaagactg

SEQ ID NO: 130777 - DNA, 20 bp, Artificial Sequence
  mmSKRIPTE0001556_Thra_8
  gRNA
cgagctgagcaacgacgcgg

SEQ ID NO: 130778 - DNA, 20 bp, Artificial Sequence
  mmSKRIPTE0001557_Thra_9
  gRNA
ataaggagcccctccctccg

SEQ ID NO: 130779 - DNA, 20 bp, Artificial Sequence
  mmSKRIPTE0001558_Prkar1a_1
  gRNA
cctacgttagaaaggtagcg

SEQ ID NO: 130780 - DNA, 20 bp, Artificial Sequence
  mmSKRIPTE0001559_Prkar1a_2
  gRNA
gccgagccgctatcgcagag

SEQ ID NO: 130781 - DNA, 20 bp, Artificial Sequence
  mmSKRIPTE0001560_Prkar1a_3
  gRNA
cttcagcactgatagcacct

SEQ ID NO: 130782 - DNA, 20 bp, Artificial Sequence
  mmSKRIPTE0001561_Prkar1a_4
  gRNA
tattcccgaaggaatgccat

SEQ ID NO: 130783 - DNA, 20 bp, Artificial Sequence
  mmSKRIPTE0001562_Prkar1a_5
  gRNA
tggcagtatggcaaccagtg

SEQ ID NO: 130784 - DNA, 20 bp, Artificial Sequence
  mmSKRIPTE0001563_Prkar1a_6
  gRNA
ccggcatccgtactgactcg

SEQ ID NO: 130785 - DNA, 20 bp, Artificial Sequence
  mmSKRIPTE0001564_Prkar1a_7
  gRNA
agtagttcctgtagacagtg

SEQ ID NO: 130786 - DNA, 20 bp, Artificial Sequence
  mmSKRIPTE0001565_Prkar1a_8
  gRNA
tcgtgcagctgtgcactacg

SEQ ID NO: 130787 - DNA, 20 bp, Artificial Sequence
  mmSKRIPTE0001566_Prkar1a_9
  gRNA
cggttctagctagatgacga

SEQ ID NO: 130788 - DNA, 20 bp, Artificial Sequence
  mmSKRIPTE0001567_Rab10_1
  gRNA
acgagcgagctctacgtcga

SEQ ID NO: 130789 - DNA, 20 bp, Artificial Sequence
  mmSKRIPTE0001568_Rab10_2
  gRNA
ccttccgaacggcctcgtcg

SEQ ID NO: 130790 - DNA, 20 bp, Artificial Sequence
  mmSKRIPTE0001569_Rab10_3
  gRNA
cttgacgaacacgccccgcg

SEQ ID NO: 130791 - DNA, 20 bp, Artificial Sequence
  mmSKRIPTE0001570_Rab10_4
  gRNA
gagcaatctcaaccacgtgt

SEQ ID NO: 130792 - DNA, 20 bp, Artificial Sequence
  mmSKRIPTE0001571_Rab10_5
  gRNA
tctttcacgatagttaactg

SEQ ID NO: 130793 - DNA, 20 bp, Artificial Sequence
  mmSKRIPTE0001572_Rab10_6
  gRNA
gctgagctcaaactttagga

SEQ ID NO: 130794 - DNA, 20 bp, Artificial Sequence
  mmSKRIPTE0001573_Rab10_7
  gRNA
ggtgtatgtgtaagtccgca

SEQ ID NO: 130795 - DNA, 20 bp, Artificial Sequence
  mmSKRIPTE0001574_Rab10_8
  gRNA
gaggagatgcttgctcctcg

SEQ ID NO: 130796 - DNA, 20 bp, Artificial Sequence
  mmSKRIPTE0001575_Rab10_9
  gRNA
gacaagagagttgtaccgaa

SEQ ID NO: 130797 - DNA, 20 bp, Artificial Sequence
  mmSKRIPTE0001576_Fos_1
  gRNA
tgacgacagagcgcccgcag

SEQ ID NO: 130798 - DNA, 20 bp, Artificial Sequence
  mmSKRIPTE0001577_Fos_2
  gRNA
acagatacactccaagcggt

SEQ ID NO: 130799 - DNA, 20 bp, Artificial Sequence
  mmSKRIPTE0001578_Fos_3
  gRNA
ttcgagcgagtgatgccgaa

SEQ ID NO: 130800 - DNA, 20 bp, Artificial Sequence
  mmSKRIPTE0001579_Fos_4
  gRNA
gaaagatgtatgccaagacg

SEQ ID NO: 130801 - DNA, 20 bp, Artificial Sequence
  mmSKRIPTE0001580_Fos_5
  gRNA
gtttgggaggcggcaaaccg

SEQ ID NO: 130802 - DNA, 20 bp, Artificial Sequence
  mmSKRIPTE0001581_Fos_6
  gRNA
aggtcgacgggaaccttcga

SEQ ID NO: 130803 - DNA, 20 bp, Artificial Sequence
  mmSKRIPTE0001582_Fos_7
  gRNA
ttactgatcatgcattgtcg

SEQ ID NO: 130804 - DNA, 20 bp, Artificial Sequence
  mmSKRIPTE0001583_Fos_8
  gRNA
actagatacaatccagcacc

SEQ ID NO: 130805 - DNA, 20 bp, Artificial Sequence
  mmSKRIPTE0001584_Fos_9
  gRNA
acaatgaacattgacgctga

SEQ ID NO: 130806 - DNA, 20 bp, Artificial Sequence
  mmSKRIPTE0001585_Ripk1_1
  gRNA
cagcaaccatctcaccctcg

SEQ ID NO: 130807 - DNA, 20 bp, Artificial Sequence
  mmSKRIPTE0001586_Ripk1_2
  gRNA
ttcccggaaatcgaaaagcg

SEQ ID NO: 130808 - DNA, 20 bp, Artificial Sequence
  mmSKRIPTE0001587_Ripk1_3
  gRNA
ctagtagtgcttcattctcg

SEQ ID NO: 130809 - DNA, 20 bp, Artificial Sequence
  mmSKRIPTE0001588_Ripk1_4
  gRNA
gtccacgcgcagaaatcgcg

SEQ ID NO: 130810 - DNA, 20 bp, Artificial Sequence
  mmSKRIPTE0001589_Ripk1_5
  gRNA
agacagcggaggcttcggga

SEQ ID NO: 130811 - DNA, 20 bp, Artificial Sequence
  mmSKRIPTE0001590_Ripk1_6
  gRNA
tggaccgaccattcattcag

SEQ ID NO: 130812 - DNA, 20 bp, Artificial Sequence
  mmSKRIPTE0001591_Ripk1_7
  gRNA
tgactaagacttctccaccc

SEQ ID NO: 130813 - DNA, 20 bp, Artificial Sequence
  mmSKRIPTE0001592_Ripk1_8
  gRNA
attgaaaggaaggataatcg

SEQ ID NO: 130814 - DNA, 20 bp, Artificial Sequence
  mmSKRIPTE0001593_Ripk1_9
  gRNA
tggctatcctataggccctg

SEQ ID NO: 130815 - DNA, 20 bp, Artificial Sequence
  mmSKRIPTE0001594_Ptk2_1
  gRNA
ctgttgctactatatatcag

SEQ ID NO: 130816 - DNA, 20 bp, Artificial Sequence
  mmSKRIPTE0001595_Ptk2_2
  gRNA
gcgttgaagagtaagctgtg

SEQ ID NO: 130817 - DNA, 20 bp, Artificial Sequence
  mmSKRIPTE0001596_Ptk2_3
  gRNA
tacatatcggaatcacaccg

SEQ ID NO: 130818 - DNA, 20 bp, Artificial Sequence
  mmSKRIPTE0001597_Ptk2_4
  gRNA
tgtaacgattctgagttgat

SEQ ID NO: 130819 - DNA, 20 bp, Artificial Sequence
  mmSKRIPTE0001598_Ptk2_5
  gRNA
gattgatggatactgccggc

SEQ ID NO: 130820 - DNA, 20 bp, Artificial Sequence
  mmSKRIPTE0001599_Ptk2_6
  gRNA
caagcagcctacttactcga

SEQ ID NO: 130821 - DNA, 20 bp, Artificial Sequence
  mmSKRIPTE0001600_Ptk2_7
  gRNA
atactcgttccattgcacca

SEQ ID NO: 130822 - DNA, 20 bp, Artificial Sequence
  mmSKRIPTE0001601_Ptk2_8
  gRNA
cctgatgtgaggctctctcg

SEQ ID NO: 130823 - DNA, 20 bp, Artificial Sequence
  mmSKRIPTE0001602_Ptk2_9
  gRNA
aaagctgccgaatcctggaa

SEQ ID NO: 130824 - DNA, 20 bp, Artificial Sequence
  mmSKRIPTE0001603_Malt1_1
  gRNA
ggcatcgagatggacgtgca

SEQ ID NO: 130825 - DNA, 20 bp, Artificial Sequence
  mmSKRIPTE0001604_Malt1_2
  gRNA
acgacacggacggatatgct

SEQ ID NO: 130826 - DNA, 20 bp, Artificial Sequence
  mmSKRIPTE0001605_Malt1_3
  gRNA
gtcctatgcctcactaccag

SEQ ID NO: 130827 - DNA, 20 bp, Artificial Sequence
  mmSKRIPTE0001606_Malt1_4
  gRNA
tctcacgcgactccgtacca

SEQ ID NO: 130828 - DNA, 20 bp, Artificial Sequence
  mmSKRIPTE0001607_Malt1_5
  gRNA
gccaagctagacatgcaccg

SEQ ID NO: 130829 - DNA, 20 bp, Artificial Sequence
  mmSKRIPTE0001608_Malt1_6
  gRNA
cccaactagaactcagctcg

SEQ ID NO: 130830 - DNA, 20 bp, Artificial Sequence
  mmSKRIPTE0001609_Malt1_7
  gRNA
atatgagatgtgtaacgctg

SEQ ID NO: 130831 - DNA, 20 bp, Artificial Sequence
  mmSKRIPTE0001610_Malt1_8
  gRNA
gacttgctcatcattactag

SEQ ID NO: 130832 - DNA, 20 bp, Artificial Sequence
  mmSKRIPTE0001611_Malt1_9
  gRNA
ttagagacagaatcgtccat

SEQ ID NO: 130833 - DNA, 20 bp, Artificial Sequence
  mmSKRIPTE0001612_Rela_1
  gRNA
aaggtgtacaggaatccgcg

SEQ ID NO: 130834 - DNA, 20 bp, Artificial Sequence
  mmSKRIPTE0001613_Rela_2
  gRNA
cgactacaagctccgcagcg

SEQ ID NO: 130835 - DNA, 20 bp, Artificial Sequence
  mmSKRIPTE0001614_Rela_3
  gRNA
aggtgtgacagccgccgctg

SEQ ID NO: 130836 - DNA, 20 bp, Artificial Sequence
  mmSKRIPTE0001615_Rela_4
  gRNA
caaagacattgatcttcgtg

SEQ ID NO: 130837 - DNA, 20 bp, Artificial Sequence
  mmSKRIPTE0001616_Rela_5
  gRNA
ggtgtcgggcagcaccacgt

SEQ ID NO: 130838 - DNA, 20 bp, Artificial Sequence
  mmSKRIPTE0001617_Rela_6
  gRNA
aaaacagagtgagtaatcgc

SEQ ID NO: 130839 - DNA, 20 bp, Artificial Sequence
  mmSKRIPTE0001618_Rela_7
  gRNA
tatcaaaaatcggatgtgag

SEQ ID NO: 130840 - DNA, 20 bp, Artificial Sequence
  mmSKRIPTE0001619_Rela_8
  gRNA
gaggtgttccctagctactg

SEQ ID NO: 130841 - DNA, 20 bp, Artificial Sequence
  mmSKRIPTE0001620_Rela_9
  gRNA
gcccagaccgcagtatccat

SEQ ID NO: 130842 - DNA, 20 bp, Artificial Sequence
  mmSKRIPTE0001621_Spi1_1
  gRNA
acataggctcttactcaacg

SEQ ID NO: 130843 - DNA, 20 bp, Artificial Sequence
  mmSKRIPTE0001622_Spi1_2
  gRNA
cccactgatagggagccgga

SEQ ID NO: 130844 - DNA, 20 bp, Artificial Sequence
  mmSKRIPTE0001623_Spi1_3
  gRNA
gtctctgcgggcgatcagtg

SEQ ID NO: 130845 - DNA, 20 bp, Artificial Sequence
  mmSKRIPTE0001624_Spi1_4
  gRNA
aaataagagatcgtgcacac

SEQ ID NO: 130846 - DNA, 20 bp, Artificial Sequence
  mmSKRIPTE0001625_Spi1_5
  gRNA
aagtccataagggatagccc

SEQ ID NO: 130847 - DNA, 20 bp, Artificial Sequence
  mmSKRIPTE0001626_Spi1_6
  gRNA
taagtaaccaagtcatccga

SEQ ID NO: 130848 - DNA, 20 bp, Artificial Sequence
  mmSKRIPTE0001627_Spi1_7
  gRNA
atgggcaaccaagtggtgtg

SEQ ID NO: 130849 - DNA, 20 bp, Artificial Sequence
  mmSKRIPTE0001628_Spi1_8
  gRNA
gcagggtcgaggactaagaa

SEQ ID NO: 130850 - DNA, 20 bp, Artificial Sequence
  mmSKRIPTE0001629_Spi1_9
  gRNA
aggacagcgtgctaacaatg

SEQ ID NO: 130851 - DNA, 20 bp, Artificial Sequence
  mmSKRIPTE0001630_Asxl1_1
  gRNA
agactatacatacctgacgc

SEQ ID NO: 130852 - DNA, 20 bp, Artificial Sequence
  mmSKRIPTE0001631_Asxl1_2
  gRNA
tggccgtctctcgattgcag

SEQ ID NO: 130853 - DNA, 20 bp, Artificial Sequence
  mmSKRIPTE0001632_Asxl1_3
  gRNA
ggcggctccgcataaccacg

SEQ ID NO: 130854 - DNA, 20 bp, Artificial Sequence
  mmSKRIPTE0001633_Asxl1_4
  gRNA
aagagcgaactagtggcggg

SEQ ID NO: 130855 - DNA, 20 bp, Artificial Sequence
  mmSKRIPTE0001634_Asxl1_5
  gRNA
gcagctgtgatgactctagt

SEQ ID NO: 130856 - DNA, 20 bp, Artificial Sequence
  mmSKRIPTE0001635_Asxl1_6
  gRNA
gtgttaacaagaatggaccc

SEQ ID NO: 130857 - DNA, 20 bp, Artificial Sequence
  mmSKRIPTE0001636_Asxl1_7
  gRNA
gaaggtaaacggggcccacg

SEQ ID NO: 130858 - DNA, 20 bp, Artificial Sequence
  mmSKRIPTE0001637_Asxl1_8
  gRNA
aggtgccaagaatcgatcca

SEQ ID NO: 130859 - DNA, 20 bp, Artificial Sequence
  mmSKRIPTE0001638_Asxl1_9
  gRNA
agacattagtgatacctgac

SEQ ID NO: 130860 - DNA, 20 bp, Artificial Sequence
  mmSKRIPTE0001639_Ptk6_1
  gRNA
aacctgctgcagctactgcg

SEQ ID NO: 130861 - DNA, 20 bp, Artificial Sequence
  mmSKRIPTE0001640_Ptk6_2
  gRNA
tggttgcatctcccgctcag

SEQ ID NO: 130862 - DNA, 20 bp, Artificial Sequence
  mmSKRIPTE0001641_Ptk6_3
  gRNA
tgtggagtctgaaccgtgag

SEQ ID NO: 130863 - DNA, 20 bp, Artificial Sequence
  mmSKRIPTE0001642_Ptk6_4
  gRNA
agaagtccaggataatcacg

SEQ ID NO: 130864 - DNA, 20 bp, Artificial Sequence
  mmSKRIPTE0001643_Ptk6_5
  gRNA
gtgcctactagaaggactag

SEQ ID NO: 130865 - DNA, 20 bp, Artificial Sequence
  mmSKRIPTE0001644_Ptk6_6
  gRNA
ccagatcctgtaatgtcgca

SEQ ID NO: 130866 - DNA, 20 bp, Artificial Sequence
  mmSKRIPTE0001645_Ptk6_7
  gRNA
cacctgaggcactttcccga

SEQ ID NO: 130867 - DNA, 20 bp, Artificial Sequence
  mmSKRIPTE0001646_Ptk6_8
  gRNA
ttgagatacccaatcacctg

SEQ ID NO: 130868 - DNA, 20 bp, Artificial Sequence
  mmSKRIPTE0001647_Ptk6_9
  gRNA
taccctaccagtaggaccct

SEQ ID NO: 130869 - DNA, 20 bp, Artificial Sequence
  mmSKRIPTE0001648_Foxp1_1
  gRNA
actcggaagaagatcctccg

SEQ ID NO: 130870 - DNA, 20 bp, Artificial Sequence
  mmSKRIPTE0001649_Foxp1_2
  gRNA
ctgctccccttctaacggcg

SEQ ID NO: 130871 - DNA, 20 bp, Artificial Sequence
  mmSKRIPTE0001650_Foxp1_3
  gRNA
acccctatatgtatgatgca

SEQ ID NO: 130872 - DNA, 20 bp, Artificial Sequence
  mmSKRIPTE0001651_Foxp1_4
  gRNA
tgctatcaaaaggtgtacgt

SEQ ID NO: 130873 - DNA, 20 bp, Artificial Sequence
  mmSKRIPTE0001652_Foxp1_5
  gRNA
acccccgagaccgaagattg

SEQ ID NO: 130874 - DNA, 20 bp, Artificial Sequence
  mmSKRIPTE0001653_Foxp1_6
  gRNA
caagttgatcaacagctccg

SEQ ID NO: 130875 - DNA, 20 bp, Artificial Sequence
  mmSKRIPTE0001654_Foxp1_7
  gRNA
agatagtcccccgagatctg

SEQ ID NO: 130876 - DNA, 20 bp, Artificial Sequence
  mmSKRIPTE0001655_Foxp1_8
  gRNA
acacggtgggacctatccgc

SEQ ID NO: 130877 - DNA, 20 bp, Artificial Sequence
  mmSKRIPTE0001656_Foxp1_9
  gRNA
tactcacacagcttgcatag

SEQ ID NO: 130878 - DNA, 20 bp, Artificial Sequence
  mmSKRIPTE0001657_Satb1_1
  gRNA
cgagtatcgacactacggat

SEQ ID NO: 130879 - DNA, 20 bp, Artificial Sequence
  mmSKRIPTE0001658_Satb1_2
  gRNA
atggaacaaaaggtgtcacg

SEQ ID NO: 130880 - DNA, 20 bp, Artificial Sequence
  mmSKRIPTE0001659_Satb1_3
  gRNA
tacccagtgattccgcggca

SEQ ID NO: 130881 - DNA, 20 bp, Artificial Sequence
  mmSKRIPTE0001660_Satb1_4
  gRNA
caagcgcggcgacaacacaa

SEQ ID NO: 130882 - DNA, 20 bp, Artificial Sequence
  mmSKRIPTE0001661_Satb1_5
  gRNA
aggtgtttcatcgatcccca

SEQ ID NO: 130883 - DNA, 20 bp, Artificial Sequence
  mmSKRIPTE0001662_Satb1_6
  gRNA
tttaggattagcagatacga

SEQ ID NO: 130884 - DNA, 20 bp, Artificial Sequence
  mmSKRIPTE0001663_Satb1_7
  gRNA
tcatggtcttcgtctagaca

SEQ ID NO: 130885 - DNA, 20 bp, Artificial Sequence
  mmSKRIPTE0001664_Satb1_8
  gRNA
atatggtgcttgtaggcggg

SEQ ID NO: 130886 - DNA, 20 bp, Artificial Sequence
  mmSKRIPTE0001665_Satb1_9
  gRNA
ggggtgctggaatgtcatcg

SEQ ID NO: 130887 - DNA, 20 bp, Artificial Sequence
  mmSKRIPTE0001666_Mixl1_1
  gRNA
cagcccttatcctcaaggcg

SEQ ID NO: 130888 - DNA, 20 bp, Artificial Sequence
  mmSKRIPTE0001667_Mixl1_2
  gRNA
agatcaatcacatggtaacg

SEQ ID NO: 130889 - DNA, 20 bp, Artificial Sequence
  mmSKRIPTE0001668_Mixl1_3
  gRNA
ttctccttggctacaacccg

SEQ ID NO: 130890 - DNA, 20 bp, Artificial Sequence
  mmSKRIPTE0001669_Mixl1_4
  gRNA
gcggtttggaaagcactgcg

SEQ ID NO: 130891 - DNA, 20 bp, Artificial Sequence
  mmSKRIPTE0001670_Mixl1_5
  gRNA
cgcctgcagttatagcggcc

SEQ ID NO: 130892 - DNA, 20 bp, Artificial Sequence
  mmSKRIPTE0001671_Mixl1_6
  gRNA
taatcgcttccgctgacccg

SEQ ID NO: 130893 - DNA, 20 bp, Artificial Sequence
  mmSKRIPTE0001672_Mixl1_7
  gRNA
agccgcgtctcgtctcctcg

SEQ ID NO: 130894 - DNA, 20 bp, Artificial Sequence
  mmSKRIPTE0001673_Mixl1_8
  gRNA
tcatgctgggatccggaacg

SEQ ID NO: 130895 - DNA, 20 bp, Artificial Sequence
  mmSKRIPTE0001674_Mixl1_9
  gRNA
gaaagtagcgttgttactga

SEQ ID NO: 130896 - DNA, 20 bp, Artificial Sequence
  mmSKRIPTE0001675_Ptpn22_1
  gRNA
gacttctacgatgaatgccg

SEQ ID NO: 130897 - DNA, 20 bp, Artificial Sequence
  mmSKRIPTE0001676_Ptpn22_2
  gRNA
ctgtggctgaaccttctaca

SEQ ID NO: 130898 - DNA, 20 bp, Artificial Sequence
  mmSKRIPTE0001677_Ptpn22_3
  gRNA
gatgcactctcaaagcgccg

SEQ ID NO: 130899 - DNA, 20 bp, Artificial Sequence
  mmSKRIPTE0001678_Ptpn22_4
  gRNA
agtatggacacatccgccat

SEQ ID NO: 130900 - DNA, 20 bp, Artificial Sequence
  mmSKRIPTE0001679_Ptpn22_5
  gRNA
gaaaccgcttgtggatcgtg

SEQ ID NO: 130901 - DNA, 20 bp, Artificial Sequence
  mmSKRIPTE0001680_Ptpn22_6
  gRNA
aaaacgatttccgaaacctg

SEQ ID NO: 130902 - DNA, 20 bp, Artificial Sequence
  mmSKRIPTE0001681_Ptpn22_7
  gRNA
tgtctcttggtttaacggtg

SEQ ID NO: 130903 - DNA, 20 bp, Artificial Sequence
  mmSKRIPTE0001682_Ptpn22_8
  gRNA
gaaagatgtcgagtagtcac

SEQ ID NO: 130904 - DNA, 20 bp, Artificial Sequence
  mmSKRIPTE0001683_Ptpn22_9
  gRNA
gcgttgcccataatgcactt

SEQ ID NO: 130905 - DNA, 20 bp, Artificial Sequence
  mmSKRIPTE0001684_Yes1_1
  gRNA
actcaggtaagctcgcggcg

SEQ ID NO: 130906 - DNA, 20 bp, Artificial Sequence
  mmSKRIPTE0001685_Yes1_2
  gRNA
cgggaccagtaggcggacag

SEQ ID NO: 130907 - DNA, 20 bp, Artificial Sequence
  mmSKRIPTE0001686_Yes1_3
  gRNA
gtattggaacaagtagagcg

SEQ ID NO: 130908 - DNA, 20 bp, Artificial Sequence
  mmSKRIPTE0001687_Yes1_4
  gRNA
gcggccccttctcgtcctag

SEQ ID NO: 130909 - DNA, 20 bp, Artificial Sequence
  mmSKRIPTE0001688_Yes1_5
  gRNA
agatacaattgagtccaatg

SEQ ID NO: 130910 - DNA, 20 bp, Artificial Sequence
  mmSKRIPTE0001689_Yes1_6
  gRNA
gccatcagcgatcttaggag

SEQ ID NO: 130911 - DNA, 20 bp, Artificial Sequence
  mmSKRIPTE0001690_Yes1_7
  gRNA
tctagtcgcaatgattctcg

SEQ ID NO: 130912 - DNA, 20 bp, Artificial Sequence
  mmSKRIPTE0001691_Yes1_8
  gRNA
agagaaccgaactcacgggg

SEQ ID NO: 130913 - DNA, 20 bp, Artificial Sequence
  mmSKRIPTE0001692_Yes1_9
  gRNA
ctgaatcctgggaatcagcg

SEQ ID NO: 130914 - DNA, 20 bp, Artificial Sequence
  mmSKRIPTE0001693_Rest_1
  gRNA
atggccgaattgatgcccgt

SEQ ID NO: 130915 - DNA, 20 bp, Artificial Sequence
  mmSKRIPTE0001694_Rest_2
  gRNA
gatatgctacggtttcccaa

SEQ ID NO: 130916 - DNA, 20 bp, Artificial Sequence
  mmSKRIPTE0001695_Rest_3
  gRNA
tgacgactcaggactgcacg

SEQ ID NO: 130917 - DNA, 20 bp, Artificial Sequence
  mmSKRIPTE0001696_Rest_4
  gRNA
aagccgcgtagtcacacacg

SEQ ID NO: 130918 - DNA, 20 bp, Artificial Sequence
  mmSKRIPTE0001697_Rest_5
  gRNA
ttatggccacccaggtgatg

SEQ ID NO: 130919 - DNA, 20 bp, Artificial Sequence
  mmSKRIPTE0001698_Rest_6
  gRNA
catcgccaaagggaaactcg

SEQ ID NO: 130920 - DNA, 20 bp, Artificial Sequence
  mmSKRIPTE0001699_Rest_7
  gRNA
tggcaaggcttacaccggaa

SEQ ID NO: 130921 - DNA, 20 bp, Artificial Sequence
  mmSKRIPTE0001700_Rest_8
  gRNA
gatatgtaactagctcgtgc

SEQ ID NO: 130922 - DNA, 20 bp, Artificial Sequence
  mmSKRIPTE0001701_Rest_9
  gRNA
attacctggtcggtgaagag

SEQ ID NO: 130923 - DNA, 20 bp, Artificial Sequence
  mmSKRIPTE0001702_Gpnmb_1
  gRNA
cgaagacgttagccccgtag

SEQ ID NO: 130924 - DNA, 20 bp, Artificial Sequence
  mmSKRIPTE0001703_Gpnmb_2
  gRNA
agagagcacaaccaattacg

SEQ ID NO: 130925 - DNA, 20 bp, Artificial Sequence
  mmSKRIPTE0001704_Gpnmb_3
  gRNA
cagcgggttgacaaacggaa

SEQ ID NO: 130926 - DNA, 20 bp, Artificial Sequence
  mmSKRIPTE0001705_Gpnmb_4
  gRNA
gcaggtgaggtaccttaccg

SEQ ID NO: 130927 - DNA, 20 bp, Artificial Sequence
  mmSKRIPTE0001706_Gpnmb_5
  gRNA
tgtctttcgaagatacggcc

SEQ ID NO: 130928 - DNA, 20 bp, Artificial Sequence
  mmSKRIPTE0001707_Gpnmb_6
  gRNA
tgtatgtgataacaggtgcg

SEQ ID NO: 130929 - DNA, 20 bp, Artificial Sequence
  mmSKRIPTE0001708_Gpnmb_7
  gRNA
accttgccttaccccgaatg

SEQ ID NO: 130930 - DNA, 20 bp, Artificial Sequence
  mmSKRIPTE0001709_Gpnmb_8
  gRNA
atatcgtggcttagggagtg

SEQ ID NO: 130931 - DNA, 20 bp, Artificial Sequence
  mmSKRIPTE0001710_Gpnmb_9
  gRNA
ctaactaagtttcgtgtgag

SEQ ID NO: 130932 - DNA, 20 bp, Artificial Sequence
  mmSKRIPTE0001711_Ihh_1
  gRNA
cggatgctaacactcccgcg

SEQ ID NO: 130933 - DNA, 20 bp, Artificial Sequence
  mmSKRIPTE0001712_Ihh_2
  gRNA
ctcagagtcgaggcgccgag

SEQ ID NO: 130934 - DNA, 20 bp, Artificial Sequence
  mmSKRIPTE0001713_Ihh_3
  gRNA
aggtggtgatatccaccgcg

SEQ ID NO: 130935 - DNA, 20 bp, Artificial Sequence
  mmSKRIPTE0001714_Ihh_4
  gRNA
gtgaaactgcgggtgaccga

SEQ ID NO: 130936 - DNA, 20 bp, Artificial Sequence
  mmSKRIPTE0001715_Ihh_5
  gRNA
cgttgccaaaacaaacgggc

SEQ ID NO: 130937 - DNA, 20 bp, Artificial Sequence
  mmSKRIPTE0001716_Ihh_6
  gRNA
ccgagggaagaggatttccg

SEQ ID NO: 130938 - DNA, 20 bp, Artificial Sequence
  mmSKRIPTE0001717_Ihh_7
  gRNA
gccgggacactaccggacat

SEQ ID NO: 130939 - DNA, 20 bp, Artificial Sequence
  mmSKRIPTE0001718_Ihh_8
  gRNA
aggcctgacctgcatttgcg

SEQ ID NO: 130940 - DNA, 20 bp, Artificial Sequence
  mmSKRIPTE0001719_Ihh_9
  gRNA
gaagattcgacagcactcat

SEQ ID NO: 130941 - DNA, 20 bp, Artificial Sequence
  mmSKRIPTE0001720_Ccr7_1
  gRNA
ccggcatgtacggaacgcgt

SEQ ID NO: 130942 - DNA, 20 bp, Artificial Sequence
  mmSKRIPTE0001721_Ccr7_2
  gRNA
ctacaaggcactactaccag

SEQ ID NO: 130943 - DNA, 20 bp, Artificial Sequence
  mmSKRIPTE0001722_Ccr7_3
  gRNA
cctggacgatggctacgtag

SEQ ID NO: 130944 - DNA, 20 bp, Artificial Sequence
  mmSKRIPTE0001723_Ccr7_4
  gRNA
gatcctatgacagccgaatg

SEQ ID NO: 130945 - DNA, 20 bp, Artificial Sequence
  mmSKRIPTE0001724_Ccr7_5
  gRNA
ccgccccggtaaaaattgct

SEQ ID NO: 130946 - DNA, 20 bp, Artificial Sequence
  mmSKRIPTE0001725_Ccr7_6
  gRNA
ccacaaccttctccccgtag

SEQ ID NO: 130947 - DNA, 20 bp, Artificial Sequence
  mmSKRIPTE0001726_Ccr7_7
  gRNA
gcttgctgatgagaagcacg

SEQ ID NO: 130948 - DNA, 20 bp, Artificial Sequence
  mmSKRIPTE0001727_Ccr7_8
  gRNA
actcactcgccatttaacca

SEQ ID NO: 130949 - DNA, 20 bp, Artificial Sequence
  mmSKRIPTE0001728_Ccr7_9
  gRNA
ctgggtttgcatctccggag

SEQ ID NO: 130950 - DNA, 20 bp, Artificial Sequence
  mmSKRIPTE0001729_Sec14l1_1
  gRNA
cgcaggtcacagtcacgtag

SEQ ID NO: 130951 - DNA, 20 bp, Artificial Sequence
  mmSKRIPTE0001730_Sec14l1_2
  gRNA
gacaacacacttgcttgacg

SEQ ID NO: 130952 - DNA, 20 bp, Artificial Sequence
  mmSKRIPTE0001731_Sec14l1_3
  gRNA
tcaccgtgcagaacggacgg

SEQ ID NO: 130953 - DNA, 20 bp, Artificial Sequence
  mmSKRIPTE0001732_Sec14l1_4
  gRNA
tcggtgtaaaagataatccg

SEQ ID NO: 130954 - DNA, 20 bp, Artificial Sequence
  mmSKRIPTE0001733_Sec14l1_5
  gRNA
gtaagctcgcgtcgtcgtgg

SEQ ID NO: 130955 - DNA, 20 bp, Artificial Sequence
  mmSKRIPTE0001734_Sec14l1_6
  gRNA
atgtttatacacccgcactg

SEQ ID NO: 130956 - DNA, 20 bp, Artificial Sequence
  mmSKRIPTE0001735_Sec14l1_7
  gRNA
ctgctattgaattacaacca

SEQ ID NO: 130957 - DNA, 20 bp, Artificial Sequence
  mmSKRIPTE0001736_Sec14l1_8
  gRNA
tattcaagcaggtacagtag

SEQ ID NO: 130958 - DNA, 20 bp, Artificial Sequence
  mmSKRIPTE0001737_Sec14l1_9
  gRNA
gcactcccagctgctcacgg

SEQ ID NO: 130959 - DNA, 20 bp, Artificial Sequence
  mmSKRIPTE0001738_Pdgfb_1
  gRNA
gtctcgatgcctgattcgga

SEQ ID NO: 130960 - DNA, 20 bp, Artificial Sequence
  mmSKRIPTE0001739_Pdgfb_2
  gRNA
gatgtgctacggatcagtag

SEQ ID NO: 130961 - DNA, 20 bp, Artificial Sequence
  mmSKRIPTE0001740_Pdgfb_3
  gRNA
acttctagtcacaggccgag

SEQ ID NO: 130962 - DNA, 20 bp, Artificial Sequence
  mmSKRIPTE0001741_Pdgfb_4
  gRNA
gagttggaaagctcatctcg

SEQ ID NO: 130963 - DNA, 20 bp, Artificial Sequence
  mmSKRIPTE0001742_Pdgfb_5
  gRNA
aggagaccctcggagcctag

SEQ ID NO: 130964 - DNA, 20 bp, Artificial Sequence
  mmSKRIPTE0001743_Pdgfb_6
  gRNA
gtcgatgcatcctgccaatg

SEQ ID NO: 130965 - DNA, 20 bp, Artificial Sequence
  mmSKRIPTE0001744_Pdgfb_7
  gRNA
gcctgatcgcctgatcgcgg

SEQ ID NO: 130966 - DNA, 20 bp, Artificial Sequence
  mmSKRIPTE0001745_Pdgfb_8
  gRNA
taaaggccggaacagctgaa

SEQ ID NO: 130967 - DNA, 20 bp, Artificial Sequence
  mmSKRIPTE0001746_Pdgfb_9
  gRNA
ctcattgagcccaaacagtg

SEQ ID NO: 130968 - DNA, 20 bp, Artificial Sequence
  mmSKRIPTE0001747_Wnt1_1
  gRNA
gggcggcactaaaagcacca

SEQ ID NO: 130969 - DNA, 20 bp, Artificial Sequence
  mmSKRIPTE0001748_Wnt1_2
  gRNA
tatttacataaccgaacgcg

SEQ ID NO: 130970 - DNA, 20 bp, Artificial Sequence
  mmSKRIPTE0001749_Wnt1_3
  gRNA
tgtgtccagtcccaccgtcg

SEQ ID NO: 130971 - DNA, 20 bp, Artificial Sequence
  mmSKRIPTE0001750_Wnt1_4
  gRNA
ttagcaggctatcaacacgt

SEQ ID NO: 130972 - DNA, 20 bp, Artificial Sequence
  mmSKRIPTE0001751_Wnt1_5
  gRNA
tctcatttagggtcatccaa

SEQ ID NO: 130973 - DNA, 20 bp, Artificial Sequence
  mmSKRIPTE0001752_Wnt1_6
  gRNA
actagctcacttaccaccat

SEQ ID NO: 130974 - DNA, 20 bp, Artificial Sequence
  mmSKRIPTE0001753_Wnt1_7
  gRNA
agctgacaggctaaccgtcg

SEQ ID NO: 130975 - DNA, 20 bp, Artificial Sequence
  mmSKRIPTE0001754_Wnt1_8
  gRNA
cagctcacagccgtccagcg

SEQ ID NO: 130976 - DNA, 20 bp, Artificial Sequence
  mmSKRIPTE0001755_Wnt1_9
  gRNA
acagctgttcaatggctccg

SEQ ID NO: 130977 - DNA, 20 bp, Artificial Sequence
  mmSKRIPTE0001756_Myo1f_1
  gRNA
taagaaccgagatcgatcgc

SEQ ID NO: 130978 - DNA, 20 bp, Artificial Sequence
  mmSKRIPTE0001757_Myo1f_2
  gRNA
ttgtatcccaagtagcgcag

SEQ ID NO: 130979 - DNA, 20 bp, Artificial Sequence
  mmSKRIPTE0001758_Myo1f_3
  gRNA
gagtcagggatatgctaacg

SEQ ID NO: 130980 - DNA, 20 bp, Artificial Sequence
  mmSKRIPTE0001759_Myo1f_4
  gRNA
catcaaccgtaacttcgttg

SEQ ID NO: 130981 - DNA, 20 bp, Artificial Sequence
  mmSKRIPTE0001760_Myo1f_5
  gRNA
tgacctcatcgaaaacaagc

SEQ ID NO: 130982 - DNA, 20 bp, Artificial Sequence
  mmSKRIPTE0001761_Myo1f_6
  gRNA
acggtctacgctctccacgc

SEQ ID NO: 130983 - DNA, 20 bp, Artificial Sequence
  mmSKRIPTE0001762_Myo1f_7
  gRNA
cataggtttgaatcgaaatg

SEQ ID NO: 130984 - DNA, 20 bp, Artificial Sequence
  mmSKRIPTE0001763_Myo1f_8
  gRNA
cgttcatctccacgccaccg

SEQ ID NO: 130985 - DNA, 20 bp, Artificial Sequence
  mmSKRIPTE0001764_Myo1f_9
  gRNA
gcaaccactatggttgcacc

SEQ ID NO: 130986 - DNA, 20 bp, Artificial Sequence
  mmSKRIPTE0001765_Runx2_1
  gRNA
cgctgcagatggactccccg

SEQ ID NO: 130987 - DNA, 20 bp, Artificial Sequence
  mmSKRIPTE0001766_Runx2_2
  gRNA
cttatcaggacctggcgctg

SEQ ID NO: 130988 - DNA, 20 bp, Artificial Sequence
  mmSKRIPTE0001767_Runx2_3
  gRNA
cggcctcaatcggggcactg

SEQ ID NO: 130989 - DNA, 20 bp, Artificial Sequence
  mmSKRIPTE0001768_Runx2_4
  gRNA
agaaatccaaacgcattccg

SEQ ID NO: 130990 - DNA, 20 bp, Artificial Sequence
  mmSKRIPTE0001769_Runx2_5
  gRNA
catgggcaccgagaccacgg

SEQ ID NO: 130991 - DNA, 20 bp, Artificial Sequence
  mmSKRIPTE0001770_Runx2_6
  gRNA
gttcccacgccggttcagag

SEQ ID NO: 130992 - DNA, 20 bp, Artificial Sequence
  mmSKRIPTE0001771_Runx2_7
  gRNA
aggtgccaatcgaggagcgt

SEQ ID NO: 130993 - DNA, 20 bp, Artificial Sequence
  mmSKRIPTE0001772_Runx2_8
  gRNA
tggtttaaagaatttctgcg

SEQ ID NO: 130994 - DNA, 20 bp, Artificial Sequence
  mmSKRIPTE0001773_Runx2_9
  gRNA
cagttcccaatggtacccgg

SEQ ID NO: 130995 - DNA, 20 bp, Artificial Sequence
  mmSKRIPTE0001774_Fer_1
  gRNA
tgaattacgaagaagacgcg

SEQ ID NO: 130996 - DNA, 20 bp, Artificial Sequence
  mmSKRIPTE0001775_Fer_2
  gRNA
gaatcggaggggtgccaacg

SEQ ID NO: 130997 - DNA, 20 bp, Artificial Sequence
  mmSKRIPTE0001776_Fer_3
  gRNA
atgtgaatatagtataccgc

SEQ ID NO: 130998 - DNA, 20 bp, Artificial Sequence
  mmSKRIPTE0001777_Fer_4
  gRNA
gctgtttatagcaccaaccg

SEQ ID NO: 130999 - DNA, 20 bp, Artificial Sequence
  mmSKRIPTE0001778_Fer_5
  gRNA
aaatacctcctggagtacca

SEQ ID NO: 131000 - DNA, 20 bp, Artificial Sequence
  mmSKRIPTE0001779_Fer_6
  gRNA
acagttctgaaagtgacgtg

SEQ ID NO: 131001 - DNA, 20 bp, Artificial Sequence
  mmSKRIPTE0001780_Fer_7
  gRNA
tgtgagcataaacatatacc

SEQ ID NO: 131002 - DNA, 20 bp, Artificial Sequence
  mmSKRIPTE0001781_Fer_8
  gRNA
ggaaccactcgtagagtcag

SEQ ID NO: 131003 - DNA, 20 bp, Artificial Sequence
  mmSKRIPTE0001782_Fer_9
  gRNA
tgttgccattaaaacgtgca

SEQ ID NO: 131004 - DNA, 20 bp, Artificial Sequence
  mmSKRIPTE0001783_Kif5b_1
  gRNA
gggtgatcctcgaatcgtcg

SEQ ID NO: 131005 - DNA, 20 bp, Artificial Sequence
  mmSKRIPTE0001784_Kif5b_2
  gRNA
acggtgatgatcgcggtgag

SEQ ID NO: 131006 - DNA, 20 bp, Artificial Sequence
  mmSKRIPTE0001785_Kif5b_3
  gRNA
atctgggaagacccacacga

SEQ ID NO: 131007 - DNA, 20 bp, Artificial Sequence
  mmSKRIPTE0001786_Kif5b_4
  gRNA
gcgggttcagacgaccaggg

SEQ ID NO: 131008 - DNA, 20 bp, Artificial Sequence
  mmSKRIPTE0001787_Kif5b_5
  gRNA
actcgagatgcatacatcgc

SEQ ID NO: 131009 - DNA, 20 bp, Artificial Sequence
  mmSKRIPTE0001788_Kif5b_6
  gRNA
catccgttacctatcactat

SEQ ID NO: 131010 - DNA, 20 bp, Artificial Sequence
  mmSKRIPTE0001789_Kif5b_7
  gRNA
gtatgatgtcataccacatg

SEQ ID NO: 131011 - DNA, 20 bp, Artificial Sequence
  mmSKRIPTE0001790_Kif5b_8
  gRNA
acgggcatcacagactcacg

SEQ ID NO: 131012 - DNA, 20 bp, Artificial Sequence
  mmSKRIPTE0001791_Kif5b_9
  gRNA
tggcgacgtacttatcgccg

SEQ ID NO: 131013 - DNA, 20 bp, Artificial Sequence
  mmSKRIPTE0001792_Fubp1_1
  gRNA
tccgcccctttacggcacga

SEQ ID NO: 131014 - DNA, 20 bp, Artificial Sequence
  mmSKRIPTE0001793_Fubp1_2
  gRNA
gtaagcgtggaccgaccgcg

SEQ ID NO: 131015 - DNA, 20 bp, Artificial Sequence
  mmSKRIPTE0001794_Fubp1_3
  gRNA
gaagacgccatctcctcggg

SEQ ID NO: 131016 - DNA, 20 bp, Artificial Sequence
  mmSKRIPTE0001795_Fubp1_4
  gRNA
gcgtcagcgctgaaacatcg

SEQ ID NO: 131017 - DNA, 20 bp, Artificial Sequence
  mmSKRIPTE0001796_Fubp1_5
  gRNA
agacgacggcggaggcactg

SEQ ID NO: 131018 - DNA, 20 bp, Artificial Sequence
  mmSKRIPTE0001797_Fubp1_6
  gRNA
ttctaacaagcatttagacg

SEQ ID NO: 131019 - DNA, 20 bp, Artificial Sequence
  mmSKRIPTE0001798_Fubp1_7
  gRNA
cacacgctgccgtttcctcg

SEQ ID NO: 131020 - DNA, 20 bp, Artificial Sequence
  mmSKRIPTE0001799_Fubp1_8
  gRNA
gtggccctaaaggatttact

SEQ ID NO: 131021 - DNA, 20 bp, Artificial Sequence
  mmSKRIPTE0001800_Fubp1_9
  gRNA
atatggcatttcatggtcgg

SEQ ID NO: 131022 - DNA, 20 bp, Artificial Sequence
  mmSKRIPTE0001801_Cd36_1
  gRNA
caatactccttacgacagtg

SEQ ID NO: 131023 - DNA, 20 bp, Artificial Sequence
  mmSKRIPTE0001802_Cd36_2
  gRNA
actgctagttaagctcacaa

SEQ ID NO: 131024 - DNA, 20 bp, Artificial Sequence
  mmSKRIPTE0001803_Cd36_3
  gRNA
aaaacactgtgattgtacct

SEQ ID NO: 131025 - DNA, 20 bp, Artificial Sequence
  mmSKRIPTE0001804_Cd36_4
  gRNA
gaacatctccttaatgcgat

SEQ ID NO: 131026 - DNA, 20 bp, Artificial Sequence
  mmSKRIPTE0001805_Cd36_5
  gRNA
tctatacaatgcgattccta

SEQ ID NO: 131027 - DNA, 20 bp, Artificial Sequence
  mmSKRIPTE0001806_Cd36_6
  gRNA
tggttgtctggattctggag

SEQ ID NO: 131028 - DNA, 20 bp, Artificial Sequence
  mmSKRIPTE0001807_Cd36_7
  gRNA
ctattaacccatgaccgtag

SEQ ID NO: 131029 - DNA, 20 bp, Artificial Sequence
  mmSKRIPTE0001808_Cd36_8
  gRNA
aaacgatcatggattaagtg

SEQ ID NO: 131030 - DNA, 20 bp, Artificial Sequence
  mmSKRIPTE0001809_Cd36_9
  gRNA
tctcacacacataagtagtg

SEQ ID NO: 131031 - DNA, 20 bp, Artificial Sequence
  mmSKRIPTE0001810_Chd2_1
  gRNA
atattcaaacttgtaaccga

SEQ ID NO: 131032 - DNA, 20 bp, Artificial Sequence
  mmSKRIPTE0001811_Chd2_2
  gRNA
aaagcgtgtctaagcatgag

SEQ ID NO: 131033 - DNA, 20 bp, Artificial Sequence
  mmSKRIPTE0001812_Chd2_3
  gRNA
aatcacgagcatccgtgatg

SEQ ID NO: 131034 - DNA, 20 bp, Artificial Sequence
  mmSKRIPTE0001813_Chd2_4
  gRNA
taagaaaccatttcgaccag

SEQ ID NO: 131035 - DNA, 20 bp, Artificial Sequence
  mmSKRIPTE0001814_Chd2_5
  gRNA
cgtcaacttgatgctgtgcg

SEQ ID NO: 131036 - DNA, 20 bp, Artificial Sequence
  mmSKRIPTE0001815_Chd2_6
  gRNA
gtcaacctactggatgacac

SEQ ID NO: 131037 - DNA, 20 bp, Artificial Sequence
  mmSKRIPTE0001816_Chd2_7
  gRNA
gagggcgtataactacccga

SEQ ID NO: 131038 - DNA, 20 bp, Artificial Sequence
  mmSKRIPTE0001817_Chd2_8
  gRNA
ctacaggggttcgaacacag

SEQ ID NO: 131039 - DNA, 20 bp, Artificial Sequence
  mmSKRIPTE0001818_Chd2_9
  gRNA
tggtcacgaatgtggtggag

SEQ ID NO: 131040 - DNA, 20 bp, Artificial Sequence
  mmSKRIPTE0001819_Blm_1
  gRNA
tgaagaaggtcggtccgcag

SEQ ID NO: 131041 - DNA, 20 bp, Artificial Sequence
  mmSKRIPTE0001820_Blm_2
  gRNA
gtacggctgactgcaagttg

SEQ ID NO: 131042 - DNA, 20 bp, Artificial Sequence
  mmSKRIPTE0001821_Blm_3
  gRNA
gtaaaactcaaatttgcacg

SEQ ID NO: 131043 - DNA, 20 bp, Artificial Sequence
  mmSKRIPTE0001822_Blm_4
  gRNA
gacttggtatcgccatcaga

SEQ ID NO: 131044 - DNA, 20 bp, Artificial Sequence
  mmSKRIPTE0001823_Blm_5
  gRNA
aatcaggacatatacaacga

SEQ ID NO: 131045 - DNA, 20 bp, Artificial Sequence
  mmSKRIPTE0001824_Blm_6
  gRNA
gcaatatggacaattagggt

SEQ ID NO: 131046 - DNA, 20 bp, Artificial Sequence
  mmSKRIPTE0001825_Blm_7
  gRNA
acatctttatcacttaacgc

SEQ ID NO: 131047 - DNA, 20 bp, Artificial Sequence
  mmSKRIPTE0001826_Blm_8
  gRNA
cgtttgccgaaagggcgcgc

SEQ ID NO: 131048 - DNA, 20 bp, Artificial Sequence
  mmSKRIPTE0001827_Blm_9
  gRNA
ccgccgactaacagagcccg

SEQ ID NO: 131049 - DNA, 20 bp, Artificial Sequence
  mmSKRIPTE0001828_Fanca_1
  gRNA
tactccggacatacgtgctg

SEQ ID NO: 131050 - DNA, 20 bp, Artificial Sequence
  mmSKRIPTE0001829_Fanca_2
  gRNA
gcacataaacggtagtctga

SEQ ID NO: 131051 - DNA, 20 bp, Artificial Sequence
  mmSKRIPTE0001830_Fanca_3
  gRNA
acacagggtgacacgctgcg

SEQ ID NO: 131052 - DNA, 20 bp, Artificial Sequence
  mmSKRIPTE0001831_Fanca_4
  gRNA
cttctacctacaaaccgaag

SEQ ID NO: 131053 - DNA, 20 bp, Artificial Sequence
  mmSKRIPTE0001832_Fanca_5
  gRNA
acagacaggtcgtatttaag

SEQ ID NO: 131054 - DNA, 20 bp, Artificial Sequence
  mmSKRIPTE0001833_Fanca_6
  gRNA
tctgctcacacagagatcgt

SEQ ID NO: 131055 - DNA, 20 bp, Artificial Sequence
  mmSKRIPTE0001834_Fanca_7
  gRNA
ggcgaataaacgagtaacag

SEQ ID NO: 131056 - DNA, 20 bp, Artificial Sequence
  mmSKRIPTE0001835_Fanca_8
  gRNA
cacgctgactggcactacac

SEQ ID NO: 131057 - DNA, 20 bp, Artificial Sequence
  mmSKRIPTE0001836_Fanca_9
  gRNA
caacagcagttatctcgacg

SEQ ID NO: 131058 - DNA, 20 bp, Artificial Sequence
  mmSKRIPTE0001837_Ctnnb1_1
  gRNA
ggagcgatttataagcggcg

SEQ ID NO: 131059 - DNA, 20 bp, Artificial Sequence
  mmSKRIPTE0001838_Ctnnb1_2
  gRNA
tgtcctattccgaatgtctg

SEQ ID NO: 131060 - DNA, 20 bp, Artificial Sequence
  mmSKRIPTE0001839_Ctnnb1_3
  gRNA
cacaaccggattgtaatccg

SEQ ID NO: 131061 - DNA, 20 bp, Artificial Sequence
  mmSKRIPTE0001840_Ctnnb1_4
  gRNA
cttccgctgagtataacgga

SEQ ID NO: 131062 - DNA, 20 bp, Artificial Sequence
  mmSKRIPTE0001841_Ctnnb1_5
  gRNA
tgtctgtgcgtgctccacga

SEQ ID NO: 131063 - DNA, 20 bp, Artificial Sequence
  mmSKRIPTE0001842_Ctnnb1_6
  gRNA
caacctttctcaccaccgcg

SEQ ID NO: 131064 - DNA, 20 bp, Artificial Sequence
  mmSKRIPTE0001843_Ctnnb1_7
  gRNA
agtagccattgtccacgcag

SEQ ID NO: 131065 - DNA, 20 bp, Artificial Sequence
  mmSKRIPTE0001844_Ctnnb1_8
  gRNA
ctcgtgtcctgtgaagcccg

SEQ ID NO: 131066 - DNA, 20 bp, Artificial Sequence
  mmSKRIPTE0001845_Ctnnb1_9
  gRNA
atgagcagcgtcaaactgcg

SEQ ID NO: 131067 - DNA, 20 bp, Artificial Sequence
  mmSKRIPTE0001846_Arid5a_1
  gRNA
aaccctacgttccgattgtg

SEQ ID NO: 131068 - DNA, 20 bp, Artificial Sequence
  mmSKRIPTE0001847_Arid5a_2
  gRNA
caggtttcagcacctcggtg

SEQ ID NO: 131069 - DNA, 20 bp, Artificial Sequence
  mmSKRIPTE0001848_Arid5a_3
  gRNA
actccgcccccttagacccg

SEQ ID NO: 131070 - DNA, 20 bp, Artificial Sequence
  mmSKRIPTE0001849_Arid5a_4
  gRNA
aattcccagcagtgcccgcg

SEQ ID NO: 131071 - DNA, 20 bp, Artificial Sequence
  mmSKRIPTE0001850_Arid5a_5
  gRNA
ttccacagtatcatccgcac

SEQ ID NO: 131072 - DNA, 20 bp, Artificial Sequence
  mmSKRIPTE0001851_Arid5a_6
  gRNA
gggggtgtttagtggaccga

SEQ ID NO: 131073 - DNA, 20 bp, Artificial Sequence
  mmSKRIPTE0001852_Arid5a_7
  gRNA
cacgtgtgttgcttagcgtg

SEQ ID NO: 131074 - DNA, 20 bp, Artificial Sequence
  mmSKRIPTE0001853_Arid5a_8
  gRNA
gctcacaagtaggacgacgt

SEQ ID NO: 131075 - DNA, 20 bp, Artificial Sequence
  mmSKRIPTE0001854_Arid5a_9
  gRNA
agggccacagatcggtggtg

SEQ ID NO: 131076 - DNA, 20 bp, Artificial Sequence
  mmSKRIPTE0001855_Slc39a10_1
  gRNA
gagcttcacagacatcatcg

SEQ ID NO: 131077 - DNA, 20 bp, Artificial Sequence
  mmSKRIPTE0001856_Slc39a10_2
  gRNA
gggtttggtaccgagcggag

SEQ ID NO: 131078 - DNA, 20 bp, Artificial Sequence
  mmSKRIPTE0001857_Slc39a10_3
  gRNA
agatattggaagacgccaag

SEQ ID NO: 131079 - DNA, 20 bp, Artificial Sequence
  mmSKRIPTE0001858_Slc39a10_4
  gRNA
acgtcgctcagagaatccag

SEQ ID NO: 131080 - DNA, 20 bp, Artificial Sequence
  mmSKRIPTE0001859_Slc39a10_5
  gRNA
aaccaggtatattaggagca

SEQ ID NO: 131081 - DNA, 20 bp, Artificial Sequence
  mmSKRIPTE0001860_Slc39a10_6
  gRNA
aaagccataggtgcatccaa

SEQ ID NO: 131082 - DNA, 20 bp, Artificial Sequence
  mmSKRIPTE0001861_Slc39a10_7
  gRNA
acacacgcgtcccaacccag

SEQ ID NO: 131083 - DNA, 20 bp, Artificial Sequence
  mmSKRIPTE0001862_Slc39a10_8
  gRNA
agtgacgttcaaacactgca

SEQ ID NO: 131084 - DNA, 20 bp, Artificial Sequence
  mmSKRIPTE0001863_Slc39a10_9
  gRNA
aaatctttatggatgtcaca

SEQ ID NO: 131085 - DNA, 20 bp, Artificial Sequence
  mmSKRIPTE0001864_Xrcc5_1
  gRNA
ttagacgagttaccccatga

SEQ ID NO: 131086 - DNA, 20 bp, Artificial Sequence
  mmSKRIPTE0001865_Xrcc5_2
  gRNA
tcggatgagagagatcacgt

SEQ ID NO: 131087 - DNA, 20 bp, Artificial Sequence
  mmSKRIPTE0001866_Xrcc5_3
  gRNA
gcaaaaggaaggcatccgca

SEQ ID NO: 131088 - DNA, 20 bp, Artificial Sequence
  mmSKRIPTE0001867_Xrcc5_4
  gRNA
taattccattcccgtcgctg

SEQ ID NO: 131089 - DNA, 20 bp, Artificial Sequence
  mmSKRIPTE0001868_Xrcc5_5
  gRNA
gaatgatatcacttccgtag

SEQ ID NO: 131090 - DNA, 20 bp, Artificial Sequence
  mmSKRIPTE0001869_Xrcc5_6
  gRNA
tgtcatcgtcatctctcggg

SEQ ID NO: 131091 - DNA, 20 bp, Artificial Sequence
  mmSKRIPTE0001870_Xrcc5_7
  gRNA
ggactcttggagccacggcg

SEQ ID NO: 131092 - DNA, 20 bp, Artificial Sequence
  mmSKRIPTE0001871_Xrcc5_8
  gRNA
gcgtctttaagaagattgag

SEQ ID NO: 131093 - DNA, 20 bp, Artificial Sequence
  mmSKRIPTE0001872_Xrcc5_9
  gRNA
cgacactctaggtttccgcc

SEQ ID NO: 131094 - DNA, 20 bp, Artificial Sequence
  mmSKRIPTE0001873_Matk_1
  gRNA
acacggcctcatcgatggtg

SEQ ID NO: 131095 - DNA, 20 bp, Artificial Sequence
  mmSKRIPTE0001874_Matk_2
  gRNA
gggacagtgatcattacccg

SEQ ID NO: 131096 - DNA, 20 bp, Artificial Sequence
  mmSKRIPTE0001875_Matk_3
  gRNA
cacagagacaaaaatcgcag

SEQ ID NO: 131097 - DNA, 20 bp, Artificial Sequence
  mmSKRIPTE0001876_Matk_4
  gRNA
gaggatagaagaccggacaa

SEQ ID NO: 131098 - DNA, 20 bp, Artificial Sequence
  mmSKRIPTE0001877_Matk_5
  gRNA
gaaacctcctttagcgactg

SEQ ID NO: 131099 - DNA, 20 bp, Artificial Sequence
  mmSKRIPTE0001878_Matk_6
  gRNA
acctgaggctctcaaaaacg

SEQ ID NO: 131100 - DNA, 20 bp, Artificial Sequence
  mmSKRIPTE0001879_Matk_7
  gRNA
catgaagtgagtatacacct

SEQ ID NO: 131101 - DNA, 20 bp, Artificial Sequence
  mmSKRIPTE0001880_Matk_8
  gRNA
accctgtcacacttatccag

SEQ ID NO: 131102 - DNA, 20 bp, Artificial Sequence
  mmSKRIPTE0001881_Matk_9
  gRNA
acagcggttctccagcaagt

SEQ ID NO: 131103 - DNA, 20 bp, Artificial Sequence
  mmSKRIPTE0001882_Polr3b_1
  gRNA
ttcgctaagcttctaaacgt

SEQ ID NO: 131104 - DNA, 20 bp, Artificial Sequence
  mmSKRIPTE0001883_Polr3b_2
  gRNA
aatgttcacatccgcccgtg

SEQ ID NO: 131105 - DNA, 20 bp, Artificial Sequence
  mmSKRIPTE0001884_Polr3b_3
  gRNA
aggagtccgtttatccgaca

SEQ ID NO: 131106 - DNA, 20 bp, Artificial Sequence
  mmSKRIPTE0001885_Polr3b_4
  gRNA
gtacaacgagtaaggctgtg

SEQ ID NO: 131107 - DNA, 20 bp, Artificial Sequence
  mmSKRIPTE0001886_Polr3b_5
  gRNA
ccccgtaaacaagcgccacg

SEQ ID NO: 131108 - DNA, 20 bp, Artificial Sequence
  mmSKRIPTE0001887_Polr3b_6
  gRNA
gagaaactgcagcgaacgag

SEQ ID NO: 131109 - DNA, 20 bp, Artificial Sequence
  mmSKRIPTE0001888_Polr3b_7
  gRNA
gctgtgctggacaacgacga

SEQ ID NO: 131110 - DNA, 20 bp, Artificial Sequence
  mmSKRIPTE0001889_Polr3b_8
  gRNA
taccaggtatgagagccccg

SEQ ID NO: 131111 - DNA, 20 bp, Artificial Sequence
  mmSKRIPTE0001890_Polr3b_9
  gRNA
agcaggctgaagactcaccg

SEQ ID NO: 131112 - DNA, 20 bp, Artificial Sequence
  mmSKRIPTE0001891_Trpv1_1
  gRNA
ctcccccggaggatacagag

SEQ ID NO: 131113 - DNA, 20 bp, Artificial Sequence
  mmSKRIPTE0001892_Trpv1_2
  gRNA
aggccgatagtaagcagccg

SEQ ID NO: 131114 - DNA, 20 bp, Artificial Sequence
  mmSKRIPTE0001893_Trpv1_3
  gRNA
tatgcgtatcagtacaagaa

SEQ ID NO: 131115 - DNA, 20 bp, Artificial Sequence
  mmSKRIPTE0001894_Trpv1_4
  gRNA
aatcactcacacctcgccca

SEQ ID NO: 131116 - DNA, 20 bp, Artificial Sequence
  mmSKRIPTE0001895_Trpv1_5
  gRNA
agccgtagtgacactgatcg

SEQ ID NO: 131117 - DNA, 20 bp, Artificial Sequence
  mmSKRIPTE0001896_Trpv1_6
  gRNA
gctccacgagaagcatgtcg

SEQ ID NO: 131118 - DNA, 20 bp, Artificial Sequence
  mmSKRIPTE0001897_Trpv1_7
  gRNA
cctggatagccacacccgtg

SEQ ID NO: 131119 - DNA, 20 bp, Artificial Sequence
  mmSKRIPTE0001898_Trpv1_8
  gRNA
gacacggaaatagtccccaa

SEQ ID NO: 131120 - DNA, 20 bp, Artificial Sequence
  mmSKRIPTE0001899_Trpv1_9
  gRNA
gcagatccccgacacttgtg

SEQ ID NO: 131121 - DNA, 20 bp, Artificial Sequence
  mmSKRIPTE0001900_Abr_1
  gRNA
tctgtagtgtgcaatacacg

SEQ ID NO: 131122 - DNA, 20 bp, Artificial Sequence
  mmSKRIPTE0001901_Abr_2
  gRNA
agtctttcaagtctatgtcg

SEQ ID NO: 131123 - DNA, 20 bp, Artificial Sequence
  mmSKRIPTE0001902_Abr_3
  gRNA
gttgtgactgcagtccggcg

SEQ ID NO: 131124 - DNA, 20 bp, Artificial Sequence
  mmSKRIPTE0001903_Abr_4
  gRNA
aaggcgacttccctgccgag

SEQ ID NO: 131125 - DNA, 20 bp, Artificial Sequence
  mmSKRIPTE0001904_Abr_5
  gRNA
accaagattgagatatgctg

SEQ ID NO: 131126 - DNA, 20 bp, Artificial Sequence
  mmSKRIPTE0001905_Abr_6
  gRNA
cgtccggcaatgcatagaag

SEQ ID NO: 131127 - DNA, 20 bp, Artificial Sequence
  mmSKRIPTE0001906_Abr_7
  gRNA
acttgcttgagcaacgactg

SEQ ID NO: 131128 - DNA, 20 bp, Artificial Sequence
  mmSKRIPTE0001907_Abr_8
  gRNA
gaaatggtggacagtctgcg

SEQ ID NO: 131129 - DNA, 20 bp, Artificial Sequence
  mmSKRIPTE0001908_Abr_9
  gRNA
acagtcgctcggaagccaag

SEQ ID NO: 131130 - DNA, 20 bp, Artificial Sequence
  mmSKRIPTE0001909_Tbx21_1
  gRNA
tgtggggctagtagttacgt

SEQ ID NO: 131131 - DNA, 20 bp, Artificial Sequence
  mmSKRIPTE0001910_Tbx21_2
  gRNA
ttcgcgctgtattagccacg

SEQ ID NO: 131132 - DNA, 20 bp, Artificial Sequence
  mmSKRIPTE0001911_Tbx21_3
  gRNA
gacatataagcggttccctg

SEQ ID NO: 131133 - DNA, 20 bp, Artificial Sequence
  mmSKRIPTE0001912_Tbx21_4
  gRNA
taggcgaaggagacactaag

SEQ ID NO: 131134 - DNA, 20 bp, Artificial Sequence
  mmSKRIPTE0001913_Tbx21_5
  gRNA
aatgggaacattcgcctgtg

SEQ ID NO: 131135 - DNA, 20 bp, Artificial Sequence
  mmSKRIPTE0001914_Tbx21_6
  gRNA
gaggaaagtcgttgttccgg

SEQ ID NO: 131136 - DNA, 20 bp, Artificial Sequence
  mmSKRIPTE0001915_Tbx21_7
  gRNA
tccatgggcagagttcgcat

SEQ ID NO: 131137 - DNA, 20 bp, Artificial Sequence
  mmSKRIPTE0001916_Tbx21_8
  gRNA
aggtcggggtagaaacggct

SEQ ID NO: 131138 - DNA, 20 bp, Artificial Sequence
  mmSKRIPTE0001917_Tbx21_9
  gRNA
gactgcctaccagaacgcag

SEQ ID NO: 131139 - DNA, 20 bp, Artificial Sequence
  mmSKRIPTE0001918_Sla_1
  gRNA
agccccccaatattccggag

SEQ ID NO: 131140 - DNA, 20 bp, Artificial Sequence
  mmSKRIPTE0001919_Sla_2
  gRNA
atgcatcagcagaacttcgt

SEQ ID NO: 131141 - DNA, 20 bp, Artificial Sequence
  mmSKRIPTE0001920_Sla_3
  gRNA
tggcaccctttgaatatatg

SEQ ID NO: 131142 - DNA, 20 bp, Artificial Sequence
  mmSKRIPTE0001921_Sla_4
  gRNA
tttcccataccaacaaccag

SEQ ID NO: 131143 - DNA, 20 bp, Artificial Sequence
  mmSKRIPTE0001922_Sla_5
  gRNA
gcaacattggtgaacccctg

SEQ ID NO: 131144 - DNA, 20 bp, Artificial Sequence
  mmSKRIPTE0001923_Sla_6
  gRNA
gccatgtctagcattctgat

SEQ ID NO: 131145 - DNA, 20 bp, Artificial Sequence
  mmSKRIPTE0001924_Sla_7
  gRNA
tatatctcatgtctaccggg

SEQ ID NO: 131146 - DNA, 20 bp, Artificial Sequence
  mmSKRIPTE0001925_Sla_8
  gRNA
aggtagaagacccctcccat

SEQ ID NO: 131147 - DNA, 20 bp, Artificial Sequence
  mmSKRIPTE0001926_Sla_9
  gRNA
tcttgctccataaaggtggt

SEQ ID NO: 131148 - DNA, 20 bp, Artificial Sequence
  mmSKRIPTE0001927_Unc93b1_1
  gRNA
gcacgttcttgaccactccg

SEQ ID NO: 131149 - DNA, 20 bp, Artificial Sequence
  mmSKRIPTE0001928_Unc93b1_2
  gRNA
ctgggaacgctactacacgc

SEQ ID NO: 131150 - DNA, 20 bp, Artificial Sequence
  mmSKRIPTE0001929_Unc93b1_3
  gRNA
gctacggcgtgtgctccatg

SEQ ID NO: 131151 - DNA, 20 bp, Artificial Sequence
  mmSKRIPTE0001930_Unc93b1_4
  gRNA
gggagggttcagttacgccg

SEQ ID NO: 131152 - DNA, 20 bp, Artificial Sequence
  mmSKRIPTE0001931_Unc93b1_5
  gRNA
tgtggactgacaccccgagt

SEQ ID NO: 131153 - DNA, 20 bp, Artificial Sequence
  mmSKRIPTE0001932_Unc93b1_6
  gRNA
tagggtgcgtgggaacctcg

SEQ ID NO: 131154 - DNA, 20 bp, Artificial Sequence
  mmSKRIPTE0001933_Unc93b1_7
  gRNA
gacagcccagagtagtaatg

SEQ ID NO: 131155 - DNA, 20 bp, Artificial Sequence
  mmSKRIPTE0001934_Unc93b1_8
  gRNA
cctccaggtagcggtagccg

SEQ ID NO: 131156 - DNA, 20 bp, Artificial Sequence
  mmSKRIPTE0001935_Unc93b1_9
  gRNA
tcggactccagaccctatcc

SEQ ID NO: 131157 - DNA, 20 bp, Artificial Sequence
  mmSKRIPTE0001936_Mrc1_1
  gRNA
agggacgtttcggtggactg

SEQ ID NO: 131158 - DNA, 20 bp, Artificial Sequence
  mmSKRIPTE0001937_Mrc1_2
  gRNA
tcacagtcgtatgtacaaca

SEQ ID NO: 131159 - DNA, 20 bp, Artificial Sequence
  mmSKRIPTE0001938_Mrc1_3
  gRNA
agggtgcggtacactaactg

SEQ ID NO: 131160 - DNA, 20 bp, Artificial Sequence
  mmSKRIPTE0001939_Mrc1_4
  gRNA
aacagtctgagtgtacgcag

SEQ ID NO: 131161 - DNA, 20 bp, Artificial Sequence
  mmSKRIPTE0001940_Mrc1_5
  gRNA
tcatggcgggaccaatagag

SEQ ID NO: 131162 - DNA, 20 bp, Artificial Sequence
  mmSKRIPTE0001941_Mrc1_6
  gRNA
gatttaagtagatcgtacgt

SEQ ID NO: 131163 - DNA, 20 bp, Artificial Sequence
  mmSKRIPTE0001942_Mrc1_7
  gRNA
gtctttcataggatctcacg

SEQ ID NO: 131164 - DNA, 20 bp, Artificial Sequence
  mmSKRIPTE0001943_Mrc1_8
  gRNA
gattggtggcaattcacgag

SEQ ID NO: 131165 - DNA, 20 bp, Artificial Sequence
  mmSKRIPTE0001944_Mrc1_9
  gRNA
aaggatgacgacgtaaggtg

SEQ ID NO: 131166 - DNA, 20 bp, Artificial Sequence
  mmSKRIPTE0001945_Nr1h3_1
  gRNA
gcgtcacggtacttgacccg

SEQ ID NO: 131167 - DNA, 20 bp, Artificial Sequence
  mmSKRIPTE0001946_Nr1h3_2
  gRNA
tgcttctggagacgtcacgg

SEQ ID NO: 131168 - DNA, 20 bp, Artificial Sequence
  mmSKRIPTE0001947_Nr1h3_3
  gRNA
gtaaagtgctgtgagtcgag

SEQ ID NO: 131169 - DNA, 20 bp, Artificial Sequence
  mmSKRIPTE0001948_Nr1h3_4
  gRNA
cagagtaggattatcagtag

SEQ ID NO: 131170 - DNA, 20 bp, Artificial Sequence
  mmSKRIPTE0001949_Nr1h3_5
  gRNA
gtcagtgagccttcgccatg

SEQ ID NO: 131171 - DNA, 20 bp, Artificial Sequence
  mmSKRIPTE0001950_Nr1h3_6
  gRNA
tggaactagaccggtctgcg

SEQ ID NO: 131172 - DNA, 20 bp, Artificial Sequence
  mmSKRIPTE0001951_Nr1h3_7
  gRNA
cggtctataggtcaccaaca

SEQ ID NO: 131173 - DNA, 20 bp, Artificial Sequence
  mmSKRIPTE0001952_Nr1h3_8
  gRNA
gccccatggacacctacatg

SEQ ID NO: 131174 - DNA, 20 bp, Artificial Sequence
  mmSKRIPTE0001953_Nr1h3_9
  gRNA
gattcggcgagtctgctcag

SEQ ID NO: 131175 - DNA, 20 bp, Artificial Sequence
  mmSKRIPTE0001954_Jag1_1
  gRNA
tcccgtccagaacgccacga

SEQ ID NO: 131176 - DNA, 20 bp, Artificial Sequence
  mmSKRIPTE0001955_Jag1_2
  gRNA
gatcagctgcatgaaacgcg

SEQ ID NO: 131177 - DNA, 20 bp, Artificial Sequence
  mmSKRIPTE0001956_Jag1_3
  gRNA
tgccacccagagaatgacga

SEQ ID NO: 131178 - DNA, 20 bp, Artificial Sequence
  mmSKRIPTE0001957_Jag1_4
  gRNA
tagagtttgagggcaccgcg

SEQ ID NO: 131179 - DNA, 20 bp, Artificial Sequence
  mmSKRIPTE0001958_Jag1_5
  gRNA
aagatcgccctgaaactgag

SEQ ID NO: 131180 - DNA, 20 bp, Artificial Sequence
  mmSKRIPTE0001959_Jag1_6
  gRNA
aagaagtccgtcatgataag

SEQ ID NO: 131181 - DNA, 20 bp, Artificial Sequence
  mmSKRIPTE0001960_Jag1_7
  gRNA
atctatgtatccacgaaccc

SEQ ID NO: 131182 - DNA, 20 bp, Artificial Sequence
  mmSKRIPTE0001961_Jag1_8
  gRNA
agcaaggtggtaaaacaacg

SEQ ID NO: 131183 - DNA, 20 bp, Artificial Sequence
  mmSKRIPTE0001962_Jag1_9
  gRNA
cacaagaagagtcttcacct

SEQ ID NO: 131184 - DNA, 20 bp, Artificial Sequence
  mmSKRIPTE0001963_Add1_1
  gRNA
ccgtggaagtactaacctag

SEQ ID NO: 131185 - DNA, 20 bp, Artificial Sequence
  mmSKRIPTE0001964_Add1_2
  gRNA
ccacacaactgacggcacca

SEQ ID NO: 131186 - DNA, 20 bp, Artificial Sequence
  mmSKRIPTE0001965_Add1_3
  gRNA
actggaagaataccgacgag

SEQ ID NO: 131187 - DNA, 20 bp, Artificial Sequence
  mmSKRIPTE0001966_Add1_4
  gRNA
gtcgccataagagtgtgatg

SEQ ID NO: 131188 - DNA, 20 bp, Artificial Sequence
  mmSKRIPTE0001967_Add1_5
  gRNA
agcatttacgcagtacccgg

SEQ ID NO: 131189 - DNA, 20 bp, Artificial Sequence
  mmSKRIPTE0001968_Add1_6
  gRNA
gtacgacggctgacatggcg

SEQ ID NO: 131190 - DNA, 20 bp, Artificial Sequence
  mmSKRIPTE0001969_Add1_7
  gRNA
actcttgcctatctccccgg

SEQ ID NO: 131191 - DNA, 20 bp, Artificial Sequence
  mmSKRIPTE0001970_Add1_8
  gRNA
aaaatacctctccttgtgag

SEQ ID NO: 131192 - DNA, 20 bp, Artificial Sequence
  mmSKRIPTE0001971_Add1_9
  gRNA
actctaatgtttgcgctgcg

SEQ ID NO: 131193 - DNA, 20 bp, Artificial Sequence
  mmSKRIPTE0001972_Tec_1
  gRNA
tcgatgctaagcatctactg

SEQ ID NO: 131194 - DNA, 20 bp, Artificial Sequence
  mmSKRIPTE0001973_Tec_2
  gRNA
tcatagtcctaaagccgccg

SEQ ID NO: 131195 - DNA, 20 bp, Artificial Sequence
  mmSKRIPTE0001974_Tec_3
  gRNA
atccagttgaggcaatcctg

SEQ ID NO: 131196 - DNA, 20 bp, Artificial Sequence
  mmSKRIPTE0001975_Tec_4
  gRNA
tgtatggaagtccccctgcg

SEQ ID NO: 131197 - DNA, 20 bp, Artificial Sequence
  mmSKRIPTE0001976_Tec_5
  gRNA
accctcatagtagctcaaca

SEQ ID NO: 131198 - DNA, 20 bp, Artificial Sequence
  mmSKRIPTE0001977_Tec_6
  gRNA
aacagcgcgtgacaatgctg

SEQ ID NO: 131199 - DNA, 20 bp, Artificial Sequence
  mmSKRIPTE0001978_Tec_7
  gRNA
taagaaggaactgtacggag

SEQ ID NO: 131200 - DNA, 20 bp, Artificial Sequence
  mmSKRIPTE0001979_Tec_8
  gRNA
aggattactacgtatccagg

SEQ ID NO: 131201 - DNA, 20 bp, Artificial Sequence
  mmSKRIPTE0001980_Tec_9
  gRNA
tgtgggtaagaaacgccttg

SEQ ID NO: 131202 - DNA, 20 bp, Artificial Sequence
  mmSKRIPTE0001981_Tgfbr3_1
  gRNA
aggcactacagctattcacg

SEQ ID NO: 131203 - DNA, 20 bp, Artificial Sequence
  mmSKRIPTE0001982_Tgfbr3_2
  gRNA
atcccacattggtaactatg

SEQ ID NO: 131204 - DNA, 20 bp, Artificial Sequence
  mmSKRIPTE0001983_Tgfbr3_3
  gRNA
cctctcaggaggacgtgtag

SEQ ID NO: 131205 - DNA, 20 bp, Artificial Sequence
  mmSKRIPTE0001984_Tgfbr3_4
  gRNA
atctttacaagacacgccat

SEQ ID NO: 131206 - DNA, 20 bp, Artificial Sequence
  mmSKRIPTE0001985_Tgfbr3_5
  gRNA
tcagtgactcttaacccggt

SEQ ID NO: 131207 - DNA, 20 bp, Artificial Sequence
  mmSKRIPTE0001986_Tgfbr3_6
  gRNA
ccgatgatcccttacgtcag

SEQ ID NO: 131208 - DNA, 20 bp, Artificial Sequence
  mmSKRIPTE0001987_Tgfbr3_7
  gRNA
ttgagaaggtgcattacctg

SEQ ID NO: 131209 - DNA, 20 bp, Artificial Sequence
  mmSKRIPTE0001988_Tgfbr3_8
  gRNA
tagttgcataaagacttacg

SEQ ID NO: 131210 - DNA, 20 bp, Artificial Sequence
  mmSKRIPTE0001989_Tgfbr3_9
  gRNA
cagcagcaatgcatagtgtg

SEQ ID NO: 131211 - DNA, 20 bp, Artificial Sequence
  mmSKRIPTE0001990_Card11_1
  gRNA
cgcgaggaattatctccgtg

SEQ ID NO: 131212 - DNA, 20 bp, Artificial Sequence
  mmSKRIPTE0001991_Card11_2
  gRNA
gcggaacagcggatgcacga

SEQ ID NO: 131213 - DNA, 20 bp, Artificial Sequence
  mmSKRIPTE0001992_Card11_3
  gRNA
tctacagacctgtcactgcg

SEQ ID NO: 131214 - DNA, 20 bp, Artificial Sequence
  mmSKRIPTE0001993_Card11_4
  gRNA
gtaaggaagatgcgccacac

SEQ ID NO: 131215 - DNA, 20 bp, Artificial Sequence
  mmSKRIPTE0001994_Card11_5
  gRNA
acggtctgccacgtccaggg

SEQ ID NO: 131216 - DNA, 20 bp, Artificial Sequence
  mmSKRIPTE0001995_Card11_6
  gRNA
cagcagcttccggtatcctg

SEQ ID NO: 131217 - DNA, 20 bp, Artificial Sequence
  mmSKRIPTE0001996_Card11_7
  gRNA
tataatatttatgcccgccg

SEQ ID NO: 131218 - DNA, 20 bp, Artificial Sequence
  mmSKRIPTE0001997_Card11_8
  gRNA
caccctgataagcaactcgt

SEQ ID NO: 131219 - DNA, 20 bp, Artificial Sequence
  mmSKRIPTE0001998_Card11_9
  gRNA
actcagacgcggtatctcca

SEQ ID NO: 131220 - DNA, 20 bp, Artificial Sequence
  mmSKRIPTE0001999_Eif2ak1_1
  gRNA
tcatacaaagtacacccggt

SEQ ID NO: 131221 - DNA, 20 bp, Artificial Sequence
  mmSKRIPTE0002000_Eif2ak1_2
  gRNA
atatccagctcctaaccggg

SEQ ID NO: 131222 - DNA, 20 bp, Artificial Sequence
  mmSKRIPTE0002001_Eif2ak1_3
  gRNA
gggcattaacttgagctccg

SEQ ID NO: 131223 - DNA, 20 bp, Artificial Sequence
  mmSKRIPTE0002002_Eif2ak1_4
  gRNA
taattgtagtcggtactctg

SEQ ID NO: 131224 - DNA, 20 bp, Artificial Sequence
  mmSKRIPTE0002003_Eif2ak1_5
  gRNA
aagccggatgcacctcactg

SEQ ID NO: 131225 - DNA, 20 bp, Artificial Sequence
  mmSKRIPTE0002004_Eif2ak1_6
  gRNA
catgttctatccacgcagtg

SEQ ID NO: 131226 - DNA, 20 bp, Artificial Sequence
  mmSKRIPTE0002005_Eif2ak1_7
  gRNA
aaaaagtcagacatgccgca

SEQ ID NO: 131227 - DNA, 20 bp, Artificial Sequence
  mmSKRIPTE0002006_Eif2ak1_8
  gRNA
ctatacatatctgactgcag

SEQ ID NO: 131228 - DNA, 20 bp, Artificial Sequence
  mmSKRIPTE0002007_Eif2ak1_9
  gRNA
ttgtggcttgcggtactcgg

SEQ ID NO: 131229 - DNA, 20 bp, Artificial Sequence
  mmSKRIPTE0002008_Styk1_1
  gRNA
gggtcccacaactaccactg

SEQ ID NO: 131230 - DNA, 20 bp, Artificial Sequence
  mmSKRIPTE0002009_Styk1_2
  gRNA
tgactcattaatcgcctctg

SEQ ID NO: 131231 - DNA, 20 bp, Artificial Sequence
  mmSKRIPTE0002010_Styk1_3
  gRNA
ttaaccagacactaaccctg

SEQ ID NO: 131232 - DNA, 20 bp, Artificial Sequence
  mmSKRIPTE0002011_Styk1_4
  gRNA
acaggatggacaattacact

SEQ ID NO: 131233 - DNA, 20 bp, Artificial Sequence
  mmSKRIPTE0002012_Styk1_5
  gRNA
tcatgcaacaatgaccacca

SEQ ID NO: 131234 - DNA, 20 bp, Artificial Sequence
  mmSKRIPTE0002013_Styk1_6
  gRNA
agatattgtaggatgctggt

SEQ ID NO: 131235 - DNA, 20 bp, Artificial Sequence
  mmSKRIPTE0002014_Styk1_7
  gRNA
atcctctgtgcgcctaacag

SEQ ID NO: 131236 - DNA, 20 bp, Artificial Sequence
  mmSKRIPTE0002015_Styk1_8
  gRNA
cctctgaggcacatttaaag

SEQ ID NO: 131237 - DNA, 20 bp, Artificial Sequence
  mmSKRIPTE0002016_Styk1_9
  gRNA
agagtttgagccttacctcg

SEQ ID NO: 131238 - DNA, 20 bp, Artificial Sequence
  mmSKRIPTE0002017_Kcnj8_1
  gRNA
ggtgcgatccatagtgcacg

SEQ ID NO: 131239 - DNA, 20 bp, Artificial Sequence
  mmSKRIPTE0002018_Kcnj8_2
  gRNA
acggacctcctacattgccg

SEQ ID NO: 131240 - DNA, 20 bp, Artificial Sequence
  mmSKRIPTE0002019_Kcnj8_3
  gRNA
ggctacgcttgtcaatcacg

SEQ ID NO: 131241 - DNA, 20 bp, Artificial Sequence
  mmSKRIPTE0002020_Kcnj8_4
  gRNA
ctggaaagtaatttgcgacg

SEQ ID NO: 131242 - DNA, 20 bp, Artificial Sequence
  mmSKRIPTE0002021_Kcnj8_5
  gRNA
ttgtacagatacctgagacg

SEQ ID NO: 131243 - DNA, 20 bp, Artificial Sequence
  mmSKRIPTE0002022_Kcnj8_6
  gRNA
aagttgcatcgcgcctcccg

SEQ ID NO: 131244 - DNA, 20 bp, Artificial Sequence
  mmSKRIPTE0002023_Kcnj8_7
  gRNA
atcacacaccgtgttaaccc

SEQ ID NO: 131245 - DNA, 20 bp, Artificial Sequence
  mmSKRIPTE0002024_Kcnj8_8
  gRNA
actttccccggctcgctcgg

SEQ ID NO: 131246 - DNA, 20 bp, Artificial Sequence
  mmSKRIPTE0002025_Kcnj8_9
  gRNA
gaccacctggatgcgcaccg

SEQ ID NO: 131247 - DNA, 20 bp, Artificial Sequence
  mmSKRIPTE0002026_Gas6_1
  gRNA
ccagaccggagcgatcacag

SEQ ID NO: 131248 - DNA, 20 bp, Artificial Sequence
  mmSKRIPTE0002027_Gas6_2
  gRNA
ggtcaacctacacccactcg

SEQ ID NO: 131249 - DNA, 20 bp, Artificial Sequence
  mmSKRIPTE0002028_Gas6_3
  gRNA
agagagttaaatagtccgtg

SEQ ID NO: 131250 - DNA, 20 bp, Artificial Sequence
  mmSKRIPTE0002029_Gas6_4
  gRNA
tccttaaacacagataacgt

SEQ ID NO: 131251 - DNA, 20 bp, Artificial Sequence
  mmSKRIPTE0002030_Gas6_5
  gRNA
cggtcatcctggctaagcga

SEQ ID NO: 131252 - DNA, 20 bp, Artificial Sequence
  mmSKRIPTE0002031_Gas6_6
  gRNA
cctcgaagacttggtaggcg

SEQ ID NO: 131253 - DNA, 20 bp, Artificial Sequence
  mmSKRIPTE0002032_Gas6_7
  gRNA
agaggtccctaggtgcacaa

SEQ ID NO: 131254 - DNA, 20 bp, Artificial Sequence
  mmSKRIPTE0002033_Gas6_8
  gRNA
cccgtcactgcgttctaccg

SEQ ID NO: 131255 - DNA, 20 bp, Artificial Sequence
  mmSKRIPTE0002034_Gas6_9
  gRNA
gtaagtccattcccgacacg

SEQ ID NO: 131256 - DNA, 20 bp, Artificial Sequence
  mmSKRIPTE0002035_Pik3cb_1
  gRNA
tatgtccgggaatacgctgt

SEQ ID NO: 131257 - DNA, 20 bp, Artificial Sequence
  mmSKRIPTE0002036_Pik3cb_2
  gRNA
acagctcccagccccgaatg

SEQ ID NO: 131258 - DNA, 20 bp, Artificial Sequence
  mmSKRIPTE0002037_Pik3cb_3
  gRNA
actgccagtcacaactcgtg

SEQ ID NO: 131259 - DNA, 20 bp, Artificial Sequence
  mmSKRIPTE0002038_Pik3cb_4
  gRNA
ctgttgctaagcagccatag

SEQ ID NO: 131260 - DNA, 20 bp, Artificial Sequence
  mmSKRIPTE0002039_Pik3cb_5
  gRNA
caactcgagttgcttaacga

SEQ ID NO: 131261 - DNA, 20 bp, Artificial Sequence
  mmSKRIPTE0002040_Pik3cb_6
  gRNA
tagcatgcaagtgtctccga

SEQ ID NO: 131262 - DNA, 20 bp, Artificial Sequence
  mmSKRIPTE0002041_Pik3cb_7
  gRNA
atcctggaagcatactgtcg

SEQ ID NO: 131263 - DNA, 20 bp, Artificial Sequence
  mmSKRIPTE0002042_Pik3cb_8
  gRNA
gagtccttggatcaggcgaa

SEQ ID NO: 131264 - DNA, 20 bp, Artificial Sequence
  mmSKRIPTE0002043_Pik3cb_9
  gRNA
acttacctttcccggcacat

SEQ ID NO: 131265 - DNA, 20 bp, Artificial Sequence
  mmSKRIPTE0002044_Map3k5_1
  gRNA
ctataccatacggaagacga

SEQ ID NO: 131266 - DNA, 20 bp, Artificial Sequence
  mmSKRIPTE0002045_Map3k5_2
  gRNA
tgtttggttgtcgtgacgga

SEQ ID NO: 131267 - DNA, 20 bp, Artificial Sequence
  mmSKRIPTE0002046_Map3k5_3
  gRNA
aattggcagctgaattggcg

SEQ ID NO: 131268 - DNA, 20 bp, Artificial Sequence
  mmSKRIPTE0002047_Map3k5_4
  gRNA
aatgtgctggaaactagtcg

SEQ ID NO: 131269 - DNA, 20 bp, Artificial Sequence
  mmSKRIPTE0002048_Map3k5_5
  gRNA
tcgtattcgtagtcatactg

SEQ ID NO: 131270 - DNA, 20 bp, Artificial Sequence
  mmSKRIPTE0002049_Map3k5_6
  gRNA
gaaactaataggtaacgtga

SEQ ID NO: 131271 - DNA, 20 bp, Artificial Sequence
  mmSKRIPTE0002050_Map3k5_7
  gRNA
attatctgactgagcccacg

SEQ ID NO: 131272 - DNA, 20 bp, Artificial Sequence
  mmSKRIPTE0002051_Map3k5_8
  gRNA
gcgcttgataggggtcaatg

SEQ ID NO: 131273 - DNA, 20 bp, Artificial Sequence
  mmSKRIPTE0002052_Map3k5_9
  gRNA
gcaacgttagaattgttgag

SEQ ID NO: 131274 - DNA, 20 bp, Artificial Sequence
  mmSKRIPTE0002053_Sqstm1_1
  gRNA
tttcgtccgtacctagaccg

SEQ ID NO: 131275 - DNA, 20 bp, Artificial Sequence
  mmSKRIPTE0002054_Sqstm1_2
  gRNA
ttgctccccgtaacgcccgg

SEQ ID NO: 131276 - DNA, 20 bp, Artificial Sequence
  mmSKRIPTE0002055_Sqstm1_3
  gRNA
gagagggactcaatcagccg

SEQ ID NO: 131277 - DNA, 20 bp, Artificial Sequence
  mmSKRIPTE0002056_Sqstm1_4
  gRNA
gtccctataaggctaagcag

SEQ ID NO: 131278 - DNA, 20 bp, Artificial Sequence
  mmSKRIPTE0002057_Sqstm1_5
  gRNA
atagaggctccgcccccacg

SEQ ID NO: 131279 - DNA, 20 bp, Artificial Sequence
  mmSKRIPTE0002058_Sqstm1_6
  gRNA
tgatggttgcaacgggcctg

SEQ ID NO: 131280 - DNA, 20 bp, Artificial Sequence
  mmSKRIPTE0002059_Sqstm1_7
  gRNA
tgggacccttgaaaggtacg

SEQ ID NO: 131281 - DNA, 20 bp, Artificial Sequence
  mmSKRIPTE0002060_Sqstm1_8
  gRNA
gaccaagaattacgacatcg

SEQ ID NO: 131282 - DNA, 20 bp, Artificial Sequence
  mmSKRIPTE0002061_Sqstm1_9
  gRNA
ttgcatcacgtagagcagca

SEQ ID NO: 131283 - DNA, 20 bp, Artificial Sequence
  mmSKRIPTE0002062_Adam17_1
  gRNA
tggggcagaatataacgtag

SEQ ID NO: 131284 - DNA, 20 bp, Artificial Sequence
  mmSKRIPTE0002063_Adam17_2
  gRNA
ttacactgtacagtaaccct

SEQ ID NO: 131285 - DNA, 20 bp, Artificial Sequence
  mmSKRIPTE0002064_Adam17_3
  gRNA
aggccatctcgaagttcatg

SEQ ID NO: 131286 - DNA, 20 bp, Artificial Sequence
  mmSKRIPTE0002065_Adam17_4
  gRNA
tccatcaccaggctatccca

SEQ ID NO: 131287 - DNA, 20 bp, Artificial Sequence
  mmSKRIPTE0002066_Adam17_5
  gRNA
gaatggccctgaaagcaacg

SEQ ID NO: 131288 - DNA, 20 bp, Artificial Sequence
  mmSKRIPTE0002067_Adam17_6
  gRNA
atatcatagggcatgcacct

SEQ ID NO: 131289 - DNA, 20 bp, Artificial Sequence
  mmSKRIPTE0002068_Adam17_7
  gRNA
ccgaactctttaccaagtcg

SEQ ID NO: 131290 - DNA, 20 bp, Artificial Sequence
  mmSKRIPTE0002069_Adam17_8
  gRNA
agcaggtactcatcagccgt

SEQ ID NO: 131291 - DNA, 20 bp, Artificial Sequence
  mmSKRIPTE0002070_Adam17_9
  gRNA
gtgattggagggacgcgccg

SEQ ID NO: 131292 - DNA, 20 bp, Artificial Sequence
  mmSKRIPTE0002071_Bcl11b_1
  gRNA
agttcaccatcatagccccg

SEQ ID NO: 131293 - DNA, 20 bp, Artificial Sequence
  mmSKRIPTE0002072_Bcl11b_2
  gRNA
tgactcggtcgaaggcactg

SEQ ID NO: 131294 - DNA, 20 bp, Artificial Sequence
  mmSKRIPTE0002073_Bcl11b_3
  gRNA
tctgagagggttcggccccg

SEQ ID NO: 131295 - DNA, 20 bp, Artificial Sequence
  mmSKRIPTE0002074_Bcl11b_4
  gRNA
ctgagagcccgtcgtctgag

SEQ ID NO: 131296 - DNA, 20 bp, Artificial Sequence
  mmSKRIPTE0002075_Bcl11b_5
  gRNA
ttgggacagatgcctttcgt

SEQ ID NO: 131297 - DNA, 20 bp, Artificial Sequence
  mmSKRIPTE0002076_Bcl11b_6
  gRNA
tcaaaatcgagcaggctgag

SEQ ID NO: 131298 - DNA, 20 bp, Artificial Sequence
  mmSKRIPTE0002077_Bcl11b_7
  gRNA
agaacgcccagggcacgcag

SEQ ID NO: 131299 - DNA, 20 bp, Artificial Sequence
  mmSKRIPTE0002078_Bcl11b_8
  gRNA
aacctgtgtcggttcccagg

SEQ ID NO: 131300 - DNA, 20 bp, Artificial Sequence
  mmSKRIPTE0002079_Bcl11b_9
  gRNA
gcacgccacctccgttctcg

SEQ ID NO: 131301 - DNA, 20 bp, Artificial Sequence
  mmSKRIPTE0002080_Ddx41_1
  gRNA
gattagcctatcttaccgag

SEQ ID NO: 131302 - DNA, 20 bp, Artificial Sequence
  mmSKRIPTE0002081_Ddx41_2
  gRNA
atgctcaggacataacgcgg

SEQ ID NO: 131303 - DNA, 20 bp, Artificial Sequence
  mmSKRIPTE0002082_Ddx41_3
  gRNA
ctgctgcagcgaagacgcaa

SEQ ID NO: 131304 - DNA, 20 bp, Artificial Sequence
  mmSKRIPTE0002083_Ddx41_4
  gRNA
ctgctgtggtcgcctagcaa

SEQ ID NO: 131305 - DNA, 20 bp, Artificial Sequence
  mmSKRIPTE0002084_Ddx41_5
  gRNA
gtacgtactgatggtctcgg

SEQ ID NO: 131306 - DNA, 20 bp, Artificial Sequence
  mmSKRIPTE0002085_Ddx41_6
  gRNA
caacacggtagagtatggtg

SEQ ID NO: 131307 - DNA, 20 bp, Artificial Sequence
  mmSKRIPTE0002086_Ddx41_7
  gRNA
gacatgtcgccgttgcacca

SEQ ID NO: 131308 - DNA, 20 bp, Artificial Sequence
  mmSKRIPTE0002087_Ddx41_8
  gRNA
cgccggcagctactggtgag

SEQ ID NO: 131309 - DNA, 20 bp, Artificial Sequence
  mmSKRIPTE0002088_Ddx41_9
  gRNA
gcgcagaagatccaagtcgt

SEQ ID NO: 131310 - DNA, 20 bp, Artificial Sequence
  mmSKRIPTE0002089_Rb1_1
  gRNA
tacgttcagaatccacggga

SEQ ID NO: 131311 - DNA, 20 bp, Artificial Sequence
  mmSKRIPTE0002090_Rb1_2
  gRNA
aataatgggaacgtcccccg

SEQ ID NO: 131312 - DNA, 20 bp, Artificial Sequence
  mmSKRIPTE0002091_Rb1_3
  gRNA
atcttaccaaagttgcccag

SEQ ID NO: 131313 - DNA, 20 bp, Artificial Sequence
  mmSKRIPTE0002092_Rb1_4
  gRNA
tcggaccagaccagtccgcg

SEQ ID NO: 131314 - DNA, 20 bp, Artificial Sequence
  mmSKRIPTE0002093_Rb1_5
  gRNA
agcattctagtgctatcaga

SEQ ID NO: 131315 - DNA, 20 bp, Artificial Sequence
  mmSKRIPTE0002094_Rb1_6
  gRNA
ttgggagaaagtttcatccg

SEQ ID NO: 131316 - DNA, 20 bp, Artificial Sequence
  mmSKRIPTE0002095_Rb1_7
  gRNA
aagtacccgaggacgacggg

SEQ ID NO: 131317 - DNA, 20 bp, Artificial Sequence
  mmSKRIPTE0002096_Rb1_8
  gRNA
tacagctggcaacctccgaa

SEQ ID NO: 131318 - DNA, 20 bp, Artificial Sequence
  mmSKRIPTE0002097_Rb1_9
  gRNA
atttctacattgattccgga

SEQ ID NO: 131319 - DNA, 20 bp, Artificial Sequence
  mmSKRIPTE0002098_Plcl2_1
  gRNA
ctgatgatggacctaaacgt

SEQ ID NO: 131320 - DNA, 20 bp, Artificial Sequence
  mmSKRIPTE0002099_Plcl2_2
  gRNA
cggaattcctgccgactgcg

SEQ ID NO: 131321 - DNA, 20 bp, Artificial Sequence
  mmSKRIPTE0002100_Plcl2_3
  gRNA
cagcacgacaaagcgcacca

SEQ ID NO: 131322 - DNA, 20 bp, Artificial Sequence
  mmSKRIPTE0002101_Plcl2_4
  gRNA
tgcaggcggaattacctctg

SEQ ID NO: 131323 - DNA, 20 bp, Artificial Sequence
  mmSKRIPTE0002102_Plcl2_5
  gRNA
gggtgtagcacatatcaatg

SEQ ID NO: 131324 - DNA, 20 bp, Artificial Sequence
  mmSKRIPTE0002103_Plcl2_6
  gRNA
accaggcactgaaaactccg

SEQ ID NO: 131325 - DNA, 20 bp, Artificial Sequence
  mmSKRIPTE0002104_Plcl2_7
  gRNA
atggcttctaggctccggcg

SEQ ID NO: 131326 - DNA, 20 bp, Artificial Sequence
  mmSKRIPTE0002105_Plcl2_8
  gRNA
gaaaatctatgtacaaggtg

SEQ ID NO: 131327 - DNA, 20 bp, Artificial Sequence
  mmSKRIPTE0002106_Plcl2_9
  gRNA
acaggcagttccctcactcg

SEQ ID NO: 131328 - DNA, 20 bp, Artificial Sequence
  mmSKRIPTE0002107_Gbf1_1
  gRNA
tggtaagttacctatgcaag

SEQ ID NO: 131329 - DNA, 20 bp, Artificial Sequence
  mmSKRIPTE0002108_Gbf1_2
  gRNA
gactccgtagtaccacctag

SEQ ID NO: 131330 - DNA, 20 bp, Artificial Sequence
  mmSKRIPTE0002109_Gbf1_3
  gRNA
acacgaccgccataactctg

SEQ ID NO: 131331 - DNA, 20 bp, Artificial Sequence
  mmSKRIPTE0002110_Gbf1_4
  gRNA
atggactacgtcaatcctcg

SEQ ID NO: 131332 - DNA, 20 bp, Artificial Sequence
  mmSKRIPTE0002111_Gbf1_5
  gRNA
aacccccctaaggttaccca

SEQ ID NO: 131333 - DNA, 20 bp, Artificial Sequence
  mmSKRIPTE0002112_Gbf1_6
  gRNA
tggagcgtgctgcttcaccg

SEQ ID NO: 131334 - DNA, 20 bp, Artificial Sequence
  mmSKRIPTE0002113_Gbf1_7
  gRNA
gcatgagtgactcgtccaag

SEQ ID NO: 131335 - DNA, 20 bp, Artificial Sequence
  mmSKRIPTE0002114_Gbf1_8
  gRNA
agcagtaatggaaccacgag

SEQ ID NO: 131336 - DNA, 20 bp, Artificial Sequence
  mmSKRIPTE0002115_Gbf1_9
  gRNA
gacaccgtatggtagctggc

SEQ ID NO: 131337 - DNA, 20 bp, Artificial Sequence
  mmSKRIPTE0002116_Ppp6c_1
  gRNA
tcaaaggaaatacggcgtcg

SEQ ID NO: 131338 - DNA, 20 bp, Artificial Sequence
  mmSKRIPTE0002117_Ppp6c_2
  gRNA
tcaacgccagtaacagtgtg

SEQ ID NO: 131339 - DNA, 20 bp, Artificial Sequence
  mmSKRIPTE0002118_Ppp6c_3
  gRNA
acgagaagctggtcacagtg

SEQ ID NO: 131340 - DNA, 20 bp, Artificial Sequence
  mmSKRIPTE0002119_Ppp6c_4
  gRNA
acccgtagctctctgccgcg

SEQ ID NO: 131341 - DNA, 20 bp, Artificial Sequence
  mmSKRIPTE0002120_Ppp6c_5
  gRNA
cctaactactgctatcgctg

SEQ ID NO: 131342 - DNA, 20 bp, Artificial Sequence
  mmSKRIPTE0002121_Ppp6c_6
  gRNA
acagatcccctgataccatg

SEQ ID NO: 131343 - DNA, 20 bp, Artificial Sequence
  mmSKRIPTE0002122_Ppp6c_7
  gRNA
gtttacagccgggttgacaa

SEQ ID NO: 131344 - DNA, 20 bp, Artificial Sequence
  mmSKRIPTE0002123_Ppp6c_8
  gRNA
atcaaattatcatccaacaa

SEQ ID NO: 131345 - DNA, 20 bp, Artificial Sequence
  mmSKRIPTE0002124_Ppp6c_9
  gRNA
ggatcggacgtgacgtaagg

SEQ ID NO: 131346 - DNA, 20 bp, Artificial Sequence
  mmSKRIPTE0002125_Ptprj_1
  gRNA
acaacctggctcaacacgtg

SEQ ID NO: 131347 - DNA, 20 bp, Artificial Sequence
  mmSKRIPTE0002126_Ptprj_2
  gRNA
gtgactgatgcaaggtcgtg

SEQ ID NO: 131348 - DNA, 20 bp, Artificial Sequence
  mmSKRIPTE0002127_Ptprj_3
  gRNA
cctcccgttgtagtagccga

SEQ ID NO: 131349 - DNA, 20 bp, Artificial Sequence
  mmSKRIPTE0002128_Ptprj_4
  gRNA
aggacccagatattaccggt

SEQ ID NO: 131350 - DNA, 20 bp, Artificial Sequence
  mmSKRIPTE0002129_Ptprj_5
  gRNA
ctcttcaatcagcatccggt

SEQ ID NO: 131351 - DNA, 20 bp, Artificial Sequence
  mmSKRIPTE0002130_Ptprj_6
  gRNA
cagatccaagttaatccgag

SEQ ID NO: 131352 - DNA, 20 bp, Artificial Sequence
  mmSKRIPTE0002131_Ptprj_7
  gRNA
tgctgtcatcctcaccaccg

SEQ ID NO: 131353 - DNA, 20 bp, Artificial Sequence
  mmSKRIPTE0002132_Ptprj_8
  gRNA
cttgtctccataaagcccga

SEQ ID NO: 131354 - DNA, 20 bp, Artificial Sequence
  mmSKRIPTE0002133_Ptprj_9
  gRNA
taactaatatttgatgcacg

SEQ ID NO: 131355 - DNA, 20 bp, Artificial Sequence
  mmSKRIPTE0002134_F2_1
  gRNA
gagcgtggccgactatacca

SEQ ID NO: 131356 - DNA, 20 bp, Artificial Sequence
  mmSKRIPTE0002135_F2_2
  gRNA
aaatacgtttggtatcgctg

SEQ ID NO: 131357 - DNA, 20 bp, Artificial Sequence
  mmSKRIPTE0002136_F2_3
  gRNA
cctgtcaccgagttgtcacg

SEQ ID NO: 131358 - DNA, 20 bp, Artificial Sequence
  mmSKRIPTE0002137_F2_4
  gRNA
tcacacgggagtgatccacc

SEQ ID NO: 131359 - DNA, 20 bp, Artificial Sequence
  mmSKRIPTE0002138_F2_5
  gRNA
tgtgcctagactcttaacct

SEQ ID NO: 131360 - DNA, 20 bp, Artificial Sequence
  mmSKRIPTE0002139_F2_6
  gRNA
agatagtctaagcgcccaag

SEQ ID NO: 131361 - DNA, 20 bp, Artificial Sequence
  mmSKRIPTE0002140_F2_7
  gRNA
cagtgaggctcgcgacatga

SEQ ID NO: 131362 - DNA, 20 bp, Artificial Sequence
  mmSKRIPTE0002141_F2_8
  gRNA
tcttctcgaacaaaggccgc

SEQ ID NO: 131363 - DNA, 20 bp, Artificial Sequence
  mmSKRIPTE0002142_F2_9
  gRNA
aaaggtgtcccggttatgga

SEQ ID NO: 131364 - DNA, 20 bp, Artificial Sequence
  mmSKRIPTE0002143_Mertk_1
  gRNA
aattggtgtgacgatcaatg

SEQ ID NO: 131365 - DNA, 20 bp, Artificial Sequence
  mmSKRIPTE0002144_Mertk_2
  gRNA
gtggggccagaaccatcgcg

SEQ ID NO: 131366 - DNA, 20 bp, Artificial Sequence
  mmSKRIPTE0002145_Mertk_3
  gRNA
cgattgctataccccaacag

SEQ ID NO: 131367 - DNA, 20 bp, Artificial Sequence
  mmSKRIPTE0002146_Mertk_4
  gRNA
agttacgctctgactaaacg

SEQ ID NO: 131368 - DNA, 20 bp, Artificial Sequence
  mmSKRIPTE0002147_Mertk_5
  gRNA
cagcgcaaatggaaatagcg

SEQ ID NO: 131369 - DNA, 20 bp, Artificial Sequence
  mmSKRIPTE0002148_Mertk_6
  gRNA
tgtcctgagctagagacccg

SEQ ID NO: 131370 - DNA, 20 bp, Artificial Sequence
  mmSKRIPTE0002149_Mertk_7
  gRNA
aacgtgactaagacgacatg

SEQ ID NO: 131371 - DNA, 20 bp, Artificial Sequence
  mmSKRIPTE0002150_Mertk_8
  gRNA
gtgtgattaaacgcaacagg

SEQ ID NO: 131372 - DNA, 20 bp, Artificial Sequence
  mmSKRIPTE0002151_Mertk_9
  gRNA
tagtgtactatggtgagacc

SEQ ID NO: 131373 - DNA, 20 bp, Artificial Sequence
  mmSKRIPTE0002152_Gbp3_1
  gRNA
gtcatgacctctcctcaatg

SEQ ID NO: 131374 - DNA, 20 bp, Artificial Sequence
  mmSKRIPTE0002153_Gbp3_2
  gRNA
ggcactggtagacctaaccg

SEQ ID NO: 131375 - DNA, 20 bp, Artificial Sequence
  mmSKRIPTE0002154_Gbp3_3
  gRNA
actgcagtctaaatccaaga

SEQ ID NO: 131376 - DNA, 20 bp, Artificial Sequence
  mmSKRIPTE0002155_Gbp3_4
  gRNA
acagtgcaatccgaaaccaa

SEQ ID NO: 131377 - DNA, 20 bp, Artificial Sequence
  mmSKRIPTE0002156_Gbp3_5
  gRNA
cggctaatgggagtactcag

SEQ ID NO: 131378 - DNA, 20 bp, Artificial Sequence
  mmSKRIPTE0002157_Gbp3_6
  gRNA
catataacgactaagcactg

SEQ ID NO: 131379 - DNA, 20 bp, Artificial Sequence
  mmSKRIPTE0002158_Gbp3_7
  gRNA
tcttgttaaaacgcacaagt

SEQ ID NO: 131380 - DNA, 20 bp, Artificial Sequence
  mmSKRIPTE0002159_Gbp3_8
  gRNA
ttgttggtttatatcgtaca

SEQ ID NO: 131381 - DNA, 20 bp, Artificial Sequence
  mmSKRIPTE0002160_Gbp3_9
  gRNA
gtgtgacagccacagctcga

SEQ ID NO: 131382 - DNA, 20 bp, Artificial Sequence
  mmSKRIPTE0002161_Glmn_1
  gRNA
agagcgtacagtcgggcccg

SEQ ID NO: 131383 - DNA, 20 bp, Artificial Sequence
  mmSKRIPTE0002162_Glmn_2
  gRNA
ttcaactgcagaaggtacga

SEQ ID NO: 131384 - DNA, 20 bp, Artificial Sequence
  mmSKRIPTE0002163_Glmn_3
  gRNA
agaccatcattaagtctatg

SEQ ID NO: 131385 - DNA, 20 bp, Artificial Sequence
  mmSKRIPTE0002164_Glmn_4
  gRNA
ctaaatacaagtaatcactc

SEQ ID NO: 131386 - DNA, 20 bp, Artificial Sequence
  mmSKRIPTE0002165_Glmn_5
  gRNA
aacaacaaggcatactccgt

SEQ ID NO: 131387 - DNA, 20 bp, Artificial Sequence
  mmSKRIPTE0002166_Glmn_6
  gRNA
tcatccagtcaagtacaact

SEQ ID NO: 131388 - DNA, 20 bp, Artificial Sequence
  mmSKRIPTE0002167_Glmn_7
  gRNA
tcttgaggaacatttcaccg

SEQ ID NO: 131389 - DNA, 20 bp, Artificial Sequence
  mmSKRIPTE0002168_Glmn_8
  gRNA
ccaacttacttgttcatgcg

SEQ ID NO: 131390 - DNA, 20 bp, Artificial Sequence
  mmSKRIPTE0002169_Glmn_9
  gRNA
acaacatctgaacatggtga

SEQ ID NO: 131391 - DNA, 20 bp, Artificial Sequence
  mmSKRIPTE0002170_Irak2_1
  gRNA
gcagaggtaggacgttcgcg

SEQ ID NO: 131392 - DNA, 20 bp, Artificial Sequence
  mmSKRIPTE0002171_Irak2_2
  gRNA
gctccccccagatatcaacg

SEQ ID NO: 131393 - DNA, 20 bp, Artificial Sequence
  mmSKRIPTE0002172_Irak2_3
  gRNA
tgtcaggtctgtgatcacgt

SEQ ID NO: 131394 - DNA, 20 bp, Artificial Sequence
  mmSKRIPTE0002173_Irak2_4
  gRNA
gcttagcagttgcatacaca

SEQ ID NO: 131395 - DNA, 20 bp, Artificial Sequence
  mmSKRIPTE0002174_Irak2_5
  gRNA
ctgcaccggaagcttacctg

SEQ ID NO: 131396 - DNA, 20 bp, Artificial Sequence
  mmSKRIPTE0002175_Irak2_6
  gRNA
cactcacttggtaaataccc

SEQ ID NO: 131397 - DNA, 20 bp, Artificial Sequence
  mmSKRIPTE0002176_Irak2_7
  gRNA
ctcaaggtagtacatcacac

SEQ ID NO: 131398 - DNA, 20 bp, Artificial Sequence
  mmSKRIPTE0002177_Irak2_8
  gRNA
caaggggcatccatctcgca

SEQ ID NO: 131399 - DNA, 20 bp, Artificial Sequence
  mmSKRIPTE0002178_Irak2_9
  gRNA
aacctgacactaagatgcgg

SEQ ID NO: 131400 - DNA, 20 bp, Artificial Sequence
  mmSKRIPTE0002179_Ptpn6_1
  gRNA
caccatctgatagcctacca

SEQ ID NO: 131401 - DNA, 20 bp, Artificial Sequence
  mmSKRIPTE0002180_Ptpn6_2
  gRNA
cttctatgacctgtacggag

SEQ ID NO: 131402 - DNA, 20 bp, Artificial Sequence
  mmSKRIPTE0002181_Ptpn6_3
  gRNA
atgtgtcccatactggcccg

SEQ ID NO: 131403 - DNA, 20 bp, Artificial Sequence
  mmSKRIPTE0002182_Ptpn6_4
  gRNA
gatatgagtgaccctgagcg

SEQ ID NO: 131404 - DNA, 20 bp, Artificial Sequence
  mmSKRIPTE0002183_Ptpn6_5
  gRNA
gtattcaggtctatgtctag

SEQ ID NO: 131405 - DNA, 20 bp, Artificial Sequence
  mmSKRIPTE0002184_Ptpn6_6
  gRNA
taccacggccacatatctgg

SEQ ID NO: 131406 - DNA, 20 bp, Artificial Sequence
  mmSKRIPTE0002185_Ptpn6_7
  gRNA
catcaatgccaactacgtga

SEQ ID NO: 131407 - DNA, 20 bp, Artificial Sequence
  mmSKRIPTE0002186_Ptpn6_8
  gRNA
tcacttggaggaagtacgcg

SEQ ID NO: 131408 - DNA, 20 bp, Artificial Sequence
  mmSKRIPTE0002187_Ptpn6_9
  gRNA
gataagtggacatccagacc

SEQ ID NO: 131409 - DNA, 20 bp, Artificial Sequence
  mmSKRIPTE0002188_Irf7_1
  gRNA
tcaccggtgaggatctagag

SEQ ID NO: 131410 - DNA, 20 bp, Artificial Sequence
  mmSKRIPTE0002189_Irf7_2
  gRNA
cccaggtagatggtgtagtg

SEQ ID NO: 131411 - DNA, 20 bp, Artificial Sequence
  mmSKRIPTE0002190_Irf7_3
  gRNA
tagtacttcgggcagaggcg

SEQ ID NO: 131412 - DNA, 20 bp, Artificial Sequence
  mmSKRIPTE0002191_Irf7_4
  gRNA
cattagccctaaccccagcg

SEQ ID NO: 131413 - DNA, 20 bp, Artificial Sequence
  mmSKRIPTE0002192_Irf7_5
  gRNA
atggaccagatgtacctgtg

SEQ ID NO: 131414 - DNA, 20 bp, Artificial Sequence
  mmSKRIPTE0002193_Irf7_6
  gRNA
tacctggtaccggagccgcc

SEQ ID NO: 131415 - DNA, 20 bp, Artificial Sequence
  mmSKRIPTE0002194_Irf7_7
  gRNA
aaaccatagaggcacccaag

SEQ ID NO: 131416 - DNA, 20 bp, Artificial Sequence
  mmSKRIPTE0002195_Irf7_8
  gRNA
tacaagtgttggtaacaggt

SEQ ID NO: 131417 - DNA, 20 bp, Artificial Sequence
  mmSKRIPTE0002196_Irf7_9
  gRNA
gctgagcgaagagagcgaag

SEQ ID NO: 131418 - DNA, 20 bp, Artificial Sequence
  mmSKRIPTE0002197_Cbfa2t3_1
  gRNA
cagccgtggaaacggccatg

SEQ ID NO: 131419 - DNA, 20 bp, Artificial Sequence
  mmSKRIPTE0002198_Cbfa2t3_2
  gRNA
agttcgtgcccacggcaggg

SEQ ID NO: 131420 - DNA, 20 bp, Artificial Sequence
  mmSKRIPTE0002199_Cbfa2t3_3
  gRNA
tgcccgagttgtgagcgtag

SEQ ID NO: 131421 - DNA, 20 bp, Artificial Sequence
  mmSKRIPTE0002200_Cbfa2t3_4
  gRNA
gggcttagtcatccgcatgg

SEQ ID NO: 131422 - DNA, 20 bp, Artificial Sequence
  mmSKRIPTE0002201_Cbfa2t3_5
  gRNA
tttaacataacgtgaccctg

SEQ ID NO: 131423 - DNA, 20 bp, Artificial Sequence
  mmSKRIPTE0002202_Cbfa2t3_6
  gRNA
accgtagctctctcgcaacc

SEQ ID NO: 131424 - DNA, 20 bp, Artificial Sequence
  mmSKRIPTE0002203_Cbfa2t3_7
  gRNA
catacctttcagctaacgag

SEQ ID NO: 131425 - DNA, 20 bp, Artificial Sequence
  mmSKRIPTE0002204_Cbfa2t3_8
  gRNA
gcggcagctgcgtagtacgc

SEQ ID NO: 131426 - DNA, 20 bp, Artificial Sequence
  mmSKRIPTE0002205_Cbfa2t3_9
  gRNA
gggtgcaggaccgcttactg

SEQ ID NO: 131427 - DNA, 20 bp, Artificial Sequence
  mmSKRIPTE0002206_Anxa2_1
  gRNA
atgaggttatggctcacccg

SEQ ID NO: 131428 - DNA, 20 bp, Artificial Sequence
  mmSKRIPTE0002207_Anxa2_2
  gRNA
tgaacgtctcctaaagcgtg

SEQ ID NO: 131429 - DNA, 20 bp, Artificial Sequence
  mmSKRIPTE0002208_Anxa2_3
  gRNA
tcaccctgtcaggactgcga

SEQ ID NO: 131430 - DNA, 20 bp, Artificial Sequence
  mmSKRIPTE0002209_Anxa2_4
  gRNA
aggtggcgaaggctgcaccg

SEQ ID NO: 131431 - DNA, 20 bp, Artificial Sequence
  mmSKRIPTE0002210_Anxa2_5
  gRNA
aacacacgtcatcccgtgaa

SEQ ID NO: 131432 - DNA, 20 bp, Artificial Sequence
  mmSKRIPTE0002211_Anxa2_6
  gRNA
aggtcaatgctactgtagcg

SEQ ID NO: 131433 - DNA, 20 bp, Artificial Sequence
  mmSKRIPTE0002212_Anxa2_7
  gRNA
ctgcggtaccttcaaccacg

SEQ ID NO: 131434 - DNA, 20 bp, Artificial Sequence
  mmSKRIPTE0002213_Anxa2_8
  gRNA
cttctttatcagattcatcg

SEQ ID NO: 131435 - DNA, 20 bp, Artificial Sequence
  mmSKRIPTE0002214_Anxa2_9
  gRNA
cgttcagcaccgcaaccccg

SEQ ID NO: 131436 - DNA, 20 bp, Artificial Sequence
  mmSKRIPTE0002215_Ager_1
  gRNA
cgagtccgagtctaccgtaa

SEQ ID NO: 131437 - DNA, 20 bp, Artificial Sequence
  mmSKRIPTE0002216_Ager_2
  gRNA
ccactggaattgtcgatgag

SEQ ID NO: 131438 - DNA, 20 bp, Artificial Sequence
  mmSKRIPTE0002217_Ager_3
  gRNA
cccatccaactccgagtcag

SEQ ID NO: 131439 - DNA, 20 bp, Artificial Sequence
  mmSKRIPTE0002218_Ager_4
  gRNA
agtagtagccctgctcgtcg

SEQ ID NO: 131440 - DNA, 20 bp, Artificial Sequence
  mmSKRIPTE0002219_Ager_5
  gRNA
ccacaatgatgctatcaccc

SEQ ID NO: 131441 - DNA, 20 bp, Artificial Sequence
  mmSKRIPTE0002220_Ager_6
  gRNA
aacctcaggagttacccttg

SEQ ID NO: 131442 - DNA, 20 bp, Artificial Sequence
  mmSKRIPTE0002221_Ager_7
  gRNA
gtcgggcaactaacaggcga

SEQ ID NO: 131443 - DNA, 20 bp, Artificial Sequence
  mmSKRIPTE0002222_Ager_8
  gRNA
gggaaacttctgattcccga

SEQ ID NO: 131444 - DNA, 20 bp, Artificial Sequence
  mmSKRIPTE0002223_Ager_9
  gRNA
tgagggcacctatagctgcg

SEQ ID NO: 131445 - DNA, 20 bp, Artificial Sequence
  mmSKRIPTE0002224_Ms4a1_1
  gRNA
gaagggtagactacactacg

SEQ ID NO: 131446 - DNA, 20 bp, Artificial Sequence
  mmSKRIPTE0002225_Ms4a1_2
  gRNA
gctgctaatttcctgtcacg

SEQ ID NO: 131447 - DNA, 20 bp, Artificial Sequence
  mmSKRIPTE0002226_Ms4a1_3
  gRNA
taaggcaaggtctactaccg

SEQ ID NO: 131448 - DNA, 20 bp, Artificial Sequence
  mmSKRIPTE0002227_Ms4a1_4
  gRNA
cccacgttgaaaccatgcaa

SEQ ID NO: 131449 - DNA, 20 bp, Artificial Sequence
  mmSKRIPTE0002228_Ms4a1_5
  gRNA
cctactgatgtcatccattg

SEQ ID NO: 131450 - DNA, 20 bp, Artificial Sequence
  mmSKRIPTE0002229_Ms4a1_6
  gRNA
agtgtatggtaccctctctg

SEQ ID NO: 131451 - DNA, 20 bp, Artificial Sequence
  mmSKRIPTE0002230_Ms4a1_7
  gRNA
tctagatccaggaattctgt

SEQ ID NO: 131452 - DNA, 20 bp, Artificial Sequence
  mmSKRIPTE0002231_Ms4a1_8
  gRNA
tagacagcattagaccaccc

SEQ ID NO: 131453 - DNA, 20 bp, Artificial Sequence
  mmSKRIPTE0002232_Ms4a1_9
  gRNA
ggtgattggagcgattctca

SEQ ID NO: 131454 - DNA, 20 bp, Artificial Sequence
  mmSKRIPTE0002233_Braf_1
  gRNA
gagacgacgaggagtcgccg

SEQ ID NO: 131455 - DNA, 20 bp, Artificial Sequence
  mmSKRIPTE0002234_Braf_2
  gRNA
gtagaaacgtgtgagcgcga

SEQ ID NO: 131456 - DNA, 20 bp, Artificial Sequence
  mmSKRIPTE0002235_Braf_3
  gRNA
tgggtgcgtgacgtcatccg

SEQ ID NO: 131457 - DNA, 20 bp, Artificial Sequence
  mmSKRIPTE0002236_Braf_4
  gRNA
tgtcattagagaccgtgaca

SEQ ID NO: 131458 - DNA, 20 bp, Artificial Sequence
  mmSKRIPTE0002237_Braf_5
  gRNA
aactggcaattgttacacag

SEQ ID NO: 131459 - DNA, 20 bp, Artificial Sequence
  mmSKRIPTE0002238_Braf_6
  gRNA
ccagtgagcaaggcaacccg

SEQ ID NO: 131460 - DNA, 20 bp, Artificial Sequence
  mmSKRIPTE0002239_Braf_7
  gRNA
tcaccagcgttgtagtacag

SEQ ID NO: 131461 - DNA, 20 bp, Artificial Sequence
  mmSKRIPTE0002240_Braf_8
  gRNA
gaggttaggagggcataatg

SEQ ID NO: 131462 - DNA, 20 bp, Artificial Sequence
  mmSKRIPTE0002241_Braf_9
  gRNA
aattacttagcagcaccgat

SEQ ID NO: 131463 - DNA, 20 bp, Artificial Sequence
  mmSKRIPTE0002242_Bcl6b_1
  gRNA
aattatccctcgtatacgca

SEQ ID NO: 131464 - DNA, 20 bp, Artificial Sequence
  mmSKRIPTE0002243_Bcl6b_2
  gRNA
aactcagctatggtcccccg

SEQ ID NO: 131465 - DNA, 20 bp, Artificial Sequence
  mmSKRIPTE0002244_Bcl6b_3
  gRNA
gcatctgcgtcagaaacacg

SEQ ID NO: 131466 - DNA, 20 bp, Artificial Sequence
  mmSKRIPTE0002245_Bcl6b_4
  gRNA
cagattgctaagcacgtcgg

SEQ ID NO: 131467 - DNA, 20 bp, Artificial Sequence
  mmSKRIPTE0002246_Bcl6b_5
  gRNA
accgcacggtgcacacaggt

SEQ ID NO: 131468 - DNA, 20 bp, Artificial Sequence
  mmSKRIPTE0002247_Bcl6b_6
  gRNA
agatcgccctacgggagcgg

SEQ ID NO: 131469 - DNA, 20 bp, Artificial Sequence
  mmSKRIPTE0002248_Bcl6b_7
  gRNA
caaccaacgccatcagatag

SEQ ID NO: 131470 - DNA, 20 bp, Artificial Sequence
  mmSKRIPTE0002249_Bcl6b_8
  gRNA
tatcgcttgcaggttcgagg

SEQ ID NO: 131471 - DNA, 20 bp, Artificial Sequence
  mmSKRIPTE0002250_Bcl6b_9
  gRNA
cttagccctgagaatatcga

SEQ ID NO: 131472 - DNA, 20 bp, Artificial Sequence
  mmSKRIPTE0002251_Erap1_1
  gRNA
catatttgacttatccaacg

SEQ ID NO: 131473 - DNA, 20 bp, Artificial Sequence
  mmSKRIPTE0002252_Erap1_2
  gRNA
gataattgcgcacacatgcg

SEQ ID NO: 131474 - DNA, 20 bp, Artificial Sequence
  mmSKRIPTE0002253_Erap1_3
  gRNA
cagtggatcaaatttaacgt

SEQ ID NO: 131475 - DNA, 20 bp, Artificial Sequence
  mmSKRIPTE0002254_Erap1_4
  gRNA
gtgttcttagatgcgtaatg

SEQ ID NO: 131476 - DNA, 20 bp, Artificial Sequence
  mmSKRIPTE0002255_Erap1_5
  gRNA
ctttcactttcggtcccggg

SEQ ID NO: 131477 - DNA, 20 bp, Artificial Sequence
  mmSKRIPTE0002256_Erap1_6
  gRNA
aggccaatggataacccact

SEQ ID NO: 131478 - DNA, 20 bp, Artificial Sequence
  mmSKRIPTE0002257_Erap1_7
  gRNA
aagtagttatcagagtgcgg

SEQ ID NO: 131479 - DNA, 20 bp, Artificial Sequence
  mmSKRIPTE0002258_Erap1_8
  gRNA
ccattgaagaaaacatacga

SEQ ID NO: 131480 - DNA, 20 bp, Artificial Sequence
  mmSKRIPTE0002259_Erap1_9
  gRNA
ctattacattgtgcattacg

SEQ ID NO: 131481 - DNA, 20 bp, Artificial Sequence
  mmSKRIPTE0002260_Rabgef1_1
  gRNA
agcctgaagtccgaacgcag

SEQ ID NO: 131482 - DNA, 20 bp, Artificial Sequence
  mmSKRIPTE0002261_Rabgef1_2
  gRNA
tagaacggaatgatagcatg

SEQ ID NO: 131483 - DNA, 20 bp, Artificial Sequence
  mmSKRIPTE0002262_Rabgef1_3
  gRNA
attccaggatttaagcatcg

SEQ ID NO: 131484 - DNA, 20 bp, Artificial Sequence
  mmSKRIPTE0002263_Rabgef1_4
  gRNA
gctgaaagaatgcagacccg

SEQ ID NO: 131485 - DNA, 20 bp, Artificial Sequence
  mmSKRIPTE0002264_Rabgef1_5
  gRNA
aggcactggaatacacaaag

SEQ ID NO: 131486 - DNA, 20 bp, Artificial Sequence
  mmSKRIPTE0002265_Rabgef1_6
  gRNA
atggtggtgaaagcgatcac

SEQ ID NO: 131487 - DNA, 20 bp, Artificial Sequence
  mmSKRIPTE0002266_Rabgef1_7
  gRNA
catattccggacctgaacag

SEQ ID NO: 131488 - DNA, 20 bp, Artificial Sequence
  mmSKRIPTE0002267_Rabgef1_8
  gRNA
gcaatgccttataaaagggt

SEQ ID NO: 131489 - DNA, 20 bp, Artificial Sequence
  mmSKRIPTE0002268_Rabgef1_9
  gRNA
agctgtgttagaagacgatg

SEQ ID NO: 131490 - DNA, 20 bp, Artificial Sequence
  mmSKRIPTE0002269_Nlrp12_1
  gRNA
acctccgaatcagacttccg

SEQ ID NO: 131491 - DNA, 20 bp, Artificial Sequence
  mmSKRIPTE0002270_Nlrp12_2
  gRNA
attcgcctaatcgtgcattg

SEQ ID NO: 131492 - DNA, 20 bp, Artificial Sequence
  mmSKRIPTE0002271_Nlrp12_3
  gRNA
taagtggtggagctaccacg

SEQ ID NO: 131493 - DNA, 20 bp, Artificial Sequence
  mmSKRIPTE0002272_Nlrp12_4
  gRNA
ctcacgacctgacactagtg

SEQ ID NO: 131494 - DNA, 20 bp, Artificial Sequence
  mmSKRIPTE0002273_Nlrp12_5
  gRNA
tcgagggatataccacgctc

SEQ ID NO: 131495 - DNA, 20 bp, Artificial Sequence
  mmSKRIPTE0002274_Nlrp12_6
  gRNA
cctacaaagactatgtccga

SEQ ID NO: 131496 - DNA, 20 bp, Artificial Sequence
  mmSKRIPTE0002275_Nlrp12_7
  gRNA
tggtattacaaggggcagcg

SEQ ID NO: 131497 - DNA, 20 bp, Artificial Sequence
  mmSKRIPTE0002276_Nlrp12_8
  gRNA
cccgtcctaaattatctgcg

SEQ ID NO: 131498 - DNA, 20 bp, Artificial Sequence
  mmSKRIPTE0002277_Nlrp12_9
  gRNA
acatgggggacaaagtaacg

SEQ ID NO: 131499 - DNA, 20 bp, Artificial Sequence
  mmSKRIPTE0002278_Igf1r_1
  gRNA
atgatgccttgcaatagtcg

SEQ ID NO: 131500 - DNA, 20 bp, Artificial Sequence
  mmSKRIPTE0002279_Igf1r_2
  gRNA
tgtcaggtgcctacaacgag

SEQ ID NO: 131501 - DNA, 20 bp, Artificial Sequence
  mmSKRIPTE0002280_Igf1r_3
  gRNA
ttggctgtaagttggcggcg

SEQ ID NO: 131502 - DNA, 20 bp, Artificial Sequence
  mmSKRIPTE0002281_Igf1r_4
  gRNA
aagaatcgagtttctcaacg

SEQ ID NO: 131503 - DNA, 20 bp, Artificial Sequence
  mmSKRIPTE0002282_Igf1r_5
  gRNA
aggattacggacacgcagtg

SEQ ID NO: 131504 - DNA, 20 bp, Artificial Sequence
  mmSKRIPTE0002283_Igf1r_6
  gRNA
agaaccgaatcatcataacg

SEQ ID NO: 131505 - DNA, 20 bp, Artificial Sequence
  mmSKRIPTE0002284_Igf1r_7
  gRNA
gagacggactactaccggaa

SEQ ID NO: 131506 - DNA, 20 bp, Artificial Sequence
  mmSKRIPTE0002285_Igf1r_8
  gRNA
gttgcgatatgtaccctccg

SEQ ID NO: 131507 - DNA, 20 bp, Artificial Sequence
  mmSKRIPTE0002286_Igf1r_9
  gRNA
tgtcgatctcctgagcaccg

SEQ ID NO: 131508 - DNA, 20 bp, Artificial Sequence
  mmSKRIPTE0002287_Zfp809_1
  gRNA
ccatcatggtgagctcggcg

SEQ ID NO: 131509 - DNA, 20 bp, Artificial Sequence
  mmSKRIPTE0002288_Zfp809_2
  gRNA
cttagataatggtcaagctg

SEQ ID NO: 131510 - DNA, 20 bp, Artificial Sequence
  mmSKRIPTE0002289_Zfp809_3
  gRNA
agtcaccaatcgatgacgga

SEQ ID NO: 131511 - DNA, 20 bp, Artificial Sequence
  mmSKRIPTE0002290_Zfp809_4
  gRNA
gatcatacggaaagtcttag

SEQ ID NO: 131512 - DNA, 20 bp, Artificial Sequence
  mmSKRIPTE0002291_Zfp809_5
  gRNA
gagtcttcttatgtcgagtg

SEQ ID NO: 131513 - DNA, 20 bp, Artificial Sequence
  mmSKRIPTE0002292_Zfp809_6
  gRNA
acttaggtttggcaatgcag

SEQ ID NO: 131514 - DNA, 20 bp, Artificial Sequence
  mmSKRIPTE0002293_Zfp809_7
  gRNA
gtgagtaagagacttcggtc

SEQ ID NO: 131515 - DNA, 20 bp, Artificial Sequence
  mmSKRIPTE0002294_Zfp809_8
  gRNA
ccagctcgagtccccacgca

SEQ ID NO: 131516 - DNA, 20 bp, Artificial Sequence
  mmSKRIPTE0002295_Zfp809_9
  gRNA
taagtaaaacatgtaatgcg

SEQ ID NO: 131517 - DNA, 20 bp, Artificial Sequence
  mmSKRIPTE0002296_Itga1_1
  gRNA
tgcgtacaacacccggacag

SEQ ID NO: 131518 - DNA, 20 bp, Artificial Sequence
  mmSKRIPTE0002297_Itga1_2
  gRNA
attactcttccaccgctcca

SEQ ID NO: 131519 - DNA, 20 bp, Artificial Sequence
  mmSKRIPTE0002298_Itga1_3
  gRNA
cagcagcaaccggaaacgag

SEQ ID NO: 131520 - DNA, 20 bp, Artificial Sequence
  mmSKRIPTE0002299_Itga1_4
  gRNA
attcggattctcgaacggtg

SEQ ID NO: 131521 - DNA, 20 bp, Artificial Sequence
  mmSKRIPTE0002300_Itga1_5
  gRNA
tggttgtcgcgtgcactttg

SEQ ID NO: 131522 - DNA, 20 bp, Artificial Sequence
  mmSKRIPTE0002301_Itga1_6
  gRNA
cacaacagacttgcgccggg

SEQ ID NO: 131523 - DNA, 20 bp, Artificial Sequence
  mmSKRIPTE0002302_Itga1_7
  gRNA
ctatgactggaacggaactg

SEQ ID NO: 131524 - DNA, 20 bp, Artificial Sequence
  mmSKRIPTE0002303_Itga1_8
  gRNA
aagtttctcacactgctacg

SEQ ID NO: 131525 - DNA, 20 bp, Artificial Sequence
  mmSKRIPTE0002304_Itga1_9
  gRNA
accaaatggttccgctagcg

SEQ ID NO: 131526 - DNA, 20 bp, Artificial Sequence
  mmSKRIPTE0002305_Gnrh1_1
  gRNA
cggaggcacatcacgttcgt

SEQ ID NO: 131527 - DNA, 20 bp, Artificial Sequence
  mmSKRIPTE0002306_Gnrh1_2
  gRNA
tcacagcgtcatcctttacg

SEQ ID NO: 131528 - DNA, 20 bp, Artificial Sequence
  mmSKRIPTE0002307_Gnrh1_3
  gRNA
tcagggtcaatgttatactc

SEQ ID NO: 131529 - DNA, 20 bp, Artificial Sequence
  mmSKRIPTE0002308_Gnrh1_4
  gRNA
agatccctgaggggtgaacg

SEQ ID NO: 131530 - DNA, 20 bp, Artificial Sequence
  mmSKRIPTE0002309_Gnrh1_5
  gRNA
acagtacattcgaagtgctg

SEQ ID NO: 131531 - DNA, 20 bp, Artificial Sequence
  mmSKRIPTE0002310_Gnrh1_6
  gRNA
tctttgtccaaagtgcaagg

SEQ ID NO: 131532 - DNA, 20 bp, Artificial Sequence
  mmSKRIPTE0002311_Gnrh1_7
  gRNA
tgagtgctctttaagcacag

SEQ ID NO: 131533 - DNA, 20 bp, Artificial Sequence
  mmSKRIPTE0002312_Gnrh1_8
  gRNA
gtcttgagcttcatagacat

SEQ ID NO: 131534 - DNA, 20 bp, Artificial Sequence
  mmSKRIPTE0002313_Gnrh1_9
  gRNA
ctaaaatccagatctaagga

SEQ ID NO: 131535 - DNA, 20 bp, Artificial Sequence
  mmSKRIPTE0002314_Pibf1_1
  gRNA
aaaacgcattaccgaactcg

SEQ ID NO: 131536 - DNA, 20 bp, Artificial Sequence
  mmSKRIPTE0002315_Pibf1_2
  gRNA
cccaatcaccgcgaccgtcg

SEQ ID NO: 131537 - DNA, 20 bp, Artificial Sequence
  mmSKRIPTE0002316_Pibf1_3
  gRNA
actctcgcgagaaaacacga

SEQ ID NO: 131538 - DNA, 20 bp, Artificial Sequence
  mmSKRIPTE0002317_Pibf1_4
  gRNA
caggtgggacgagtacctcg

SEQ ID NO: 131539 - DNA, 20 bp, Artificial Sequence
  mmSKRIPTE0002318_Pibf1_5
  gRNA
ggtccttggtaactcacgca

SEQ ID NO: 131540 - DNA, 20 bp, Artificial Sequence
  mmSKRIPTE0002319_Pibf1_6
  gRNA
acccctcaacaggtatctcg

SEQ ID NO: 131541 - DNA, 20 bp, Artificial Sequence
  mmSKRIPTE0002320_Pibf1_7
  gRNA
gctcagcaaataactgtcgg

SEQ ID NO: 131542 - DNA, 20 bp, Artificial Sequence
  mmSKRIPTE0002321_Pibf1_8
  gRNA
cgccgtgccccagaagaagt

SEQ ID NO: 131543 - DNA, 20 bp, Artificial Sequence
  mmSKRIPTE0002322_Pibf1_9
  gRNA
aatgtataacagtaacgcac

SEQ ID NO: 131544 - DNA, 20 bp, Artificial Sequence
  mmSKRIPTE0002323_Drosha_1
  gRNA
ttaagacaacaaccgcagtg

SEQ ID NO: 131545 - DNA, 20 bp, Artificial Sequence
  mmSKRIPTE0002324_Drosha_2
  gRNA
atgctaaaggaggagccgcg

SEQ ID NO: 131546 - DNA, 20 bp, Artificial Sequence
  mmSKRIPTE0002325_Drosha_3
  gRNA
acagtctgacaacaacccga

SEQ ID NO: 131547 - DNA, 20 bp, Artificial Sequence
  mmSKRIPTE0002326_Drosha_4
  gRNA
gacctgtagacaatgtcgat

SEQ ID NO: 131548 - DNA, 20 bp, Artificial Sequence
  mmSKRIPTE0002327_Drosha_5
  gRNA
gcatcttagtgtcaatcacg

SEQ ID NO: 131549 - DNA, 20 bp, Artificial Sequence
  mmSKRIPTE0002328_Drosha_6
  gRNA
taccgctcagactatgatcg

SEQ ID NO: 131550 - DNA, 20 bp, Artificial Sequence
  mmSKRIPTE0002329_Drosha_7
  gRNA
aaagtgcgtgaaaatcaccg

SEQ ID NO: 131551 - DNA, 20 bp, Artificial Sequence
  mmSKRIPTE0002330_Drosha_8
  gRNA
tgaccatcatagtccccgag

SEQ ID NO: 131552 - DNA, 20 bp, Artificial Sequence
  mmSKRIPTE0002331_Drosha_9
  gRNA
tatacgtgggctaacacggg

SEQ ID NO: 131553 - DNA, 20 bp, Artificial Sequence
  mmSKRIPTE0002332_Lrrk2_1
  gRNA
tcgtgaacaagatgtacgga

SEQ ID NO: 131554 - DNA, 20 bp, Artificial Sequence
  mmSKRIPTE0002333_Lrrk2_2
  gRNA
gcatctaggttggtgatacg

SEQ ID NO: 131555 - DNA, 20 bp, Artificial Sequence
  mmSKRIPTE0002334_Lrrk2_3
  gRNA
cggaacggatccgcactgag

SEQ ID NO: 131556 - DNA, 20 bp, Artificial Sequence
  mmSKRIPTE0002335_Lrrk2_4
  gRNA
gtactcacatgtaaccgcca

SEQ ID NO: 131557 - DNA, 20 bp, Artificial Sequence
  mmSKRIPTE0002336_Lrrk2_5
  gRNA
tgtccggtgctacaatcttg

SEQ ID NO: 131558 - DNA, 20 bp, Artificial Sequence
  mmSKRIPTE0002337_Lrrk2_6
  gRNA
agcgatgatctggatagcga

SEQ ID NO: 131559 - DNA, 20 bp, Artificial Sequence
  mmSKRIPTE0002338_Lrrk2_7
  gRNA
tcgcacgtctatgccgactg

SEQ ID NO: 131560 - DNA, 20 bp, Artificial Sequence
  mmSKRIPTE0002339_Lrrk2_8
  gRNA
agtcacgtgacgtatccacg

SEQ ID NO: 131561 - DNA, 20 bp, Artificial Sequence
  mmSKRIPTE0002340_Lrrk2_9
  gRNA
cttgatatatcacacgaaca

SEQ ID NO: 131562 - DNA, 20 bp, Artificial Sequence
  mmSKRIPTE0002341_Ciita_1
  gRNA
gctcaacgccagtctgacga

SEQ ID NO: 131563 - DNA, 20 bp, Artificial Sequence
  mmSKRIPTE0002342_Ciita_2
  gRNA
atcgtctcgtgcagacccag

SEQ ID NO: 131564 - DNA, 20 bp, Artificial Sequence
  mmSKRIPTE0002343_Ciita_3
  gRNA
atatgtcatcggattatggt

SEQ ID NO: 131565 - DNA, 20 bp, Artificial Sequence
  mmSKRIPTE0002344_Ciita_4
  gRNA
ccattggagcagtagtacac

SEQ ID NO: 131566 - DNA, 20 bp, Artificial Sequence
  mmSKRIPTE0002345_Ciita_5
  gRNA
agttcttactcctgcacccg

SEQ ID NO: 131567 - DNA, 20 bp, Artificial Sequence
  mmSKRIPTE0002346_Ciita_6
  gRNA
agctcgactaaggctccggg

SEQ ID NO: 131568 - DNA, 20 bp, Artificial Sequence
  mmSKRIPTE0002347_Ciita_7
  gRNA
cttccgtgggttcacccggg

SEQ ID NO: 131569 - DNA, 20 bp, Artificial Sequence
  mmSKRIPTE0002348_Ciita_8
  gRNA
caattgccaatgtcggcagt

SEQ ID NO: 131570 - DNA, 20 bp, Artificial Sequence
  mmSKRIPTE0002349_Ciita_9
  gRNA
ggtgttcctgaaccccaaag

SEQ ID NO: 131571 - DNA, 20 bp, Artificial Sequence
  mmSKRIPTE0002350_Lrp5_1
  gRNA
cgtgtactggaccgacgatg

SEQ ID NO: 131572 - DNA, 20 bp, Artificial Sequence
  mmSKRIPTE0002351_Lrp5_2
  gRNA
tttctgaggactccaaacgt

SEQ ID NO: 131573 - DNA, 20 bp, Artificial Sequence
  mmSKRIPTE0002352_Lrp5_3
  gRNA
aagtcatctaacaatccttg

SEQ ID NO: 131574 - DNA, 20 bp, Artificial Sequence
  mmSKRIPTE0002353_Lrp5_4
  gRNA
tccagtacatgtacctagtg

SEQ ID NO: 131575 - DNA, 20 bp, Artificial Sequence
  mmSKRIPTE0002354_Lrp5_5
  gRNA
aggaccgtttgacgaaggat

SEQ ID NO: 131576 - DNA, 20 bp, Artificial Sequence
  mmSKRIPTE0002355_Lrp5_6
  gRNA
tgaggtgcgggctatccgca

SEQ ID NO: 131577 - DNA, 20 bp, Artificial Sequence
  mmSKRIPTE0002356_Lrp5_7
  gRNA
acctaaccaagtgccacaag

SEQ ID NO: 131578 - DNA, 20 bp, Artificial Sequence
  mmSKRIPTE0002357_Lrp5_8
  gRNA
caagacgtgcaagacaggtg

SEQ ID NO: 131579 - DNA, 20 bp, Artificial Sequence
  mmSKRIPTE0002358_Lrp5_9
  gRNA
ggagtagaaaggctccctcg

SEQ ID NO: 131580 - DNA, 20 bp, Artificial Sequence
  mmSKRIPTE0002359_Dock8_1
  gRNA
tctcaggaaacggattcccg

SEQ ID NO: 131581 - DNA, 20 bp, Artificial Sequence
  mmSKRIPTE0002360_Dock8_2
  gRNA
atatgctggcctattctccg

SEQ ID NO: 131582 - DNA, 20 bp, Artificial Sequence
  mmSKRIPTE0002361_Dock8_3
  gRNA
aggtaatgcgccccgcccgt

SEQ ID NO: 131583 - DNA, 20 bp, Artificial Sequence
  mmSKRIPTE0002362_Dock8_4
  gRNA
tttctacggatcccgatttg

SEQ ID NO: 131584 - DNA, 20 bp, Artificial Sequence
  mmSKRIPTE0002363_Dock8_5
  gRNA
ccaagaatggcacccccgag

SEQ ID NO: 131585 - DNA, 20 bp, Artificial Sequence
  mmSKRIPTE0002364_Dock8_6
  gRNA
gatcaacaggtaagacggcg

SEQ ID NO: 131586 - DNA, 20 bp, Artificial Sequence
  mmSKRIPTE0002365_Dock8_7
  gRNA
aagcagatggctaacccgga

SEQ ID NO: 131587 - DNA, 20 bp, Artificial Sequence
  mmSKRIPTE0002366_Dock8_8
  gRNA
ggtcaccacaggcgtagaca

SEQ ID NO: 131588 - DNA, 20 bp, Artificial Sequence
  mmSKRIPTE0002367_Dock8_9
  gRNA
tgactcgatgggtcaatcga

SEQ ID NO: 131589 - DNA, 20 bp, Artificial Sequence
  mmSKRIPTE0002368_Lef1_1
  gRNA
gcgcacgtaataacgatgcg

SEQ ID NO: 131590 - DNA, 20 bp, Artificial Sequence
  mmSKRIPTE0002369_Lef1_2
  gRNA
tacaccgcgtgtgcattctg

SEQ ID NO: 131591 - DNA, 20 bp, Artificial Sequence
  mmSKRIPTE0002370_Lef1_3
  gRNA
tggtggccctttaacggaca

SEQ ID NO: 131592 - DNA, 20 bp, Artificial Sequence
  mmSKRIPTE0002371_Lef1_4
  gRNA
gaatggtggtttacgccaca

SEQ ID NO: 131593 - DNA, 20 bp, Artificial Sequence
  mmSKRIPTE0002372_Lef1_5
  gRNA
gcaaactatgcattggcctg

SEQ ID NO: 131594 - DNA, 20 bp, Artificial Sequence
  mmSKRIPTE0002373_Lef1_6
  gRNA
ttgaaaagcatacccccacg

SEQ ID NO: 131595 - DNA, 20 bp, Artificial Sequence
  mmSKRIPTE0002374_Lef1_7
  gRNA
gcggatcattgtaaccatcg

SEQ ID NO: 131596 - DNA, 20 bp, Artificial Sequence
  mmSKRIPTE0002375_Lef1_8
  gRNA
tacaggagtcgacttcaggt

SEQ ID NO: 131597 - DNA, 20 bp, Artificial Sequence
  mmSKRIPTE0002376_Lef1_9
  gRNA
gtacccaagcccatgcgaca

SEQ ID NO: 131598 - DNA, 20 bp, Artificial Sequence
  mmSKRIPTE0002377_Nkx3-2_1
  gRNA
gaataataaatagcgtcccg

SEQ ID NO: 131599 - DNA, 20 bp, Artificial Sequence
  mmSKRIPTE0002378_Nkx3-2_2
  gRNA
agaacctgtcagactcgcag

SEQ ID NO: 131600 - DNA, 20 bp, Artificial Sequence
  mmSKRIPTE0002379_Nkx3-2_3
  gRNA
aggccggcgagaattgtcaa

SEQ ID NO: 131601 - DNA, 20 bp, Artificial Sequence
  mmSKRIPTE0002380_Nkx3-2_4
  gRNA
gtcgctacaagaccaaacgc

SEQ ID NO: 131602 - DNA, 20 bp, Artificial Sequence
  mmSKRIPTE0002381_Nkx3-2_5
  gRNA
aggcgactgcagacgcggag

SEQ ID NO: 131603 - DNA, 20 bp, Artificial Sequence
  mmSKRIPTE0002382_Nkx3-2_6
  gRNA
cccgaaccagaacagccgtg

SEQ ID NO: 131604 - DNA, 20 bp, Artificial Sequence
  mmSKRIPTE0002383_Nkx3-2_7
  gRNA
tcagcgctacctgtccgggc

SEQ ID NO: 131605 - DNA, 20 bp, Artificial Sequence
  mmSKRIPTE0002384_Nkx3-2_8
  gRNA
gccgattatctcttcgcccg

SEQ ID NO: 131606 - DNA, 20 bp, Artificial Sequence
  mmSKRIPTE0002385_Nkx3-2_9
  gRNA
gcgcttctttcgcggtttag

SEQ ID NO: 131607 - DNA, 20 bp, Artificial Sequence
  mmSKRIPTE0002386_Oas3_1
  gRNA
ctcctggagtccatgtaccg

SEQ ID NO: 131608 - DNA, 20 bp, Artificial Sequence
  mmSKRIPTE0002387_Oas3_2
  gRNA
taggggtgaagatgccggaa

SEQ ID NO: 131609 - DNA, 20 bp, Artificial Sequence
  mmSKRIPTE0002388_Oas3_3
  gRNA
atgaggtctgtgtagacccg

SEQ ID NO: 131610 - DNA, 20 bp, Artificial Sequence
  mmSKRIPTE0002389_Oas3_4
  gRNA
gagaggggtcccatcccgca

SEQ ID NO: 131611 - DNA, 20 bp, Artificial Sequence
  mmSKRIPTE0002390_Oas3_5
  gRNA
tggatccagctgatccaacg

SEQ ID NO: 131612 - DNA, 20 bp, Artificial Sequence
  mmSKRIPTE0002391_Oas3_6
  gRNA
gacagatgccaatagctacg

SEQ ID NO: 131613 - DNA, 20 bp, Artificial Sequence
  mmSKRIPTE0002392_Oas3_7
  gRNA
ccaaccagagacccgtcaag

SEQ ID NO: 131614 - DNA, 20 bp, Artificial Sequence
  mmSKRIPTE0002393_Oas3_8
  gRNA
acctggcctgctatacacca

SEQ ID NO: 131615 - DNA, 20 bp, Artificial Sequence
  mmSKRIPTE0002394_Oas3_9
  gRNA
gtgattacagatgtgcctcg

SEQ ID NO: 131616 - DNA, 20 bp, Artificial Sequence
  mmSKRIPTE0002395_Hcar2_1
  gRNA
tcgaatttagagaaacggcg

SEQ ID NO: 131617 - DNA, 20 bp, Artificial Sequence
  mmSKRIPTE0002396_Hcar2_2
  gRNA
ccgagatgaaaacatcgcca

SEQ ID NO: 131618 - DNA, 20 bp, Artificial Sequence
  mmSKRIPTE0002397_Hcar2_3
  gRNA
atttggccgttcgttgaaca

SEQ ID NO: 131619 - DNA, 20 bp, Artificial Sequence
  mmSKRIPTE0002398_Hcar2_4
  gRNA
ctgacatgacataaagccga

SEQ ID NO: 131620 - DNA, 20 bp, Artificial Sequence
  mmSKRIPTE0002399_Hcar2_5
  gRNA
gttctgctcaaagtcacgga

SEQ ID NO: 131621 - DNA, 20 bp, Artificial Sequence
  mmSKRIPTE0002400_Hcar2_6
  gRNA
gaacaagatctccaaccgga

SEQ ID NO: 131622 - DNA, 20 bp, Artificial Sequence
  mmSKRIPTE0002401_Hcar2_7
  gRNA
aaagaaagccaggtccaccg

SEQ ID NO: 131623 - DNA, 20 bp, Artificial Sequence
  mmSKRIPTE0002402_Hcar2_8
  gRNA
actcgccttgagccttcgct

SEQ ID NO: 131624 - DNA, 20 bp, Artificial Sequence
  mmSKRIPTE0002403_Hcar2_9
  gRNA
gacaggctaggtaggaccct

SEQ ID NO: 131625 - DNA, 20 bp, Artificial Sequence
  mmSKRIPTE0002404_Zfp36_1
  gRNA
gatcgccggtatctggaccg

SEQ ID NO: 131626 - DNA, 20 bp, Artificial Sequence
  mmSKRIPTE0002405_Zfp36_2
  gRNA
aagcgggcgttgtcgctacg

SEQ ID NO: 131627 - DNA, 20 bp, Artificial Sequence
  mmSKRIPTE0002406_Zfp36_3
  gRNA
gacttctgcgaaccgacagt

SEQ ID NO: 131628 - DNA, 20 bp, Artificial Sequence
  mmSKRIPTE0002407_Zfp36_4
  gRNA
gctagtctgagaaggtacgg

SEQ ID NO: 131629 - DNA, 20 bp, Artificial Sequence
  mmSKRIPTE0002408_Zfp36_5
  gRNA
cgtgaagtgctttacaacag

SEQ ID NO: 131630 - DNA, 20 bp, Artificial Sequence
  mmSKRIPTE0002409_Zfp36_6
  gRNA
catgacctgtcatccgacca

SEQ ID NO: 131631 - DNA, 20 bp, Artificial Sequence
  mmSKRIPTE0002410_Zfp36_7
  gRNA
ggcctaagtttggtgcgtcg

SEQ ID NO: 131632 - DNA, 20 bp, Artificial Sequence
  mmSKRIPTE0002411_Zfp36_8
  gRNA
ctagctgatccatactgggt

SEQ ID NO: 131633 - DNA, 20 bp, Artificial Sequence
  mmSKRIPTE0002412_Zfp36_9
  gRNA
gactcgaagagaccctaacc

SEQ ID NO: 131634 - DNA, 20 bp, Artificial Sequence
  mmSKRIPTE0002413_Lrrk1_1
  gRNA
gagttcgagacactagagcg

SEQ ID NO: 131635 - DNA, 20 bp, Artificial Sequence
  mmSKRIPTE0002414_Lrrk1_2
  gRNA
ccgatgagtgacacgatgca

SEQ ID NO: 131636 - DNA, 20 bp, Artificial Sequence
  mmSKRIPTE0002415_Lrrk1_3
  gRNA
taggacgacagacgagcatg

SEQ ID NO: 131637 - DNA, 20 bp, Artificial Sequence
  mmSKRIPTE0002416_Lrrk1_4
  gRNA
cggtaggcacaggttaacgg

SEQ ID NO: 131638 - DNA, 20 bp, Artificial Sequence
  mmSKRIPTE0002417_Lrrk1_5
  gRNA
tctgccgtgcatcttcgtcg

SEQ ID NO: 131639 - DNA, 20 bp, Artificial Sequence
  mmSKRIPTE0002418_Lrrk1_6
  gRNA
taatgccccagcaggtaacg

SEQ ID NO: 131640 - DNA, 20 bp, Artificial Sequence
  mmSKRIPTE0002419_Lrrk1_7
  gRNA
catcctctaagggcgaggct

SEQ ID NO: 131641 - DNA, 20 bp, Artificial Sequence
  mmSKRIPTE0002420_Lrrk1_8
  gRNA
catacgaatgcctccagggt

SEQ ID NO: 131642 - DNA, 20 bp, Artificial Sequence
  mmSKRIPTE0002421_Lrrk1_9
  gRNA
acatgcccaagtgcaaatcg

SEQ ID NO: 131643 - DNA, 20 bp, Artificial Sequence
  mmSKRIPTE0002422_Cdkn1c_1
  gRNA
gctgcaccctccaatcgccg

SEQ ID NO: 131644 - DNA, 20 bp, Artificial Sequence
  mmSKRIPTE0002423_Cdkn1c_2
  gRNA
tcatctcagacgtttgcgcg

SEQ ID NO: 131645 - DNA, 20 bp, Artificial Sequence
  mmSKRIPTE0002424_Cdkn1c_3
  gRNA
cgtggtctacaggcccgaag

SEQ ID NO: 131646 - DNA, 20 bp, Artificial Sequence
  mmSKRIPTE0002425_Cdkn1c_4
  gRNA
taaacaaagctgacccgccg

SEQ ID NO: 131647 - DNA, 20 bp, Artificial Sequence
  mmSKRIPTE0002426_Cdkn1c_5
  gRNA
ccgtggcattaaagggcccg

SEQ ID NO: 131648 - DNA, 20 bp, Artificial Sequence
  mmSKRIPTE0002427_Cdkn1c_6
  gRNA
tcaataacccagcagttgcg

SEQ ID NO: 131649 - DNA, 20 bp, Artificial Sequence
  mmSKRIPTE0002428_Cdkn1c_7
  gRNA
ccgtccatcaccaatcagcc

SEQ ID NO: 131650 - DNA, 20 bp, Artificial Sequence
  mmSKRIPTE0002429_Cdkn1c_8
  gRNA
gtacacgtcggacatgccca

SEQ ID NO: 131651 - DNA, 20 bp, Artificial Sequence
  mmSKRIPTE0002430_Cdkn1c_9
  gRNA
gcgcgtataaaggggcgcag

SEQ ID NO: 131652 - DNA, 20 bp, Artificial Sequence
  mmSKRIPTE0002431_Casp3_1
  gRNA
tctcactcgcgttaacagga

SEQ ID NO: 131653 - DNA, 20 bp, Artificial Sequence
  mmSKRIPTE0002432_Casp3_2
  gRNA
aagcgcagtgtcctgcggcg

SEQ ID NO: 131654 - DNA, 20 bp, Artificial Sequence
  mmSKRIPTE0002433_Casp3_3
  gRNA
aaggccggcgtttaaaagga

SEQ ID NO: 131655 - DNA, 20 bp, Artificial Sequence
  mmSKRIPTE0002434_Casp3_4
  gRNA
cctaggaggcaaaaatacga

SEQ ID NO: 131656 - DNA, 20 bp, Artificial Sequence
  mmSKRIPTE0002435_Casp3_5
  gRNA
cgactggcgtgtgcgagatg

SEQ ID NO: 131657 - DNA, 20 bp, Artificial Sequence
  mmSKRIPTE0002436_Casp3_6
  gRNA
ccgcccaccgaagcttccga

SEQ ID NO: 131658 - DNA, 20 bp, Artificial Sequence
  mmSKRIPTE0002437_Casp3_7
  gRNA
aatgtcatctcgctctggta

SEQ ID NO: 131659 - DNA, 20 bp, Artificial Sequence
  mmSKRIPTE0002438_Casp3_8
  gRNA
ccaaaagagcgccagctccg

SEQ ID NO: 131660 - DNA, 20 bp, Artificial Sequence
  mmSKRIPTE0002439_Casp3_9
  gRNA
gatgtcttgtgtgctaacag

SEQ ID NO: 131661 - DNA, 20 bp, Artificial Sequence
  mmSKRIPTE0002440_Map2k1_1
  gRNA
gatgacgcggaaatacgtca

SEQ ID NO: 131662 - DNA, 20 bp, Artificial Sequence
  mmSKRIPTE0002441_Map2k1_2
  gRNA
cgcttcgccgacagccaatg

SEQ ID NO: 131663 - DNA, 20 bp, Artificial Sequence
  mmSKRIPTE0002442_Map2k1_3
  gRNA
cgtaggcctcgccgtccttg

SEQ ID NO: 131664 - DNA, 20 bp, Artificial Sequence
  mmSKRIPTE0002443_Map2k1_4
  gRNA
agtgtggatgatgcagcacg

SEQ ID NO: 131665 - DNA, 20 bp, Artificial Sequence
  mmSKRIPTE0002444_Map2k1_5
  gRNA
gatggtgtgcctataatggg

SEQ ID NO: 131666 - DNA, 20 bp, Artificial Sequence
  mmSKRIPTE0002445_Map2k1_6
  gRNA
gggcacgagatcctacatgt

SEQ ID NO: 131667 - DNA, 20 bp, Artificial Sequence
  mmSKRIPTE0002446_Map2k1_7
  gRNA
cacaaagccaatccacttag

SEQ ID NO: 131668 - DNA, 20 bp, Artificial Sequence
  mmSKRIPTE0002447_Map2k1_8
  gRNA
acattctagtgaactcacgt

SEQ ID NO: 131669 - DNA, 20 bp, Artificial Sequence
  mmSKRIPTE0002448_Map2k1_9
  gRNA
tagaggcctaggagacccgg

SEQ ID NO: 131670 - DNA, 20 bp, Artificial Sequence
  mmSKRIPTE0002449_Cadm1_1
  gRNA
atatcgatcatcaagttacg

SEQ ID NO: 131671 - DNA, 20 bp, Artificial Sequence
  mmSKRIPTE0002450_Cadm1_2
  gRNA
atggccatcatcagccgaag

SEQ ID NO: 131672 - DNA, 20 bp, Artificial Sequence
  mmSKRIPTE0002451_Cadm1_3
  gRNA
ggatcagtgccgcggccgaa

SEQ ID NO: 131673 - DNA, 20 bp, Artificial Sequence
  mmSKRIPTE0002452_Cadm1_4
  gRNA
gtgcattcatctcggcacag

SEQ ID NO: 131674 - DNA, 20 bp, Artificial Sequence
  mmSKRIPTE0002453_Cadm1_5
  gRNA
taacggtacttaccgctgtg

SEQ ID NO: 131675 - DNA, 20 bp, Artificial Sequence
  mmSKRIPTE0002454_Cadm1_6
  gRNA
attagcaaaaacatccgagg

SEQ ID NO: 131676 - DNA, 20 bp, Artificial Sequence
  mmSKRIPTE0002455_Cadm1_7
  gRNA
gagcgtggcaaggaaagtcg

SEQ ID NO: 131677 - DNA, 20 bp, Artificial Sequence
  mmSKRIPTE0002456_Cadm1_8
  gRNA
aactcaaatagggttcggca

SEQ ID NO: 131678 - DNA, 20 bp, Artificial Sequence
  mmSKRIPTE0002457_Cadm1_9
  gRNA
atgagaacgtgaagatactg

SEQ ID NO: 131679 - DNA, 20 bp, Artificial Sequence
  mmSKRIPTE0002458_Bcr_1
  gRNA
tctttcagaccccgtcgcaa

SEQ ID NO: 131680 - DNA, 20 bp, Artificial Sequence
  mmSKRIPTE0002459_Bcr_2
  gRNA
ccctctcagtgatagtaggt

SEQ ID NO: 131681 - DNA, 20 bp, Artificial Sequence
  mmSKRIPTE0002460_Bcr_3
  gRNA
aacggtgctcctgtactgcg

SEQ ID NO: 131682 - DNA, 20 bp, Artificial Sequence
  mmSKRIPTE0002461_Bcr_4
  gRNA
ttgtattcagtgccgcacag

SEQ ID NO: 131683 - DNA, 20 bp, Artificial Sequence
  mmSKRIPTE0002462_Bcr_5
  gRNA
ctgactatgagcgagccgag

SEQ ID NO: 131684 - DNA, 20 bp, Artificial Sequence
  mmSKRIPTE0002463_Bcr_6
  gRNA
agaatgcaggacctcctcgg

SEQ ID NO: 131685 - DNA, 20 bp, Artificial Sequence
  mmSKRIPTE0002464_Bcr_7
  gRNA
ggactgctgcgaattctgcg

SEQ ID NO: 131686 - DNA, 20 bp, Artificial Sequence
  mmSKRIPTE0002465_Bcr_8
  gRNA
gtctcttagatggggcaacg

SEQ ID NO: 131687 - DNA, 20 bp, Artificial Sequence
  mmSKRIPTE0002466_Bcr_9
  gRNA
tgggcggtcataacggactg

SEQ ID NO: 131688 - DNA, 20 bp, Artificial Sequence
  mmSKRIPTE0002467_Ptprq_1
  gRNA
tgaaggacgagagattaacg

SEQ ID NO: 131689 - DNA, 20 bp, Artificial Sequence
  mmSKRIPTE0002468_Ptprq_2
  gRNA
caaacagaagacaccgtgcg

SEQ ID NO: 131690 - DNA, 20 bp, Artificial Sequence
  mmSKRIPTE0002469_Ptprq_3
  gRNA
gggaaacgtagtagaagacg

SEQ ID NO: 131691 - DNA, 20 bp, Artificial Sequence
  mmSKRIPTE0002470_Ptprq_4
  gRNA
atgccatcagtattggcccg

SEQ ID NO: 131692 - DNA, 20 bp, Artificial Sequence
  mmSKRIPTE0002471_Ptprq_5
  gRNA
tgggatcattattgcctacg

SEQ ID NO: 131693 - DNA, 20 bp, Artificial Sequence
  mmSKRIPTE0002472_Ptprq_6
  gRNA
gcaggcgaatgactgtacgt

SEQ ID NO: 131694 - DNA, 20 bp, Artificial Sequence
  mmSKRIPTE0002473_Ptprq_7
  gRNA
tcctcctgaaaatgttcgcg

SEQ ID NO: 131695 - DNA, 20 bp, Artificial Sequence
  mmSKRIPTE0002474_Ptprq_8
  gRNA
caagagaagtaatagccacg

SEQ ID NO: 131696 - DNA, 20 bp, Artificial Sequence
  mmSKRIPTE0002475_Ptprq_9
  gRNA
gtgacacaggaaactaccgg

SEQ ID NO: 131697 - DNA, 20 bp, Artificial Sequence
  mmSKRIPTE0002476_Erbb2_1
  gRNA
gaacaacacagagatcggca

SEQ ID NO: 131698 - DNA, 20 bp, Artificial Sequence
  mmSKRIPTE0002477_Erbb2_2
  gRNA
caggattgaagcatcgagcg

SEQ ID NO: 131699 - DNA, 20 bp, Artificial Sequence
  mmSKRIPTE0002478_Erbb2_3
  gRNA
gggaccctagaaacgctcca

SEQ ID NO: 131700 - DNA, 20 bp, Artificial Sequence
  mmSKRIPTE0002479_Erbb2_4
  gRNA
tatcatttaatccacaggcg

SEQ ID NO: 131701 - DNA, 20 bp, Artificial Sequence
  mmSKRIPTE0002480_Erbb2_5
  gRNA
agggagtcgcaacttcatgt

SEQ ID NO: 131702 - DNA, 20 bp, Artificial Sequence
  mmSKRIPTE0002481_Erbb2_6
  gRNA
agacctgctatggatcggtg

SEQ ID NO: 131703 - DNA, 20 bp, Artificial Sequence
  mmSKRIPTE0002482_Erbb2_7
  gRNA
gcaggaccatccctattccg

SEQ ID NO: 131704 - DNA, 20 bp, Artificial Sequence
  mmSKRIPTE0002483_Erbb2_8
  gRNA
tgtgtggacctggacgaacg

SEQ ID NO: 131705 - DNA, 20 bp, Artificial Sequence
  mmSKRIPTE0002484_Erbb2_9
  gRNA
gggcatcgtagccttgatcg

SEQ ID NO: 131706 - DNA, 20 bp, Artificial Sequence
  mmSKRIPTE0002485_Csf3_1
  gRNA
gctcattaaacgttaacggt

SEQ ID NO: 131707 - DNA, 20 bp, Artificial Sequence
  mmSKRIPTE0002486_Csf3_2
  gRNA
agcttgcggataataaagtg

SEQ ID NO: 131708 - DNA, 20 bp, Artificial Sequence
  mmSKRIPTE0002487_Csf3_3
  gRNA
tgcactatggtcaggacgag

SEQ ID NO: 131709 - DNA, 20 bp, Artificial Sequence
  mmSKRIPTE0002488_Csf3_4
  gRNA
aaatacccgatagagcctgc

SEQ ID NO: 131710 - DNA, 20 bp, Artificial Sequence
  mmSKRIPTE0002489_Csf3_5
  gRNA
aaagccatcaaggccccggg

SEQ ID NO: 131711 - DNA, 20 bp, Artificial Sequence
  mmSKRIPTE0002490_Csf3_6
  gRNA
ctacaagctgtgtcaccccg

SEQ ID NO: 131712 - DNA, 20 bp, Artificial Sequence
  mmSKRIPTE0002491_Csf3_7
  gRNA
gacttaagcaggaagcttcg

SEQ ID NO: 131713 - DNA, 20 bp, Artificial Sequence
  mmSKRIPTE0002492_Csf3_8
  gRNA
tagtagagaatggcacccag

SEQ ID NO: 131714 - DNA, 20 bp, Artificial Sequence
  mmSKRIPTE0002493_Csf3_9
  gRNA
gagggggggacaagacgtca

SEQ ID NO: 131715 - DNA, 20 bp, Artificial Sequence
  mmSKRIPTE0002494_Map3k14_1
  gRNA
acaccccagatgcagcaccg

SEQ ID NO: 131716 - DNA, 20 bp, Artificial Sequence
  mmSKRIPTE0002495_Map3k14_2
  gRNA
gctgtcaaaaaggtatgccg

SEQ ID NO: 131717 - DNA, 20 bp, Artificial Sequence
  mmSKRIPTE0002496_Map3k14_3
  gRNA
gcaaagcccgaaaaaaacgt

SEQ ID NO: 131718 - DNA, 20 bp, Artificial Sequence
  mmSKRIPTE0002497_Map3k14_4
  gRNA
agagatcaccccgacccacg

SEQ ID NO: 131719 - DNA, 20 bp, Artificial Sequence
  mmSKRIPTE0002498_Map3k14_5
  gRNA
caacagtcatggggtatccg

SEQ ID NO: 131720 - DNA, 20 bp, Artificial Sequence
  mmSKRIPTE0002499_Map3k14_6
  gRNA
atgacacaccagcctcgggt

SEQ ID NO: 131721 - DNA, 20 bp, Artificial Sequence
  mmSKRIPTE0002500_Map3k14_7
  gRNA
cagggctaagaggtccgacg

SEQ ID NO: 131722 - DNA, 20 bp, Artificial Sequence
  mmSKRIPTE0002501_Map3k14_8
  gRNA
gacaccaggggactatacat

SEQ ID NO: 131723 - DNA, 20 bp, Artificial Sequence
  mmSKRIPTE0002502_Map3k14_9
  gRNA
ctaccggtactatgattgtg

SEQ ID NO: 131724 - DNA, 20 bp, Artificial Sequence
  mmSKRIPTE0002503_Gch1_1
  gRNA
cggccaatgaaaatatctcg

SEQ ID NO: 131725 - DNA, 20 bp, Artificial Sequence
  mmSKRIPTE0002504_Gch1_2
  gRNA
ataaaaagagaggcgcggcg

SEQ ID NO: 131726 - DNA, 20 bp, Artificial Sequence
  mmSKRIPTE0002505_Gch1_3
  gRNA
ttggtgcacctgactccccg

SEQ ID NO: 131727 - DNA, 20 bp, Artificial Sequence
  mmSKRIPTE0002506_Gch1_4
  gRNA
cagtgggcatagtctaacgt

SEQ ID NO: 131728 - DNA, 20 bp, Artificial Sequence
  mmSKRIPTE0002507_Gch1_5
  gRNA
aggagcctgaaagcacggcg

SEQ ID NO: 131729 - DNA, 20 bp, Artificial Sequence
  mmSKRIPTE0002508_Gch1_6
  gRNA
ctcacaactgccgagagcat

SEQ ID NO: 131730 - DNA, 20 bp, Artificial Sequence
  mmSKRIPTE0002509_Gch1_7
  gRNA
ctgtggccgttggtgcacag

SEQ ID NO: 131731 - DNA, 20 bp, Artificial Sequence
  mmSKRIPTE0002510_Gch1_8
  gRNA
gtgtagctgtccgagaagtg

SEQ ID NO: 131732 - DNA, 20 bp, Artificial Sequence
  mmSKRIPTE0002511_Gch1_9
  gRNA
tagggtgctaacaagcgctg

SEQ ID NO: 131733 - DNA, 20 bp, Artificial Sequence
  mmSKRIPTE0002512_Tagap_1
  gRNA
aagcgcggaaccctacctgt

SEQ ID NO: 131734 - DNA, 20 bp, Artificial Sequence
  mmSKRIPTE0002513_Tagap_2
  gRNA
ggtctcgtagggtctcggaa

SEQ ID NO: 131735 - DNA, 20 bp, Artificial Sequence
  mmSKRIPTE0002514_Tagap_3
  gRNA
aagctgataagcagtctcga

SEQ ID NO: 131736 - DNA, 20 bp, Artificial Sequence
  mmSKRIPTE0002515_Tagap_4
  gRNA
atcccaggttccgatagaca

SEQ ID NO: 131737 - DNA, 20 bp, Artificial Sequence
  mmSKRIPTE0002516_Tagap_5
  gRNA
ccagtgcccagggacacacg

SEQ ID NO: 131738 - DNA, 20 bp, Artificial Sequence
  mmSKRIPTE0002517_Tagap_6
  gRNA
gaggggggtccactacctcg

SEQ ID NO: 131739 - DNA, 20 bp, Artificial Sequence
  mmSKRIPTE0002518_Tagap_7
  gRNA
ttaaaggtccttcaacggaa

SEQ ID NO: 131740 - DNA, 20 bp, Artificial Sequence
  mmSKRIPTE0002519_Tagap_8
  gRNA
tccccacagatgatcgacaa

SEQ ID NO: 131741 - DNA, 20 bp, Artificial Sequence
  mmSKRIPTE0002520_Tagap_9
  gRNA
cttactatgctggttacggg

SEQ ID NO: 131742 - DNA, 20 bp, Artificial Sequence
  mmSKRIPTE0002521_Epas1_1
  gRNA
agaaatcccgtgatgccgcg

SEQ ID NO: 131743 - DNA, 20 bp, Artificial Sequence
  mmSKRIPTE0002522_Epas1_2
  gRNA
tttgcataaacgccatttag

SEQ ID NO: 131744 - DNA, 20 bp, Artificial Sequence
  mmSKRIPTE0002523_Epas1_3
  gRNA
cagcttcgaacaccaccgcg

SEQ ID NO: 131745 - DNA, 20 bp, Artificial Sequence
  mmSKRIPTE0002524_Epas1_4
  gRNA
cggactccggagctgtacac

SEQ ID NO: 131746 - DNA, 20 bp, Artificial Sequence
  mmSKRIPTE0002525_Epas1_5
  gRNA
ggggctttgagtaagcgagt

SEQ ID NO: 131747 - DNA, 20 bp, Artificial Sequence
  mmSKRIPTE0002526_Epas1_6
  gRNA
tggggatagacactaacggg

SEQ ID NO: 131748 - DNA, 20 bp, Artificial Sequence
  mmSKRIPTE0002527_Epas1_7
  gRNA
actgattggttaccaccccg

SEQ ID NO: 131749 - DNA, 20 bp, Artificial Sequence
  mmSKRIPTE0002528_Epas1_8
  gRNA
agttcactgaagtccgtctg

SEQ ID NO: 131750 - DNA, 20 bp, Artificial Sequence
  mmSKRIPTE0002529_Epas1_9
  gRNA
atgcctgatgtcacactacg

SEQ ID NO: 131751 - DNA, 20 bp, Artificial Sequence
  mmSKRIPTE0002530_Chd7_1
  gRNA
taatattccttggcgctgtg

SEQ ID NO: 131752 - DNA, 20 bp, Artificial Sequence
  mmSKRIPTE0002531_Chd7_2
  gRNA
ccctgctaaatcattccggt

SEQ ID NO: 131753 - DNA, 20 bp, Artificial Sequence
  mmSKRIPTE0002532_Chd7_3
  gRNA
gatgaaagttcattgtcgag

SEQ ID NO: 131754 - DNA, 20 bp, Artificial Sequence
  mmSKRIPTE0002533_Chd7_4
  gRNA
ggtacgacacctccgcacag

SEQ ID NO: 131755 - DNA, 20 bp, Artificial Sequence
  mmSKRIPTE0002534_Chd7_5
  gRNA
ttattgacactcctcgagtg

SEQ ID NO: 131756 - DNA, 20 bp, Artificial Sequence
  mmSKRIPTE0002535_Chd7_6
  gRNA
aattgttcctcctttcagcg

SEQ ID NO: 131757 - DNA, 20 bp, Artificial Sequence
  mmSKRIPTE0002536_Chd7_7
  gRNA
gtgggattcccgtcaaacag

SEQ ID NO: 131758 - DNA, 20 bp, Artificial Sequence
  mmSKRIPTE0002537_Chd7_8
  gRNA
ctggtacctgaacggcccgg

SEQ ID NO: 131759 - DNA, 20 bp, Artificial Sequence
  mmSKRIPTE0002538_Chd7_9
  gRNA
gtggactgaactcaccgtga

SEQ ID NO: 131760 - DNA, 20 bp, Artificial Sequence
  mmSKRIPTE0002539_Trim32_1
  gRNA
gatacgatagttgccccggt

SEQ ID NO: 131761 - DNA, 20 bp, Artificial Sequence
  mmSKRIPTE0002540_Trim32_2
  gRNA
tggcagaaattcccgtcaag

SEQ ID NO: 131762 - DNA, 20 bp, Artificial Sequence
  mmSKRIPTE0002541_Trim32_3
  gRNA
gagcttcgaccaacaatgtg

SEQ ID NO: 131763 - DNA, 20 bp, Artificial Sequence
  mmSKRIPTE0002542_Trim32_4
  gRNA
tacggcaccatcaacaacga

SEQ ID NO: 131764 - DNA, 20 bp, Artificial Sequence
  mmSKRIPTE0002543_Trim32_5
  gRNA
tggcagcggtggactcgcgt

SEQ ID NO: 131765 - DNA, 20 bp, Artificial Sequence
  mmSKRIPTE0002544_Trim32_6
  gRNA
tttgtggtgactgacgtgga

SEQ ID NO: 131766 - DNA, 20 bp, Artificial Sequence
  mmSKRIPTE0002545_Trim32_7
  gRNA
gcatcgccctcacacccaag

SEQ ID NO: 131767 - DNA, 20 bp, Artificial Sequence
  mmSKRIPTE0002546_Trim32_8
  gRNA
atttggggactggatcggag

SEQ ID NO: 131768 - DNA, 20 bp, Artificial Sequence
  mmSKRIPTE0002547_Trim32_9
  gRNA
ctgcacacttccggtcaagg

SEQ ID NO: 131769 - DNA, 20 bp, Artificial Sequence
  mmSKRIPTE0002548_Tnfrsf8_1
  gRNA
cattagaagtgatttcaccg

SEQ ID NO: 131770 - DNA, 20 bp, Artificial Sequence
  mmSKRIPTE0002549_Tnfrsf8_2
  gRNA
atgtgtgcagcatccgttcg

SEQ ID NO: 131771 - DNA, 20 bp, Artificial Sequence
  mmSKRIPTE0002550_Tnfrsf8_3
  gRNA
agatggtcccagattcggga

SEQ ID NO: 131772 - DNA, 20 bp, Artificial Sequence
  mmSKRIPTE0002551_Tnfrsf8_4
  gRNA
ggccagagtgacacttcgtg

SEQ ID NO: 131773 - DNA, 20 bp, Artificial Sequence
  mmSKRIPTE0002552_Tnfrsf8_5
  gRNA
aagccagaatctctgtctcg

SEQ ID NO: 131774 - DNA, 20 bp, Artificial Sequence
  mmSKRIPTE0002553_Tnfrsf8_6
  gRNA
gagcgccctactcaccgcag

SEQ ID NO: 131775 - DNA, 20 bp, Artificial Sequence
  mmSKRIPTE0002554_Tnfrsf8_7
  gRNA
ttagggctgaacccgaagaa

SEQ ID NO: 131776 - DNA, 20 bp, Artificial Sequence
  mmSKRIPTE0002555_Tnfrsf8_8
  gRNA
agatcctggtctaatcatgt

SEQ ID NO: 131777 - DNA, 20 bp, Artificial Sequence
  mmSKRIPTE0002556_Tnfrsf8_9
  gRNA
gtcacctagtaagtgtcttg

SEQ ID NO: 131778 - DNA, 20 bp, Artificial Sequence
  mmSKRIPTE0002557_Serpine1_1
  gRNA
agtcactgatcatacctaag

SEQ ID NO: 131779 - DNA, 20 bp, Artificial Sequence
  mmSKRIPTE0002558_Serpine1_2
  gRNA
ctggttatccaattgcattg

SEQ ID NO: 131780 - DNA, 20 bp, Artificial Sequence
  mmSKRIPTE0002559_Serpine1_3
  gRNA
ggtaaacgagagcggcacag

SEQ ID NO: 131781 - DNA, 20 bp, Artificial Sequence
  mmSKRIPTE0002560_Serpine1_4
  gRNA
ccatctgggaaactccgcaa

SEQ ID NO: 131782 - DNA, 20 bp, Artificial Sequence
  mmSKRIPTE0002561_Serpine1_5
  gRNA
gcacctttgaatactcaggt

SEQ ID NO: 131783 - DNA, 20 bp, Artificial Sequence
  mmSKRIPTE0002562_Serpine1_6
  gRNA
cccatcacgaggctacccag

SEQ ID NO: 131784 - DNA, 20 bp, Artificial Sequence
  mmSKRIPTE0002563_Serpine1_7
  gRNA
attatttaaaggactctatg

SEQ ID NO: 131785 - DNA, 20 bp, Artificial Sequence
  mmSKRIPTE0002564_Serpine1_8
  gRNA
ggctcaagaaaacgtctacg

SEQ ID NO: 131786 - DNA, 20 bp, Artificial Sequence
  mmSKRIPTE0002565_Serpine1_9
  gRNA
cgtcatactcgagcccatcg

SEQ ID NO: 131787 - DNA, 20 bp, Artificial Sequence
  mmSKRIPTE0002566_Abcc9_1
  gRNA
tcgataatggatcaagtccg

SEQ ID NO: 131788 - DNA, 20 bp, Artificial Sequence
  mmSKRIPTE0002567_Abcc9_2
  gRNA
tttagacactgtaaccaacg

SEQ ID NO: 131789 - DNA, 20 bp, Artificial Sequence
  mmSKRIPTE0002568_Abcc9_3
  gRNA
caccatacaggataaccatg

SEQ ID NO: 131790 - DNA, 20 bp, Artificial Sequence
  mmSKRIPTE0002569_Abcc9_4
  gRNA
tccatgcgtttaccctccag

SEQ ID NO: 131791 - DNA, 20 bp, Artificial Sequence
  mmSKRIPTE0002570_Abcc9_5
  gRNA
aatgttatgataatagacga

SEQ ID NO: 131792 - DNA, 20 bp, Artificial Sequence
  mmSKRIPTE0002571_Abcc9_6
  gRNA
ctgctgcgtgaattgtaaag

SEQ ID NO: 131793 - DNA, 20 bp, Artificial Sequence
  mmSKRIPTE0002572_Abcc9_7
  gRNA
catgtttgtgagatagcgga

SEQ ID NO: 131794 - DNA, 20 bp, Artificial Sequence
  mmSKRIPTE0002573_Abcc9_8
  gRNA
gaaaccgaatggttctttcg

SEQ ID NO: 131795 - DNA, 20 bp, Artificial Sequence
  mmSKRIPTE0002574_Abcc9_9
  gRNA
ctatggcgccaacagaggat

SEQ ID NO: 131796 - DNA, 20 bp, Artificial Sequence
  mmSKRIPTE0002575_Myo9b_1
  gRNA
gatgccgtaggtctagtggc

SEQ ID NO: 131797 - DNA, 20 bp, Artificial Sequence
  mmSKRIPTE0002576_Myo9b_2
  gRNA
ccctatccacgctatcaccg

SEQ ID NO: 131798 - DNA, 20 bp, Artificial Sequence
  mmSKRIPTE0002577_Myo9b_3
  gRNA
actgtactcacatatgcgcg

SEQ ID NO: 131799 - DNA, 20 bp, Artificial Sequence
  mmSKRIPTE0002578_Myo9b_4
  gRNA
ccctggcctgctgatactaa

SEQ ID NO: 131800 - DNA, 20 bp, Artificial Sequence
  mmSKRIPTE0002579_Myo9b_5
  gRNA
tgataggagaactgtaggcg

SEQ ID NO: 131801 - DNA, 20 bp, Artificial Sequence
  mmSKRIPTE0002580_Myo9b_6
  gRNA
ggagttgcaagacctttggt

SEQ ID NO: 131802 - DNA, 20 bp, Artificial Sequence
  mmSKRIPTE0002581_Myo9b_7
  gRNA
caccagagatgacgatacac

SEQ ID NO: 131803 - DNA, 20 bp, Artificial Sequence
  mmSKRIPTE0002582_Myo9b_8
  gRNA
ctacatgcggcctgacatcg

SEQ ID NO: 131804 - DNA, 20 bp, Artificial Sequence
  mmSKRIPTE0002583_Myo9b_9
  gRNA
gatcccgcctactctctatg

SEQ ID NO: 131805 - DNA, 20 bp, Artificial Sequence
  mmSKRIPTE0002584_Fli1_1
  gRNA
cctgttacatatcccccgga

SEQ ID NO: 131806 - DNA, 20 bp, Artificial Sequence
  mmSKRIPTE0002585_Fli1_2
  gRNA
agaaaccttactcctcggta

SEQ ID NO: 131807 - DNA, 20 bp, Artificial Sequence
  mmSKRIPTE0002586_Fli1_3
  gRNA
ggatcaggataggttccacg

SEQ ID NO: 131808 - DNA, 20 bp, Artificial Sequence
  mmSKRIPTE0002587_Fli1_4
  gRNA
cccttcagattagcccggcg

SEQ ID NO: 131809 - DNA, 20 bp, Artificial Sequence
  mmSKRIPTE0002588_Fli1_5
  gRNA
attactcgtctacgttgact

SEQ ID NO: 131810 - DNA, 20 bp, Artificial Sequence
  mmSKRIPTE0002589_Fli1_6
  gRNA
tagagcagggtcgtccaagg

SEQ ID NO: 131811 - DNA, 20 bp, Artificial Sequence
  mmSKRIPTE0002590_Fli1_7
  gRNA
aatccacatgtgcattcacg

SEQ ID NO: 131812 - DNA, 20 bp, Artificial Sequence
  mmSKRIPTE0002591_Fli1_8
  gRNA
acttcactttgcgatcgggg

SEQ ID NO: 131813 - DNA, 20 bp, Artificial Sequence
  mmSKRIPTE0002592_Fli1_9
  gRNA
actacacaaatccagacggt

SEQ ID NO: 131814 - DNA, 20 bp, Artificial Sequence
  mmSKRIPTE0002593_Smad3_1
  gRNA
gcggctctactacatcggag

SEQ ID NO: 131815 - DNA, 20 bp, Artificial Sequence
  mmSKRIPTE0002594_Smad3_2
  gRNA
gtacagccttgatgacgatg

SEQ ID NO: 131816 - DNA, 20 bp, Artificial Sequence
  mmSKRIPTE0002595_Smad3_3
  gRNA
atgaaccacagcatggacgc

SEQ ID NO: 131817 - DNA, 20 bp, Artificial Sequence
  mmSKRIPTE0002596_Smad3_4
  gRNA
gccaagaaaaacatcgttag

SEQ ID NO: 131818 - DNA, 20 bp, Artificial Sequence
  mmSKRIPTE0002597_Smad3_5
  gRNA
actttgtgttcctgccgcag

SEQ ID NO: 131819 - DNA, 20 bp, Artificial Sequence
  mmSKRIPTE0002598_Smad3_6
  gRNA
tgggcgagacgcgacatgtg

SEQ ID NO: 131820 - DNA, 20 bp, Artificial Sequence
  mmSKRIPTE0002599_Smad3_7
  gRNA
acgacatggctggcaccgaa

SEQ ID NO: 131821 - DNA, 20 bp, Artificial Sequence
  mmSKRIPTE0002600_Smad3_8
  gRNA
ccaacacagcctatacatca

SEQ ID NO: 131822 - DNA, 20 bp, Artificial Sequence
  mmSKRIPTE0002601_Smad3_9
  gRNA
catactacggtcccacccag

SEQ ID NO: 131823 - DNA, 20 bp, Artificial Sequence
  mmSKRIPTE0002602_Onecut1_1
  gRNA
ttgcatgtagagttcgacgt

SEQ ID NO: 131824 - DNA, 20 bp, Artificial Sequence
  mmSKRIPTE0002603_Onecut1_2
  gRNA
ccactatgctcatcccggcg

SEQ ID NO: 131825 - DNA, 20 bp, Artificial Sequence
  mmSKRIPTE0002604_Onecut1_3
  gRNA
agcgggctgcaacatcgatg

SEQ ID NO: 131826 - DNA, 20 bp, Artificial Sequence
  mmSKRIPTE0002605_Onecut1_4
  gRNA
ataaatacccgaccgcaagg

SEQ ID NO: 131827 - DNA, 20 bp, Artificial Sequence
  mmSKRIPTE0002606_Onecut1_5
  gRNA
gctgtgcgttcatcgtgatg

SEQ ID NO: 131828 - DNA, 20 bp, Artificial Sequence
  mmSKRIPTE0002607_Onecut1_6
  gRNA
tgccatgctcggtcgccacg

SEQ ID NO: 131829 - DNA, 20 bp, Artificial Sequence
  mmSKRIPTE0002608_Onecut1_7
  gRNA
agggaacttgtcggacacgg

SEQ ID NO: 131830 - DNA, 20 bp, Artificial Sequence
  mmSKRIPTE0002609_Onecut1_8
  gRNA
acgccatgcccatggaacgc

SEQ ID NO: 131831 - DNA, 20 bp, Artificial Sequence
  mmSKRIPTE0002610_Onecut1_9
  gRNA
accacggactagtacctcgg

SEQ ID NO: 131832 - DNA, 20 bp, Artificial Sequence
  mmSKRIPTE0002611_Nos2_1
  gRNA
cgacccgtccacagtatgtg

SEQ ID NO: 131833 - DNA, 20 bp, Artificial Sequence
  mmSKRIPTE0002612_Nos2_2
  gRNA
acccactcttcgcttactag

SEQ ID NO: 131834 - DNA, 20 bp, Artificial Sequence
  mmSKRIPTE0002613_Nos2_3
  gRNA
gcagagttcaccgatcagag

SEQ ID NO: 131835 - DNA, 20 bp, Artificial Sequence
  mmSKRIPTE0002614_Nos2_4
  gRNA
catctggttacaaggtgtcg

SEQ ID NO: 131836 - DNA, 20 bp, Artificial Sequence
  mmSKRIPTE0002615_Nos2_5
  gRNA
gtggtcacctaccgcacccg

SEQ ID NO: 131837 - DNA, 20 bp, Artificial Sequence
  mmSKRIPTE0002616_Nos2_6
  gRNA
catttgcggagatgtgcgca

SEQ ID NO: 131838 - DNA, 20 bp, Artificial Sequence
  mmSKRIPTE0002617_Nos2_7
  gRNA
ctaaacctttatgggccgag

SEQ ID NO: 131839 - DNA, 20 bp, Artificial Sequence
  mmSKRIPTE0002618_Nos2_8
  gRNA
taactatcaagaccaacaag

SEQ ID NO: 131840 - DNA, 20 bp, Artificial Sequence
  mmSKRIPTE0002619_Nos2_9
  gRNA
gaacccgtaaagcttccctc

SEQ ID NO: 131841 - DNA, 20 bp, Artificial Sequence
  mmSKRIPTE0002620_Rab3b_1
  gRNA
taggcgcctccaagacgacg

SEQ ID NO: 131842 - DNA, 20 bp, Artificial Sequence
  mmSKRIPTE0002621_Rab3b_2
  gRNA
gatactaactgcaggttacg

SEQ ID NO: 131843 - DNA, 20 bp, Artificial Sequence
  mmSKRIPTE0002622_Rab3b_3
  gRNA
tgatcccaagaactcgactg

SEQ ID NO: 131844 - DNA, 20 bp, Artificial Sequence
  mmSKRIPTE0002623_Rab3b_4
  gRNA
ggcgagccaccatactcggt

SEQ ID NO: 131845 - DNA, 20 bp, Artificial Sequence
  mmSKRIPTE0002624_Rab3b_5
  gRNA
tagttatgttgattgcattg

SEQ ID NO: 131846 - DNA, 20 bp, Artificial Sequence
  mmSKRIPTE0002625_Rab3b_6
  gRNA
ccatctgcagagaaccgcag

SEQ ID NO: 131847 - DNA, 20 bp, Artificial Sequence
  mmSKRIPTE0002626_Rab3b_7
  gRNA
agaactgctcttgttagaca

SEQ ID NO: 131848 - DNA, 20 bp, Artificial Sequence
  mmSKRIPTE0002627_Rab3b_8
  gRNA
tagaactagttgtcaataca

SEQ ID NO: 131849 - DNA, 20 bp, Artificial Sequence
  mmSKRIPTE0002628_Rab3b_9
  gRNA
tcagattaagacctactcct

SEQ ID NO: 131850 - DNA, 20 bp, Artificial Sequence
  mmSKRIPTE0002629_Nme2_1
  gRNA
tccgactccaaaaggcgacg

SEQ ID NO: 131851 - DNA, 20 bp, Artificial Sequence
  mmSKRIPTE0002630_Nme2_2
  gRNA
cattggcgaacggatcggaa

SEQ ID NO: 131852 - DNA, 20 bp, Artificial Sequence
  mmSKRIPTE0002631_Nme2_3
  gRNA
agtgtgatactgactgttcg

SEQ ID NO: 131853 - DNA, 20 bp, Artificial Sequence
  mmSKRIPTE0002632_Nme2_4
  gRNA
cgaagggcgttgttacccga

SEQ ID NO: 131854 - DNA, 20 bp, Artificial Sequence
  mmSKRIPTE0002633_Nme2_5
  gRNA
agaacgaccaccagccggcg

SEQ ID NO: 131855 - DNA, 20 bp, Artificial Sequence
  mmSKRIPTE0002634_Nme2_6
  gRNA
catgaaaccgacacttattg

SEQ ID NO: 131856 - DNA, 20 bp, Artificial Sequence
  mmSKRIPTE0002635_Nme2_7
  gRNA
gaggtcaaaaggattctcgt

SEQ ID NO: 131857 - DNA, 20 bp, Artificial Sequence
  mmSKRIPTE0002636_Nme2_8
  gRNA
tttattgaactaccaaacct

SEQ ID NO: 131858 - DNA, 20 bp, Artificial Sequence
  mmSKRIPTE0002637_Nme2_9
  gRNA
tagccttaccgaaagccggt

SEQ ID NO: 131859 - DNA, 20 bp, Artificial Sequence
  mmSKRIPTE0002638_Stat5a_1
  gRNA
agagatactacaactgacgt

SEQ ID NO: 131860 - DNA, 20 bp, Artificial Sequence
  mmSKRIPTE0002639_Stat5a_2
  gRNA
agtggtcggtcttgtaagcg

SEQ ID NO: 131861 - DNA, 20 bp, Artificial Sequence
  mmSKRIPTE0002640_Stat5a_3
  gRNA
tgtcagttcttgcgccaggg

SEQ ID NO: 131862 - DNA, 20 bp, Artificial Sequence
  mmSKRIPTE0002641_Stat5a_4
  gRNA
acactccccataatcaggag

SEQ ID NO: 131863 - DNA, 20 bp, Artificial Sequence
  mmSKRIPTE0002642_Stat5a_5
  gRNA
agcctgaggacgctctatgg

SEQ ID NO: 131864 - DNA, 20 bp, Artificial Sequence
  mmSKRIPTE0002643_Stat5a_6
  gRNA
atcaagcgcgccgacaggcg

SEQ ID NO: 131865 - DNA, 20 bp, Artificial Sequence
  mmSKRIPTE0002644_Stat5a_7
  gRNA
gcacggtggcagtagcattg

SEQ ID NO: 131866 - DNA, 20 bp, Artificial Sequence
  mmSKRIPTE0002645_Stat5a_8
  gRNA
ggaccccacaaagcacccgt

SEQ ID NO: 131867 - DNA, 20 bp, Artificial Sequence
  mmSKRIPTE0002646_Stat5a_9
  gRNA
aggcagtgtatgtcacgctg

SEQ ID NO: 131868 - DNA, 20 bp, Artificial Sequence
  mmSKRIPTE0002647_Csk_1
  gRNA
tcggcaatacaggtatcgtg

SEQ ID NO: 131869 - DNA, 20 bp, Artificial Sequence
  mmSKRIPTE0002648_Csk_2
  gRNA
tcacacgggagcaggccgag

SEQ ID NO: 131870 - DNA, 20 bp, Artificial Sequence
  mmSKRIPTE0002649_Csk_3
  gRNA
ctgcaaaaacgtgggccgtg

SEQ ID NO: 131871 - DNA, 20 bp, Artificial Sequence
  mmSKRIPTE0002650_Csk_4
  gRNA
cgagggacgacgtccttcag

SEQ ID NO: 131872 - DNA, 20 bp, Artificial Sequence
  mmSKRIPTE0002651_Csk_5
  gRNA
tcacctcgtagactgcgggc

SEQ ID NO: 131873 - DNA, 20 bp, Artificial Sequence
  mmSKRIPTE0002652_Csk_6
  gRNA
agttggtgctttcccgcacg

SEQ ID NO: 131874 - DNA, 20 bp, Artificial Sequence
  mmSKRIPTE0002653_Csk_7
  gRNA
cactacaccacagatgccga

SEQ ID NO: 131875 - DNA, 20 bp, Artificial Sequence
  mmSKRIPTE0002654_Csk_8
  gRNA
aggctgaggagaacctacct

SEQ ID NO: 131876 - DNA, 20 bp, Artificial Sequence
  mmSKRIPTE0002655_Csk_9
  gRNA
cagtccagctcacgtcatga

SEQ ID NO: 131877 - DNA, 20 bp, Artificial Sequence
  mmSKRIPTE0002656_Cd276_1
  gRNA
gtgcaggataggtagcgcta

SEQ ID NO: 131878 - DNA, 20 bp, Artificial Sequence
  mmSKRIPTE0002657_Cd276_2
  gRNA
gggacaaacccattcgttgg

SEQ ID NO: 131879 - DNA, 20 bp, Artificial Sequence
  mmSKRIPTE0002658_Cd276_3
  gRNA
gcgcgtccgagtaaccgacg

SEQ ID NO: 131880 - DNA, 20 bp, Artificial Sequence
  mmSKRIPTE0002659_Cd276_4
  gRNA
caccatcgaagtaccagggg

SEQ ID NO: 131881 - DNA, 20 bp, Artificial Sequence
  mmSKRIPTE0002660_Cd276_5
  gRNA
ccaacaaggacctacgtcca

SEQ ID NO: 131882 - DNA, 20 bp, Artificial Sequence
  mmSKRIPTE0002661_Cd276_6
  gRNA
acgactctggaggaacaccg

SEQ ID NO: 131883 - DNA, 20 bp, Artificial Sequence
  mmSKRIPTE0002662_Cd276_7
  gRNA
acgatacacgaaccatcctg

SEQ ID NO: 131884 - DNA, 20 bp, Artificial Sequence
  mmSKRIPTE0002663_Cd276_8
  gRNA
tgcaaggcaatgcgtccttg

SEQ ID NO: 131885 - DNA, 20 bp, Artificial Sequence
  mmSKRIPTE0002664_Cd276_9
  gRNA
ttgttctacggtgtgaacag

SEQ ID NO: 131886 - DNA, 20 bp, Artificial Sequence
  mmSKRIPTE0002665_Kdm5d_1
  gRNA
ttgccgaatatgctctcgtg

SEQ ID NO: 131887 - DNA, 20 bp, Artificial Sequence
  mmSKRIPTE0002666_Kdm5d_2
  gRNA
ctatatagccaagaggatcg

SEQ ID NO: 131888 - DNA, 20 bp, Artificial Sequence
  mmSKRIPTE0002667_Kdm5d_3
  gRNA
ggaattgcctactcactgcg

SEQ ID NO: 131889 - DNA, 20 bp, Artificial Sequence
  mmSKRIPTE0002668_Kdm5d_4
  gRNA
tcagtctggagctaatcttg

SEQ ID NO: 131890 - DNA, 20 bp, Artificial Sequence
  mmSKRIPTE0002669_Kdm5d_5
  gRNA
cttcatgttcgctcaaaacg

SEQ ID NO: 131891 - DNA, 20 bp, Artificial Sequence
  mmSKRIPTE0002670_Kdm5d_6
  gRNA
aagcaaataccagtgaacca

SEQ ID NO: 131892 - DNA, 20 bp, Artificial Sequence
  mmSKRIPTE0002671_Kdm5d_7
  gRNA
ttcagttgctacagtagacg

SEQ ID NO: 131893 - DNA, 20 bp, Artificial Sequence
  mmSKRIPTE0002672_Kdm5d_8
  gRNA
ctggtatgctactccttgtg

SEQ ID NO: 131894 - DNA, 20 bp, Artificial Sequence
  mmSKRIPTE0002673_Kdm5d_9
  gRNA
ccttcactacaatagttgca

SEQ ID NO: 131895 - DNA, 20 bp, Artificial Sequence
  mmSKRIPTE0002674_Il4_1
  gRNA
tgcctggattcatcggtaag

SEQ ID NO: 131896 - DNA, 20 bp, Artificial Sequence
  mmSKRIPTE0002675_Il4_2
  gRNA
accatccggatcgagccggg

SEQ ID NO: 131897 - DNA, 20 bp, Artificial Sequence
  mmSKRIPTE0002676_Il4_3
  gRNA
ccaaagtcttgacttaccag

SEQ ID NO: 131898 - DNA, 20 bp, Artificial Sequence
  mmSKRIPTE0002677_Il4_4
  gRNA
agcaggatgaatcctatcca

SEQ ID NO: 131899 - DNA, 20 bp, Artificial Sequence
  mmSKRIPTE0002678_Il4_5
  gRNA
tgcagcaccgaagccacggt

SEQ ID NO: 131900 - DNA, 20 bp, Artificial Sequence
  mmSKRIPTE0002679_Il4_6
  gRNA
actctcatggaacgttctag

SEQ ID NO: 131901 - DNA, 20 bp, Artificial Sequence
  mmSKRIPTE0002680_Il4_7
  gRNA
ttattcccatgagcacacct

SEQ ID NO: 131902 - DNA, 20 bp, Artificial Sequence
  mmSKRIPTE0002681_Il4_8
  gRNA
ctcatgacagccaaaacgcg

SEQ ID NO: 131903 - DNA, 20 bp, Artificial Sequence
  mmSKRIPTE0002682_Il4_9
  gRNA
cagagagtgagctcgtctgt

SEQ ID NO: 131904 - DNA, 20 bp, Artificial Sequence
  mmSKRIPTE0002683_Stat5b_1
  gRNA
tagatgtgttggctgctgcg

SEQ ID NO: 131905 - DNA, 20 bp, Artificial Sequence
  mmSKRIPTE0002684_Stat5b_2
  gRNA
ctgcagcttcatcgccctcg

SEQ ID NO: 131906 - DNA, 20 bp, Artificial Sequence
  mmSKRIPTE0002685_Stat5b_3
  gRNA
caagaggtctgaccgccgtg

SEQ ID NO: 131907 - DNA, 20 bp, Artificial Sequence
  mmSKRIPTE0002686_Stat5b_4
  gRNA
tttaagtctagacgtcaccc

SEQ ID NO: 131908 - DNA, 20 bp, Artificial Sequence
  mmSKRIPTE0002687_Stat5b_5
  gRNA
gtggcaagtagggggcaccg

SEQ ID NO: 131909 - DNA, 20 bp, Artificial Sequence
  mmSKRIPTE0002688_Stat5b_6
  gRNA
aagacacgatggacgtggcg

SEQ ID NO: 131910 - DNA, 20 bp, Artificial Sequence
  mmSKRIPTE0002689_Stat5b_7
  gRNA
catttagccaacttatgtcg

SEQ ID NO: 131911 - DNA, 20 bp, Artificial Sequence
  mmSKRIPTE0002690_Stat5b_8
  gRNA
aatgccacatgtgagaatcg

SEQ ID NO: 131912 - DNA, 20 bp, Artificial Sequence
  mmSKRIPTE0002691_Stat5b_9
  gRNA
attgcgtactagctgcggag

SEQ ID NO: 131913 - DNA, 20 bp, Artificial Sequence
  mmSKRIPTE0002692_Prkcd_1
  gRNA
cgttaggctccaccctatgg

SEQ ID NO: 131914 - DNA, 20 bp, Artificial Sequence
  mmSKRIPTE0002693_Prkcd_2
  gRNA
tgtgtcacatttaacaccgt

SEQ ID NO: 131915 - DNA, 20 bp, Artificial Sequence
  mmSKRIPTE0002694_Prkcd_3
  gRNA
caaacagtctatgcgtagtg

SEQ ID NO: 131916 - DNA, 20 bp, Artificial Sequence
  mmSKRIPTE0002695_Prkcd_4
  gRNA
gagccctcacatacgtagcc

SEQ ID NO: 131917 - DNA, 20 bp, Artificial Sequence
  mmSKRIPTE0002696_Prkcd_5
  gRNA
tttccaaccatgaaccgtcg

SEQ ID NO: 131918 - DNA, 20 bp, Artificial Sequence
  mmSKRIPTE0002697_Prkcd_6
  gRNA
gattccttggtgatccaacg

SEQ ID NO: 131919 - DNA, 20 bp, Artificial Sequence
  mmSKRIPTE0002698_Prkcd_7
  gRNA
aagtaggctagtgtcaagcg

SEQ ID NO: 131920 - DNA, 20 bp, Artificial Sequence
  mmSKRIPTE0002699_Prkcd_8
  gRNA
atccggcagaaactaccctg

SEQ ID NO: 131921 - DNA, 20 bp, Artificial Sequence
  mmSKRIPTE0002700_Prkcd_9
  gRNA
cagggctaaaatccagcgtg

SEQ ID NO: 131922 - DNA, 20 bp, Artificial Sequence
  mmSKRIPTE0002701_Tarbp2_1
  gRNA
gaccctacatataggctgag

SEQ ID NO: 131923 - DNA, 20 bp, Artificial Sequence
  mmSKRIPTE0002702_Tarbp2_2
  gRNA
gactgtctaagttaacctag

SEQ ID NO: 131924 - DNA, 20 bp, Artificial Sequence
  mmSKRIPTE0002703_Tarbp2_3
  gRNA
acacctgcagagcaccgacg

SEQ ID NO: 131925 - DNA, 20 bp, Artificial Sequence
  mmSKRIPTE0002704_Tarbp2_4
  gRNA
tgcacgttcaaccagcacca

SEQ ID NO: 131926 - DNA, 20 bp, Artificial Sequence
  mmSKRIPTE0002705_Tarbp2_5
  gRNA
tgctccccctaatacccacg

SEQ ID NO: 131927 - DNA, 20 bp, Artificial Sequence
  mmSKRIPTE0002706_Tarbp2_6
  gRNA
gtccttcaggaatccaagcg

SEQ ID NO: 131928 - DNA, 20 bp, Artificial Sequence
  mmSKRIPTE0002707_Tarbp2_7
  gRNA
gatcgcatgatattaagcca

SEQ ID NO: 131929 - DNA, 20 bp, Artificial Sequence
  mmSKRIPTE0002708_Tarbp2_8
  gRNA
aggcgagggatcctgtgccg

SEQ ID NO: 131930 - DNA, 20 bp, Artificial Sequence
  mmSKRIPTE0002709_Tarbp2_9
  gRNA
ctgctactttatcaccccag

SEQ ID NO: 131931 - DNA, 20 bp, Artificial Sequence
  mmSKRIPTE0002710_Muc4_1
  gRNA
tcctcgttgaacgaatggtg

SEQ ID NO: 131932 - DNA, 20 bp, Artificial Sequence
  mmSKRIPTE0002711_Muc4_2
  gRNA
gtaccctggagattctagcg

SEQ ID NO: 131933 - DNA, 20 bp, Artificial Sequence
  mmSKRIPTE0002712_Muc4_3
  gRNA
ctgtaacacaggaggtacga

SEQ ID NO: 131934 - DNA, 20 bp, Artificial Sequence
  mmSKRIPTE0002713_Muc4_4
  gRNA
ctcccatcacggtaagtgag

SEQ ID NO: 131935 - DNA, 20 bp, Artificial Sequence
  mmSKRIPTE0002714_Muc4_5
  gRNA
gcccatcagctgcctcgtcg

SEQ ID NO: 131936 - DNA, 20 bp, Artificial Sequence
  mmSKRIPTE0002715_Muc4_6
  gRNA
ccatatacgagagacgactg

SEQ ID NO: 131937 - DNA, 20 bp, Artificial Sequence
  mmSKRIPTE0002716_Muc4_7
  gRNA
ggagaccttaaccccgcccg

SEQ ID NO: 131938 - DNA, 20 bp, Artificial Sequence
  mmSKRIPTE0002717_Muc4_8
  gRNA
aggcctaatgaggattagag

SEQ ID NO: 131939 - DNA, 20 bp, Artificial Sequence
  mmSKRIPTE0002718_Muc4_9
  gRNA
tctgtcgcctttgcacccag

SEQ ID NO: 131940 - DNA, 20 bp, Artificial Sequence
  mmSKRIPTE0002719_Nkx2-5_1
  gRNA
tctgccctggatgtggcgcg

SEQ ID NO: 131941 - DNA, 20 bp, Artificial Sequence
  mmSKRIPTE0002720_Nkx2-5_2
  gRNA
gtgagtgcgctaacgcacgc

SEQ ID NO: 131942 - DNA, 20 bp, Artificial Sequence
  mmSKRIPTE0002721_Nkx2-5_3
  gRNA
taaaggtgggagtcgttccg

SEQ ID NO: 131943 - DNA, 20 bp, Artificial Sequence
  mmSKRIPTE0002722_Nkx2-5_4
  gRNA
gatagtctcccactcctgca

SEQ ID NO: 131944 - DNA, 20 bp, Artificial Sequence
  mmSKRIPTE0002723_Nkx2-5_5
  gRNA
ggatttctgagcgagcgcag

SEQ ID NO: 131945 - DNA, 20 bp, Artificial Sequence
  mmSKRIPTE0002724_Nkx2-5_6
  gRNA
gagacgcccgaattgccctg

SEQ ID NO: 131946 - DNA, 20 bp, Artificial Sequence
  mmSKRIPTE0002725_Nkx2-5_7
  gRNA
gcaggtttcacagcgccagg

SEQ ID NO: 131947 - DNA, 20 bp, Artificial Sequence
  mmSKRIPTE0002726_Nkx2-5_8
  gRNA
cactcggcgattagcttaag

SEQ ID NO: 131948 - DNA, 20 bp, Artificial Sequence
  mmSKRIPTE0002727_Nkx2-5_9
  gRNA
aaggtcccaggcctgcgcga

SEQ ID NO: 131949 - DNA, 20 bp, Artificial Sequence
  mmSKRIPTE0002728_Sos1_1
  gRNA
gtaccgaggcttcaccaaag

SEQ ID NO: 131950 - DNA, 20 bp, Artificial Sequence
  mmSKRIPTE0002729_Sos1_2
  gRNA
acaaagttgccactatgatg

SEQ ID NO: 131951 - DNA, 20 bp, Artificial Sequence
  mmSKRIPTE0002730_Sos1_3
  gRNA
gcatgtatctcgccgtacgt

SEQ ID NO: 131952 - DNA, 20 bp, Artificial Sequence
  mmSKRIPTE0002731_Sos1_4
  gRNA
gtacgcaggtaagaaacacg

SEQ ID NO: 131953 - DNA, 20 bp, Artificial Sequence
  mmSKRIPTE0002732_Sos1_5
  gRNA
aagtggggatgttcaaagcg

SEQ ID NO: 131954 - DNA, 20 bp, Artificial Sequence
  mmSKRIPTE0002733_Sos1_6
  gRNA
cagctgttgacactcgcccg

SEQ ID NO: 131955 - DNA, 20 bp, Artificial Sequence
  mmSKRIPTE0002734_Sos1_7
  gRNA
gtaatgtatgtcctggctcg

SEQ ID NO: 131956 - DNA, 20 bp, Artificial Sequence
  mmSKRIPTE0002735_Sos1_8
  gRNA
agtttcatgatggttcagac

SEQ ID NO: 131957 - DNA, 20 bp, Artificial Sequence
  mmSKRIPTE0002736_Sos1_9
  gRNA
ctgataaagtaagacgcatg

SEQ ID NO: 131958 - DNA, 20 bp, Artificial Sequence
  mmSKRIPTE0002737_Zeb1_1
  gRNA
gacggatgctgagtacaatg

SEQ ID NO: 131959 - DNA, 20 bp, Artificial Sequence
  mmSKRIPTE0002738_Zeb1_2
  gRNA
cttaggcgagtgtgtgctcg

SEQ ID NO: 131960 - DNA, 20 bp, Artificial Sequence
  mmSKRIPTE0002739_Zeb1_3
  gRNA
aacacggcatctaacgtcag

SEQ ID NO: 131961 - DNA, 20 bp, Artificial Sequence
  mmSKRIPTE0002740_Zeb1_4
  gRNA
cacctggtttacgacactcg

SEQ ID NO: 131962 - DNA, 20 bp, Artificial Sequence
  mmSKRIPTE0002741_Zeb1_5
  gRNA
ttacctgcctctgcgcctag

SEQ ID NO: 131963 - DNA, 20 bp, Artificial Sequence
  mmSKRIPTE0002742_Zeb1_6
  gRNA
tgtcatatgacgttcaagct

SEQ ID NO: 131964 - DNA, 20 bp, Artificial Sequence
  mmSKRIPTE0002743_Zeb1_7
  gRNA
ggactgtccagacaatgacc

SEQ ID NO: 131965 - DNA, 20 bp, Artificial Sequence
  mmSKRIPTE0002744_Zeb1_8
  gRNA
agtccgtggtgctttcactg

SEQ ID NO: 131966 - DNA, 20 bp, Artificial Sequence
  mmSKRIPTE0002745_Zeb1_9
  gRNA
gtgctcaagtttatggtacg

SEQ ID NO: 131967 - DNA, 20 bp, Artificial Sequence
  mmSKRIPTE0002746_Smad7_1
  gRNA
tcaaggcaatcaccgcctcg

SEQ ID NO: 131968 - DNA, 20 bp, Artificial Sequence
  mmSKRIPTE0002747_Smad7_2
  gRNA
caaaaatggcagacaaccgt

SEQ ID NO: 131969 - DNA, 20 bp, Artificial Sequence
  mmSKRIPTE0002748_Smad7_3
  gRNA
gggaggagaagactcgcgtg

SEQ ID NO: 131970 - DNA, 20 bp, Artificial Sequence
  mmSKRIPTE0002749_Smad7_4
  gRNA
accattaataatctgcatcg

SEQ ID NO: 131971 - DNA, 20 bp, Artificial Sequence
  mmSKRIPTE0002750_Smad7_5
  gRNA
acagtcacgtgggacacgag

SEQ ID NO: 131972 - DNA, 20 bp, Artificial Sequence
  mmSKRIPTE0002751_Smad7_6
  gRNA
caacaattccagaccaacgg

SEQ ID NO: 131973 - DNA, 20 bp, Artificial Sequence
  mmSKRIPTE0002752_Smad7_7
  gRNA
acagccggtagtcggtcgtg

SEQ ID NO: 131974 - DNA, 20 bp, Artificial Sequence
  mmSKRIPTE0002753_Smad7_8
  gRNA
gattcgacccaagcccgcca

SEQ ID NO: 131975 - DNA, 20 bp, Artificial Sequence
  mmSKRIPTE0002754_Smad7_9
  gRNA
gctgtggcatccagctgacg

SEQ ID NO: 131976 - DNA, 20 bp, Artificial Sequence
  mmSKRIPTE0002755_Dbh_1
  gRNA
gcttgttcaagagcgtatgg

SEQ ID NO: 131977 - DNA, 20 bp, Artificial Sequence
  mmSKRIPTE0002756_Dbh_2
  gRNA
gcttcccggtatgactgatg

SEQ ID NO: 131978 - DNA, 20 bp, Artificial Sequence
  mmSKRIPTE0002757_Dbh_3
  gRNA
aaaaaagtgcttaaccggtg

SEQ ID NO: 131979 - DNA, 20 bp, Artificial Sequence
  mmSKRIPTE0002758_Dbh_4
  gRNA
cgtacatggaagccgcctca

SEQ ID NO: 131980 - DNA, 20 bp, Artificial Sequence
  mmSKRIPTE0002759_Dbh_5
  gRNA
catttgctaagcggacagcg

SEQ ID NO: 131981 - DNA, 20 bp, Artificial Sequence
  mmSKRIPTE0002760_Dbh_6
  gRNA
aacttccagtcggagaaacg

SEQ ID NO: 131982 - DNA, 20 bp, Artificial Sequence
  mmSKRIPTE0002761_Dbh_7
  gRNA
ccccgtttaccatgatgatg

SEQ ID NO: 131983 - DNA, 20 bp, Artificial Sequence
  mmSKRIPTE0002762_Dbh_8
  gRNA
acccacggaagatacaaggt

SEQ ID NO: 131984 - DNA, 20 bp, Artificial Sequence
  mmSKRIPTE0002763_Dbh_9
  gRNA
tgagatggtcgatccattcg

SEQ ID NO: 131985 - DNA, 20 bp, Artificial Sequence
  mmSKRIPTE0002764_Jak1_1
  gRNA
tgctggtggtcaatgcctag

SEQ ID NO: 131986 - DNA, 20 bp, Artificial Sequence
  mmSKRIPTE0002765_Jak1_2
  gRNA
aagcagcatttactgttgtg

SEQ ID NO: 131987 - DNA, 20 bp, Artificial Sequence
  mmSKRIPTE0002766_Jak1_3
  gRNA
catctcgaaacgaagtgctg

SEQ ID NO: 131988 - DNA, 20 bp, Artificial Sequence
  mmSKRIPTE0002767_Jak1_4
  gRNA
tgtaactcgagtatttgttg

SEQ ID NO: 131989 - DNA, 20 bp, Artificial Sequence
  mmSKRIPTE0002768_Jak1_5
  gRNA
gaaccaaccagattggaccg

SEQ ID NO: 131990 - DNA, 20 bp, Artificial Sequence
  mmSKRIPTE0002769_Jak1_6
  gRNA
cacaggtttgacgtaaacag

SEQ ID NO: 131991 - DNA, 20 bp, Artificial Sequence
  mmSKRIPTE0002770_Jak1_7
  gRNA
actctcctttcatactggag

SEQ ID NO: 131992 - DNA, 20 bp, Artificial Sequence
  mmSKRIPTE0002771_Jak1_8
  gRNA
ccagtggagtgaagtaattg

SEQ ID NO: 131993 - DNA, 20 bp, Artificial Sequence
  mmSKRIPTE0002772_Jak1_9
  gRNA
gaatcgcactgcaacacgga

SEQ ID NO: 131994 - DNA, 20 bp, Artificial Sequence
  mmSKRIPTE0002773_Ptprz1_1
  gRNA
taagtgataggacctcggcg

SEQ ID NO: 131995 - DNA, 20 bp, Artificial Sequence
  mmSKRIPTE0002774_Ptprz1_2
  gRNA
gttgagtcgtctgcgaatgg

SEQ ID NO: 131996 - DNA, 20 bp, Artificial Sequence
  mmSKRIPTE0002775_Ptprz1_3
  gRNA
atggcgtcataaacgacccg

SEQ ID NO: 131997 - DNA, 20 bp, Artificial Sequence
  mmSKRIPTE0002776_Ptprz1_4
  gRNA
gaccaaaggagtctcagtag

SEQ ID NO: 131998 - DNA, 20 bp, Artificial Sequence
  mmSKRIPTE0002777_Ptprz1_5
  gRNA
ttcccatgtgcacatcaacg

SEQ ID NO: 131999 - DNA, 20 bp, Artificial Sequence
  mmSKRIPTE0002778_Ptprz1_6
  gRNA
tcactcgttcacctagaccc

SEQ ID NO: 132000 - DNA, 20 bp, Artificial Sequence
  mmSKRIPTE0002779_Ptprz1_7
  gRNA
gtcacaaccataatgatcac

SEQ ID NO: 132001 - DNA, 20 bp, Artificial Sequence
  mmSKRIPTE0002780_Ptprz1_8
  gRNA
ttgtgatgtgagatatgatg

SEQ ID NO: 132002 - DNA, 20 bp, Artificial Sequence
  mmSKRIPTE0002781_Ptprz1_9
  gRNA
tgggcatgtccactatcagt

SEQ ID NO: 132003 - DNA, 20 bp, Artificial Sequence
  mmSKRIPTE0002782_Prmt1_1
  gRNA
aggtccgtcctaaagcacaa

SEQ ID NO: 132004 - DNA, 20 bp, Artificial Sequence
  mmSKRIPTE0002783_Prmt1_2
  gRNA
accgactaccggatgcgctg

SEQ ID NO: 132005 - DNA, 20 bp, Artificial Sequence
  mmSKRIPTE0002784_Prmt1_3
  gRNA
cttcgcgttggtccgcatcg

SEQ ID NO: 132006 - DNA, 20 bp, Artificial Sequence
  mmSKRIPTE0002785_Prmt1_4
  gRNA
gctgggctctttaggcccgg

SEQ ID NO: 132007 - DNA, 20 bp, Artificial Sequence
  mmSKRIPTE0002786_Prmt1_5
  gRNA
gagccgaggactgtcgcacg

SEQ ID NO: 132008 - DNA, 20 bp, Artificial Sequence
  mmSKRIPTE0002787_Prmt1_6
  gRNA
gggggccgagatcatcagtg

SEQ ID NO: 132009 - DNA, 20 bp, Artificial Sequence
  mmSKRIPTE0002788_Prmt1_7
  gRNA
ggtagcatagcgggtacccg

SEQ ID NO: 132010 - DNA, 20 bp, Artificial Sequence
  mmSKRIPTE0002789_Prmt1_8
  gRNA
gaggacggttagacctcttg

SEQ ID NO: 132011 - DNA, 20 bp, Artificial Sequence
  mmSKRIPTE0002790_Prmt1_9
  gRNA
accaatgagaacttatggcg

SEQ ID NO: 132012 - DNA, 20 bp, Artificial Sequence
  mmSKRIPTE0002791_Ikbkb_1
  gRNA
atgtggcaccctcggcaaag

SEQ ID NO: 132013 - DNA, 20 bp, Artificial Sequence
  mmSKRIPTE0002792_Ikbkb_2
  gRNA
cgttcacacataccccgtga

SEQ ID NO: 132014 - DNA, 20 bp, Artificial Sequence
  mmSKRIPTE0002793_Ikbkb_3
  gRNA
tcttaacaggtaaggccgtg

SEQ ID NO: 132015 - DNA, 20 bp, Artificial Sequence
  mmSKRIPTE0002794_Ikbkb_4
  gRNA
atagacgcacggcgacacca

SEQ ID NO: 132016 - DNA, 20 bp, Artificial Sequence
  mmSKRIPTE0002795_Ikbkb_5
  gRNA
ctgacgtcacgggtactaga

SEQ ID NO: 132017 - DNA, 20 bp, Artificial Sequence
  mmSKRIPTE0002796_Ikbkb_6
  gRNA
gcctcgtaggaatcgttctg

SEQ ID NO: 132018 - DNA, 20 bp, Artificial Sequence
  mmSKRIPTE0002797_Ikbkb_7
  gRNA
gcttcacggtaaccgcctga

SEQ ID NO: 132019 - DNA, 20 bp, Artificial Sequence
  mmSKRIPTE0002798_Ikbkb_8
  gRNA
tgggattaacactaacgact

SEQ ID NO: 132020 - DNA, 20 bp, Artificial Sequence
  mmSKRIPTE0002799_Ikbkb_9
  gRNA
tgtctgtatacctaacctag

SEQ ID NO: 132021 - DNA, 20 bp, Artificial Sequence
  mmSKRIPTE0002800_Junb_1
  gRNA
acgcagcggcgggatacggt

SEQ ID NO: 132022 - DNA, 20 bp, Artificial Sequence
  mmSKRIPTE0002801_Junb_2
  gRNA
cgcttggtactcagcctgcg

SEQ ID NO: 132023 - DNA, 20 bp, Artificial Sequence
  mmSKRIPTE0002802_Junb_3
  gRNA
gactgggagctcatacccga

SEQ ID NO: 132024 - DNA, 20 bp, Artificial Sequence
  mmSKRIPTE0002803_Junb_4
  gRNA
gggtaaaagtactgtcccgg

SEQ ID NO: 132025 - DNA, 20 bp, Artificial Sequence
  mmSKRIPTE0002804_Junb_5
  gRNA
agaaagcaggcgcaccacgg

SEQ ID NO: 132026 - DNA, 20 bp, Artificial Sequence
  mmSKRIPTE0002805_Junb_6
  gRNA
ggaaccgcagaccgtaccgg

SEQ ID NO: 132027 - DNA, 20 bp, Artificial Sequence
  mmSKRIPTE0002806_Junb_7
  gRNA
caagcgctccagttccgtgg

SEQ ID NO: 132028 - DNA, 20 bp, Artificial Sequence
  mmSKRIPTE0002807_Junb_8
  gRNA
gctgcgccacttgctcccgt

SEQ ID NO: 132029 - DNA, 20 bp, Artificial Sequence
  mmSKRIPTE0002808_Junb_9
  gRNA
gaccccgatagggatccgcc

SEQ ID NO: 132030 - DNA, 20 bp, Artificial Sequence
  mmSKRIPTE0002809_Mb21d1_1
  gRNA
gaagtgtgtcaccgccatag

SEQ ID NO: 132031 - DNA, 20 bp, Artificial Sequence
  mmSKRIPTE0002810_Mb21d1_2
  gRNA
cgaggcgcggaaagtcgtaa

SEQ ID NO: 132032 - DNA, 20 bp, Artificial Sequence
  mmSKRIPTE0002811_Mb21d1_3
  gRNA
cagtggtttccgcgtctgtg

SEQ ID NO: 132033 - DNA, 20 bp, Artificial Sequence
  mmSKRIPTE0002812_Mb21d1_4
  gRNA
ggcgccgtcgtccttctacg

SEQ ID NO: 132034 - DNA, 20 bp, Artificial Sequence
  mmSKRIPTE0002813_Mb21d1_5
  gRNA
cgagacggtgaataaagttg

SEQ ID NO: 132035 - DNA, 20 bp, Artificial Sequence
  mmSKRIPTE0002814_Mb21d1_6
  gRNA
gaaaaagacagaccgcccga

SEQ ID NO: 132036 - DNA, 20 bp, Artificial Sequence
  mmSKRIPTE0002815_Mb21d1_7
  gRNA
aggaccagaacaccttgtag

SEQ ID NO: 132037 - DNA, 20 bp, Artificial Sequence
  mmSKRIPTE0002816_Mb21d1_8
  gRNA
tcgtagtgccacaccctgcg

SEQ ID NO: 132038 - DNA, 20 bp, Artificial Sequence
  mmSKRIPTE0002817_Mb21d1_9
  gRNA
tgaagtgtgccacctaatgg

SEQ ID NO: 132039 - DNA, 20 bp, Artificial Sequence
  mmSKRIPTE0002818_Ikbkg_1
  gRNA
atttggccttgtccaaccag

SEQ ID NO: 132040 - DNA, 20 bp, Artificial Sequence
  mmSKRIPTE0002819_Ikbkg_2
  gRNA
cagtagcccacatcactctg

SEQ ID NO: 132041 - DNA, 20 bp, Artificial Sequence
  mmSKRIPTE0002820_Ikbkg_3
  gRNA
ggatcccgcacttacgacac

SEQ ID NO: 132042 - DNA, 20 bp, Artificial Sequence
  mmSKRIPTE0002821_Ikbkg_4
  gRNA
acttgggggcatatcatcag

SEQ ID NO: 132043 - DNA, 20 bp, Artificial Sequence
  mmSKRIPTE0002822_Ikbkg_5
  gRNA
gagctccggttctgtcggag

SEQ ID NO: 132044 - DNA, 20 bp, Artificial Sequence
  mmSKRIPTE0002823_Ikbkg_6
  gRNA
gctccccctcaggtacactg

SEQ ID NO: 132045 - DNA, 20 bp, Artificial Sequence
  mmSKRIPTE0002824_Ikbkg_7
  gRNA
cttagatcgccagcctgcgt

SEQ ID NO: 132046 - DNA, 20 bp, Artificial Sequence
  mmSKRIPTE0002825_Ikbkg_8
  gRNA
gtcacatgcagaagataatg

SEQ ID NO: 132047 - DNA, 20 bp, Artificial Sequence
  mmSKRIPTE0002826_Ikbkg_9
  gRNA
tgttacctctggtagacatg

SEQ ID NO: 132048 - DNA, 20 bp, Artificial Sequence
  mmSKRIPTE0002827_Eprs_1
  gRNA
tcctacggctaaatctcctg

SEQ ID NO: 132049 - DNA, 20 bp, Artificial Sequence
  mmSKRIPTE0002828_Eprs_2
  gRNA
gagcctggactacgtccacg

SEQ ID NO: 132050 - DNA, 20 bp, Artificial Sequence
  mmSKRIPTE0002829_Eprs_3
  gRNA
ggtagacagtaaaatgaccg

SEQ ID NO: 132051 - DNA, 20 bp, Artificial Sequence
  mmSKRIPTE0002830_Eprs_4
  gRNA
ataagaaacgccacgtagag

SEQ ID NO: 132052 - DNA, 20 bp, Artificial Sequence
  mmSKRIPTE0002831_Eprs_5
  gRNA
gctcaaccagtggtgcaatg

SEQ ID NO: 132053 - DNA, 20 bp, Artificial Sequence
  mmSKRIPTE0002832_Eprs_6
  gRNA
tcccagatggagtacgacca

SEQ ID NO: 132054 - DNA, 20 bp, Artificial Sequence
  mmSKRIPTE0002833_Eprs_7
  gRNA
ggaaagccgtaggaacgctg

SEQ ID NO: 132055 - DNA, 20 bp, Artificial Sequence
  mmSKRIPTE0002834_Eprs_8
  gRNA
tgacagctcttcatatcacg

SEQ ID NO: 132056 - DNA, 20 bp, Artificial Sequence
  mmSKRIPTE0002835_Eprs_9
  gRNA
taggctcaataacgatggaa

SEQ ID NO: 132057 - DNA, 20 bp, Artificial Sequence
  mmSKRIPTE0002836_9230019H11Rik_1
  gRNA
gatgtgctacttcaaatgcg

SEQ ID NO: 132058 - DNA, 20 bp, Artificial Sequence
  mmSKRIPTE0002837_9230019H11Rik_2
  gRNA
gagtttgaataatttatgcg

SEQ ID NO: 132059 - DNA, 20 bp, Artificial Sequence
  mmSKRIPTE0002838_9230019H11Rik_3
  gRNA
gatcatagaatgatggtgct

SEQ ID NO: 132060 - DNA, 20 bp, Artificial Sequence
  mmSKRIPTE0002839_9230019H11Rik_4
  gRNA
tgtagaatgagccatcccca

SEQ ID NO: 132061 - DNA, 20 bp, Artificial Sequence
  mmSKRIPTE0002840_9230019H11Rik_5
  gRNA
gatagacgttactgttctag

SEQ ID NO: 132062 - DNA, 20 bp, Artificial Sequence
  mmSKRIPTE0002841_9230019H11Rik_6
  gRNA
cccagagataaagtagcctg

SEQ ID NO: 132063 - DNA, 20 bp, Artificial Sequence
  mmSKRIPTE0002842_9230019H11Rik_7
  gRNA
tgtgtgggtcctgagttgga

SEQ ID NO: 132064 - DNA, 20 bp, Artificial Sequence
  mmSKRIPTE0002843_9230019H11Rik_8
  gRNA
aaaatgtggagggtaaaacc

SEQ ID NO: 132065 - DNA, 20 bp, Artificial Sequence
  mmSKRIPTE0002844_9230019H11Rik_9
  gRNA
tccagtctatcggacagagt

SEQ ID NO: 132066 - DNA, 20 bp, Artificial Sequence
  mmSKRIPTE0002845_Esr1_1
  gRNA
atgaataggaacccgcacaa

SEQ ID NO: 132067 - DNA, 20 bp, Artificial Sequence
  mmSKRIPTE0002846_Esr1_2
  gRNA
ggagccagtctgtaactcgc

SEQ ID NO: 132068 - DNA, 20 bp, Artificial Sequence
  mmSKRIPTE0002847_Esr1_3
  gRNA
gctcgaatgatcgagtggcg

SEQ ID NO: 132069 - DNA, 20 bp, Artificial Sequence
  mmSKRIPTE0002848_Esr1_4
  gRNA
acacagcggccaccccgatg

SEQ ID NO: 132070 - DNA, 20 bp, Artificial Sequence
  mmSKRIPTE0002849_Esr1_5
  gRNA
ggcatacggaaagaccgccg

SEQ ID NO: 132071 - DNA, 20 bp, Artificial Sequence
  mmSKRIPTE0002850_Esr1_6
  gRNA
aatcctacaagtccggaaag

SEQ ID NO: 132072 - DNA, 20 bp, Artificial Sequence
  mmSKRIPTE0002851_Esr1_7
  gRNA
gggccagtactcgtgccaag

SEQ ID NO: 132073 - DNA, 20 bp, Artificial Sequence
  mmSKRIPTE0002852_Esr1_8
  gRNA
aactattggccctttagtgt

SEQ ID NO: 132074 - DNA, 20 bp, Artificial Sequence
  mmSKRIPTE0002853_Esr1_9
  gRNA
atattggccaagtcccagct

SEQ ID NO: 132075 - DNA, 20 bp, Artificial Sequence
  mmSKRIPTE0002854_Igf1_1
  gRNA
ctcagaaggtacgatcgagt

SEQ ID NO: 132076 - DNA, 20 bp, Artificial Sequence
  mmSKRIPTE0002855_Igf1_2
  gRNA
tcctggaagaaagtacacgc

SEQ ID NO: 132077 - DNA, 20 bp, Artificial Sequence
  mmSKRIPTE0002856_Igf1_3
  gRNA
gcgatgtgttgactcgcact

SEQ ID NO: 132078 - DNA, 20 bp, Artificial Sequence
  mmSKRIPTE0002857_Igf1_4
  gRNA
gggatacggcacttacacat

SEQ ID NO: 132079 - DNA, 20 bp, Artificial Sequence
  mmSKRIPTE0002858_Igf1_5
  gRNA
gatgctcttcagttcgtgtg

SEQ ID NO: 132080 - DNA, 20 bp, Artificial Sequence
  mmSKRIPTE0002859_Igf1_6
  gRNA
aggaggtaacggaggcaact

SEQ ID NO: 132081 - DNA, 20 bp, Artificial Sequence
  mmSKRIPTE0002860_Igf1_7
  gRNA
tggaccagagaccctttgcg

SEQ ID NO: 132082 - DNA, 20 bp, Artificial Sequence
  mmSKRIPTE0002861_Igf1_8
  gRNA
ctagttacatttggacaccc

SEQ ID NO: 132083 - DNA, 20 bp, Artificial Sequence
  mmSKRIPTE0002862_Igf1_9
  gRNA
gacctgctgtgtaaacgacc

SEQ ID NO: 132084 - DNA, 20 bp, Artificial Sequence
  mmSKRIPTE0002863_Meis1_1
  gRNA
aagacagatactaatgagcg

SEQ ID NO: 132085 - DNA, 20 bp, Artificial Sequence
  mmSKRIPTE0002864_Meis1_2
  gRNA
cagcgaccaaattatacctg

SEQ ID NO: 132086 - DNA, 20 bp, Artificial Sequence
  mmSKRIPTE0002865_Meis1_3
  gRNA
atgcgggtccccatacatcg

SEQ ID NO: 132087 - DNA, 20 bp, Artificial Sequence
  mmSKRIPTE0002866_Meis1_4
  gRNA
taaccatagaacttgcactg

SEQ ID NO: 132088 - DNA, 20 bp, Artificial Sequence
  mmSKRIPTE0002867_Meis1_5
  gRNA
gttcccccacatgtcaagcg

SEQ ID NO: 132089 - DNA, 20 bp, Artificial Sequence
  mmSKRIPTE0002868_Meis1_6
  gRNA
tcccactataagtcaaactg

SEQ ID NO: 132090 - DNA, 20 bp, Artificial Sequence
  mmSKRIPTE0002869_Meis1_7
  gRNA
caagcgggcagcatcgatcg

SEQ ID NO: 132091 - DNA, 20 bp, Artificial Sequence
  mmSKRIPTE0002870_Meis1_8
  gRNA
agcctggagaccttattcga

SEQ ID NO: 132092 - DNA, 20 bp, Artificial Sequence
  mmSKRIPTE0002871_Meis1_9
  gRNA
cataccaagcagattacatg

SEQ ID NO: 132093 - DNA, 20 bp, Artificial Sequence
  mmSKRIPTE0002872_Arid4a_1
  gRNA
actgcaccgggaccccatcg

SEQ ID NO: 132094 - DNA, 20 bp, Artificial Sequence
  mmSKRIPTE0002873_Arid4a_2
  gRNA
agaagcgctccttcacccgg

SEQ ID NO: 132095 - DNA, 20 bp, Artificial Sequence
  mmSKRIPTE0002874_Arid4a_3
  gRNA
ggtgcctccttaataccccg

SEQ ID NO: 132096 - DNA, 20 bp, Artificial Sequence
  mmSKRIPTE0002875_Arid4a_4
  gRNA
ttgataccagcactactagg

SEQ ID NO: 132097 - DNA, 20 bp, Artificial Sequence
  mmSKRIPTE0002876_Arid4a_5
  gRNA
tggattgtggcagtaaatcg

SEQ ID NO: 132098 - DNA, 20 bp, Artificial Sequence
  mmSKRIPTE0002877_Arid4a_6
  gRNA
cctcccctgacatgtcaccg

SEQ ID NO: 132099 - DNA, 20 bp, Artificial Sequence
  mmSKRIPTE0002878_Arid4a_7
  gRNA
aagtcaaggtaaatgcgcga

SEQ ID NO: 132100 - DNA, 20 bp, Artificial Sequence
  mmSKRIPTE0002879_Arid4a_8
  gRNA
attaccagcgcttccactag

SEQ ID NO: 132101 - DNA, 20 bp, Artificial Sequence
  mmSKRIPTE0002880_Arid4a_9
  gRNA
agtagtgctgtatcgccctg

SEQ ID NO: 132102 - DNA, 20 bp, Artificial Sequence
  mmSKRIPTE0002881_Gabpa_1
  gRNA
aaatgggagtcgcagcgccg

SEQ ID NO: 132103 - DNA, 20 bp, Artificial Sequence
  mmSKRIPTE0002882_Gabpa_2
  gRNA
atgtgagagcaggttcatcg

SEQ ID NO: 132104 - DNA, 20 bp, Artificial Sequence
  mmSKRIPTE0002883_Gabpa_3
  gRNA
tgaggaccatggagccctcg

SEQ ID NO: 132105 - DNA, 20 bp, Artificial Sequence
  mmSKRIPTE0002884_Gabpa_4
  gRNA
acaggaatgaatactcacgc

SEQ ID NO: 132106 - DNA, 20 bp, Artificial Sequence
  mmSKRIPTE0002885_Gabpa_5
  gRNA
cctactcctcagctgtaacg

SEQ ID NO: 132107 - DNA, 20 bp, Artificial Sequence
  mmSKRIPTE0002886_Gabpa_6
  gRNA
aaagtcagagatacaccgca

SEQ ID NO: 132108 - DNA, 20 bp, Artificial Sequence
  mmSKRIPTE0002887_Gabpa_7
  gRNA
ctctgtgtaaagcagcggag

SEQ ID NO: 132109 - DNA, 20 bp, Artificial Sequence
  mmSKRIPTE0002888_Gabpa_8
  gRNA
gctgtgttagacccaactag

SEQ ID NO: 132110 - DNA, 20 bp, Artificial Sequence
  mmSKRIPTE0002889_Gabpa_9
  gRNA
atcgggacgctgactccgaa

SEQ ID NO: 132111 - DNA, 20 bp, Artificial Sequence
  mmSKRIPTE0002890_Pim1_1
  gRNA
ccatcgctaccacggcaggt

SEQ ID NO: 132112 - DNA, 20 bp, Artificial Sequence
  mmSKRIPTE0002891_Pim1_2
  gRNA
tgactaaagttccatcgaca

SEQ ID NO: 132113 - DNA, 20 bp, Artificial Sequence
  mmSKRIPTE0002892_Pim1_3
  gRNA
ggcgagtcggaggacgactg

SEQ ID NO: 132114 - DNA, 20 bp, Artificial Sequence
  mmSKRIPTE0002893_Pim1_4
  gRNA
ccggcaagttgtcggcgacg

SEQ ID NO: 132115 - DNA, 20 bp, Artificial Sequence
  mmSKRIPTE0002894_Pim1_5
  gRNA
caaactcatcgacttcgggt

SEQ ID NO: 132116 - DNA, 20 bp, Artificial Sequence
  mmSKRIPTE0002895_Pim1_6
  gRNA
ccacctccagggtgtcggtg

SEQ ID NO: 132117 - DNA, 20 bp, Artificial Sequence
  mmSKRIPTE0002896_Pim1_7
  gRNA
gttcggtgataaagtcgaag

SEQ ID NO: 132118 - DNA, 20 bp, Artificial Sequence
  mmSKRIPTE0002897_Pim1_8
  gRNA
ttataccaaacactgcccgg

SEQ ID NO: 132119 - DNA, 20 bp, Artificial Sequence
  mmSKRIPTE0002898_Pim1_9
  gRNA
ttcccggcatagtacagccg

SEQ ID NO: 132120 - DNA, 20 bp, Artificial Sequence
  mmSKRIPTE0002899_Rbp4_1
  gRNA
gccataccgatgcctatgag

SEQ ID NO: 132121 - DNA, 20 bp, Artificial Sequence
  mmSKRIPTE0002900_Rbp4_2
  gRNA
aacttcgacaaggctcgtgt

SEQ ID NO: 132122 - DNA, 20 bp, Artificial Sequence
  mmSKRIPTE0002901_Rbp4_3
  gRNA
atggtacccgataagcccaa

SEQ ID NO: 132123 - DNA, 20 bp, Artificial Sequence
  mmSKRIPTE0002902_Rbp4_4
  gRNA
agggacgagtccgtcttctg

SEQ ID NO: 132124 - DNA, 20 bp, Artificial Sequence
  mmSKRIPTE0002903_Rbp4_5
  gRNA
gtcgcgctttcgtaaccgcg

SEQ ID NO: 132125 - DNA, 20 bp, Artificial Sequence
  mmSKRIPTE0002904_Rbp4_6
  gRNA
ccggagctataaaggaccga

SEQ ID NO: 132126 - DNA, 20 bp, Artificial Sequence
  mmSKRIPTE0002905_Rbp4_7
  gRNA
acaggcgcagggtaaacgcg

SEQ ID NO: 132127 - DNA, 20 bp, Artificial Sequence
  mmSKRIPTE0002906_Rbp4_8
  gRNA
ttgaagacttatttgtggcg

SEQ ID NO: 132128 - DNA, 20 bp, Artificial Sequence
  mmSKRIPTE0002907_Rbp4_9
  gRNA
ccgttgggaagggcttcgag

SEQ ID NO: 132129 - DNA, 20 bp, Artificial Sequence
  mmSKRIPTE0002908_Samhd1_1
  gRNA
tcaggttcaacagtgcatcg

SEQ ID NO: 132130 - DNA, 20 bp, Artificial Sequence
  mmSKRIPTE0002909_Samhd1_2
  gRNA
cttgggctgccatcgcagcg

SEQ ID NO: 132131 - DNA, 20 bp, Artificial Sequence
  mmSKRIPTE0002910_Samhd1_3
  gRNA
gtaccatacgctcagcattg

SEQ ID NO: 132132 - DNA, 20 bp, Artificial Sequence
  mmSKRIPTE0002911_Samhd1_4
  gRNA
ctatatgaacagcatttgcg

SEQ ID NO: 132133 - DNA, 20 bp, Artificial Sequence
  mmSKRIPTE0002912_Samhd1_5
  gRNA
gcgaacacacgggctacccg

SEQ ID NO: 132134 - DNA, 20 bp, Artificial Sequence
  mmSKRIPTE0002913_Samhd1_6
  gRNA
taaaggccagcattccggca

SEQ ID NO: 132135 - DNA, 20 bp, Artificial Sequence
  mmSKRIPTE0002914_Samhd1_7
  gRNA
ggctgcgaagttaagtaccg

SEQ ID NO: 132136 - DNA, 20 bp, Artificial Sequence
  mmSKRIPTE0002915_Samhd1_8
  gRNA
ccttggcatagaaaagcgca

SEQ ID NO: 132137 - DNA, 20 bp, Artificial Sequence
  mmSKRIPTE0002916_Samhd1_9
  gRNA
cctcaaagcagacccctacg

SEQ ID NO: 132138 - DNA, 20 bp, Artificial Sequence
  mmSKRIPTE0002917_Stk4_1
  gRNA
gagagaattaggacaattcg

SEQ ID NO: 132139 - DNA, 20 bp, Artificial Sequence
  mmSKRIPTE0002918_Stk4_2
  gRNA
ccatgggaggctcgtcactg

SEQ ID NO: 132140 - DNA, 20 bp, Artificial Sequence
  mmSKRIPTE0002919_Stk4_3
  gRNA
ctctgatgagtagatacccg

SEQ ID NO: 132141 - DNA, 20 bp, Artificial Sequence
  mmSKRIPTE0002920_Stk4_4
  gRNA
ttctgccaagggcagttacg

SEQ ID NO: 132142 - DNA, 20 bp, Artificial Sequence
  mmSKRIPTE0002921_Stk4_5
  gRNA
ttatggtactgtgcagcaag

SEQ ID NO: 132143 - DNA, 20 bp, Artificial Sequence
  mmSKRIPTE0002922_Stk4_6
  gRNA
tctgttcaaagtatcgaagt

SEQ ID NO: 132144 - DNA, 20 bp, Artificial Sequence
  mmSKRIPTE0002923_Stk4_7
  gRNA
tgactggctggacgtgagag

SEQ ID NO: 132145 - DNA, 20 bp, Artificial Sequence
  mmSKRIPTE0002924_Stk4_8
  gRNA
ttgtatcgcgacatctgctg

SEQ ID NO: 132146 - DNA, 20 bp, Artificial Sequence
  mmSKRIPTE0002925_Stk4_9
  gRNA
gaggcgtatgtgctgttcgg

SEQ ID NO: 132147 - DNA, 20 bp, Artificial Sequence
  mmSKRIPTE0002926_Nfatc2_1
  gRNA
acgccttctaccaagtacac

SEQ ID NO: 132148 - DNA, 20 bp, Artificial Sequence
  mmSKRIPTE0002927_Nfatc2_2
  gRNA
ctcatcaacagtgatctacg

SEQ ID NO: 132149 - DNA, 20 bp, Artificial Sequence
  mmSKRIPTE0002928_Nfatc2_3
  gRNA
gagcccgactgattggagag

SEQ ID NO: 132150 - DNA, 20 bp, Artificial Sequence
  mmSKRIPTE0002929_Nfatc2_4
  gRNA
cgggttcgtatagagtcgcg

SEQ ID NO: 132151 - DNA, 20 bp, Artificial Sequence
  mmSKRIPTE0002930_Nfatc2_5
  gRNA
acctcgaaccagcctcgccg

SEQ ID NO: 132152 - DNA, 20 bp, Artificial Sequence
  mmSKRIPTE0002931_Nfatc2_6
  gRNA
atctgaaccctatcgaaggt

SEQ ID NO: 132153 - DNA, 20 bp, Artificial Sequence
  mmSKRIPTE0002932_Nfatc2_7
  gRNA
gcggaggcattcgtgcgcag

SEQ ID NO: 132154 - DNA, 20 bp, Artificial Sequence
  mmSKRIPTE0002933_Nfatc2_8
  gRNA
gtcaccgtatctgtggcgca

SEQ ID NO: 132155 - DNA, 20 bp, Artificial Sequence
  mmSKRIPTE0002934_Nfatc2_9
  gRNA
ccatcgagtgctgtaagtca

SEQ ID NO: 132156 - DNA, 20 bp, Artificial Sequence
  mmSKRIPTE0002935_Il12a_1
  gRNA
gatgacgaagacaaactcct

SEQ ID NO: 132157 - DNA, 20 bp, Artificial Sequence
  mmSKRIPTE0002936_Il12a_2
  gRNA
gtatctggcaggaaccgtag

SEQ ID NO: 132158 - DNA, 20 bp, Artificial Sequence
  mmSKRIPTE0002937_Il12a_3
  gRNA
aatcacgctgtaagtacctg

SEQ ID NO: 132159 - DNA, 20 bp, Artificial Sequence
  mmSKRIPTE0002938_Il12a_4
  gRNA
tctgctaacacattgagggg

SEQ ID NO: 132160 - DNA, 20 bp, Artificial Sequence
  mmSKRIPTE0002939_Il12a_5
  gRNA
tcgggactggctaagacacc

SEQ ID NO: 132161 - DNA, 20 bp, Artificial Sequence
  mmSKRIPTE0002940_Il12a_6
  gRNA
tggaactacacaaggtatgg

SEQ ID NO: 132162 - DNA, 20 bp, Artificial Sequence
  mmSKRIPTE0002941_Il12a_7
  gRNA
ttattgtagaggccccctca

SEQ ID NO: 132163 - DNA, 20 bp, Artificial Sequence
  mmSKRIPTE0002942_Il12a_8
  gRNA
ataatttaagcccttccccg

SEQ ID NO: 132164 - DNA, 20 bp, Artificial Sequence
  mmSKRIPTE0002943_Il12a_9
  gRNA
gttagaagtcatgtcaacag

SEQ ID NO: 132165 - DNA, 20 bp, Artificial Sequence
  mmSKRIPTE0002944_Efna4_1
  gRNA
acgccgtgtagcatgttcga

SEQ ID NO: 132166 - DNA, 20 bp, Artificial Sequence
  mmSKRIPTE0002945_Efna4_2
  gRNA
ataaatcacccgttctagtg

SEQ ID NO: 132167 - DNA, 20 bp, Artificial Sequence
  mmSKRIPTE0002946_Efna4_3
  gRNA
tgtgcccacaggttgctccg

SEQ ID NO: 132168 - DNA, 20 bp, Artificial Sequence
  mmSKRIPTE0002947_Efna4_4
  gRNA
ccgacagtccgacagtccgg

SEQ ID NO: 132169 - DNA, 20 bp, Artificial Sequence
  mmSKRIPTE0002948_Efna4_5
  gRNA
gagaaagcggtacgtccggg

SEQ ID NO: 132170 - DNA, 20 bp, Artificial Sequence
  mmSKRIPTE0002949_Efna4_6
  gRNA
gagccttgaccacctgagcg

SEQ ID NO: 132171 - DNA, 20 bp, Artificial Sequence
  mmSKRIPTE0002950_Efna4_7
  gRNA
gtgaagacggacttgccatg

SEQ ID NO: 132172 - DNA, 20 bp, Artificial Sequence
  mmSKRIPTE0002951_Efna4_8
  gRNA
ggagagcggtaagtgaacca

SEQ ID NO: 132173 - DNA, 20 bp, Artificial Sequence
  mmSKRIPTE0002952_Efna4_9
  gRNA
gatatgccacacacatgcgc

SEQ ID NO: 132174 - DNA, 20 bp, Artificial Sequence
  mmSKRIPTE0002953_Cdk6_1
  gRNA
ccaaccatgtggcaacgacg

SEQ ID NO: 132175 - DNA, 20 bp, Artificial Sequence
  mmSKRIPTE0002954_Cdk6_2
  gRNA
tgtttgatgtgtgagacgcg

SEQ ID NO: 132176 - DNA, 20 bp, Artificial Sequence
  mmSKRIPTE0002955_Cdk6_3
  gRNA
aatacaccctactgaatctg

SEQ ID NO: 132177 - DNA, 20 bp, Artificial Sequence
  mmSKRIPTE0002956_Cdk6_4
  gRNA
acggacactcgaagtaaggg

SEQ ID NO: 132178 - DNA, 20 bp, Artificial Sequence
  mmSKRIPTE0002957_Cdk6_5
  gRNA
ctaaggacgtcatcccacgg

SEQ ID NO: 132179 - DNA, 20 bp, Artificial Sequence
  mmSKRIPTE0002958_Cdk6_6
  gRNA
caggaccccctgatttagtg

SEQ ID NO: 132180 - DNA, 20 bp, Artificial Sequence
  mmSKRIPTE0002959_Cdk6_7
  gRNA
tctcgagggaatgtcccgcg

SEQ ID NO: 132181 - DNA, 20 bp, Artificial Sequence
  mmSKRIPTE0002960_Cdk6_8
  gRNA
tggggataaagtccaccccg

SEQ ID NO: 132182 - DNA, 20 bp, Artificial Sequence
  mmSKRIPTE0002961_Cdk6_9
  gRNA
tggcatagccccaccgtacg

SEQ ID NO: 132183 - DNA, 20 bp, Artificial Sequence
  mmSKRIPTE0002962_Flt3_1
  gRNA
cgtgtgccacgaccgcatcg

SEQ ID NO: 132184 - DNA, 20 bp, Artificial Sequence
  mmSKRIPTE0002963_Flt3_2
  gRNA
ttacggtaaacaccacgggt

SEQ ID NO: 132185 - DNA, 20 bp, Artificial Sequence
  mmSKRIPTE0002964_Flt3_3
  gRNA
acccacgaatccgatgcacg

SEQ ID NO: 132186 - DNA, 20 bp, Artificial Sequence
  mmSKRIPTE0002965_Flt3_4
  gRNA
gagcttatgcgagcctggtg

SEQ ID NO: 132187 - DNA, 20 bp, Artificial Sequence
  mmSKRIPTE0002966_Flt3_5
  gRNA
ctgaatccgcattagtgtcg

SEQ ID NO: 132188 - DNA, 20 bp, Artificial Sequence
  mmSKRIPTE0002967_Flt3_6
  gRNA
tagctctcacacgaccacag

SEQ ID NO: 132189 - DNA, 20 bp, Artificial Sequence
  mmSKRIPTE0002968_Flt3_7
  gRNA
ggggctaagtctatagctcg

SEQ ID NO: 132190 - DNA, 20 bp, Artificial Sequence
  mmSKRIPTE0002969_Flt3_8
  gRNA
acgcgagaccgattagaact

SEQ ID NO: 132191 - DNA, 20 bp, Artificial Sequence
  mmSKRIPTE0002970_Flt3_9
  gRNA
ggagacagttctagaagtcg

SEQ ID NO: 132192 - DNA, 20 bp, Artificial Sequence
  mmSKRIPTE0002971_Rras_1
  gRNA
cggtggcgacatgagcagcg

SEQ ID NO: 132193 - DNA, 20 bp, Artificial Sequence
  mmSKRIPTE0002972_Rras_2
  gRNA
atacagtcgagcacaccttg

SEQ ID NO: 132194 - DNA, 20 bp, Artificial Sequence
  mmSKRIPTE0002973_Rras_3
  gRNA
aagaggaggcttcagaccgg

SEQ ID NO: 132195 - DNA, 20 bp, Artificial Sequence
  mmSKRIPTE0002974_Rras_4
  gRNA
agcttgtgagtctcgccggg

SEQ ID NO: 132196 - DNA, 20 bp, Artificial Sequence
  mmSKRIPTE0002975_Rras_5
  gRNA
agaaacgtgtgggtcccccc

SEQ ID NO: 132197 - DNA, 20 bp, Artificial Sequence
  mmSKRIPTE0002976_Rras_6
  gRNA
tggtgtttgccattaacgac

SEQ ID NO: 132198 - DNA, 20 bp, Artificial Sequence
  mmSKRIPTE0002977_Rras_7
  gRNA
atgcagggctgatgaccggg

SEQ ID NO: 132199 - DNA, 20 bp, Artificial Sequence
  mmSKRIPTE0002978_Rras_8
  gRNA
ttgtgacaatagagggacca

SEQ ID NO: 132200 - DNA, 20 bp, Artificial Sequence
  mmSKRIPTE0002979_Rras_9
  gRNA
actgcgtctgaatgtcgatg

SEQ ID NO: 132201 - DNA, 20 bp, Artificial Sequence
  mmSKRIPTE0002980_Nlrp6_1
  gRNA
cacgccatgccgctacaggg

SEQ ID NO: 132202 - DNA, 20 bp, Artificial Sequence
  mmSKRIPTE0002981_Nlrp6_2
  gRNA
ctgctgttgcttaagtcgcg

SEQ ID NO: 132203 - DNA, 20 bp, Artificial Sequence
  mmSKRIPTE0002982_Nlrp6_3
  gRNA
gcccaaagtttcattcgcgg

SEQ ID NO: 132204 - DNA, 20 bp, Artificial Sequence
  mmSKRIPTE0002983_Nlrp6_4
  gRNA
gtatacaccaggataacggc

SEQ ID NO: 132205 - DNA, 20 bp, Artificial Sequence
  mmSKRIPTE0002984_Nlrp6_5
  gRNA
tggaaggcaaacccgacatg

SEQ ID NO: 132206 - DNA, 20 bp, Artificial Sequence
  mmSKRIPTE0002985_Nlrp6_6
  gRNA
atggccgcagcatcccgtgg

SEQ ID NO: 132207 - DNA, 20 bp, Artificial Sequence
  mmSKRIPTE0002986_Nlrp6_7
  gRNA
tgataaccccaatggcggag

SEQ ID NO: 132208 - DNA, 20 bp, Artificial Sequence
  mmSKRIPTE0002987_Nlrp6_8
  gRNA
tagaagctgagcgaactccg

SEQ ID NO: 132209 - DNA, 20 bp, Artificial Sequence
  mmSKRIPTE0002988_Nlrp6_9
  gRNA
ggtctcggcaaactgcatca

SEQ ID NO: 132210 - DNA, 20 bp, Artificial Sequence
  mmSKRIPTE0002989_Pdgfd_1
  gRNA
agactggtagaccgacggtg

SEQ ID NO: 132211 - DNA, 20 bp, Artificial Sequence
  mmSKRIPTE0002990_Pdgfd_2
  gRNA
cgtctggctcttctgcggaa

SEQ ID NO: 132212 - DNA, 20 bp, Artificial Sequence
  mmSKRIPTE0002991_Pdgfd_3
  gRNA
taccctgtcagattataggg

SEQ ID NO: 132213 - DNA, 20 bp, Artificial Sequence
  mmSKRIPTE0002992_Pdgfd_4
  gRNA
tcgtgggaagaagactgcat

SEQ ID NO: 132214 - DNA, 20 bp, Artificial Sequence
  mmSKRIPTE0002993_Pdgfd_5
  gRNA
tatttactgaagtcccctag

SEQ ID NO: 132215 - DNA, 20 bp, Artificial Sequence
  mmSKRIPTE0002994_Pdgfd_6
  gRNA
tcatctgagatgtcatgccg

SEQ ID NO: 132216 - DNA, 20 bp, Artificial Sequence
  mmSKRIPTE0002995_Pdgfd_7
  gRNA
ataattatgccactgccaca

SEQ ID NO: 132217 - DNA, 20 bp, Artificial Sequence
  mmSKRIPTE0002996_Pdgfd_8
  gRNA
agcagctaaagttcgcgcac

SEQ ID NO: 132218 - DNA, 20 bp, Artificial Sequence
  mmSKRIPTE0002997_Pdgfd_9
  gRNA
tagtccgaattgatggtcaa

SEQ ID NO: 132219 - DNA, 20 bp, Artificial Sequence
  mmSKRIPTE0002998_Icosl_1
  gRNA
gtaatgctttgtactcggga

SEQ ID NO: 132220 - DNA, 20 bp, Artificial Sequence
  mmSKRIPTE0002999_Icosl_2
  gRNA
agagactgaagtcggtgcaa

SEQ ID NO: 132221 - DNA, 20 bp, Artificial Sequence
  mmSKRIPTE0003000_Icosl_3
  gRNA
ccgagggagatctctccagt

SEQ ID NO: 132222 - DNA, 20 bp, Artificial Sequence
  mmSKRIPTE0003001_Icosl_4
  gRNA
ccagtgtgatgctcgtcctg

SEQ ID NO: 132223 - DNA, 20 bp, Artificial Sequence
  mmSKRIPTE0003002_Icosl_5
  gRNA
gctcccttggacatctcgtg

SEQ ID NO: 132224 - DNA, 20 bp, Artificial Sequence
  mmSKRIPTE0003003_Icosl_6
  gRNA
acggactcactttagctgca

SEQ ID NO: 132225 - DNA, 20 bp, Artificial Sequence
  mmSKRIPTE0003004_Icosl_7
  gRNA
attgcccgacgctagcgcag

SEQ ID NO: 132226 - DNA, 20 bp, Artificial Sequence
  mmSKRIPTE0003005_Icosl_8
  gRNA
aggaggaatcagacgttaca

SEQ ID NO: 132227 - DNA, 20 bp, Artificial Sequence
  mmSKRIPTE0003006_Icosl_9
  gRNA
tcggacgcggagagttgcag

SEQ ID NO: 132228 - DNA, 20 bp, Artificial Sequence
  mmSKRIPTE0003007_Ube2n_1
  gRNA
gaggcctctctaaggcatcg

SEQ ID NO: 132229 - DNA, 20 bp, Artificial Sequence
  mmSKRIPTE0003008_Ube2n_2
  gRNA
tgaagggacagcataggcgt

SEQ ID NO: 132230 - DNA, 20 bp, Artificial Sequence
  mmSKRIPTE0003009_Ube2n_3
  gRNA
cagggactacatttcccgag

SEQ ID NO: 132231 - DNA, 20 bp, Artificial Sequence
  mmSKRIPTE0003010_Ube2n_4
  gRNA
gacctaatgaacccggcaag

SEQ ID NO: 132232 - DNA, 20 bp, Artificial Sequence
  mmSKRIPTE0003011_Ube2n_5
  gRNA
catcaaggtaaccgcccagg

SEQ ID NO: 132233 - DNA, 20 bp, Artificial Sequence
  mmSKRIPTE0003012_Ube2n_6
  gRNA
ccactcgagcgtgaggagag

SEQ ID NO: 132234 - DNA, 20 bp, Artificial Sequence
  mmSKRIPTE0003013_Ube2n_7
  gRNA
gtaaggcatcagctatgact

SEQ ID NO: 132235 - DNA, 20 bp, Artificial Sequence
  mmSKRIPTE0003014_Ube2n_8
  gRNA
ttagactgatgatcattgtg

SEQ ID NO: 132236 - DNA, 20 bp, Artificial Sequence
  mmSKRIPTE0003015_Ube2n_9
  gRNA
gcttgtccggcgttcagagg

SEQ ID NO: 132237 - DNA, 20 bp, Artificial Sequence
  mmSKRIPTE0003016_Sox4_1
  gRNA
tgtgggcggaatcggcgctg

SEQ ID NO: 132238 - DNA, 20 bp, Artificial Sequence
  mmSKRIPTE0003017_Sox4_2
  gRNA
cgaggagtttctccaaacgt

SEQ ID NO: 132239 - DNA, 20 bp, Artificial Sequence
  mmSKRIPTE0003018_Sox4_3
  gRNA
gtcccgatcgagcgccgatg

SEQ ID NO: 132240 - DNA, 20 bp, Artificial Sequence
  mmSKRIPTE0003019_Sox4_4
  gRNA
ttggagcttctcattgcacg

SEQ ID NO: 132241 - DNA, 20 bp, Artificial Sequence
  mmSKRIPTE0003020_Sox4_5
  gRNA
ccgccaacctagagtccccg

SEQ ID NO: 132242 - DNA, 20 bp, Artificial Sequence
  mmSKRIPTE0003021_Sox4_6
  gRNA
agaagcgcgaggcggaattg

SEQ ID NO: 132243 - DNA, 20 bp, Artificial Sequence
  mmSKRIPTE0003022_Sox4_7
  gRNA
aaatggacatggggacctcg

SEQ ID NO: 132244 - DNA, 20 bp, Artificial Sequence
  mmSKRIPTE0003023_Sox4_8
  gRNA
ttgcagttcacgagagctcg

SEQ ID NO: 132245 - DNA, 20 bp, Artificial Sequence
  mmSKRIPTE0003024_Sox4_9
  gRNA
gcaaagcttctaaagaccga

SEQ ID NO: 132246 - DNA, 20 bp, Artificial Sequence
  mmSKRIPTE0003025_Map3k8_1
  gRNA
gaactgcgacctaggagacg

SEQ ID NO: 132247 - DNA, 20 bp, Artificial Sequence
  mmSKRIPTE0003026_Map3k8_2
  gRNA
ctaagcaactccatcaccgt

SEQ ID NO: 132248 - DNA, 20 bp, Artificial Sequence
  mmSKRIPTE0003027_Map3k8_3
  gRNA
acaccttgcgcaagaccgcg

SEQ ID NO: 132249 - DNA, 20 bp, Artificial Sequence
  mmSKRIPTE0003028_Map3k8_4
  gRNA
gcccactgttaaatgcagtg

SEQ ID NO: 132250 - DNA, 20 bp, Artificial Sequence
  mmSKRIPTE0003029_Map3k8_5
  gRNA
atctgtcagatatgggaccg

SEQ ID NO: 132251 - DNA, 20 bp, Artificial Sequence
  mmSKRIPTE0003030_Map3k8_6
  gRNA
cccaccggtgaacactcgag

SEQ ID NO: 132252 - DNA, 20 bp, Artificial Sequence
  mmSKRIPTE0003031_Map3k8_7
  gRNA
catccatcagccgtattcca

SEQ ID NO: 132253 - DNA, 20 bp, Artificial Sequence
  mmSKRIPTE0003032_Map3k8_8
  gRNA
atgtgtataacagagcaccg

SEQ ID NO: 132254 - DNA, 20 bp, Artificial Sequence
  mmSKRIPTE0003033_Map3k8_9
  gRNA
gctacttcaatattgttcgt

SEQ ID NO: 132255 - DNA, 20 bp, Artificial Sequence
  mmSKRIPTE0003034_Rock1_1
  gRNA
cgataccttcttgcccgcag

SEQ ID NO: 132256 - DNA, 20 bp, Artificial Sequence
  mmSKRIPTE0003035_Rock1_2
  gRNA
tcagggctagctaaacaact

SEQ ID NO: 132257 - DNA, 20 bp, Artificial Sequence
  mmSKRIPTE0003036_Rock1_3
  gRNA
caagcaccaatctatcgaag

SEQ ID NO: 132258 - DNA, 20 bp, Artificial Sequence
  mmSKRIPTE0003037_Rock1_4
  gRNA
cgaacggacccttaaaacac

SEQ ID NO: 132259 - DNA, 20 bp, Artificial Sequence
  mmSKRIPTE0003038_Rock1_5
  gRNA
ctgcggctacaaacccaccg

SEQ ID NO: 132260 - DNA, 20 bp, Artificial Sequence
  mmSKRIPTE0003039_Rock1_6
  gRNA
tcgctgtcacaccgagcctg

SEQ ID NO: 132261 - DNA, 20 bp, Artificial Sequence
  mmSKRIPTE0003040_Rock1_7
  gRNA
acatcaactcttgttaccag

SEQ ID NO: 132262 - DNA, 20 bp, Artificial Sequence
  mmSKRIPTE0003041_Rock1_8
  gRNA
tgtagtaatccatacaacca

SEQ ID NO: 132263 - DNA, 20 bp, Artificial Sequence
  mmSKRIPTE0003042_Rock1_9
  gRNA
gctcgtaggtgagtaaagca

SEQ ID NO: 132264 - DNA, 20 bp, Artificial Sequence
  mmSKRIPTE0003043_Ticam2_1
  gRNA
tttgcagaatctagacgatg

SEQ ID NO: 132265 - DNA, 20 bp, Artificial Sequence
  mmSKRIPTE0003044_Ticam2_2
  gRNA
tcgaagttctatgagcggaa

SEQ ID NO: 132266 - DNA, 20 bp, Artificial Sequence
  mmSKRIPTE0003045_Ticam2_3
  gRNA
agtggtactgcttgaccacg

SEQ ID NO: 132267 - DNA, 20 bp, Artificial Sequence
  mmSKRIPTE0003046_Ticam2_4
  gRNA
acaactccgtcatacccatg

SEQ ID NO: 132268 - DNA, 20 bp, Artificial Sequence
  mmSKRIPTE0003047_Ticam2_5
  gRNA
tcgaaagtagcccaatccta

SEQ ID NO: 132269 - DNA, 20 bp, Artificial Sequence
  mmSKRIPTE0003048_Ticam2_6
  gRNA
tgcagaagatgacaccgacg

SEQ ID NO: 132270 - DNA, 20 bp, Artificial Sequence
  mmSKRIPTE0003049_Ticam2_7
  gRNA
ttcatgtaaagtcacaatcc

SEQ ID NO: 132271 - DNA, 20 bp, Artificial Sequence
  mmSKRIPTE0003050_Ticam2_8
  gRNA
ctgcggatgaatgtgccagt

SEQ ID NO: 132272 - DNA, 20 bp, Artificial Sequence
  mmSKRIPTE0003051_Ticam2_9
  gRNA
gagacgccttagcctccagt

SEQ ID NO: 132273 - DNA, 20 bp, Artificial Sequence
  mmSKRIPTE0003052_Gal_1
  gRNA
agactgcgatggtatcagtg

SEQ ID NO: 132274 - DNA, 20 bp, Artificial Sequence
  mmSKRIPTE0003053_Gal_2
  gRNA
acagtgcatagggtaatgga

SEQ ID NO: 132275 - DNA, 20 bp, Artificial Sequence
  mmSKRIPTE0003054_Gal_3
  gRNA
gttagacagcctaggacccg

SEQ ID NO: 132276 - DNA, 20 bp, Artificial Sequence
  mmSKRIPTE0003055_Gal_4
  gRNA
ctgccgctatttatgcccag

SEQ ID NO: 132277 - DNA, 20 bp, Artificial Sequence
  mmSKRIPTE0003056_Gal_5
  gRNA
cagccctgcatcactcacgt

SEQ ID NO: 132278 - DNA, 20 bp, Artificial Sequence
  mmSKRIPTE0003057_Gal_6
  gRNA
gagagcggttccggtcacag

SEQ ID NO: 132279 - DNA, 20 bp, Artificial Sequence
  mmSKRIPTE0003058_Gal_7
  gRNA
aggatggttcattgtccctg

SEQ ID NO: 132280 - DNA, 20 bp, Artificial Sequence
  mmSKRIPTE0003059_Gal_8
  gRNA
gtcaggctctagtcctcctg

SEQ ID NO: 132281 - DNA, 20 bp, Artificial Sequence
  mmSKRIPTE0003060_Gal_9
  gRNA
agatcatttagcgacaagca

SEQ ID NO: 132282 - DNA, 20 bp, Artificial Sequence
  mmSKRIPTE0003061_Zc3h8_1
  gRNA
ttgtgtttccgcagtcagcg

SEQ ID NO: 132283 - DNA, 20 bp, Artificial Sequence
  mmSKRIPTE0003062_Zc3h8_2
  gRNA
gcacacgatcacgacgacac

SEQ ID NO: 132284 - DNA, 20 bp, Artificial Sequence
  mmSKRIPTE0003063_Zc3h8_3
  gRNA
actacactacagcgtcgtca

SEQ ID NO: 132285 - DNA, 20 bp, Artificial Sequence
  mmSKRIPTE0003064_Zc3h8_4
  gRNA
ctcccgttcgacacgcagag

SEQ ID NO: 132286 - DNA, 20 bp, Artificial Sequence
  mmSKRIPTE0003065_Zc3h8_5
  gRNA
ccatcatagctctcgactgg

SEQ ID NO: 132287 - DNA, 20 bp, Artificial Sequence
  mmSKRIPTE0003066_Zc3h8_6
  gRNA
ggtatgctgagacggtgcat

SEQ ID NO: 132288 - DNA, 20 bp, Artificial Sequence
  mmSKRIPTE0003067_Zc3h8_7
  gRNA
ccttgactcatcctcacacg

SEQ ID NO: 132289 - DNA, 20 bp, Artificial Sequence
  mmSKRIPTE0003068_Zc3h8_8
  gRNA
gtactgaacaaccagcgaag

SEQ ID NO: 132290 - DNA, 20 bp, Artificial Sequence
  mmSKRIPTE0003069_Zc3h8_9
  gRNA
tatgccttataataacgcag

SEQ ID NO: 132291 - DNA, 20 bp, Artificial Sequence
  mmSKRIPTE0003070_Pik3ca_1
  gRNA
gcgcactatttatgacccag

SEQ ID NO: 132292 - DNA, 20 bp, Artificial Sequence
  mmSKRIPTE0003071_Pik3ca_2
  gRNA
acggtgcgtaagtaccaaca

SEQ ID NO: 132293 - DNA, 20 bp, Artificial Sequence
  mmSKRIPTE0003072_Pik3ca_3
  gRNA
acaaggacggtcatctacag

SEQ ID NO: 132294 - DNA, 20 bp, Artificial Sequence
  mmSKRIPTE0003073_Pik3ca_4
  gRNA
ccagtgttctgtctaacacg

SEQ ID NO: 132295 - DNA, 20 bp, Artificial Sequence
  mmSKRIPTE0003074_Pik3ca_5
  gRNA
acgtgccccaaccccgacat

SEQ ID NO: 132296 - DNA, 20 bp, Artificial Sequence
  mmSKRIPTE0003075_Pik3ca_6
  gRNA
caaccgggtgagataactga

SEQ ID NO: 132297 - DNA, 20 bp, Artificial Sequence
  mmSKRIPTE0003076_Pik3ca_7
  gRNA
ccatcttcgggtgaactgtg

SEQ ID NO: 132298 - DNA, 20 bp, Artificial Sequence
  mmSKRIPTE0003077_Pik3ca_8
  gRNA
tatgtgctatggaaacggag

SEQ ID NO: 132299 - DNA, 20 bp, Artificial Sequence
  mmSKRIPTE0003078_Pik3ca_9
  gRNA
tacggatacgtagcttacga

SEQ ID NO: 132300 - DNA, 20 bp, Artificial Sequence
  mmSKRIPTE0003079_Pik3cd_1
  gRNA
acgaggcttgagacggtggt

SEQ ID NO: 132301 - DNA, 20 bp, Artificial Sequence
  mmSKRIPTE0003080_Pik3cd_2
  gRNA
caaccttaagcaacagctcg

SEQ ID NO: 132302 - DNA, 20 bp, Artificial Sequence
  mmSKRIPTE0003081_Pik3cd_3
  gRNA
ccagagagtagggtcgacag

SEQ ID NO: 132303 - DNA, 20 bp, Artificial Sequence
  mmSKRIPTE0003082_Pik3cd_4
  gRNA
gactcacgtcagcttccgaa

SEQ ID NO: 132304 - DNA, 20 bp, Artificial Sequence
  mmSKRIPTE0003083_Pik3cd_5
  gRNA
cttgaagaactagccaacgg

SEQ ID NO: 132305 - DNA, 20 bp, Artificial Sequence
  mmSKRIPTE0003084_Pik3cd_6
  gRNA
gtgccccatttagctccgtg

SEQ ID NO: 132306 - DNA, 20 bp, Artificial Sequence
  mmSKRIPTE0003085_Pik3cd_7
  gRNA
caccacctaggcgcaccgtg

SEQ ID NO: 132307 - DNA, 20 bp, Artificial Sequence
  mmSKRIPTE0003086_Pik3cd_8
  gRNA
tgaggttggcccaagcgatg

SEQ ID NO: 132308 - DNA, 20 bp, Artificial Sequence
  mmSKRIPTE0003087_Pik3cd_9
  gRNA
accacccattatcaccacca

SEQ ID NO: 132309 - DNA, 20 bp, Artificial Sequence
  mmSKRIPTE0003088_Jchain_1
  gRNA
agtcagggtagcaagaatcg

SEQ ID NO: 132310 - DNA, 20 bp, Artificial Sequence
  mmSKRIPTE0003089_Jchain_2
  gRNA
taggatcatcccttccaccg

SEQ ID NO: 132311 - DNA, 20 bp, Artificial Sequence
  mmSKRIPTE0003090_Jchain_3
  gRNA
atacctaagtgggaccatag

SEQ ID NO: 132312 - DNA, 20 bp, Artificial Sequence
  mmSKRIPTE0003091_Jchain_4
  gRNA
aggctgtccttgtaacaggt

SEQ ID NO: 132313 - DNA, 20 bp, Artificial Sequence
  mmSKRIPTE0003092_Jchain_5
  gRNA
ctgtaagaaatgcgatcctg

SEQ ID NO: 132314 - DNA, 20 bp, Artificial Sequence
  mmSKRIPTE0003093_Jchain_6
  gRNA
aacagatccctgtagtaggg

SEQ ID NO: 132315 - DNA, 20 bp, Artificial Sequence
  mmSKRIPTE0003094_Jchain_7
  gRNA
atacctctttatgtaatgca

SEQ ID NO: 132316 - DNA, 20 bp, Artificial Sequence
  mmSKRIPTE0003095_Jchain_8
  gRNA
gcctaatcatctgcacagca

SEQ ID NO: 132317 - DNA, 20 bp, Artificial Sequence
  mmSKRIPTE0003096_Jchain_9
  gRNA
atacatctcctgcttctgaa

SEQ ID NO: 132318 - DNA, 20 bp, Artificial Sequence
  mmSKRIPTE0003097_Ephb4_1
  gRNA
cagaggtccctactgaaccg

SEQ ID NO: 132319 - DNA, 20 bp, Artificial Sequence
  mmSKRIPTE0003098_Ephb4_2
  gRNA
gactgaaggtgagttcggcg

SEQ ID NO: 132320 - DNA, 20 bp, Artificial Sequence
  mmSKRIPTE0003099_Ephb4_3
  gRNA
catcatggtgaagcgtatcg

SEQ ID NO: 132321 - DNA, 20 bp, Artificial Sequence
  mmSKRIPTE0003100_Ephb4_4
  gRNA
tcactcgcctacccatcttg

SEQ ID NO: 132322 - DNA, 20 bp, Artificial Sequence
  mmSKRIPTE0003101_Ephb4_5
  gRNA
cctccaaggactcaccaccg

SEQ ID NO: 132323 - DNA, 20 bp, Artificial Sequence
  mmSKRIPTE0003102_Ephb4_6
  gRNA
aatgtcaccactgaccgtga

SEQ ID NO: 132324 - DNA, 20 bp, Artificial Sequence
  mmSKRIPTE0003103_Ephb4_7
  gRNA
agccggaccacaaaccctag

SEQ ID NO: 132325 - DNA, 20 bp, Artificial Sequence
  mmSKRIPTE0003104_Ephb4_8
  gRNA
gcgagtacccgggaaaggtg

SEQ ID NO: 132326 - DNA, 20 bp, Artificial Sequence
  mmSKRIPTE0003105_Ephb4_9
  gRNA
ttcagagtcgtacaaacgtg

SEQ ID NO: 132327 - DNA, 20 bp, Artificial Sequence
  mmSKRIPTE0003106_Epo_1
  gRNA
gcaagttcgtcggtccacca

SEQ ID NO: 132328 - DNA, 20 bp, Artificial Sequence
  mmSKRIPTE0003107_Epo_2
  gRNA
gttggcatgacacagtgacg

SEQ ID NO: 132329 - DNA, 20 bp, Artificial Sequence
  mmSKRIPTE0003108_Epo_3
  gRNA
aaaccccttagtgcacgtgg

SEQ ID NO: 132330 - DNA, 20 bp, Artificial Sequence
  mmSKRIPTE0003109_Epo_4
  gRNA
agaactgttaaagaaccctg

SEQ ID NO: 132331 - DNA, 20 bp, Artificial Sequence
  mmSKRIPTE0003110_Epo_5
  gRNA
acaaatccgagctgattctg

SEQ ID NO: 132332 - DNA, 20 bp, Artificial Sequence
  mmSKRIPTE0003111_Epo_6
  gRNA
aaggatgaagacttgcagcg

SEQ ID NO: 132333 - DNA, 20 bp, Artificial Sequence
  mmSKRIPTE0003112_Epo_7
  gRNA
tccactgtgagtgttcggag

SEQ ID NO: 132334 - DNA, 20 bp, Artificial Sequence
  mmSKRIPTE0003113_Epo_8
  gRNA
tctacgccaacttcctccgg

SEQ ID NO: 132335 - DNA, 20 bp, Artificial Sequence
  mmSKRIPTE0003114_Epo_9
  gRNA
tcagtcctgtataatagcca

SEQ ID NO: 132336 - DNA, 20 bp, Artificial Sequence
  mmSKRIPTE0003115_Arhgef5_1
  gRNA
tgaagtgcactgctaatacg

SEQ ID NO: 132337 - DNA, 20 bp, Artificial Sequence
  mmSKRIPTE0003116_Arhgef5_2
  gRNA
gcaaaattgaaggtctacga

SEQ ID NO: 132338 - DNA, 20 bp, Artificial Sequence
  mmSKRIPTE0003117_Arhgef5_3
  gRNA
tccgttctcctccatccgag

SEQ ID NO: 132339 - DNA, 20 bp, Artificial Sequence
  mmSKRIPTE0003118_Arhgef5_4
  gRNA
gtatgccagagtcaacttag

SEQ ID NO: 132340 - DNA, 20 bp, Artificial Sequence
  mmSKRIPTE0003119_Arhgef5_5
  gRNA
ccgattgaaagctattctag

SEQ ID NO: 132341 - DNA, 20 bp, Artificial Sequence
  mmSKRIPTE0003120_Arhgef5_6
  gRNA
cctcatggtagtccgacatg

SEQ ID NO: 132342 - DNA, 20 bp, Artificial Sequence
  mmSKRIPTE0003121_Arhgef5_7
  gRNA
ctcgaggcttgtaggcacgg

SEQ ID NO: 132343 - DNA, 20 bp, Artificial Sequence
  mmSKRIPTE0003122_Arhgef5_8
  gRNA
tgcctttcgacgatgccgtg

SEQ ID NO: 132344 - DNA, 20 bp, Artificial Sequence
  mmSKRIPTE0003123_Arhgef5_9
  gRNA
atcccctgagagaacatacg

SEQ ID NO: 132345 - DNA, 20 bp, Artificial Sequence
  mmSKRIPTE0003124_Kat6a_1
  gRNA
accaacgtaagggctacggc

SEQ ID NO: 132346 - DNA, 20 bp, Artificial Sequence
  mmSKRIPTE0003125_Kat6a_2
  gRNA
gtgaatctgcagtctccgcg

SEQ ID NO: 132347 - DNA, 20 bp, Artificial Sequence
  mmSKRIPTE0003126_Kat6a_3
  gRNA
aaactcgtgcagacgcacga

SEQ ID NO: 132348 - DNA, 20 bp, Artificial Sequence
  mmSKRIPTE0003127_Kat6a_4
  gRNA
cacttaacggaccttacatg

SEQ ID NO: 132349 - DNA, 20 bp, Artificial Sequence
  mmSKRIPTE0003128_Kat6a_5
  gRNA
ggcaatggaagtaccctctg

SEQ ID NO: 132350 - DNA, 20 bp, Artificial Sequence
  mmSKRIPTE0003129_Kat6a_6
  gRNA
gtacatactacagaggcgag

SEQ ID NO: 132351 - DNA, 20 bp, Artificial Sequence
  mmSKRIPTE0003130_Kat6a_7
  gRNA
ctggtgacttgtaagccgag

SEQ ID NO: 132352 - DNA, 20 bp, Artificial Sequence
  mmSKRIPTE0003131_Kat6a_8
  gRNA
tgagagtgaaggccttacgg

SEQ ID NO: 132353 - DNA, 20 bp, Artificial Sequence
  mmSKRIPTE0003132_Kat6a_9
  gRNA
aaaattatggacaagcccga

SEQ ID NO: 132354 - DNA, 20 bp, Artificial Sequence
  mmSKRIPTE0003133_Drd2_1
  gRNA
tttccactgagtctccgtcg

SEQ ID NO: 132355 - DNA, 20 bp, Artificial Sequence
  mmSKRIPTE0003134_Drd2_2
  gRNA
gttgtggagattatttaccc

SEQ ID NO: 132356 - DNA, 20 bp, Artificial Sequence
  mmSKRIPTE0003135_Drd2_3
  gRNA
agaactcagactctcgtcag

SEQ ID NO: 132357 - DNA, 20 bp, Artificial Sequence
  mmSKRIPTE0003136_Drd2_4
  gRNA
gccatcagcatcgacaggtg

SEQ ID NO: 132358 - DNA, 20 bp, Artificial Sequence
  mmSKRIPTE0003137_Drd2_5
  gRNA
caggttcagtggatccattg

SEQ ID NO: 132359 - DNA, 20 bp, Artificial Sequence
  mmSKRIPTE0003138_Drd2_6
  gRNA
tggcgatcatgacagtaact

SEQ ID NO: 132360 - DNA, 20 bp, Artificial Sequence
  mmSKRIPTE0003139_Drd2_7
  gRNA
ggtacgatgatgatctggag

SEQ ID NO: 132361 - DNA, 20 bp, Artificial Sequence
  mmSKRIPTE0003140_Drd2_8
  gRNA
agacgcttcgaccggtgcag

SEQ ID NO: 132362 - DNA, 20 bp, Artificial Sequence
  mmSKRIPTE0003141_Drd2_9
  gRNA
acatgggtcacacaagacag

SEQ ID NO: 132363 - DNA, 20 bp, Artificial Sequence
  mmSKRIPTE0003142_Atm_1
  gRNA
taattcagcatgacatcgtg

SEQ ID NO: 132364 - DNA, 20 bp, Artificial Sequence
  mmSKRIPTE0003143_Atm_2
  gRNA
acggtttatgttcggctgag

SEQ ID NO: 132365 - DNA, 20 bp, Artificial Sequence
  mmSKRIPTE0003144_Atm_3
  gRNA
atccaagtgataatcgactg

SEQ ID NO: 132366 - DNA, 20 bp, Artificial Sequence
  mmSKRIPTE0003145_Atm_4
  gRNA
ttgatggtaggatcgaacag

SEQ ID NO: 132367 - DNA, 20 bp, Artificial Sequence
  mmSKRIPTE0003146_Atm_5
  gRNA
agcctgtaaaccttctaggt

SEQ ID NO: 132368 - DNA, 20 bp, Artificial Sequence
  mmSKRIPTE0003147_Atm_6
  gRNA
cccaactccaagacccggag

SEQ ID NO: 132369 - DNA, 20 bp, Artificial Sequence
  mmSKRIPTE0003148_Atm_7
  gRNA
agcaccaaacccattaggag

SEQ ID NO: 132370 - DNA, 20 bp, Artificial Sequence
  mmSKRIPTE0003149_Atm_8
  gRNA
tatagtagctgttgtcacgt

SEQ ID NO: 132371 - DNA, 20 bp, Artificial Sequence
  mmSKRIPTE0003150_Atm_9
  gRNA
tctaggcacgataatagcac

SEQ ID NO: 132372 - DNA, 20 bp, Artificial Sequence
  mmSKRIPTE0003151_Impdh2_1
  gRNA
taatctagtttatattggcg

SEQ ID NO: 132373 - DNA, 20 bp, Artificial Sequence
  mmSKRIPTE0003152_Impdh2_2
  gRNA
tggaatggccatcgcgatgg

SEQ ID NO: 132374 - DNA, 20 bp, Artificial Sequence
  mmSKRIPTE0003153_Impdh2_3
  gRNA
gcataggggctacttacgaa

SEQ ID NO: 132375 - DNA, 20 bp, Artificial Sequence
  mmSKRIPTE0003154_Impdh2_4
  gRNA
tgctgggaattagaggcgtg

SEQ ID NO: 132376 - DNA, 20 bp, Artificial Sequence
  mmSKRIPTE0003155_Impdh2_5
  gRNA
tttcttagctagagcacgca

SEQ ID NO: 132377 - DNA, 20 bp, Artificial Sequence
  mmSKRIPTE0003156_Impdh2_6
  gRNA
tccttccagaaatacgaaca

SEQ ID NO: 132378 - DNA, 20 bp, Artificial Sequence
  mmSKRIPTE0003157_Impdh2_7
  gRNA
acccactctaggaactggat

SEQ ID NO: 132379 - DNA, 20 bp, Artificial Sequence
  mmSKRIPTE0003158_Impdh2_8
  gRNA
gccagctccgcctctatacg

SEQ ID NO: 132380 - DNA, 20 bp, Artificial Sequence
  mmSKRIPTE0003159_Impdh2_9
  gRNA
cgggtctagggcacccatcg

SEQ ID NO: 132381 - DNA, 20 bp, Artificial Sequence
  mmSKRIPTE0003160_Cmtm7_1
  gRNA
tcgcaccccgggtttcggtg

SEQ ID NO: 132382 - DNA, 20 bp, Artificial Sequence
  mmSKRIPTE0003161_Cmtm7_2
  gRNA
gcgcgatgtctcatggatcg

SEQ ID NO: 132383 - DNA, 20 bp, Artificial Sequence
  mmSKRIPTE0003162_Cmtm7_3
  gRNA
agatcccagtcagagttgcg

SEQ ID NO: 132384 - DNA, 20 bp, Artificial Sequence
  mmSKRIPTE0003163_Cmtm7_4
  gRNA
ccaacttccgcgtgtctaga

SEQ ID NO: 132385 - DNA, 20 bp, Artificial Sequence
  mmSKRIPTE0003164_Cmtm7_5
  gRNA
tgatccataagggaagccga

SEQ ID NO: 132386 - DNA, 20 bp, Artificial Sequence
  mmSKRIPTE0003165_Cmtm7_6
  gRNA
aacctggggacccgtacacg

SEQ ID NO: 132387 - DNA, 20 bp, Artificial Sequence
  mmSKRIPTE0003166_Cmtm7_7
  gRNA
tcacaatcccaatttgcccg

SEQ ID NO: 132388 - DNA, 20 bp, Artificial Sequence
  mmSKRIPTE0003167_Cmtm7_8
  gRNA
gacttggtcatctttctacg

SEQ ID NO: 132389 - DNA, 20 bp, Artificial Sequence
  mmSKRIPTE0003168_Cmtm7_9
  gRNA
ccacggcgccctgttcaaag

SEQ ID NO: 132390 - DNA, 20 bp, Artificial Sequence
  mmSKRIPTE0003169_Foxp3_1
  gRNA
tcccacgctcgggtacaccc

SEQ ID NO: 132391 - DNA, 20 bp, Artificial Sequence
  mmSKRIPTE0003170_Foxp3_2
  gRNA
acggcggcctgtttgcagtg

SEQ ID NO: 132392 - DNA, 20 bp, Artificial Sequence
  mmSKRIPTE0003171_Foxp3_3
  gRNA
ccacgggcactatcacacat

SEQ ID NO: 132393 - DNA, 20 bp, Artificial Sequence
  mmSKRIPTE0003172_Foxp3_4
  gRNA
accactctgtcgtgaatgtg

SEQ ID NO: 132394 - DNA, 20 bp, Artificial Sequence
  mmSKRIPTE0003173_Foxp3_5
  gRNA
tatgtctcttcatacatgcg

SEQ ID NO: 132395 - DNA, 20 bp, Artificial Sequence
  mmSKRIPTE0003174_Foxp3_6
  gRNA
gcttacccatcggataaggg

SEQ ID NO: 132396 - DNA, 20 bp, Artificial Sequence
  mmSKRIPTE0003175_Foxp3_7
  gRNA
cggtttccataggtacacgt

SEQ ID NO: 132397 - DNA, 20 bp, Artificial Sequence
  mmSKRIPTE0003176_Foxp3_8
  gRNA
aactgatacactaagccaag

SEQ ID NO: 132398 - DNA, 20 bp, Artificial Sequence
  mmSKRIPTE0003177_Foxp3_9
  gRNA
tgtgcctgagaacgaccagg

SEQ ID NO: 132399 - DNA, 20 bp, Artificial Sequence
  mmSKRIPTE0003178_Tsc1_1
  gRNA
aatagcccaacttcaccgga

SEQ ID NO: 132400 - DNA, 20 bp, Artificial Sequence
  mmSKRIPTE0003179_Tsc1_2
  gRNA
accaacgtgttgacaagcat

SEQ ID NO: 132401 - DNA, 20 bp, Artificial Sequence
  mmSKRIPTE0003180_Tsc1_3
  gRNA
gtaccgtgacctatgctaag

SEQ ID NO: 132402 - DNA, 20 bp, Artificial Sequence
  mmSKRIPTE0003181_Tsc1_4
  gRNA
cacagacagtcaaacgaccg

SEQ ID NO: 132403 - DNA, 20 bp, Artificial Sequence
  mmSKRIPTE0003182_Tsc1_5
  gRNA
taggggtcgataccaacact

SEQ ID NO: 132404 - DNA, 20 bp, Artificial Sequence
  mmSKRIPTE0003183_Tsc1_6
  gRNA
ctgaaatgcaacttgtctcg

SEQ ID NO: 132405 - DNA, 20 bp, Artificial Sequence
  mmSKRIPTE0003184_Tsc1_7
  gRNA
aaaggttggacgcctcacag

SEQ ID NO: 132406 - DNA, 20 bp, Artificial Sequence
  mmSKRIPTE0003185_Tsc1_8
  gRNA
acgataaggtgagtactggt

SEQ ID NO: 132407 - DNA, 20 bp, Artificial Sequence
  mmSKRIPTE0003186_Tsc1_9
  gRNA
acaaggcagctggacccgag

SEQ ID NO: 132408 - DNA, 20 bp, Artificial Sequence
  mmSKRIPTE0003187_Rassf2_1
  gRNA
gttcatgtgtacgtgccacg

SEQ ID NO: 132409 - DNA, 20 bp, Artificial Sequence
  mmSKRIPTE0003188_Rassf2_2
  gRNA
taagcgctctaatacacgag

SEQ ID NO: 132410 - DNA, 20 bp, Artificial Sequence
  mmSKRIPTE0003189_Rassf2_3
  gRNA
tgcatccgctctcgccgcag

SEQ ID NO: 132411 - DNA, 20 bp, Artificial Sequence
  mmSKRIPTE0003190_Rassf2_4
  gRNA
aatgattcggcaaaggctcg

SEQ ID NO: 132412 - DNA, 20 bp, Artificial Sequence
  mmSKRIPTE0003191_Rassf2_5
  gRNA
tcaagcgtggcagatccgtg

SEQ ID NO: 132413 - DNA, 20 bp, Artificial Sequence
  mmSKRIPTE0003192_Rassf2_6
  gRNA
gggcgttgttgctcggtgtg

SEQ ID NO: 132414 - DNA, 20 bp, Artificial Sequence
  mmSKRIPTE0003193_Rassf2_7
  gRNA
gattcattgcatccgccctg

SEQ ID NO: 132415 - DNA, 20 bp, Artificial Sequence
  mmSKRIPTE0003194_Rassf2_8
  gRNA
tcaagcgatcaggctcaggt

SEQ ID NO: 132416 - DNA, 20 bp, Artificial Sequence
  mmSKRIPTE0003195_Rassf2_9
  gRNA
gaatggtggagtcccgacag

SEQ ID NO: 132417 - DNA, 20 bp, Artificial Sequence
  mmSKRIPTE0003196_Hmgb2_1
  gRNA
actaccacgagtgtacaggc

SEQ ID NO: 132418 - DNA, 20 bp, Artificial Sequence
  mmSKRIPTE0003197_Hmgb2_2
  gRNA
aacttgaccagaccagtcgc

SEQ ID NO: 132419 - DNA, 20 bp, Artificial Sequence
  mmSKRIPTE0003198_Hmgb2_3
  gRNA
tcttaacgcgtagacgtggg

SEQ ID NO: 132420 - DNA, 20 bp, Artificial Sequence
  mmSKRIPTE0003199_Hmgb2_4
  gRNA
aaattggaagttacgagatg

SEQ ID NO: 132421 - DNA, 20 bp, Artificial Sequence
  mmSKRIPTE0003200_Hmgb2_5
  gRNA
ccaatcggaagccttctccg

SEQ ID NO: 132422 - DNA, 20 bp, Artificial Sequence
  mmSKRIPTE0003201_Hmgb2_6
  gRNA
aaaaaacgagtcaatcggca

SEQ ID NO: 132423 - DNA, 20 bp, Artificial Sequence
  mmSKRIPTE0003202_Hmgb2_7
  gRNA
agaaagccgtgtccggaccg

SEQ ID NO: 132424 - DNA, 20 bp, Artificial Sequence
  mmSKRIPTE0003203_Hmgb2_8
  gRNA
accccgactccaaatttgag

SEQ ID NO: 132425 - DNA, 20 bp, Artificial Sequence
  mmSKRIPTE0003204_Hmgb2_9
  gRNA
gcaggtaaggttcggccggg

SEQ ID NO: 132426 - DNA, 20 bp, Artificial Sequence
  mmSKRIPTE0003205_Rab27a_1
  gRNA
ctgccacagagaattgagcg

SEQ ID NO: 132427 - DNA, 20 bp, Artificial Sequence
  mmSKRIPTE0003206_Rab27a_2
  gRNA
ctcacttagctgatccgcag

SEQ ID NO: 132428 - DNA, 20 bp, Artificial Sequence
  mmSKRIPTE0003207_Rab27a_3
  gRNA
gcgttacagatggatgcccg

SEQ ID NO: 132429 - DNA, 20 bp, Artificial Sequence
  mmSKRIPTE0003208_Rab27a_4
  gRNA
aaaactggacttctacgagg

SEQ ID NO: 132430 - DNA, 20 bp, Artificial Sequence
  mmSKRIPTE0003209_Rab27a_5
  gRNA
actgtgttaaggcaggcgac

SEQ ID NO: 132431 - DNA, 20 bp, Artificial Sequence
  mmSKRIPTE0003210_Rab27a_6
  gRNA
catctgaatcctatataccc

SEQ ID NO: 132432 - DNA, 20 bp, Artificial Sequence
  mmSKRIPTE0003211_Rab27a_7
  gRNA
gcgtcatcgcaattgccaga

SEQ ID NO: 132433 - DNA, 20 bp, Artificial Sequence
  mmSKRIPTE0003212_Rab27a_8
  gRNA
cctaaatgacccgccaccgt

SEQ ID NO: 132434 - DNA, 20 bp, Artificial Sequence
  mmSKRIPTE0003213_Rab27a_9
  gRNA
gacttcagtagtgcccagag

SEQ ID NO: 132435 - DNA, 20 bp, Artificial Sequence
  mmSKRIPTE0003214_Nfkbia_1
  gRNA
ccagcgtttatagggcgccg

SEQ ID NO: 132436 - DNA, 20 bp, Artificial Sequence
  mmSKRIPTE0003215_Nfkbia_2
  gRNA
ccacttataatgtcagacgc

SEQ ID NO: 132437 - DNA, 20 bp, Artificial Sequence
  mmSKRIPTE0003216_Nfkbia_3
  gRNA
tgaatatcatataggcatcg

SEQ ID NO: 132438 - DNA, 20 bp, Artificial Sequence
  mmSKRIPTE0003217_Nfkbia_4
  gRNA
gcctgggtctaggcgctgtg

SEQ ID NO: 132439 - DNA, 20 bp, Artificial Sequence
  mmSKRIPTE0003218_Nfkbia_5
  gRNA
gatgacagggaaaccccccg

SEQ ID NO: 132440 - DNA, 20 bp, Artificial Sequence
  mmSKRIPTE0003219_Nfkbia_6
  gRNA
ctcagctcataataacctcg

SEQ ID NO: 132441 - DNA, 20 bp, Artificial Sequence
  mmSKRIPTE0003220_Nfkbia_7
  gRNA
ggcttgttcctgaagatcgg

SEQ ID NO: 132442 - DNA, 20 bp, Artificial Sequence
  mmSKRIPTE0003221_Nfkbia_8
  gRNA
acagccgtcagcgtgctgag

SEQ ID NO: 132443 - DNA, 20 bp, Artificial Sequence
  mmSKRIPTE0003222_Nfkbia_9
  gRNA
ggtagccgtggatagaggct

SEQ ID NO: 132444 - DNA, 20 bp, Artificial Sequence
  mmSKRIPTE0003223_Ednrb_1
  gRNA
ctagacaagaatgcgcaaag

SEQ ID NO: 132445 - DNA, 20 bp, Artificial Sequence
  mmSKRIPTE0003224_Ednrb_2
  gRNA
ctgccgtagaccagtcggtg

SEQ ID NO: 132446 - DNA, 20 bp, Artificial Sequence
  mmSKRIPTE0003225_Ednrb_3
  gRNA
agtcccgagaagtgacagcg

SEQ ID NO: 132447 - DNA, 20 bp, Artificial Sequence
  mmSKRIPTE0003226_Ednrb_4
  gRNA
cctttcacaccgacatgacg

SEQ ID NO: 132448 - DNA, 20 bp, Artificial Sequence
  mmSKRIPTE0003227_Ednrb_5
  gRNA
tagtacaagtacctccacag

SEQ ID NO: 132449 - DNA, 20 bp, Artificial Sequence
  mmSKRIPTE0003228_Ednrb_6
  gRNA
gccggtgattaacggccaga

SEQ ID NO: 132450 - DNA, 20 bp, Artificial Sequence
  mmSKRIPTE0003229_Ednrb_7
  gRNA
atatgatagcgaaaataccg

SEQ ID NO: 132451 - DNA, 20 bp, Artificial Sequence
  mmSKRIPTE0003230_Ednrb_8
  gRNA
agtgaacctaaggcacgtcg

SEQ ID NO: 132452 - DNA, 20 bp, Artificial Sequence
  mmSKRIPTE0003231_Ednrb_9
  gRNA
acacgtagaggacttaacaa

SEQ ID NO: 132453 - DNA, 20 bp, Artificial Sequence
  mmSKRIPTE0003232_Btnl2_1
  gRNA
acggtatagtctatctggcg

SEQ ID NO: 132454 - DNA, 20 bp, Artificial Sequence
  mmSKRIPTE0003233_Btnl2_2
  gRNA
acagatcgaaccgagacctg

SEQ ID NO: 132455 - DNA, 20 bp, Artificial Sequence
  mmSKRIPTE0003234_Btnl2_3
  gRNA
tgaaaggcctcggaaaacga

SEQ ID NO: 132456 - DNA, 20 bp, Artificial Sequence
  mmSKRIPTE0003235_Btnl2_4
  gRNA
ccattctcacgaggatcgtg

SEQ ID NO: 132457 - DNA, 20 bp, Artificial Sequence
  mmSKRIPTE0003236_Btnl2_5
  gRNA
gagaagccaaaagatccacc

SEQ ID NO: 132458 - DNA, 20 bp, Artificial Sequence
  mmSKRIPTE0003237_Btnl2_6
  gRNA
gcccaatccagtagcactag

SEQ ID NO: 132459 - DNA, 20 bp, Artificial Sequence
  mmSKRIPTE0003238_Btnl2_7
  gRNA
gaggagctgacacgttagca

SEQ ID NO: 132460 - DNA, 20 bp, Artificial Sequence
  mmSKRIPTE0003239_Btnl2_8
  gRNA
agatgagcaaaacatcgaga

SEQ ID NO: 132461 - DNA, 20 bp, Artificial Sequence
  mmSKRIPTE0003240_Btnl2_9
  gRNA
atgctcagaacttagaggtg

SEQ ID NO: 132462 - DNA, 20 bp, Artificial Sequence
  mmSKRIPTE0003241_Galp_1
  gRNA
atggtcaaattccacgtgcg

SEQ ID NO: 132463 - DNA, 20 bp, Artificial Sequence
  mmSKRIPTE0003242_Galp_2
  gRNA
gtaggaagtcctacttgcac

SEQ ID NO: 132464 - DNA, 20 bp, Artificial Sequence
  mmSKRIPTE0003243_Galp_3
  gRNA
gaatactggaggtaaacatg

SEQ ID NO: 132465 - DNA, 20 bp, Artificial Sequence
  mmSKRIPTE0003244_Galp_4
  gRNA
ggtcagacaaaggtgccttg

SEQ ID NO: 132466 - DNA, 20 bp, Artificial Sequence
  mmSKRIPTE0003245_Galp_5
  gRNA
agtatgtgcatatctgcaag

SEQ ID NO: 132467 - DNA, 20 bp, Artificial Sequence
  mmSKRIPTE0003246_Galp_6
  gRNA
ggtcaactgacataaccatg

SEQ ID NO: 132468 - DNA, 20 bp, Artificial Sequence
  mmSKRIPTE0003247_Galp_7
  gRNA
atttattagcatcgtatgtg

SEQ ID NO: 132469 - DNA, 20 bp, Artificial Sequence
  mmSKRIPTE0003248_Galp_8
  gRNA
aaaattaatatgaggccggt

SEQ ID NO: 132470 - DNA, 20 bp, Artificial Sequence
  mmSKRIPTE0003249_Galp_9
  gRNA
gttcttcagccggatgagtg

SEQ ID NO: 132471 - DNA, 20 bp, Artificial Sequence
  mmSKRIPTE0003250_Nfatc3_1
  gRNA
gtttgcagtagtcatcggcg

SEQ ID NO: 132472 - DNA, 20 bp, Artificial Sequence
  mmSKRIPTE0003251_Nfatc3_2
  gRNA
tcgcagaggactcacgcgat

SEQ ID NO: 132473 - DNA, 20 bp, Artificial Sequence
  mmSKRIPTE0003252_Nfatc3_3
  gRNA
actgagggaagattcccggt

SEQ ID NO: 132474 - DNA, 20 bp, Artificial Sequence
  mmSKRIPTE0003253_Nfatc3_4
  gRNA
cttcaaactcgtcttcggcg

SEQ ID NO: 132475 - DNA, 20 bp, Artificial Sequence
  mmSKRIPTE0003254_Nfatc3_5
  gRNA
cccagcatgaagcggcgctg

SEQ ID NO: 132476 - DNA, 20 bp, Artificial Sequence
  mmSKRIPTE0003255_Nfatc3_6
  gRNA
ctgacatcgcacggtcatgg

SEQ ID NO: 132477 - DNA, 20 bp, Artificial Sequence
  mmSKRIPTE0003256_Nfatc3_7
  gRNA
gccagctttctaggtcggaa

SEQ ID NO: 132478 - DNA, 20 bp, Artificial Sequence
  mmSKRIPTE0003257_Nfatc3_8
  gRNA
actgaaatggaaacggtgca

SEQ ID NO: 132479 - DNA, 20 bp, Artificial Sequence
  mmSKRIPTE0003258_Nfatc3_9
  gRNA
agccacggtcgcctcaacca

SEQ ID NO: 132480 - DNA, 20 bp, Artificial Sequence
  mmSKRIPTE0003259_Myo1g_1
  gRNA
aatcttcccctccgtcagtg

SEQ ID NO: 132481 - DNA, 20 bp, Artificial Sequence
  mmSKRIPTE0003260_Myo1g_2
  gRNA
ttggccacggcgtaaagatg

SEQ ID NO: 132482 - DNA, 20 bp, Artificial Sequence
  mmSKRIPTE0003261_Myo1g_3
  gRNA
caccgagggtctcggtttcg

SEQ ID NO: 132483 - DNA, 20 bp, Artificial Sequence
  mmSKRIPTE0003262_Myo1g_4
  gRNA
tcacggactcttcatcacca

SEQ ID NO: 132484 - DNA, 20 bp, Artificial Sequence
  mmSKRIPTE0003263_Myo1g_5
  gRNA
gtatggttctgggaccacca

SEQ ID NO: 132485 - DNA, 20 bp, Artificial Sequence
  mmSKRIPTE0003264_Myo1g_6
  gRNA
atcccaccttgcgagccatg

SEQ ID NO: 132486 - DNA, 20 bp, Artificial Sequence
  mmSKRIPTE0003265_Myo1g_7
  gRNA
ggtgttccctgtcaacaggt

SEQ ID NO: 132487 - DNA, 20 bp, Artificial Sequence
  mmSKRIPTE0003266_Myo1g_8
  gRNA
gatctgagcactactcacag

SEQ ID NO: 132488 - DNA, 20 bp, Artificial Sequence
  mmSKRIPTE0003267_Myo1g_9
  gRNA
accagtgaagatcaaaggcg

SEQ ID NO: 132489 - DNA, 20 bp, Artificial Sequence
  mmSKRIPTE0003268_Top2a_1
  gRNA
tcttctctattcgttgccgg

SEQ ID NO: 132490 - DNA, 20 bp, Artificial Sequence
  mmSKRIPTE0003269_Top2a_2
  gRNA
cctcttcaggaccgtcacca

SEQ ID NO: 132491 - DNA, 20 bp, Artificial Sequence
  mmSKRIPTE0003270_Top2a_3
  gRNA
tagccacttgctaagctccg

SEQ ID NO: 132492 - DNA, 20 bp, Artificial Sequence
  mmSKRIPTE0003271_Top2a_4
  gRNA
tcggcacgtaccgtctacca

SEQ ID NO: 132493 - DNA, 20 bp, Artificial Sequence
  mmSKRIPTE0003272_Top2a_5
  gRNA
tgagacagtcgggctgcacg

SEQ ID NO: 132494 - DNA, 20 bp, Artificial Sequence
  mmSKRIPTE0003273_Top2a_6
  gRNA
ggtagagttagcaggcgcgt

SEQ ID NO: 132495 - DNA, 20 bp, Artificial Sequence
  mmSKRIPTE0003274_Top2a_7
  gRNA
atcgtcgtcatagttactgg

SEQ ID NO: 132496 - DNA, 20 bp, Artificial Sequence
  mmSKRIPTE0003275_Top2a_8
  gRNA
tctcaagttcaagattggtg

SEQ ID NO: 132497 - DNA, 20 bp, Artificial Sequence
  mmSKRIPTE0003276_Top2a_9
  gRNA
ttctgtgctagagcgacccg

SEQ ID NO: 132498 - DNA, 20 bp, Artificial Sequence
  mmSKRIPTE0003277_Sox11_1
  gRNA
gcccttcagcgttatccacg

SEQ ID NO: 132499 - DNA, 20 bp, Artificial Sequence
  mmSKRIPTE0003278_Sox11_2
  gRNA
gcggcttaaaggtccccgcg

SEQ ID NO: 132500 - DNA, 20 bp, Artificial Sequence
  mmSKRIPTE0003279_Sox11_3
  gRNA
gtaagtgtcccgtagcacta

SEQ ID NO: 132501 - DNA, 20 bp, Artificial Sequence
  mmSKRIPTE0003280_Sox11_4
  gRNA
tatacatggaacgttatgag

SEQ ID NO: 132502 - DNA, 20 bp, Artificial Sequence
  mmSKRIPTE0003281_Sox11_5
  gRNA
ttcacgtattgagaggcgca

SEQ ID NO: 132503 - DNA, 20 bp, Artificial Sequence
  mmSKRIPTE0003282_Sox11_6
  gRNA
cgcgctcaatgagatacgag

SEQ ID NO: 132504 - DNA, 20 bp, Artificial Sequence
  mmSKRIPTE0003283_Sox11_7
  gRNA
agcgcgatctcatagcgcgt

SEQ ID NO: 132505 - DNA, 20 bp, Artificial Sequence
  mmSKRIPTE0003284_Sox11_8
  gRNA
acatctgtgtcgtatcatga

SEQ ID NO: 132506 - DNA, 20 bp, Artificial Sequence
  mmSKRIPTE0003285_Sox11_9
  gRNA
acacgtcaagaatcgttaca

SEQ ID NO: 132507 - DNA, 20 bp, Artificial Sequence
  mmSKRIPTE0003286_Trim27_1
  gRNA
acgttcacttcctcacggag

SEQ ID NO: 132508 - DNA, 20 bp, Artificial Sequence
  mmSKRIPTE0003287_Trim27_2
  gRNA
caccgaactaaacgtagctg

SEQ ID NO: 132509 - DNA, 20 bp, Artificial Sequence
  mmSKRIPTE0003288_Trim27_3
  gRNA
ttcagcctaagctactcggg

SEQ ID NO: 132510 - DNA, 20 bp, Artificial Sequence
  mmSKRIPTE0003289_Trim27_4
  gRNA
ctgtaggagatgcccaccag

SEQ ID NO: 132511 - DNA, 20 bp, Artificial Sequence
  mmSKRIPTE0003290_Trim27_5
  gRNA
aaaatggcgagccggacgtg

SEQ ID NO: 132512 - DNA, 20 bp, Artificial Sequence
  mmSKRIPTE0003291_Trim27_6
  gRNA
aatcagtacccaattgacac

SEQ ID NO: 132513 - DNA, 20 bp, Artificial Sequence
  mmSKRIPTE0003292_Trim27_7
  gRNA
tctgagaagagagtccagcg

SEQ ID NO: 132514 - DNA, 20 bp, Artificial Sequence
  mmSKRIPTE0003293_Trim27_8
  gRNA
catctgctcggcctccaatg

SEQ ID NO: 132515 - DNA, 20 bp, Artificial Sequence
  mmSKRIPTE0003294_Trim27_9
  gRNA
gctacttggaacctatacaa

SEQ ID NO: 132516 - DNA, 20 bp, Artificial Sequence
  mmSKRIPTE0003295_Nfam1_1
  gRNA
ctaaccgggagactgaacgc

SEQ ID NO: 132517 - DNA, 20 bp, Artificial Sequence
  mmSKRIPTE0003296_Nfam1_2
  gRNA
acaagcttctgggctagccg

SEQ ID NO: 132518 - DNA, 20 bp, Artificial Sequence
  mmSKRIPTE0003297_Nfam1_3
  gRNA
tgaagctaacggaaccgcaa

SEQ ID NO: 132519 - DNA, 20 bp, Artificial Sequence
  mmSKRIPTE0003298_Nfam1_4
  gRNA
gcttagggtgaggcacggtg

SEQ ID NO: 132520 - DNA, 20 bp, Artificial Sequence
  mmSKRIPTE0003299_Nfam1_5
  gRNA
ttagcgcttagtgcgcactg

SEQ ID NO: 132521 - DNA, 20 bp, Artificial Sequence
  mmSKRIPTE0003300_Nfam1_6
  gRNA
ccggcacctgactagctgtg

SEQ ID NO: 132522 - DNA, 20 bp, Artificial Sequence
  mmSKRIPTE0003301_Nfam1_7
  gRNA
agactcgcccacttacccag

SEQ ID NO: 132523 - DNA, 20 bp, Artificial Sequence
  mmSKRIPTE0003302_Nfam1_8
  gRNA
aagctgccctagtggcctag

SEQ ID NO: 132524 - DNA, 20 bp, Artificial Sequence
  mmSKRIPTE0003303_Nfam1_9
  gRNA
cctacagcgtcgagagacgg

SEQ ID NO: 132525 - DNA, 20 bp, Artificial Sequence
  mmSKRIPTE0003304_H2-M5_1
  gRNA
cctttcacatcccttacgga

SEQ ID NO: 132526 - DNA, 20 bp, Artificial Sequence
  mmSKRIPTE0003305_H2-M5_2
  gRNA
ttgtggtccaaatacgaccg

SEQ ID NO: 132527 - DNA, 20 bp, Artificial Sequence
  mmSKRIPTE0003306_H2-M5_3
  gRNA
cgtgcttctcatgcccacgg

SEQ ID NO: 132528 - DNA, 20 bp, Artificial Sequence
  mmSKRIPTE0003307_H2-M5_4
  gRNA
gcactcacctgcgcgaacca

SEQ ID NO: 132529 - DNA, 20 bp, Artificial Sequence
  mmSKRIPTE0003308_H2-M5_5
  gRNA
cagcatgtcatcattcgaca

SEQ ID NO: 132530 - DNA, 20 bp, Artificial Sequence
  mmSKRIPTE0003309_H2-M5_6
  gRNA
aaggaactcaaaggttacgg

SEQ ID NO: 132531 - DNA, 20 bp, Artificial Sequence
  mmSKRIPTE0003310_H2-M5_7
  gRNA
tctagaccttctaaacacgg

SEQ ID NO: 132532 - DNA, 20 bp, Artificial Sequence
  mmSKRIPTE0003311_H2-M5_8
  gRNA
tgggaatggtgtgcttagaa

SEQ ID NO: 132533 - DNA, 20 bp, Artificial Sequence
  mmSKRIPTE0003312_H2-M5_9
  gRNA
cccccgcccctgaagtgtag

SEQ ID NO: 132534 - DNA, 20 bp, Artificial Sequence
  mmSKRIPTE0003313_Rab12_1
  gRNA
aatcaacagcatcggacgtg

SEQ ID NO: 132535 - DNA, 20 bp, Artificial Sequence
  mmSKRIPTE0003314_Rab12_2
  gRNA
ataacatacaccccacggag

SEQ ID NO: 132536 - DNA, 20 bp, Artificial Sequence
  mmSKRIPTE0003315_Rab12_3
  gRNA
tccgtagcgaggctacagta

SEQ ID NO: 132537 - DNA, 20 bp, Artificial Sequence
  mmSKRIPTE0003316_Rab12_4
  gRNA
cagctttagaaggttccgca

SEQ ID NO: 132538 - DNA, 20 bp, Artificial Sequence
  mmSKRIPTE0003317_Rab12_5
  gRNA
gcatctgtccagcgtacgtg

SEQ ID NO: 132539 - DNA, 20 bp, Artificial Sequence
  mmSKRIPTE0003318_Rab12_6
  gRNA
atccgtaggatgattcgttg

SEQ ID NO: 132540 - DNA, 20 bp, Artificial Sequence
  mmSKRIPTE0003319_Rab12_7
  gRNA
ggggactggacttagtcccg

SEQ ID NO: 132541 - DNA, 20 bp, Artificial Sequence
  mmSKRIPTE0003320_Rab12_8
  gRNA
acaagaccacagaccccgtg

SEQ ID NO: 132542 - DNA, 20 bp, Artificial Sequence
  mmSKRIPTE0003321_Rab12_9
  gRNA
ccaatcttgtgcccccaccg

SEQ ID NO: 132543 - DNA, 20 bp, Artificial Sequence
  mmSKRIPTE0003322_Mbl2_1
  gRNA
aattagtcacgctaaaggtg

SEQ ID NO: 132544 - DNA, 20 bp, Artificial Sequence
  mmSKRIPTE0003323_Mbl2_2
  gRNA
caatcccagcggcttccgtg

SEQ ID NO: 132545 - DNA, 20 bp, Artificial Sequence
  mmSKRIPTE0003324_Mbl2_3
  gRNA
aaaacataggtcgatatctg

SEQ ID NO: 132546 - DNA, 20 bp, Artificial Sequence
  mmSKRIPTE0003325_Mbl2_4
  gRNA
gcattccttgtgatactgcg

SEQ ID NO: 132547 - DNA, 20 bp, Artificial Sequence
  mmSKRIPTE0003326_Mbl2_5
  gRNA
ggcctgcagtaagtgcagca

SEQ ID NO: 132548 - DNA, 20 bp, Artificial Sequence
  mmSKRIPTE0003327_Mbl2_6
  gRNA
agccgccagaagaataaggg

SEQ ID NO: 132549 - DNA, 20 bp, Artificial Sequence
  mmSKRIPTE0003328_Mbl2_7
  gRNA
tagtttattgctagaaacgg

SEQ ID NO: 132550 - DNA, 20 bp, Artificial Sequence
  mmSKRIPTE0003329_Mbl2_8
  gRNA
gtgcaggagacgcccttctg

SEQ ID NO: 132551 - DNA, 20 bp, Artificial Sequence
  mmSKRIPTE0003330_Mbl2_9
  gRNA
gccctgtgctccgaattcca

SEQ ID NO: 132552 - DNA, 20 bp, Artificial Sequence
  mmSKRIPTE0003331_Adam15_1
  gRNA
gacccagcagcgtctcctag

SEQ ID NO: 132553 - DNA, 20 bp, Artificial Sequence
  mmSKRIPTE0003332_Adam15_2
  gRNA
tctgccggagcctaaccaga

SEQ ID NO: 132554 - DNA, 20 bp, Artificial Sequence
  mmSKRIPTE0003333_Adam15_3
  gRNA
ctttggtccgcagatcacgc

SEQ ID NO: 132555 - DNA, 20 bp, Artificial Sequence
  mmSKRIPTE0003334_Adam15_4
  gRNA
gcgctgttaagcaatacctg

SEQ ID NO: 132556 - DNA, 20 bp, Artificial Sequence
  mmSKRIPTE0003335_Adam15_5
  gRNA
ggttggtagaagaagcgcca

SEQ ID NO: 132557 - DNA, 20 bp, Artificial Sequence
  mmSKRIPTE0003336_Adam15_6
  gRNA
cgcctaagatgcttgtggag

SEQ ID NO: 132558 - DNA, 20 bp, Artificial Sequence
  mmSKRIPTE0003337_Adam15_7
  gRNA
ccatcccttcatctcccgtg

SEQ ID NO: 132559 - DNA, 20 bp, Artificial Sequence
  mmSKRIPTE0003338_Adam15_8
  gRNA
actacatctcgcttaagctg

SEQ ID NO: 132560 - DNA, 20 bp, Artificial Sequence
  mmSKRIPTE0003339_Adam15_9
  gRNA
gaagccgggctacagacggg

SEQ ID NO: 132561 - DNA, 20 bp, Artificial Sequence
  mmSKRIPTE0003340_Ilf2_1
  gRNA
atacagcattaacagttacg

SEQ ID NO: 132562 - DNA, 20 bp, Artificial Sequence
  mmSKRIPTE0003341_Ilf2_2
  gRNA
gtatagctacaggtataaca

SEQ ID NO: 132563 - DNA, 20 bp, Artificial Sequence
  mmSKRIPTE0003342_Ilf2_3
  gRNA
tccagcctacttattgcgca

SEQ ID NO: 132564 - DNA, 20 bp, Artificial Sequence
  mmSKRIPTE0003343_Ilf2_4
  gRNA
tagttcttcccagcgaagag

SEQ ID NO: 132565 - DNA, 20 bp, Artificial Sequence
  mmSKRIPTE0003344_Ilf2_5
  gRNA
attgaagaagtccggcaggt

SEQ ID NO: 132566 - DNA, 20 bp, Artificial Sequence
  mmSKRIPTE0003345_Ilf2_6
  gRNA
ctggtgtgcctcacgatcgt

SEQ ID NO: 132567 - DNA, 20 bp, Artificial Sequence
  mmSKRIPTE0003346_Ilf2_7
  gRNA
aacgaccaatgagactcacg

SEQ ID NO: 132568 - DNA, 20 bp, Artificial Sequence
  mmSKRIPTE0003347_Ilf2_8
  gRNA
atagggtagagcgtaactcg

SEQ ID NO: 132569 - DNA, 20 bp, Artificial Sequence
  mmSKRIPTE0003348_Ilf2_9
  gRNA
agttccagccgaagtctcgg

SEQ ID NO: 132570 - DNA, 20 bp, Artificial Sequence
  mmSKRIPTE0003349_Bcl10_1
  gRNA
cggaagcagagacgtaaccg

SEQ ID NO: 132571 - DNA, 20 bp, Artificial Sequence
  mmSKRIPTE0003350_Bcl10_2
  gRNA
tagggtaaagaagcgctctg

SEQ ID NO: 132572 - DNA, 20 bp, Artificial Sequence
  mmSKRIPTE0003351_Bcl10_3
  gRNA
cccaccgacaggcttaaccg

SEQ ID NO: 132573 - DNA, 20 bp, Artificial Sequence
  mmSKRIPTE0003352_Bcl10_4
  gRNA
agcgacggggaacttcaggt

SEQ ID NO: 132574 - DNA, 20 bp, Artificial Sequence
  mmSKRIPTE0003353_Bcl10_5
  gRNA
ggaaagccaccagcgacgag

SEQ ID NO: 132575 - DNA, 20 bp, Artificial Sequence
  mmSKRIPTE0003354_Bcl10_6
  gRNA
tcaggcaccacccttcggcg

SEQ ID NO: 132576 - DNA, 20 bp, Artificial Sequence
  mmSKRIPTE0003355_Bcl10_7
  gRNA
cttgcggattggacgcctga

SEQ ID NO: 132577 - DNA, 20 bp, Artificial Sequence
  mmSKRIPTE0003356_Bcl10_8
  gRNA
cagccaatcagtactaccct

SEQ ID NO: 132578 - DNA, 20 bp, Artificial Sequence
  mmSKRIPTE0003357_Bcl10_9
  gRNA
gtaacacggaggaaaatcgc

SEQ ID NO: 132579 - DNA, 20 bp, Artificial Sequence
  mmSKRIPTE0003358_Irs2_1
  gRNA
gcggaggcactaccgctgga

SEQ ID NO: 132580 - DNA, 20 bp, Artificial Sequence
  mmSKRIPTE0003359_Irs2_2
  gRNA
acacaccagccctcatcgca

SEQ ID NO: 132581 - DNA, 20 bp, Artificial Sequence
  mmSKRIPTE0003360_Irs2_3
  gRNA
tgccacgataggttgtggcg

SEQ ID NO: 132582 - DNA, 20 bp, Artificial Sequence
  mmSKRIPTE0003361_Irs2_4
  gRNA
atgaggccgagtgccatcgg

SEQ ID NO: 132583 - DNA, 20 bp, Artificial Sequence
  mmSKRIPTE0003362_Irs2_5
  gRNA
gcaccgagcatccttcggag

SEQ ID NO: 132584 - DNA, 20 bp, Artificial Sequence
  mmSKRIPTE0003363_Irs2_6
  gRNA
gacgactgactcttgctgcg

SEQ ID NO: 132585 - DNA, 20 bp, Artificial Sequence
  mmSKRIPTE0003364_Irs2_7
  gRNA
cctcaacatgtcccccagcg

SEQ ID NO: 132586 - DNA, 20 bp, Artificial Sequence
  mmSKRIPTE0003365_Irs2_8
  gRNA
caggcggtataggtctcccg

SEQ ID NO: 132587 - DNA, 20 bp, Artificial Sequence
  mmSKRIPTE0003366_Irs2_9
  gRNA
tatatcgccatcgatgtgag

SEQ ID NO: 132588 - DNA, 20 bp, Artificial Sequence
  mmSKRIPTE0003367_Rab20_1
  gRNA
ggatgatagcggccgctccg

SEQ ID NO: 132589 - DNA, 20 bp, Artificial Sequence
  mmSKRIPTE0003368_Rab20_2
  gRNA
acgcagccctgcgaccacgt

SEQ ID NO: 132590 - DNA, 20 bp, Artificial Sequence
  mmSKRIPTE0003369_Rab20_3
  gRNA
tggtgcgcaagtcacgtgag

SEQ ID NO: 132591 - DNA, 20 bp, Artificial Sequence
  mmSKRIPTE0003370_Rab20_4
  gRNA
cgcaggggtcatctcctccg

SEQ ID NO: 132592 - DNA, 20 bp, Artificial Sequence
  mmSKRIPTE0003371_Rab20_5
  gRNA
atacgcccaccaccaaactg

SEQ ID NO: 132593 - DNA, 20 bp, Artificial Sequence
  mmSKRIPTE0003372_Rab20_6
  gRNA
gcatgatcataggtaccacc

SEQ ID NO: 132594 - DNA, 20 bp, Artificial Sequence
  mmSKRIPTE0003373_Rab20_7
  gRNA
gggtaaataaccgtgagtcg

SEQ ID NO: 132595 - DNA, 20 bp, Artificial Sequence
  mmSKRIPTE0003374_Rab20_8
  gRNA
gccggctttaactggctatg

SEQ ID NO: 132596 - DNA, 20 bp, Artificial Sequence
  mmSKRIPTE0003375_Rab20_9
  gRNA
tgccacctccggatgcccag

SEQ ID NO: 132597 - DNA, 20 bp, Artificial Sequence
  mmSKRIPTE0003376_F7_1
  gRNA
aagtcacatacacatcggcg

SEQ ID NO: 132598 - DNA, 20 bp, Artificial Sequence
  mmSKRIPTE0003377_F7_2
  gRNA
atacagttgagtacccgtgt

SEQ ID NO: 132599 - DNA, 20 bp, Artificial Sequence
  mmSKRIPTE0003378_F7_3
  gRNA
gcggatattatcgaagcagt

SEQ ID NO: 132600 - DNA, 20 bp, Artificial Sequence
  mmSKRIPTE0003379_F7_4
  gRNA
aggcaacgtgtgccccaaag

SEQ ID NO: 132601 - DNA, 20 bp, Artificial Sequence
  mmSKRIPTE0003380_F7_5
  gRNA
gcaagtacgacgggtgacac

SEQ ID NO: 132602 - DNA, 20 bp, Artificial Sequence
  mmSKRIPTE0003381_F7_6
  gRNA
tgtgaccttcactgactacg

SEQ ID NO: 132603 - DNA, 20 bp, Artificial Sequence
  mmSKRIPTE0003382_F7_7
  gRNA
gcagacaggaggcagctacg

SEQ ID NO: 132604 - DNA, 20 bp, Artificial Sequence
  mmSKRIPTE0003383_F7_8
  gRNA
gctgatttcagcacaccttg

SEQ ID NO: 132605 - DNA, 20 bp, Artificial Sequence
  mmSKRIPTE0003384_F7_9
  gRNA
ccatgtgccatggtagtgcg

SEQ ID NO: 132606 - DNA, 20 bp, Artificial Sequence
  mmSKRIPTE0003385_Rfx1_1
  gRNA
ataagttaacagttccgcag

SEQ ID NO: 132607 - DNA, 20 bp, Artificial Sequence
  mmSKRIPTE0003386_Rfx1_2
  gRNA
agtaccactattacggcctg

SEQ ID NO: 132608 - DNA, 20 bp, Artificial Sequence
  mmSKRIPTE0003387_Rfx1_3
  gRNA
ggtagtgctgacagtctgcg

SEQ ID NO: 132609 - DNA, 20 bp, Artificial Sequence
  mmSKRIPTE0003388_Rfx1_4
  gRNA
aagatgggacgacgtcagtg

SEQ ID NO: 132610 - DNA, 20 bp, Artificial Sequence
  mmSKRIPTE0003389_Rfx1_5
  gRNA
taagtgttcgccttattcag

SEQ ID NO: 132611 - DNA, 20 bp, Artificial Sequence
  mmSKRIPTE0003390_Rfx1_6
  gRNA
tggccaacggtgttgccgtg

SEQ ID NO: 132612 - DNA, 20 bp, Artificial Sequence
  mmSKRIPTE0003391_Rfx1_7
  gRNA
ggataattacgagaccgctg

SEQ ID NO: 132613 - DNA, 20 bp, Artificial Sequence
  mmSKRIPTE0003392_Rfx1_8
  gRNA
tcacactggtagaaacgctg

SEQ ID NO: 132614 - DNA, 20 bp, Artificial Sequence
  mmSKRIPTE0003393_Rfx1_9
  gRNA
agccaccagcgaaactggcg

SEQ ID NO: 132615 - DNA, 20 bp, Artificial Sequence
  mmSKRIPTE0003394_Zap70_1
  gRNA
atcgccaccatagtgcacgt

SEQ ID NO: 132616 - DNA, 20 bp, Artificial Sequence
  mmSKRIPTE0003395_Zap70_2
  gRNA
tgactgtggaacaacgtatg

SEQ ID NO: 132617 - DNA, 20 bp, Artificial Sequence
  mmSKRIPTE0003396_Zap70_3
  gRNA
caagctcgatgtccgccacg

SEQ ID NO: 132618 - DNA, 20 bp, Artificial Sequence
  mmSKRIPTE0003397_Zap70_4
  gRNA
gcttatgaagttatgcagag

SEQ ID NO: 132619 - DNA, 20 bp, Artificial Sequence
  mmSKRIPTE0003398_Zap70_5
  gRNA
gagtccctacagcgaccctg

SEQ ID NO: 132620 - DNA, 20 bp, Artificial Sequence
  mmSKRIPTE0003399_Zap70_6
  gRNA
atgatgtacccaccctcacg

SEQ ID NO: 132621 - DNA, 20 bp, Artificial Sequence
  mmSKRIPTE0003400_Zap70_7
  gRNA
tcgcatgcgcaagtatggcg

SEQ ID NO: 132622 - DNA, 20 bp, Artificial Sequence
  mmSKRIPTE0003401_Zap70_8
  gRNA
agtcagtctcccttcccatg

SEQ ID NO: 132623 - DNA, 20 bp, Artificial Sequence
  mmSKRIPTE0003402_Zap70_9
  gRNA
ggccagaagccctacaaggt

SEQ ID NO: 132624 - DNA, 20 bp, Artificial Sequence
  mmSKRIPTE0003403_Eef2_1
  gRNA
gacgcgcagatatggcgccg

SEQ ID NO: 132625 - DNA, 20 bp, Artificial Sequence
  mmSKRIPTE0003404_Eef2_2
  gRNA
agggagatggcgctacggag

SEQ ID NO: 132626 - DNA, 20 bp, Artificial Sequence
  mmSKRIPTE0003405_Eef2_3
  gRNA
agaccgctgacgtcaacgcc

SEQ ID NO: 132627 - DNA, 20 bp, Artificial Sequence
  mmSKRIPTE0003406_Eef2_4
  gRNA
tgttatgtgtgaatcaccgc

SEQ ID NO: 132628 - DNA, 20 bp, Artificial Sequence
  mmSKRIPTE0003407_Eef2_5
  gRNA
cgtcagccctgtcgtccgtg

SEQ ID NO: 132629 - DNA, 20 bp, Artificial Sequence
  mmSKRIPTE0003408_Eef2_6
  gRNA
accccgcagctatattacac

SEQ ID NO: 132630 - DNA, 20 bp, Artificial Sequence
  mmSKRIPTE0003409_Eef2_7
  gRNA
cctcggctccgctagactcg

SEQ ID NO: 132631 - DNA, 20 bp, Artificial Sequence
  mmSKRIPTE0003410_Eef2_8
  gRNA
agttgggaaatcgagtcacc

SEQ ID NO: 132632 - DNA, 20 bp, Artificial Sequence
  mmSKRIPTE0003411_Eef2_9
  gRNA
cctcaatcggctccacgtag

SEQ ID NO: 132633 - DNA, 20 bp, Artificial Sequence
  mmSKRIPTE0003412_Patz1_1
  gRNA
taggactccttacactcccg

SEQ ID NO: 132634 - DNA, 20 bp, Artificial Sequence
  mmSKRIPTE0003413_Patz1_2
  gRNA
tgcaggcagccagtacggcg

SEQ ID NO: 132635 - DNA, 20 bp, Artificial Sequence
  mmSKRIPTE0003414_Patz1_3
  gRNA
cgggtcaacgacgcttcttg

SEQ ID NO: 132636 - DNA, 20 bp, Artificial Sequence
  mmSKRIPTE0003415_Patz1_4
  gRNA
gaatgggttacccatctccg

SEQ ID NO: 132637 - DNA, 20 bp, Artificial Sequence
  mmSKRIPTE0003416_Patz1_5
  gRNA
ggagctggctcatacaccaa

SEQ ID NO: 132638 - DNA, 20 bp, Artificial Sequence
  mmSKRIPTE0003417_Patz1_6
  gRNA
aaaggcgtctcgctgcctaa

SEQ ID NO: 132639 - DNA, 20 bp, Artificial Sequence
  mmSKRIPTE0003418_Patz1_7
  gRNA
aaaaagggctagacccagcg

SEQ ID NO: 132640 - DNA, 20 bp, Artificial Sequence
  mmSKRIPTE0003419_Patz1_8
  gRNA
actcacactccccgcacgtg

SEQ ID NO: 132641 - DNA, 20 bp, Artificial Sequence
  mmSKRIPTE0003420_Patz1_9
  gRNA
agcagctttagaatgacacg

SEQ ID NO: 132642 - DNA, 20 bp, Artificial Sequence
  mmSKRIPTE0003421_Nf1_1
  gRNA
tggatggtagacgttcagtg

SEQ ID NO: 132643 - DNA, 20 bp, Artificial Sequence
  mmSKRIPTE0003422_Nf1_2
  gRNA
aataatctacccgtgtacgt

SEQ ID NO: 132644 - DNA, 20 bp, Artificial Sequence
  mmSKRIPTE0003423_Nf1_3
  gRNA
actattctttgaatacaacg

SEQ ID NO: 132645 - DNA, 20 bp, Artificial Sequence
  mmSKRIPTE0003424_Nf1_4
  gRNA
ttcagaccctagtttacggt

SEQ ID NO: 132646 - DNA, 20 bp, Artificial Sequence
  mmSKRIPTE0003425_Nf1_5
  gRNA
agtttacggaaagcactcgc

SEQ ID NO: 132647 - DNA, 20 bp, Artificial Sequence
  mmSKRIPTE0003426_Nf1_6
  gRNA
ccgatacttccaaagaggcg

SEQ ID NO: 132648 - DNA, 20 bp, Artificial Sequence
  mmSKRIPTE0003427_Nf1_7
  gRNA
agaaagtcaccgttgctccg

SEQ ID NO: 132649 - DNA, 20 bp, Artificial Sequence
  mmSKRIPTE0003428_Nf1_8
  gRNA
gaattcgagtgatagctgtg

SEQ ID NO: 132650 - DNA, 20 bp, Artificial Sequence
  mmSKRIPTE0003429_Nf1_9
  gRNA
caacttgaatcccattaacc

SEQ ID NO: 132651 - DNA, 20 bp, Artificial Sequence
  mmSKRIPTE0003430_Stat3_1
  gRNA
aacctggggttccgacgtcg

SEQ ID NO: 132652 - DNA, 20 bp, Artificial Sequence
  mmSKRIPTE0003431_Stat3_2
  gRNA
gtaagagatgacgttccgaa

SEQ ID NO: 132653 - DNA, 20 bp, Artificial Sequence
  mmSKRIPTE0003432_Stat3_3
  gRNA
ctggcctctcctagccgacg

SEQ ID NO: 132654 - DNA, 20 bp, Artificial Sequence
  mmSKRIPTE0003433_Stat3_4
  gRNA
gcacctggtcggtgtccgag

SEQ ID NO: 132655 - DNA, 20 bp, Artificial Sequence
  mmSKRIPTE0003434_Stat3_5
  gRNA
gagccctaaccggatcgctg

SEQ ID NO: 132656 - DNA, 20 bp, Artificial Sequence
  mmSKRIPTE0003435_Stat3_6
  gRNA
ggatggcatctcagacgctg

SEQ ID NO: 132657 - DNA, 20 bp, Artificial Sequence
  mmSKRIPTE0003436_Stat3_7
  gRNA
gtcaccacaagtactcatag

SEQ ID NO: 132658 - DNA, 20 bp, Artificial Sequence
  mmSKRIPTE0003437_Stat3_8
  gRNA
agtaggtgactcgttacaca

SEQ ID NO: 132659 - DNA, 20 bp, Artificial Sequence
  mmSKRIPTE0003438_Stat3_9
  gRNA
tatagccggctaaggaggtg

SEQ ID NO: 132660 - DNA, 20 bp, Artificial Sequence
  mmSKRIPTE0003439_Sectm1b_1
  gRNA
tgtaaacagaggcagccgcg

SEQ ID NO: 132661 - DNA, 20 bp, Artificial Sequence
  mmSKRIPTE0003440_Sectm1b_2
  gRNA
caatgtcggagcattagcag

SEQ ID NO: 132662 - DNA, 20 bp, Artificial Sequence
  mmSKRIPTE0003441_Sectm1b_3
  gRNA
ttgcactgaggacggcactg

SEQ ID NO: 132663 - DNA, 20 bp, Artificial Sequence
  mmSKRIPTE0003442_Sectm1b_4
  gRNA
ggcagtaggtttagacacgt

SEQ ID NO: 132664 - DNA, 20 bp, Artificial Sequence
  mmSKRIPTE0003443_Sectm1b_5
  gRNA
gagtactggtggaagctgcg

SEQ ID NO: 132665 - DNA, 20 bp, Artificial Sequence
  mmSKRIPTE0003444_Sectm1b_6
  gRNA
tcaaaacgtagactctgttg

SEQ ID NO: 132666 - DNA, 20 bp, Artificial Sequence
  mmSKRIPTE0003445_Sectm1b_7
  gRNA
ggtcggacctgcctaccatg

SEQ ID NO: 132667 - DNA, 20 bp, Artificial Sequence
  mmSKRIPTE0003446_Sectm1b_8
  gRNA
gacaggtagacgtcagaatg

SEQ ID NO: 132668 - DNA, 20 bp, Artificial Sequence
  mmSKRIPTE0003447_Sectm1b_9
  gRNA
gccacgattcctgtagaagt

SEQ ID NO: 132669 - DNA, 20 bp, Artificial Sequence
  mmSKRIPTE0003448_Six4_1
  gRNA
cctcagcctctctagccacg

SEQ ID NO: 132670 - DNA, 20 bp, Artificial Sequence
  mmSKRIPTE0003449_Six4_2
  gRNA
ttaaccaacgacgaggtcag

SEQ ID NO: 132671 - DNA, 20 bp, Artificial Sequence
  mmSKRIPTE0003450_Six4_3
  gRNA
agcaaccggaggagtcacgt

SEQ ID NO: 132672 - DNA, 20 bp, Artificial Sequence
  mmSKRIPTE0003451_Six4_4
  gRNA
gtacaaggcgcgctacaccg

SEQ ID NO: 132673 - DNA, 20 bp, Artificial Sequence
  mmSKRIPTE0003452_Six4_5
  gRNA
gcctagggagaggatcaccg

SEQ ID NO: 132674 - DNA, 20 bp, Artificial Sequence
  mmSKRIPTE0003453_Six4_6
  gRNA
atagaagctctccatcctcg

SEQ ID NO: 132675 - DNA, 20 bp, Artificial Sequence
  mmSKRIPTE0003454_Six4_7
  gRNA
gtaactgaaagattacctag

SEQ ID NO: 132676 - DNA, 20 bp, Artificial Sequence
  mmSKRIPTE0003455_Six4_8
  gRNA
ctatcttaatggtgactgcg

SEQ ID NO: 132677 - DNA, 20 bp, Artificial Sequence
  mmSKRIPTE0003456_Six4_9
  gRNA
cgagagccacagcttcgagt

SEQ ID NO: 132678 - DNA, 20 bp, Artificial Sequence
  mmSKRIPTE0003457_Prkdc_1
  gRNA
cagtagccaacaccgtacgc

SEQ ID NO: 132679 - DNA, 20 bp, Artificial Sequence
  mmSKRIPTE0003458_Prkdc_2
  gRNA
gacgttgactacacgcacca

SEQ ID NO: 132680 - DNA, 20 bp, Artificial Sequence
  mmSKRIPTE0003459_Prkdc_3
  gRNA
tggcccttgtaagtagacga

SEQ ID NO: 132681 - DNA, 20 bp, Artificial Sequence
  mmSKRIPTE0003460_Prkdc_4
  gRNA
cactgcctgaatatcacgtg

SEQ ID NO: 132682 - DNA, 20 bp, Artificial Sequence
  mmSKRIPTE0003461_Prkdc_5
  gRNA
atccaccggagaacatcggg

SEQ ID NO: 132683 - DNA, 20 bp, Artificial Sequence
  mmSKRIPTE0003462_Prkdc_6
  gRNA
tgataaccgttcggcctccg

SEQ ID NO: 132684 - DNA, 20 bp, Artificial Sequence
  mmSKRIPTE0003463_Prkdc_7
  gRNA
atcctcagaagcatctgcgt

SEQ ID NO: 132685 - DNA, 20 bp, Artificial Sequence
  mmSKRIPTE0003464_Prkdc_8
  gRNA
tccacatagtctttgtacgt

SEQ ID NO: 132686 - DNA, 20 bp, Artificial Sequence
  mmSKRIPTE0003465_Prkdc_9
  gRNA
agacggtgtgatccgccagt

SEQ ID NO: 132687 - DNA, 20 bp, Artificial Sequence
  mmSKRIPTE0003466_Ufd1_1
  gRNA
gtacttactgagttgatcga

SEQ ID NO: 132688 - DNA, 20 bp, Artificial Sequence
  mmSKRIPTE0003467_Ufd1_2
  gRNA
tcagatcggatgacacactg

SEQ ID NO: 132689 - DNA, 20 bp, Artificial Sequence
  mmSKRIPTE0003468_Ufd1_3
  gRNA
tgggtaataaatgtagcgga

SEQ ID NO: 132690 - DNA, 20 bp, Artificial Sequence
  mmSKRIPTE0003469_Ufd1_4
  gRNA
tggaattagatcaacatgtg

SEQ ID NO: 132691 - DNA, 20 bp, Artificial Sequence
  mmSKRIPTE0003470_Ufd1_5
  gRNA
tgccagttagtacactgacg

SEQ ID NO: 132692 - DNA, 20 bp, Artificial Sequence
  mmSKRIPTE0003471_Ufd1_6
  gRNA
ccacagtggctatgccggag

SEQ ID NO: 132693 - DNA, 20 bp, Artificial Sequence
  mmSKRIPTE0003472_Ufd1_7
  gRNA
tgttagtcaccactgttgag

SEQ ID NO: 132694 - DNA, 20 bp, Artificial Sequence
  mmSKRIPTE0003473_Ufd1_8
  gRNA
ctgacactggtagagcacaa

SEQ ID NO: 132695 - DNA, 20 bp, Artificial Sequence
  mmSKRIPTE0003474_Ufd1_9
  gRNA
aagcggttctggaagacccg

SEQ ID NO: 132696 - DNA, 20 bp, Artificial Sequence
  mmSKRIPTE0003475_Hes1_1
  gRNA
cactgcgttaggacccaccg

SEQ ID NO: 132697 - DNA, 20 bp, Artificial Sequence
  mmSKRIPTE0003476_Hes1_2
  gRNA
agacccagaccgtgggaacg

SEQ ID NO: 132698 - DNA, 20 bp, Artificial Sequence
  mmSKRIPTE0003477_Hes1_3
  gRNA
gtgtgagggcgttaacaccg

SEQ ID NO: 132699 - DNA, 20 bp, Artificial Sequence
  mmSKRIPTE0003478_Hes1_4
  gRNA
ttccggagcagtaacaactt

SEQ ID NO: 132700 - DNA, 20 bp, Artificial Sequence
  mmSKRIPTE0003479_Hes1_5
  gRNA
cctgcgtctagaaattaagt

SEQ ID NO: 132701 - DNA, 20 bp, Artificial Sequence
  mmSKRIPTE0003480_Hes1_6
  gRNA
aagtctggaagaaatcaccg

SEQ ID NO: 132702 - DNA, 20 bp, Artificial Sequence
  mmSKRIPTE0003481_Hes1_7
  gRNA
tatctgggactgcacgcgaa

SEQ ID NO: 132703 - DNA, 20 bp, Artificial Sequence
  mmSKRIPTE0003482_Hes1_8
  gRNA
gcgggcgcagatgaccggta

SEQ ID NO: 132704 - DNA, 20 bp, Artificial Sequence
  mmSKRIPTE0003483_Hes1_9
  gRNA
ggcgaaaggacgtaagactg

SEQ ID NO: 132705 - DNA, 20 bp, Artificial Sequence
  mmSKRIPTE0003484_Jak2_1
  gRNA
cagatacggagtgtcccgtg

SEQ ID NO: 132706 - DNA, 20 bp, Artificial Sequence
  mmSKRIPTE0003485_Jak2_2
  gRNA
tctaagagggagcagcacga

SEQ ID NO: 132707 - DNA, 20 bp, Artificial Sequence
  mmSKRIPTE0003486_Jak2_3
  gRNA
aaagtattatacactccacg

SEQ ID NO: 132708 - DNA, 20 bp, Artificial Sequence
  mmSKRIPTE0003487_Jak2_4
  gRNA
aagtagagtaactttcacgt

SEQ ID NO: 132709 - DNA, 20 bp, Artificial Sequence
  mmSKRIPTE0003488_Jak2_5
  gRNA
atggtgtagaaacaaacgca

SEQ ID NO: 132710 - DNA, 20 bp, Artificial Sequence
  mmSKRIPTE0003489_Jak2_6
  gRNA
tagcattacagttctaccga

SEQ ID NO: 132711 - DNA, 20 bp, Artificial Sequence
  mmSKRIPTE0003490_Jak2_7
  gRNA
ttcttccgtagatgagaccg

SEQ ID NO: 132712 - DNA, 20 bp, Artificial Sequence
  mmSKRIPTE0003491_Jak2_8
  gRNA
cgggtattacagactaactg

SEQ ID NO: 132713 - DNA, 20 bp, Artificial Sequence
  mmSKRIPTE0003492_Jak2_9
  gRNA
tgtgctacgatgcagcccta

SEQ ID NO: 132714 - DNA, 20 bp, Artificial Sequence
  mmSKRIPTE0003493_Pi4k2a_1
  gRNA
aagcatccccaatctcgccg

SEQ ID NO: 132715 - DNA, 20 bp, Artificial Sequence
  mmSKRIPTE0003494_Pi4k2a_2
  gRNA
acactggtactgacttcgtg

SEQ ID NO: 132716 - DNA, 20 bp, Artificial Sequence
  mmSKRIPTE0003495_Pi4k2a_3
  gRNA
tgacccgacctacaaccaag

SEQ ID NO: 132717 - DNA, 20 bp, Artificial Sequence
  mmSKRIPTE0003496_Pi4k2a_4
  gRNA
gatcaaatatgactgtccga

SEQ ID NO: 132718 - DNA, 20 bp, Artificial Sequence
  mmSKRIPTE0003497_Pi4k2a_5
  gRNA
ttgagtacaagcttcgaggg

SEQ ID NO: 132719 - DNA, 20 bp, Artificial Sequence
  mmSKRIPTE0003498_Pi4k2a_6
  gRNA
attgatttcttcatcccgcg

SEQ ID NO: 132720 - DNA, 20 bp, Artificial Sequence
  mmSKRIPTE0003499_Pi4k2a_7
  gRNA
gagaacgggactttcgcctg

SEQ ID NO: 132721 - DNA, 20 bp, Artificial Sequence
  mmSKRIPTE0003500_Pi4k2a_8
  gRNA
tgctttgtaccaaatctccg

SEQ ID NO: 132722 - DNA, 20 bp, Artificial Sequence
  mmSKRIPTE0003501_Pi4k2a_9
  gRNA
tcgcggccgtgaccaatccg

SEQ ID NO: 132723 - DNA, 20 bp, Artificial Sequence
  mmSKRIPTE0003502_Sp3_1
  gRNA
tggttggagtatcgtcactg

SEQ ID NO: 132724 - DNA, 20 bp, Artificial Sequence
  mmSKRIPTE0003503_Sp3_2
  gRNA
tgaacccgcccatcgcgggt

SEQ ID NO: 132725 - DNA, 20 bp, Artificial Sequence
  mmSKRIPTE0003504_Sp3_3
  gRNA
gctcccccgaatgccaacgc

SEQ ID NO: 132726 - DNA, 20 bp, Artificial Sequence
  mmSKRIPTE0003505_Sp3_4
  gRNA
gtactcgaacggtcacaccc

SEQ ID NO: 132727 - DNA, 20 bp, Artificial Sequence
  mmSKRIPTE0003506_Sp3_5
  gRNA
caggtgctgctacttcaagt

SEQ ID NO: 132728 - DNA, 20 bp, Artificial Sequence
  mmSKRIPTE0003507_Sp3_6
  gRNA
atagcttgactactactagt

SEQ ID NO: 132729 - DNA, 20 bp, Artificial Sequence
  mmSKRIPTE0003508_Sp3_7
  gRNA
ccaaatgcatcaatcctgtg

SEQ ID NO: 132730 - DNA, 20 bp, Artificial Sequence
  mmSKRIPTE0003509_Sp3_8
  gRNA
agccgtacttcctgtgcgag

SEQ ID NO: 132731 - DNA, 20 bp, Artificial Sequence
  mmSKRIPTE0003510_Sp3_9
  gRNA
ttattggtaatttacaacga

SEQ ID NO: 132732 - DNA, 20 bp, Artificial Sequence
  mmSKRIPTE0003511_Mafb_1
  gRNA
cgcgccgaaagtcctaactg

SEQ ID NO: 132733 - DNA, 20 bp, Artificial Sequence
  mmSKRIPTE0003512_Mafb_2
  gRNA
cgcggccatcgctaaaagcg

SEQ ID NO: 132734 - DNA, 20 bp, Artificial Sequence
  mmSKRIPTE0003513_Mafb_3
  gRNA
acaagattgtatgaaccgca

SEQ ID NO: 132735 - DNA, 20 bp, Artificial Sequence
  mmSKRIPTE0003514_Mafb_4
  gRNA
tgaaccgaagacccatctcg

SEQ ID NO: 132736 - DNA, 20 bp, Artificial Sequence
  mmSKRIPTE0003515_Mafb_5
  gRNA
cggcggaccctgaagaaccg

SEQ ID NO: 132737 - DNA, 20 bp, Artificial Sequence
  mmSKRIPTE0003516_Mafb_6
  gRNA
cagagttagagaaacccggg

SEQ ID NO: 132738 - DNA, 20 bp, Artificial Sequence
  mmSKRIPTE0003517_Mafb_7
  gRNA
tctccagtcagctgacgcgg

SEQ ID NO: 132739 - DNA, 20 bp, Artificial Sequence
  mmSKRIPTE0003518_Mafb_8
  gRNA
ataactactgtacaacggaa

SEQ ID NO: 132740 - DNA, 20 bp, Artificial Sequence
  mmSKRIPTE0003519_Mafb_9
  gRNA
gtggacgacaccgagccagc

SEQ ID NO: 132741 - DNA, 20 bp, Artificial Sequence
  mmSKRIPTE0003520_Pag1_1
  gRNA
cgtcggcagagactgaacgg

SEQ ID NO: 132742 - DNA, 20 bp, Artificial Sequence
  mmSKRIPTE0003521_Pag1_2
  gRNA
ctaccatcatcgggaccatg

SEQ ID NO: 132743 - DNA, 20 bp, Artificial Sequence
  mmSKRIPTE0003522_Pag1_3
  gRNA
ctcggcgctgtcattctccg

SEQ ID NO: 132744 - DNA, 20 bp, Artificial Sequence
  mmSKRIPTE0003523_Pag1_4
  gRNA
tccaacagctgagatccgtg

SEQ ID NO: 132745 - DNA, 20 bp, Artificial Sequence
  mmSKRIPTE0003524_Pag1_5
  gRNA
gcaccgggacagacgacgag

SEQ ID NO: 132746 - DNA, 20 bp, Artificial Sequence
  mmSKRIPTE0003525_Pag1_6
  gRNA
ctgtgtcctgcacttcagcg

SEQ ID NO: 132747 - DNA, 20 bp, Artificial Sequence
  mmSKRIPTE0003526_Pag1_7
  gRNA
gttcacgtgtcagtatgctg

SEQ ID NO: 132748 - DNA, 20 bp, Artificial Sequence
  mmSKRIPTE0003527_Pag1_8
  gRNA
tgcagatgcagtgtccaacg

SEQ ID NO: 132749 - DNA, 20 bp, Artificial Sequence
  mmSKRIPTE0003528_Pag1_9
  gRNA
gaatttaagaaatctctgcg

SEQ ID NO: 132750 - DNA, 20 bp, Artificial Sequence
  mmSKRIPTE0003529_Ptprd_1
  gRNA
gagactccatggatagcgaa

SEQ ID NO: 132751 - DNA, 20 bp, Artificial Sequence
  mmSKRIPTE0003530_Ptprd_2
  gRNA
gtgtgcctgcagcctatccg

SEQ ID NO: 132752 - DNA, 20 bp, Artificial Sequence
  mmSKRIPTE0003531_Ptprd_3
  gRNA
gtcacatgataacatatgcg

SEQ ID NO: 132753 - DNA, 20 bp, Artificial Sequence
  mmSKRIPTE0003532_Ptprd_4
  gRNA
cgagccgcactagaatacct

SEQ ID NO: 132754 - DNA, 20 bp, Artificial Sequence
  mmSKRIPTE0003533_Ptprd_5
  gRNA
aggctgagatttacctaccg

SEQ ID NO: 132755 - DNA, 20 bp, Artificial Sequence
  mmSKRIPTE0003534_Ptprd_6
  gRNA
gaagacattacctgccccag

SEQ ID NO: 132756 - DNA, 20 bp, Artificial Sequence
  mmSKRIPTE0003535_Ptprd_7
  gRNA
ctggcaatggtatctgatcg

SEQ ID NO: 132757 - DNA, 20 bp, Artificial Sequence
  mmSKRIPTE0003536_Ptprd_8
  gRNA
atggccagtcccgaacagtg

SEQ ID NO: 132758 - DNA, 20 bp, Artificial Sequence
  mmSKRIPTE0003537_Ptprd_9
  gRNA
ttgccacgataactgaacag

SEQ ID NO: 132759 - DNA, 20 bp, Artificial Sequence
  mmSKRIPTE0003538_Rab43_1
  gRNA
atcatctagctgttaaggcg

SEQ ID NO: 132760 - DNA, 20 bp, Artificial Sequence
  mmSKRIPTE0003539_Rab43_2
  gRNA
caggtcagtaacaagccgag

SEQ ID NO: 132761 - DNA, 20 bp, Artificial Sequence
  mmSKRIPTE0003540_Rab43_3
  gRNA
cagttgcttgaagatttccg

SEQ ID NO: 132762 - DNA, 20 bp, Artificial Sequence
  mmSKRIPTE0003541_Rab43_4
  gRNA
acacacacaagcgctgcgtg

SEQ ID NO: 132763 - DNA, 20 bp, Artificial Sequence
  mmSKRIPTE0003542_Rab43_5
  gRNA
cctcacagacttcgccctag

SEQ ID NO: 132764 - DNA, 20 bp, Artificial Sequence
  mmSKRIPTE0003543_Rab43_6
  gRNA
ttgggctgagggagtagacg

SEQ ID NO: 132765 - DNA, 20 bp, Artificial Sequence
  mmSKRIPTE0003544_Rab43_7
  gRNA
agccatgtgacttacccagt

SEQ ID NO: 132766 - DNA, 20 bp, Artificial Sequence
  mmSKRIPTE0003545_Rab43_8
  gRNA
ctcacatcctcgatccagtg

SEQ ID NO: 132767 - DNA, 20 bp, Artificial Sequence
  mmSKRIPTE0003546_Rab43_9
  gRNA
agtctttctaaggctgacag

SEQ ID NO: 132768 - DNA, 20 bp, Artificial Sequence
  mmSKRIPTE0003547_Klrk1_1
  gRNA
acttcatatatgtcacaacg

SEQ ID NO: 132769 - DNA, 20 bp, Artificial Sequence
  mmSKRIPTE0003548_Klrk1_2
  gRNA
ggagcatataaagacccgaa

SEQ ID NO: 132770 - DNA, 20 bp, Artificial Sequence
  mmSKRIPTE0003549_Klrk1_3
  gRNA
gtagtggtcaccgaggcctg

SEQ ID NO: 132771 - DNA, 20 bp, Artificial Sequence
  mmSKRIPTE0003550_Klrk1_4
  gRNA
acccagcatctatctctacg

SEQ ID NO: 132772 - DNA, 20 bp, Artificial Sequence
  mmSKRIPTE0003551_Klrk1_5
  gRNA
acgacctcaagccagcaaag

SEQ ID NO: 132773 - DNA, 20 bp, Artificial Sequence
  mmSKRIPTE0003552_Klrk1_6
  gRNA
tttctggtatgagcacatcg

SEQ ID NO: 132774 - DNA, 20 bp, Artificial Sequence
  mmSKRIPTE0003553_Klrk1_7
  gRNA
agaaactcatcacttgagca

SEQ ID NO: 132775 - DNA, 20 bp, Artificial Sequence
  mmSKRIPTE0003554_Klrk1_8
  gRNA
tggttcagtgagaattacag

SEQ ID NO: 132776 - DNA, 20 bp, Artificial Sequence
  mmSKRIPTE0003555_Klrk1_9
  gRNA
gtgaaactttgtgtaatgag

SEQ ID NO: 132777 - DNA, 20 bp, Artificial Sequence
  mmSKRIPTE0003556_Nfkbid_1
  gRNA
tagtttacctccatcaccag

SEQ ID NO: 132778 - DNA, 20 bp, Artificial Sequence
  mmSKRIPTE0003557_Nfkbid_2
  gRNA
acaagcctgggggtgccgtg

SEQ ID NO: 132779 - DNA, 20 bp, Artificial Sequence
  mmSKRIPTE0003558_Nfkbid_3
  gRNA
aaaactccaaagtggcacgg

SEQ ID NO: 132780 - DNA, 20 bp, Artificial Sequence
  mmSKRIPTE0003559_Nfkbid_4
  gRNA
gccacgtgtcaggacttctg

SEQ ID NO: 132781 - DNA, 20 bp, Artificial Sequence
  mmSKRIPTE0003560_Nfkbid_5
  gRNA
tcggtacatctgtaacacct

SEQ ID NO: 132782 - DNA, 20 bp, Artificial Sequence
  mmSKRIPTE0003561_Nfkbid_6
  gRNA
gcatacgctgactgtcccac

SEQ ID NO: 132783 - DNA, 20 bp, Artificial Sequence
  mmSKRIPTE0003562_Nfkbid_7
  gRNA
tgatcatgactgatccaggt

SEQ ID NO: 132784 - DNA, 20 bp, Artificial Sequence
  mmSKRIPTE0003563_Nfkbid_8
  gRNA
gggccgttccgtcttgcacg

SEQ ID NO: 132785 - DNA, 20 bp, Artificial Sequence
  mmSKRIPTE0003564_Nfkbid_9
  gRNA
ggtgcggaggaaaagcgtgg

SEQ ID NO: 132786 - DNA, 20 bp, Artificial Sequence
  mmSKRIPTE0003565_Smarca4_1
  gRNA
cagctgattctaacccacga

SEQ ID NO: 132787 - DNA, 20 bp, Artificial Sequence
  mmSKRIPTE0003566_Smarca4_2
  gRNA
gttcacagttccactcggca

SEQ ID NO: 132788 - DNA, 20 bp, Artificial Sequence
  mmSKRIPTE0003567_Smarca4_3
  gRNA
tgccgagtctgtcgtcagag

SEQ ID NO: 132789 - DNA, 20 bp, Artificial Sequence
  mmSKRIPTE0003568_Smarca4_4
  gRNA
tgggcccatacatacgagag

SEQ ID NO: 132790 - DNA, 20 bp, Artificial Sequence
  mmSKRIPTE0003569_Smarca4_5
  gRNA
ccacgttagctgctgcgctg

SEQ ID NO: 132791 - DNA, 20 bp, Artificial Sequence
  mmSKRIPTE0003570_Smarca4_6
  gRNA
taagcgtaagcgagacagcg

SEQ ID NO: 132792 - DNA, 20 bp, Artificial Sequence
  mmSKRIPTE0003571_Smarca4_7
  gRNA
ggcttccaacaggaggacgt

SEQ ID NO: 132793 - DNA, 20 bp, Artificial Sequence
  mmSKRIPTE0003572_Smarca4_8
  gRNA
ggtccttaacacacactacg

SEQ ID NO: 132794 - DNA, 20 bp, Artificial Sequence
  mmSKRIPTE0003573_Smarca4_9
  gRNA
tgcccttgtaatccgcactg

SEQ ID NO: 132795 - DNA, 20 bp, Artificial Sequence
  mmSKRIPTE0003574_Hspa8_1
  gRNA
gaaaccggtctcattgaacg

SEQ ID NO: 132796 - DNA, 20 bp, Artificial Sequence
  mmSKRIPTE0003575_Hspa8_2
  gRNA
tggaatccatcatcacagcg

SEQ ID NO: 132797 - DNA, 20 bp, Artificial Sequence
  mmSKRIPTE0003576_Hspa8_3
  gRNA
atggacgtaatctctagtgc

SEQ ID NO: 132798 - DNA, 20 bp, Artificial Sequence
  mmSKRIPTE0003577_Hspa8_4
  gRNA
catggccttgtggctccgcg

SEQ ID NO: 132799 - DNA, 20 bp, Artificial Sequence
  mmSKRIPTE0003578_Hspa8_5
  gRNA
aagagccagaacgctcgcct

SEQ ID NO: 132800 - DNA, 20 bp, Artificial Sequence
  mmSKRIPTE0003579_Hspa8_6
  gRNA
actgcggactggataaaagc

SEQ ID NO: 132801 - DNA, 20 bp, Artificial Sequence
  mmSKRIPTE0003580_Hspa8_7
  gRNA
gaagcgtacctcggaaaggt

SEQ ID NO: 132802 - DNA, 20 bp, Artificial Sequence
  mmSKRIPTE0003581_Hspa8_8
  gRNA
acctatcacctgaagccacg

SEQ ID NO: 132803 - DNA, 20 bp, Artificial Sequence
  mmSKRIPTE0003582_Hspa8_9
  gRNA
gcggtttccaccagaacgca

SEQ ID NO: 132804 - DNA, 20 bp, Artificial Sequence
  mmSKRIPTE0003583_Tfe3_1
  gRNA
gtcccggcaaaacacgcacg

SEQ ID NO: 132805 - DNA, 20 bp, Artificial Sequence
  mmSKRIPTE0003584_Tfe3_2
  gRNA
acaacgttccatgtatcggg

SEQ ID NO: 132806 - DNA, 20 bp, Artificial Sequence
  mmSKRIPTE0003585_Tfe3_3
  gRNA
aggtccagaagggcatccga

SEQ ID NO: 132807 - DNA, 20 bp, Artificial Sequence
  mmSKRIPTE0003586_Tfe3_4
  gRNA
ttgttgtgatggttcaagcg

SEQ ID NO: 132808 - DNA, 20 bp, Artificial Sequence
  mmSKRIPTE0003587_Tfe3_5
  gRNA
gatagggattaaccctccag

SEQ ID NO: 132809 - DNA, 20 bp, Artificial Sequence
  mmSKRIPTE0003588_Tfe3_6
  gRNA
cctgcctccttctatcaccg

SEQ ID NO: 132810 - DNA, 20 bp, Artificial Sequence
  mmSKRIPTE0003589_Tfe3_7
  gRNA
gttggtcctaggttaaggca

SEQ ID NO: 132811 - DNA, 20 bp, Artificial Sequence
  mmSKRIPTE0003590_Tfe3_8
  gRNA
ggtcaggtattcgctctgcg

SEQ ID NO: 132812 - DNA, 20 bp, Artificial Sequence
  mmSKRIPTE0003591_Tfe3_9
  gRNA
aaaaggcaaggtcgtcccaa

SEQ ID NO: 132813 - DNA, 20 bp, Artificial Sequence
  mmSKRIPTE0003592_Mid2_1
  gRNA
agattggccggtgcgccacg

SEQ ID NO: 132814 - DNA, 20 bp, Artificial Sequence
  mmSKRIPTE0003593_Mid2_2
  gRNA
gtgaaaccatcctcacatgt

SEQ ID NO: 132815 - DNA, 20 bp, Artificial Sequence
  mmSKRIPTE0003594_Mid2_3
  gRNA
ctgcaaaaaacattgccgag

SEQ ID NO: 132816 - DNA, 20 bp, Artificial Sequence
  mmSKRIPTE0003595_Mid2_4
  gRNA
ctattgcttaagcgtccctg

SEQ ID NO: 132817 - DNA, 20 bp, Artificial Sequence
  mmSKRIPTE0003596_Mid2_5
  gRNA
tttcaccagccatcgcctgg

SEQ ID NO: 132818 - DNA, 20 bp, Artificial Sequence
  mmSKRIPTE0003597_Mid2_6
  gRNA
cactaatggaggcttaagag

SEQ ID NO: 132819 - DNA, 20 bp, Artificial Sequence
  mmSKRIPTE0003598_Mid2_7
  gRNA
gagatgtatagtgtagctcg

SEQ ID NO: 132820 - DNA, 20 bp, Artificial Sequence
  mmSKRIPTE0003599_Mid2_8
  gRNA
cgatggctaagtgagccaag

SEQ ID NO: 132821 - DNA, 20 bp, Artificial Sequence
  mmSKRIPTE0003600_Mid2_9
  gRNA
attgtagctcagccatattg

SEQ ID NO: 132822 - DNA, 20 bp, Artificial Sequence
  mmSKRIPTE0003601_Mapk1_1
  gRNA
gccgggcctgaaatccagcg

SEQ ID NO: 132823 - DNA, 20 bp, Artificial Sequence
  mmSKRIPTE0003602_Mapk1_2
  gRNA
acgaccgtcacagtgtctaa

SEQ ID NO: 132824 - DNA, 20 bp, Artificial Sequence
  mmSKRIPTE0003603_Mapk1_3
  gRNA
gaagcgcagcataagtcgag

SEQ ID NO: 132825 - DNA, 20 bp, Artificial Sequence
  mmSKRIPTE0003604_Mapk1_4
  gRNA
aagataactgcaccaccgtg

SEQ ID NO: 132826 - DNA, 20 bp, Artificial Sequence
  mmSKRIPTE0003605_Mapk1_5
  gRNA
ttaatcctcaacaccctgcg

SEQ ID NO: 132827 - DNA, 20 bp, Artificial Sequence
  mmSKRIPTE0003606_Mapk1_6
  gRNA
agtcagatgaatgcaccgaa

SEQ ID NO: 132828 - DNA, 20 bp, Artificial Sequence
  mmSKRIPTE0003607_Mapk1_7
  gRNA
gattgcacacatcacctacg

SEQ ID NO: 132829 - DNA, 20 bp, Artificial Sequence
  mmSKRIPTE0003608_Mapk1_8
  gRNA
ctacgtcgaacacctgcccg

SEQ ID NO: 132830 - DNA, 20 bp, Artificial Sequence
  mmSKRIPTE0003609_Mapk1_9
  gRNA
acctgcagcagctaacctgg

SEQ ID NO: 132831 - DNA, 20 bp, Artificial Sequence
  mmSKRIPTE0003610_Kit_1
  gRNA
atagtatttcaaacgaagcg

SEQ ID NO: 132832 - DNA, 20 bp, Artificial Sequence
  mmSKRIPTE0003611_Kit_2
  gRNA
aatctgaatgttaatagccg

SEQ ID NO: 132833 - DNA, 20 bp, Artificial Sequence
  mmSKRIPTE0003612_Kit_3
  gRNA
tcggcacacgtccaaacatg

SEQ ID NO: 132834 - DNA, 20 bp, Artificial Sequence
  mmSKRIPTE0003613_Kit_4
  gRNA
agaacagtgtgggcttacgc

SEQ ID NO: 132835 - DNA, 20 bp, Artificial Sequence
  mmSKRIPTE0003614_Kit_5
  gRNA
ctttacagaattcgatacaa

SEQ ID NO: 132836 - DNA, 20 bp, Artificial Sequence
  mmSKRIPTE0003615_Kit_6
  gRNA
cctcctgtaaaaatacccat

SEQ ID NO: 132837 - DNA, 20 bp, Artificial Sequence
  mmSKRIPTE0003616_Kit_7
  gRNA
ggagacgctgactatcagct

SEQ ID NO: 132838 - DNA, 20 bp, Artificial Sequence
  mmSKRIPTE0003617_Kit_8
  gRNA
tctggagccacttctctacg

SEQ ID NO: 132839 - DNA, 20 bp, Artificial Sequence
  mmSKRIPTE0003618_Kit_9
  gRNA
aagccgctgtatttgaccgt

SEQ ID NO: 132840 - DNA, 20 bp, Artificial Sequence
  mmSKRIPTE0003619_Cxcl5_1
  gRNA
taagcggaatgcactcgcag

SEQ ID NO: 132841 - DNA, 20 bp, Artificial Sequence
  mmSKRIPTE0003620_Cxcl5_2
  gRNA
catccgcatgaatggcgaga

SEQ ID NO: 132842 - DNA, 20 bp, Artificial Sequence
  mmSKRIPTE0003621_Cxcl5_3
  gRNA
tctaagctcagtttcgaatg

SEQ ID NO: 132843 - DNA, 20 bp, Artificial Sequence
  mmSKRIPTE0003622_Cxcl5_4
  gRNA
agttcataaagaaaatccgt

SEQ ID NO: 132844 - DNA, 20 bp, Artificial Sequence
  mmSKRIPTE0003623_Cxcl5_5
  gRNA
ttcctcagtcatagccgcaa

SEQ ID NO: 132845 - DNA, 20 bp, Artificial Sequence
  mmSKRIPTE0003624_Cxcl5_6
  gRNA
gtggacaagatcccggacca

SEQ ID NO: 132846 - DNA, 20 bp, Artificial Sequence
  mmSKRIPTE0003625_Cxcl5_7
  gRNA
acttccaccgtagggcactg

SEQ ID NO: 132847 - DNA, 20 bp, Artificial Sequence
  mmSKRIPTE0003626_Cxcl5_8
  gRNA
cataatgtagaatgcatgcg

SEQ ID NO: 132848 - DNA, 20 bp, Artificial Sequence
  mmSKRIPTE0003627_Cxcl5_9
  gRNA
gaatccgggataagggatgt

SEQ ID NO: 132849 - DNA, 20 bp, Artificial Sequence
  mmSKRIPTE0003628_Thbs4_1
  gRNA
gggctgtgcaggcgacaatg

SEQ ID NO: 132850 - DNA, 20 bp, Artificial Sequence
  mmSKRIPTE0003629_Thbs4_2
  gRNA
cttacgtagcactttcagag

SEQ ID NO: 132851 - DNA, 20 bp, Artificial Sequence
  mmSKRIPTE0003630_Thbs4_3
  gRNA
gtacatcaccatcacgcacg

SEQ ID NO: 132852 - DNA, 20 bp, Artificial Sequence
  mmSKRIPTE0003631_Thbs4_4
  gRNA
tgttgcagacaccataccag

SEQ ID NO: 132853 - DNA, 20 bp, Artificial Sequence
  mmSKRIPTE0003632_Thbs4_5
  gRNA
tgaccgcacctcagatcacg

SEQ ID NO: 132854 - DNA, 20 bp, Artificial Sequence
  mmSKRIPTE0003633_Thbs4_6
  gRNA
atgccgtgtaccctgtggag

SEQ ID NO: 132855 - DNA, 20 bp, Artificial Sequence
  mmSKRIPTE0003634_Thbs4_7
  gRNA
tgtccgatgtacggacacca

SEQ ID NO: 132856 - DNA, 20 bp, Artificial Sequence
  mmSKRIPTE0003635_Thbs4_8
  gRNA
agggcagtgaaaagattacg

SEQ ID NO: 132857 - DNA, 20 bp, Artificial Sequence
  mmSKRIPTE0003636_Thbs4_9
  gRNA
ccagcttctatgtagtcatg

SEQ ID NO: 132858 - DNA, 20 bp, Artificial Sequence
  mmSKRIPTE0003637_Erbin_1
  gRNA
agccacggactgaagacggt

SEQ ID NO: 132859 - DNA, 20 bp, Artificial Sequence
  mmSKRIPTE0003638_Erbin_2
  gRNA
gtaccatgtcgctgtctacg

SEQ ID NO: 132860 - DNA, 20 bp, Artificial Sequence
  mmSKRIPTE0003639_Erbin_3
  gRNA
tgcctcgctgaactccacgg

SEQ ID NO: 132861 - DNA, 20 bp, Artificial Sequence
  mmSKRIPTE0003640_Erbin_4
  gRNA
tggcactagtcggtcattcg

SEQ ID NO: 132862 - DNA, 20 bp, Artificial Sequence
  mmSKRIPTE0003641_Erbin_5
  gRNA
gggctgatcatacagcagtg

SEQ ID NO: 132863 - DNA, 20 bp, Artificial Sequence
  mmSKRIPTE0003642_Erbin_6
  gRNA
gtggtaaagcgctatcacac

SEQ ID NO: 132864 - DNA, 20 bp, Artificial Sequence
  mmSKRIPTE0003643_Erbin_7
  gRNA
tatttaaaaaaccacccgtg

SEQ ID NO: 132865 - DNA, 20 bp, Artificial Sequence
  mmSKRIPTE0003644_Erbin_8
  gRNA
taaaagggagccgattgctg

SEQ ID NO: 132866 - DNA, 20 bp, Artificial Sequence
  mmSKRIPTE0003645_Erbin_9
  gRNA
gaccccacaaggcgtactga

SEQ ID NO: 132867 - DNA, 20 bp, Artificial Sequence
  mmSKRIPTE0003646_Csf1r_1
  gRNA
tgtagaaggcaaaggcatcg

SEQ ID NO: 132868 - DNA, 20 bp, Artificial Sequence
  mmSKRIPTE0003647_Csf1r_2
  gRNA
ccaaagacccctgttcacgt

SEQ ID NO: 132869 - DNA, 20 bp, Artificial Sequence
  mmSKRIPTE0003648_Csf1r_3
  gRNA
caggagatctggcgtcagtg

SEQ ID NO: 132870 - DNA, 20 bp, Artificial Sequence
  mmSKRIPTE0003649_Csf1r_4
  gRNA
caaaagattcaagcccatcg

SEQ ID NO: 132871 - DNA, 20 bp, Artificial Sequence
  mmSKRIPTE0003650_Csf1r_5
  gRNA
tcagggtgtagacacctacg

SEQ ID NO: 132872 - DNA, 20 bp, Artificial Sequence
  mmSKRIPTE0003651_Csf1r_6
  gRNA
ttcgagctgctacgtcccgg

SEQ ID NO: 132873 - DNA, 20 bp, Artificial Sequence
  mmSKRIPTE0003652_Csf1r_7
  gRNA
ctcgtgggtaatatagctag

SEQ ID NO: 132874 - DNA, 20 bp, Artificial Sequence
  mmSKRIPTE0003653_Csf1r_8
  gRNA
caagctggtgcggattcgag

SEQ ID NO: 132875 - DNA, 20 bp, Artificial Sequence
  mmSKRIPTE0003654_Csf1r_9
  gRNA
gctgaattcctactggtcgt

SEQ ID NO: 132876 - DNA, 20 bp, Artificial Sequence
  mmSKRIPTE0003655_Shb_1
  gRNA
taagcaccgactcatcaaag

SEQ ID NO: 132877 - DNA, 20 bp, Artificial Sequence
  mmSKRIPTE0003656_Shb_2
  gRNA
ccttgtgctatatcaccgtg

SEQ ID NO: 132878 - DNA, 20 bp, Artificial Sequence
  mmSKRIPTE0003657_Shb_3
  gRNA
tgatgagtacgaccagccgt

SEQ ID NO: 132879 - DNA, 20 bp, Artificial Sequence
  mmSKRIPTE0003658_Shb_4
  gRNA
ctgattaaacgagtgatcga

SEQ ID NO: 132880 - DNA, 20 bp, Artificial Sequence
  mmSKRIPTE0003659_Shb_5
  gRNA
agtcgcgctccttctgcgcg

SEQ ID NO: 132881 - DNA, 20 bp, Artificial Sequence
  mmSKRIPTE0003660_Shb_6
  gRNA
gacaccccgtacgagccgga

SEQ ID NO: 132882 - DNA, 20 bp, Artificial Sequence
  mmSKRIPTE0003661_Shb_7
  gRNA
agtcagttatctaggtcgga

SEQ ID NO: 132883 - DNA, 20 bp, Artificial Sequence
  mmSKRIPTE0003662_Shb_8
  gRNA
gctccccaaacgcacccttg

SEQ ID NO: 132884 - DNA, 20 bp, Artificial Sequence
  mmSKRIPTE0003663_Shb_9
  gRNA
tctccccagatggtatcacg

SEQ ID NO: 132885 - DNA, 20 bp, Artificial Sequence
  mmSKRIPTE0003664_Nppa_1
  gRNA
aagggacacccatcgtagtg

SEQ ID NO: 132886 - DNA, 20 bp, Artificial Sequence
  mmSKRIPTE0003665_Nppa_2
  gRNA
gtcacattgccactgtggcg

SEQ ID NO: 132887 - DNA, 20 bp, Artificial Sequence
  mmSKRIPTE0003666_Nppa_3
  gRNA
agcaccaaggacagacgccg

SEQ ID NO: 132888 - DNA, 20 bp, Artificial Sequence
  mmSKRIPTE0003667_Nppa_4
  gRNA
agagggcagatctatcggag

SEQ ID NO: 132889 - DNA, 20 bp, Artificial Sequence
  mmSKRIPTE0003668_Nppa_5
  gRNA
gcttgccggtttaatcacag

SEQ ID NO: 132890 - DNA, 20 bp, Artificial Sequence
  mmSKRIPTE0003669_Nppa_6
  gRNA
cgcacttagctccctccccg

SEQ ID NO: 132891 - DNA, 20 bp, Artificial Sequence
  mmSKRIPTE0003670_Nppa_7
  gRNA
tgtagatgagtggtctagtg

SEQ ID NO: 132892 - DNA, 20 bp, Artificial Sequence
  mmSKRIPTE0003671_Nppa_8
  gRNA
ttggacaccgcactgtacac

SEQ ID NO: 132893 - DNA, 20 bp, Artificial Sequence
  mmSKRIPTE0003672_Nppa_9
  gRNA
agtaccgaagataacagcca

SEQ ID NO: 132894 - DNA, 20 bp, Artificial Sequence
  mmSKRIPTE0003673_Spp1_1
  gRNA
attcagctgtactcaccggg

SEQ ID NO: 132895 - DNA, 20 bp, Artificial Sequence
  mmSKRIPTE0003674_Spp1_2
  gRNA
cagttaaatgatcaacccgg

SEQ ID NO: 132896 - DNA, 20 bp, Artificial Sequence
  mmSKRIPTE0003675_Spp1_3
  gRNA
atagcttggcttatggactg

SEQ ID NO: 132897 - DNA, 20 bp, Artificial Sequence
  mmSKRIPTE0003676_Spp1_4
  gRNA
gtgacttggtggtgatctag

SEQ ID NO: 132898 - DNA, 20 bp, Artificial Sequence
  mmSKRIPTE0003677_Spp1_5
  gRNA
ggcaacagggatgacatcga

SEQ ID NO: 132899 - DNA, 20 bp, Artificial Sequence
  mmSKRIPTE0003678_Spp1_6
  gRNA
ctcaccgctcttcatgtgag

SEQ ID NO: 132900 - DNA, 20 bp, Artificial Sequence
  mmSKRIPTE0003679_Spp1_7
  gRNA
ccgagccccaaggagatcag

SEQ ID NO: 132901 - DNA, 20 bp, Artificial Sequence
  mmSKRIPTE0003680_Spp1_8
  gRNA
acccagatcctatagccaca

SEQ ID NO: 132902 - DNA, 20 bp, Artificial Sequence
  mmSKRIPTE0003681_Spp1_9
  gRNA
ctgtgaaacaaatcttggtg

SEQ ID NO: 132903 - DNA, 20 bp, Artificial Sequence
  mmSKRIPTE0003682_Hnf1a_1
  gRNA
gctcacttatggttggccgt

SEQ ID NO: 132904 - DNA, 20 bp, Artificial Sequence
  mmSKRIPTE0003683_Hnf1a_2
  gRNA
aagatgtgtaaacatgtacg

SEQ ID NO: 132905 - DNA, 20 bp, Artificial Sequence
  mmSKRIPTE0003684_Hnf1a_3
  gRNA
agcctgacaagcgagcctcg

SEQ ID NO: 132906 - DNA, 20 bp, Artificial Sequence
  mmSKRIPTE0003685_Hnf1a_4
  gRNA
aaactggaccggctgcagcg

SEQ ID NO: 132907 - DNA, 20 bp, Artificial Sequence
  mmSKRIPTE0003686_Hnf1a_5
  gRNA
cgtaccgtacacctagagtg

SEQ ID NO: 132908 - DNA, 20 bp, Artificial Sequence
  mmSKRIPTE0003687_Hnf1a_6
  gRNA
tcattaacttgtcgggacgg

SEQ ID NO: 132909 - DNA, 20 bp, Artificial Sequence
  mmSKRIPTE0003688_Hnf1a_7
  gRNA
acaggtggcccacggatacg

SEQ ID NO: 132910 - DNA, 20 bp, Artificial Sequence
  mmSKRIPTE0003689_Hnf1a_8
  gRNA
aaagaaataatggcgtgcgt

SEQ ID NO: 132911 - DNA, 20 bp, Artificial Sequence
  mmSKRIPTE0003690_Hnf1a_9
  gRNA
cgtgccgggcgataatctca

SEQ ID NO: 132912 - DNA, 20 bp, Artificial Sequence
  mmSKRIPTE0003691_Pou2f2_1
  gRNA
agcacccgtaggatcatccg

SEQ ID NO: 132913 - DNA, 20 bp, Artificial Sequence
  mmSKRIPTE0003692_Pou2f2_2
  gRNA
caatgtggcgccccgcaaag

SEQ ID NO: 132914 - DNA, 20 bp, Artificial Sequence
  mmSKRIPTE0003693_Pou2f2_3
  gRNA
ggaacagcacaacgaccacg

SEQ ID NO: 132915 - DNA, 20 bp, Artificial Sequence
  mmSKRIPTE0003694_Pou2f2_4
  gRNA
aagagtaatcgagagcaccg

SEQ ID NO: 132916 - DNA, 20 bp, Artificial Sequence
  mmSKRIPTE0003695_Pou2f2_5
  gRNA
ttcctgtgagtgtatcccgg

SEQ ID NO: 132917 - DNA, 20 bp, Artificial Sequence
  mmSKRIPTE0003696_Pou2f2_6
  gRNA
acgcatcaacccttgcagtg

SEQ ID NO: 132918 - DNA, 20 bp, Artificial Sequence
  mmSKRIPTE0003697_Pou2f2_7
  gRNA
actgacttctgagaaccgtg

SEQ ID NO: 132919 - DNA, 20 bp, Artificial Sequence
  mmSKRIPTE0003698_Pou2f2_8
  gRNA
aaagatgttactaaagcacg

SEQ ID NO: 132920 - DNA, 20 bp, Artificial Sequence
  mmSKRIPTE0003699_Pou2f2_9
  gRNA
aaggggtaactggtccacga

SEQ ID NO: 132921 - DNA, 20 bp, Artificial Sequence
  mmSKRIPTE0003700_Sfrp1_1
  gRNA
aggctaaagtgccctatccg

SEQ ID NO: 132922 - DNA, 20 bp, Artificial Sequence
  mmSKRIPTE0003701_Sfrp1_2
  gRNA
ccccgggtctccgatcgatg

SEQ ID NO: 132923 - DNA, 20 bp, Artificial Sequence
  mmSKRIPTE0003702_Sfrp1_3
  gRNA
gctcacgtagtcgtactcgc

SEQ ID NO: 132924 - DNA, 20 bp, Artificial Sequence
  mmSKRIPTE0003703_Sfrp1_4
  gRNA
aattccccaccgcatccatg

SEQ ID NO: 132925 - DNA, 20 bp, Artificial Sequence
  mmSKRIPTE0003704_Sfrp1_5
  gRNA
catgttgctcggcgacgtcg

SEQ ID NO: 132926 - DNA, 20 bp, Artificial Sequence
  mmSKRIPTE0003705_Sfrp1_6
  gRNA
tttgtatgaaggaggtacgt

SEQ ID NO: 132927 - DNA, 20 bp, Artificial Sequence
  mmSKRIPTE0003706_Sfrp1_7
  gRNA
gcggcgattggttaactgcg

SEQ ID NO: 132928 - DNA, 20 bp, Artificial Sequence
  mmSKRIPTE0003707_Sfrp1_8
  gRNA
gccaggctaacaagatctag

SEQ ID NO: 132929 - DNA, 20 bp, Artificial Sequence
  mmSKRIPTE0003708_Sfrp1_9
  gRNA
caaaaagggaggctatctag

SEQ ID NO: 132930 - DNA, 20 bp, Artificial Sequence
  mmSKRIPTE0003709_Selp_1
  gRNA
gccagagtgtgaatacggtg

SEQ ID NO: 132931 - DNA, 20 bp, Artificial Sequence
  mmSKRIPTE0003710_Selp_2
  gRNA
aaggaccagcaatagccgtg

SEQ ID NO: 132932 - DNA, 20 bp, Artificial Sequence
  mmSKRIPTE0003711_Selp_3
  gRNA
tacatctcccaacaaagccg

SEQ ID NO: 132933 - DNA, 20 bp, Artificial Sequence
  mmSKRIPTE0003712_Selp_4
  gRNA
accattgccaggaatgatcg

SEQ ID NO: 132934 - DNA, 20 bp, Artificial Sequence
  mmSKRIPTE0003713_Selp_5
  gRNA
tgtgagagcaacctgccgag

SEQ ID NO: 132935 - DNA, 20 bp, Artificial Sequence
  mmSKRIPTE0003714_Selp_6
  gRNA
ccagcctggatatagagcga

SEQ ID NO: 132936 - DNA, 20 bp, Artificial Sequence
  mmSKRIPTE0003715_Selp_7
  gRNA
cccctcccacgtgtgaaggt

SEQ ID NO: 132937 - DNA, 20 bp, Artificial Sequence
  mmSKRIPTE0003716_Selp_8
  gRNA
catgtgctatgatgacgcaa

SEQ ID NO: 132938 - DNA, 20 bp, Artificial Sequence
  mmSKRIPTE0003717_Selp_9
  gRNA
aggctgtctgatcctctaca

SEQ ID NO: 132939 - DNA, 20 bp, Artificial Sequence
  mmSKRIPTE0003718_Phb_1
  gRNA
acgcgcagtatccggagctg

SEQ ID NO: 132940 - DNA, 20 bp, Artificial Sequence
  mmSKRIPTE0003719_Phb_2
  gRNA
gactctggaactgatcggag

SEQ ID NO: 132941 - DNA, 20 bp, Artificial Sequence
  mmSKRIPTE0003720_Phb_3
  gRNA
ctttgtataatggtgaggcg

SEQ ID NO: 132942 - DNA, 20 bp, Artificial Sequence
  mmSKRIPTE0003721_Phb_4
  gRNA
gcatgtcctatagtgacacg

SEQ ID NO: 132943 - DNA, 20 bp, Artificial Sequence
  mmSKRIPTE0003722_Phb_5
  gRNA
gctgatctgaacgatagcct

SEQ ID NO: 132944 - DNA, 20 bp, Artificial Sequence
  mmSKRIPTE0003723_Phb_6
  gRNA
tccactcacacctaaacacg

SEQ ID NO: 132945 - DNA, 20 bp, Artificial Sequence
  mmSKRIPTE0003724_Phb_7
  gRNA
gcatgtgtgggtacgcctag

SEQ ID NO: 132946 - DNA, 20 bp, Artificial Sequence
  mmSKRIPTE0003725_Phb_8
  gRNA
ggtgtcataacttcaacgga

SEQ ID NO: 132947 - DNA, 20 bp, Artificial Sequence
  mmSKRIPTE0003726_Phb_9
  gRNA
tagagccggtatgtacatgt

SEQ ID NO: 132948 - DNA, 20 bp, Artificial Sequence
  mmSKRIPTE0003727_Cdc42ep2_1
  gRNA
ctcgcactacaaccgtgtgt

SEQ ID NO: 132949 - DNA, 20 bp, Artificial Sequence
  mmSKRIPTE0003728_Cdc42ep2_2
  gRNA
caccctagaaggttccgcag

SEQ ID NO: 132950 - DNA, 20 bp, Artificial Sequence
  mmSKRIPTE0003729_Cdc42ep2_3
  gRNA
gggggccaccaattacaggg

SEQ ID NO: 132951 - DNA, 20 bp, Artificial Sequence
  mmSKRIPTE0003730_Cdc42ep2_4
  gRNA
atagccaacgataccaacaa

SEQ ID NO: 132952 - DNA, 20 bp, Artificial Sequence
  mmSKRIPTE0003731_Cdc42ep2_5
  gRNA
tttatgtaggaatctgcacg

SEQ ID NO: 132953 - DNA, 20 bp, Artificial Sequence
  mmSKRIPTE0003732_Cdc42ep2_6
  gRNA
cttgcatccatctagaagag

SEQ ID NO: 132954 - DNA, 20 bp, Artificial Sequence
  mmSKRIPTE0003733_Cdc42ep2_7
  gRNA
ctagaggcttagcctccggg

SEQ ID NO: 132955 - DNA, 20 bp, Artificial Sequence
  mmSKRIPTE0003734_Cdc42ep2_8
  gRNA
atgtgatcaaagttggccca

SEQ ID NO: 132956 - DNA, 20 bp, Artificial Sequence
  mmSKRIPTE0003735_Cdc42ep2_9
  gRNA
cagaattccctggtcatgtg

SEQ ID NO: 132957 - DNA, 20 bp, Artificial Sequence
  mmSKRIPTE0003736_Rapgef1_1
  gRNA
cgcacctcgatatccccaca

SEQ ID NO: 132958 - DNA, 20 bp, Artificial Sequence
  mmSKRIPTE0003737_Rapgef1_2
  gRNA
cccttccggagaagaagcgt

SEQ ID NO: 132959 - DNA, 20 bp, Artificial Sequence
  mmSKRIPTE0003738_Rapgef1_3
  gRNA
ggcagcacaagatgcctgcg

SEQ ID NO: 132960 - DNA, 20 bp, Artificial Sequence
  mmSKRIPTE0003739_Rapgef1_4
  gRNA
agacacgctaacatcaccac

SEQ ID NO: 132961 - DNA, 20 bp, Artificial Sequence
  mmSKRIPTE0003740_Rapgef1_5
  gRNA
ctgcggtagtgattccacgc

SEQ ID NO: 132962 - DNA, 20 bp, Artificial Sequence
  mmSKRIPTE0003741_Rapgef1_6
  gRNA
tcagtgaaagaggtttcgga

SEQ ID NO: 132963 - DNA, 20 bp, Artificial Sequence
  mmSKRIPTE0003742_Rapgef1_7
  gRNA
cgagcaccggtccagtagag

SEQ ID NO: 132964 - DNA, 20 bp, Artificial Sequence
  mmSKRIPTE0003743_Rapgef1_8
  gRNA
ctcctctggccagaccagcg

SEQ ID NO: 132965 - DNA, 20 bp, Artificial Sequence
  mmSKRIPTE0003744_Rapgef1_9
  gRNA
taggacgtgagggcctccag

SEQ ID NO: 132966 - DNA, 20 bp, Artificial Sequence
  mmSKRIPTE0003745_Rasgrp1_1
  gRNA
tggattaagcactatcaccg

SEQ ID NO: 132967 - DNA, 20 bp, Artificial Sequence
  mmSKRIPTE0003746_Rasgrp1_2
  gRNA
gctcttaacgaatctaggga

SEQ ID NO: 132968 - DNA, 20 bp, Artificial Sequence
  mmSKRIPTE0003747_Rasgrp1_3
  gRNA
acgtacagatatccgtcgga

SEQ ID NO: 132969 - DNA, 20 bp, Artificial Sequence
  mmSKRIPTE0003748_Rasgrp1_4
  gRNA
agtgtatgcatgatccacgc

SEQ ID NO: 132970 - DNA, 20 bp, Artificial Sequence
  mmSKRIPTE0003749_Rasgrp1_5
  gRNA
tagaggtgcagcgctctccg

SEQ ID NO: 132971 - DNA, 20 bp, Artificial Sequence
  mmSKRIPTE0003750_Rasgrp1_6
  gRNA
acaggggtagaccatgatcg

SEQ ID NO: 132972 - DNA, 20 bp, Artificial Sequence
  mmSKRIPTE0003751_Rasgrp1_7
  gRNA
ccaaacagaatcgttcccgt

SEQ ID NO: 132973 - DNA, 20 bp, Artificial Sequence
  mmSKRIPTE0003752_Rasgrp1_8
  gRNA
gctgacggtgagattcccat

SEQ ID NO: 132974 - DNA, 20 bp, Artificial Sequence
  mmSKRIPTE0003753_Rasgrp1_9
  gRNA
gtcccatagcaaaagatccg

SEQ ID NO: 132975 - DNA, 20 bp, Artificial Sequence
  mmSKRIPTE0003754_Rap1a_1
  gRNA
cggttaagaataggccaccg

SEQ ID NO: 132976 - DNA, 20 bp, Artificial Sequence
  mmSKRIPTE0003755_Rap1a_2
  gRNA
tggacactgcaggaaccgta

SEQ ID NO: 132977 - DNA, 20 bp, Artificial Sequence
  mmSKRIPTE0003756_Rap1a_3
  gRNA
taacctgctcaatgccaccg

SEQ ID NO: 132978 - DNA, 20 bp, Artificial Sequence
  mmSKRIPTE0003757_Rap1a_4
  gRNA
atgaggtaacctgcaaccgt

SEQ ID NO: 132979 - DNA, 20 bp, Artificial Sequence
  mmSKRIPTE0003758_Rap1a_5
  gRNA
gagacagcactccactagag

SEQ ID NO: 132980 - DNA, 20 bp, Artificial Sequence
  mmSKRIPTE0003759_Rap1a_6
  gRNA
catgtatagatccagcggta

SEQ ID NO: 132981 - DNA, 20 bp, Artificial Sequence
  mmSKRIPTE0003760_Rap1a_7
  gRNA
aagacacttaagcagaacgg

SEQ ID NO: 132982 - DNA, 20 bp, Artificial Sequence
  mmSKRIPTE0003761_Rap1a_8
  gRNA
tcaaattggacagttcacca

SEQ ID NO: 132983 - DNA, 20 bp, Artificial Sequence
  mmSKRIPTE0003762_Rap1a_9
  gRNA
gttggttcagaccatcccag

SEQ ID NO: 132984 - DNA, 20 bp, Artificial Sequence
  mmSKRIPTE0003763_Ddx58_1
  gRNA
aggaccaagacttataactg

SEQ ID NO: 132985 - DNA, 20 bp, Artificial Sequence
  mmSKRIPTE0003764_Ddx58_2
  gRNA
cagaaggttacaaagtcgcg

SEQ ID NO: 132986 - DNA, 20 bp, Artificial Sequence
  mmSKRIPTE0003765_Ddx58_3
  gRNA
gcggtgatgagaataagccc

SEQ ID NO: 132987 - DNA, 20 bp, Artificial Sequence
  mmSKRIPTE0003766_Ddx58_4
  gRNA
atgcgtctcggtgtaccgag

SEQ ID NO: 132988 - DNA, 20 bp, Artificial Sequence
  mmSKRIPTE0003767_Ddx58_5
  gRNA
tgaatgccagataacctgac

SEQ ID NO: 132989 - DNA, 20 bp, Artificial Sequence
  mmSKRIPTE0003768_Ddx58_6
  gRNA
cagaactgtagccacgactg

SEQ ID NO: 132990 - DNA, 20 bp, Artificial Sequence
  mmSKRIPTE0003769_Ddx58_7
  gRNA
tggcagggtcaaatccggaa

SEQ ID NO: 132991 - DNA, 20 bp, Artificial Sequence
  mmSKRIPTE0003770_Ddx58_8
  gRNA
ttaacttaaggacagcgcgg

SEQ ID NO: 132992 - DNA, 20 bp, Artificial Sequence
  mmSKRIPTE0003771_Ddx58_9
  gRNA
ccgagcgagagcttactcgg

SEQ ID NO: 132993 - DNA, 20 bp, Artificial Sequence
  mmSKRIPTE0003772_Oas2_1
  gRNA
gcaaatctatcgccatctgg

SEQ ID NO: 132994 - DNA, 20 bp, Artificial Sequence
  mmSKRIPTE0003773_Oas2_2
  gRNA
ccgctggataagtcgcagca

SEQ ID NO: 132995 - DNA, 20 bp, Artificial Sequence
  mmSKRIPTE0003774_Oas2_3
  gRNA
tggctgcatgactcccggaa

SEQ ID NO: 132996 - DNA, 20 bp, Artificial Sequence
  mmSKRIPTE0003775_Oas2_4
  gRNA
agagtcgtaactctccagcg

SEQ ID NO: 132997 - DNA, 20 bp, Artificial Sequence
  mmSKRIPTE0003776_Oas2_5
  gRNA
ccaaccacctatagcacgtg

SEQ ID NO: 132998 - DNA, 20 bp, Artificial Sequence
  mmSKRIPTE0003777_Oas2_6
  gRNA
tgagcagctaagctcaatca

SEQ ID NO: 132999 - DNA, 20 bp, Artificial Sequence
  mmSKRIPTE0003778_Oas2_7
  gRNA
tccccagatcactcacgtag

SEQ ID NO: 133000 - DNA, 20 bp, Artificial Sequence
  mmSKRIPTE0003779_Oas2_8
  gRNA
aatcgggttaattcagaacg

SEQ ID NO: 133001 - DNA, 20 bp, Artificial Sequence
  mmSKRIPTE0003780_Oas2_9
  gRNA
gttaggcggtggccattcaa

SEQ ID NO: 133002 - DNA, 20 bp, Artificial Sequence
  mmSKRIPTE0003781_Trim21_1
  gRNA
gagcctatgagtatcgaatg

SEQ ID NO: 133003 - DNA, 20 bp, Artificial Sequence
  mmSKRIPTE0003782_Trim21_2
  gRNA
taatgtacccgggagccacg

SEQ ID NO: 133004 - DNA, 20 bp, Artificial Sequence
  mmSKRIPTE0003783_Trim21_3
  gRNA
gtccgggaagtaccgtcagt

SEQ ID NO: 133005 - DNA, 20 bp, Artificial Sequence
  mmSKRIPTE0003784_Trim21_4
  gRNA
aggtggacaagcgatgacac

SEQ ID NO: 133006 - DNA, 20 bp, Artificial Sequence
  mmSKRIPTE0003785_Trim21_5
  gRNA
tgcacttcttctgtaaaccc

SEQ ID NO: 133007 - DNA, 20 bp, Artificial Sequence
  mmSKRIPTE0003786_Trim21_6
  gRNA
tcatggttaaggcttgcttg

SEQ ID NO: 133008 - DNA, 20 bp, Artificial Sequence
  mmSKRIPTE0003787_Trim21_7
  gRNA
tctgggcacctagcaccatg

SEQ ID NO: 133009 - DNA, 20 bp, Artificial Sequence
  mmSKRIPTE0003788_Trim21_8
  gRNA
ggtcaaaatgaccaagtgca

SEQ ID NO: 133010 - DNA, 20 bp, Artificial Sequence
  mmSKRIPTE0003789_Trim21_9
  gRNA
gaacccagggtggtaatgtg

SEQ ID NO: 133011 - DNA, 20 bp, Artificial Sequence
  mmSKRIPTE0003790_Sox6_1
  gRNA
tctcctgtctcctaaccgga

SEQ ID NO: 133012 - DNA, 20 bp, Artificial Sequence
  mmSKRIPTE0003791_Sox6_2
  gRNA
ttgacggaatgaactgtacg

SEQ ID NO: 133013 - DNA, 20 bp, Artificial Sequence
  mmSKRIPTE0003792_Sox6_3
  gRNA
acgcattggcttgtatagag

SEQ ID NO: 133014 - DNA, 20 bp, Artificial Sequence
  mmSKRIPTE0003793_Sox6_4
  gRNA
tcttatcaacagtgccaacg

SEQ ID NO: 133015 - DNA, 20 bp, Artificial Sequence
  mmSKRIPTE0003794_Sox6_5
  gRNA
tagtgcctgctatcagcgat

SEQ ID NO: 133016 - DNA, 20 bp, Artificial Sequence
  mmSKRIPTE0003795_Sox6_6
  gRNA
gcgtatccaccacatcggca

SEQ ID NO: 133017 - DNA, 20 bp, Artificial Sequence
  mmSKRIPTE0003796_Sox6_7
  gRNA
tcggaaagaacaatgcgcac

SEQ ID NO: 133018 - DNA, 20 bp, Artificial Sequence
  mmSKRIPTE0003797_Sox6_8
  gRNA
gtggggtaggtactcccaag

SEQ ID NO: 133019 - DNA, 20 bp, Artificial Sequence
  mmSKRIPTE0003798_Sox6_9
  gRNA
cctcaaggtaaacggcaatg

SEQ ID NO: 133020 - DNA, 20 bp, Artificial Sequence
  mmSKRIPTE0003799_Angpt2_1
  gRNA
ctggctttctctgcgcacaa

SEQ ID NO: 133021 - DNA, 20 bp, Artificial Sequence
  mmSKRIPTE0003800_Angpt2_2
  gRNA
acaaattcagaactgaccga

SEQ ID NO: 133022 - DNA, 20 bp, Artificial Sequence
  mmSKRIPTE0003801_Angpt2_3
  gRNA
tcacagggaagaatgttccg

SEQ ID NO: 133023 - DNA, 20 bp, Artificial Sequence
  mmSKRIPTE0003802_Angpt2_4
  gRNA
gcctactgtgacatggacgt

SEQ ID NO: 133024 - DNA, 20 bp, Artificial Sequence
  mmSKRIPTE0003803_Angpt2_5
  gRNA
aaggccgtgtcctcgcactg

SEQ ID NO: 133025 - DNA, 20 bp, Artificial Sequence
  mmSKRIPTE0003804_Angpt2_6
  gRNA
aaaccgtgcttagaggaatg

SEQ ID NO: 133026 - DNA, 20 bp, Artificial Sequence
  mmSKRIPTE0003805_Angpt2_7
  gRNA
accccctacaggaagatagt

SEQ ID NO: 133027 - DNA, 20 bp, Artificial Sequence
  mmSKRIPTE0003806_Angpt2_8
  gRNA
atactggggaaaaatgccgc

SEQ ID NO: 133028 - DNA, 20 bp, Artificial Sequence
  mmSKRIPTE0003807_Angpt2_9
  gRNA
ccatgtcatccgtaagtgag

SEQ ID NO: 133029 - DNA, 20 bp, Artificial Sequence
  mmSKRIPTE0003808_Ednra_1
  gRNA
ctattcaagaagctacacgc

SEQ ID NO: 133030 - DNA, 20 bp, Artificial Sequence
  mmSKRIPTE0003809_Ednra_2
  gRNA
tcagccaaaagtatgccgca

SEQ ID NO: 133031 - DNA, 20 bp, Artificial Sequence
  mmSKRIPTE0003810_Ednra_3
  gRNA
cccatcaacgtgtttaaggt

SEQ ID NO: 133032 - DNA, 20 bp, Artificial Sequence
  mmSKRIPTE0003811_Ednra_4
  gRNA
cagtccacgagtcgtctcgg

SEQ ID NO: 133033 - DNA, 20 bp, Artificial Sequence
  mmSKRIPTE0003812_Ednra_5
  gRNA
attactgtacggcatactgg

SEQ ID NO: 133034 - DNA, 20 bp, Artificial Sequence
  mmSKRIPTE0003813_Ednra_6
  gRNA
ggagtgcccatggacaaccg

SEQ ID NO: 133035 - DNA, 20 bp, Artificial Sequence
  mmSKRIPTE0003814_Ednra_7
  gRNA
tctcagagaagggatcaact

SEQ ID NO: 133036 - DNA, 20 bp, Artificial Sequence
  mmSKRIPTE0003815_Ednra_8
  gRNA
tattctaggagcaataggct

SEQ ID NO: 133037 - DNA, 20 bp, Artificial Sequence
  mmSKRIPTE0003816_Ednra_9
  gRNA
gttgaccccccattacagac

SEQ ID NO: 133038 - DNA, 20 bp, Artificial Sequence
  mmSKRIPTE0003817_Apoa1_1
  gRNA
gtaaggaaagacctagcgtg

SEQ ID NO: 133039 - DNA, 20 bp, Artificial Sequence
  mmSKRIPTE0003818_Apoa1_2
  gRNA
taggtgcctcttgacctgcg

SEQ ID NO: 133040 - DNA, 20 bp, Artificial Sequence
  mmSKRIPTE0003819_Apoa1_3
  gRNA
ttgtaagaaagccaatgcgg

SEQ ID NO: 133041 - DNA, 20 bp, Artificial Sequence
  mmSKRIPTE0003820_Apoa1_4
  gRNA
gagaacatggtgccgcactg

SEQ ID NO: 133042 - DNA, 20 bp, Artificial Sequence
  mmSKRIPTE0003821_Apoa1_5
  gRNA
cactgtccaaatcaataccg

SEQ ID NO: 133043 - DNA, 20 bp, Artificial Sequence
  mmSKRIPTE0003822_Apoa1_6
  gRNA
agctgagtagtcgcgtacaa

SEQ ID NO: 133044 - DNA, 20 bp, Artificial Sequence
  mmSKRIPTE0003823_Apoa1_7
  gRNA
tctcgcgcatctgttcgctg

SEQ ID NO: 133045 - DNA, 20 bp, Artificial Sequence
  mmSKRIPTE0003824_Apoa1_8
  gRNA
actgtcggagagctccgggg

SEQ ID NO: 133046 - DNA, 20 bp, Artificial Sequence
  mmSKRIPTE0003825_Apoa1_9
  gRNA
ttaggttagactcggagtca

SEQ ID NO: 133047 - DNA, 20 bp, Artificial Sequence
  mmSKRIPTE0003826_Apoa4_1
  gRNA
gaaagcatgacctaccccag

SEQ ID NO: 133048 - DNA, 20 bp, Artificial Sequence
  mmSKRIPTE0003827_Apoa4_2
  gRNA
tgctagtacgtatgctgatg

SEQ ID NO: 133049 - DNA, 20 bp, Artificial Sequence
  mmSKRIPTE0003828_Apoa4_3
  gRNA
tagaactggcggacagctcg

SEQ ID NO: 133050 - DNA, 20 bp, Artificial Sequence
  mmSKRIPTE0003829_Apoa4_4
  gRNA
gtaagtgcgatcagtctaca

SEQ ID NO: 133051 - DNA, 20 bp, Artificial Sequence
  mmSKRIPTE0003830_Apoa4_5
  gRNA
ttagtggccctaagacaacg

SEQ ID NO: 133052 - DNA, 20 bp, Artificial Sequence
  mmSKRIPTE0003831_Apoa4_6
  gRNA
gagtgtgtcaccttccaacg

SEQ ID NO: 133053 - DNA, 20 bp, Artificial Sequence
  mmSKRIPTE0003832_Apoa4_7
  gRNA
gactggtggctgtctcactg

SEQ ID NO: 133054 - DNA, 20 bp, Artificial Sequence
  mmSKRIPTE0003833_Apoa4_8
  gRNA
ctttattgagtagcgagatg

SEQ ID NO: 133055 - DNA, 20 bp, Artificial Sequence
  mmSKRIPTE0003834_Apoa4_9
  gRNA
caaagtaacccagacgttcg

SEQ ID NO: 133056 - DNA, 20 bp, Artificial Sequence
  mmSKRIPTE0003835_Trf_1
  gRNA
acagcgtagtagtaggtctg

SEQ ID NO: 133057 - DNA, 20 bp, Artificial Sequence
  mmSKRIPTE0003836_Trf_2
  gRNA
tgcaatctgtcggtaacatg

SEQ ID NO: 133058 - DNA, 20 bp, Artificial Sequence
  mmSKRIPTE0003837_Trf_3
  gRNA
ggaatcaacccaaaccggca

SEQ ID NO: 133059 - DNA, 20 bp, Artificial Sequence
  mmSKRIPTE0003838_Trf_4
  gRNA
actgtcctggataacaccga

SEQ ID NO: 133060 - DNA, 20 bp, Artificial Sequence
  mmSKRIPTE0003839_Trf_5
  gRNA
tgagtggaattgacactctg

SEQ ID NO: 133061 - DNA, 20 bp, Artificial Sequence
  mmSKRIPTE0003840_Trf_6
  gRNA
tccgaacaacctgaagcccg

SEQ ID NO: 133062 - DNA, 20 bp, Artificial Sequence
  mmSKRIPTE0003841_Trf_7
  gRNA
gccatgtgcctaagatggcg

SEQ ID NO: 133063 - DNA, 20 bp, Artificial Sequence
  mmSKRIPTE0003842_Trf_8
  gRNA
ccgctcgcctttatgcacgg

SEQ ID NO: 133064 - DNA, 20 bp, Artificial Sequence
  mmSKRIPTE0003843_Trf_9
  gRNA
gtggaaccgttgtagtcact

SEQ ID NO: 133065 - DNA, 20 bp, Artificial Sequence
  mmSKRIPTE0003844_Madcam1_1
  gRNA
gctgccaatccataggacga

SEQ ID NO: 133066 - DNA, 20 bp, Artificial Sequence
  mmSKRIPTE0003845_Madcam1_2
  gRNA
ttgttggggatctacaggtg

SEQ ID NO: 133067 - DNA, 20 bp, Artificial Sequence
  mmSKRIPTE0003846_Madcam1_3
  gRNA
acagcatgccccgtacagag

SEQ ID NO: 133068 - DNA, 20 bp, Artificial Sequence
  mmSKRIPTE0003847_Madcam1_4
  gRNA
cgttgtgtcattcggaacag

SEQ ID NO: 133069 - DNA, 20 bp, Artificial Sequence
  mmSKRIPTE0003848_Madcam1_5
  gRNA
gtagcatttccacaggcggt

SEQ ID NO: 133070 - DNA, 20 bp, Artificial Sequence
  mmSKRIPTE0003849_Madcam1_6
  gRNA
gcaaggtcctgattcccccg

SEQ ID NO: 133071 - DNA, 20 bp, Artificial Sequence
  mmSKRIPTE0003850_Madcam1_7
  gRNA
cggcttaaataagagtgggc

SEQ ID NO: 133072 - DNA, 20 bp, Artificial Sequence
  mmSKRIPTE0003851_Madcam1_8
  gRNA
cagaccacgccagtgcaccc

SEQ ID NO: 133073 - DNA, 20 bp, Artificial Sequence
  mmSKRIPTE0003852_Madcam1_9
  gRNA
aaggtgccccgagttctaag

SEQ ID NO: 133074 - DNA, 20 bp, Artificial Sequence
  mmSKRIPTE0003853_Ifng_1
  gRNA
ctccgtagtaagttggacag

SEQ ID NO: 133075 - DNA, 20 bp, Artificial Sequence
  mmSKRIPTE0003854_Ifng_2
  gRNA
tgtgaaaatacgtaatcccg

SEQ ID NO: 133076 - DNA, 20 bp, Artificial Sequence
  mmSKRIPTE0003855_Ifng_3
  gRNA
tagccaagactgtgattgcg

SEQ ID NO: 133077 - DNA, 20 bp, Artificial Sequence
  mmSKRIPTE0003856_Ifng_4
  gRNA
tgcttgtggttggttgaccg

SEQ ID NO: 133078 - DNA, 20 bp, Artificial Sequence
  mmSKRIPTE0003857_Ifng_5
  gRNA
gtcttctctaggtcagccga

SEQ ID NO: 133079 - DNA, 20 bp, Artificial Sequence
  mmSKRIPTE0003858_Ifng_6
  gRNA
ccacctagcgatgaatggga

SEQ ID NO: 133080 - DNA, 20 bp, Artificial Sequence
  mmSKRIPTE0003859_Ifng_7
  gRNA
aaggagtcgctgctgattcg

SEQ ID NO: 133081 - DNA, 20 bp, Artificial Sequence
  mmSKRIPTE0003860_Ifng_8
  gRNA
gaaaagccccacacttaacg

SEQ ID NO: 133082 - DNA, 20 bp, Artificial Sequence
  mmSKRIPTE0003861_Ifng_9
  gRNA
actcatcagctgataaagct

SEQ ID NO: 133083 - DNA, 20 bp, Artificial Sequence
  mmSKRIPTE0003862_Il13_1
  gRNA
agtctgtcagtatcccggtg

SEQ ID NO: 133084 - DNA, 20 bp, Artificial Sequence
  mmSKRIPTE0003863_Il13_2
  gRNA
ttaccgtagtgggggccttg

SEQ ID NO: 133085 - DNA, 20 bp, Artificial Sequence
  mmSKRIPTE0003864_Il13_3
  gRNA
agatcttggcaccggccctg

SEQ ID NO: 133086 - DNA, 20 bp, Artificial Sequence
  mmSKRIPTE0003865_Il13_4
  gRNA
gcatggcctctgtaaccgca

SEQ ID NO: 133087 - DNA, 20 bp, Artificial Sequence
  mmSKRIPTE0003866_Il13_5
  gRNA
acaaagcaactgtttcgcca

SEQ ID NO: 133088 - DNA, 20 bp, Artificial Sequence
  mmSKRIPTE0003867_Il13_6
  gRNA
accatgctgccgttgcacag

SEQ ID NO: 133089 - DNA, 20 bp, Artificial Sequence
  mmSKRIPTE0003868_Il13_7
  gRNA
ccaggctctatgctacccga

SEQ ID NO: 133090 - DNA, 20 bp, Artificial Sequence
  mmSKRIPTE0003869_Il13_8
  gRNA
gcgaagcatagggtgttgag

SEQ ID NO: 133091 - DNA, 20 bp, Artificial Sequence
  mmSKRIPTE0003870_Il13_9
  gRNA
cacgccccctgtctactgtg

SEQ ID NO: 133092 - DNA, 20 bp, Artificial Sequence
  mmSKRIPTE0003871_Atad5_1
  gRNA
tacaacaggagttgtcgaga

SEQ ID NO: 133093 - DNA, 20 bp, Artificial Sequence
  mmSKRIPTE0003872_Atad5_2
  gRNA
tgatgtaacaactttccccg

SEQ ID NO: 133094 - DNA, 20 bp, Artificial Sequence
  mmSKRIPTE0003873_Atad5_3
  gRNA
tccaaaagtaatgacgacgt

SEQ ID NO: 133095 - DNA, 20 bp, Artificial Sequence
  mmSKRIPTE0003874_Atad5_4
  gRNA
taatgacggattctaccatg

SEQ ID NO: 133096 - DNA, 20 bp, Artificial Sequence
  mmSKRIPTE0003875_Atad5_5
  gRNA
gtctcgtagagaccaccggc

SEQ ID NO: 133097 - DNA, 20 bp, Artificial Sequence
  mmSKRIPTE0003876_Atad5_6
  gRNA
gacaatacaaggtgcccccg

SEQ ID NO: 133098 - DNA, 20 bp, Artificial Sequence
  mmSKRIPTE0003877_Atad5_7
  gRNA
gagctttacacggcacactg

SEQ ID NO: 133099 - DNA, 20 bp, Artificial Sequence
  mmSKRIPTE0003878_Atad5_8
  gRNA
tctgcggctgtcgagtggaa

SEQ ID NO: 133100 - DNA, 20 bp, Artificial Sequence
  mmSKRIPTE0003879_Atad5_9
  gRNA
gctgtcttaggcgttccctg

SEQ ID NO: 133101 - DNA, 20 bp, Artificial Sequence
  mmSKRIPTE0003880_Ccl3_1
  gRNA
aagtgaagagtccctcgatg

SEQ ID NO: 133102 - DNA, 20 bp, Artificial Sequence
  mmSKRIPTE0003881_Ccl3_2
  gRNA
tgatggatattacacaaccc

SEQ ID NO: 133103 - DNA, 20 bp, Artificial Sequence
  mmSKRIPTE0003882_Ccl3_3
  gRNA
caggtggcaggaatgttccg

SEQ ID NO: 133104 - DNA, 20 bp, Artificial Sequence
  mmSKRIPTE0003883_Ccl3_4
  gRNA
agggctacctataagagaag

SEQ ID NO: 133105 - DNA, 20 bp, Artificial Sequence
  mmSKRIPTE0003884_Ccl3_5
  gRNA
ctaaaacaacttaagaggcg

SEQ ID NO: 133106 - DNA, 20 bp, Artificial Sequence
  mmSKRIPTE0003885_Ccl3_6
  gRNA
gctctacacgggacccatgg

SEQ ID NO: 133107 - DNA, 20 bp, Artificial Sequence
  mmSKRIPTE0003886_Ccl3_7
  gRNA
gacccttccacaccatagag

SEQ ID NO: 133108 - DNA, 20 bp, Artificial Sequence
  mmSKRIPTE0003887_Ccl3_8
  gRNA
aagtcatcattgaacagggt

SEQ ID NO: 133109 - DNA, 20 bp, Artificial Sequence
  mmSKRIPTE0003888_Ccl3_9
  gRNA
tgagagtcttggaggcagcg

SEQ ID NO: 133110 - DNA, 20 bp, Artificial Sequence
  mmSKRIPTE0003889_Actg1_1
  gRNA
aatgactcgtcacgcccaag

SEQ ID NO: 133111 - DNA, 20 bp, Artificial Sequence
  mmSKRIPTE0003890_Actg1_2
  gRNA
ccgacaccaggttagttgag

SEQ ID NO: 133112 - DNA, 20 bp, Artificial Sequence
  mmSKRIPTE0003891_Actg1_3
  gRNA
tcttcctgcgcagatcgcaa

SEQ ID NO: 133113 - DNA, 20 bp, Artificial Sequence
  mmSKRIPTE0003892_Actg1_4
  gRNA
taaggccagctcaggccggg

SEQ ID NO: 133114 - DNA, 20 bp, Artificial Sequence
  mmSKRIPTE0003893_Actg1_5
  gRNA
ttggctcctaaatcatgttg

SEQ ID NO: 133115 - DNA, 20 bp, Artificial Sequence
  mmSKRIPTE0003894_Actg1_6
  gRNA
taaggtgagtggctaccacc

SEQ ID NO: 133116 - DNA, 20 bp, Artificial Sequence
  mmSKRIPTE0003895_Actg1_7
  gRNA
ccctgcgagagaaaaggccg

SEQ ID NO: 133117 - DNA, 20 bp, Artificial Sequence
  mmSKRIPTE0003896_Actg1_8
  gRNA
gcggcgtaaccgtcggctac

SEQ ID NO: 133118 - DNA, 20 bp, Artificial Sequence
  mmSKRIPTE0003897_Actg1_9
  gRNA
gcggagtgtgagaccgaccg

SEQ ID NO: 133119 - DNA, 20 bp, Artificial Sequence
  mmSKRIPTE0003898_Cxcl14_1
  gRNA
taatgagctcgctctccgag

SEQ ID NO: 133120 - DNA, 20 bp, Artificial Sequence
  mmSKRIPTE0003899_Cxcl14_2
  gRNA
tctgagctttataagcgcct

SEQ ID NO: 133121 - DNA, 20 bp, Artificial Sequence
  mmSKRIPTE0003900_Cxcl14_3
  gRNA
ctcgatgttcgggaggacaa

SEQ ID NO: 133122 - DNA, 20 bp, Artificial Sequence
  mmSKRIPTE0003901_Cxcl14_4
  gRNA
aagagcatgtccaggtaccg

SEQ ID NO: 133123 - DNA, 20 bp, Artificial Sequence
  mmSKRIPTE0003902_Cxcl14_5
  gRNA
ctgcctttgacaagaccgac

SEQ ID NO: 133124 - DNA, 20 bp, Artificial Sequence
  mmSKRIPTE0003903_Cxcl14_6
  gRNA
ggggagctcccattgccaag

SEQ ID NO: 133125 - DNA, 20 bp, Artificial Sequence
  mmSKRIPTE0003904_Cxcl14_7
  gRNA
agggtctacgaagaataggg

SEQ ID NO: 133126 - DNA, 20 bp, Artificial Sequence
  mmSKRIPTE0003905_Cxcl14_8
  gRNA
tatcagtccgatctaaccct

SEQ ID NO: 133127 - DNA, 20 bp, Artificial Sequence
  mmSKRIPTE0003906_Cxcl14_9
  gRNA
tgggggtcacacgttagatg

SEQ ID NO: 133128 - DNA, 20 bp, Artificial Sequence
  mmSKRIPTE0003907_Naip5_1
  gRNA
cggatgtcatgggaaccgtg

SEQ ID NO: 133129 - DNA, 20 bp, Artificial Sequence
  mmSKRIPTE0003908_Naip5_2
  gRNA
accctgatccatctatccga

SEQ ID NO: 133130 - DNA, 20 bp, Artificial Sequence
  mmSKRIPTE0003909_Naip5_3
  gRNA
ctccgggtcatatctcacgc

SEQ ID NO: 133131 - DNA, 20 bp, Artificial Sequence
  mmSKRIPTE0003910_Naip5_4
  gRNA
cactgggtggaggatataca

SEQ ID NO: 133132 - DNA, 20 bp, Artificial Sequence
  mmSKRIPTE0003911_Naip5_5
  gRNA
cgtattcattagccttgatg

SEQ ID NO: 133133 - DNA, 20 bp, Artificial Sequence
  mmSKRIPTE0003912_Naip5_6
  gRNA
gaatttgctcatcaagaggg

SEQ ID NO: 133134 - DNA, 20 bp, Artificial Sequence
  mmSKRIPTE0003913_Naip5_7
  gRNA
tatgtaatgactttgtgcac

SEQ ID NO: 133135 - DNA, 20 bp, Artificial Sequence
  mmSKRIPTE0003914_Naip5_8
  gRNA
actagtgaacagatgaccta

SEQ ID NO: 133136 - DNA, 20 bp, Artificial Sequence
  mmSKRIPTE0003915_Naip5_9
  gRNA
actagagcttcaacacccac

SEQ ID NO: 133137 - DNA, 20 bp, Artificial Sequence
  mmSKRIPTE0003916_Angpt1_1
  gRNA
tctcaagcatggtggccgtg

SEQ ID NO: 133138 - DNA, 20 bp, Artificial Sequence
  mmSKRIPTE0003917_Angpt1_2
  gRNA
caaggcaattgtctgcggaa

SEQ ID NO: 133139 - DNA, 20 bp, Artificial Sequence
  mmSKRIPTE0003918_Angpt1_3
  gRNA
cggtgccgatttcagcacga

SEQ ID NO: 133140 - DNA, 20 bp, Artificial Sequence
  mmSKRIPTE0003919_Angpt1_4
  gRNA
aaaaatgtacgtgtaaccag

SEQ ID NO: 133141 - DNA, 20 bp, Artificial Sequence
  mmSKRIPTE0003920_Angpt1_5
  gRNA
atatgtactcgcagctgacg

SEQ ID NO: 133142 - DNA, 20 bp, Artificial Sequence
  mmSKRIPTE0003921_Angpt1_6
  gRNA
ctctgtgtaaccgttcagcg

SEQ ID NO: 133143 - DNA, 20 bp, Artificial Sequence
  mmSKRIPTE0003922_Angpt1_7
  gRNA
actgctctgtcgcactctca

SEQ ID NO: 133144 - DNA, 20 bp, Artificial Sequence
  mmSKRIPTE0003923_Angpt1_8
  gRNA
ttcaaacgctttctttaacg

SEQ ID NO: 133145 - DNA, 20 bp, Artificial Sequence
  mmSKRIPTE0003924_Angpt1_9
  gRNA
gcatgacctcgatcatgtat

SEQ ID NO: 133146 - DNA, 20 bp, Artificial Sequence
  mmSKRIPTE0003925_Rubcn_1
  gRNA
gtgcagtatagcctgactag

SEQ ID NO: 133147 - DNA, 20 bp, Artificial Sequence
  mmSKRIPTE0003926_Rubcn_2
  gRNA
ataaagaggcgagtactcgg

SEQ ID NO: 133148 - DNA, 20 bp, Artificial Sequence
  mmSKRIPTE0003927_Rubcn_3
  gRNA
cggactataaggccgtctcg

SEQ ID NO: 133149 - DNA, 20 bp, Artificial Sequence
  mmSKRIPTE0003928_Rubcn_4
  gRNA
ggatgccacatcccgcacag

SEQ ID NO: 133150 - DNA, 20 bp, Artificial Sequence
  mmSKRIPTE0003929_Rubcn_5
  gRNA
tcctagtagaagaggccgag

SEQ ID NO: 133151 - DNA, 20 bp, Artificial Sequence
  mmSKRIPTE0003930_Rubcn_6
  gRNA
gggtaatttgaagacgactg

SEQ ID NO: 133152 - DNA, 20 bp, Artificial Sequence
  mmSKRIPTE0003931_Rubcn_7
  gRNA
tagcagtcacccactcagcg

SEQ ID NO: 133153 - DNA, 20 bp, Artificial Sequence
  mmSKRIPTE0003932_Rubcn_8
  gRNA
accgtgtcactaattcagcc

SEQ ID NO: 133154 - DNA, 20 bp, Artificial Sequence
  mmSKRIPTE0003933_Rubcn_9
  gRNA
gcatggaatgtagcacctag

SEQ ID NO: 133155 - DNA, 20 bp, Artificial Sequence
  mmSKRIPTE0003934_Axin1_1
  gRNA
cagcccatatccacatagcg

SEQ ID NO: 133156 - DNA, 20 bp, Artificial Sequence
  mmSKRIPTE0003935_Axin1_2
  gRNA
agcacgtgcaaagggtcatg

SEQ ID NO: 133157 - DNA, 20 bp, Artificial Sequence
  mmSKRIPTE0003936_Axin1_3
  gRNA
gggaacaacccgcatcaaag

SEQ ID NO: 133158 - DNA, 20 bp, Artificial Sequence
  mmSKRIPTE0003937_Axin1_4
  gRNA
gttgtaccgtctacttgagg

SEQ ID NO: 133159 - DNA, 20 bp, Artificial Sequence
  mmSKRIPTE0003938_Axin1_5
  gRNA
cttcggtgaaacttgctccg

SEQ ID NO: 133160 - DNA, 20 bp, Artificial Sequence
  mmSKRIPTE0003939_Axin1_6
  gRNA
ggcattcggtaagtgcgctg

SEQ ID NO: 133161 - DNA, 20 bp, Artificial Sequence
  mmSKRIPTE0003940_Axin1_7
  gRNA
tcccactactcaccagcgcg

SEQ ID NO: 133162 - DNA, 20 bp, Artificial Sequence
  mmSKRIPTE0003941_Axin1_8
  gRNA
ggcacaacctcgcacatcag

SEQ ID NO: 133163 - DNA, 20 bp, Artificial Sequence
  mmSKRIPTE0003942_Axin1_9
  gRNA
tgaagaaaagatcatcggca

SEQ ID NO: 133164 - DNA, 20 bp, Artificial Sequence
  mmSKRIPTE0003943_Prkcq_1
  gRNA
agagccctttgtcgccaaca

SEQ ID NO: 133165 - DNA, 20 bp, Artificial Sequence
  mmSKRIPTE0003944_Prkcq_2
  gRNA
atcccaagtaggcacttacg

SEQ ID NO: 133166 - DNA, 20 bp, Artificial Sequence
  mmSKRIPTE0003945_Prkcq_3
  gRNA
gggtaaggatgtcgcctacg

SEQ ID NO: 133167 - DNA, 20 bp, Artificial Sequence
  mmSKRIPTE0003946_Prkcq_4
  gRNA
caccatgcgtaccaacacct

SEQ ID NO: 133168 - DNA, 20 bp, Artificial Sequence
  mmSKRIPTE0003947_Prkcq_5
  gRNA
gacagccaagacacggcacg

SEQ ID NO: 133169 - DNA, 20 bp, Artificial Sequence
  mmSKRIPTE0003948_Prkcq_6
  gRNA
tgctggttggtgatgaacca

SEQ ID NO: 133170 - DNA, 20 bp, Artificial Sequence
  mmSKRIPTE0003949_Prkcq_7
  gRNA
agggagtataaatgacgcgt

SEQ ID NO: 133171 - DNA, 20 bp, Artificial Sequence
  mmSKRIPTE0003950_Prkcq_8
  gRNA
gctccaccaaaaacgaaacc

SEQ ID NO: 133172 - DNA, 20 bp, Artificial Sequence
  mmSKRIPTE0003951_Prkcq_9
  gRNA
tagagtttccagtctcacgg

SEQ ID NO: 133173 - DNA, 20 bp, Artificial Sequence
  mmSKRIPTE0003952_Prnp_1
  gRNA
ttggactggtaccactagga

SEQ ID NO: 133174 - DNA, 20 bp, Artificial Sequence
  mmSKRIPTE0003953_Prnp_2
  gRNA
gatagcttcagcttgcactg

SEQ ID NO: 133175 - DNA, 20 bp, Artificial Sequence
  mmSKRIPTE0003954_Prnp_3
  gRNA
agtcccaggcctattacgac

SEQ ID NO: 133176 - DNA, 20 bp, Artificial Sequence
  mmSKRIPTE0003955_Prnp_4
  gRNA
cctagaccacgagaatgcga

SEQ ID NO: 133177 - DNA, 20 bp, Artificial Sequence
  mmSKRIPTE0003956_Prnp_5
  gRNA
ggtctgctgatccgacaacg

SEQ ID NO: 133178 - DNA, 20 bp, Artificial Sequence
  mmSKRIPTE0003957_Prnp_6
  gRNA
gcatttaagccagtccggag

SEQ ID NO: 133179 - DNA, 20 bp, Artificial Sequence
  mmSKRIPTE0003958_Prnp_7
  gRNA
cagtgagccgagcttgacga

SEQ ID NO: 133180 - DNA, 20 bp, Artificial Sequence
  mmSKRIPTE0003959_Prnp_8
  gRNA
atagttgctgagcgtcgtca

SEQ ID NO: 133181 - DNA, 20 bp, Artificial Sequence
  mmSKRIPTE0003960_Prnp_9
  gRNA
gccaccctggcgataaacag

SEQ ID NO: 133182 - DNA, 20 bp, Artificial Sequence
  mmSKRIPTE0003961_Gbp5_1
  gRNA
gggtggagttccctagtccg

SEQ ID NO: 133183 - DNA, 20 bp, Artificial Sequence
  mmSKRIPTE0003962_Gbp5_2
  gRNA
gtgcctcattgggagcaccg

SEQ ID NO: 133184 - DNA, 20 bp, Artificial Sequence
  mmSKRIPTE0003963_Gbp5_3
  gRNA
cttaatcacatagctcctcg

SEQ ID NO: 133185 - DNA, 20 bp, Artificial Sequence
  mmSKRIPTE0003964_Gbp5_4
  gRNA
tagtatcgttcccatgcatg

SEQ ID NO: 133186 - DNA, 20 bp, Artificial Sequence
  mmSKRIPTE0003965_Gbp5_5
  gRNA
agatacactggcttccgctg

SEQ ID NO: 133187 - DNA, 20 bp, Artificial Sequence
  mmSKRIPTE0003966_Gbp5_6
  gRNA
tgtatacaaaggtgctactg

SEQ ID NO: 133188 - DNA, 20 bp, Artificial Sequence
  mmSKRIPTE0003967_Gbp5_7
  gRNA
gaaagcttacttccaagcgc

SEQ ID NO: 133189 - DNA, 20 bp, Artificial Sequence
  mmSKRIPTE0003968_Gbp5_8
  gRNA
ttaaacttgatgtacctctg

SEQ ID NO: 133190 - DNA, 20 bp, Artificial Sequence
  mmSKRIPTE0003969_Gbp5_9
  gRNA
tatctatccagaaggcaatg

SEQ ID NO: 133191 - DNA, 20 bp, Artificial Sequence
  mmSKRIPTE0003970_Trim14_1
  gRNA
taactcatccagatgcggcg

SEQ ID NO: 133192 - DNA, 20 bp, Artificial Sequence
  mmSKRIPTE0003971_Trim14_2
  gRNA
tggtaataaagtttacccga

SEQ ID NO: 133193 - DNA, 20 bp, Artificial Sequence
  mmSKRIPTE0003972_Trim14_3
  gRNA
tttgccgcagtggtaaatgg

SEQ ID NO: 133194 - DNA, 20 bp, Artificial Sequence
  mmSKRIPTE0003973_Trim14_4
  gRNA
aatggcgagcgagactaccg

SEQ ID NO: 133195 - DNA, 20 bp, Artificial Sequence
  mmSKRIPTE0003974_Trim14_5
  gRNA
atgtactacatatcatacta

SEQ ID NO: 133196 - DNA, 20 bp, Artificial Sequence
  mmSKRIPTE0003975_Trim14_6
  gRNA
agaaatcgaaaccttgctcg

SEQ ID NO: 133197 - DNA, 20 bp, Artificial Sequence
  mmSKRIPTE0003976_Trim14_7
  gRNA
tagactcaaaacaagctggt

SEQ ID NO: 133198 - DNA, 20 bp, Artificial Sequence
  mmSKRIPTE0003977_Trim14_8
  gRNA
ggtcaaatcccgttaggaca

SEQ ID NO: 133199 - DNA, 20 bp, Artificial Sequence
  mmSKRIPTE0003978_Trim14_9
  gRNA
aacaccgtctttacacacca

SEQ ID NO: 133200 - DNA, 20 bp, Artificial Sequence
  mmSKRIPTE0003979_Tal1_1
  gRNA
cctaaagtgagaactacccg

SEQ ID NO: 133201 - DNA, 20 bp, Artificial Sequence
  mmSKRIPTE0003980_Tal1_2
  gRNA
ctgcacccagaacgccgcag

SEQ ID NO: 133202 - DNA, 20 bp, Artificial Sequence
  mmSKRIPTE0003981_Tal1_3
  gRNA
gcggccctttaagtccctcg

SEQ ID NO: 133203 - DNA, 20 bp, Artificial Sequence
  mmSKRIPTE0003982_Tal1_4
  gRNA
cagttacttagcttgccgtg

SEQ ID NO: 133204 - DNA, 20 bp, Artificial Sequence
  mmSKRIPTE0003983_Tal1_5
  gRNA
cacctgcctagtgaggcgag

SEQ ID NO: 133205 - DNA, 20 bp, Artificial Sequence
  mmSKRIPTE0003984_Tal1_6
  gRNA
cagccccagacgcatcaccg

SEQ ID NO: 133206 - DNA, 20 bp, Artificial Sequence
  mmSKRIPTE0003985_Tal1_7
  gRNA
ggttggggtgtgcgtccacg

SEQ ID NO: 133207 - DNA, 20 bp, Artificial Sequence
  mmSKRIPTE0003986_Tal1_8
  gRNA
taaggctatagagcagcgct

SEQ ID NO: 133208 - DNA, 20 bp, Artificial Sequence
  mmSKRIPTE0003987_Tal1_9
  gRNA
gcaagctggatggatcaaca

SEQ ID NO: 133209 - DNA, 20 bp, Artificial Sequence
  mmSKRIPTE0003988_Gfi1_1
  gRNA
ccttccacctggtatacccg

SEQ ID NO: 133210 - DNA, 20 bp, Artificial Sequence
  mmSKRIPTE0003989_Gfi1_2
  gRNA
gggtccaaacattcgtccag

SEQ ID NO: 133211 - DNA, 20 bp, Artificial Sequence
  mmSKRIPTE0003990_Gfi1_3
  gRNA
gctgtgtaacactaccgtga

SEQ ID NO: 133212 - DNA, 20 bp, Artificial Sequence
  mmSKRIPTE0003991_Gfi1_4
  gRNA
acgtgcacctccagcccgtg

SEQ ID NO: 133213 - DNA, 20 bp, Artificial Sequence
  mmSKRIPTE0003992_Gfi1_5
  gRNA
tggctaagactttcacgctg

SEQ ID NO: 133214 - DNA, 20 bp, Artificial Sequence
  mmSKRIPTE0003993_Gfi1_6
  gRNA
cgcccactggaatagtggtg

SEQ ID NO: 133215 - DNA, 20 bp, Artificial Sequence
  mmSKRIPTE0003994_Gfi1_7
  gRNA
cgagtgccacctggtgagcg

SEQ ID NO: 133216 - DNA, 20 bp, Artificial Sequence
  mmSKRIPTE0003995_Gfi1_8
  gRNA
aggccattgagtcaagttcg

SEQ ID NO: 133217 - DNA, 20 bp, Artificial Sequence
  mmSKRIPTE0003996_Gfi1_9
  gRNA
gcggcatcaagccctcccag

SEQ ID NO: 133218 - DNA, 20 bp, Artificial Sequence
  mmSKRIPTE0003997_Etv6_1
  gRNA
gtcctcactagcaaacgcag

SEQ ID NO: 133219 - DNA, 20 bp, Artificial Sequence
  mmSKRIPTE0003998_Etv6_2
  gRNA
ttactcgtgacaatggcggc

SEQ ID NO: 133220 - DNA, 20 bp, Artificial Sequence
  mmSKRIPTE0003999_Etv6_3
  gRNA
gcactcgtgtggcttcgaga

SEQ ID NO: 133221 - DNA, 20 bp, Artificial Sequence
  mmSKRIPTE0004000_Etv6_4
  gRNA
gtgaacatgaagcggagtcg

SEQ ID NO: 133222 - DNA, 20 bp, Artificial Sequence
  mmSKRIPTE0004001_Etv6_5
  gRNA
caaaggcgtcctccgcctcg

SEQ ID NO: 133223 - DNA, 20 bp, Artificial Sequence
  mmSKRIPTE0004002_Etv6_6
  gRNA
tctagcattaaggtaacgat

SEQ ID NO: 133224 - DNA, 20 bp, Artificial Sequence
  mmSKRIPTE0004003_Etv6_7
  gRNA
catacaatggaaccgcacac

SEQ ID NO: 133225 - DNA, 20 bp, Artificial Sequence
  mmSKRIPTE0004004_Etv6_8
  gRNA
tatgtaaagatctcggctag

SEQ ID NO: 133226 - DNA, 20 bp, Artificial Sequence
  mmSKRIPTE0004005_Etv6_9
  gRNA
ctgcatcagaaccatgacga

SEQ ID NO: 133227 - DNA, 20 bp, Artificial Sequence
  mmSKRIPTE0004006_Crtc3_1
  gRNA
cgttgggtaaggatcccccg

SEQ ID NO: 133228 - DNA, 20 bp, Artificial Sequence
  mmSKRIPTE0004007_Crtc3_2
  gRNA
aagtctgttatagctcacca

SEQ ID NO: 133229 - DNA, 20 bp, Artificial Sequence
  mmSKRIPTE0004008_Crtc3_3
  gRNA
tcggtgacgcccacacaccg

SEQ ID NO: 133230 - DNA, 20 bp, Artificial Sequence
  mmSKRIPTE0004009_Crtc3_4
  gRNA
tagaccggtaggctctctag

SEQ ID NO: 133231 - DNA, 20 bp, Artificial Sequence
  mmSKRIPTE0004010_Crtc3_5
  gRNA
tgatttaacctgccgcacag

SEQ ID NO: 133232 - DNA, 20 bp, Artificial Sequence
  mmSKRIPTE0004011_Crtc3_6
  gRNA
aactggtagacattctagag

SEQ ID NO: 133233 - DNA, 20 bp, Artificial Sequence
  mmSKRIPTE0004012_Crtc3_7
  gRNA
ctgggactcgtattagtgca

SEQ ID NO: 133234 - DNA, 20 bp, Artificial Sequence
  mmSKRIPTE0004013_Crtc3_8
  gRNA
tcacaggaagatgagcgcta

SEQ ID NO: 133235 - DNA, 20 bp, Artificial Sequence
  mmSKRIPTE0004014_Crtc3_9
  gRNA
acagatcacggtgacccgtg

SEQ ID NO: 133236 - DNA, 20 bp, Artificial Sequence
  mmSKRIPTE0004015_Il12rb1_1
  gRNA
gatctgtcctggtctagacg

SEQ ID NO: 133237 - DNA, 20 bp, Artificial Sequence
  mmSKRIPTE0004016_Il12rb1_2
  gRNA
acaatgtttctcacgtcctg

SEQ ID NO: 133238 - DNA, 20 bp, Artificial Sequence
  mmSKRIPTE0004017_Il12rb1_3
  gRNA
cggtactccacgacacgtgt

SEQ ID NO: 133239 - DNA, 20 bp, Artificial Sequence
  mmSKRIPTE0004018_Il12rb1_4
  gRNA
gcgcagccgagtaatgtaca

SEQ ID NO: 133240 - DNA, 20 bp, Artificial Sequence
  mmSKRIPTE0004019_Il12rb1_5
  gRNA
tgcactacaaacccaccttg

SEQ ID NO: 133241 - DNA, 20 bp, Artificial Sequence
  mmSKRIPTE0004020_Il12rb1_6
  gRNA
gaggggctaagtaaagtgcg

SEQ ID NO: 133242 - DNA, 20 bp, Artificial Sequence
  mmSKRIPTE0004021_Il12rb1_7
  gRNA
tggaggcgaacactgtgatg

SEQ ID NO: 133243 - DNA, 20 bp, Artificial Sequence
  mmSKRIPTE0004022_Il12rb1_8
  gRNA
gtacagatagttgaggcgag

SEQ ID NO: 133244 - DNA, 20 bp, Artificial Sequence
  mmSKRIPTE0004023_Il12rb1_9
  gRNA
ggactgcaaagcgagtccga

SEQ ID NO: 133245 - DNA, 20 bp, Artificial Sequence
  mmSKRIPTE0004024_Calr_1
  gRNA
ccggaataccctagacctag

SEQ ID NO: 133246 - DNA, 20 bp, Artificial Sequence
  mmSKRIPTE0004025_Calr_2
  gRNA
ctgaaacgattaccattctg

SEQ ID NO: 133247 - DNA, 20 bp, Artificial Sequence
  mmSKRIPTE0004026_Calr_3
  gRNA
ttgtagctcctgacagacgt

SEQ ID NO: 133248 - DNA, 20 bp, Artificial Sequence
  mmSKRIPTE0004027_Calr_4
  gRNA
ggcatagagtcagattagcg

SEQ ID NO: 133249 - DNA, 20 bp, Artificial Sequence
  mmSKRIPTE0004028_Calr_5
  gRNA
gggtcgaccacgcgttgtgg

SEQ ID NO: 133250 - DNA, 20 bp, Artificial Sequence
  mmSKRIPTE0004029_Calr_6
  gRNA
taaaccagtcaaaaggaccg

SEQ ID NO: 133251 - DNA, 20 bp, Artificial Sequence
  mmSKRIPTE0004030_Calr_7
  gRNA
acgaggcagccgaggtctcg

SEQ ID NO: 133252 - DNA, 20 bp, Artificial Sequence
  mmSKRIPTE0004031_Calr_8
  gRNA
tacgtgaagctgtttccgag

SEQ ID NO: 133253 - DNA, 20 bp, Artificial Sequence
  mmSKRIPTE0004032_Calr_9
  gRNA
cgttcagagggccaacactg

SEQ ID NO: 133254 - DNA, 20 bp, Artificial Sequence
  mmSKRIPTE0004033_Rab4a_1
  gRNA
accaagtagcctgagcgacg

SEQ ID NO: 133255 - DNA, 20 bp, Artificial Sequence
  mmSKRIPTE0004034_Rab4a_2
  gRNA
gtgacgagaagctactacag

SEQ ID NO: 133256 - DNA, 20 bp, Artificial Sequence
  mmSKRIPTE0004035_Rab4a_3
  gRNA
gagacttacggtaagacgcg

SEQ ID NO: 133257 - DNA, 20 bp, Artificial Sequence
  mmSKRIPTE0004036_Rab4a_4
  gRNA
gactggcgagaacgtcgaag

SEQ ID NO: 133258 - DNA, 20 bp, Artificial Sequence
  mmSKRIPTE0004037_Rab4a_5
  gRNA
gagatatcctgcaaacctcg

SEQ ID NO: 133259 - DNA, 20 bp, Artificial Sequence
  mmSKRIPTE0004038_Rab4a_6
  gRNA
gttaggtcgagtgcactccg

SEQ ID NO: 133260 - DNA, 20 bp, Artificial Sequence
  mmSKRIPTE0004039_Rab4a_7
  gRNA
gagcagctctttaggtcacg

SEQ ID NO: 133261 - DNA, 20 bp, Artificial Sequence
  mmSKRIPTE0004040_Rab4a_8
  gRNA
atggctacagcacgaccact

SEQ ID NO: 133262 - DNA, 20 bp, Artificial Sequence
  mmSKRIPTE0004041_Rab4a_9
  gRNA
ggaaagcagaactttccgag

SEQ ID NO: 133263 - DNA, 20 bp, Artificial Sequence
  mmSKRIPTE0004042_5730559C18Rik_1
  gRNA
agtcttgttctaatacgcag

SEQ ID NO: 133264 - DNA, 20 bp, Artificial Sequence
  mmSKRIPTE0004043_5730559C18Rik_2
  gRNA
accagtcgctggtaacgcag

SEQ ID NO: 133265 - DNA, 20 bp, Artificial Sequence
  mmSKRIPTE0004044_5730559C18Rik_3
  gRNA
ccccgttgggaagtatccag

SEQ ID NO: 133266 - DNA, 20 bp, Artificial Sequence
  mmSKRIPTE0004045_5730559C18Rik_4
  gRNA
tttctgtcctctaagcgccg

SEQ ID NO: 133267 - DNA, 20 bp, Artificial Sequence
  mmSKRIPTE0004046_5730559C18Rik_5
  gRNA
aggggacggctagcagcgtg

SEQ ID NO: 133268 - DNA, 20 bp, Artificial Sequence
  mmSKRIPTE0004047_5730559C18Rik_6
  gRNA
tcattccggagacccaagcg

SEQ ID NO: 133269 - DNA, 20 bp, Artificial Sequence
  mmSKRIPTE0004048_5730559C18Rik_7
  gRNA
ccactcgctcgaccgccaag

SEQ ID NO: 133270 - DNA, 20 bp, Artificial Sequence
  mmSKRIPTE0004049_5730559C18Rik_8
  gRNA
tcttacctatgtacccgaca

SEQ ID NO: 133271 - DNA, 20 bp, Artificial Sequence
  mmSKRIPTE0004050_5730559C18Rik_9
  gRNA
cctccggagtacgtacacgg

SEQ ID NO: 133272 - DNA, 20 bp, Artificial Sequence
  mmSKRIPTE0004051_Il12b_1
  gRNA
aagcaccaaattactccgga

SEQ ID NO: 133273 - DNA, 20 bp, Artificial Sequence
  mmSKRIPTE0004052_Il12b_2
  gRNA
cggtagatgtcttctctacg

SEQ ID NO: 133274 - DNA, 20 bp, Artificial Sequence
  mmSKRIPTE0004053_Il12b_3
  gRNA
ctcttcaatcagggctgcgt

SEQ ID NO: 133275 - DNA, 20 bp, Artificial Sequence
  mmSKRIPTE0004054_Il12b_4
  gRNA
ataatggtgacttcctcgag

SEQ ID NO: 133276 - DNA, 20 bp, Artificial Sequence
  mmSKRIPTE0004055_Il12b_5
  gRNA
tgtgagctatgacgttccaa

SEQ ID NO: 133277 - DNA, 20 bp, Artificial Sequence
  mmSKRIPTE0004056_Il12b_6
  gRNA
ccgatcctaggatgcaacgt

SEQ ID NO: 133278 - DNA, 20 bp, Artificial Sequence
  mmSKRIPTE0004057_Il12b_7
  gRNA
tgagtgcatctatcatacag

SEQ ID NO: 133279 - DNA, 20 bp, Artificial Sequence
  mmSKRIPTE0004058_Il12b_8
  gRNA
ctggccattacatggtacaa

SEQ ID NO: 133280 - DNA, 20 bp, Artificial Sequence
  mmSKRIPTE0004059_Il12b_9
  gRNA
tggagacaccagcaaaacga

SEQ ID NO: 133281 - DNA, 20 bp, Artificial Sequence
  mmSKRIPTE0004060_Tnk1_1
  gRNA
gccccagagagcctacgcca

SEQ ID NO: 133282 - DNA, 20 bp, Artificial Sequence
  mmSKRIPTE0004061_Tnk1_2
  gRNA
tcatgacagatacttcccgc

SEQ ID NO: 133283 - DNA, 20 bp, Artificial Sequence
  mmSKRIPTE0004062_Tnk1_3
  gRNA
gtgcctgggagggttaatca

SEQ ID NO: 133284 - DNA, 20 bp, Artificial Sequence
  mmSKRIPTE0004063_Tnk1_4
  gRNA
gggttatggacactacccag

SEQ ID NO: 133285 - DNA, 20 bp, Artificial Sequence
  mmSKRIPTE0004064_Tnk1_5
  gRNA
cgccccctcaccaggcatag

SEQ ID NO: 133286 - DNA, 20 bp, Artificial Sequence
  mmSKRIPTE0004065_Tnk1_6
  gRNA
ttgaggaactcaacgtcact

SEQ ID NO: 133287 - DNA, 20 bp, Artificial Sequence
  mmSKRIPTE0004066_Tnk1_7
  gRNA
aaggataaaatgagtgaccg

SEQ ID NO: 133288 - DNA, 20 bp, Artificial Sequence
  mmSKRIPTE0004067_Tnk1_8
  gRNA
ggactggttcggccactggg

SEQ ID NO: 133289 - DNA, 20 bp, Artificial Sequence
  mmSKRIPTE0004068_Tnk1_9
  gRNA
atgtgaacaggacttcgtca

SEQ ID NO: 133290 - DNA, 20 bp, Artificial Sequence
  mmSKRIPTE0004069_Crk_1
  gRNA
agggcgcgtcatttccggtg

SEQ ID NO: 133291 - DNA, 20 bp, Artificial Sequence
  mmSKRIPTE0004070_Crk_2
  gRNA
tataccgaacagcacttgtg

SEQ ID NO: 133292 - DNA, 20 bp, Artificial Sequence
  mmSKRIPTE0004071_Crk_3
  gRNA
gcaacttcgactcggaggag

SEQ ID NO: 133293 - DNA, 20 bp, Artificial Sequence
  mmSKRIPTE0004072_Crk_4
  gRNA
cgctaagcacatagtccccg

SEQ ID NO: 133294 - DNA, 20 bp, Artificial Sequence
  mmSKRIPTE0004073_Crk_5
  gRNA
agctggttcccaccgatgag

SEQ ID NO: 133295 - DNA, 20 bp, Artificial Sequence
  mmSKRIPTE0004074_Crk_6
  gRNA
gtctatacttctccacgtaa

SEQ ID NO: 133296 - DNA, 20 bp, Artificial Sequence
  mmSKRIPTE0004075_Crk_7
  gRNA
gactcgcttctggataaccc

SEQ ID NO: 133297 - DNA, 20 bp, Artificial Sequence
  mmSKRIPTE0004076_Crk_8
  gRNA
gggagcggagtgttgacgct

SEQ ID NO: 133298 - DNA, 20 bp, Artificial Sequence
  mmSKRIPTE0004077_Crk_9
  gRNA
tggggccctcagtgcgcatg

SEQ ID NO: 133299 - DNA, 20 bp, Artificial Sequence
  mmSKRIPTE0004078_Prkca_1
  gRNA
tcattctctgaagtgccgga

SEQ ID NO: 133300 - DNA, 20 bp, Artificial Sequence
  mmSKRIPTE0004079_Prkca_2
  gRNA
gaaccgatgatcgaatggga

SEQ ID NO: 133301 - DNA, 20 bp, Artificial Sequence
  mmSKRIPTE0004080_Prkca_3
  gRNA
ctaacaacactcgtgaacag

SEQ ID NO: 133302 - DNA, 20 bp, Artificial Sequence
  mmSKRIPTE0004081_Prkca_4
  gRNA
aagcaaatcaagtcatgtcg

SEQ ID NO: 133303 - DNA, 20 bp, Artificial Sequence
  mmSKRIPTE0004082_Prkca_5
  gRNA
catgtttccctacacgccgc

SEQ ID NO: 133304 - DNA, 20 bp, Artificial Sequence
  mmSKRIPTE0004083_Prkca_6
  gRNA
ctgtggatgtggcgaccacc

SEQ ID NO: 133305 - DNA, 20 bp, Artificial Sequence
  mmSKRIPTE0004084_Prkca_7
  gRNA
ggttagctccgtgaacacgg

SEQ ID NO: 133306 - DNA, 20 bp, Artificial Sequence
  mmSKRIPTE0004085_Prkca_8
  gRNA
ctgtgaaaatcgctgcacag

SEQ ID NO: 133307 - DNA, 20 bp, Artificial Sequence
  mmSKRIPTE0004086_Prkca_9
  gRNA
cggcaccgccatctactcgg

SEQ ID NO: 133308 - DNA, 20 bp, Artificial Sequence
  mmSKRIPTE0004087_Akt1_1
  gRNA
aggtcacggggatactcgca

SEQ ID NO: 133309 - DNA, 20 bp, Artificial Sequence
  mmSKRIPTE0004088_Akt1_2
  gRNA
agctcttcaatgtggaaccg

SEQ ID NO: 133310 - DNA, 20 bp, Artificial Sequence
  mmSKRIPTE0004089_Akt1_3
  gRNA
actctgtcagcgttgtgtcg

SEQ ID NO: 133311 - DNA, 20 bp, Artificial Sequence
  mmSKRIPTE0004090_Akt1_4
  gRNA
cacgccgcctgatcaaggtg

SEQ ID NO: 133312 - DNA, 20 bp, Artificial Sequence
  mmSKRIPTE0004091_Akt1_5
  gRNA
gaacgacgtagccattgtga

SEQ ID NO: 133313 - DNA, 20 bp, Artificial Sequence
  mmSKRIPTE0004092_Akt1_6
  gRNA
actgcccactgagaaacccg

SEQ ID NO: 133314 - DNA, 20 bp, Artificial Sequence
  mmSKRIPTE0004093_Akt1_7
  gRNA
ttcttgaggaggaagtagcg

SEQ ID NO: 133315 - DNA, 20 bp, Artificial Sequence
  mmSKRIPTE0004094_Akt1_8
  gRNA
agtgtcttagccatgcgggt

SEQ ID NO: 133316 - DNA, 20 bp, Artificial Sequence
  mmSKRIPTE0004095_Akt1_9
  gRNA
tgtaccttctagataacacg

SEQ ID NO: 133317 - DNA, 20 bp, Artificial Sequence
  mmSKRIPTE0004096_Inhba_1
  gRNA
ctgctgctgaaatagacgga

SEQ ID NO: 133318 - DNA, 20 bp, Artificial Sequence
  mmSKRIPTE0004097_Inhba_2
  gRNA
gttaggtccatccttcggaa

SEQ ID NO: 133319 - DNA, 20 bp, Artificial Sequence
  mmSKRIPTE0004098_Inhba_3
  gRNA
cctcatcgcaggcgtaggcg

SEQ ID NO: 133320 - DNA, 20 bp, Artificial Sequence
  mmSKRIPTE0004099_Inhba_4
  gRNA
tcctggcagcaaaagtcgtg

SEQ ID NO: 133321 - DNA, 20 bp, Artificial Sequence
  mmSKRIPTE0004100_Inhba_5
  gRNA
tcacctttgccgagtcaggt

SEQ ID NO: 133322 - DNA, 20 bp, Artificial Sequence
  mmSKRIPTE0004101_Inhba_6
  gRNA
ctaataactaataacctccc

SEQ ID NO: 133323 - DNA, 20 bp, Artificial Sequence
  mmSKRIPTE0004102_Inhba_7
  gRNA
ctatcacgccaattattgtg

SEQ ID NO: 133324 - DNA, 20 bp, Artificial Sequence
  mmSKRIPTE0004103_Inhba_8
  gRNA
caaaaaaacctgtgcgtgag

SEQ ID NO: 133325 - DNA, 20 bp, Artificial Sequence
  mmSKRIPTE0004104_Inhba_9
  gRNA
aagcagatttatttcatgcg

SEQ ID NO: 133326 - DNA, 20 bp, Artificial Sequence
  mmSKRIPTE0004105_Wrnip1_1
  gRNA
acttcccgacacgactcgcg

SEQ ID NO: 133327 - DNA, 20 bp, Artificial Sequence
  mmSKRIPTE0004106_Wrnip1_2
  gRNA
aatagataggcaacttacgt

SEQ ID NO: 133328 - DNA, 20 bp, Artificial Sequence
  mmSKRIPTE0004107_Wrnip1_3
  gRNA
cgcctcgttcggagtcagcg

SEQ ID NO: 133329 - DNA, 20 bp, Artificial Sequence
  mmSKRIPTE0004108_Wrnip1_4
  gRNA
tcaatgcgagaaattgccgg

SEQ ID NO: 133330 - DNA, 20 bp, Artificial Sequence
  mmSKRIPTE0004109_Wrnip1_5
  gRNA
ccttatcccggacttcccgg

SEQ ID NO: 133331 - DNA, 20 bp, Artificial Sequence
  mmSKRIPTE0004110_Wrnip1_6
  gRNA
ccagcgaggacatcggtgag

SEQ ID NO: 133332 - DNA, 20 bp, Artificial Sequence
  mmSKRIPTE0004111_Wrnip1_7
  gRNA
cccggctcagaatacctccg

SEQ ID NO: 133333 - DNA, 20 bp, Artificial Sequence
  mmSKRIPTE0004112_Wrnip1_8
  gRNA
caggtgcgaattgatgtgcg

SEQ ID NO: 133334 - DNA, 20 bp, Artificial Sequence
  mmSKRIPTE0004113_Wrnip1_9
  gRNA
caagaacaattacccgacag

SEQ ID NO: 133335 - DNA, 20 bp, Artificial Sequence
  mmSKRIPTE0004114_Nuggc_1
  gRNA
tccatctgaaggaccgagtg

SEQ ID NO: 133336 - DNA, 20 bp, Artificial Sequence
  mmSKRIPTE0004115_Nuggc_2
  gRNA
ctggaatagccggtcccaag

SEQ ID NO: 133337 - DNA, 20 bp, Artificial Sequence
  mmSKRIPTE0004116_Nuggc_3
  gRNA
tggcctgcgacaatttgtag

SEQ ID NO: 133338 - DNA, 20 bp, Artificial Sequence
  mmSKRIPTE0004117_Nuggc_4
  gRNA
tgaatcctcagataactacc

SEQ ID NO: 133339 - DNA, 20 bp, Artificial Sequence
  mmSKRIPTE0004118_Nuggc_5
  gRNA
tacatgttgaaacgactgca

SEQ ID NO: 133340 - DNA, 20 bp, Artificial Sequence
  mmSKRIPTE0004119_Nuggc_6
  gRNA
taacacttgaatctatccag

SEQ ID NO: 133341 - DNA, 20 bp, Artificial Sequence
  mmSKRIPTE0004120_Nuggc_7
  gRNA
caagctaatagaaaacggga

SEQ ID NO: 133342 - DNA, 20 bp, Artificial Sequence
  mmSKRIPTE0004121_Nuggc_8
  gRNA
ccagtgtctggcacactacg

SEQ ID NO: 133343 - DNA, 20 bp, Artificial Sequence
  mmSKRIPTE0004122_Nuggc_9
  gRNA
caggcaacatgtagataacg

SEQ ID NO: 133344 - DNA, 20 bp, Artificial Sequence
  mmSKRIPTE0004123_Fyb_1
  gRNA
cacggggagtaacccgacag

SEQ ID NO: 133345 - DNA, 20 bp, Artificial Sequence
  mmSKRIPTE0004124_Fyb_2
  gRNA
gcaaagctcacagtacggca

SEQ ID NO: 133346 - DNA, 20 bp, Artificial Sequence
  mmSKRIPTE0004125_Fyb_3
  gRNA
ctgacagcggggacaccgtg

SEQ ID NO: 133347 - DNA, 20 bp, Artificial Sequence
  mmSKRIPTE0004126_Fyb_4
  gRNA
ggcagcgaaacctacctacg

SEQ ID NO: 133348 - DNA, 20 bp, Artificial Sequence
  mmSKRIPTE0004127_Fyb_5
  gRNA
tgaagtcagataactaggag

SEQ ID NO: 133349 - DNA, 20 bp, Artificial Sequence
  mmSKRIPTE0004128_Fyb_6
  gRNA
tgatttaggaactatctacg

SEQ ID NO: 133350 - DNA, 20 bp, Artificial Sequence
  mmSKRIPTE0004129_Fyb_7
  gRNA
gaatccgaacatcctcacgc

SEQ ID NO: 133351 - DNA, 20 bp, Artificial Sequence
  mmSKRIPTE0004130_Fyb_8
  gRNA
gctctaattaagctagccag

SEQ ID NO: 133352 - DNA, 20 bp, Artificial Sequence
  mmSKRIPTE0004131_Fyb_9
  gRNA
gctcctgagaacgacactag

SEQ ID NO: 133353 - DNA, 20 bp, Artificial Sequence
  mmSKRIPTE0004132_Tap2_1
  gRNA
ttacacgacccgaatagcga

SEQ ID NO: 133354 - DNA, 20 bp, Artificial Sequence
  mmSKRIPTE0004133_Tap2_2
  gRNA
taggggtccgcccttcacca

SEQ ID NO: 133355 - DNA, 20 bp, Artificial Sequence
  mmSKRIPTE0004134_Tap2_3
  gRNA
gagcacctcagtagtccgag

SEQ ID NO: 133356 - DNA, 20 bp, Artificial Sequence
  mmSKRIPTE0004135_Tap2_4
  gRNA
actcacctgcggctgcggag

SEQ ID NO: 133357 - DNA, 20 bp, Artificial Sequence
  mmSKRIPTE0004136_Tap2_5
  gRNA
caggcaaggcacaatctgtg

SEQ ID NO: 133358 - DNA, 20 bp, Artificial Sequence
  mmSKRIPTE0004137_Tap2_6
  gRNA
gaaccggatgatgacgccaa

SEQ ID NO: 133359 - DNA, 20 bp, Artificial Sequence
  mmSKRIPTE0004138_Tap2_7
  gRNA
gatggttgcatacacagtcg

SEQ ID NO: 133360 - DNA, 20 bp, Artificial Sequence
  mmSKRIPTE0004139_Tap2_8
  gRNA
tcctggctcttaaagacccg

SEQ ID NO: 133361 - DNA, 20 bp, Artificial Sequence
  mmSKRIPTE0004140_Tap2_9
  gRNA
aggcccaaagcgaagtactg

SEQ ID NO: 133362 - DNA, 20 bp, Artificial Sequence
  mmSKRIPTE0004141_Vegfa_1
  gRNA
caacggtgacgatgatggcg

SEQ ID NO: 133363 - DNA, 20 bp, Artificial Sequence
  mmSKRIPTE0004142_Vegfa_2
  gRNA
aaatcctggagcgtgtacgt

SEQ ID NO: 133364 - DNA, 20 bp, Artificial Sequence
  mmSKRIPTE0004143_Vegfa_3
  gRNA
catggggccctataatgccg

SEQ ID NO: 133365 - DNA, 20 bp, Artificial Sequence
  mmSKRIPTE0004144_Vegfa_4
  gRNA
cccaatagaaccctcgagtg

SEQ ID NO: 133366 - DNA, 20 bp, Artificial Sequence
  mmSKRIPTE0004145_Vegfa_5
  gRNA
cagactcgcgttgcaaggcg

SEQ ID NO: 133367 - DNA, 20 bp, Artificial Sequence
  mmSKRIPTE0004146_Vegfa_6
  gRNA
gtgcccatattccagagacg

SEQ ID NO: 133368 - DNA, 20 bp, Artificial Sequence
  mmSKRIPTE0004147_Vegfa_7
  gRNA
aaacgaacgtacttgcaggt

SEQ ID NO: 133369 - DNA, 20 bp, Artificial Sequence
  mmSKRIPTE0004148_Vegfa_8
  gRNA
aatcgtggagagcttcggca

SEQ ID NO: 133370 - DNA, 20 bp, Artificial Sequence
  mmSKRIPTE0004149_Vegfa_9
  gRNA
tgatccgcatgatctgtaga

SEQ ID NO: 133371 - DNA, 20 bp, Artificial Sequence
  mmSKRIPTE0004150_Tfeb_1
  gRNA
gaggcacccaaggaccggtg

SEQ ID NO: 133372 - DNA, 20 bp, Artificial Sequence
  mmSKRIPTE0004151_Tfeb_2
  gRNA
agtcatagtactgccgccag

SEQ ID NO: 133373 - DNA, 20 bp, Artificial Sequence
  mmSKRIPTE0004152_Tfeb_3
  gRNA
gggtgatactatctacccag

SEQ ID NO: 133374 - DNA, 20 bp, Artificial Sequence
  mmSKRIPTE0004153_Tfeb_4
  gRNA
catattcacacccgacggcg

SEQ ID NO: 133375 - DNA, 20 bp, Artificial Sequence
  mmSKRIPTE0004154_Tfeb_5
  gRNA
tcatggctcagctcgctcag

SEQ ID NO: 133376 - DNA, 20 bp, Artificial Sequence
  mmSKRIPTE0004155_Tfeb_6
  gRNA
ctgtagttgagagaagacgc

SEQ ID NO: 133377 - DNA, 20 bp, Artificial Sequence
  mmSKRIPTE0004156_Tfeb_7
  gRNA
ctctcgcttctgagtcaggt

SEQ ID NO: 133378 - DNA, 20 bp, Artificial Sequence
  mmSKRIPTE0004157_Tfeb_8
  gRNA
gtgtcccaagctagggacgc

SEQ ID NO: 133379 - DNA, 20 bp, Artificial Sequence
  mmSKRIPTE0004158_Tfeb_9
  gRNA
agccacctgaacgtgtacag

SEQ ID NO: 133380 - DNA, 20 bp, Artificial Sequence
  mmSKRIPTE0004159_Dpp4_1
  gRNA
tgcctcgattatccacgcaa

SEQ ID NO: 133381 - DNA, 20 bp, Artificial Sequence
  mmSKRIPTE0004160_Dpp4_2
  gRNA
agtcataggatcacatcgac

SEQ ID NO: 133382 - DNA, 20 bp, Artificial Sequence
  mmSKRIPTE0004161_Dpp4_3
  gRNA
atgataagatcaacctaacg

SEQ ID NO: 133383 - DNA, 20 bp, Artificial Sequence
  mmSKRIPTE0004162_Dpp4_4
  gRNA
ttcatcaatatgtatgcgat

SEQ ID NO: 133384 - DNA, 20 bp, Artificial Sequence
  mmSKRIPTE0004163_Dpp4_5
  gRNA
ttggatgggagccgcactag

SEQ ID NO: 133385 - DNA, 20 bp, Artificial Sequence
  mmSKRIPTE0004164_Dpp4_6
  gRNA
gacatatggtaagcgagtcg

SEQ ID NO: 133386 - DNA, 20 bp, Artificial Sequence
  mmSKRIPTE0004165_Dpp4_7
  gRNA
gagggtgtgagtataacgca

SEQ ID NO: 133387 - DNA, 20 bp, Artificial Sequence
  mmSKRIPTE0004166_Dpp4_8
  gRNA
gccattaggcggaagccacg

SEQ ID NO: 133388 - DNA, 20 bp, Artificial Sequence
  mmSKRIPTE0004167_Dpp4_9
  gRNA
gcagagacggacgtcctgcg

SEQ ID NO: 133389 - DNA, 20 bp, Artificial Sequence
  mmSKRIPTE0004168_Tnfsf10_1
  gRNA
gaagacgtttacatcgaatg

SEQ ID NO: 133390 - DNA, 20 bp, Artificial Sequence
  mmSKRIPTE0004169_Tnfsf10_2
  gRNA
tgcttagtatcgatggacag

SEQ ID NO: 133391 - DNA, 20 bp, Artificial Sequence
  mmSKRIPTE0004170_Tnfsf10_3
  gRNA
taaagcctgctgctccatcg

SEQ ID NO: 133392 - DNA, 20 bp, Artificial Sequence
  mmSKRIPTE0004171_Tnfsf10_4
  gRNA
tcccatccatacatacggtg

SEQ ID NO: 133393 - DNA, 20 bp, Artificial Sequence
  mmSKRIPTE0004172_Tnfsf10_5
  gRNA
aaatgaatgccctttccgag

SEQ ID NO: 133394 - DNA, 20 bp, Artificial Sequence
  mmSKRIPTE0004173_Tnfsf10_6
  gRNA
ctaagacgagcctgccacct

SEQ ID NO: 133395 - DNA, 20 bp, Artificial Sequence
  mmSKRIPTE0004174_Tnfsf10_7
  gRNA
ccaacaggatcggaatcctg

SEQ ID NO: 133396 - DNA, 20 bp, Artificial Sequence
  mmSKRIPTE0004175_Tnfsf10_8
  gRNA
cccagggtcttactcccagt

SEQ ID NO: 133397 - DNA, 20 bp, Artificial Sequence
  mmSKRIPTE0004176_Tnfsf10_9
  gRNA
agcgggtgtagaaataggcc

SEQ ID NO: 133398 - DNA, 20 bp, Artificial Sequence
  mmSKRIPTE0004177_Jun_1
  gRNA
acggtccgtcacttcacgcg

SEQ ID NO: 133399 - DNA, 20 bp, Artificial Sequence
  mmSKRIPTE0004178_Jun_2
  gRNA
gactccgctagcactcacgt

SEQ ID NO: 133400 - DNA, 20 bp, Artificial Sequence
  mmSKRIPTE0004179_Jun_3
  gRNA
acggacttggccaacccggt

SEQ ID NO: 133401 - DNA, 20 bp, Artificial Sequence
  mmSKRIPTE0004180_Jun_4
  gRNA
gtcgggagaatagttcaacc

SEQ ID NO: 133402 - DNA, 20 bp, Artificial Sequence
  mmSKRIPTE0004181_Jun_5
  gRNA
gcccaactgtaggagcgcag

SEQ ID NO: 133403 - DNA, 20 bp, Artificial Sequence
  mmSKRIPTE0004182_Jun_6
  gRNA
cgcgcgaggaaataggcgag

SEQ ID NO: 133404 - DNA, 20 bp, Artificial Sequence
  mmSKRIPTE0004183_Jun_7
  gRNA
gaaggtccgagttcttggcg

SEQ ID NO: 133405 - DNA, 20 bp, Artificial Sequence
  mmSKRIPTE0004184_Jun_8
  gRNA
tcatgaaccacgttaacagt

SEQ ID NO: 133406 - DNA, 20 bp, Artificial Sequence
  mmSKRIPTE0004185_Jun_9
  gRNA
agtcgtcacggaattctcgg

SEQ ID NO: 133407 - DNA, 20 bp, Artificial Sequence
  mmSKRIPTE0004186_Il6_1
  gRNA
actagagagtaagcgtccag

SEQ ID NO: 133408 - DNA, 20 bp, Artificial Sequence
  mmSKRIPTE0004187_Il6_2
  gRNA
agtctcaatagctccgccag

SEQ ID NO: 133409 - DNA, 20 bp, Artificial Sequence
  mmSKRIPTE0004188_Il6_3
  gRNA
cctacttcacaagtccggag

SEQ ID NO: 133410 - DNA, 20 bp, Artificial Sequence
  mmSKRIPTE0004189_Il6_4
  gRNA
gaaaaagtgccgctaccctg

SEQ ID NO: 133411 - DNA, 20 bp, Artificial Sequence
  mmSKRIPTE0004190_Il6_5
  gRNA
aaactgatgaagacccagtg

SEQ ID NO: 133412 - DNA, 20 bp, Artificial Sequence
  mmSKRIPTE0004191_Il6_6
  gRNA
agtctgaatggaaaccacga

SEQ ID NO: 133413 - DNA, 20 bp, Artificial Sequence
  mmSKRIPTE0004192_Il6_7
  gRNA
ctggatggaagtctcctgcg

SEQ ID NO: 133414 - DNA, 20 bp, Artificial Sequence
  mmSKRIPTE0004193_Il6_8
  gRNA
ttacttaggaggtctaggaa

SEQ ID NO: 133415 - DNA, 20 bp, Artificial Sequence
  mmSKRIPTE0004194_Il6_9
  gRNA
tataccacttcacaagtcgg

SEQ ID NO: 133416 - DNA, 20 bp, Artificial Sequence
  mmSKRIPTE0004195_Nt5c3_1
  gRNA
gtaaccggacaagctacgta

SEQ ID NO: 133417 - DNA, 20 bp, Artificial Sequence
  mmSKRIPTE0004196_Nt5c3_2
  gRNA
tttatcaatgaagcgaccga

SEQ ID NO: 133418 - DNA, 20 bp, Artificial Sequence
  mmSKRIPTE0004197_Nt5c3_3
  gRNA
aaacagccccgtgacgcacg

SEQ ID NO: 133419 - DNA, 20 bp, Artificial Sequence
  mmSKRIPTE0004198_Nt5c3_4
  gRNA
acagacgatcttcagacgtg

SEQ ID NO: 133420 - DNA, 20 bp, Artificial Sequence
  mmSKRIPTE0004199_Nt5c3_5
  gRNA
atagtgaacattgcgctggg

SEQ ID NO: 133421 - DNA, 20 bp, Artificial Sequence
  mmSKRIPTE0004200_Nt5c3_6
  gRNA
gacattgcatgcaccctcag

SEQ ID NO: 133422 - DNA, 20 bp, Artificial Sequence
  mmSKRIPTE0004201_Nt5c3_7
  gRNA
ctgttagtatatctcagccg

SEQ ID NO: 133423 - DNA, 20 bp, Artificial Sequence
  mmSKRIPTE0004202_Nt5c3_8
  gRNA
ggtgtatgtaatgcgaggca

SEQ ID NO: 133424 - DNA, 20 bp, Artificial Sequence
  mmSKRIPTE0004203_Nt5c3_9
  gRNA
atcatcttaaggcacatcgc

SEQ ID NO: 133425 - DNA, 20 bp, Artificial Sequence
  mmSKRIPTE0004204_Igkc_1
  gRNA
cagcaccctcacgttgacca

SEQ ID NO: 133426 - DNA, 20 bp, Artificial Sequence
  mmSKRIPTE0004205_Igkc_2
  gRNA
gttcaagaagcacacgactg

SEQ ID NO: 133427 - DNA, 20 bp, Artificial Sequence
  mmSKRIPTE0004206_Igkc_3
  gRNA
acagtggtaggtcgcttgtg

SEQ ID NO: 133428 - DNA, 20 bp, Artificial Sequence
  mmSKRIPTE0004207_Igkc_4
  gRNA
atgtagtggacagccaacca

SEQ ID NO: 133429 - DNA, 20 bp, Artificial Sequence
  mmSKRIPTE0004208_Igkc_5
  gRNA
atgtcgttcatactcgtcct

SEQ ID NO: 133430 - DNA, 20 bp, Artificial Sequence
  mmSKRIPTE0004209_Igkc_6
  gRNA
gaggatggtatgaagtaaca

SEQ ID NO: 133431 - DNA, 20 bp, Artificial Sequence
  mmSKRIPTE0004210_Igkc_7
  gRNA
agtgagcagttaacatctgg

SEQ ID NO: 133432 - DNA, 20 bp, Artificial Sequence
  mmSKRIPTE0004211_Igkc_8
  gRNA
acataacagctatacctgtg

SEQ ID NO: 133433 - DNA, 20 bp, Artificial Sequence
  mmSKRIPTE0004212_Igkc_9
  gRNA
agtactcgtgaaccttagaa

SEQ ID NO: 133434 - DNA, 20 bp, Artificial Sequence
  mmSKRIPTE0004213_Atp7a_1
  gRNA
caatagaggccatttcaccg

SEQ ID NO: 133435 - DNA, 20 bp, Artificial Sequence
  mmSKRIPTE0004214_Atp7a_2
  gRNA
aactcataattgtcatacgt

SEQ ID NO: 133436 - DNA, 20 bp, Artificial Sequence
  mmSKRIPTE0004215_Atp7a_3
  gRNA
agtagggcccacatggtacg

SEQ ID NO: 133437 - DNA, 20 bp, Artificial Sequence
  mmSKRIPTE0004216_Atp7a_4
  gRNA
gctagccaagtcgtctactg

SEQ ID NO: 133438 - DNA, 20 bp, Artificial Sequence
  mmSKRIPTE0004217_Atp7a_5
  gRNA
tgtgaccttaaggactacag

SEQ ID NO: 133439 - DNA, 20 bp, Artificial Sequence
  mmSKRIPTE0004218_Atp7a_6
  gRNA
cctatatacttgccccactg

SEQ ID NO: 133440 - DNA, 20 bp, Artificial Sequence
  mmSKRIPTE0004219_Atp7a_7
  gRNA
tatatatgagaagtggtacg

SEQ ID NO: 133441 - DNA, 20 bp, Artificial Sequence
  mmSKRIPTE0004220_Atp7a_8
  gRNA
aaaagagtgaagtcgccgat

SEQ ID NO: 133442 - DNA, 20 bp, Artificial Sequence
  mmSKRIPTE0004221_Atp7a_9
  gRNA
tctatagggcaaaacctccg

SEQ ID NO: 133443 - DNA, 20 bp, Artificial Sequence
  mmSKRIPTE0004222_Flcn_1
  gRNA
accaaactgtagcgtcgaag

SEQ ID NO: 133444 - DNA, 20 bp, Artificial Sequence
  mmSKRIPTE0004223_Flcn_2
  gRNA
gtacagccataggtaccctg

SEQ ID NO: 133445 - DNA, 20 bp, Artificial Sequence
  mmSKRIPTE0004224_Flcn_3
  gRNA
agaatacaatgccggtcatg

SEQ ID NO: 133446 - DNA, 20 bp, Artificial Sequence
  mmSKRIPTE0004225_Flcn_4
  gRNA
agatggggccttcacgacca

SEQ ID NO: 133447 - DNA, 20 bp, Artificial Sequence
  mmSKRIPTE0004226_Flcn_5
  gRNA
acgcctatcgtatcccagag

SEQ ID NO: 133448 - DNA, 20 bp, Artificial Sequence
  mmSKRIPTE0004227_Flcn_6
  gRNA
caagtggcccataacagtag

SEQ ID NO: 133449 - DNA, 20 bp, Artificial Sequence
  mmSKRIPTE0004228_Flcn_7
  gRNA
gatgtccacagcgtgcccag

SEQ ID NO: 133450 - DNA, 20 bp, Artificial Sequence
  mmSKRIPTE0004229_Flcn_8
  gRNA
cacgacaactacgaactctg

SEQ ID NO: 133451 - DNA, 20 bp, Artificial Sequence
  mmSKRIPTE0004230_Flcn_9
  gRNA
aagcacgcatcctggaaacg

SEQ ID NO: 133452 - DNA, 20 bp, Artificial Sequence
  mmSKRIPTE0004231_Hoxb7_1
  gRNA
ccgtcataccattggccgag

SEQ ID NO: 133453 - DNA, 20 bp, Artificial Sequence
  mmSKRIPTE0004232_Hoxb7_2
  gRNA
cagcccagacttaaacggcg

SEQ ID NO: 133454 - DNA, 20 bp, Artificial Sequence
  mmSKRIPTE0004233_Hoxb7_3
  gRNA
atattagtgtccctagagtg

SEQ ID NO: 133455 - DNA, 20 bp, Artificial Sequence
  mmSKRIPTE0004234_Hoxb7_4
  gRNA
tctgcacctagtagtgaaag

SEQ ID NO: 133456 - DNA, 20 bp, Artificial Sequence
  mmSKRIPTE0004235_Hoxb7_5
  gRNA
cattactgggagcctccggg

SEQ ID NO: 133457 - DNA, 20 bp, Artificial Sequence
  mmSKRIPTE0004236_Hoxb7_6
  gRNA
aggcgcaagaagtttgttcg

SEQ ID NO: 133458 - DNA, 20 bp, Artificial Sequence
  mmSKRIPTE0004237_Hoxb7_7
  gRNA
ttccagcaaggtaaccacct

SEQ ID NO: 133459 - DNA, 20 bp, Artificial Sequence
  mmSKRIPTE0004238_Hoxb7_8
  gRNA
ggagtacagaccctgcaccg

SEQ ID NO: 133460 - DNA, 20 bp, Artificial Sequence
  mmSKRIPTE0004239_Hoxb7_9
  gRNA
gtagggcctgaccgaaagcg

SEQ ID NO: 133461 - DNA, 20 bp, Artificial Sequence
  mmSKRIPTE0004240_Cd300lf_1
  gRNA
ttggtgctttatatgccagc

SEQ ID NO: 133462 - DNA, 20 bp, Artificial Sequence
  mmSKRIPTE0004241_Cd300lf_2
  gRNA
gttcactttccaaggcggtg

SEQ ID NO: 133463 - DNA, 20 bp, Artificial Sequence
  mmSKRIPTE0004242_Cd300lf_3
  gRNA
tgatggccatgagagacgga

SEQ ID NO: 133464 - DNA, 20 bp, Artificial Sequence
  mmSKRIPTE0004243_Cd300lf_4
  gRNA
ccagccaccttagatagcag

SEQ ID NO: 133465 - DNA, 20 bp, Artificial Sequence
  mmSKRIPTE0004244_Cd300lf_5
  gRNA
agtgccgatatacctcaggc

SEQ ID NO: 133466 - DNA, 20 bp, Artificial Sequence
  mmSKRIPTE0004245_Cd300lf_6
  gRNA
aggaggtgctgggctcacat

SEQ ID NO: 133467 - DNA, 20 bp, Artificial Sequence
  mmSKRIPTE0004246_Cd300lf_7
  gRNA
gtcaggtctcccattctggt

SEQ ID NO: 133468 - DNA, 20 bp, Artificial Sequence
  mmSKRIPTE0004247_Cd300lf_8
  gRNA
gccccatgaaagacgtacca

SEQ ID NO: 133469 - DNA, 20 bp, Artificial Sequence
  mmSKRIPTE0004248_Cd300lf_9
  gRNA
ttgaactccaagctcaagca

SEQ ID NO: 133470 - DNA, 20 bp, Artificial Sequence
  mmSKRIPTE0004249_Itga6_1
  gRNA
ccgaccaactggtctaggac

SEQ ID NO: 133471 - DNA, 20 bp, Artificial Sequence
  mmSKRIPTE0004250_Itga6_2
  gRNA
aaacagtacatccactgccg

SEQ ID NO: 133472 - DNA, 20 bp, Artificial Sequence
  mmSKRIPTE0004251_Itga6_3
  gRNA
ttgaccaggtcaaggcggtg

SEQ ID NO: 133473 - DNA, 20 bp, Artificial Sequence
  mmSKRIPTE0004252_Itga6_4
  gRNA
cagcattccccgataccatg

SEQ ID NO: 133474 - DNA, 20 bp, Artificial Sequence
  mmSKRIPTE0004253_Itga6_5
  gRNA
tcgttctccctggcgcagcg

SEQ ID NO: 133475 - DNA, 20 bp, Artificial Sequence
  mmSKRIPTE0004254_Itga6_6
  gRNA
ccgtgtacaaggtccccggg

SEQ ID NO: 133476 - DNA, 20 bp, Artificial Sequence
  mmSKRIPTE0004255_Itga6_7
  gRNA
gtgtattccaggttctcgag

SEQ ID NO: 133477 - DNA, 20 bp, Artificial Sequence
  mmSKRIPTE0004256_Itga6_8
  gRNA
cccttctctagacctacgga

SEQ ID NO: 133478 - DNA, 20 bp, Artificial Sequence
  mmSKRIPTE0004257_Itga6_9
  gRNA
aagaatccttgtcagcacgt

SEQ ID NO: 133479 - DNA, 20 bp, Artificial Sequence
  mmSKRIPTE0004258_Mavs_1
  gRNA
gcacttgaagtcatcccgag

SEQ ID NO: 133480 - DNA, 20 bp, Artificial Sequence
  mmSKRIPTE0004259_Mavs_2
  gRNA
tggatgatgagatacctagt

SEQ ID NO: 133481 - DNA, 20 bp, Artificial Sequence
  mmSKRIPTE0004260_Mavs_3
  gRNA
gaactcttacactgccacgt

SEQ ID NO: 133482 - DNA, 20 bp, Artificial Sequence
  mmSKRIPTE0004261_Mavs_4
  gRNA
gggctctgcacagtcgaacg

SEQ ID NO: 133483 - DNA, 20 bp, Artificial Sequence
  mmSKRIPTE0004262_Mavs_5
  gRNA
acgcctgaccaatagctgcg

SEQ ID NO: 133484 - DNA, 20 bp, Artificial Sequence
  mmSKRIPTE0004263_Mavs_6
  gRNA
tggctacgagcaacgacctg

SEQ ID NO: 133485 - DNA, 20 bp, Artificial Sequence
  mmSKRIPTE0004264_Mavs_7
  gRNA
aggccctggtgactcgagcg

SEQ ID NO: 133486 - DNA, 20 bp, Artificial Sequence
  mmSKRIPTE0004265_Mavs_8
  gRNA
cttgttcccaatgtagatag

SEQ ID NO: 133487 - DNA, 20 bp, Artificial Sequence
  mmSKRIPTE0004266_Mavs_9
  gRNA
tttgtcctcagggcagtacg

SEQ ID NO: 133488 - DNA, 20 bp, Artificial Sequence
  mmSKRIPTE0004267_Rab32_1
  gRNA
atcaccatcaccaggccgag

SEQ ID NO: 133489 - DNA, 20 bp, Artificial Sequence
  mmSKRIPTE0004268_Rab32_2
  gRNA
agtccacgccaatggtggcg

SEQ ID NO: 133490 - DNA, 20 bp, Artificial Sequence
  mmSKRIPTE0004269_Rab32_3
  gRNA
tgggtcttcctaagtgcccg

SEQ ID NO: 133491 - DNA, 20 bp, Artificial Sequence
  mmSKRIPTE0004270_Rab32_4
  gRNA
aggccctgtgactttacccg

SEQ ID NO: 133492 - DNA, 20 bp, Artificial Sequence
  mmSKRIPTE0004271_Rab32_5
  gRNA
ggataatataaacatcgacg

SEQ ID NO: 133493 - DNA, 20 bp, Artificial Sequence
  mmSKRIPTE0004272_Rab32_6
  gRNA
cggtgactcgcgtgactgcg

SEQ ID NO: 133494 - DNA, 20 bp, Artificial Sequence
  mmSKRIPTE0004273_Rab32_7
  gRNA
taggtccatatctggcacat

SEQ ID NO: 133495 - DNA, 20 bp, Artificial Sequence
  mmSKRIPTE0004274_Rab32_8
  gRNA
gcggtgcctgtacagctgaa

SEQ ID NO: 133496 - DNA, 20 bp, Artificial Sequence
  mmSKRIPTE0004275_Rab32_9
  gRNA
taaacgttcagtgcagtaag

SEQ ID NO: 133497 - DNA, 20 bp, Artificial Sequence
  mmSKRIPTE0004276_Stat6_1
  gRNA
accattgcacacgtcatccg

SEQ ID NO: 133498 - DNA, 20 bp, Artificial Sequence
  mmSKRIPTE0004277_Stat6_2
  gRNA
gtgtcgtcagagcgccaggg

SEQ ID NO: 133499 - DNA, 20 bp, Artificial Sequence
  mmSKRIPTE0004278_Stat6_3
  gRNA
caactttcgaaggactcggg

SEQ ID NO: 133500 - DNA, 20 bp, Artificial Sequence
  mmSKRIPTE0004279_Stat6_4
  gRNA
gatccattctcaacccacca

SEQ ID NO: 133501 - DNA, 20 bp, Artificial Sequence
  mmSKRIPTE0004280_Stat6_5
  gRNA
ccccgaaaatccatccctcg

SEQ ID NO: 133502 - DNA, 20 bp, Artificial Sequence
  mmSKRIPTE0004281_Stat6_6
  gRNA
ctaagctacacaacgagcag

SEQ ID NO: 133503 - DNA, 20 bp, Artificial Sequence
  mmSKRIPTE0004282_Stat6_7
  gRNA
ggagtaagtcagatgcggtg

SEQ ID NO: 133504 - DNA, 20 bp, Artificial Sequence
  mmSKRIPTE0004283_Stat6_8
  gRNA
gtgaacctgtatgtacccgg

SEQ ID NO: 133505 - DNA, 20 bp, Artificial Sequence
  mmSKRIPTE0004284_Stat6_9
  gRNA
ataaagcgctgtgagcggaa

SEQ ID NO: 133506 - DNA, 20 bp, Artificial Sequence
  mmSKRIPTE0004285_Sp7_1
  gRNA
caaacatcagcgcacccacg

SEQ ID NO: 133507 - DNA, 20 bp, Artificial Sequence
  mmSKRIPTE0004286_Sp7_2
  gRNA
tgactcatccctatggctcg

SEQ ID NO: 133508 - DNA, 20 bp, Artificial Sequence
  mmSKRIPTE0004287_Sp7_3
  gRNA
tgcgggactcaacaaccctg

SEQ ID NO: 133509 - DNA, 20 bp, Artificial Sequence
  mmSKRIPTE0004288_Sp7_4
  gRNA
tcaggagctagagcggctcg

SEQ ID NO: 133510 - DNA, 20 bp, Artificial Sequence
  mmSKRIPTE0004289_Sp7_5
  gRNA
agaaactctcggagacctcg

SEQ ID NO: 133511 - DNA, 20 bp, Artificial Sequence
  mmSKRIPTE0004290_Sp7_6
  gRNA
catgcaaggagataacctag

SEQ ID NO: 133512 - DNA, 20 bp, Artificial Sequence
  mmSKRIPTE0004291_Sp7_7
  gRNA
agtgaaacctcctagattgg

SEQ ID NO: 133513 - DNA, 20 bp, Artificial Sequence
  mmSKRIPTE0004292_Sp7_8
  gRNA
ggcgaagtggaagatcgggg

SEQ ID NO: 133514 - DNA, 20 bp, Artificial Sequence
  mmSKRIPTE0004293_Sp7_9
  gRNA
aacagttacctcaagcagag

SEQ ID NO: 133515 - DNA, 20 bp, Artificial Sequence
  mmSKRIPTE0004294_Prdx3_1
  gRNA
cacgataggcggagataccg

SEQ ID NO: 133516 - DNA, 20 bp, Artificial Sequence
  mmSKRIPTE0004295_Prdx3_2
  gRNA
gggaaaagggtcgttaacaa

SEQ ID NO: 133517 - DNA, 20 bp, Artificial Sequence
  mmSKRIPTE0004296_Prdx3_3
  gRNA
aggaaaacaacataccgtag

SEQ ID NO: 133518 - DNA, 20 bp, Artificial Sequence
  mmSKRIPTE0004297_Prdx3_4
  gRNA
ctcaaggataatctaccaag

SEQ ID NO: 133519 - DNA, 20 bp, Artificial Sequence
  mmSKRIPTE0004298_Prdx3_5
  gRNA
tctagccgcaggaggcctag

SEQ ID NO: 133520 - DNA, 20 bp, Artificial Sequence
  mmSKRIPTE0004299_Prdx3_6
  gRNA
cctgtttgacagacatactg

SEQ ID NO: 133521 - DNA, 20 bp, Artificial Sequence
  mmSKRIPTE0004300_Prdx3_7
  gRNA
acaagcctcaagtatagcca

SEQ ID NO: 133522 - DNA, 20 bp, Artificial Sequence
  mmSKRIPTE0004301_Prdx3_8
  gRNA
taaaagaggaatttcagcgt

SEQ ID NO: 133523 - DNA, 20 bp, Artificial Sequence
  mmSKRIPTE0004302_Prdx3_9
  gRNA
tcgtaagccccgcctcgctg

SEQ ID NO: 133524 - DNA, 20 bp, Artificial Sequence
  mmSKRIPTE0004303_Acvr2a_1
  gRNA
aacgcctggctgaggcgacg

SEQ ID NO: 133525 - DNA, 20 bp, Artificial Sequence
  mmSKRIPTE0004304_Acvr2a_2
  gRNA
aaacatattcggaagccccg

SEQ ID NO: 133526 - DNA, 20 bp, Artificial Sequence
  mmSKRIPTE0004305_Acvr2a_3
  gRNA
tcatgggaccaataattgtg

SEQ ID NO: 133527 - DNA, 20 bp, Artificial Sequence
  mmSKRIPTE0004306_Acvr2a_4
  gRNA
ttagatgctagggcattagt

SEQ ID NO: 133528 - DNA, 20 bp, Artificial Sequence
  mmSKRIPTE0004307_Acvr2a_5
  gRNA
aggtcaacagactttaagtg

SEQ ID NO: 133529 - DNA, 20 bp, Artificial Sequence
  mmSKRIPTE0004308_Acvr2a_6
  gRNA
cacagtagccgagctcgcgg

SEQ ID NO: 133530 - DNA, 20 bp, Artificial Sequence
  mmSKRIPTE0004309_Acvr2a_7
  gRNA
gaaatgagtaggatgcctcc

SEQ ID NO: 133531 - DNA, 20 bp, Artificial Sequence
  mmSKRIPTE0004310_Acvr2a_8
  gRNA
gcgcgaggagattgtccggg

SEQ ID NO: 133532 - DNA, 20 bp, Artificial Sequence
  mmSKRIPTE0004311_Acvr2a_9
  gRNA
aggatagatatgtacgccat

SEQ ID NO: 133533 - DNA, 20 bp, Artificial Sequence
  mmSKRIPTE0004312_Adar_1
  gRNA
gggccattgtgataagcgtg

SEQ ID NO: 133534 - DNA, 20 bp, Artificial Sequence
  mmSKRIPTE0004313_Adar_2
  gRNA
acagaactggggtaacgcag

SEQ ID NO: 133535 - DNA, 20 bp, Artificial Sequence
  mmSKRIPTE0004314_Adar_3
  gRNA
tgaggagacatgcacgcgag

SEQ ID NO: 133536 - DNA, 20 bp, Artificial Sequence
  mmSKRIPTE0004315_Adar_4
  gRNA
tcggtccttagcctgaatag

SEQ ID NO: 133537 - DNA, 20 bp, Artificial Sequence
  mmSKRIPTE0004316_Adar_5
  gRNA
aagctgaaagctatgtaccg

SEQ ID NO: 133538 - DNA, 20 bp, Artificial Sequence
  mmSKRIPTE0004317_Adar_6
  gRNA
ttgaccacgtcaaaagctcg

SEQ ID NO: 133539 - DNA, 20 bp, Artificial Sequence
  mmSKRIPTE0004318_Adar_7
  gRNA
cggccgacctaggaaccacg

SEQ ID NO: 133540 - DNA, 20 bp, Artificial Sequence
  mmSKRIPTE0004319_Adar_8
  gRNA
tctggcagcacggcgccatg

SEQ ID NO: 133541 - DNA, 20 bp, Artificial Sequence
  mmSKRIPTE0004320_Adar_9
  gRNA
tcgcgtagtgtgaattacga

SEQ ID NO: 133542 - DNA, 20 bp, Artificial Sequence
  mmSKRIPTE0004321_Runx3_1
  gRNA
atttgcaggagcccataccg

SEQ ID NO: 133543 - DNA, 20 bp, Artificial Sequence
  mmSKRIPTE0004322_Runx3_2
  gRNA
ccgttgggaacggtacaccg

SEQ ID NO: 133544 - DNA, 20 bp, Artificial Sequence
  mmSKRIPTE0004323_Runx3_3
  gRNA
agaatcaagtggcggcgacg

SEQ ID NO: 133545 - DNA, 20 bp, Artificial Sequence
  mmSKRIPTE0004324_Runx3_4
  gRNA
aaagctagttcgtctcagca

SEQ ID NO: 133546 - DNA, 20 bp, Artificial Sequence
  mmSKRIPTE0004325_Runx3_5
  gRNA
ttggtgttacacgcatgcgc

SEQ ID NO: 133547 - DNA, 20 bp, Artificial Sequence
  mmSKRIPTE0004326_Runx3_6
  gRNA
tacactcgcaggtctcccga

SEQ ID NO: 133548 - DNA, 20 bp, Artificial Sequence
  mmSKRIPTE0004327_Runx3_7
  gRNA
acagaggacttgtacccccg

SEQ ID NO: 133549 - DNA, 20 bp, Artificial Sequence
  mmSKRIPTE0004328_Runx3_8
  gRNA
gtgttgcacagggcgaccgt

SEQ ID NO: 133550 - DNA, 20 bp, Artificial Sequence
  mmSKRIPTE0004329_Runx3_9
  gRNA
gctcagtagcacttacgtcg

SEQ ID NO: 133551 - DNA, 20 bp, Artificial Sequence
  mmSKRIPTE0004330_Cftr_1
  gRNA
ccactccagcttaatcctag

SEQ ID NO: 133552 - DNA, 20 bp, Artificial Sequence
  mmSKRIPTE0004331_Cftr_2
  gRNA
accatatctgtacggcagtg

SEQ ID NO: 133553 - DNA, 20 bp, Artificial Sequence
  mmSKRIPTE0004332_Cftr_3
  gRNA
tgaatgtatcttaacctgag

SEQ ID NO: 133554 - DNA, 20 bp, Artificial Sequence
  mmSKRIPTE0004333_Cftr_4
  gRNA
cgaagggcgtggataagctg

SEQ ID NO: 133555 - DNA, 20 bp, Artificial Sequence
  mmSKRIPTE0004334_Cftr_5
  gRNA
gccgtgtgactgacatacgt

SEQ ID NO: 133556 - DNA, 20 bp, Artificial Sequence
  mmSKRIPTE0004335_Cftr_6
  gRNA
ttctgcatgatgtctccgtg

SEQ ID NO: 133557 - DNA, 20 bp, Artificial Sequence
  mmSKRIPTE0004336_Cftr_7
  gRNA
atattgttgggaatcagcga

SEQ ID NO: 133558 - DNA, 20 bp, Artificial Sequence
  mmSKRIPTE0004337_Cftr_8
  gRNA
gtggcgatcatgttgctgcg

SEQ ID NO: 133559 - DNA, 20 bp, Artificial Sequence
  mmSKRIPTE0004338_Cftr_9
  gRNA
gtgttcggctaaattcaggt

SEQ ID NO: 133560 - DNA, 20 bp, Artificial Sequence
  mmSKRIPTE0004339_March8_1
  gRNA
gcgttgcccatggctacgag

SEQ ID NO: 133561 - DNA, 20 bp, Artificial Sequence
  mmSKRIPTE0004340_March8_2
  gRNA
tgtaagtgtatacggatctg

SEQ ID NO: 133562 - DNA, 20 bp, Artificial Sequence
  mmSKRIPTE0004341_March8_3
  gRNA
aggatccctgagcaacgctt

SEQ ID NO: 133563 - DNA, 20 bp, Artificial Sequence
  mmSKRIPTE0004342_March8_4
  gRNA
tggcactgcagcatacagat

SEQ ID NO: 133564 - DNA, 20 bp, Artificial Sequence
  mmSKRIPTE0004343_March8_5
  gRNA
gcccaaaatgactctgctag

SEQ ID NO: 133565 - DNA, 20 bp, Artificial Sequence
  mmSKRIPTE0004344_March8_6
  gRNA
ctaaatcagatgctacaaca

SEQ ID NO: 133566 - DNA, 20 bp, Artificial Sequence
  mmSKRIPTE0004345_March8_7
  gRNA
attaacgtctgaccatgtga

SEQ ID NO: 133567 - DNA, 20 bp, Artificial Sequence
  mmSKRIPTE0004346_March8_8
  gRNA
aagtcctccagtgaagccga

SEQ ID NO: 133568 - DNA, 20 bp, Artificial Sequence
  mmSKRIPTE0004347_March8_9
  gRNA
gacccgttcctggtgtgctg

SEQ ID NO: 133569 - DNA, 20 bp, Artificial Sequence
  mmSKRIPTE0004348_Cd4_1
  gRNA
agacatctcactacggtcag

SEQ ID NO: 133570 - DNA, 20 bp, Artificial Sequence
  mmSKRIPTE0004349_Cd4_2
  gRNA
cgggcgatgagacaggacgc

SEQ ID NO: 133571 - DNA, 20 bp, Artificial Sequence
  mmSKRIPTE0004350_Cd4_3
  gRNA
tacacagcacagtttacgag

SEQ ID NO: 133572 - DNA, 20 bp, Artificial Sequence
  mmSKRIPTE0004351_Cd4_4
  gRNA
cttgagtgtctgaaacgcag

SEQ ID NO: 133573 - DNA, 20 bp, Artificial Sequence
  mmSKRIPTE0004352_Cd4_5
  gRNA
cggggttcaagctgtaagcg

SEQ ID NO: 133574 - DNA, 20 bp, Artificial Sequence
  mmSKRIPTE0004353_Cd4_6
  gRNA
gcctcactctaagagaacta

SEQ ID NO: 133575 - DNA, 20 bp, Artificial Sequence
  mmSKRIPTE0004354_Cd4_7
  gRNA
tatcacggcctataagagtg

SEQ ID NO: 133576 - DNA, 20 bp, Artificial Sequence
  mmSKRIPTE0004355_Cd4_8
  gRNA
agtaactggaggatacaagt

SEQ ID NO: 133577 - DNA, 20 bp, Artificial Sequence
  mmSKRIPTE0004356_Cd4_9
  gRNA
tgtcactcaagggaagacgc

SEQ ID NO: 133578 - DNA, 20 bp, Artificial Sequence
  mmSKRIPTE0004357_Gpx1_1
  gRNA
tggatggtgctgagatcacg

SEQ ID NO: 133579 - DNA, 20 bp, Artificial Sequence
  mmSKRIPTE0004358_Gpx1_2
  gRNA
ctccttgtataaccgaggat

SEQ ID NO: 133580 - DNA, 20 bp, Artificial Sequence
  mmSKRIPTE0004359_Gpx1_3
  gRNA
ggtcggtcatgagcgcagtg

SEQ ID NO: 133581 - DNA, 20 bp, Artificial Sequence
  mmSKRIPTE0004360_Gpx1_4
  gRNA
tgcgcacgggaacaccgtcg

SEQ ID NO: 133582 - DNA, 20 bp, Artificial Sequence
  mmSKRIPTE0004361_Gpx1_5
  gRNA
aatccgtactagcgctcaca

SEQ ID NO: 133583 - DNA, 20 bp, Artificial Sequence
  mmSKRIPTE0004362_Gpx1_6
  gRNA
gtaagcggtgtcccgcccgt

SEQ ID NO: 133584 - DNA, 20 bp, Artificial Sequence
  mmSKRIPTE0004363_Gpx1_7
  gRNA
ctcggtgtagtcccggatcg

SEQ ID NO: 133585 - DNA, 20 bp, Artificial Sequence
  mmSKRIPTE0004364_Gpx1_8
  gRNA
ttccgcaggaaggtaaagag

SEQ ID NO: 133586 - DNA, 20 bp, Artificial Sequence
  mmSKRIPTE0004365_Gpx1_9
  gRNA
ggtgtccgaactgattgcac

SEQ ID NO: 133587 - DNA, 20 bp, Artificial Sequence
  mmSKRIPTE0004366_Traf3ip1_1
  gRNA
cagcgccatgaacgccgcag

SEQ ID NO: 133588 - DNA, 20 bp, Artificial Sequence
  mmSKRIPTE0004367_Traf3ip1_2
  gRNA
aagcagattaaaacgctgcg

SEQ ID NO: 133589 - DNA, 20 bp, Artificial Sequence
  mmSKRIPTE0004368_Traf3ip1_3
  gRNA
tgtttcatatcatacccgtg

SEQ ID NO: 133590 - DNA, 20 bp, Artificial Sequence
  mmSKRIPTE0004369_Traf3ip1_4
  gRNA
cacgacatcatcaccgaggt

SEQ ID NO: 133591 - DNA, 20 bp, Artificial Sequence
  mmSKRIPTE0004370_Traf3ip1_5
  gRNA
tctgagtgtcatgccgaccg

SEQ ID NO: 133592 - DNA, 20 bp, Artificial Sequence
  mmSKRIPTE0004371_Traf3ip1_6
  gRNA
cactggtcaaaacagcctag

SEQ ID NO: 133593 - DNA, 20 bp, Artificial Sequence
  mmSKRIPTE0004372_Traf3ip1_7
  gRNA
ggtacagcccctcaatacaa

SEQ ID NO: 133594 - DNA, 20 bp, Artificial Sequence
  mmSKRIPTE0004373_Traf3ip1_8
  gRNA
taggcacacgttcaaaagtg

SEQ ID NO: 133595 - DNA, 20 bp, Artificial Sequence
  mmSKRIPTE0004374_Traf3ip1_9
  gRNA
gtgcgcgtcaggttgaggtg

SEQ ID NO: 133596 - DNA, 20 bp, Artificial Sequence
  mmSKRIPTE0004375_Shmt2_1
  gRNA
ccgcggtcggaaaagccgag

SEQ ID NO: 133597 - DNA, 20 bp, Artificial Sequence
  mmSKRIPTE0004376_Shmt2_2
  gRNA
tctgtatcggtgtagtaccg

SEQ ID NO: 133598 - DNA, 20 bp, Artificial Sequence
  mmSKRIPTE0004377_Shmt2_3
  gRNA
cggagcgccattactccggg

SEQ ID NO: 133599 - DNA, 20 bp, Artificial Sequence
  mmSKRIPTE0004378_Shmt2_4
  gRNA
gcacttgtaaggagtactcg

SEQ ID NO: 133600 - DNA, 20 bp, Artificial Sequence
  mmSKRIPTE0004379_Shmt2_5
  gRNA
gaactggcgagaggtcaacg

SEQ ID NO: 133601 - DNA, 20 bp, Artificial Sequence
  mmSKRIPTE0004380_Shmt2_6
  gRNA
ttccacggcagatactacgg

SEQ ID NO: 133602 - DNA, 20 bp, Artificial Sequence
  mmSKRIPTE0004381_Shmt2_7
  gRNA
ccgaggagagcggaccatcg

SEQ ID NO: 133603 - DNA, 20 bp, Artificial Sequence
  mmSKRIPTE0004382_Shmt2_8
  gRNA
ggaccactcgggtaagaaca

SEQ ID NO: 133604 - DNA, 20 bp, Artificial Sequence
  mmSKRIPTE0004383_Shmt2_9
  gRNA
ttctggcgatcagacgacct

SEQ ID NO: 133605 - DNA, 20 bp, Artificial Sequence
  mmSKRIPTE0004384_Gas2l1_1
  gRNA
cggtctcgagactggctgcg

SEQ ID NO: 133606 - DNA, 20 bp, Artificial Sequence
  mmSKRIPTE0004385_Gas2l1_2
  gRNA
atcgggacccatagaactcg

SEQ ID NO: 133607 - DNA, 20 bp, Artificial Sequence
  mmSKRIPTE0004386_Gas2l1_3
  gRNA
gggacaagttggcacccacg

SEQ ID NO: 133608 - DNA, 20 bp, Artificial Sequence
  mmSKRIPTE0004387_Gas2l1_4
  gRNA
gcgacccttccgatccagtg

SEQ ID NO: 133609 - DNA, 20 bp, Artificial Sequence
  mmSKRIPTE0004388_Gas2l1_5
  gRNA
taagggcaggcattcgccga

SEQ ID NO: 133610 - DNA, 20 bp, Artificial Sequence
  mmSKRIPTE0004389_Gas2l1_6
  gRNA
ttgtgccatgtagtcccgtg

SEQ ID NO: 133611 - DNA, 20 bp, Artificial Sequence
  mmSKRIPTE0004390_Gas2l1_7
  gRNA
gggttggatcagccaccgcc

SEQ ID NO: 133612 - DNA, 20 bp, Artificial Sequence
  mmSKRIPTE0004391_Gas2l1_8
  gRNA
tagaagacgagcagcgacaa

SEQ ID NO: 133613 - DNA, 20 bp, Artificial Sequence
  mmSKRIPTE0004392_Gas2l1_9
  gRNA
ccgagacggccagcactcgt

SEQ ID NO: 133614 - DNA, 20 bp, Artificial Sequence
  mmSKRIPTE0004393_Cd300a_1
  gRNA
ctcctagctacactgacgca

SEQ ID NO: 133615 - DNA, 20 bp, Artificial Sequence
  mmSKRIPTE0004394_Cd300a_2
  gRNA
gagctgatgaaccccccgtg

SEQ ID NO: 133616 - DNA, 20 bp, Artificial Sequence
  mmSKRIPTE0004395_Cd300a_3
  gRNA
tacctacttaagcccctgtg

SEQ ID NO: 133617 - DNA, 20 bp, Artificial Sequence
  mmSKRIPTE0004396_Cd300a_4
  gRNA
cgccctaggatccaacacag

SEQ ID NO: 133618 - DNA, 20 bp, Artificial Sequence
  mmSKRIPTE0004397_Cd300a_5
  gRNA
ccacggttcagtcccgctgg

SEQ ID NO: 133619 - DNA, 20 bp, Artificial Sequence
  mmSKRIPTE0004398_Cd300a_6
  gRNA
gctgcagacaatgtaggcgt

SEQ ID NO: 133620 - DNA, 20 bp, Artificial Sequence
  mmSKRIPTE0004399_Cd300a_7
  gRNA
ttgacatggttcgtatagaa

SEQ ID NO: 133621 - DNA, 20 bp, Artificial Sequence
  mmSKRIPTE0004400_Cd300a_8
  gRNA
tctttgcacccccggctctg

SEQ ID NO: 133622 - DNA, 20 bp, Artificial Sequence
  mmSKRIPTE0004401_Cd300a_9
  gRNA
gggaatagtcatgttcacgg

SEQ ID NO: 133623 - DNA, 20 bp, Artificial Sequence
  mmSKRIPTE0004402_Lgals3_1
  gRNA
aaggcggtagaccagcgcct

SEQ ID NO: 133624 - DNA, 20 bp, Artificial Sequence
  mmSKRIPTE0004403_Lgals3_2
  gRNA
ttgtggctcactctaacgca

SEQ ID NO: 133625 - DNA, 20 bp, Artificial Sequence
  mmSKRIPTE0004404_Lgals3_3
  gRNA
tttctccgagagttacccgc

SEQ ID NO: 133626 - DNA, 20 bp, Artificial Sequence
  mmSKRIPTE0004405_Lgals3_4
  gRNA
cacagcgttctcttaccaag

SEQ ID NO: 133627 - DNA, 20 bp, Artificial Sequence
  mmSKRIPTE0004406_Lgals3_5
  gRNA
acgaagcaggacaataactg

SEQ ID NO: 133628 - DNA, 20 bp, Artificial Sequence
  mmSKRIPTE0004407_Lgals3_6
  gRNA
aacaacttccttcttaccag

SEQ ID NO: 133629 - DNA, 20 bp, Artificial Sequence
  mmSKRIPTE0004408_Lgals3_7
  gRNA
aggggtgtaattagtcaagt

SEQ ID NO: 133630 - DNA, 20 bp, Artificial Sequence
  mmSKRIPTE0004409_Lgals3_8
  gRNA
tgatcacactaacaaatgag

SEQ ID NO: 133631 - DNA, 20 bp, Artificial Sequence
  mmSKRIPTE0004410_Lgals3_9
  gRNA
aactcatgcgagtatgtatg

SEQ ID NO: 133632 - DNA, 20 bp, Artificial Sequence
  mmSKRIPTE0004411_Trim31_1
  gRNA
aacgtagtatgctatatgtg

SEQ ID NO: 133633 - DNA, 20 bp, Artificial Sequence
  mmSKRIPTE0004412_Trim31_2
  gRNA
agtccactcaggtgtaattg

SEQ ID NO: 133634 - DNA, 20 bp, Artificial Sequence
  mmSKRIPTE0004413_Trim31_3
  gRNA
cggcattcatatcgtctgtg

SEQ ID NO: 133635 - DNA, 20 bp, Artificial Sequence
  mmSKRIPTE0004414_Trim31_4
  gRNA
caatgggtgtcaatcaactg

SEQ ID NO: 133636 - DNA, 20 bp, Artificial Sequence
  mmSKRIPTE0004415_Trim31_5
  gRNA
tgtgggaggcagaaatccgg

SEQ ID NO: 133637 - DNA, 20 bp, Artificial Sequence
  mmSKRIPTE0004416_Trim31_6
  gRNA
cacttcagatgccttcatcg

SEQ ID NO: 133638 - DNA, 20 bp, Artificial Sequence
  mmSKRIPTE0004417_Trim31_7
  gRNA
ggaactagaaccacacagcg

SEQ ID NO: 133639 - DNA, 20 bp, Artificial Sequence
  mmSKRIPTE0004418_Trim31_8
  gRNA
ggttacagagttggcgcgag

SEQ ID NO: 133640 - DNA, 20 bp, Artificial Sequence
  mmSKRIPTE0004419_Trim31_9
  gRNA
gagcgcgcagagctacatat

SEQ ID NO: 133641 - DNA, 20 bp, Artificial Sequence
  mmSKRIPTE0004420_Egr1_1
  gRNA
tcagcgctagaccatcaagt

SEQ ID NO: 133642 - DNA, 20 bp, Artificial Sequence
  mmSKRIPTE0004421_Egr1_2
  gRNA
ttgaaatagaggccgattcg

SEQ ID NO: 133643 - DNA, 20 bp, Artificial Sequence
  mmSKRIPTE0004422_Egr1_3
  gRNA
atatggaaggaccggccggg

SEQ ID NO: 133644 - DNA, 20 bp, Artificial Sequence
  mmSKRIPTE0004423_Egr1_4
  gRNA
ctcacgagtagaaggaccgt

SEQ ID NO: 133645 - DNA, 20 bp, Artificial Sequence
  mmSKRIPTE0004424_Egr1_5
  gRNA
tactgagggcacactcgccg

SEQ ID NO: 133646 - DNA, 20 bp, Artificial Sequence
  mmSKRIPTE0004425_Egr1_6
  gRNA
gaatgcgctctattgcccat

SEQ ID NO: 133647 - DNA, 20 bp, Artificial Sequence
  mmSKRIPTE0004426_Egr1_7
  gRNA
gatgatgctgctgagcaacg

SEQ ID NO: 133648 - DNA, 20 bp, Artificial Sequence
  mmSKRIPTE0004427_Egr1_8
  gRNA
cgcagaccaccgcttacctg

SEQ ID NO: 133649 - DNA, 20 bp, Artificial Sequence
  mmSKRIPTE0004428_Egr1_9
  gRNA
cgctcaccttagccttaagg

SEQ ID NO: 133650 - DNA, 20 bp, Artificial Sequence
  mmSKRIPTE0004429_Il33_1
  gRNA
agtagcccgtggttatcatg

SEQ ID NO: 133651 - DNA, 20 bp, Artificial Sequence
  mmSKRIPTE0004430_Il33_2
  gRNA
actgtgttagctctccaccg

SEQ ID NO: 133652 - DNA, 20 bp, Artificial Sequence
  mmSKRIPTE0004431_Il33_3
  gRNA
tacagccgtacgatcctaca

SEQ ID NO: 133653 - DNA, 20 bp, Artificial Sequence
  mmSKRIPTE0004432_Il33_4
  gRNA
tttgaccaccatatccgtaa

SEQ ID NO: 133654 - DNA, 20 bp, Artificial Sequence
  mmSKRIPTE0004433_Il33_5
  gRNA
caatgatttcaatcacgggt

SEQ ID NO: 133655 - DNA, 20 bp, Artificial Sequence
  mmSKRIPTE0004434_Il33_6
  gRNA
tagctcttatcttccagtcg

SEQ ID NO: 133656 - DNA, 20 bp, Artificial Sequence
  mmSKRIPTE0004435_Il33_7
  gRNA
ttgtcaacaatgatgcactg

SEQ ID NO: 133657 - DNA, 20 bp, Artificial Sequence
  mmSKRIPTE0004436_Il33_8
  gRNA
gatcccattagaccattggg

SEQ ID NO: 133658 - DNA, 20 bp, Artificial Sequence
  mmSKRIPTE0004437_Il33_9
  gRNA
agatatatgacttacggcgt

SEQ ID NO: 133659 - DNA, 20 bp, Artificial Sequence
  mmSKRIPTE0004438_Grem1_1
  gRNA
caaactgagtaattcgacac

SEQ ID NO: 133660 - DNA, 20 bp, Artificial Sequence
  mmSKRIPTE0004439_Grem1_2
  gRNA
aatcgcaccgcatacactgt

SEQ ID NO: 133661 - DNA, 20 bp, Artificial Sequence
  mmSKRIPTE0004440_Grem1_3
  gRNA
agacaaaagacttacacccg

SEQ ID NO: 133662 - DNA, 20 bp, Artificial Sequence
  mmSKRIPTE0004441_Grem1_4
  gRNA
tttgacttaatccaagtcga

SEQ ID NO: 133663 - DNA, 20 bp, Artificial Sequence
  mmSKRIPTE0004442_Grem1_5
  gRNA
cctacttggcttaaacctag

SEQ ID NO: 133664 - DNA, 20 bp, Artificial Sequence
  mmSKRIPTE0004443_Grem1_6
  gRNA
tcgagatggtatgaaccctg

SEQ ID NO: 133665 - DNA, 20 bp, Artificial Sequence
  mmSKRIPTE0004444_Grem1_7
  gRNA
cgagccacttgggctcgacg

SEQ ID NO: 133666 - DNA, 20 bp, Artificial Sequence
  mmSKRIPTE0004445_Grem1_8
  gRNA
ccccaggcacatccgaaagg

SEQ ID NO: 133667 - DNA, 20 bp, Artificial Sequence
  mmSKRIPTE0004446_Grem1_9
  gRNA
ggttcttcgctgtggacgag

SEQ ID NO: 133668 - DNA, 20 bp, Artificial Sequence
  mmSKRIPTE0004447_Ptpro_1
  gRNA
aatgaacatcaatgctgtcg

SEQ ID NO: 133669 - DNA, 20 bp, Artificial Sequence
  mmSKRIPTE0004448_Ptpro_2
  gRNA
gacgtcagtgaccctgctgt

SEQ ID NO: 133670 - DNA, 20 bp, Artificial Sequence
  mmSKRIPTE0004449_Ptpro_3
  gRNA
gtgagctgacaagaacggag

SEQ ID NO: 133671 - DNA, 20 bp, Artificial Sequence
  mmSKRIPTE0004450_Ptpro_4
  gRNA
gaggagatggttaacacacc

SEQ ID NO: 133672 - DNA, 20 bp, Artificial Sequence
  mmSKRIPTE0004451_Ptpro_5
  gRNA
actgcagacggcaatcaggg

SEQ ID NO: 133673 - DNA, 20 bp, Artificial Sequence
  mmSKRIPTE0004452_Ptpro_6
  gRNA
gctttgacctttaaaagacg

SEQ ID NO: 133674 - DNA, 20 bp, Artificial Sequence
  mmSKRIPTE0004453_Ptpro_7
  gRNA
ctgtagtctagagcaacacg

SEQ ID NO: 133675 - DNA, 20 bp, Artificial Sequence
  mmSKRIPTE0004454_Ptpro_8
  gRNA
tgaattactaaccctcacca

SEQ ID NO: 133676 - DNA, 20 bp, Artificial Sequence
  mmSKRIPTE0004455_Ptpro_9
  gRNA
gcagggtgctcgttaagcta

SEQ ID NO: 133677 - DNA, 20 bp, Artificial Sequence
  mmSKRIPTE0004456_Nlrp10_1
  gRNA
ctgcaaagctggaggccgcg

SEQ ID NO: 133678 - DNA, 20 bp, Artificial Sequence
  mmSKRIPTE0004457_Nlrp10_2
  gRNA
cctacggtttctaacccccg

SEQ ID NO: 133679 - DNA, 20 bp, Artificial Sequence
  mmSKRIPTE0004458_Nlrp10_3
  gRNA
aagcagctttagtagcggga

SEQ ID NO: 133680 - DNA, 20 bp, Artificial Sequence
  mmSKRIPTE0004459_Nlrp10_4
  gRNA
actgcatcgactaccgagcg

SEQ ID NO: 133681 - DNA, 20 bp, Artificial Sequence
  mmSKRIPTE0004460_Nlrp10_5
  gRNA
ttcagatcctgccttaccga

SEQ ID NO: 133682 - DNA, 20 bp, Artificial Sequence
  mmSKRIPTE0004461_Nlrp10_6
  gRNA
agatactgagcacctactag

SEQ ID NO: 133683 - DNA, 20 bp, Artificial Sequence
  mmSKRIPTE0004462_Nlrp10_7
  gRNA
ccgcccatagtggtgatgca

SEQ ID NO: 133684 - DNA, 20 bp, Artificial Sequence
  mmSKRIPTE0004463_Nlrp10_8
  gRNA
acctatgggatcgactcatg

SEQ ID NO: 133685 - DNA, 20 bp, Artificial Sequence
  mmSKRIPTE0004464_Nlrp10_9
  gRNA
ttggatgttagcgtagaatg

SEQ ID NO: 133686 - DNA, 20 bp, Artificial Sequence
  mmSKRIPTE0004465_Fgf3_1
  gRNA
cgtttacgagcacctcggcg

SEQ ID NO: 133687 - DNA, 20 bp, Artificial Sequence
  mmSKRIPTE0004466_Fgf3_2
  gRNA
ccattcaccgacacgtacca

SEQ ID NO: 133688 - DNA, 20 bp, Artificial Sequence
  mmSKRIPTE0004467_Fgf3_3
  gRNA
tcagtccgaagacgccgccg

SEQ ID NO: 133689 - DNA, 20 bp, Artificial Sequence
  mmSKRIPTE0004468_Fgf3_4
  gRNA
gattaaggtctcccgcacag

SEQ ID NO: 133690 - DNA, 20 bp, Artificial Sequence
  mmSKRIPTE0004469_Fgf3_5
  gRNA
aacccagctggccaactacg

SEQ ID NO: 133691 - DNA, 20 bp, Artificial Sequence
  mmSKRIPTE0004470_Fgf3_6
  gRNA
tgtaccgcacagggtccagt

SEQ ID NO: 133692 - DNA, 20 bp, Artificial Sequence
  mmSKRIPTE0004471_Fgf3_7
  gRNA
gtctggttggaagtcctggt

SEQ ID NO: 133693 - DNA, 20 bp, Artificial Sequence
  mmSKRIPTE0004472_Fgf3_8
  gRNA
tgcctctatctaggacgtgg

SEQ ID NO: 133694 - DNA, 20 bp, Artificial Sequence
  mmSKRIPTE0004473_Fgf3_9
  gRNA
tggtagcgcagtagagcttg

SEQ ID NO: 133695 - DNA, 20 bp, Artificial Sequence
  mmSKRIPTE0004474_Adam9_1
  gRNA
ccacgcaggtgggatcaatg

SEQ ID NO: 133696 - DNA, 20 bp, Artificial Sequence
  mmSKRIPTE0004475_Adam9_2
  gRNA
agtgcacactctatggtacg

SEQ ID NO: 133697 - DNA, 20 bp, Artificial Sequence
  mmSKRIPTE0004476_Adam9_3
  gRNA
gattcgcttagcaaactacc

SEQ ID NO: 133698 - DNA, 20 bp, Artificial Sequence
  mmSKRIPTE0004477_Adam9_4
  gRNA
gctctgaatcaactccggaa

SEQ ID NO: 133699 - DNA, 20 bp, Artificial Sequence
  mmSKRIPTE0004478_Adam9_5
  gRNA
tcctgtcggagctaagtacg

SEQ ID NO: 133700 - DNA, 20 bp, Artificial Sequence
  mmSKRIPTE0004479_Adam9_6
  gRNA
atgtcgtactgaaaagacga

SEQ ID NO: 133701 - DNA, 20 bp, Artificial Sequence
  mmSKRIPTE0004480_Adam9_7
  gRNA
caaatgagccgatcccaatg

SEQ ID NO: 133702 - DNA, 20 bp, Artificial Sequence
  mmSKRIPTE0004481_Adam9_8
  gRNA
tcatccttgcaaccccgcgg

SEQ ID NO: 133703 - DNA, 20 bp, Artificial Sequence
  mmSKRIPTE0004482_Adam9_9
  gRNA
agtcgaggcaccaaatgctg

SEQ ID NO: 133704 - DNA, 20 bp, Artificial Sequence
  mmSKRIPTE0004483_Cyld_1
  gRNA
actacactcagataacgctg

SEQ ID NO: 133705 - DNA, 20 bp, Artificial Sequence
  mmSKRIPTE0004484_Cyld_2
  gRNA
gagctaataccatgttgcaa

SEQ ID NO: 133706 - DNA, 20 bp, Artificial Sequence
  mmSKRIPTE0004485_Cyld_3
  gRNA
cggataaccccatagaacgg

SEQ ID NO: 133707 - DNA, 20 bp, Artificial Sequence
  mmSKRIPTE0004486_Cyld_4
  gRNA
acgatccggacatctcagct

SEQ ID NO: 133708 - DNA, 20 bp, Artificial Sequence
  mmSKRIPTE0004487_Cyld_5
  gRNA
gaggacctttattagcggag

SEQ ID NO: 133709 - DNA, 20 bp, Artificial Sequence
  mmSKRIPTE0004488_Cyld_6
  gRNA
attgcagtaacatgctgacg

SEQ ID NO: 133710 - DNA, 20 bp, Artificial Sequence
  mmSKRIPTE0004489_Cyld_7
  gRNA
ataaccaggttatccgcagt

SEQ ID NO: 133711 - DNA, 20 bp, Artificial Sequence
  mmSKRIPTE0004490_Cyld_8
  gRNA
gtacatccaagaccgttctg

SEQ ID NO: 133712 - DNA, 20 bp, Artificial Sequence
  mmSKRIPTE0004491_Cyld_9
  gRNA
gccaccccatgaattgtcag

SEQ ID NO: 133713 - DNA, 20 bp, Artificial Sequence
  mmSKRIPTE0004492_Sin3a_1
  gRNA
aatcggaggactacatgtac

SEQ ID NO: 133714 - DNA, 20 bp, Artificial Sequence
  mmSKRIPTE0004493_Sin3a_2
  gRNA
tcatcacaccagcgaactcg

SEQ ID NO: 133715 - DNA, 20 bp, Artificial Sequence
  mmSKRIPTE0004494_Sin3a_3
  gRNA
tagtagtggtctcttaatcg

SEQ ID NO: 133716 - DNA, 20 bp, Artificial Sequence
  mmSKRIPTE0004495_Sin3a_4
  gRNA
ctgatatcatcgatggcctg

SEQ ID NO: 133717 - DNA, 20 bp, Artificial Sequence
  mmSKRIPTE0004496_Sin3a_5
  gRNA
agagcccagtcgtttacaag

SEQ ID NO: 133718 - DNA, 20 bp, Artificial Sequence
  mmSKRIPTE0004497_Sin3a_6
  gRNA
ttggctattctaatgcagct

SEQ ID NO: 133719 - DNA, 20 bp, Artificial Sequence
  mmSKRIPTE0004498_Sin3a_7
  gRNA
tacagcatgtgggaatcgag

SEQ ID NO: 133720 - DNA, 20 bp, Artificial Sequence
  mmSKRIPTE0004499_Sin3a_8
  gRNA
aatggcagaacatacgttag

SEQ ID NO: 133721 - DNA, 20 bp, Artificial Sequence
  mmSKRIPTE0004500_Sin3a_9
  gRNA
caggctacagaagagaacgc

SEQ ID NO: 133722 - DNA, 20 bp, Artificial Sequence
  mmSKRIPTE0004501_Rbp1_1
  gRNA
acgaccgcaagtgcatggtg

SEQ ID NO: 133723 - DNA, 20 bp, Artificial Sequence
  mmSKRIPTE0004502_Rbp1_2
  gRNA
aaaggattccctaggtagcg

SEQ ID NO: 133724 - DNA, 20 bp, Artificial Sequence
  mmSKRIPTE0004503_Rbp1_3
  gRNA
tcagcgtgcggatgatcatg

SEQ ID NO: 133725 - DNA, 20 bp, Artificial Sequence
  mmSKRIPTE0004504_Rbp1_4
  gRNA
ggccacgttgacgtctacaa

SEQ ID NO: 133726 - DNA, 20 bp, Artificial Sequence
  mmSKRIPTE0004505_Rbp1_5
  gRNA
gatgacgctagcaaacctga

SEQ ID NO: 133727 - DNA, 20 bp, Artificial Sequence
  mmSKRIPTE0004506_Rbp1_6
  gRNA
ggtgtgtttagcataccctg

SEQ ID NO: 133728 - DNA, 20 bp, Artificial Sequence
  mmSKRIPTE0004507_Rbp1_7
  gRNA
ggtgatgaacttcacctggt

SEQ ID NO: 133729 - DNA, 20 bp, Artificial Sequence
  mmSKRIPTE0004508_Rbp1_8
  gRNA
ggtgacgctaaggagtcgag

SEQ ID NO: 133730 - DNA, 20 bp, Artificial Sequence
  mmSKRIPTE0004509_Rbp1_9
  gRNA
tgtccgatagctctccccgg

SEQ ID NO: 133731 - DNA, 20 bp, Artificial Sequence
  mmSKRIPTE0004510_Cybb_1
  gRNA
cgactgagtatagagacggc

SEQ ID NO: 133732 - DNA, 20 bp, Artificial Sequence
  mmSKRIPTE0004511_Cybb_2
  gRNA
atgcctagggtgcaacacga

SEQ ID NO: 133733 - DNA, 20 bp, Artificial Sequence
  mmSKRIPTE0004512_Cybb_3
  gRNA
aatgtcccagtaatgctggt

SEQ ID NO: 133734 - DNA, 20 bp, Artificial Sequence
  mmSKRIPTE0004513_Cybb_4
  gRNA
aattgtacgtggacagactg

SEQ ID NO: 133735 - DNA, 20 bp, Artificial Sequence
  mmSKRIPTE0004514_Cybb_5
  gRNA
aggatcccgaatttaaacta

SEQ ID NO: 133736 - DNA, 20 bp, Artificial Sequence
  mmSKRIPTE0004515_Cybb_6
  gRNA
ttatactcgaaaactccttg

SEQ ID NO: 133737 - DNA, 20 bp, Artificial Sequence
  mmSKRIPTE0004516_Cybb_7
  gRNA
gttactggttaaaaagcgca

SEQ ID NO: 133738 - DNA, 20 bp, Artificial Sequence
  mmSKRIPTE0004517_Cybb_8
  gRNA
atccaaagtgttgctcgaca

SEQ ID NO: 133739 - DNA, 20 bp, Artificial Sequence
  mmSKRIPTE0004518_Cybb_9
  gRNA
aaatgaagtggactccacgc

SEQ ID NO: 133740 - DNA, 20 bp, Artificial Sequence
  mmSKRIPTE0004519_Stat1_1
  gRNA
gcgaccgcttcccagtcatg

SEQ ID NO: 133741 - DNA, 20 bp, Artificial Sequence
  mmSKRIPTE0004520_Stat1_2
  gRNA
cagaactgttctgttccgag

SEQ ID NO: 133742 - DNA, 20 bp, Artificial Sequence
  mmSKRIPTE0004521_Stat1_3
  gRNA
tatgccagttgcatgcgcgg

SEQ ID NO: 133743 - DNA, 20 bp, Artificial Sequence
  mmSKRIPTE0004522_Stat1_4
  gRNA
cgagcaaaggttaagcggga

SEQ ID NO: 133744 - DNA, 20 bp, Artificial Sequence
  mmSKRIPTE0004523_Stat1_5
  gRNA
aaaggccaaagtcggaactg

SEQ ID NO: 133745 - DNA, 20 bp, Artificial Sequence
  mmSKRIPTE0004524_Stat1_6
  gRNA
gcaactactgaacttcgaga

SEQ ID NO: 133746 - DNA, 20 bp, Artificial Sequence
  mmSKRIPTE0004525_Stat1_7
  gRNA
gtggaacggtcccagaacgg

SEQ ID NO: 133747 - DNA, 20 bp, Artificial Sequence
  mmSKRIPTE0004526_Stat1_8
  gRNA
agagtcccaacagcacccgt

SEQ ID NO: 133748 - DNA, 20 bp, Artificial Sequence
  mmSKRIPTE0004527_Stat1_9
  gRNA
gaggggcagtcgttcctgag

SEQ ID NO: 133749 - DNA, 20 bp, Artificial Sequence
  mmSKRIPTE0004528_Sgpl1_1
  gRNA
aggcttatggagaattcacg

SEQ ID NO: 133750 - DNA, 20 bp, Artificial Sequence
  mmSKRIPTE0004529_Sgpl1_2
  gRNA
gagaaggtttctgatcacgc

SEQ ID NO: 133751 - DNA, 20 bp, Artificial Sequence
  mmSKRIPTE0004530_Sgpl1_3
  gRNA
tctagtatcatggtatcacg

SEQ ID NO: 133752 - DNA, 20 bp, Artificial Sequence
  mmSKRIPTE0004531_Sgpl1_4
  gRNA
acaagggtcaaagttcagcg

SEQ ID NO: 133753 - DNA, 20 bp, Artificial Sequence
  mmSKRIPTE0004532_Sgpl1_5
  gRNA
ccttcattgctcatacacga

SEQ ID NO: 133754 - DNA, 20 bp, Artificial Sequence
  mmSKRIPTE0004533_Sgpl1_6
  gRNA
attgagcatatccgttccgt

SEQ ID NO: 133755 - DNA, 20 bp, Artificial Sequence
  mmSKRIPTE0004534_Sgpl1_7
  gRNA
gtgagtcgctcgcagaaccg

SEQ ID NO: 133756 - DNA, 20 bp, Artificial Sequence
  mmSKRIPTE0004535_Sgpl1_8
  gRNA
ctcaggagctgtgtacaatg

SEQ ID NO: 133757 - DNA, 20 bp, Artificial Sequence
  mmSKRIPTE0004536_Sgpl1_9
  gRNA
acagaaccatcaaggtaatg

SEQ ID NO: 133758 - DNA, 20 bp, Artificial Sequence
  mmSKRIPTE0004537_Flot2_1
  gRNA
tgcctaacgtaatagcacca

SEQ ID NO: 133759 - DNA, 20 bp, Artificial Sequence
  mmSKRIPTE0004538_Flot2_2
  gRNA
gtcatgatcttcacctgtcg

SEQ ID NO: 133760 - DNA, 20 bp, Artificial Sequence
  mmSKRIPTE0004539_Flot2_3
  gRNA
agaatattgagacgtcggag

SEQ ID NO: 133761 - DNA, 20 bp, Artificial Sequence
  mmSKRIPTE0004540_Flot2_4
  gRNA
tctacgctctatcctaggtg

SEQ ID NO: 133762 - DNA, 20 bp, Artificial Sequence
  mmSKRIPTE0004541_Flot2_5
  gRNA
ctttcatcgtatattctgtg

SEQ ID NO: 133763 - DNA, 20 bp, Artificial Sequence
  mmSKRIPTE0004542_Flot2_6
  gRNA
gtctctacgtcctcacagcg

SEQ ID NO: 133764 - DNA, 20 bp, Artificial Sequence
  mmSKRIPTE0004543_Flot2_7
  gRNA
tgtcccctgcaccatcacgg

SEQ ID NO: 133765 - DNA, 20 bp, Artificial Sequence
  mmSKRIPTE0004544_Flot2_8
  gRNA
gcaagcctgagtgcacgcaa

SEQ ID NO: 133766 - DNA, 20 bp, Artificial Sequence
  mmSKRIPTE0004545_Flot2_9
  gRNA
tgcccatgcggccaacatcg

SEQ ID NO: 133767 - DNA, 20 bp, Artificial Sequence
  mmSKRIPTE0004546_Ccl1_1
  gRNA
cgcctcaactaacaaaacgt

SEQ ID NO: 133768 - DNA, 20 bp, Artificial Sequence
  mmSKRIPTE0004547_Ccl1_2
  gRNA
aggtgaacccctgctaaccg

SEQ ID NO: 133769 - DNA, 20 bp, Artificial Sequence
  mmSKRIPTE0004548_Ccl1_3
  gRNA
ggaattctagtctccacggt

SEQ ID NO: 133770 - DNA, 20 bp, Artificial Sequence
  mmSKRIPTE0004549_Ccl1_4
  gRNA
gcatggagaccacatcccga

SEQ ID NO: 133771 - DNA, 20 bp, Artificial Sequence
  mmSKRIPTE0004550_Ccl1_5
  gRNA
ataagcttccaatgtaacac

SEQ ID NO: 133772 - DNA, 20 bp, Artificial Sequence
  mmSKRIPTE0004551_Ccl1_6
  gRNA
aggtgtagagtgacactagg

SEQ ID NO: 133773 - DNA, 20 bp, Artificial Sequence
  mmSKRIPTE0004552_Ccl1_7
  gRNA
tggctccaccagacattcgg

SEQ ID NO: 133774 - DNA, 20 bp, Artificial Sequence
  mmSKRIPTE0004553_Ccl1_8
  gRNA
catagcttatcacatgactg

SEQ ID NO: 133775 - DNA, 20 bp, Artificial Sequence
  mmSKRIPTE0004554_Ccl1_9
  gRNA
tcaaaacttatcctatacag

SEQ ID NO: 133776 - DNA, 20 bp, Artificial Sequence
  mmSKRIPTE0004555_Ripor2_1
  gRNA
tgtacatggacatccttcgc

SEQ ID NO: 133777 - DNA, 20 bp, Artificial Sequence
  mmSKRIPTE0004556_Ripor2_2
  gRNA
cggagacgcttagtaccggg

SEQ ID NO: 133778 - DNA, 20 bp, Artificial Sequence
  mmSKRIPTE0004557_Ripor2_3
  gRNA
gcccaccctgagtataacgt

SEQ ID NO: 133779 - DNA, 20 bp, Artificial Sequence
  mmSKRIPTE0004558_Ripor2_4
  gRNA
aaaacaaggaacttactacc

SEQ ID NO: 133780 - DNA, 20 bp, Artificial Sequence
  mmSKRIPTE0004559_Ripor2_5
  gRNA
gtggagcagtatcattcgga

SEQ ID NO: 133781 - DNA, 20 bp, Artificial Sequence
  mmSKRIPTE0004560_Ripor2_6
  gRNA
aggaggatgtgtcataacca

SEQ ID NO: 133782 - DNA, 20 bp, Artificial Sequence
  mmSKRIPTE0004561_Ripor2_7
  gRNA
tagcgatcaccctaatagtg

SEQ ID NO: 133783 - DNA, 20 bp, Artificial Sequence
  mmSKRIPTE0004562_Ripor2_8
  gRNA
aaaggtgggaaacggcacgt

SEQ ID NO: 133784 - DNA, 20 bp, Artificial Sequence
  mmSKRIPTE0004563_Ripor2_9
  gRNA
cagcccactgaaacctgcga

SEQ ID NO: 133785 - DNA, 20 bp, Artificial Sequence
  mmSKRIPTE0004564_Dapk1_1
  gRNA
ctggcatggctattactccg

SEQ ID NO: 133786 - DNA, 20 bp, Artificial Sequence
  mmSKRIPTE0004565_Dapk1_2
  gRNA
tagaaggagacattggacgt

SEQ ID NO: 133787 - DNA, 20 bp, Artificial Sequence
  mmSKRIPTE0004566_Dapk1_3
  gRNA
atggatccaccagcaaagcg

SEQ ID NO: 133788 - DNA, 20 bp, Artificial Sequence
  mmSKRIPTE0004567_Dapk1_4
  gRNA
atccacatggccatgccgag

SEQ ID NO: 133789 - DNA, 20 bp, Artificial Sequence
  mmSKRIPTE0004568_Dapk1_5
  gRNA
ttacagttactcataaaacg

SEQ ID NO: 133790 - DNA, 20 bp, Artificial Sequence
  mmSKRIPTE0004569_Dapk1_6
  gRNA
cctccattactgattgccgc

SEQ ID NO: 133791 - DNA, 20 bp, Artificial Sequence
  mmSKRIPTE0004570_Dapk1_7
  gRNA
tgatgcggacatccgtctgt

SEQ ID NO: 133792 - DNA, 20 bp, Artificial Sequence
  mmSKRIPTE0004571_Dapk1_8
  gRNA
aagtctatgatcttgatccg

SEQ ID NO: 133793 - DNA, 20 bp, Artificial Sequence
  mmSKRIPTE0004572_Dapk1_9
  gRNA
gtgactcggagcacttcgaa

SEQ ID NO: 133794 - DNA, 20 bp, Artificial Sequence
  mmSKRIPTE0004573_Wnt10b_1
  gRNA
aaggctgtctcggaaccgga

SEQ ID NO: 133795 - DNA, 20 bp, Artificial Sequence
  mmSKRIPTE0004574_Wnt10b_2
  gRNA
ccaagaacaggagacccgcg

SEQ ID NO: 133796 - DNA, 20 bp, Artificial Sequence
  mmSKRIPTE0004575_Wnt10b_3
  gRNA
agcctcgcctaggcacgacg

SEQ ID NO: 133797 - DNA, 20 bp, Artificial Sequence
  mmSKRIPTE0004576_Wnt10b_4
  gRNA
tttctgtctagggtttatcg

SEQ ID NO: 133798 - DNA, 20 bp, Artificial Sequence
  mmSKRIPTE0004577_Wnt10b_5
  gRNA
gttgtgggtatcgataaaga

SEQ ID NO: 133799 - DNA, 20 bp, Artificial Sequence
  mmSKRIPTE0004578_Wnt10b_6
  gRNA
gcggatccacaacaacaggg

SEQ ID NO: 133800 - DNA, 20 bp, Artificial Sequence
  mmSKRIPTE0004579_Wnt10b_7
  gRNA
caagcgcggtgagcctgacg

SEQ ID NO: 133801 - DNA, 20 bp, Artificial Sequence
  mmSKRIPTE0004580_Wnt10b_8
  gRNA
aagtaggaacctgagcccga

SEQ ID NO: 133802 - DNA, 20 bp, Artificial Sequence
  mmSKRIPTE0004581_Wnt10b_9
  gRNA
cgttaccacctacaacgtca

SEQ ID NO: 133803 - DNA, 20 bp, Artificial Sequence
  mmSKRIPTE0004582_Txnrd2_1
  gRNA
tgtctggattgcctacctcg

SEQ ID NO: 133804 - DNA, 20 bp, Artificial Sequence
  mmSKRIPTE0004583_Txnrd2_2
  gRNA
gagcacactcgggatctgtg

SEQ ID NO: 133805 - DNA, 20 bp, Artificial Sequence
  mmSKRIPTE0004584_Txnrd2_3
  gRNA
taaccccagaaggccacggt

SEQ ID NO: 133806 - DNA, 20 bp, Artificial Sequence
  mmSKRIPTE0004585_Txnrd2_4
  gRNA
gctgggacttcgaagccttg

SEQ ID NO: 133807 - DNA, 20 bp, Artificial Sequence
  mmSKRIPTE0004586_Txnrd2_5
  gRNA
aagccatgactcctagacga

SEQ ID NO: 133808 - DNA, 20 bp, Artificial Sequence
  mmSKRIPTE0004587_Txnrd2_6
  gRNA
aggatgcgagaagcctactg

SEQ ID NO: 133809 - DNA, 20 bp, Artificial Sequence
  mmSKRIPTE0004588_Txnrd2_7
  gRNA
taacatgagagttctcgtgg

SEQ ID NO: 133810 - DNA, 20 bp, Artificial Sequence
  mmSKRIPTE0004589_Txnrd2_8
  gRNA
tcttatttgtgcggacagtg

SEQ ID NO: 133811 - DNA, 20 bp, Artificial Sequence
  mmSKRIPTE0004590_Txnrd2_9
  gRNA
cagtagtgacttaaccctcg

SEQ ID NO: 133812 - DNA, 20 bp, Artificial Sequence
  mmSKRIPTE0004591_Sod1_1
  gRNA
tcaggcctataaaagctccg

SEQ ID NO: 133813 - DNA, 20 bp, Artificial Sequence
  mmSKRIPTE0004592_Sod1_2
  gRNA
gtgtaaatactcctgcacca

SEQ ID NO: 133814 - DNA, 20 bp, Artificial Sequence
  mmSKRIPTE0004593_Sod1_3
  gRNA
aaggaccgcgcaaaaaaacg

SEQ ID NO: 133815 - DNA, 20 bp, Artificial Sequence
  mmSKRIPTE0004594_Sod1_4
  gRNA
acggaaccaatcgctacccg

SEQ ID NO: 133816 - DNA, 20 bp, Artificial Sequence
  mmSKRIPTE0004595_Sod1_5
  gRNA
gcggactgagaaagttcccg

SEQ ID NO: 133817 - DNA, 20 bp, Artificial Sequence
  mmSKRIPTE0004596_Sod1_6
  gRNA
cagaagctattctagcacgt

SEQ ID NO: 133818 - DNA, 20 bp, Artificial Sequence
  mmSKRIPTE0004597_Sod1_7
  gRNA
atggggacaatacacaaggt

SEQ ID NO: 133819 - DNA, 20 bp, Artificial Sequence
  mmSKRIPTE0004598_Sod1_8
  gRNA
agcagcacgctctgtatgca

SEQ ID NO: 133820 - DNA, 20 bp, Artificial Sequence
  mmSKRIPTE0004599_Sod1_9
  gRNA
cagtgcagctacttacacca

SEQ ID NO: 133821 - DNA, 20 bp, Artificial Sequence
  mmSKRIPTE0004600_Cnpy3_1
  gRNA
acgcaaccaatgggttcgct

SEQ ID NO: 133822 - DNA, 20 bp, Artificial Sequence
  mmSKRIPTE0004601_Cnpy3_2
  gRNA
gcggcttgcgaaaccgacca

SEQ ID NO: 133823 - DNA, 20 bp, Artificial Sequence
  mmSKRIPTE0004602_Cnpy3_3
  gRNA
ccgttgccgtggttacccag

SEQ ID NO: 133824 - DNA, 20 bp, Artificial Sequence
  mmSKRIPTE0004603_Cnpy3_4
  gRNA
gctgggcaatcgcacccagt

SEQ ID NO: 133825 - DNA, 20 bp, Artificial Sequence
  mmSKRIPTE0004604_Cnpy3_5
  gRNA
tacaccaagtcgtgagtgca

SEQ ID NO: 133826 - DNA, 20 bp, Artificial Sequence
  mmSKRIPTE0004605_Cnpy3_6
  gRNA
tttcgacaaagaccttgttg

SEQ ID NO: 133827 - DNA, 20 bp, Artificial Sequence
  mmSKRIPTE0004606_Cnpy3_7
  gRNA
ggtaaagcgatgggagttcg

SEQ ID NO: 133828 - DNA, 20 bp, Artificial Sequence
  mmSKRIPTE0004607_Cnpy3_8
  gRNA
cagccggacccagagcagag

SEQ ID NO: 133829 - DNA, 20 bp, Artificial Sequence
  mmSKRIPTE0004608_Cnpy3_9
  gRNA
actggatcgtgagatgcaag

SEQ ID NO: 133830 - DNA, 20 bp, Artificial Sequence
  mmSKRIPTE0004609_Cd70_1
  gRNA
ccctgcatcggacatccccg

SEQ ID NO: 133831 - DNA, 20 bp, Artificial Sequence
  mmSKRIPTE0004610_Cd70_2
  gRNA
agaaggtctcatcagcgttg

SEQ ID NO: 133832 - DNA, 20 bp, Artificial Sequence
  mmSKRIPTE0004611_Cd70_3
  gRNA
tgaaacccatcagtgcggag

SEQ ID NO: 133833 - DNA, 20 bp, Artificial Sequence
  mmSKRIPTE0004612_Cd70_4
  gRNA
aaggaccccacactgcgctg

SEQ ID NO: 133834 - DNA, 20 bp, Artificial Sequence
  mmSKRIPTE0004613_Cd70_5
  gRNA
tatatagtacacatatccgt

SEQ ID NO: 133835 - DNA, 20 bp, Artificial Sequence
  mmSKRIPTE0004614_Cd70_6
  gRNA
aacaggggataacttaactg

SEQ ID NO: 133836 - DNA, 20 bp, Artificial Sequence
  mmSKRIPTE0004615_Cd70_7
  gRNA
tcccgctccagcgaacccag

SEQ ID NO: 133837 - DNA, 20 bp, Artificial Sequence
  mmSKRIPTE0004616_Cd70_8
  gRNA
ttgggaaggtccttcacaca

SEQ ID NO: 133838 - DNA, 20 bp, Artificial Sequence
  mmSKRIPTE0004617_Cd70_9
  gRNA
ctttggacaggactgtacag

SEQ ID NO: 133839 - DNA, 20 bp, Artificial Sequence
  mmSKRIPTE0004618_Card9_1
  gRNA
agcccaactagcattagcct

SEQ ID NO: 133840 - DNA, 20 bp, Artificial Sequence
  mmSKRIPTE0004619_Card9_2
  gRNA
acagatgctcagcctcggcg

SEQ ID NO: 133841 - DNA, 20 bp, Artificial Sequence
  mmSKRIPTE0004620_Card9_3
  gRNA
agcatagctagctggccgtg

SEQ ID NO: 133842 - DNA, 20 bp, Artificial Sequence
  mmSKRIPTE0004621_Card9_4
  gRNA
agagcttcgagaactaccgc

SEQ ID NO: 133843 - DNA, 20 bp, Artificial Sequence
  mmSKRIPTE0004622_Card9_5
  gRNA
gcacctgctcctcatcatcg

SEQ ID NO: 133844 - DNA, 20 bp, Artificial Sequence
  mmSKRIPTE0004623_Card9_6
  gRNA
attataaccgcagcctacag

SEQ ID NO: 133845 - DNA, 20 bp, Artificial Sequence
  mmSKRIPTE0004624_Card9_7
  gRNA
tccattgagagggaccaggt

SEQ ID NO: 133846 - DNA, 20 bp, Artificial Sequence
  mmSKRIPTE0004625_Card9_8
  gRNA
gaaccgtgacctgcagcttg

SEQ ID NO: 133847 - DNA, 20 bp, Artificial Sequence
  mmSKRIPTE0004626_Card9_9
  gRNA
gtgtactatcagaggcatgt

SEQ ID NO: 133848 - DNA, 20 bp, Artificial Sequence
  mmSKRIPTE0004627_Pax1_1
  gRNA
atgaacgcgggatactgacg

SEQ ID NO: 133849 - DNA, 20 bp, Artificial Sequence
  mmSKRIPTE0004628_Pax1_2
  gRNA
tccaggatgcacacgatcag

SEQ ID NO: 133850 - DNA, 20 bp, Artificial Sequence
  mmSKRIPTE0004629_Pax1_3
  gRNA
gtgcccatcttagtgcccgt

SEQ ID NO: 133851 - DNA, 20 bp, Artificial Sequence
  mmSKRIPTE0004630_Pax1_4
  gRNA
accgccacaccagctccgtg

SEQ ID NO: 133852 - DNA, 20 bp, Artificial Sequence
  mmSKRIPTE0004631_Pax1_5
  gRNA
ctccacgattcgtaggcgga

SEQ ID NO: 133853 - DNA, 20 bp, Artificial Sequence
  mmSKRIPTE0004632_Pax1_6
  gRNA
ggctcgacttcttcaatccg

SEQ ID NO: 133854 - DNA, 20 bp, Artificial Sequence
  mmSKRIPTE0004633_Pax1_7
  gRNA
tggagcaaacaggttagtcg

SEQ ID NO: 133855 - DNA, 20 bp, Artificial Sequence
  mmSKRIPTE0004634_Pax1_8
  gRNA
cgtgactgtagagattgacg

SEQ ID NO: 133856 - DNA, 20 bp, Artificial Sequence
  mmSKRIPTE0004635_Pax1_9
  gRNA
aacaccggcgggttactcaa

SEQ ID NO: 133857 - DNA, 20 bp, Artificial Sequence
  mmSKRIPTE0004636_Fgg_1
  gRNA
tcggggttccgactacccag

SEQ ID NO: 133858 - DNA, 20 bp, Artificial Sequence
  mmSKRIPTE0004637_Fgg_2
  gRNA
gaggaggtgactcctcggtg

SEQ ID NO: 133859 - DNA, 20 bp, Artificial Sequence
  mmSKRIPTE0004638_Fgg_3
  gRNA
ttggggaaaagaatcgaacg

SEQ ID NO: 133860 - DNA, 20 bp, Artificial Sequence
  mmSKRIPTE0004639_Fgg_4
  gRNA
ttgagtaagtaccacctgca

SEQ ID NO: 133861 - DNA, 20 bp, Artificial Sequence
  mmSKRIPTE0004640_Fgg_5
  gRNA
taaaacagtatggcttcgga

SEQ ID NO: 133862 - DNA, 20 bp, Artificial Sequence
  mmSKRIPTE0004641_Fgg_6
  gRNA
ttagtgtactgtgaaatcga

SEQ ID NO: 133863 - DNA, 20 bp, Artificial Sequence
  mmSKRIPTE0004642_Fgg_7
  gRNA
actgaccaacgtcgctccag

SEQ ID NO: 133864 - DNA, 20 bp, Artificial Sequence
  mmSKRIPTE0004643_Fgg_8
  gRNA
cataccgaatgcttgtctcg

SEQ ID NO: 133865 - DNA, 20 bp, Artificial Sequence
  mmSKRIPTE0004644_Fgg_9
  gRNA
ctggaagtagttgcaacacg

SEQ ID NO: 133866 - DNA, 20 bp, Artificial Sequence
  mmSKRIPTE0004645_Ctps_1
  gRNA
tggtcacctacacaatgacc

SEQ ID NO: 133867 - DNA, 20 bp, Artificial Sequence
  mmSKRIPTE0004646_Ctps_2
  gRNA
accgccaccgatttgaggtg

SEQ ID NO: 133868 - DNA, 20 bp, Artificial Sequence
  mmSKRIPTE0004647_Ctps_3
  gRNA
ccaccccttctaagcccgag

SEQ ID NO: 133869 - DNA, 20 bp, Artificial Sequence
  mmSKRIPTE0004648_Ctps_4
  gRNA
ctgcactgtcacgaagactg

SEQ ID NO: 133870 - DNA, 20 bp, Artificial Sequence
  mmSKRIPTE0004649_Ctps_5
  gRNA
tcgagcaggtctccagcaag

SEQ ID NO: 133871 - DNA, 20 bp, Artificial Sequence
  mmSKRIPTE0004650_Ctps_6
  gRNA
ttaatgttgagctactgggg

SEQ ID NO: 133872 - DNA, 20 bp, Artificial Sequence
  mmSKRIPTE0004651_Ctps_7
  gRNA
caagctaaccaccatactgt

SEQ ID NO: 133873 - DNA, 20 bp, Artificial Sequence
  mmSKRIPTE0004652_Ctps_8
  gRNA
atcgatgtactagtgcacca

SEQ ID NO: 133874 - DNA, 20 bp, Artificial Sequence
  mmSKRIPTE0004653_Ctps_9
  gRNA
acacgtgctgcatataaccg

SEQ ID NO: 133875 - DNA, 20 bp, Artificial Sequence
  mmSKRIPTE0004654_Cdc42_1
  gRNA
actgagatttggtatcctcg

SEQ ID NO: 133876 - DNA, 20 bp, Artificial Sequence
  mmSKRIPTE0004655_Cdc42_2
  gRNA
gcatcctcgagaaccgagag

SEQ ID NO: 133877 - DNA, 20 bp, Artificial Sequence
  mmSKRIPTE0004656_Cdc42_3
  gRNA
cagaagacgctcccgcaggg

SEQ ID NO: 133878 - DNA, 20 bp, Artificial Sequence
  mmSKRIPTE0004657_Cdc42_4
  gRNA
caccactcaaaaatggccag

SEQ ID NO: 133879 - DNA, 20 bp, Artificial Sequence
  mmSKRIPTE0004658_Cdc42_5
  gRNA
gaatcatcctagaaattgtg

SEQ ID NO: 133880 - DNA, 20 bp, Artificial Sequence
  mmSKRIPTE0004659_Cdc42_6
  gRNA
tcacctcagcttctccgccg

SEQ ID NO: 133881 - DNA, 20 bp, Artificial Sequence
  mmSKRIPTE0004660_Cdc42_7
  gRNA
actaattagacaaagccaag

SEQ ID NO: 133882 - DNA, 20 bp, Artificial Sequence
  mmSKRIPTE0004661_Cdc42_8
  gRNA
gacctctctacaagacagag

SEQ ID NO: 133883 - DNA, 20 bp, Artificial Sequence
  mmSKRIPTE0004662_Cdc42_9
  gRNA
cgcctgacgtcagcacgcag

SEQ ID NO: 133884 - DNA, 20 bp, Artificial Sequence
  mmSKRIPTE0004663_Slit2_1
  gRNA
tggccttaattatcacgtag

SEQ ID NO: 133885 - DNA, 20 bp, Artificial Sequence
  mmSKRIPTE0004664_Slit2_2
  gRNA
cggtgggtaccattgcaaca

SEQ ID NO: 133886 - DNA, 20 bp, Artificial Sequence
  mmSKRIPTE0004665_Slit2_3
  gRNA
ctacttagaagcgaacacgg

SEQ ID NO: 133887 - DNA, 20 bp, Artificial Sequence
  mmSKRIPTE0004666_Slit2_4
  gRNA
agcgagagcataactaccga

SEQ ID NO: 133888 - DNA, 20 bp, Artificial Sequence
  mmSKRIPTE0004667_Slit2_5
  gRNA
aatccatcaaaggttcgtgg

SEQ ID NO: 133889 - DNA, 20 bp, Artificial Sequence
  mmSKRIPTE0004668_Slit2_6
  gRNA
ctttgcccaccggaatacac

SEQ ID NO: 133890 - DNA, 20 bp, Artificial Sequence
  mmSKRIPTE0004669_Slit2_7
  gRNA
catgcctgggaaaaataacg

SEQ ID NO: 133891 - DNA, 20 bp, Artificial Sequence
  mmSKRIPTE0004670_Slit2_8
  gRNA
agggaccggcttatcgagca

SEQ ID NO: 133892 - DNA, 20 bp, Artificial Sequence
  mmSKRIPTE0004671_Slit2_9
  gRNA
ccagctctgattaaagtgtg

SEQ ID NO: 133893 - DNA, 20 bp, Artificial Sequence
  mmSKRIPTE0004672_Cxcl10_1
  gRNA
actgcatccatatcgatgac

SEQ ID NO: 133894 - DNA, 20 bp, Artificial Sequence
  mmSKRIPTE0004673_Cxcl10_2
  gRNA
actcagccctatgatacgat

SEQ ID NO: 133895 - DNA, 20 bp, Artificial Sequence
  mmSKRIPTE0004674_Cxcl10_3
  gRNA
gggaagtcccctgtaaaccg

SEQ ID NO: 133896 - DNA, 20 bp, Artificial Sequence
  mmSKRIPTE0004675_Cxcl10_4
  gRNA
gtccatccatcgcagcaccg

SEQ ID NO: 133897 - DNA, 20 bp, Artificial Sequence
  mmSKRIPTE0004676_Cxcl10_5
  gRNA
ggggttatcaagatactcag

SEQ ID NO: 133898 - DNA, 20 bp, Artificial Sequence
  mmSKRIPTE0004677_Cxcl10_6
  gRNA
atttactgtgtggttacggg

SEQ ID NO: 133899 - DNA, 20 bp, Artificial Sequence
  mmSKRIPTE0004678_Cxcl10_7
  gRNA
agggatccctctcgcaagga

SEQ ID NO: 133900 - DNA, 20 bp, Artificial Sequence
  mmSKRIPTE0004679_Cxcl10_8
  gRNA
ctcacatgatctcaacacgt

SEQ ID NO: 133901 - DNA, 20 bp, Artificial Sequence
  mmSKRIPTE0004680_Cxcl10_9
  gRNA
ccatcccagccacttgagcg

SEQ ID NO: 133902 - DNA, 20 bp, Artificial Sequence
  mmSKRIPTE0004681_Ephb6_1
  gRNA
agacggccccgacagtattg

SEQ ID NO: 133903 - DNA, 20 bp, Artificial Sequence
  mmSKRIPTE0004682_Ephb6_2
  gRNA
cgttcgcccagctagcgctg

SEQ ID NO: 133904 - DNA, 20 bp, Artificial Sequence
  mmSKRIPTE0004683_Ephb6_3
  gRNA
ggagtgccgaagagaccgca

SEQ ID NO: 133905 - DNA, 20 bp, Artificial Sequence
  mmSKRIPTE0004684_Ephb6_4
  gRNA
gggcctaggacccaagtgcg

SEQ ID NO: 133906 - DNA, 20 bp, Artificial Sequence
  mmSKRIPTE0004685_Ephb6_5
  gRNA
gggcactagggatatcacgg

SEQ ID NO: 133907 - DNA, 20 bp, Artificial Sequence
  mmSKRIPTE0004686_Ephb6_6
  gRNA
catttcgacccccgccagag

SEQ ID NO: 133908 - DNA, 20 bp, Artificial Sequence
  mmSKRIPTE0004687_Ephb6_7
  gRNA
tgcttcaggtagggtattcg

SEQ ID NO: 133909 - DNA, 20 bp, Artificial Sequence
  mmSKRIPTE0004688_Ephb6_8
  gRNA
ttgcctctcaggaagcgccg

SEQ ID NO: 133910 - DNA, 20 bp, Artificial Sequence
  mmSKRIPTE0004689_Ephb6_9
  gRNA
agcagagcggcgtgacaggg

SEQ ID NO: 133911 - DNA, 20 bp, Artificial Sequence
  mmSKRIPTE0004690_Arhgef7_1
  gRNA
attgtaacaccaccgtaccc

SEQ ID NO: 133912 - DNA, 20 bp, Artificial Sequence
  mmSKRIPTE0004691_Arhgef7_2
  gRNA
gagcagtccactttctcacg

SEQ ID NO: 133913 - DNA, 20 bp, Artificial Sequence
  mmSKRIPTE0004692_Arhgef7_3
  gRNA
tcacttcatccgtcttagca

SEQ ID NO: 133914 - DNA, 20 bp, Artificial Sequence
  mmSKRIPTE0004693_Arhgef7_4
  gRNA
ggtggttggcacagtaagcg

SEQ ID NO: 133915 - DNA, 20 bp, Artificial Sequence
  mmSKRIPTE0004694_Arhgef7_5
  gRNA
cttctgctccgtaaatgacg

SEQ ID NO: 133916 - DNA, 20 bp, Artificial Sequence
  mmSKRIPTE0004695_Arhgef7_6
  gRNA
cccctaaacaccaacccgag

SEQ ID NO: 133917 - DNA, 20 bp, Artificial Sequence
  mmSKRIPTE0004696_Arhgef7_7
  gRNA
cctcccactagtcatcactg

SEQ ID NO: 133918 - DNA, 20 bp, Artificial Sequence
  mmSKRIPTE0004697_Arhgef7_8
  gRNA
tgtcgcagttcaccccgtgt

SEQ ID NO: 133919 - DNA, 20 bp, Artificial Sequence
  mmSKRIPTE0004698_Arhgef7_9
  gRNA
aggcactcgctctcgttccg

SEQ ID NO: 133920 - DNA, 20 bp, Artificial Sequence
  mmSKRIPTE0004699_Lrrfip2_1
  gRNA
cttgcggtatcatcatcgat

SEQ ID NO: 133921 - DNA, 20 bp, Artificial Sequence
  mmSKRIPTE0004700_Lrrfip2_2
  gRNA
acagtgatgtacgagatgag

SEQ ID NO: 133922 - DNA, 20 bp, Artificial Sequence
  mmSKRIPTE0004701_Lrrfip2_3
  gRNA
aaggctgcaggaatttcgag

SEQ ID NO: 133923 - DNA, 20 bp, Artificial Sequence
  mmSKRIPTE0004702_Lrrfip2_4
  gRNA
tacccgcagttcactcagtg

SEQ ID NO: 133924 - DNA, 20 bp, Artificial Sequence
  mmSKRIPTE0004703_Lrrfip2_5
  gRNA
ctcagccgcttacatccaag

SEQ ID NO: 133925 - DNA, 20 bp, Artificial Sequence
  mmSKRIPTE0004704_Lrrfip2_6
  gRNA
agtggcgcgataaagagcct

SEQ ID NO: 133926 - DNA, 20 bp, Artificial Sequence
  mmSKRIPTE0004705_Lrrfip2_7
  gRNA
gtagaagggcggtacatgca

SEQ ID NO: 133927 - DNA, 20 bp, Artificial Sequence
  mmSKRIPTE0004706_Lrrfip2_8
  gRNA
taggagctaaatatgtccca

SEQ ID NO: 133928 - DNA, 20 bp, Artificial Sequence
  mmSKRIPTE0004707_Lrrfip2_9
  gRNA
agcagtggagtcttcatgag

SEQ ID NO: 133929 - DNA, 20 bp, Artificial Sequence
  mmSKRIPTE0004708_Ppp2r3c_1
  gRNA
ctacgatgtaatagacgcag

SEQ ID NO: 133930 - DNA, 20 bp, Artificial Sequence
  mmSKRIPTE0004709_Ppp2r3c_2
  gRNA
cccaagcgaagaagtcacgc

SEQ ID NO: 133931 - DNA, 20 bp, Artificial Sequence
  mmSKRIPTE0004710_Ppp2r3c_3
  gRNA
cttggcgaagtctgacgtcg

SEQ ID NO: 133932 - DNA, 20 bp, Artificial Sequence
  mmSKRIPTE0004711_Ppp2r3c_4
  gRNA
agtatacgattaggggacgt

SEQ ID NO: 133933 - DNA, 20 bp, Artificial Sequence
  mmSKRIPTE0004712_Ppp2r3c_5
  gRNA
cttaccctgtaataaaaccg

SEQ ID NO: 133934 - DNA, 20 bp, Artificial Sequence
  mmSKRIPTE0004713_Ppp2r3c_6
  gRNA
ttagacacggaacatactaa

SEQ ID NO: 133935 - DNA, 20 bp, Artificial Sequence
  mmSKRIPTE0004714_Ppp2r3c_7
  gRNA
ggaaagacgtgcttcgccgg

SEQ ID NO: 133936 - DNA, 20 bp, Artificial Sequence
  mmSKRIPTE0004715_Ppp2r3c_8
  gRNA
gataccacctatgattggag

SEQ ID NO: 133937 - DNA, 20 bp, Artificial Sequence
  mmSKRIPTE0004716_Ppp2r3c_9
  gRNA
gggcagtgtgcacgctacgc

SEQ ID NO: 133938 - DNA, 20 bp, Artificial Sequence
  mmSKRIPTE0004717_Grap2_1
  gRNA
agtcgtactgcaaggcttag

SEQ ID NO: 133939 - DNA, 20 bp, Artificial Sequence
  mmSKRIPTE0004718_Grap2_2
  gRNA
tccttgcgatccagtacacg

SEQ ID NO: 133940 - DNA, 20 bp, Artificial Sequence
  mmSKRIPTE0004719_Grap2_3
  gRNA
acactgcggccttggaagtg

SEQ ID NO: 133941 - DNA, 20 bp, Artificial Sequence
  mmSKRIPTE0004720_Grap2_4
  gRNA
ttggtacgactatcacacag

SEQ ID NO: 133942 - DNA, 20 bp, Artificial Sequence
  mmSKRIPTE0004721_Grap2_5
  gRNA
gtgtctccggtgcatcagcg

SEQ ID NO: 133943 - DNA, 20 bp, Artificial Sequence
  mmSKRIPTE0004722_Grap2_6
  gRNA
cctcacccgagtggaaccgt

SEQ ID NO: 133944 - DNA, 20 bp, Artificial Sequence
  mmSKRIPTE0004723_Grap2_7
  gRNA
cggaggcataggttgttagg

SEQ ID NO: 133945 - DNA, 20 bp, Artificial Sequence
  mmSKRIPTE0004724_Grap2_8
  gRNA
ctcttctggcagtaactgtg

SEQ ID NO: 133946 - DNA, 20 bp, Artificial Sequence
  mmSKRIPTE0004725_Grap2_9
  gRNA
agaacggagcgatgccacag

SEQ ID NO: 133947 - DNA, 20 bp, Artificial Sequence
  mmSKRIPTE0004726_Xrcc6_1
  gRNA
gttagtctgactttcacgcg

SEQ ID NO: 133948 - DNA, 20 bp, Artificial Sequence
  mmSKRIPTE0004727_Xrcc6_2
  gRNA
aggtgggcaccacgtccacg

SEQ ID NO: 133949 - DNA, 20 bp, Artificial Sequence
  mmSKRIPTE0004728_Xrcc6_3
  gRNA
gacaccaagcggtctctggt

SEQ ID NO: 133950 - DNA, 20 bp, Artificial Sequence
  mmSKRIPTE0004729_Xrcc6_4
  gRNA
aggtcgacagcgctgctccg

SEQ ID NO: 133951 - DNA, 20 bp, Artificial Sequence
  mmSKRIPTE0004730_Xrcc6_5
  gRNA
attaaaaccagggatagcga

SEQ ID NO: 133952 - DNA, 20 bp, Artificial Sequence
  mmSKRIPTE0004731_Xrcc6_6
  gRNA
tacggggagacgttcttccg

SEQ ID NO: 133953 - DNA, 20 bp, Artificial Sequence
  mmSKRIPTE0004732_Xrcc6_7
  gRNA
acagcacacagcttgaaacg

SEQ ID NO: 133954 - DNA, 20 bp, Artificial Sequence
  mmSKRIPTE0004733_Xrcc6_8
  gRNA
gcttgtcatcggcataaggg

SEQ ID NO: 133955 - DNA, 20 bp, Artificial Sequence
  mmSKRIPTE0004734_Xrcc6_9
  gRNA
aagcacttccgagacacggt

SEQ ID NO: 133956 - DNA, 20 bp, Artificial Sequence
  mmSKRIPTE0004735_Mirlet7e_1
  gRNA
cacccgtagaaccgaccttg

SEQ ID NO: 133957 - DNA, 20 bp, Artificial Sequence
  mmSKRIPTE0004736_Mirlet7e_2
  gRNA
gcgatggtgagcccccgaca

SEQ ID NO: 133958 - DNA, 20 bp, Artificial Sequence
  mmSKRIPTE0004737_Mirlet7e_3
  gRNA
aacctcctacctcagcccgg

SEQ ID NO: 133959 - DNA, 20 bp, Artificial Sequence
  mmSKRIPTE0004738_Mirlet7e_4
  gRNA
gcacacaagctcgtgtctgt

SEQ ID NO: 133960 - DNA, 20 bp, Artificial Sequence
  mmSKRIPTE0004739_Mirlet7e_5
  gRNA
agaactcttgggcaatggtg

SEQ ID NO: 133961 - DNA, 20 bp, Artificial Sequence
  mmSKRIPTE0004740_Mirlet7e_6
  gRNA
acggcctcctagctttcccc

SEQ ID NO: 133962 - DNA, 20 bp, Artificial Sequence
  mmSKRIPTE0004741_Mirlet7e_7
  gRNA
ttgatgggagaccagaagta

SEQ ID NO: 133963 - DNA, 20 bp, Artificial Sequence
  mmSKRIPTE0004742_Mirlet7e_8
  gRNA
atagttgaggaagacacccg

SEQ ID NO: 133964 - DNA, 20 bp, Artificial Sequence
  mmSKRIPTE0004743_Mirlet7e_9
  gRNA
cccgtagaaccgaccttgcg

SEQ ID NO: 133965 - DNA, 20 bp, Artificial Sequence
  mmSKRIPTE0004744_Sh2d6_1
  gRNA
gagtcatgggccaatcaccg

SEQ ID NO: 133966 - DNA, 20 bp, Artificial Sequence
  mmSKRIPTE0004745_Sh2d6_2
  gRNA
acacgcgtgtgcacttaacc

SEQ ID NO: 133967 - DNA, 20 bp, Artificial Sequence
  mmSKRIPTE0004746_Sh2d6_3
  gRNA
gggctggaatgagcatccga

SEQ ID NO: 133968 - DNA, 20 bp, Artificial Sequence
  mmSKRIPTE0004747_Sh2d6_4
  gRNA
aggatgtgcagcgatttcag

SEQ ID NO: 133969 - DNA, 20 bp, Artificial Sequence
  mmSKRIPTE0004748_Sh2d6_5
  gRNA
gtttcagtctcatagcgtgg

SEQ ID NO: 133970 - DNA, 20 bp, Artificial Sequence
  mmSKRIPTE0004749_Sh2d6_6
  gRNA
gtttgtaagatttactcacc

SEQ ID NO: 133971 - DNA, 20 bp, Artificial Sequence
  mmSKRIPTE0004750_Sh2d6_7
  gRNA
ttccacggctccacataggg

SEQ ID NO: 133972 - DNA, 20 bp, Artificial Sequence
  mmSKRIPTE0004751_Sh2d6_8
  gRNA
cagggtaagtcggaatgctg

SEQ ID NO: 133973 - DNA, 20 bp, Artificial Sequence
  mmSKRIPTE0004752_Sh2d6_9
  gRNA
acccccgctcagtcatgtgg

SEQ ID NO: 133974 - DNA, 20 bp, Artificial Sequence
  mmSKRIPTE0004753_Abl2_1
  gRNA
cgctgcgggatacaggtccg

SEQ ID NO: 133975 - DNA, 20 bp, Artificial Sequence
  mmSKRIPTE0004754_Abl2_2
  gRNA
tctccgggagtgcagccgag

SEQ ID NO: 133976 - DNA, 20 bp, Artificial Sequence
  mmSKRIPTE0004755_Abl2_3
  gRNA
tgtactgaatacccaccagg

SEQ ID NO: 133977 - DNA, 20 bp, Artificial Sequence
  mmSKRIPTE0004756_Abl2_4
  gRNA
ggagacacgccatagacggt

SEQ ID NO: 133978 - DNA, 20 bp, Artificial Sequence
  mmSKRIPTE0004757_Abl2_5
  gRNA
aggcaggtatggaaccacag

SEQ ID NO: 133979 - DNA, 20 bp, Artificial Sequence
  mmSKRIPTE0004758_Abl2_6
  gRNA
actgaggttcaaatgcggct

SEQ ID NO: 133980 - DNA, 20 bp, Artificial Sequence
  mmSKRIPTE0004759_Abl2_7
  gRNA
cggtgctgggtagtgcagcg

SEQ ID NO: 133981 - DNA, 20 bp, Artificial Sequence
  mmSKRIPTE0004760_Abl2_8
  gRNA
gaattccagtgctggatcgt

SEQ ID NO: 133982 - DNA, 20 bp, Artificial Sequence
  mmSKRIPTE0004761_Abl2_9
  gRNA
tctcaacacacctgtcacgt

SEQ ID NO: 133983 - DNA, 20 bp, Artificial Sequence
  mmSKRIPTE0004762_Tnfsf13_1
  gRNA
gcggtgacccaggagcacga

SEQ ID NO: 133984 - DNA, 20 bp, Artificial Sequence
  mmSKRIPTE0004763_Tnfsf13_2
  gRNA
gcacccgcctatgaacaact

SEQ ID NO: 133985 - DNA, 20 bp, Artificial Sequence
  mmSKRIPTE0004764_Tnfsf13_3
  gRNA
gatgaatggcatgcatatcg

SEQ ID NO: 133986 - DNA, 20 bp, Artificial Sequence
  mmSKRIPTE0004765_Tnfsf13_4
  gRNA
ggtcaggtggtatctcggga

SEQ ID NO: 133987 - DNA, 20 bp, Artificial Sequence
  mmSKRIPTE0004766_Tnfsf13_5
  gRNA
ggcaaccagtacttaggcgt

SEQ ID NO: 133988 - DNA, 20 bp, Artificial Sequence
  mmSKRIPTE0004767_Tnfsf13_6
  gRNA
taagccctgagcctgccgtg

SEQ ID NO: 133989 - DNA, 20 bp, Artificial Sequence
  mmSKRIPTE0004768_Tnfsf13_7
  gRNA
agcagactctgacgtgacag

SEQ ID NO: 133990 - DNA, 20 bp, Artificial Sequence
  mmSKRIPTE0004769_Tnfsf13_8
  gRNA
gccagtgagaccgctcactt

SEQ ID NO: 133991 - DNA, 20 bp, Artificial Sequence
  mmSKRIPTE0004770_Tnfsf13_9
  gRNA
gaaaaccctccttacagaca

SEQ ID NO: 133992 - DNA, 20 bp, Artificial Sequence
  mmSKRIPTE0004771_Lgals9_1
  gRNA
atgtcttgccagatgctacg

SEQ ID NO: 133993 - DNA, 20 bp, Artificial Sequence
  mmSKRIPTE0004772_Lgals9_2
  gRNA
aaatatctagagattctgcg

SEQ ID NO: 133994 - DNA, 20 bp, Artificial Sequence
  mmSKRIPTE0004773_Lgals9_3
  gRNA
cctgtggggaaacaacggag

SEQ ID NO: 133995 - DNA, 20 bp, Artificial Sequence
  mmSKRIPTE0004774_Lgals9_4
  gRNA
cagagctcagtaactaaacg

SEQ ID NO: 133996 - DNA, 20 bp, Artificial Sequence
  mmSKRIPTE0004775_Lgals9_5
  gRNA
tctcgggtctgcgattccga

SEQ ID NO: 133997 - DNA, 20 bp, Artificial Sequence
  mmSKRIPTE0004776_Lgals9_6
  gRNA
gattgggcctgcctctacga

SEQ ID NO: 133998 - DNA, 20 bp, Artificial Sequence
  mmSKRIPTE0004777_Lgals9_7
  gRNA
agacagcgatggtgtccacg

SEQ ID NO: 133999 - DNA, 20 bp, Artificial Sequence
  mmSKRIPTE0004778_Lgals9_8
  gRNA
gaccaggatgctcaggacgt

SEQ ID NO: 134000 - DNA, 20 bp, Artificial Sequence
  mmSKRIPTE0004779_Lgals9_9
  gRNA
actcagatcaacaactcctg

SEQ ID NO: 134001 - DNA, 20 bp, Artificial Sequence
  mmSKRIPTE0004780_Hoxb4_1
  gRNA
aagggcagtctgcacaacgt

SEQ ID NO: 134002 - DNA, 20 bp, Artificial Sequence
  mmSKRIPTE0004781_Hoxb4_2
  gRNA
aaaccccaattacgccggcg

SEQ ID NO: 134003 - DNA, 20 bp, Artificial Sequence
  mmSKRIPTE0004782_Hoxb4_3
  gRNA
atttacatagggctcccgcg

SEQ ID NO: 134004 - DNA, 20 bp, Artificial Sequence
  mmSKRIPTE0004783_Hoxb4_4
  gRNA
gggtacccactaggtcatag

SEQ ID NO: 134005 - DNA, 20 bp, Artificial Sequence
  mmSKRIPTE0004784_Hoxb4_5
  gRNA
ttacagtgaagggacctccg

SEQ ID NO: 134006 - DNA, 20 bp, Artificial Sequence
  mmSKRIPTE0004785_Hoxb4_6
  gRNA
gtgcactgtgcagcgctacg

SEQ ID NO: 134007 - DNA, 20 bp, Artificial Sequence
  mmSKRIPTE0004786_Hoxb4_7
  gRNA
gacgacgggctctttgcacg

SEQ ID NO: 134008 - DNA, 20 bp, Artificial Sequence
  mmSKRIPTE0004787_Hoxb4_8
  gRNA
ccaagcaggagttcgaacat

SEQ ID NO: 134009 - DNA, 20 bp, Artificial Sequence
  mmSKRIPTE0004788_Hoxb4_9
  gRNA
ttcttgtgaccatcacatcg

SEQ ID NO: 134010 - DNA, 20 bp, Artificial Sequence
  mmSKRIPTE0004789_Rara_1
  gRNA
tcgtacatctcgccccacga

SEQ ID NO: 134011 - DNA, 20 bp, Artificial Sequence
  mmSKRIPTE0004790_Rara_2
  gRNA
actacggtatgccagccgcg

SEQ ID NO: 134012 - DNA, 20 bp, Artificial Sequence
  mmSKRIPTE0004791_Rara_3
  gRNA
ctgcagaaatgtttcgacgt

SEQ ID NO: 134013 - DNA, 20 bp, Artificial Sequence
  mmSKRIPTE0004792_Rara_4
  gRNA
cgtgtgtcgaggtggtcatg

SEQ ID NO: 134014 - DNA, 20 bp, Artificial Sequence
  mmSKRIPTE0004793_Rara_5
  gRNA
aggccatagcaaaagcttag

SEQ ID NO: 134015 - DNA, 20 bp, Artificial Sequence
  mmSKRIPTE0004794_Rara_6
  gRNA
cgcacccggaatctaagcca

SEQ ID NO: 134016 - DNA, 20 bp, Artificial Sequence
  mmSKRIPTE0004795_Rara_7
  gRNA
tcgatcgtttcgcaccgctg

SEQ ID NO: 134017 - DNA, 20 bp, Artificial Sequence
  mmSKRIPTE0004796_Rara_8
  gRNA
actcggatgtcctagctgga

SEQ ID NO: 134018 - DNA, 20 bp, Artificial Sequence
  mmSKRIPTE0004797_Rara_9
  gRNA
cggactcagatgcacaacgc

SEQ ID NO: 134019 - DNA, 20 bp, Artificial Sequence
  mmSKRIPTE0004798_Pik3cg_1
  gRNA
atcctggaggcgtacctgcg

SEQ ID NO: 134020 - DNA, 20 bp, Artificial Sequence
  mmSKRIPTE0004799_Pik3cg_2
  gRNA
gaggtttggacgttacccaa

SEQ ID NO: 134021 - DNA, 20 bp, Artificial Sequence
  mmSKRIPTE0004800_Pik3cg_3
  gRNA
cgtcagttcccaaggtaccg

SEQ ID NO: 134022 - DNA, 20 bp, Artificial Sequence
  mmSKRIPTE0004801_Pik3cg_4
  gRNA
ccagttgagatgcaaccgta

SEQ ID NO: 134023 - DNA, 20 bp, Artificial Sequence
  mmSKRIPTE0004802_Pik3cg_5
  gRNA
acaaccggtggttctaagag

SEQ ID NO: 134024 - DNA, 20 bp, Artificial Sequence
  mmSKRIPTE0004803_Pik3cg_6
  gRNA
gttcacgtaatagagaagct

SEQ ID NO: 134025 - DNA, 20 bp, Artificial Sequence
  mmSKRIPTE0004804_Pik3cg_7
  gRNA
tgttaataaacacttacacc

SEQ ID NO: 134026 - DNA, 20 bp, Artificial Sequence
  mmSKRIPTE0004805_Pik3cg_8
  gRNA
atcatggtgactaatgctgt

SEQ ID NO: 134027 - DNA, 20 bp, Artificial Sequence
  mmSKRIPTE0004806_Pik3cg_9
  gRNA
tccctgtttagcaggcactg

SEQ ID NO: 134028 - DNA, 20 bp, Artificial Sequence
  mmSKRIPTE0004807_Ahr_1
  gRNA
ctgagatgctccctatacga

SEQ ID NO: 134029 - DNA, 20 bp, Artificial Sequence
  mmSKRIPTE0004808_Ahr_2
  gRNA
atgcacctatggtacagtga

SEQ ID NO: 134030 - DNA, 20 bp, Artificial Sequence
  mmSKRIPTE0004809_Ahr_3
  gRNA
cacgtagcatgattggcgag

SEQ ID NO: 134031 - DNA, 20 bp, Artificial Sequence
  mmSKRIPTE0004810_Ahr_4
  gRNA
cttcccgatatcacacccgg

SEQ ID NO: 134032 - DNA, 20 bp, Artificial Sequence
  mmSKRIPTE0004811_Ahr_5
  gRNA
cgtcggtagagcagtccctg

SEQ ID NO: 134033 - DNA, 20 bp, Artificial Sequence
  mmSKRIPTE0004812_Ahr_6
  gRNA
agctgtgcacaagaggatcg

SEQ ID NO: 134034 - DNA, 20 bp, Artificial Sequence
  mmSKRIPTE0004813_Ahr_7
  gRNA
gataaactcacagtccgcca

SEQ ID NO: 134035 - DNA, 20 bp, Artificial Sequence
  mmSKRIPTE0004814_Ahr_8
  gRNA
cagggttgtgagcgacgccg

SEQ ID NO: 134036 - DNA, 20 bp, Artificial Sequence
  mmSKRIPTE0004815_Ahr_9
  gRNA
ttagagcaccactagactga

SEQ ID NO: 134037 - DNA, 20 bp, Artificial Sequence
  mmSKRIPTE0004816_Rgcc_1
  gRNA
aaagcctagttgaggatacg

SEQ ID NO: 134038 - DNA, 20 bp, Artificial Sequence
  mmSKRIPTE0004817_Rgcc_2
  gRNA
atagcacgttatcaaaggcg

SEQ ID NO: 134039 - DNA, 20 bp, Artificial Sequence
  mmSKRIPTE0004818_Rgcc_3
  gRNA
gttcttcagaggccagcgcg

SEQ ID NO: 134040 - DNA, 20 bp, Artificial Sequence
  mmSKRIPTE0004819_Rgcc_4
  gRNA
cgcgtagcagagatgctgcg

SEQ ID NO: 134041 - DNA, 20 bp, Artificial Sequence
  mmSKRIPTE0004820_Rgcc_5
  gRNA
gaataagttatccccgccag

SEQ ID NO: 134042 - DNA, 20 bp, Artificial Sequence
  mmSKRIPTE0004821_Rgcc_6
  gRNA
tccaaataggcactcacctg

SEQ ID NO: 134043 - DNA, 20 bp, Artificial Sequence
  mmSKRIPTE0004822_Rgcc_7
  gRNA
ctactccgtcttatagccac

SEQ ID NO: 134044 - DNA, 20 bp, Artificial Sequence
  mmSKRIPTE0004823_Rgcc_8
  gRNA
agtccctggcttcgatcccg

SEQ ID NO: 134045 - DNA, 20 bp, Artificial Sequence
  mmSKRIPTE0004824_Rgcc_9
  gRNA
cttagcaagtgagtacacgc

SEQ ID NO: 134046 - DNA, 20 bp, Artificial Sequence
  mmSKRIPTE0004825_Rtp4_1
  gRNA
aaatccgtattccgggtctg

SEQ ID NO: 134047 - DNA, 20 bp, Artificial Sequence
  mmSKRIPTE0004826_Rtp4_2
  gRNA
cccaagtactgaagtcatcg

SEQ ID NO: 134048 - DNA, 20 bp, Artificial Sequence
  mmSKRIPTE0004827_Rtp4_3
  gRNA
ttaagcctctgcacgtagtg

SEQ ID NO: 134049 - DNA, 20 bp, Artificial Sequence
  mmSKRIPTE0004828_Rtp4_4
  gRNA
ccggacactttgaaatcgca

SEQ ID NO: 134050 - DNA, 20 bp, Artificial Sequence
  mmSKRIPTE0004829_Rtp4_5
  gRNA
tcacaattgcgtgtgtcgtg

SEQ ID NO: 134051 - DNA, 20 bp, Artificial Sequence
  mmSKRIPTE0004830_Rtp4_6
  gRNA
gtggtggctctatttcacgt

SEQ ID NO: 134052 - DNA, 20 bp, Artificial Sequence
  mmSKRIPTE0004831_Rtp4_7
  gRNA
caaagcggcggccggagtaa

SEQ ID NO: 134053 - DNA, 20 bp, Artificial Sequence
  mmSKRIPTE0004832_Rtp4_8
  gRNA
tgcagagatactatggacac

SEQ ID NO: 134054 - DNA, 20 bp, Artificial Sequence
  mmSKRIPTE0004833_Rtp4_9
  gRNA
tcagtgtagagaacttcaca

SEQ ID NO: 134055 - DNA, 20 bp, Artificial Sequence
  mmSKRIPTE0004834_Parp14_1
  gRNA
gcgtgcagaatgctacggta

SEQ ID NO: 134056 - DNA, 20 bp, Artificial Sequence
  mmSKRIPTE0004835_Parp14_2
  gRNA
actcacaaagagatagacgt

SEQ ID NO: 134057 - DNA, 20 bp, Artificial Sequence
  mmSKRIPTE0004836_Parp14_3
  gRNA
cagccgccacgtcttccatg

SEQ ID NO: 134058 - DNA, 20 bp, Artificial Sequence
  mmSKRIPTE0004837_Parp14_4
  gRNA
gctaacggatttcaccccaa

SEQ ID NO: 134059 - DNA, 20 bp, Artificial Sequence
  mmSKRIPTE0004838_Parp14_5
  gRNA
ctgactacggcattgagtca

SEQ ID NO: 134060 - DNA, 20 bp, Artificial Sequence
  mmSKRIPTE0004839_Parp14_6
  gRNA
aaaaagctgcaatataagcg

SEQ ID NO: 134061 - DNA, 20 bp, Artificial Sequence
  mmSKRIPTE0004840_Parp14_7
  gRNA
gatgtgaggggaatcctacg

SEQ ID NO: 134062 - DNA, 20 bp, Artificial Sequence
  mmSKRIPTE0004841_Parp14_8
  gRNA
ccaaataggacagcaccaag

SEQ ID NO: 134063 - DNA, 20 bp, Artificial Sequence
  mmSKRIPTE0004842_Parp14_9
  gRNA
gacgaacagtttgactccgg

SEQ ID NO: 134064 - DNA, 20 bp, Artificial Sequence
  mmSKRIPTE0004843_Msh6_1
  gRNA
agtttcgtgataccaaacag

SEQ ID NO: 134065 - DNA, 20 bp, Artificial Sequence
  mmSKRIPTE0004844_Msh6_2
  gRNA
gttacctcctccactgacgt

SEQ ID NO: 134066 - DNA, 20 bp, Artificial Sequence
  mmSKRIPTE0004845_Msh6_3
  gRNA
caaggatcgcatccaccgcg

SEQ ID NO: 134067 - DNA, 20 bp, Artificial Sequence
  mmSKRIPTE0004846_Msh6_4
  gRNA
taaacggtgaagctatccat

SEQ ID NO: 134068 - DNA, 20 bp, Artificial Sequence
  mmSKRIPTE0004847_Msh6_5
  gRNA
gcagtaagtagttcttacgg

SEQ ID NO: 134069 - DNA, 20 bp, Artificial Sequence
  mmSKRIPTE0004848_Msh6_6
  gRNA
cccgagcatccgtagcccag

SEQ ID NO: 134070 - DNA, 20 bp, Artificial Sequence
  mmSKRIPTE0004849_Msh6_7
  gRNA
tcctggtagttaaagcccag

SEQ ID NO: 134071 - DNA, 20 bp, Artificial Sequence
  mmSKRIPTE0004850_Msh6_8
  gRNA
ttccagatttaggacgctag

SEQ ID NO: 134072 - DNA, 20 bp, Artificial Sequence
  mmSKRIPTE0004851_Msh6_9
  gRNA
cctcccgactttcccgccag

SEQ ID NO: 134073 - DNA, 20 bp, Artificial Sequence
  mmSKRIPTE0004852_Il17b_1
  gRNA
gagagtcctaaatcaaagcg

SEQ ID NO: 134074 - DNA, 20 bp, Artificial Sequence
  mmSKRIPTE0004853_Il17b_2
  gRNA
ctagactttaggcattctcg

SEQ ID NO: 134075 - DNA, 20 bp, Artificial Sequence
  mmSKRIPTE0004854_Il17b_3
  gRNA
tggtctccatgacgacacgc

SEQ ID NO: 134076 - DNA, 20 bp, Artificial Sequence
  mmSKRIPTE0004855_Il17b_4
  gRNA
catgtgacgactgaaccacg

SEQ ID NO: 134077 - DNA, 20 bp, Artificial Sequence
  mmSKRIPTE0004856_Il17b_5
  gRNA
gacgcgctaaaatggtgtcg

SEQ ID NO: 134078 - DNA, 20 bp, Artificial Sequence
  mmSKRIPTE0004857_Il17b_6
  gRNA
tggccgcacagcctggtacg

SEQ ID NO: 134079 - DNA, 20 bp, Artificial Sequence
  mmSKRIPTE0004858_Il17b_7
  gRNA
ccaacccaacgccttacggt

SEQ ID NO: 134080 - DNA, 20 bp, Artificial Sequence
  mmSKRIPTE0004859_Il17b_8
  gRNA
tcctttaataaagtccactg

SEQ ID NO: 134081 - DNA, 20 bp, Artificial Sequence
  mmSKRIPTE0004860_Il17b_9
  gRNA
ctaatcgcgctgatcccttg

SEQ ID NO: 134082 - DNA, 20 bp, Artificial Sequence
  mmSKRIPTE0004861_Sdc4_1
  gRNA
cttcatgacttccgtcagag

SEQ ID NO: 134083 - DNA, 20 bp, Artificial Sequence
  mmSKRIPTE0004862_Sdc4_2
  gRNA
aaatacataccgactctccg

SEQ ID NO: 134084 - DNA, 20 bp, Artificial Sequence
  mmSKRIPTE0004863_Sdc4_3
  gRNA
ccgagttatacagccacacg

SEQ ID NO: 134085 - DNA, 20 bp, Artificial Sequence
  mmSKRIPTE0004864_Sdc4_4
  gRNA
gcttaaccctcggtgcccgg

SEQ ID NO: 134086 - DNA, 20 bp, Artificial Sequence
  mmSKRIPTE0004865_Sdc4_5
  gRNA
gactaagatcacagctagag

SEQ ID NO: 134087 - DNA, 20 bp, Artificial Sequence
  mmSKRIPTE0004866_Sdc4_6
  gRNA
ttgtgtggctagtgcaaccg

SEQ ID NO: 134088 - DNA, 20 bp, Artificial Sequence
  mmSKRIPTE0004867_Sdc4_7
  gRNA
aggctcatttgggaccagcg

SEQ ID NO: 134089 - DNA, 20 bp, Artificial Sequence
  mmSKRIPTE0004868_Sdc4_8
  gRNA
ccagctaggaccctgcacgg

SEQ ID NO: 134090 - DNA, 20 bp, Artificial Sequence
  mmSKRIPTE0004869_Sdc4_9
  gRNA
tcacagcagtatgtataccc

SEQ ID NO: 134091 - DNA, 20 bp, Artificial Sequence
  mmSKRIPTE0004870_Trim62_1
  gRNA
atatttctcttctcgccaag

SEQ ID NO: 134092 - DNA, 20 bp, Artificial Sequence
  mmSKRIPTE0004871_Trim62_2
  gRNA
agcttccgggtgcataagcg

SEQ ID NO: 134093 - DNA, 20 bp, Artificial Sequence
  mmSKRIPTE0004872_Trim62_3
  gRNA
cggacggtgttgatccgcag

SEQ ID NO: 134094 - DNA, 20 bp, Artificial Sequence
  mmSKRIPTE0004873_Trim62_4
  gRNA
tttccgttgtcattgacaag

SEQ ID NO: 134095 - DNA, 20 bp, Artificial Sequence
  mmSKRIPTE0004874_Trim62_5
  gRNA
ttgtgggtgtaggttcccgt

SEQ ID NO: 134096 - DNA, 20 bp, Artificial Sequence
  mmSKRIPTE0004875_Trim62_6
  gRNA
accctctccgtccatgcagt

SEQ ID NO: 134097 - DNA, 20 bp, Artificial Sequence
  mmSKRIPTE0004876_Trim62_7
  gRNA
gtacccgataacaatctcct

SEQ ID NO: 134098 - DNA, 20 bp, Artificial Sequence
  mmSKRIPTE0004877_Trim62_8
  gRNA
actccgtggttgatgccctg

SEQ ID NO: 134099 - DNA, 20 bp, Artificial Sequence
  mmSKRIPTE0004878_Trim62_9
  gRNA
tcctagaccacctactggag

SEQ ID NO: 134100 - DNA, 20 bp, Artificial Sequence
  mmSKRIPTE0004879_Pla2g5_1
  gRNA
gagagcatacagatgcctcg

SEQ ID NO: 134101 - DNA, 20 bp, Artificial Sequence
  mmSKRIPTE0004880_Pla2g5_2
  gRNA
tggaggaggactctgaatcg

SEQ ID NO: 134102 - DNA, 20 bp, Artificial Sequence
  mmSKRIPTE0004881_Pla2g5_3
  gRNA
cattccacaaaggcccactg

SEQ ID NO: 134103 - DNA, 20 bp, Artificial Sequence
  mmSKRIPTE0004882_Pla2g5_4
  gRNA
gcatgggctgatttgaatcg

SEQ ID NO: 134104 - DNA, 20 bp, Artificial Sequence
  mmSKRIPTE0004883_Pla2g5_5
  gRNA
aacgaacttaggtcgcctag

SEQ ID NO: 134105 - DNA, 20 bp, Artificial Sequence
  mmSKRIPTE0004884_Pla2g5_6
  gRNA
cattatgggactgcccaatg

SEQ ID NO: 134106 - DNA, 20 bp, Artificial Sequence
  mmSKRIPTE0004885_Pla2g5_7
  gRNA
ggggagtctatgcagactag

SEQ ID NO: 134107 - DNA, 20 bp, Artificial Sequence
  mmSKRIPTE0004886_Pla2g5_8
  gRNA
attccacggatcaagccctg

SEQ ID NO: 134108 - DNA, 20 bp, Artificial Sequence
  mmSKRIPTE0004887_Pla2g5_9
  gRNA
tccctccagagtccgaggaa

SEQ ID NO: 134109 - DNA, 20 bp, Artificial Sequence
  mmSKRIPTE0004888_Mtor_1
  gRNA
gtgcttcgctagtggctgcg

SEQ ID NO: 134110 - DNA, 20 bp, Artificial Sequence
  mmSKRIPTE0004889_Mtor_2
  gRNA
ttcctttggttcccgctgcg

SEQ ID NO: 134111 - DNA, 20 bp, Artificial Sequence
  mmSKRIPTE0004890_Mtor_3
  gRNA
aaaatcgtgataataccagt

SEQ ID NO: 134112 - DNA, 20 bp, Artificial Sequence
  mmSKRIPTE0004891_Mtor_4
  gRNA
tgacaactggatcgcttgag

SEQ ID NO: 134113 - DNA, 20 bp, Artificial Sequence
  mmSKRIPTE0004892_Mtor_5
  gRNA
gctcgctactgccttaccag

SEQ ID NO: 134114 - DNA, 20 bp, Artificial Sequence
  mmSKRIPTE0004893_Mtor_6
  gRNA
ctaacagttgttgctaccag

SEQ ID NO: 134115 - DNA, 20 bp, Artificial Sequence
  mmSKRIPTE0004894_Mtor_7
  gRNA
tctctcacccggtaccactg

SEQ ID NO: 134116 - DNA, 20 bp, Artificial Sequence
  mmSKRIPTE0004895_Mtor_8
  gRNA
tagacaaaacgagcaaccag

SEQ ID NO: 134117 - DNA, 20 bp, Artificial Sequence
  mmSKRIPTE0004896_Mtor_9
  gRNA
agacctaaatgctccacgga

SEQ ID NO: 134118 - DNA, 20 bp, Artificial Sequence
  mmSKRIPTE0004897_Txk_1
  gRNA
tcacggagatcgcagaaacg

SEQ ID NO: 134119 - DNA, 20 bp, Artificial Sequence
  mmSKRIPTE0004898_Txk_2
  gRNA
ctgtgctcccgataagaacg

SEQ ID NO: 134120 - DNA, 20 bp, Artificial Sequence
  mmSKRIPTE0004899_Txk_3
  gRNA
acgagctgagccgattcgca

SEQ ID NO: 134121 - DNA, 20 bp, Artificial Sequence
  mmSKRIPTE0004900_Txk_4
  gRNA
ttacactgcccagagcaccg

SEQ ID NO: 134122 - DNA, 20 bp, Artificial Sequence
  mmSKRIPTE0004901_Txk_5
  gRNA
gtgccattgtcaccgtggcg

SEQ ID NO: 134123 - DNA, 20 bp, Artificial Sequence
  mmSKRIPTE0004902_Txk_6
  gRNA
aaagatctcagacttcggca

SEQ ID NO: 134124 - DNA, 20 bp, Artificial Sequence
  mmSKRIPTE0004903_Txk_7
  gRNA
ggtgcgaggatccccagacg

SEQ ID NO: 134125 - DNA, 20 bp, Artificial Sequence
  mmSKRIPTE0004904_Txk_8
  gRNA
atggacgcagaactaaaggt

SEQ ID NO: 134126 - DNA, 20 bp, Artificial Sequence
  mmSKRIPTE0004905_Txk_9
  gRNA
cttgcaaaaaaacggtcgca

SEQ ID NO: 134127 - DNA, 20 bp, Artificial Sequence
  mmSKRIPTE0004906_Cxcl1_1
  gRNA
gcagtggcgagacctacctg

SEQ ID NO: 134128 - DNA, 20 bp, Artificial Sequence
  mmSKRIPTE0004907_Cxcl1_2
  gRNA
cacactcaagaatggtcgcg

SEQ ID NO: 134129 - DNA, 20 bp, Artificial Sequence
  mmSKRIPTE0004908_Cxcl1_3
  gRNA
gtgtggatacatttcatcga

SEQ ID NO: 134130 - DNA, 20 bp, Artificial Sequence
  mmSKRIPTE0004909_Cxcl1_4
  gRNA
gcgctgcacagagaagcgag

SEQ ID NO: 134131 - DNA, 20 bp, Artificial Sequence
  mmSKRIPTE0004910_Cxcl1_5
  gRNA
acttcggtttgggtgcagtg

SEQ ID NO: 134132 - DNA, 20 bp, Artificial Sequence
  mmSKRIPTE0004911_Cxcl1_6
  gRNA
ttgatagaattaacgttcag

SEQ ID NO: 134133 - DNA, 20 bp, Artificial Sequence
  mmSKRIPTE0004912_Cxcl1_7
  gRNA
ttcccactaggagaagtgtg

SEQ ID NO: 134134 - DNA, 20 bp, Artificial Sequence
  mmSKRIPTE0004913_Cxcl1_8
  gRNA
tcgagcataaaaggggctcg

SEQ ID NO: 134135 - DNA, 20 bp, Artificial Sequence
  mmSKRIPTE0004914_Cxcl1_9
  gRNA
gtacccgagactagagtcaa

SEQ ID NO: 134136 - DNA, 20 bp, Artificial Sequence
  mmSKRIPTE0004915_Tgfb1_1
  gRNA
tgatctgtggagtcactacg

SEQ ID NO: 134137 - DNA, 20 bp, Artificial Sequence
  mmSKRIPTE0004916_Tgfb1_2
  gRNA
gaagaggtcacattaagtcg

SEQ ID NO: 134138 - DNA, 20 bp, Artificial Sequence
  mmSKRIPTE0004917_Tgfb1_3
  gRNA
gggatcagccccaaacgtcg

SEQ ID NO: 134139 - DNA, 20 bp, Artificial Sequence
  mmSKRIPTE0004918_Tgfb1_4
  gRNA
gtaaacactgtctctctccg

SEQ ID NO: 134140 - DNA, 20 bp, Artificial Sequence
  mmSKRIPTE0004919_Tgfb1_5
  gRNA
cttaggaaggtggccccccg

SEQ ID NO: 134141 - DNA, 20 bp, Artificial Sequence
  mmSKRIPTE0004920_Tgfb1_6
  gRNA
caacaacggtgagctccgag

SEQ ID NO: 134142 - DNA, 20 bp, Artificial Sequence
  mmSKRIPTE0004921_Tgfb1_7
  gRNA
ggatgaggaagcccccacgt

SEQ ID NO: 134143 - DNA, 20 bp, Artificial Sequence
  mmSKRIPTE0004922_Tgfb1_8
  gRNA
tactgcaagtcagagacgtg

SEQ ID NO: 134144 - DNA, 20 bp, Artificial Sequence
  mmSKRIPTE0004923_Tgfb1_9
  gRNA
gctactgccagcaggtccga

SEQ ID NO: 134145 - DNA, 20 bp, Artificial Sequence
  mmSKRIPTE0004924_Ido1_1
  gRNA
tgtaagtatctactattgcg

SEQ ID NO: 134146 - DNA, 20 bp, Artificial Sequence
  mmSKRIPTE0004925_Ido1_2
  gRNA
aactgcagcgctaaaccctg

SEQ ID NO: 134147 - DNA, 20 bp, Artificial Sequence
  mmSKRIPTE0004926_Ido1_3
  gRNA
ggcgtatgtgtggaaccgag

SEQ ID NO: 134148 - DNA, 20 bp, Artificial Sequence
  mmSKRIPTE0004927_Ido1_4
  gRNA
gacaagatagaccgtccatg

SEQ ID NO: 134149 - DNA, 20 bp, Artificial Sequence
  mmSKRIPTE0004928_Ido1_5
  gRNA
ctcaacacaaagaatcccgg

SEQ ID NO: 134150 - DNA, 20 bp, Artificial Sequence
  mmSKRIPTE0004929_Ido1_6
  gRNA
caaacccgggaccttccgcg

SEQ ID NO: 134151 - DNA, 20 bp, Artificial Sequence
  mmSKRIPTE0004930_Ido1_7
  gRNA
gtattacccgtgagcttgag

SEQ ID NO: 134152 - DNA, 20 bp, Artificial Sequence
  mmSKRIPTE0004931_Ido1_8
  gRNA
ttaaagccacgattgagatg

SEQ ID NO: 134153 - DNA, 20 bp, Artificial Sequence
  mmSKRIPTE0004932_Ido1_9
  gRNA
gatccatcagtactgagacg

SEQ ID NO: 134154 - DNA, 20 bp, Artificial Sequence
  mmSKRIPTE0004933_Mst1_1
  gRNA
aactattgtcgtaatccgga

SEQ ID NO: 134155 - DNA, 20 bp, Artificial Sequence
  mmSKRIPTE0004934_Mst1_2
  gRNA
ccgcaagctgaccgtccatg

SEQ ID NO: 134156 - DNA, 20 bp, Artificial Sequence
  mmSKRIPTE0004935_Mst1_3
  gRNA
gaatgtaacacgaagtaccg

SEQ ID NO: 134157 - DNA, 20 bp, Artificial Sequence
  mmSKRIPTE0004936_Mst1_4
  gRNA
cgaacctctcacaggatacg

SEQ ID NO: 134158 - DNA, 20 bp, Artificial Sequence
  mmSKRIPTE0004937_Mst1_5
  gRNA
aggggtgaactccctcgtga

SEQ ID NO: 134159 - DNA, 20 bp, Artificial Sequence
  mmSKRIPTE0004938_Mst1_6
  gRNA
tccggcagaaattctcacga

SEQ ID NO: 134160 - DNA, 20 bp, Artificial Sequence
  mmSKRIPTE0004939_Mst1_7
  gRNA
cggtgaggattaccgtggcg

SEQ ID NO: 134161 - DNA, 20 bp, Artificial Sequence
  mmSKRIPTE0004940_Mst1_8
  gRNA
caagagtaataaacttcgtg

SEQ ID NO: 134162 - DNA, 20 bp, Artificial Sequence
  mmSKRIPTE0004941_Mst1_9
  gRNA
gctgagtaacaggggccacg

SEQ ID NO: 134163 - DNA, 20 bp, Artificial Sequence
  mmSKRIPTE0004942_Ddx3x_1
  gRNA
aagggtagtaactagatccg

SEQ ID NO: 134164 - DNA, 20 bp, Artificial Sequence
  mmSKRIPTE0004943_Ddx3x_2
  gRNA
atataaggtcggtggccgcg

SEQ ID NO: 134165 - DNA, 20 bp, Artificial Sequence
  mmSKRIPTE0004944_Ddx3x_3
  gRNA
cactctaagaactacctcag

SEQ ID NO: 134166 - DNA, 20 bp, Artificial Sequence
  mmSKRIPTE0004945_Ddx3x_4
  gRNA
aagtgatgcagcgacccccg

SEQ ID NO: 134167 - DNA, 20 bp, Artificial Sequence
  mmSKRIPTE0004946_Ddx3x_5
  gRNA
agatactataaatcgtaggc

SEQ ID NO: 134168 - DNA, 20 bp, Artificial Sequence
  mmSKRIPTE0004947_Ddx3x_6
  gRNA
acttaaagagctgcgccaca

SEQ ID NO: 134169 - DNA, 20 bp, Artificial Sequence
  mmSKRIPTE0004948_Ddx3x_7
  gRNA
ggtcagcttcatctaacacc

SEQ ID NO: 134170 - DNA, 20 bp, Artificial Sequence
  mmSKRIPTE0004949_Ddx3x_8
  gRNA
tcccaacactgctttacacg

SEQ ID NO: 134171 - DNA, 20 bp, Artificial Sequence
  mmSKRIPTE0004950_Ddx3x_9
  gRNA
tccgagtcggtatataaggt

SEQ ID NO: 134172 - DNA, 20 bp, Artificial Sequence
  mmSKRIPTE0004951_Fcgr3_1
  gRNA
tggtgacactgatgtgcgaa

SEQ ID NO: 134173 - DNA, 20 bp, Artificial Sequence
  mmSKRIPTE0004952_Fcgr3_2
  gRNA
tccttgctaagactccaact

SEQ ID NO: 134174 - DNA, 20 bp, Artificial Sequence
  mmSKRIPTE0004953_Fcgr3_3
  gRNA
atccggtaccaccagacatg

SEQ ID NO: 134175 - DNA, 20 bp, Artificial Sequence
  mmSKRIPTE0004954_Fcgr3_4
  gRNA
gagcctttgtaaagcgacca

SEQ ID NO: 134176 - DNA, 20 bp, Artificial Sequence
  mmSKRIPTE0004955_Fcgr3_5
  gRNA
ggagaaatcttcaaaccccg

SEQ ID NO: 134177 - DNA, 20 bp, Artificial Sequence
  mmSKRIPTE0004956_Fcgr3_6
  gRNA
ctgatgagccgcctaaaccc

SEQ ID NO: 134178 - DNA, 20 bp, Artificial Sequence
  mmSKRIPTE0004957_Fcgr3_7
  gRNA
tagcgttctgttgtaaacaa

SEQ ID NO: 134179 - DNA, 20 bp, Artificial Sequence
  mmSKRIPTE0004958_Fcgr3_8
  gRNA
aactggatcagagtctgatg

SEQ ID NO: 134180 - DNA, 20 bp, Artificial Sequence
  mmSKRIPTE0004959_Fcgr3_9
  gRNA
gaaattcagaataaacggtg

SEQ ID NO: 134181 - DNA, 20 bp, Artificial Sequence
  mmSKRIPTE0004960_Tnfaip3_1
  gRNA
gtgtgcaacgtaacccggat

SEQ ID NO: 134182 - DNA, 20 bp, Artificial Sequence
  mmSKRIPTE0004961_Tnfaip3_2
  gRNA
gtcctccagcggtttcctcg

SEQ ID NO: 134183 - DNA, 20 bp, Artificial Sequence
  mmSKRIPTE0004962_Tnfaip3_3
  gRNA
acacatccagtgctcgtgag

SEQ ID NO: 134184 - DNA, 20 bp, Artificial Sequence
  mmSKRIPTE0004963_Tnfaip3_4
  gRNA
ctcagggaaaaacaggacgt

SEQ ID NO: 134185 - DNA, 20 bp, Artificial Sequence
  mmSKRIPTE0004964_Tnfaip3_5
  gRNA
agacatgcctcgaactacac

SEQ ID NO: 134186 - DNA, 20 bp, Artificial Sequence
  mmSKRIPTE0004965_Tnfaip3_6
  gRNA
gccctgccacaccaaactgt

SEQ ID NO: 134187 - DNA, 20 bp, Artificial Sequence
  mmSKRIPTE0004966_Tnfaip3_7
  gRNA
gggccacagaacctactcgt

SEQ ID NO: 134188 - DNA, 20 bp, Artificial Sequence
  mmSKRIPTE0004967_Tnfaip3_8
  gRNA
tgatcaggtgagtcgtgccg

SEQ ID NO: 134189 - DNA, 20 bp, Artificial Sequence
  mmSKRIPTE0004968_Tnfaip3_9
  gRNA
gctgtcatagcctaggacga

SEQ ID NO: 134190 - DNA, 20 bp, Artificial Sequence
  mmSKRIPTE0004969_Bves_1
  gRNA
ggagtggttcaaacaaccga

SEQ ID NO: 134191 - DNA, 20 bp, Artificial Sequence
  mmSKRIPTE0004970_Bves_2
  gRNA
ggcctgcaccactttctgcg

SEQ ID NO: 134192 - DNA, 20 bp, Artificial Sequence
  mmSKRIPTE0004971_Bves_3
  gRNA
ggcatgagtggggacacgcg

SEQ ID NO: 134193 - DNA, 20 bp, Artificial Sequence
  mmSKRIPTE0004972_Bves_4
  gRNA
ttccacggagtccatcccgc

SEQ ID NO: 134194 - DNA, 20 bp, Artificial Sequence
  mmSKRIPTE0004973_Bves_5
  gRNA
gactaaaataggcatcccgg

SEQ ID NO: 134195 - DNA, 20 bp, Artificial Sequence
  mmSKRIPTE0004974_Bves_6
  gRNA
tgccaagatgaagccaatcg

SEQ ID NO: 134196 - DNA, 20 bp, Artificial Sequence
  mmSKRIPTE0004975_Bves_7
  gRNA
tgtccactaacttagaacgt

SEQ ID NO: 134197 - DNA, 20 bp, Artificial Sequence
  mmSKRIPTE0004976_Bves_8
  gRNA
aaccttctaaacaaatccgg

SEQ ID NO: 134198 - DNA, 20 bp, Artificial Sequence
  mmSKRIPTE0004977_Bves_9
  gRNA
tcgcgcgggaaagttgggca

SEQ ID NO: 134199 - DNA, 20 bp, Artificial Sequence
  mmSKRIPTE0004978_Rel_1
  gRNA
tcatgcgggtccatctcgag

SEQ ID NO: 134200 - DNA, 20 bp, Artificial Sequence
  mmSKRIPTE0004979_Rel_2
  gRNA
tgccgtgtgaacaagaactg

SEQ ID NO: 134201 - DNA, 20 bp, Artificial Sequence
  mmSKRIPTE0004980_Rel_3
  gRNA
atggcctcgagtgagtaccg

SEQ ID NO: 134202 - DNA, 20 bp, Artificial Sequence
  mmSKRIPTE0004981_Rel_4
  gRNA
agtaagcgcactggcccgcg

SEQ ID NO: 134203 - DNA, 20 bp, Artificial Sequence
  mmSKRIPTE0004982_Rel_5
  gRNA
acaagcgccttatcagagtg

SEQ ID NO: 134204 - DNA, 20 bp, Artificial Sequence
  mmSKRIPTE0004983_Rel_6
  gRNA
ccggacatacccgtctgtcc

SEQ ID NO: 134205 - DNA, 20 bp, Artificial Sequence
  mmSKRIPTE0004984_Rel_7
  gRNA
ggtgtgagccgcaaacccag

SEQ ID NO: 134206 - DNA, 20 bp, Artificial Sequence
  mmSKRIPTE0004985_Rel_8
  gRNA
actgcgacctcaatgtggtg

SEQ ID NO: 134207 - DNA, 20 bp, Artificial Sequence
  mmSKRIPTE0004986_Rel_9
  gRNA
ttcacacgcaaaccccggag

SEQ ID NO: 134208 - DNA, 20 bp, Artificial Sequence
  mmSKRIPTE0004987_Dock2_1
  gRNA
actagggcagaatcgaggca

SEQ ID NO: 134209 - DNA, 20 bp, Artificial Sequence
  mmSKRIPTE0004988_Dock2_2
  gRNA
actcacgactagcaagtccc

SEQ ID NO: 134210 - DNA, 20 bp, Artificial Sequence
  mmSKRIPTE0004989_Dock2_3
  gRNA
acttagatctcggagactcg

SEQ ID NO: 134211 - DNA, 20 bp, Artificial Sequence
  mmSKRIPTE0004990_Dock2_4
  gRNA
ggtatgtcactaataaacag

SEQ ID NO: 134212 - DNA, 20 bp, Artificial Sequence
  mmSKRIPTE0004991_Dock2_5
  gRNA
agcacactgtcggtattggg

SEQ ID NO: 134213 - DNA, 20 bp, Artificial Sequence
  mmSKRIPTE0004992_Dock2_6
  gRNA
gaaccggacagtcatcacga

SEQ ID NO: 134214 - DNA, 20 bp, Artificial Sequence
  mmSKRIPTE0004993_Dock2_7
  gRNA
gtggcctaagcagtgcgatg

SEQ ID NO: 134215 - DNA, 20 bp, Artificial Sequence
  mmSKRIPTE0004994_Dock2_8
  gRNA
acgggaggtaacctgtacca

SEQ ID NO: 134216 - DNA, 20 bp, Artificial Sequence
  mmSKRIPTE0004995_Dock2_9
  gRNA
ggaacactagaccttccagc

SEQ ID NO: 134217 - DNA, 20 bp, Artificial Sequence
  mmSKRIPTE0004996_Nme1_1
  gRNA
gttccgtgcgagcagctgcg

SEQ ID NO: 134218 - DNA, 20 bp, Artificial Sequence
  mmSKRIPTE0004997_Nme1_2
  gRNA
taaagggtgcactctccgcg

SEQ ID NO: 134219 - DNA, 20 bp, Artificial Sequence
  mmSKRIPTE0004998_Nme1_3
  gRNA
aatggtaaatactgccacgg

SEQ ID NO: 134220 - DNA, 20 bp, Artificial Sequence
  mmSKRIPTE0004999_Nme1_4
  gRNA
tctaagcctgggaccatacg

SEQ ID NO: 134221 - DNA, 20 bp, Artificial Sequence
  mmSKRIPTE0005000_Nme1_5
  gRNA
gtcagcttgatacgccacgt

SEQ ID NO: 134222 - DNA, 20 bp, Artificial Sequence
  mmSKRIPTE0005001_Nme1_6
  gRNA
tgttccaatactaaggacgc

SEQ ID NO: 134223 - DNA, 20 bp, Artificial Sequence
  mmSKRIPTE0005002_Nme1_7
  gRNA
atgaacacgataccacctgc

SEQ ID NO: 134224 - DNA, 20 bp, Artificial Sequence
  mmSKRIPTE0005003_Nme1_8
  gRNA
tcaattcagacccatccgtg

SEQ ID NO: 134225 - DNA, 20 bp, Artificial Sequence
  mmSKRIPTE0005004_Nme1_9
  gRNA
ccgactccccagaagaagcg

SEQ ID NO: 134226 - DNA, 20 bp, Artificial Sequence
  mmSKRIPTE0005005_Nup85_1
  gRNA
cggacgtggatttatagcag

SEQ ID NO: 134227 - DNA, 20 bp, Artificial Sequence
  mmSKRIPTE0005006_Nup85_2
  gRNA
gcactactgacacttcccca

SEQ ID NO: 134228 - DNA, 20 bp, Artificial Sequence
  mmSKRIPTE0005007_Nup85_3
  gRNA
aactgtaagggcgatcggag

SEQ ID NO: 134229 - DNA, 20 bp, Artificial Sequence
  mmSKRIPTE0005008_Nup85_4
  gRNA
ctacctgtcagatacgagtg

SEQ ID NO: 134230 - DNA, 20 bp, Artificial Sequence
  mmSKRIPTE0005009_Nup85_5
  gRNA
taacggtgggactattaatg

SEQ ID NO: 134231 - DNA, 20 bp, Artificial Sequence
  mmSKRIPTE0005010_Nup85_6
  gRNA
gttgtagtgaggctgtcgga

SEQ ID NO: 134232 - DNA, 20 bp, Artificial Sequence
  mmSKRIPTE0005011_Nup85_7
  gRNA
acgtgtacacggtactgctt

SEQ ID NO: 134233 - DNA, 20 bp, Artificial Sequence
  mmSKRIPTE0005012_Nup85_8
  gRNA
agcatcattggatacgacct

SEQ ID NO: 134234 - DNA, 20 bp, Artificial Sequence
  mmSKRIPTE0005013_Nup85_9
  gRNA
gctgctaaagatccagccag

SEQ ID NO: 134235 - DNA, 20 bp, Artificial Sequence
  mmSKRIPTE0005014_Lrrc14_1
  gRNA
aagtgactcaaggtataccc

SEQ ID NO: 134236 - DNA, 20 bp, Artificial Sequence
  mmSKRIPTE0005015_Lrrc14_2
  gRNA
acaggctgagctacgtaccg

SEQ ID NO: 134237 - DNA, 20 bp, Artificial Sequence
  mmSKRIPTE0005016_Lrrc14_3
  gRNA
cttggacggcaggttcgacg

SEQ ID NO: 134238 - DNA, 20 bp, Artificial Sequence
  mmSKRIPTE0005017_Lrrc14_4
  gRNA
tctacccatgcgtaacactg

SEQ ID NO: 134239 - DNA, 20 bp, Artificial Sequence
  mmSKRIPTE0005018_Lrrc14_5
  gRNA
atagcctacttatagactag

SEQ ID NO: 134240 - DNA, 20 bp, Artificial Sequence
  mmSKRIPTE0005019_Lrrc14_6
  gRNA
ggtctactcggatttccacg

SEQ ID NO: 134241 - DNA, 20 bp, Artificial Sequence
  mmSKRIPTE0005020_Lrrc14_7
  gRNA
cagatgctctgagccccccg

SEQ ID NO: 134242 - DNA, 20 bp, Artificial Sequence
  mmSKRIPTE0005021_Lrrc14_8
  gRNA
ctcacgaaggaatgtgtacg

SEQ ID NO: 134243 - DNA, 20 bp, Artificial Sequence
  mmSKRIPTE0005022_Lrrc14_9
  gRNA
agatcaaggacagtcacgcg

SEQ ID NO: 134244 - DNA, 20 bp, Artificial Sequence
  mmSKRIPTE0005023_Cd200_1
  gRNA
ctcttggaatgcaaacaccg

SEQ ID NO: 134245 - DNA, 20 bp, Artificial Sequence
  mmSKRIPTE0005024_Cd200_2
  gRNA
ctttggagaagtggtatccg

SEQ ID NO: 134246 - DNA, 20 bp, Artificial Sequence
  mmSKRIPTE0005025_Cd200_3
  gRNA
gcgattccattgcgaaaaca

SEQ ID NO: 134247 - DNA, 20 bp, Artificial Sequence
  mmSKRIPTE0005026_Cd200_4
  gRNA
acgcgtgtatctagggtggg

SEQ ID NO: 134248 - DNA, 20 bp, Artificial Sequence
  mmSKRIPTE0005027_Cd200_5
  gRNA
catcagattcaagtagacca

SEQ ID NO: 134249 - DNA, 20 bp, Artificial Sequence
  mmSKRIPTE0005028_Cd200_6
  gRNA
gaatgggcgatctggagccg

SEQ ID NO: 134250 - DNA, 20 bp, Artificial Sequence
  mmSKRIPTE0005029_Cd200_7
  gRNA
ccgactagggctcccatcgg

SEQ ID NO: 134251 - DNA, 20 bp, Artificial Sequence
  mmSKRIPTE0005030_Cd200_8
  gRNA
cgtcaccgaaatcaggagcg

SEQ ID NO: 134252 - DNA, 20 bp, Artificial Sequence
  mmSKRIPTE0005031_Cd200_9
  gRNA
gaagcacatagagaacggca

SEQ ID NO: 134253 - DNA, 20 bp, Artificial Sequence
  mmSKRIPTE0005032_Trim26_1
  gRNA
ctacgtgagagttaggctag

SEQ ID NO: 134254 - DNA, 20 bp, Artificial Sequence
  mmSKRIPTE0005033_Trim26_2
  gRNA
tgttcagtctcgagacgctg

SEQ ID NO: 134255 - DNA, 20 bp, Artificial Sequence
  mmSKRIPTE0005034_Trim26_3
  gRNA
gatacccgctcgatcctctg

SEQ ID NO: 134256 - DNA, 20 bp, Artificial Sequence
  mmSKRIPTE0005035_Trim26_4
  gRNA
cttgctcaggacctaccccg

SEQ ID NO: 134257 - DNA, 20 bp, Artificial Sequence
  mmSKRIPTE0005036_Trim26_5
  gRNA
ggaggtcgctcgtcgacctg

SEQ ID NO: 134258 - DNA, 20 bp, Artificial Sequence
  mmSKRIPTE0005037_Trim26_6
  gRNA
aggagaacatccgacccgtg

SEQ ID NO: 134259 - DNA, 20 bp, Artificial Sequence
  mmSKRIPTE0005038_Trim26_7
  gRNA
ccagatcatcagatgtagtg

SEQ ID NO: 134260 - DNA, 20 bp, Artificial Sequence
  mmSKRIPTE0005039_Trim26_8
  gRNA
atatctgccttgttacctag

SEQ ID NO: 134261 - DNA, 20 bp, Artificial Sequence
  mmSKRIPTE0005040_Trim26_9
  gRNA
tagcttacaccggttgagtg

SEQ ID NO: 134262 - DNA, 20 bp, Artificial Sequence
  mmSKRIPTE0005041_C3_1
  gRNA
tgatggaatacctgaccgtg

SEQ ID NO: 134263 - DNA, 20 bp, Artificial Sequence
  mmSKRIPTE0005042_C3_2
  gRNA
aagtaccactacgcgcgtga

SEQ ID NO: 134264 - DNA, 20 bp, Artificial Sequence
  mmSKRIPTE0005043_C3_3
  gRNA
cttgacaggaatgccatcgg

SEQ ID NO: 134265 - DNA, 20 bp, Artificial Sequence
  mmSKRIPTE0005044_C3_4
  gRNA
gtagaggtttcaagagaccg

SEQ ID NO: 134266 - DNA, 20 bp, Artificial Sequence
  mmSKRIPTE0005045_C3_5
  gRNA
gagataaccatctcgcacct

SEQ ID NO: 134267 - DNA, 20 bp, Artificial Sequence
  mmSKRIPTE0005046_C3_6
  gRNA
tgcagatcggaaccgctggg

SEQ ID NO: 134268 - DNA, 20 bp, Artificial Sequence
  mmSKRIPTE0005047_C3_7
  gRNA
actggctggaatctatgcgt

SEQ ID NO: 134269 - DNA, 20 bp, Artificial Sequence
  mmSKRIPTE0005048_C3_8
  gRNA
cttatatcggatcttcactg

SEQ ID NO: 134270 - DNA, 20 bp, Artificial Sequence
  mmSKRIPTE0005049_C3_9
  gRNA
gcgcatgttcgtaaaaggct

SEQ ID NO: 134271 - DNA, 20 bp, Artificial Sequence
  mmSKRIPTE0005050_Nlrc4_1
  gRNA
acaatacggggaatccggga

SEQ ID NO: 134272 - DNA, 20 bp, Artificial Sequence
  mmSKRIPTE0005051_Nlrc4_2
  gRNA
ttcaggagtacacggcaggt

SEQ ID NO: 134273 - DNA, 20 bp, Artificial Sequence
  mmSKRIPTE0005052_Nlrc4_3
  gRNA
ccttcacagaacctatcatg

SEQ ID NO: 134274 - DNA, 20 bp, Artificial Sequence
  mmSKRIPTE0005053_Nlrc4_4
  gRNA
gatatgcctcaggcactccg

SEQ ID NO: 134275 - DNA, 20 bp, Artificial Sequence
  mmSKRIPTE0005054_Nlrc4_5
  gRNA
tgcagcagttggatttagcg

SEQ ID NO: 134276 - DNA, 20 bp, Artificial Sequence
  mmSKRIPTE0005055_Nlrc4_6
  gRNA
catatggatgatctttcggg

SEQ ID NO: 134277 - DNA, 20 bp, Artificial Sequence
  mmSKRIPTE0005056_Nlrc4_7
  gRNA
tctactgagatctaggaacg

SEQ ID NO: 134278 - DNA, 20 bp, Artificial Sequence
  mmSKRIPTE0005057_Nlrc4_8
  gRNA
ggtttgctgataagaatggt

SEQ ID NO: 134279 - DNA, 20 bp, Artificial Sequence
  mmSKRIPTE0005058_Nlrc4_9
  gRNA
catagcgattctctgcagca

SEQ ID NO: 134280 - DNA, 20 bp, Artificial Sequence
  mmSKRIPTE0005059_Phpt1_1
  gRNA
cagccacggccaatcccgtg

SEQ ID NO: 134281 - DNA, 20 bp, Artificial Sequence
  mmSKRIPTE0005060_Phpt1_2
  gRNA
ctacatcaggaatctgaccg

SEQ ID NO: 134282 - DNA, 20 bp, Artificial Sequence
  mmSKRIPTE0005061_Phpt1_3
  gRNA
cccgacccaggcctatgcgt

SEQ ID NO: 134283 - DNA, 20 bp, Artificial Sequence
  mmSKRIPTE0005062_Phpt1_4
  gRNA
gagtgcaaggaaatcgtgcg

SEQ ID NO: 134284 - DNA, 20 bp, Artificial Sequence
  mmSKRIPTE0005063_Phpt1_5
  gRNA
agagacctgacttagtccgg

SEQ ID NO: 134285 - DNA, 20 bp, Artificial Sequence
  mmSKRIPTE0005064_Phpt1_6
  gRNA
acgaccgtaaccctagagaa

SEQ ID NO: 134286 - DNA, 20 bp, Artificial Sequence
  mmSKRIPTE0005065_Phpt1_7
  gRNA
cccagtatgattaggatggt

SEQ ID NO: 134287 - DNA, 20 bp, Artificial Sequence
  mmSKRIPTE0005066_Phpt1_8
  gRNA
ggtgtcatttggaaaacgtg

SEQ ID NO: 134288 - DNA, 20 bp, Artificial Sequence
  mmSKRIPTE0005067_Phpt1_9
  gRNA
agtcccagttaaaggagccg

SEQ ID NO: 134289 - DNA, 20 bp, Artificial Sequence
  mmSKRIPTE0005068_B2m_1
  gRNA
ggaaaacagaaggtactcgt

SEQ ID NO: 134290 - DNA, 20 bp, Artificial Sequence
  mmSKRIPTE0005069_B2m_2
  gRNA
caatccggactcagatccgg

SEQ ID NO: 134291 - DNA, 20 bp, Artificial Sequence
  mmSKRIPTE0005070_B2m_3
  gRNA
gagcccaagaccgtctactg

SEQ ID NO: 134292 - DNA, 20 bp, Artificial Sequence
  mmSKRIPTE0005071_B2m_4
  gRNA
agtatactcacgccacccac

SEQ ID NO: 134293 - DNA, 20 bp, Artificial Sequence
  mmSKRIPTE0005072_B2m_5
  gRNA
ctcctcaactaagggtcgag

SEQ ID NO: 134294 - DNA, 20 bp, Artificial Sequence
  mmSKRIPTE0005073_B2m_6
  gRNA
cccgtcgggaaggagaacta

SEQ ID NO: 134295 - DNA, 20 bp, Artificial Sequence
  mmSKRIPTE0005074_B2m_7
  gRNA
acagctttgaggctacaggg

SEQ ID NO: 134296 - DNA, 20 bp, Artificial Sequence
  mmSKRIPTE0005075_B2m_8
  gRNA
ccaagtaatgagaagtacag

SEQ ID NO: 134297 - DNA, 20 bp, Artificial Sequence
  mmSKRIPTE0005076_B2m_9
  gRNA
aaaatgtgggtagactttgg

SEQ ID NO: 134298 - DNA, 20 bp, Artificial Sequence
  mmSKRIPTE0005077_Prex1_1
  gRNA
gaccttcgtgcaccccaaag

SEQ ID NO: 134299 - DNA, 20 bp, Artificial Sequence
  mmSKRIPTE0005078_Prex1_2
  gRNA
aaagctcaggtagctaccgt

SEQ ID NO: 134300 - DNA, 20 bp, Artificial Sequence
  mmSKRIPTE0005079_Prex1_3
  gRNA
cctgccctaatatcgcagag

SEQ ID NO: 134301 - DNA, 20 bp, Artificial Sequence
  mmSKRIPTE0005080_Prex1_4
  gRNA
aagttgcaatgggaatacgg

SEQ ID NO: 134302 - DNA, 20 bp, Artificial Sequence
  mmSKRIPTE0005081_Prex1_5
  gRNA
tgacacaaccaagtccaacg

SEQ ID NO: 134303 - DNA, 20 bp, Artificial Sequence
  mmSKRIPTE0005082_Prex1_6
  gRNA
tctactctaatcaggcccag

SEQ ID NO: 134304 - DNA, 20 bp, Artificial Sequence
  mmSKRIPTE0005083_Prex1_7
  gRNA
acttaccgtggtgcaccttg

SEQ ID NO: 134305 - DNA, 20 bp, Artificial Sequence
  mmSKRIPTE0005084_Prex1_8
  gRNA
cgagctctgctatcgcctgg

SEQ ID NO: 134306 - DNA, 20 bp, Artificial Sequence
  mmSKRIPTE0005085_Prex1_9
  gRNA
gttgtagcggtagtcaaggg

SEQ ID NO: 134307 - DNA, 20 bp, Artificial Sequence
  mmSKRIPTE0005086_Lck_1
  gRNA
tctatgcagacgcctctgat

SEQ ID NO: 134308 - DNA, 20 bp, Artificial Sequence
  mmSKRIPTE0005087_Lck_2
  gRNA
accccatcagggtactacaa

SEQ ID NO: 134309 - DNA, 20 bp, Artificial Sequence
  mmSKRIPTE0005088_Lck_3
  gRNA
tccgggaaaagtgatacgag

SEQ ID NO: 134310 - DNA, 20 bp, Artificial Sequence
  mmSKRIPTE0005089_Lck_4
  gRNA
gatgaagtcaccttgcagcg

SEQ ID NO: 134311 - DNA, 20 bp, Artificial Sequence
  mmSKRIPTE0005090_Lck_5
  gRNA
cacggtcgaatcccttaccc

SEQ ID NO: 134312 - DNA, 20 bp, Artificial Sequence
  mmSKRIPTE0005091_Lck_6
  gRNA
tgagccgtaaggacgccgag

SEQ ID NO: 134313 - DNA, 20 bp, Artificial Sequence
  mmSKRIPTE0005092_Lck_7
  gRNA
ttcgctttcccggatcagga

SEQ ID NO: 134314 - DNA, 20 bp, Artificial Sequence
  mmSKRIPTE0005093_Lck_8
  gRNA
tctcccaggtagtcccccaa

SEQ ID NO: 134315 - DNA, 20 bp, Artificial Sequence
  mmSKRIPTE0005094_Lck_9
  gRNA
cgtgagcaggagacctccgt

SEQ ID NO: 134316 - DNA, 20 bp, Artificial Sequence
  mmSKRIPTE0005095_Tesc_1
  gRNA
gctcgagcggcctcttatag

SEQ ID NO: 134317 - DNA, 20 bp, Artificial Sequence
  mmSKRIPTE0005096_Tesc_2
  gRNA
cagctgctctatctggtccg

SEQ ID NO: 134318 - DNA, 20 bp, Artificial Sequence
  mmSKRIPTE0005097_Tesc_3
  gRNA
gcagtcacgaatgatcggaa

SEQ ID NO: 134319 - DNA, 20 bp, Artificial Sequence
  mmSKRIPTE0005098_Tesc_4
  gRNA
cttcagttatcctcctcgtg

SEQ ID NO: 134320 - DNA, 20 bp, Artificial Sequence
  mmSKRIPTE0005099_Tesc_5
  gRNA
tcagtgagcacctaacagag

SEQ ID NO: 134321 - DNA, 20 bp, Artificial Sequence
  mmSKRIPTE0005100_Tesc_6
  gRNA
aaccggaccaggtgtacgag

SEQ ID NO: 134322 - DNA, 20 bp, Artificial Sequence
  mmSKRIPTE0005101_Tesc_7
  gRNA
ttgttctgacctccgcacca

SEQ ID NO: 134323 - DNA, 20 bp, Artificial Sequence
  mmSKRIPTE0005102_Tesc_8
  gRNA
cgtgtggtctgtgacgtaag

SEQ ID NO: 134324 - DNA, 20 bp, Artificial Sequence
  mmSKRIPTE0005103_Tesc_9
  gRNA
tggctgcacgtcttaccgaa

SEQ ID NO: 134325 - DNA, 20 bp, Artificial Sequence
  mmSKRIPTE0005104_Nod1_1
  gRNA
accgtgagacggctaaagca

SEQ ID NO: 134326 - DNA, 20 bp, Artificial Sequence
  mmSKRIPTE0005105_Nod1_2
  gRNA
ctgcacgtagggtttccgcc

SEQ ID NO: 134327 - DNA, 20 bp, Artificial Sequence
  mmSKRIPTE0005106_Nod1_3
  gRNA
cacgcattaagagcatacgc

SEQ ID NO: 134328 - DNA, 20 bp, Artificial Sequence
  mmSKRIPTE0005107_Nod1_4
  gRNA
ataagatcgtgacgttcctg

SEQ ID NO: 134329 - DNA, 20 bp, Artificial Sequence
  mmSKRIPTE0005108_Nod1_5
  gRNA
tactcacccaacatcaacga

SEQ ID NO: 134330 - DNA, 20 bp, Artificial Sequence
  mmSKRIPTE0005109_Nod1_6
  gRNA
gttcggttctggattctcag

SEQ ID NO: 134331 - DNA, 20 bp, Artificial Sequence
  mmSKRIPTE0005110_Nod1_7
  gRNA
cgtcaaccagatcaccgaca

SEQ ID NO: 134332 - DNA, 20 bp, Artificial Sequence
  mmSKRIPTE0005111_Nod1_8
  gRNA
ttggtctgtccattacacaa

SEQ ID NO: 134333 - DNA, 20 bp, Artificial Sequence
  mmSKRIPTE0005112_Nod1_9
  gRNA
cgtctgcagggtctcagccg

SEQ ID NO: 134334 - DNA, 20 bp, Artificial Sequence
  mmSKRIPTE0005113_Igbp1b_1
  gRNA
aacacttcgagtgaggacga

SEQ ID NO: 134335 - DNA, 20 bp, Artificial Sequence
  mmSKRIPTE0005114_Igbp1b_2
  gRNA
aacgacgccatcttgccaga

SEQ ID NO: 134336 - DNA, 20 bp, Artificial Sequence
  mmSKRIPTE0005115_Igbp1b_3
  gRNA
agagcaccggacattaacta

SEQ ID NO: 134337 - DNA, 20 bp, Artificial Sequence
  mmSKRIPTE0005116_Igbp1b_4
  gRNA
tggaaggacactcatcctag

SEQ ID NO: 134338 - DNA, 20 bp, Artificial Sequence
  mmSKRIPTE0005117_Igbp1b_5
  gRNA
gggcatcagaggtggcagcg

SEQ ID NO: 134339 - DNA, 20 bp, Artificial Sequence
  mmSKRIPTE0005118_Igbp1b_6
  gRNA
agtgttctcgagcatcctgc

SEQ ID NO: 134340 - DNA, 20 bp, Artificial Sequence
  mmSKRIPTE0005119_Igbp1b_7
  gRNA
gtcttaggcttatagagacc

SEQ ID NO: 134341 - DNA, 20 bp, Artificial Sequence
  mmSKRIPTE0005120_Igbp1b_8
  gRNA
ctgctcgtaccagtcattca

SEQ ID NO: 134342 - DNA, 20 bp, Artificial Sequence
  mmSKRIPTE0005121_Igbp1b_9
  gRNA
taggtggattagcatcagcc

SEQ ID NO: 134343 - DNA, 20 bp, Artificial Sequence
  mmSKRIPTE0005122_Relb_1
  gRNA
cactacaatatgacccccgg

SEQ ID NO: 134344 - DNA, 20 bp, Artificial Sequence
  mmSKRIPTE0005123_Relb_2
  gRNA
gtttcccaaccagtaccgag

SEQ ID NO: 134345 - DNA, 20 bp, Artificial Sequence
  mmSKRIPTE0005124_Relb_3
  gRNA
acagaggtcgctatgacagt

SEQ ID NO: 134346 - DNA, 20 bp, Artificial Sequence
  mmSKRIPTE0005125_Relb_4
  gRNA
ctccaagtcccaccttaatg

SEQ ID NO: 134347 - DNA, 20 bp, Artificial Sequence
  mmSKRIPTE0005126_Relb_5
  gRNA
gtccaacatagtgaagagcg

SEQ ID NO: 134348 - DNA, 20 bp, Artificial Sequence
  mmSKRIPTE0005127_Relb_6
  gRNA
ccaagttagttctgactacg

SEQ ID NO: 134349 - DNA, 20 bp, Artificial Sequence
  mmSKRIPTE0005128_Relb_7
  gRNA
ggggctcggatttcgccctg

SEQ ID NO: 134350 - DNA, 20 bp, Artificial Sequence
  mmSKRIPTE0005129_Relb_8
  gRNA
tttgacgtgacgtcacggag

SEQ ID NO: 134351 - DNA, 20 bp, Artificial Sequence
  mmSKRIPTE0005130_Relb_9
  gRNA
ctcagggcgagcgcacacga

SEQ ID NO: 134352 - DNA, 20 bp, Artificial Sequence
  mmSKRIPTE0005131_Cebpa_1
  gRNA
tgctcgcagatgccgcccag

SEQ ID NO: 134353 - DNA, 20 bp, Artificial Sequence
  mmSKRIPTE0005132_Cebpa_2
  gRNA
taaagccaaacaacgcaacg

SEQ ID NO: 134354 - DNA, 20 bp, Artificial Sequence
  mmSKRIPTE0005133_Cebpa_3
  gRNA
atacacccttggacaactag

SEQ ID NO: 134355 - DNA, 20 bp, Artificial Sequence
  mmSKRIPTE0005134_Cebpa_4
  gRNA
agacccgtttggacaccagg

SEQ ID NO: 134356 - DNA, 20 bp, Artificial Sequence
  mmSKRIPTE0005135_Cebpa_5
  gRNA
ggagtcggccgacttctacg

SEQ ID NO: 134357 - DNA, 20 bp, Artificial Sequence
  mmSKRIPTE0005136_Cebpa_6
  gRNA
gcacaatcgatccatcccag

SEQ ID NO: 134358 - DNA, 20 bp, Artificial Sequence
  mmSKRIPTE0005137_Cebpa_7
  gRNA
aggactaggagattccggtg

SEQ ID NO: 134359 - DNA, 20 bp, Artificial Sequence
  mmSKRIPTE0005138_Cebpa_8
  gRNA
gtgctagtggagagagatcg

SEQ ID NO: 134360 - DNA, 20 bp, Artificial Sequence
  mmSKRIPTE0005139_Cebpa_9
  gRNA
actcggtgcgtctaagatga

SEQ ID NO: 134361 - DNA, 20 bp, Artificial Sequence
  mmSKRIPTE0005140_Chrna7_1
  gRNA
tactcggcaggggcaccatg

SEQ ID NO: 134362 - DNA, 20 bp, Artificial Sequence
  mmSKRIPTE0005141_Chrna7_2
  gRNA
cacacaggtccatggatcgt

SEQ ID NO: 134363 - DNA, 20 bp, Artificial Sequence
  mmSKRIPTE0005142_Chrna7_3
  gRNA
gctgcacggtaacctcagcg

SEQ ID NO: 134364 - DNA, 20 bp, Artificial Sequence
  mmSKRIPTE0005143_Chrna7_4
  gRNA
tggatgtggtgagtctggcg

SEQ ID NO: 134365 - DNA, 20 bp, Artificial Sequence
  mmSKRIPTE0005144_Chrna7_5
  gRNA
gtagagtgtcctacggcgca

SEQ ID NO: 134366 - DNA, 20 bp, Artificial Sequence
  mmSKRIPTE0005145_Chrna7_6
  gRNA
aaaccatgggacttatggca

SEQ ID NO: 134367 - DNA, 20 bp, Artificial Sequence
  mmSKRIPTE0005146_Chrna7_7
  gRNA
tcctggtctgcaacgacaag

SEQ ID NO: 134368 - DNA, 20 bp, Artificial Sequence
  mmSKRIPTE0005147_Chrna7_8
  gRNA
ccattgtcaagtgaacagca

SEQ ID NO: 134369 - DNA, 20 bp, Artificial Sequence
  mmSKRIPTE0005148_Chrna7_9
  gRNA
gatatcaatatcttacagag

SEQ ID NO: 134370 - DNA, 20 bp, Artificial Sequence
  mmSKRIPTE0005149_Gab2_1
  gRNA
gctggctatggaacgaccag

SEQ ID NO: 134371 - DNA, 20 bp, Artificial Sequence
  mmSKRIPTE0005150_Gab2_2
  gRNA
tcgttgttgtgggaatactg

SEQ ID NO: 134372 - DNA, 20 bp, Artificial Sequence
  mmSKRIPTE0005151_Gab2_3
  gRNA
acgacgtggtgtgtaccggc

SEQ ID NO: 134373 - DNA, 20 bp, Artificial Sequence
  mmSKRIPTE0005152_Gab2_4
  gRNA
acctacgagtacccggcacg

SEQ ID NO: 134374 - DNA, 20 bp, Artificial Sequence
  mmSKRIPTE0005153_Gab2_5
  gRNA
cgctggtttatacttcggag

SEQ ID NO: 134375 - DNA, 20 bp, Artificial Sequence
  mmSKRIPTE0005154_Gab2_6
  gRNA
tgcaagtagagatactcctg

SEQ ID NO: 134376 - DNA, 20 bp, Artificial Sequence
  mmSKRIPTE0005155_Gab2_7
  gRNA
tgccgtgggatatactcaca

SEQ ID NO: 134377 - DNA, 20 bp, Artificial Sequence
  mmSKRIPTE0005156_Gab2_8
  gRNA
gacaacagccgactccatcg

SEQ ID NO: 134378 - DNA, 20 bp, Artificial Sequence
  mmSKRIPTE0005157_Gab2_9
  gRNA
aaatgccatcattcttcggg

SEQ ID NO: 134379 - DNA, 20 bp, Artificial Sequence
  mmSKRIPTE0005158_Cd81_1
  gRNA
ttccatgagacggtatagct

SEQ ID NO: 134380 - DNA, 20 bp, Artificial Sequence
  mmSKRIPTE0005159_Cd81_2
  gRNA
atcctgcatcgcgagcagtg

SEQ ID NO: 134381 - DNA, 20 bp, Artificial Sequence
  mmSKRIPTE0005160_Cd81_3
  gRNA
atctcccactcggtgaacct

SEQ ID NO: 134382 - DNA, 20 bp, Artificial Sequence
  mmSKRIPTE0005161_Cd81_4
  gRNA
cgggccggagaactgcgttg

SEQ ID NO: 134383 - DNA, 20 bp, Artificial Sequence
  mmSKRIPTE0005162_Cd81_5
  gRNA
tagcccatgaggtaccaact

SEQ ID NO: 134384 - DNA, 20 bp, Artificial Sequence
  mmSKRIPTE0005163_Cd81_6
  gRNA
gctcacctaactctaaggac

SEQ ID NO: 134385 - DNA, 20 bp, Artificial Sequence
  mmSKRIPTE0005164_Cd81_7
  gRNA
agggtgagcaggtccaatag

SEQ ID NO: 134386 - DNA, 20 bp, Artificial Sequence
  mmSKRIPTE0005165_Cd81_8
  gRNA
caatggctgcaattccaatg

SEQ ID NO: 134387 - DNA, 20 bp, Artificial Sequence
  mmSKRIPTE0005166_Cd81_9
  gRNA
cctgacccttagatcctgag

SEQ ID NO: 134388 - DNA, 20 bp, Artificial Sequence
  mmSKRIPTE0005167_Tlr3_1
  gRNA
gaatggtcaagttacgaaga

SEQ ID NO: 134389 - DNA, 20 bp, Artificial Sequence
  mmSKRIPTE0005168_Tlr3_2
  gRNA
ggtactgctcattcacatcg

SEQ ID NO: 134390 - DNA, 20 bp, Artificial Sequence
  mmSKRIPTE0005169_Tlr3_3
  gRNA
ggaaattaacgggaccaccg

SEQ ID NO: 134391 - DNA, 20 bp, Artificial Sequence
  mmSKRIPTE0005170_Tlr3_4
  gRNA
tgagaaattatcgtttggca

SEQ ID NO: 134392 - DNA, 20 bp, Artificial Sequence
  mmSKRIPTE0005171_Tlr3_5
  gRNA
tcacaaatcgaccttcaggg

SEQ ID NO: 134393 - DNA, 20 bp, Artificial Sequence
  mmSKRIPTE0005172_Tlr3_6
  gRNA
tggacccagcagtcacgacg

SEQ ID NO: 134394 - DNA, 20 bp, Artificial Sequence
  mmSKRIPTE0005173_Tlr3_7
  gRNA
cacacccagctatgtacgtg

SEQ ID NO: 134395 - DNA, 20 bp, Artificial Sequence
  mmSKRIPTE0005174_Tlr3_8
  gRNA
atctacaaagttgggaacgg

SEQ ID NO: 134396 - DNA, 20 bp, Artificial Sequence
  mmSKRIPTE0005175_Tlr3_9
  gRNA
gatgtatcgaaaagcttcag

SEQ ID NO: 134397 - DNA, 20 bp, Artificial Sequence
  mmSKRIPTE0005176_Il34_1
  gRNA
tcttgggatcctacttgacg

SEQ ID NO: 134398 - DNA, 20 bp, Artificial Sequence
  mmSKRIPTE0005177_Il34_2
  gRNA
gcgggtggccaagaacgacg

SEQ ID NO: 134399 - DNA, 20 bp, Artificial Sequence
  mmSKRIPTE0005178_Il34_3
  gRNA
tgccacgtggttgatccatg

SEQ ID NO: 134400 - DNA, 20 bp, Artificial Sequence
  mmSKRIPTE0005179_Il34_4
  gRNA
gtgatggatgtacttctcga

SEQ ID NO: 134401 - DNA, 20 bp, Artificial Sequence
  mmSKRIPTE0005180_Il34_5
  gRNA
tgagcatgtgagacacacga

SEQ ID NO: 134402 - DNA, 20 bp, Artificial Sequence
  mmSKRIPTE0005181_Il34_6
  gRNA
cattgctggagaacgtacag

SEQ ID NO: 134403 - DNA, 20 bp, Artificial Sequence
  mmSKRIPTE0005182_Il34_7
  gRNA
aggtgtacaccaacggcctg

SEQ ID NO: 134404 - DNA, 20 bp, Artificial Sequence
  mmSKRIPTE0005183_Il34_8
  gRNA
ttgccaaacattgaccagga

SEQ ID NO: 134405 - DNA, 20 bp, Artificial Sequence
  mmSKRIPTE0005184_Il34_9
  gRNA
aggactccaaggcacctcgg

SEQ ID NO: 134406 - DNA, 20 bp, Artificial Sequence
  mmSKRIPTE0005185_Marco_1
  gRNA
gttgccaaatcgagtgctag

SEQ ID NO: 134407 - DNA, 20 bp, Artificial Sequence
  mmSKRIPTE0005186_Marco_2
  gRNA
caatggatcactagctatcg

SEQ ID NO: 134408 - DNA, 20 bp, Artificial Sequence
  mmSKRIPTE0005187_Marco_3
  gRNA
gttcgttctagctgaaaacg

SEQ ID NO: 134409 - DNA, 20 bp, Artificial Sequence
  mmSKRIPTE0005188_Marco_4
  gRNA
gcagggctcccatttaactg

SEQ ID NO: 134410 - DNA, 20 bp, Artificial Sequence
  mmSKRIPTE0005189_Marco_5
  gRNA
gtgactagatcttccccggt

SEQ ID NO: 134411 - DNA, 20 bp, Artificial Sequence
  mmSKRIPTE0005190_Marco_6
  gRNA
caccagagtctaaaccctgt

SEQ ID NO: 134412 - DNA, 20 bp, Artificial Sequence
  mmSKRIPTE0005191_Marco_7
  gRNA
gttatgagtcttgaaaaccc

SEQ ID NO: 134413 - DNA, 20 bp, Artificial Sequence
  mmSKRIPTE0005192_Marco_8
  gRNA
atattgccggagccagtgtg

SEQ ID NO: 134414 - DNA, 20 bp, Artificial Sequence
  mmSKRIPTE0005193_Marco_9
  gRNA
gtgaacgaggctctccaggt

SEQ ID NO: 134415 - DNA, 20 bp, Artificial Sequence
  mmSKRIPTE0005194_Rab29_1
  gRNA
caagcactacaagtccaccg

SEQ ID NO: 134416 - DNA, 20 bp, Artificial Sequence
  mmSKRIPTE0005195_Rab29_2
  gRNA
acccttccttcaccggaggt

SEQ ID NO: 134417 - DNA, 20 bp, Artificial Sequence
  mmSKRIPTE0005196_Rab29_3
  gRNA
aaggaaggtgccaatcgcgg

SEQ ID NO: 134418 - DNA, 20 bp, Artificial Sequence
  mmSKRIPTE0005197_Rab29_4
  gRNA
gaggcaacctcggtacccag

SEQ ID NO: 134419 - DNA, 20 bp, Artificial Sequence
  mmSKRIPTE0005198_Rab29_5
  gRNA
cgctcgccagcattgaaccg

SEQ ID NO: 134420 - DNA, 20 bp, Artificial Sequence
  mmSKRIPTE0005199_Rab29_6
  gRNA
aatcagagaagagaatccgt

SEQ ID NO: 134421 - DNA, 20 bp, Artificial Sequence
  mmSKRIPTE0005200_Rab29_7
  gRNA
gagaagcttcaaccaaccga

SEQ ID NO: 134422 - DNA, 20 bp, Artificial Sequence
  mmSKRIPTE0005201_Rab29_8
  gRNA
atgtagttctccgagcagtg

SEQ ID NO: 134423 - DNA, 20 bp, Artificial Sequence
  mmSKRIPTE0005202_Rab29_9
  gRNA
cagagacgtcttgccaacgg

SEQ ID NO: 134424 - DNA, 20 bp, Artificial Sequence
  mmSKRIPTE0005203_Rnasel_1
  gRNA
cgaagaatcatcttcgacaa

SEQ ID NO: 134425 - DNA, 20 bp, Artificial Sequence
  mmSKRIPTE0005204_Rnasel_2
  gRNA
tttgcgacgacagacaacga

SEQ ID NO: 134426 - DNA, 20 bp, Artificial Sequence
  mmSKRIPTE0005205_Rnasel_3
  gRNA
gaccagtggacatctaaggt

SEQ ID NO: 134427 - DNA, 20 bp, Artificial Sequence
  mmSKRIPTE0005206_Rnasel_4
  gRNA
tataggcgaacacatcaatg

SEQ ID NO: 134428 - DNA, 20 bp, Artificial Sequence
  mmSKRIPTE0005207_Rnasel_5
  gRNA
gatctatgacaatcgagaag

SEQ ID NO: 134429 - DNA, 20 bp, Artificial Sequence
  mmSKRIPTE0005208_Rnasel_6
  gRNA
ggggctgatgttaacgtgag

SEQ ID NO: 134430 - DNA, 20 bp, Artificial Sequence
  mmSKRIPTE0005209_Rnasel_7
  gRNA
cgcctcacagttcacgttgg

SEQ ID NO: 134431 - DNA, 20 bp, Artificial Sequence
  mmSKRIPTE0005210_Rnasel_8
  gRNA
atggtgctgaccctcatcgg

SEQ ID NO: 134432 - DNA, 20 bp, Artificial Sequence
  mmSKRIPTE0005211_Rnasel_9
  gRNA
gttcagcagagtacggatca

SEQ ID NO: 134433 - DNA, 20 bp, Artificial Sequence
  mmSKRIPTE0005212_Fbxo7_1
  gRNA
gcaaagccgccctcgcagag

SEQ ID NO: 134434 - DNA, 20 bp, Artificial Sequence
  mmSKRIPTE0005213_Fbxo7_2
  gRNA
ccccccttaagctaccgacg

SEQ ID NO: 134435 - DNA, 20 bp, Artificial Sequence
  mmSKRIPTE0005214_Fbxo7_3
  gRNA
ttctactccagcagcaacgt

SEQ ID NO: 134436 - DNA, 20 bp, Artificial Sequence
  mmSKRIPTE0005215_Fbxo7_4
  gRNA
ccggaagtgactactcaccg

SEQ ID NO: 134437 - DNA, 20 bp, Artificial Sequence
  mmSKRIPTE0005216_Fbxo7_5
  gRNA
tgagccgcgtcgctgtcgtg

SEQ ID NO: 134438 - DNA, 20 bp, Artificial Sequence
  mmSKRIPTE0005217_Fbxo7_6
  gRNA
gagatgcaccagcactatca

SEQ ID NO: 134439 - DNA, 20 bp, Artificial Sequence
  mmSKRIPTE0005218_Fbxo7_7
  gRNA
ctgaactatcccaaccgcag

SEQ ID NO: 134440 - DNA, 20 bp, Artificial Sequence
  mmSKRIPTE0005219_Fbxo7_8
  gRNA
tatcaaacagcgcagacatg

SEQ ID NO: 134441 - DNA, 20 bp, Artificial Sequence
  mmSKRIPTE0005220_Fbxo7_9
  gRNA
tacactaatagtgcccagaa

SEQ ID NO: 134442 - DNA, 20 bp, Artificial Sequence
  mmSKRIPTE0005221_Arrb2_1
  gRNA
gactacttgaaggaccggaa

SEQ ID NO: 134443 - DNA, 20 bp, Artificial Sequence
  mmSKRIPTE0005222_Arrb2_2
  gRNA
cacgggacacttgtactgcg

SEQ ID NO: 134444 - DNA, 20 bp, Artificial Sequence
  mmSKRIPTE0005223_Arrb2_3
  gRNA
catgggaatctctatcctag

SEQ ID NO: 134445 - DNA, 20 bp, Artificial Sequence
  mmSKRIPTE0005224_Arrb2_4
  gRNA
tgtgcggcttatcatcagaa

SEQ ID NO: 134446 - DNA, 20 bp, Artificial Sequence
  mmSKRIPTE0005225_Arrb2_5
  gRNA
tatgtgtaccgaccctccgt

SEQ ID NO: 134447 - DNA, 20 bp, Artificial Sequence
  mmSKRIPTE0005226_Arrb2_6
  gRNA
aggcacgtctgtttcccggg

SEQ ID NO: 134448 - DNA, 20 bp, Artificial Sequence
  mmSKRIPTE0005227_Arrb2_7
  gRNA
tctaggcaaacttacccaca

SEQ ID NO: 134449 - DNA, 20 bp, Artificial Sequence
  mmSKRIPTE0005228_Arrb2_8
  gRNA
aggtttcccacactgcgaca

SEQ ID NO: 134450 - DNA, 20 bp, Artificial Sequence
  mmSKRIPTE0005229_Arrb2_9
  gRNA
ggtgtacaccttgcagaacg

SEQ ID NO: 134451 - DNA, 20 bp, Artificial Sequence
  mmSKRIPTE0005230_Mir21a_1
  gRNA
cgatgtcacgaccacgacag

SEQ ID NO: 134452 - DNA, 20 bp, Artificial Sequence
  mmSKRIPTE0005231_Mir21a_2
  gRNA
gtctgataagctatccgaca

SEQ ID NO: 134453 - DNA, 20 bp, Artificial Sequence
  mmSKRIPTE0005232_Mir21a_3
  gRNA
tcatggcaacagcagtcgat

SEQ ID NO: 134454 - DNA, 20 bp, Artificial Sequence
  mmSKRIPTE0005233_Mir21a_4
  gRNA
cacgacagggggcaagcacg

SEQ ID NO: 134455 - DNA, 20 bp, Artificial Sequence
  mmSKRIPTE0005234_Mir21a_5
  gRNA
caaacatctctggtttgctg

SEQ ID NO: 134456 - DNA, 20 bp, Artificial Sequence
  mmSKRIPTE0005235_Hoxb3_1
  gRNA
ccgttagcttggaggacgtg

SEQ ID NO: 134457 - DNA, 20 bp, Artificial Sequence
  mmSKRIPTE0005236_Hoxb3_2
  gRNA
gtgtccgctaatgcgacggg

SEQ ID NO: 134458 - DNA, 20 bp, Artificial Sequence
  mmSKRIPTE0005237_Hoxb3_3
  gRNA
ttctaccctgaggcggtgcg

SEQ ID NO: 134459 - DNA, 20 bp, Artificial Sequence
  mmSKRIPTE0005238_Hoxb3_4
  gRNA
gcagattggccatctcgacc

SEQ ID NO: 134460 - DNA, 20 bp, Artificial Sequence
  mmSKRIPTE0005239_Hoxb3_5
  gRNA
gctgcagagatactggcgag

SEQ ID NO: 134461 - DNA, 20 bp, Artificial Sequence
  mmSKRIPTE0005240_Hoxb3_6
  gRNA
tattcctaagcggtcctcga

SEQ ID NO: 134462 - DNA, 20 bp, Artificial Sequence
  mmSKRIPTE0005241_Hoxb3_7
  gRNA
gcagcgcgtaggcattctgg

SEQ ID NO: 134463 - DNA, 20 bp, Artificial Sequence
  mmSKRIPTE0005242_Hoxb3_8
  gRNA
ggcgccgcaacccttaagag

SEQ ID NO: 134464 - DNA, 20 bp, Artificial Sequence
  mmSKRIPTE0005243_Hoxb3_9
  gRNA
gggttccagcactaccaagt

SEQ ID NO: 134465 - DNA, 20 bp, Artificial Sequence
  mmSKRIPTE0005244_Mthfd1_1
  gRNA
caatgcctggactccctacg

SEQ ID NO: 134466 - DNA, 20 bp, Artificial Sequence
  mmSKRIPTE0005245_Mthfd1_2
  gRNA
ctcttccataggaatgacct

SEQ ID NO: 134467 - DNA, 20 bp, Artificial Sequence
  mmSKRIPTE0005246_Mthfd1_3
  gRNA
tcgatccctgatttgcctag

SEQ ID NO: 134468 - DNA, 20 bp, Artificial Sequence
  mmSKRIPTE0005247_Mthfd1_4
  gRNA
acactctacccgtcagatag

SEQ ID NO: 134469 - DNA, 20 bp, Artificial Sequence
  mmSKRIPTE0005248_Mthfd1_5
  gRNA
cttcatggcaagcgtaagtg

SEQ ID NO: 134470 - DNA, 20 bp, Artificial Sequence
  mmSKRIPTE0005249_Mthfd1_6
  gRNA
gctacgggtagccttacgca

SEQ ID NO: 134471 - DNA, 20 bp, Artificial Sequence
  mmSKRIPTE0005250_Mthfd1_7
  gRNA
ctggataagtatcctgaccc

SEQ ID NO: 134472 - DNA, 20 bp, Artificial Sequence
  mmSKRIPTE0005251_Mthfd1_8
  gRNA
tggactgtgcagttacaatg

SEQ ID NO: 134473 - DNA, 20 bp, Artificial Sequence
  mmSKRIPTE0005252_Mthfd1_9
  gRNA
cacccgagaaggatgtggat

SEQ ID NO: 134474 - DNA, 20 bp, Artificial Sequence
  mmSKRIPTE0005253_Ighv5-15_1
  gRNA
cactttcagtgactacggaa

SEQ ID NO: 134475 - DNA, 20 bp, Artificial Sequence
  mmSKRIPTE0005254_Ighv5-15_2
  gRNA
agtgcgggtcactgaatggg

SEQ ID NO: 134476 - DNA, 20 bp, Artificial Sequence
  mmSKRIPTE0005255_Ighv5-15_3
  gRNA
agtgagtgaatgttactgtg

SEQ ID NO: 134477 - DNA, 20 bp, Artificial Sequence
  mmSKRIPTE0005256_Ighv5-15_4
  gRNA
tgagtggtctgtactgagtg

SEQ ID NO: 134478 - DNA, 20 bp, Artificial Sequence
  mmSKRIPTE0005257_Ighv5-15_5
  gRNA
taagcacattgggccagcag

SEQ ID NO: 134479 - DNA, 20 bp, Artificial Sequence
  mmSKRIPTE0005258_Ighv5-15_6
  gRNA
ctgaaggcagtgctcatggc

SEQ ID NO: 134480 - DNA, 20 bp, Artificial Sequence
  mmSKRIPTE0005259_Ighv5-15_7
  gRNA
ccaacctgttcaaaaagtcc

SEQ ID NO: 134481 - DNA, 20 bp, Artificial Sequence
  mmSKRIPTE0005260_Ighv5-15_8
  gRNA
ctaatgaatgctacccactc

SEQ ID NO: 134482 - DNA, 20 bp, Artificial Sequence
  mmSKRIPTE0005261_Ighv5-15_9
  gRNA
gggactgggctttctctcag

SEQ ID NO: 134483 - DNA, 20 bp, Artificial Sequence
  mmSKRIPTE0005262_Edn1_1
  gRNA
gtcgtaccgtatggactggg

SEQ ID NO: 134484 - DNA, 20 bp, Artificial Sequence
  mmSKRIPTE0005263_Edn1_2
  gRNA
gcaggccggacaagtcaaag

SEQ ID NO: 134485 - DNA, 20 bp, Artificial Sequence
  mmSKRIPTE0005264_Edn1_3
  gRNA
ccactggggcgaaagcgtcg

SEQ ID NO: 134486 - DNA, 20 bp, Artificial Sequence
  mmSKRIPTE0005265_Edn1_4
  gRNA
tcttagcaagaccatctgtg

SEQ ID NO: 134487 - DNA, 20 bp, Artificial Sequence
  mmSKRIPTE0005266_Edn1_5
  gRNA
tgggaacccggatagcggag

SEQ ID NO: 134488 - DNA, 20 bp, Artificial Sequence
  mmSKRIPTE0005267_Edn1_6
  gRNA
cccgccgtctgacaatccag

SEQ ID NO: 134489 - DNA, 20 bp, Artificial Sequence
  mmSKRIPTE0005268_Edn1_7
  gRNA
ccattagcactggcgtccag

SEQ ID NO: 134490 - DNA, 20 bp, Artificial Sequence
  mmSKRIPTE0005269_Edn1_8
  gRNA
actcccgagtgagtctctag

SEQ ID NO: 134491 - DNA, 20 bp, Artificial Sequence
  mmSKRIPTE0005270_Edn1_9
  gRNA
ccatttggggacatacactg

SEQ ID NO: 134492 - DNA, 20 bp, Artificial Sequence
  mmSKRIPTE0005271_Mmp14_1
  gRNA
cctgagaacaagccatcccg

SEQ ID NO: 134493 - DNA, 20 bp, Artificial Sequence
  mmSKRIPTE0005272_Mmp14_2
  gRNA
gctgcatcgatcttgtccgt

SEQ ID NO: 134494 - DNA, 20 bp, Artificial Sequence
  mmSKRIPTE0005273_Mmp14_3
  gRNA
ccgttgcctataaggtcaga

SEQ ID NO: 134495 - DNA, 20 bp, Artificial Sequence
  mmSKRIPTE0005274_Mmp14_4
  gRNA
ttatccggaacaccacagcg

SEQ ID NO: 134496 - DNA, 20 bp, Artificial Sequence
  mmSKRIPTE0005275_Mmp14_5
  gRNA
tagtaccggcaggaccacgg

SEQ ID NO: 134497 - DNA, 20 bp, Artificial Sequence
  mmSKRIPTE0005276_Mmp14_6
  gRNA
tgacgggaactttgacaccg

SEQ ID NO: 134498 - DNA, 20 bp, Artificial Sequence
  mmSKRIPTE0005277_Mmp14_7
  gRNA
ccagggcaacaaccttgtcg

SEQ ID NO: 134499 - DNA, 20 bp, Artificial Sequence
  mmSKRIPTE0005278_Mmp14_8
  gRNA
gtagggcgggaccgatccag

SEQ ID NO: 134500 - DNA, 20 bp, Artificial Sequence
  mmSKRIPTE0005279_Mmp14_9
  gRNA
ttggtattcagcacggtcag

SEQ ID NO: 134501 - DNA, 20 bp, Artificial Sequence
  mmSKRIPTE0005280_Klf10_1
  gRNA
actctggacgagtcaatctg

SEQ ID NO: 134502 - DNA, 20 bp, Artificial Sequence
  mmSKRIPTE0005281_Klf10_2
  gRNA
ttaacgtcaagcatacactg

SEQ ID NO: 134503 - DNA, 20 bp, Artificial Sequence
  mmSKRIPTE0005282_Klf10_3
  gRNA
ctgacttcgaaccctcccaa

SEQ ID NO: 134504 - DNA, 20 bp, Artificial Sequence
  mmSKRIPTE0005283_Klf10_4
  gRNA
ataaaccgacggtcacacat

SEQ ID NO: 134505 - DNA, 20 bp, Artificial Sequence
  mmSKRIPTE0005284_Klf10_5
  gRNA
atgaactgtccagacaccgg

SEQ ID NO: 134506 - DNA, 20 bp, Artificial Sequence
  mmSKRIPTE0005285_Klf10_6
  gRNA
tatctggttatccaaaccgc

SEQ ID NO: 134507 - DNA, 20 bp, Artificial Sequence
  mmSKRIPTE0005286_Klf10_7
  gRNA
ggatgctagctgctttcacg

SEQ ID NO: 134508 - DNA, 20 bp, Artificial Sequence
  mmSKRIPTE0005287_Klf10_8
  gRNA
aagttgtactcactcagacc

SEQ ID NO: 134509 - DNA, 20 bp, Artificial Sequence
  mmSKRIPTE0005288_Klf10_9
  gRNA
gtgatcacacctgcagtttg

SEQ ID NO: 134510 - DNA, 20 bp, Artificial Sequence
  mmSKRIPTE0005289_Snx4_1
  gRNA
gaccggaggatgacccgatg

SEQ ID NO: 134511 - DNA, 20 bp, Artificial Sequence
  mmSKRIPTE0005290_Snx4_2
  gRNA
tgtctgactctactaaggtg

SEQ ID NO: 134512 - DNA, 20 bp, Artificial Sequence
  mmSKRIPTE0005291_Snx4_3
  gRNA
tggtcccatgaacttactgg

SEQ ID NO: 134513 - DNA, 20 bp, Artificial Sequence
  mmSKRIPTE0005292_Snx4_4
  gRNA
ggactaccgagagcgcaggg

SEQ ID NO: 134514 - DNA, 20 bp, Artificial Sequence
  mmSKRIPTE0005293_Snx4_5
  gRNA
gctcaggggtcgacacggtg

SEQ ID NO: 134515 - DNA, 20 bp, Artificial Sequence
  mmSKRIPTE0005294_Snx4_6
  gRNA
cattagtggagtgctacgtg

SEQ ID NO: 134516 - DNA, 20 bp, Artificial Sequence
  mmSKRIPTE0005295_Snx4_7
  gRNA
gaggatgacccgatgcggag

SEQ ID NO: 134517 - DNA, 20 bp, Artificial Sequence
  mmSKRIPTE0005296_Snx4_8
  gRNA
aatgctgtgacgcttaacaa

SEQ ID NO: 134518 - DNA, 20 bp, Artificial Sequence
  mmSKRIPTE0005297_Snx4_9
  gRNA
gcggtcggtgaggagaacga

SEQ ID NO: 134519 - DNA, 20 bp, Artificial Sequence
  mmSKRIPTE0005298_Camk1d_1
  gRNA
gcttcactgataacgtactg

SEQ ID NO: 134520 - DNA, 20 bp, Artificial Sequence
  mmSKRIPTE0005299_Camk1d_2
  gRNA
ctggtggagaactcttcgat

SEQ ID NO: 134521 - DNA, 20 bp, Artificial Sequence
  mmSKRIPTE0005300_Camk1d_3
  gRNA
gtttcctttcttcttcgtcg

SEQ ID NO: 134522 - DNA, 20 bp, Artificial Sequence
  mmSKRIPTE0005301_Camk1d_4
  gRNA
aaaagcccgctgaagaacgg

SEQ ID NO: 134523 - DNA, 20 bp, Artificial Sequence
  mmSKRIPTE0005302_Camk1d_5
  gRNA
tgtgctccagtacaacgaga

SEQ ID NO: 134524 - DNA, 20 bp, Artificial Sequence
  mmSKRIPTE0005303_Camk1d_6
  gRNA
cggcagtcgtgagacatatg

SEQ ID NO: 134525 - DNA, 20 bp, Artificial Sequence
  mmSKRIPTE0005304_Camk1d_7
  gRNA
gatataggcgatcaccccga

SEQ ID NO: 134526 - DNA, 20 bp, Artificial Sequence
  mmSKRIPTE0005305_Camk1d_8
  gRNA
tggaccccagaacctcacga

SEQ ID NO: 134527 - DNA, 20 bp, Artificial Sequence
  mmSKRIPTE0005306_Camk1d_9
  gRNA
cttatactacagtcaagacg

SEQ ID NO: 134528 - DNA, 20 bp, Artificial Sequence
  mmSKRIPTE0005307_Abi1_1
  gRNA
taatgcgagaggaagcgatg

SEQ ID NO: 134529 - DNA, 20 bp, Artificial Sequence
  mmSKRIPTE0005308_Abi1_2
  gRNA
tccagaactgtatagtcgat

SEQ ID NO: 134530 - DNA, 20 bp, Artificial Sequence
  mmSKRIPTE0005309_Abi1_3
  gRNA
actacatgactagtcctgcg

SEQ ID NO: 134531 - DNA, 20 bp, Artificial Sequence
  mmSKRIPTE0005310_Abi1_4
  gRNA
agaggaagctgagtccgccg

SEQ ID NO: 134532 - DNA, 20 bp, Artificial Sequence
  mmSKRIPTE0005311_Abi1_5
  gRNA
taaaatccaaaggaccggtg

SEQ ID NO: 134533 - DNA, 20 bp, Artificial Sequence
  mmSKRIPTE0005312_Abi1_6
  gRNA
aaagtccctcggcccgacac

SEQ ID NO: 134534 - DNA, 20 bp, Artificial Sequence
  mmSKRIPTE0005313_Abi1_7
  gRNA
atcagagaccaaggacgcat

SEQ ID NO: 134535 - DNA, 20 bp, Artificial Sequence
  mmSKRIPTE0005314_Abi1_8
  gRNA
tatatgctgtccctatgcat

SEQ ID NO: 134536 - DNA, 20 bp, Artificial Sequence
  mmSKRIPTE0005315_Abi1_9
  gRNA
ttaccagaacctgacccggg

SEQ ID NO: 134537 - DNA, 20 bp, Artificial Sequence
  mmSKRIPTE0005316_Padi4_1
  gRNA
tacaacggggaggttcactg

SEQ ID NO: 134538 - DNA, 20 bp, Artificial Sequence
  mmSKRIPTE0005317_Padi4_2
  gRNA
tcacccgcggacatccagcg

SEQ ID NO: 134539 - DNA, 20 bp, Artificial Sequence
  mmSKRIPTE0005318_Padi4_3
  gRNA
gagatggaactctcgccttg

SEQ ID NO: 134540 - DNA, 20 bp, Artificial Sequence
  mmSKRIPTE0005319_Padi4_4
  gRNA
aggaaccttacgactctgca

SEQ ID NO: 134541 - DNA, 20 bp, Artificial Sequence
  mmSKRIPTE0005320_Padi4_5
  gRNA
gggctacgacaagaccacat

SEQ ID NO: 134542 - DNA, 20 bp, Artificial Sequence
  mmSKRIPTE0005321_Padi4_6
  gRNA
atgaggctcccatgcctgcg

SEQ ID NO: 134543 - DNA, 20 bp, Artificial Sequence
  mmSKRIPTE0005322_Padi4_7
  gRNA
gttcacgtgagaccctggtg

SEQ ID NO: 134544 - DNA, 20 bp, Artificial Sequence
  mmSKRIPTE0005323_Padi4_8
  gRNA
aaacttgttccatctatgag

SEQ ID NO: 134545 - DNA, 20 bp, Artificial Sequence
  mmSKRIPTE0005324_Padi4_9
  gRNA
agccctgatctacatcactg

SEQ ID NO: 134546 - DNA, 20 bp, Artificial Sequence
  mmSKRIPTE0005325_Rbpj_1
  gRNA
attgcagttgaatggcggcg

SEQ ID NO: 134547 - DNA, 20 bp, Artificial Sequence
  mmSKRIPTE0005326_Rbpj_2
  gRNA
ggggatcctatttagatgcg

SEQ ID NO: 134548 - DNA, 20 bp, Artificial Sequence
  mmSKRIPTE0005327_Rbpj_3
  gRNA
tggctgtcggtggtacacaa

SEQ ID NO: 134549 - DNA, 20 bp, Artificial Sequence
  mmSKRIPTE0005328_Rbpj_4
  gRNA
gtccaataaaatactaacgt

SEQ ID NO: 134550 - DNA, 20 bp, Artificial Sequence
  mmSKRIPTE0005329_Rbpj_5
  gRNA
aaatcaggcagtgacgcgag

SEQ ID NO: 134551 - DNA, 20 bp, Artificial Sequence
  mmSKRIPTE0005330_Rbpj_6
  gRNA
agccctccgagtagtccatg

SEQ ID NO: 134552 - DNA, 20 bp, Artificial Sequence
  mmSKRIPTE0005331_Rbpj_7
  gRNA
aaacatctctgatcgaaacc

SEQ ID NO: 134553 - DNA, 20 bp, Artificial Sequence
  mmSKRIPTE0005332_Rbpj_8
  gRNA
tcttctagtcaattgacact

SEQ ID NO: 134554 - DNA, 20 bp, Artificial Sequence
  mmSKRIPTE0005333_Rbpj_9
  gRNA
gagaatgagacactacatag

SEQ ID NO: 134555 - DNA, 20 bp, Artificial Sequence
  mmSKRIPTE0005334_Ube2k_1
  gRNA
gtcttgtgggaaacgtgctg

SEQ ID NO: 134556 - DNA, 20 bp, Artificial Sequence
  mmSKRIPTE0005335_Ube2k_2
  gRNA
gctcgggtctgaatcgctga

SEQ ID NO: 134557 - DNA, 20 bp, Artificial Sequence
  mmSKRIPTE0005336_Ube2k_3
  gRNA
gcggaggtgattctacagtg

SEQ ID NO: 134558 - DNA, 20 bp, Artificial Sequence
  mmSKRIPTE0005337_Ube2k_4
  gRNA
atatccatttaaccccccta

SEQ ID NO: 134559 - DNA, 20 bp, Artificial Sequence
  mmSKRIPTE0005338_Ube2k_5
  gRNA
tgcataccttcacaacagag

SEQ ID NO: 134560 - DNA, 20 bp, Artificial Sequence
  mmSKRIPTE0005339_Ube2k_6
  gRNA
gaggtgtgtttgagactcga

SEQ ID NO: 134561 - DNA, 20 bp, Artificial Sequence
  mmSKRIPTE0005340_Ube2k_7
  gRNA
aggcgggtacgaatcagctg

SEQ ID NO: 134562 - DNA, 20 bp, Artificial Sequence
  mmSKRIPTE0005341_Ube2k_8
  gRNA
acacgtggggtaacctacac

SEQ ID NO: 134563 - DNA, 20 bp, Artificial Sequence
  mmSKRIPTE0005342_Ube2k_9
  gRNA
atccctaccaagctagaaca

SEQ ID NO: 134564 - DNA, 20 bp, Artificial Sequence
  mmSKRIPTE0005343_Zp3_1
  gRNA
catcctcaggactaaccgtg

SEQ ID NO: 134565 - DNA, 20 bp, Artificial Sequence
  mmSKRIPTE0005344_Zp3_2
  gRNA
tcggtatccacggacacccg

SEQ ID NO: 134566 - DNA, 20 bp, Artificial Sequence
  mmSKRIPTE0005345_Zp3_3
  gRNA
ataacccagattctgatcgt

SEQ ID NO: 134567 - DNA, 20 bp, Artificial Sequence
  mmSKRIPTE0005346_Zp3_4
  gRNA
cattcccctaagcaacccga

SEQ ID NO: 134568 - DNA, 20 bp, Artificial Sequence
  mmSKRIPTE0005347_Zp3_5
  gRNA
ttccatataaacccatcccg

SEQ ID NO: 134569 - DNA, 20 bp, Artificial Sequence
  mmSKRIPTE0005348_Zp3_6
  gRNA
gtgaaggcgtggccacgcag

SEQ ID NO: 134570 - DNA, 20 bp, Artificial Sequence
  mmSKRIPTE0005349_Zp3_7
  gRNA
gtcttcctgctgtcaagtgt

SEQ ID NO: 134571 - DNA, 20 bp, Artificial Sequence
  mmSKRIPTE0005350_Zp3_8
  gRNA
actcaatgggtacctccaca

SEQ ID NO: 134572 - DNA, 20 bp, Artificial Sequence
  mmSKRIPTE0005351_Zp3_9
  gRNA
cgttcaacaagacttcccag

SEQ ID NO: 134573 - DNA, 20 bp, Artificial Sequence
  mmSKRIPTE0005352_Il23r_1
  gRNA
aaggtctcaatttcgccctg

SEQ ID NO: 134574 - DNA, 20 bp, Artificial Sequence
  mmSKRIPTE0005353_Il23r_2
  gRNA
gtacacatgtatattcgctg

SEQ ID NO: 134575 - DNA, 20 bp, Artificial Sequence
  mmSKRIPTE0005354_Il23r_3
  gRNA
agggtgtgcatggaaatcac

SEQ ID NO: 134576 - DNA, 20 bp, Artificial Sequence
  mmSKRIPTE0005355_Il23r_4
  gRNA
acatatatatggcctaaacc

SEQ ID NO: 134577 - DNA, 20 bp, Artificial Sequence
  mmSKRIPTE0005356_Il23r_5
  gRNA
tctatagtacttacgtccag

SEQ ID NO: 134578 - DNA, 20 bp, Artificial Sequence
  mmSKRIPTE0005357_Il23r_6
  gRNA
ctcagtgctacaatcttcag

SEQ ID NO: 134579 - DNA, 20 bp, Artificial Sequence
  mmSKRIPTE0005358_Il23r_7
  gRNA
ctataggaaaatatactgag

SEQ ID NO: 134580 - DNA, 20 bp, Artificial Sequence
  mmSKRIPTE0005359_Il23r_8
  gRNA
ctcttcagatggtgtcacgg

SEQ ID NO: 134581 - DNA, 20 bp, Artificial Sequence
  mmSKRIPTE0005360_Il23r_9
  gRNA
ctggtagacaacattcctag

SEQ ID NO: 134582 - DNA, 20 bp, Artificial Sequence
  mmSKRIPTE0005361_Dock1_1
  gRNA
ttaagggtctcaaaccagcg

SEQ ID NO: 134583 - DNA, 20 bp, Artificial Sequence
  mmSKRIPTE0005362_Dock1_2
  gRNA
ggcgttagtccacaggacga

SEQ ID NO: 134584 - DNA, 20 bp, Artificial Sequence
  mmSKRIPTE0005363_Dock1_3
  gRNA
ttattggactaatcgcggat

SEQ ID NO: 134585 - DNA, 20 bp, Artificial Sequence
  mmSKRIPTE0005364_Dock1_4
  gRNA
actacgacagagcgaatgcg

SEQ ID NO: 134586 - DNA, 20 bp, Artificial Sequence
  mmSKRIPTE0005365_Dock1_5
  gRNA
ctagggttgtgctattactg

SEQ ID NO: 134587 - DNA, 20 bp, Artificial Sequence
  mmSKRIPTE0005366_Dock1_6
  gRNA
ttgataaaatacccgcaatg

SEQ ID NO: 134588 - DNA, 20 bp, Artificial Sequence
  mmSKRIPTE0005367_Dock1_7
  gRNA
tctatggaggtccttatcaa

SEQ ID NO: 134589 - DNA, 20 bp, Artificial Sequence
  mmSKRIPTE0005368_Dock1_8
  gRNA
ataccacaattccttgactg

SEQ ID NO: 134590 - DNA, 20 bp, Artificial Sequence
  mmSKRIPTE0005369_Dock1_9
  gRNA
tatttaccagccacgccgaa

SEQ ID NO: 134591 - DNA, 20 bp, Artificial Sequence
  mmSKRIPTE0005370_Fadd_1
  gRNA
gcccaggcttcctagcgcat

SEQ ID NO: 134592 - DNA, 20 bp, Artificial Sequence
  mmSKRIPTE0005371_Fadd_2
  gRNA
ttgccttacagttggccaag

SEQ ID NO: 134593 - DNA, 20 bp, Artificial Sequence
  mmSKRIPTE0005372_Fadd_3
  gRNA
cagtggtggagaacacgacg

SEQ ID NO: 134594 - DNA, 20 bp, Artificial Sequence
  mmSKRIPTE0005373_Fadd_4
  gRNA
agcccggcgtaccactgcca

SEQ ID NO: 134595 - DNA, 20 bp, Artificial Sequence
  mmSKRIPTE0005374_Fadd_5
  gRNA
ccggactggttaaggcgctg

SEQ ID NO: 134596 - DNA, 20 bp, Artificial Sequence
  mmSKRIPTE0005375_Fadd_6
  gRNA
acatcccgcgagacgctggg

SEQ ID NO: 134597 - DNA, 20 bp, Artificial Sequence
  mmSKRIPTE0005376_Fadd_7
  gRNA
gcgcctggacgacttcgagg

SEQ ID NO: 134598 - DNA, 20 bp, Artificial Sequence
  mmSKRIPTE0005377_Fadd_8
  gRNA
ccacgttggggattaaaacg

SEQ ID NO: 134599 - DNA, 20 bp, Artificial Sequence
  mmSKRIPTE0005378_Fadd_9
  gRNA
tttcctatgtgggatcgctg

SEQ ID NO: 134600 - DNA, 20 bp, Artificial Sequence
  mmSKRIPTE0005379_Cd209a_1
  gRNA
agcctcacgtccctaacctg

SEQ ID NO: 134601 - DNA, 20 bp, Artificial Sequence
  mmSKRIPTE0005380_Cd209a_2
  gRNA
acgctctattcacttagatg

SEQ ID NO: 134602 - DNA, 20 bp, Artificial Sequence
  mmSKRIPTE0005381_Cd209a_3
  gRNA
ctgtggaccaggcaccctgt

SEQ ID NO: 134603 - DNA, 20 bp, Artificial Sequence
  mmSKRIPTE0005382_Cd209a_4
  gRNA
acataaacttagtttctgtg

SEQ ID NO: 134604 - DNA, 20 bp, Artificial Sequence
  mmSKRIPTE0005383_Cd209a_5
  gRNA
caagttgagcccccacattg

SEQ ID NO: 134605 - DNA, 20 bp, Artificial Sequence
  mmSKRIPTE0005384_Cd209a_6
  gRNA
gagactatctaagagagacg

SEQ ID NO: 134606 - DNA, 20 bp, Artificial Sequence
  mmSKRIPTE0005385_Cd209a_7
  gRNA
aagtctggctcttcaaacga

SEQ ID NO: 134607 - DNA, 20 bp, Artificial Sequence
  mmSKRIPTE0005386_Cd209a_8
  gRNA
gagcatctgacacaccaggc

SEQ ID NO: 134608 - DNA, 20 bp, Artificial Sequence
  mmSKRIPTE0005387_Cd209a_9
  gRNA
ggggctcattgacatgagca

SEQ ID NO: 134609 - DNA, 20 bp, Artificial Sequence
  mmSKRIPTE0005388_Jak3_1
  gRNA
aatttgatcgtggtgcgaag

SEQ ID NO: 134610 - DNA, 20 bp, Artificial Sequence
  mmSKRIPTE0005389_Jak3_2
  gRNA
gtagtgcaatcagtcccgcc

SEQ ID NO: 134611 - DNA, 20 bp, Artificial Sequence
  mmSKRIPTE0005390_Jak3_3
  gRNA
ccaccgcacagctcatctcg

SEQ ID NO: 134612 - DNA, 20 bp, Artificial Sequence
  mmSKRIPTE0005391_Jak3_4
  gRNA
agagagccatgatagcacgt

SEQ ID NO: 134613 - DNA, 20 bp, Artificial Sequence
  mmSKRIPTE0005392_Jak3_5
  gRNA
aagacccggatagcagccag

SEQ ID NO: 134614 - DNA, 20 bp, Artificial Sequence
  mmSKRIPTE0005393_Jak3_6
  gRNA
tctagggcggggatcacgtg

SEQ ID NO: 134615 - DNA, 20 bp, Artificial Sequence
  mmSKRIPTE0005394_Jak3_7
  gRNA
cgtgctgagacgttgccgtg

SEQ ID NO: 134616 - DNA, 20 bp, Artificial Sequence
  mmSKRIPTE0005395_Jak3_8
  gRNA
atggggcaggcgacgcacag

SEQ ID NO: 134617 - DNA, 20 bp, Artificial Sequence
  mmSKRIPTE0005396_Jak3_9
  gRNA
tagggggccattaaactgag

SEQ ID NO: 134618 - DNA, 20 bp, Artificial Sequence
  mmSKRIPTE0005397_Inpp4b_1
  gRNA
ttacaatagtggatgtccca

SEQ ID NO: 134619 - DNA, 20 bp, Artificial Sequence
  mmSKRIPTE0005398_Inpp4b_2
  gRNA
ggcttgatagtacaatacga

SEQ ID NO: 134620 - DNA, 20 bp, Artificial Sequence
  mmSKRIPTE0005399_Inpp4b_3
  gRNA
aaaatgagttcttaccacgt

SEQ ID NO: 134621 - DNA, 20 bp, Artificial Sequence
  mmSKRIPTE0005400_Inpp4b_4
  gRNA
tgtattgccaacaccctgtg

SEQ ID NO: 134622 - DNA, 20 bp, Artificial Sequence
  mmSKRIPTE0005401_Inpp4b_5
  gRNA
gttctggcacagacgatgga

SEQ ID NO: 134623 - DNA, 20 bp, Artificial Sequence
  mmSKRIPTE0005402_Inpp4b_6
  gRNA
tataatactgagcgtataca

SEQ ID NO: 134624 - DNA, 20 bp, Artificial Sequence
  mmSKRIPTE0005403_Inpp4b_7
  gRNA
acttaatcatatctttccga

SEQ ID NO: 134625 - DNA, 20 bp, Artificial Sequence
  mmSKRIPTE0005404_Inpp4b_8
  gRNA
aatgagctccggtttaacgt

SEQ ID NO: 134626 - DNA, 20 bp, Artificial Sequence
  mmSKRIPTE0005405_Inpp4b_9
  gRNA
gactctcgagggaggtacgg

SEQ ID NO: 134627 - DNA, 20 bp, Artificial Sequence
  mmSKRIPTE0005406_Nod2_1
  gRNA
gtcaattccagacggcaatg

SEQ ID NO: 134628 - DNA, 20 bp, Artificial Sequence
  mmSKRIPTE0005407_Nod2_2
  gRNA
taagagactcatgagccgag

SEQ ID NO: 134629 - DNA, 20 bp, Artificial Sequence
  mmSKRIPTE0005408_Nod2_3
  gRNA
ccgacccatcgtaagtactg

SEQ ID NO: 134630 - DNA, 20 bp, Artificial Sequence
  mmSKRIPTE0005409_Nod2_4
  gRNA
gcgctgacacagcatccgga

SEQ ID NO: 134631 - DNA, 20 bp, Artificial Sequence
  mmSKRIPTE0005410_Nod2_5
  gRNA
agtccaggtcccagaccgag

SEQ ID NO: 134632 - DNA, 20 bp, Artificial Sequence
  mmSKRIPTE0005411_Nod2_6
  gRNA
ctgcagaaactagcgtgagt

SEQ ID NO: 134633 - DNA, 20 bp, Artificial Sequence
  mmSKRIPTE0005412_Nod2_7
  gRNA
ggcattattgtaccatcaca

SEQ ID NO: 134634 - DNA, 20 bp, Artificial Sequence
  mmSKRIPTE0005413_Nod2_8
  gRNA
gcagagtctggactgacgtg

SEQ ID NO: 134635 - DNA, 20 bp, Artificial Sequence
  mmSKRIPTE0005414_Nod2_9
  gRNA
gagcacactcaaccagcgtg

SEQ ID NO: 134636 - DNA, 20 bp, Artificial Sequence
  mmSKRIPTE0005415_Pum2_1
  gRNA
aggtgccttagaaaggaacg

SEQ ID NO: 134637 - DNA, 20 bp, Artificial Sequence
  mmSKRIPTE0005416_Pum2_2
  gRNA
ggatgctgtaaggacaaacg

SEQ ID NO: 134638 - DNA, 20 bp, Artificial Sequence
  mmSKRIPTE0005417_Pum2_3
  gRNA
catgcctattggacttggag

SEQ ID NO: 134639 - DNA, 20 bp, Artificial Sequence
  mmSKRIPTE0005418_Pum2_4
  gRNA
tgaatccagagaaacgtgcg

SEQ ID NO: 134640 - DNA, 20 bp, Artificial Sequence
  mmSKRIPTE0005419_Pum2_5
  gRNA
acgcatcagctgccaaacgt

SEQ ID NO: 134641 - DNA, 20 bp, Artificial Sequence
  mmSKRIPTE0005420_Pum2_6
  gRNA
ctaaggtccaggccaaccca

SEQ ID NO: 134642 - DNA, 20 bp, Artificial Sequence
  mmSKRIPTE0005421_Pum2_7
  gRNA
ctgccgttaatacgatggag

SEQ ID NO: 134643 - DNA, 20 bp, Artificial Sequence
  mmSKRIPTE0005422_Pum2_8
  gRNA
tgatgtcagatctattatag

SEQ ID NO: 134644 - DNA, 20 bp, Artificial Sequence
  mmSKRIPTE0005423_Pum2_9
  gRNA
gctcttgcattagaatctcg

SEQ ID NO: 134645 - DNA, 20 bp, Artificial Sequence
  mmSKRIPTE0005424_Pms2_1
  gRNA
gactacaggtttggacggtg

SEQ ID NO: 134646 - DNA, 20 bp, Artificial Sequence
  mmSKRIPTE0005425_Pms2_2
  gRNA
ttgatccacgataacagacc

SEQ ID NO: 134647 - DNA, 20 bp, Artificial Sequence
  mmSKRIPTE0005426_Pms2_3
  gRNA
gtaaccttgagggatcacac

SEQ ID NO: 134648 - DNA, 20 bp, Artificial Sequence
  mmSKRIPTE0005427_Pms2_4
  gRNA
gtgatatctatcacagtacg

SEQ ID NO: 134649 - DNA, 20 bp, Artificial Sequence
  mmSKRIPTE0005428_Pms2_5
  gRNA
ttcacacacagcgtcactag

SEQ ID NO: 134650 - DNA, 20 bp, Artificial Sequence
  mmSKRIPTE0005429_Pms2_6
  gRNA
gctacttgggagatcccggt

SEQ ID NO: 134651 - DNA, 20 bp, Artificial Sequence
  mmSKRIPTE0005430_Pms2_7
  gRNA
tggagcaaaccgaaggcgtg

SEQ ID NO: 134652 - DNA, 20 bp, Artificial Sequence
  mmSKRIPTE0005431_Pms2_8
  gRNA
gagtgctgtgataaccagcg

SEQ ID NO: 134653 - DNA, 20 bp, Artificial Sequence
  mmSKRIPTE0005432_Pms2_9
  gRNA
tatgatccgccccttccggg

SEQ ID NO: 134654 - DNA, 20 bp, Artificial Sequence
  mmSKRIPTE0005433_Myb_1
  gRNA
gtcgtcctacgaaaaaggcg

SEQ ID NO: 134655 - DNA, 20 bp, Artificial Sequence
  mmSKRIPTE0005434_Myb_2
  gRNA
tgtgtgaccatgactacgat

SEQ ID NO: 134656 - DNA, 20 bp, Artificial Sequence
  mmSKRIPTE0005435_Myb_3
  gRNA
aggtgcatgatcgtccacca

SEQ ID NO: 134657 - DNA, 20 bp, Artificial Sequence
  mmSKRIPTE0005436_Myb_4
  gRNA
aggttaacgataagtcacgt

SEQ ID NO: 134658 - DNA, 20 bp, Artificial Sequence
  mmSKRIPTE0005437_Myb_5
  gRNA
taccccagtgagattgaacg

SEQ ID NO: 134659 - DNA, 20 bp, Artificial Sequence
  mmSKRIPTE0005438_Myb_6
  gRNA
acagagccggaactgcctcg

SEQ ID NO: 134660 - DNA, 20 bp, Artificial Sequence
  mmSKRIPTE0005439_Myb_7
  gRNA
cccgtatgacgccgtcagcg

SEQ ID NO: 134661 - DNA, 20 bp, Artificial Sequence
  mmSKRIPTE0005440_Myb_8
  gRNA
gggatattcgctgttgacgg

SEQ ID NO: 134662 - DNA, 20 bp, Artificial Sequence
  mmSKRIPTE0005441_Myb_9
  gRNA
agaccccgacacaggtaatg

SEQ ID NO: 134663 - DNA, 20 bp, Artificial Sequence
  mmSKRIPTE0005442_Cartpt_1
  gRNA
gaacccggagccttaccatg

SEQ ID NO: 134664 - DNA, 20 bp, Artificial Sequence
  mmSKRIPTE0005443_Cartpt_2
  gRNA
gttcccctcagagagcggat

SEQ ID NO: 134665 - DNA, 20 bp, Artificial Sequence
  mmSKRIPTE0005444_Cartpt_3
  gRNA
cctgagctgatggtaccatg

SEQ ID NO: 134666 - DNA, 20 bp, Artificial Sequence
  mmSKRIPTE0005445_Cartpt_4
  gRNA
gagcccgggacacacaaccg

SEQ ID NO: 134667 - DNA, 20 bp, Artificial Sequence
  mmSKRIPTE0005446_Cartpt_5
  gRNA
gaattgcaggaagttcctcg

SEQ ID NO: 134668 - DNA, 20 bp, Artificial Sequence
  mmSKRIPTE0005447_Cartpt_6
  gRNA
ccccaaaggcagaagaacgt

SEQ ID NO: 134669 - DNA, 20 bp, Artificial Sequence
  mmSKRIPTE0005448_Cartpt_7
  gRNA
ctggagagcagtgcgcagtg

SEQ ID NO: 134670 - DNA, 20 bp, Artificial Sequence
  mmSKRIPTE0005449_Cartpt_8
  gRNA
attgcctagaatcttacaca

SEQ ID NO: 134671 - DNA, 20 bp, Artificial Sequence
  mmSKRIPTE0005450_Cartpt_9
  gRNA
accctgtggtagtccagtgg

SEQ ID NO: 134672 - DNA, 20 bp, Artificial Sequence
  mmSKRIPTE0005451_Trib1_1
  gRNA
tggggtacctctaatatccg

SEQ ID NO: 134673 - DNA, 20 bp, Artificial Sequence
  mmSKRIPTE0005452_Trib1_2
  gRNA
gttaggtgaacaaacgtgcg

SEQ ID NO: 134674 - DNA, 20 bp, Artificial Sequence
  mmSKRIPTE0005453_Trib1_3
  gRNA
ggagcgcgcaggattccgag

SEQ ID NO: 134675 - DNA, 20 bp, Artificial Sequence
  mmSKRIPTE0005454_Trib1_4
  gRNA
catagggtttggtaacccga

SEQ ID NO: 134676 - DNA, 20 bp, Artificial Sequence
  mmSKRIPTE0005455_Trib1_5
  gRNA
aacagtagacccggaccgcg

SEQ ID NO: 134677 - DNA, 20 bp, Artificial Sequence
  mmSKRIPTE0005456_Trib1_6
  gRNA
ttcccgggtgttgagcctcg

SEQ ID NO: 134678 - DNA, 20 bp, Artificial Sequence
  mmSKRIPTE0005457_Trib1_7
  gRNA
ggaagccgggttgtgcaatg

SEQ ID NO: 134679 - DNA, 20 bp, Artificial Sequence
  mmSKRIPTE0005458_Trib1_8
  gRNA
gagacatgcactcctatgtg

SEQ ID NO: 134680 - DNA, 20 bp, Artificial Sequence
  mmSKRIPTE0005459_Trib1_9
  gRNA
aatcaggggcagacacccga

SEQ ID NO: 134681 - DNA, 20 bp, Artificial Sequence
  mmSKRIPTE0005460_Tnf_1
  gRNA
ttacagtcacggctcccgtg

SEQ ID NO: 134682 - DNA, 20 bp, Artificial Sequence
  mmSKRIPTE0005461_Tnf_2
  gRNA
gagaaaaccatgatctcatg

SEQ ID NO: 134683 - DNA, 20 bp, Artificial Sequence
  mmSKRIPTE0005462_Tnf_3
  gRNA
cttctgccagttccacgtcg

SEQ ID NO: 134684 - DNA, 20 bp, Artificial Sequence
  mmSKRIPTE0005463_Tnf_4
  gRNA
gatgtggagtgtgaactaag

SEQ ID NO: 134685 - DNA, 20 bp, Artificial Sequence
  mmSKRIPTE0005464_Tnf_5
  gRNA
aagcggggcaatcagccggg

SEQ ID NO: 134686 - DNA, 20 bp, Artificial Sequence
  mmSKRIPTE0005465_Tnf_6
  gRNA
tcggggtgatcggtccccaa

SEQ ID NO: 134687 - DNA, 20 bp, Artificial Sequence
  mmSKRIPTE0005466_Tnf_7
  gRNA
aagcctgtagcccacgtcgt

SEQ ID NO: 134688 - DNA, 20 bp, Artificial Sequence
  mmSKRIPTE0005467_Tnf_8
  gRNA
gggtgaggagcacgtagtcg

SEQ ID NO: 134689 - DNA, 20 bp, Artificial Sequence
  mmSKRIPTE0005468_Tnf_9
  gRNA
gtagacaaggtacaacccat

SEQ ID NO: 134690 - DNA, 20 bp, Artificial Sequence
  mmSKRIPTE0005469_Traf6_1
  gRNA
attgagaaaacttctttgcg

SEQ ID NO: 134691 - DNA, 20 bp, Artificial Sequence
  mmSKRIPTE0005470_Traf6_2
  gRNA
tgccgtgtatgtaggcgacg

SEQ ID NO: 134692 - DNA, 20 bp, Artificial Sequence
  mmSKRIPTE0005471_Traf6_3
  gRNA
tctgtgaccctaatgtggag

SEQ ID NO: 134693 - DNA, 20 bp, Artificial Sequence
  mmSKRIPTE0005472_Traf6_4
  gRNA
atgtgattggcactacacga

SEQ ID NO: 134694 - DNA, 20 bp, Artificial Sequence
  mmSKRIPTE0005473_Traf6_5
  gRNA
ggcggggtaaggcttcagcg

SEQ ID NO: 134695 - DNA, 20 bp, Artificial Sequence
  mmSKRIPTE0005474_Traf6_6
  gRNA
tgcagcaatgctcgaagcag

SEQ ID NO: 134696 - DNA, 20 bp, Artificial Sequence
  mmSKRIPTE0005475_Traf6_7
  gRNA
acaatcccacggaaccccaa

SEQ ID NO: 134697 - DNA, 20 bp, Artificial Sequence
  mmSKRIPTE0005476_Traf6_8
  gRNA
aaaggctctaactagtcgta

SEQ ID NO: 134698 - DNA, 20 bp, Artificial Sequence
  mmSKRIPTE0005477_Traf6_9
  gRNA
ctacctgaggtgtattctag

SEQ ID NO: 134699 - DNA, 20 bp, Artificial Sequence
  mmSKRIPTE0005478_Arhgef2_1
  gRNA
gaatcgtgttggcaagacgg

SEQ ID NO: 134700 - DNA, 20 bp, Artificial Sequence
  mmSKRIPTE0005479_Arhgef2_2
  gRNA
atgcagcgtcccgagacgac

SEQ ID NO: 134701 - DNA, 20 bp, Artificial Sequence
  mmSKRIPTE0005480_Arhgef2_3
  gRNA
gtcttccccgatacctacga

SEQ ID NO: 134702 - DNA, 20 bp, Artificial Sequence
  mmSKRIPTE0005481_Arhgef2_4
  gRNA
gaactcactcttacttcgaa

SEQ ID NO: 134703 - DNA, 20 bp, Artificial Sequence
  mmSKRIPTE0005482_Arhgef2_5
  gRNA
acgggagaactagaggtcga

SEQ ID NO: 134704 - DNA, 20 bp, Artificial Sequence
  mmSKRIPTE0005483_Arhgef2_6
  gRNA
gcagctttccattcgcagag

SEQ ID NO: 134705 - DNA, 20 bp, Artificial Sequence
  mmSKRIPTE0005484_Arhgef2_7
  gRNA
agctcccatacgctaccctg

SEQ ID NO: 134706 - DNA, 20 bp, Artificial Sequence
  mmSKRIPTE0005485_Arhgef2_8
  gRNA
tgggagacgagattagtcag

SEQ ID NO: 134707 - DNA, 20 bp, Artificial Sequence
  mmSKRIPTE0005486_Arhgef2_9
  gRNA
tcccaggaaatatgccgact

SEQ ID NO: 134708 - DNA, 20 bp, Artificial Sequence
  mmSKRIPTE0005487_Nfkb1_1
  gRNA
ccacccataattcatcgtag

SEQ ID NO: 134709 - DNA, 20 bp, Artificial Sequence
  mmSKRIPTE0005488_Nfkb1_2
  gRNA
caaaacaggtaagcgtaaag

SEQ ID NO: 134710 - DNA, 20 bp, Artificial Sequence
  mmSKRIPTE0005489_Nfkb1_3
  gRNA
tgatatactaccacaaggtg

SEQ ID NO: 134711 - DNA, 20 bp, Artificial Sequence
  mmSKRIPTE0005490_Nfkb1_4
  gRNA
atgtaaacactcccgctgag

SEQ ID NO: 134712 - DNA, 20 bp, Artificial Sequence
  mmSKRIPTE0005491_Nfkb1_5
  gRNA
ctgggcgccctgtaaccgag

SEQ ID NO: 134713 - DNA, 20 bp, Artificial Sequence
  mmSKRIPTE0005492_Nfkb1_6
  gRNA
gtccttgtacgaaacccctg

SEQ ID NO: 134714 - DNA, 20 bp, Artificial Sequence
  mmSKRIPTE0005493_Nfkb1_7
  gRNA
tgagcatcaaggtaaacccg

SEQ ID NO: 134715 - DNA, 20 bp, Artificial Sequence
  mmSKRIPTE0005494_Nfkb1_8
  gRNA
ccttatctcttagcaagcgt

SEQ ID NO: 134716 - DNA, 20 bp, Artificial Sequence
  mmSKRIPTE0005495_Nfkb1_9
  gRNA
atgacagaggcgtgtattag

SEQ ID NO: 134717 - DNA, 20 bp, Artificial Sequence
  mmSKRIPTE0005496_Lyn_1
  gRNA
gatagggaacttcgcacctg

SEQ ID NO: 134718 - DNA, 20 bp, Artificial Sequence
  mmSKRIPTE0005497_Lyn_2
  gRNA
ctgacagaagtcgagctacg

SEQ ID NO: 134719 - DNA, 20 bp, Artificial Sequence
  mmSKRIPTE0005498_Lyn_3
  gRNA
tggaaatacacatggccggg

SEQ ID NO: 134720 - DNA, 20 bp, Artificial Sequence
  mmSKRIPTE0005499_Lyn_4
  gRNA
agacctaacgtggaagacga

SEQ ID NO: 134721 - DNA, 20 bp, Artificial Sequence
  mmSKRIPTE0005500_Lyn_5
  gRNA
tatgcacactggctctacag

SEQ ID NO: 134722 - DNA, 20 bp, Artificial Sequence
  mmSKRIPTE0005501_Lyn_6
  gRNA
cacgcgacgggatagccctg

SEQ ID NO: 134723 - DNA, 20 bp, Artificial Sequence
  mmSKRIPTE0005502_Lyn_7
  gRNA
agtatcagcagcaaccgtag

SEQ ID NO: 134724 - DNA, 20 bp, Artificial Sequence
  mmSKRIPTE0005503_Lyn_8
  gRNA
accacgagcgagtaagtccg

SEQ ID NO: 134725 - DNA, 20 bp, Artificial Sequence
  mmSKRIPTE0005504_Lyn_9
  gRNA
ggtttaacgtaagctcccag

SEQ ID NO: 134726 - DNA, 20 bp, Artificial Sequence
  mmSKRIPTE0005505_Xbp1_1
  gRNA
attggacccagaaagtagcg

SEQ ID NO: 134727 - DNA, 20 bp, Artificial Sequence
  mmSKRIPTE0005506_Xbp1_2
  gRNA
gatccgggtggacagccgca

SEQ ID NO: 134728 - DNA, 20 bp, Artificial Sequence
  mmSKRIPTE0005507_Xbp1_3
  gRNA
tcacggatatcgctctagca

SEQ ID NO: 134729 - DNA, 20 bp, Artificial Sequence
  mmSKRIPTE0005508_Xbp1_4
  gRNA
tccaacctggctaatctccg

SEQ ID NO: 134730 - DNA, 20 bp, Artificial Sequence
  mmSKRIPTE0005509_Xbp1_5
  gRNA
tctttagtgacggaaccaca

SEQ ID NO: 134731 - DNA, 20 bp, Artificial Sequence
  mmSKRIPTE0005510_Xbp1_6
  gRNA
ggaagaagcatatgacgcaa

SEQ ID NO: 134732 - DNA, 20 bp, Artificial Sequence
  mmSKRIPTE0005511_Xbp1_7
  gRNA
aaccacacggtctaaccgca

SEQ ID NO: 134733 - DNA, 20 bp, Artificial Sequence
  mmSKRIPTE0005512_Xbp1_8
  gRNA
gacagagagtcaaactaacg

SEQ ID NO: 134734 - DNA, 20 bp, Artificial Sequence
  mmSKRIPTE0005513_Xbp1_9
  gRNA
catcccgagagtttggcttg

SEQ ID NO: 134735 - DNA, 20 bp, Artificial Sequence
  mmSKRIPTE0005514_Irgm2_1
  gRNA
acaccatcaagggtagtgta

SEQ ID NO: 134736 - DNA, 20 bp, Artificial Sequence
  mmSKRIPTE0005515_Irgm2_2
  gRNA
cagtcggcctagtaacctca

SEQ ID NO: 134737 - DNA, 20 bp, Artificial Sequence
  mmSKRIPTE0005516_Irgm2_3
  gRNA
gagcatgacagaacacggag

SEQ ID NO: 134738 - DNA, 20 bp, Artificial Sequence
  mmSKRIPTE0005517_Irgm2_4
  gRNA
tgagcccaaactaaacgctc

SEQ ID NO: 134739 - DNA, 20 bp, Artificial Sequence
  mmSKRIPTE0005518_Irgm2_5
  gRNA
ttccatgttgtcgagcaacg

SEQ ID NO: 134740 - DNA, 20 bp, Artificial Sequence
  mmSKRIPTE0005519_Irgm2_6
  gRNA
tcaccttagcgccaacgacg

SEQ ID NO: 134741 - DNA, 20 bp, Artificial Sequence
  mmSKRIPTE0005520_Irgm2_7
  gRNA
cagggtatcagtgaggcgca

SEQ ID NO: 134742 - DNA, 20 bp, Artificial Sequence
  mmSKRIPTE0005521_Irgm2_8
  gRNA
ctccctgatagcggacacac

SEQ ID NO: 134743 - DNA, 20 bp, Artificial Sequence
  mmSKRIPTE0005522_Irgm2_9
  gRNA
ttcgtgtccgatgagcctaa

SEQ ID NO: 134744 - DNA, 20 bp, Artificial Sequence
  mmSKRIPTE0005523_Med1_1
  gRNA
tttccgtcgtagactcagag

SEQ ID NO: 134745 - DNA, 20 bp, Artificial Sequence
  mmSKRIPTE0005524_Med1_2
  gRNA
ccaaacataacacgtcagga

SEQ ID NO: 134746 - DNA, 20 bp, Artificial Sequence
  mmSKRIPTE0005525_Med1_3
  gRNA
gcattcattcccaaagaccg

SEQ ID NO: 134747 - DNA, 20 bp, Artificial Sequence
  mmSKRIPTE0005526_Med1_4
  gRNA
gctagtgtactgactgtgag

SEQ ID NO: 134748 - DNA, 20 bp, Artificial Sequence
  mmSKRIPTE0005527_Med1_5
  gRNA
gcggcgagccaatccgagag

SEQ ID NO: 134749 - DNA, 20 bp, Artificial Sequence
  mmSKRIPTE0005528_Med1_6
  gRNA
tatatgtaaaccaacccgag

SEQ ID NO: 134750 - DNA, 20 bp, Artificial Sequence
  mmSKRIPTE0005529_Med1_7
  gRNA
gtgttggttatctcaccccg

SEQ ID NO: 134751 - DNA, 20 bp, Artificial Sequence
  mmSKRIPTE0005530_Med1_8
  gRNA
tacgctgtaagtaggccctg

SEQ ID NO: 134752 - DNA, 20 bp, Artificial Sequence
  mmSKRIPTE0005531_Med1_9
  gRNA
aacatcgccagttgatcacc

SEQ ID NO: 134753 - DNA, 20 bp, Artificial Sequence
  mmSKRIPTE0005532_Ighg3_1
  gRNA
atggagagcctcatgcacca

SEQ ID NO: 134754 - DNA, 20 bp, Artificial Sequence
  mmSKRIPTE0005533_Ighg3_2
  gRNA
ttaaccaggaggtcaagttg

SEQ ID NO: 134755 - DNA, 20 bp, Artificial Sequence
  mmSKRIPTE0005534_Ighg3_3
  gRNA
tcagtgtcttgtaagacccg

SEQ ID NO: 134756 - DNA, 20 bp, Artificial Sequence
  mmSKRIPTE0005535_Ighg3_4
  gRNA
ctgttgtactgagcttcacg

SEQ ID NO: 134757 - DNA, 20 bp, Artificial Sequence
  mmSKRIPTE0005536_Ighg3_5
  gRNA
aaggcatcccagtgtcaccg

SEQ ID NO: 134758 - DNA, 20 bp, Artificial Sequence
  mmSKRIPTE0005537_Ighg3_6
  gRNA
atcggtgagagggtaactaa

SEQ ID NO: 134759 - DNA, 20 bp, Artificial Sequence
  mmSKRIPTE0005538_Ighg3_7
  gRNA
gcatgtaggatatatcacct

SEQ ID NO: 134760 - DNA, 20 bp, Artificial Sequence
  mmSKRIPTE0005539_Ighg3_8
  gRNA
gagacttaaatgacttacgt

SEQ ID NO: 134761 - DNA, 20 bp, Artificial Sequence
  mmSKRIPTE0005540_Ighg3_9
  gRNA
ctggcatccttgtaggacca

SEQ ID NO: 134762 - DNA, 20 bp, Artificial Sequence
  mmSKRIPTE0005541_Fgf10_1
  gRNA
agaaggtgccaaccgcagag

SEQ ID NO: 134763 - DNA, 20 bp, Artificial Sequence
  mmSKRIPTE0005542_Fgf10_2
  gRNA
acagcaaatagtgcagacgt

SEQ ID NO: 134764 - DNA, 20 bp, Artificial Sequence
  mmSKRIPTE0005543_Fgf10_3
  gRNA
tcagggtgaacagtggacgt

SEQ ID NO: 134765 - DNA, 20 bp, Artificial Sequence
  mmSKRIPTE0005544_Fgf10_4
  gRNA
agtcatatgctctgtacccg

SEQ ID NO: 134766 - DNA, 20 bp, Artificial Sequence
  mmSKRIPTE0005545_Fgf10_5
  gRNA
gaagggtaagacctgctgcg

SEQ ID NO: 134767 - DNA, 20 bp, Artificial Sequence
  mmSKRIPTE0005546_Fgf10_6
  gRNA
gagaacaaagtaacccccgg

SEQ ID NO: 134768 - DNA, 20 bp, Artificial Sequence
  mmSKRIPTE0005547_Fgf10_7
  gRNA
gagctttgggtgtggcacca

SEQ ID NO: 134769 - DNA, 20 bp, Artificial Sequence
  mmSKRIPTE0005548_Fgf10_8
  gRNA
tttagtgatctacagagcga

SEQ ID NO: 134770 - DNA, 20 bp, Artificial Sequence
  mmSKRIPTE0005549_Fgf10_9
  gRNA
ttatacctgacacatgacca

SEQ ID NO: 134771 - DNA, 20 bp, Artificial Sequence
  mmSKRIPTE0005550_Ccl28_1
  gRNA
taatcctataatccaccacc

SEQ ID NO: 134772 - DNA, 20 bp, Artificial Sequence
  mmSKRIPTE0005551_Ccl28_2
  gRNA
tgggcttctagagtcaagtg

SEQ ID NO: 134773 - DNA, 20 bp, Artificial Sequence
  mmSKRIPTE0005552_Ccl28_3
  gRNA
ccacataactcagcgcactg

SEQ ID NO: 134774 - DNA, 20 bp, Artificial Sequence
  mmSKRIPTE0005553_Ccl28_4
  gRNA
gcttcaaagtacgattgtgc

SEQ ID NO: 134775 - DNA, 20 bp, Artificial Sequence
  mmSKRIPTE0005554_Ccl28_5
  gRNA
agcacttgggttgtacatgt

SEQ ID NO: 134776 - DNA, 20 bp, Artificial Sequence
  mmSKRIPTE0005555_Ccl28_6
  gRNA
aggaccagtcagacaaacct

SEQ ID NO: 134777 - DNA, 20 bp, Artificial Sequence
  mmSKRIPTE0005556_Ccl28_7
  gRNA
acaggctggtactctgcgga

SEQ ID NO: 134778 - DNA, 20 bp, Artificial Sequence
  mmSKRIPTE0005557_Ccl28_8
  gRNA
gagtcattgccagactcagt

SEQ ID NO: 134779 - DNA, 20 bp, Artificial Sequence
  mmSKRIPTE0005558_Ccl28_9
  gRNA
actattacttgttagctaag

SEQ ID NO: 134780 - DNA, 20 bp, Artificial Sequence
  mmSKRIPTE0005559_Ep300_1
  gRNA
gagaacttgagattacggat

SEQ ID NO: 134781 - DNA, 20 bp, Artificial Sequence
  mmSKRIPTE0005560_Ep300_2
  gRNA
tgggagcaggacaagcgatg

SEQ ID NO: 134782 - DNA, 20 bp, Artificial Sequence
  mmSKRIPTE0005561_Ep300_3
  gRNA
atgtctcaaactgcgtgttg

SEQ ID NO: 134783 - DNA, 20 bp, Artificial Sequence
  mmSKRIPTE0005562_Ep300_4
  gRNA
tgtagtaagtagcatcacgg

SEQ ID NO: 134784 - DNA, 20 bp, Artificial Sequence
  mmSKRIPTE0005563_Ep300_5
  gRNA
tcgagatctggattgcacgt

SEQ ID NO: 134785 - DNA, 20 bp, Artificial Sequence
  mmSKRIPTE0005564_Ep300_6
  gRNA
ggaagaaatgaacactatcg

SEQ ID NO: 134786 - DNA, 20 bp, Artificial Sequence
  mmSKRIPTE0005565_Ep300_7
  gRNA
cagatggccagatgatctcg

SEQ ID NO: 134787 - DNA, 20 bp, Artificial Sequence
  mmSKRIPTE0005566_Ep300_8
  gRNA
tcggcaagaaggccatactg

SEQ ID NO: 134788 - DNA, 20 bp, Artificial Sequence
  mmSKRIPTE0005567_Ep300_9
  gRNA
cagcatgcaacgaactggtg

SEQ ID NO: 134789 - DNA, 20 bp, Artificial Sequence
  mmSKRIPTE0005568_App_1
  gRNA
cggttagcgtacgcttacag

SEQ ID NO: 134790 - DNA, 20 bp, Artificial Sequence
  mmSKRIPTE0005569_App_2
  gRNA
ccccaacttctgacaccacg

SEQ ID NO: 134791 - DNA, 20 bp, Artificial Sequence
  mmSKRIPTE0005570_App_3
  gRNA
atctctcggagaacatccga

SEQ ID NO: 134792 - DNA, 20 bp, Artificial Sequence
  mmSKRIPTE0005571_App_4
  gRNA
tctggccagacgcaatctcg

SEQ ID NO: 134793 - DNA, 20 bp, Artificial Sequence
  mmSKRIPTE0005572_App_5
  gRNA
gtaacacgtgcaacccagag

SEQ ID NO: 134794 - DNA, 20 bp, Artificial Sequence
  mmSKRIPTE0005573_App_6
  gRNA
ctggcggtcacactaacgga

SEQ ID NO: 134795 - DNA, 20 bp, Artificial Sequence
  mmSKRIPTE0005574_App_7
  gRNA
tgtacaacgcgtaggcacct

SEQ ID NO: 134796 - DNA, 20 bp, Artificial Sequence
  mmSKRIPTE0005575_App_8
  gRNA
ttaagtaggaactctatctg

SEQ ID NO: 134797 - DNA, 20 bp, Artificial Sequence
  mmSKRIPTE0005576_App_9
  gRNA
tcccacgcactcatgagggt

SEQ ID NO: 134798 - DNA, 20 bp, Artificial Sequence
  mmSKRIPTE0005577_Tap1_1
  gRNA
atgcaccgaggttagacccg

SEQ ID NO: 134799 - DNA, 20 bp, Artificial Sequence
  mmSKRIPTE0005578_Tap1_2
  gRNA
caggcggaggatgcgcaaag

SEQ ID NO: 134800 - DNA, 20 bp, Artificial Sequence
  mmSKRIPTE0005579_Tap1_3
  gRNA
tctggacagctcacgctcga

SEQ ID NO: 134801 - DNA, 20 bp, Artificial Sequence
  mmSKRIPTE0005580_Tap1_4
  gRNA
actaatggactcgcacacgt

SEQ ID NO: 134802 - DNA, 20 bp, Artificial Sequence
  mmSKRIPTE0005581_Tap1_5
  gRNA
tatcggcgatgcctactgtg

SEQ ID NO: 134803 - DNA, 20 bp, Artificial Sequence
  mmSKRIPTE0005582_Tap1_6
  gRNA
cgtgtctagtgattcgaggt

SEQ ID NO: 134804 - DNA, 20 bp, Artificial Sequence
  mmSKRIPTE0005583_Tap1_7
  gRNA
gccatacttctaggtagaag

SEQ ID NO: 134805 - DNA, 20 bp, Artificial Sequence
  mmSKRIPTE0005584_Tap1_8
  gRNA
ggacacctaggttagctgcg

SEQ ID NO: 134806 - DNA, 20 bp, Artificial Sequence
  mmSKRIPTE0005585_Tap1_9
  gRNA
gcctggggaacactccggga

SEQ ID NO: 134807 - DNA, 20 bp, Artificial Sequence
  mmSKRIPTE0005586_Blnk_1
  gRNA
aggtgcttccctagtcgagg

SEQ ID NO: 134808 - DNA, 20 bp, Artificial Sequence
  mmSKRIPTE0005587_Blnk_2
  gRNA
gacggccaatcataggtgga

SEQ ID NO: 134809 - DNA, 20 bp, Artificial Sequence
  mmSKRIPTE0005588_Blnk_3
  gRNA
aaggtgtaggaggcgttcag

SEQ ID NO: 134810 - DNA, 20 bp, Artificial Sequence
  mmSKRIPTE0005589_Blnk_4
  gRNA
ctatgcaggtcgaaacagtg

SEQ ID NO: 134811 - DNA, 20 bp, Artificial Sequence
  mmSKRIPTE0005590_Blnk_5
  gRNA
tataatggcagcagtccgct

SEQ ID NO: 134812 - DNA, 20 bp, Artificial Sequence
  mmSKRIPTE0005591_Blnk_6
  gRNA
acgggagtctacgttaagag

SEQ ID NO: 134813 - DNA, 20 bp, Artificial Sequence
  mmSKRIPTE0005592_Blnk_7
  gRNA
aagaggaataaggctccgaa

SEQ ID NO: 134814 - DNA, 20 bp, Artificial Sequence
  mmSKRIPTE0005593_Blnk_8
  gRNA
cctgggtcatggatgcctag

SEQ ID NO: 134815 - DNA, 20 bp, Artificial Sequence
  mmSKRIPTE0005594_Blnk_9
  gRNA
gggaagacatccgatcaaag

SEQ ID NO: 134816 - DNA, 20 bp, Artificial Sequence
  mmSKRIPTE0005595_Hps1_1
  gRNA
ggatatataagaccactacg

SEQ ID NO: 134817 - DNA, 20 bp, Artificial Sequence
  mmSKRIPTE0005596_Hps1_2
  gRNA
cgagacgctagagcggcacg

SEQ ID NO: 134818 - DNA, 20 bp, Artificial Sequence
  mmSKRIPTE0005597_Hps1_3
  gRNA
caacacttggagtctatcga

SEQ ID NO: 134819 - DNA, 20 bp, Artificial Sequence
  mmSKRIPTE0005598_Hps1_4
  gRNA
gctcatccccggaagatgag

SEQ ID NO: 134820 - DNA, 20 bp, Artificial Sequence
  mmSKRIPTE0005599_Hps1_5
  gRNA
tctactccgggtaaacctga

SEQ ID NO: 134821 - DNA, 20 bp, Artificial Sequence
  mmSKRIPTE0005600_Hps1_6
  gRNA
ggacctagcaccaggcacgt

SEQ ID NO: 134822 - DNA, 20 bp, Artificial Sequence
  mmSKRIPTE0005601_Hps1_7
  gRNA
tgggagctataagtcgggca

SEQ ID NO: 134823 - DNA, 20 bp, Artificial Sequence
  mmSKRIPTE0005602_Hps1_8
  gRNA
agtgggtgacaagtgaaacg

SEQ ID NO: 134824 - DNA, 20 bp, Artificial Sequence
  mmSKRIPTE0005603_Hps1_9
  gRNA
ggtgggttaactaggcacac

SEQ ID NO: 134825 - DNA, 20 bp, Artificial Sequence
  mmSKRIPTE0005604_Mmp9_1
  gRNA
gccattcgaacaccacgctg

SEQ ID NO: 134826 - DNA, 20 bp, Artificial Sequence
  mmSKRIPTE0005605_Mmp9_2
  gRNA
ccttccttactgcccgcacg

SEQ ID NO: 134827 - DNA, 20 bp, Artificial Sequence
  mmSKRIPTE0005606_Mmp9_3
  gRNA
acgatcgcttcaaaacacac

SEQ ID NO: 134828 - DNA, 20 bp, Artificial Sequence
  mmSKRIPTE0005607_Mmp9_4
  gRNA
gtgaaaagccagcgtcgatg

SEQ ID NO: 134829 - DNA, 20 bp, Artificial Sequence
  mmSKRIPTE0005608_Mmp9_5
  gRNA
ggtcagtagacactaaggtg

SEQ ID NO: 134830 - DNA, 20 bp, Artificial Sequence
  mmSKRIPTE0005609_Mmp9_6
  gRNA
agagccttcccgagacgacg

SEQ ID NO: 134831 - DNA, 20 bp, Artificial Sequence
  mmSKRIPTE0005610_Mmp9_7
  gRNA
cccaattgggagtcaaggag

SEQ ID NO: 134832 - DNA, 20 bp, Artificial Sequence
  mmSKRIPTE0005611_Mmp9_8
  gRNA
gtaccgctatggttacaccc

SEQ ID NO: 134833 - DNA, 20 bp, Artificial Sequence
  mmSKRIPTE0005612_Mmp9_9
  gRNA
ctccggttagctgaacacaa

SEQ ID NO: 134834 - DNA, 20 bp, Artificial Sequence
  mmSKRIPTE0005613_Il21_1
  gRNA
acaatgtccatgttcacccg

SEQ ID NO: 134835 - DNA, 20 bp, Artificial Sequence
  mmSKRIPTE0005614_Il21_2
  gRNA
tctccacttgcaatcccaag

SEQ ID NO: 134836 - DNA, 20 bp, Artificial Sequence
  mmSKRIPTE0005615_Il21_3
  gRNA
tgcctgcccatgtagcataa

SEQ ID NO: 134837 - DNA, 20 bp, Artificial Sequence
  mmSKRIPTE0005616_Il21_4
  gRNA
ggtgctaatctggtccctag

SEQ ID NO: 134838 - DNA, 20 bp, Artificial Sequence
  mmSKRIPTE0005617_Il21_5
  gRNA
gatgctgatgaatcatctgt

SEQ ID NO: 134839 - DNA, 20 bp, Artificial Sequence
  mmSKRIPTE0005618_Il21_6
  gRNA
gagtaactctgcaagaaggt

SEQ ID NO: 134840 - DNA, 20 bp, Artificial Sequence
  mmSKRIPTE0005619_Il21_7
  gRNA
ctgcttagttaatgggcgaa

SEQ ID NO: 134841 - DNA, 20 bp, Artificial Sequence
  mmSKRIPTE0005620_Il21_8
  gRNA
tcgtgagcgtctatagtgtc

SEQ ID NO: 134842 - DNA, 20 bp, Artificial Sequence
  mmSKRIPTE0005621_Il21_9
  gRNA
aggatccgagaagattcccg

SEQ ID NO: 134843 - DNA, 20 bp, Artificial Sequence
  mmSKRIPTE0005622_Zbtb7b_1
  gRNA
ctgtcacaagataatccacg

SEQ ID NO: 134844 - DNA, 20 bp, Artificial Sequence
  mmSKRIPTE0005623_Zbtb7b_2
  gRNA
aaggcgccgcaaggatgacg

SEQ ID NO: 134845 - DNA, 20 bp, Artificial Sequence
  mmSKRIPTE0005624_Zbtb7b_3
  gRNA
tggccgtaaattatgcaaag

SEQ ID NO: 134846 - DNA, 20 bp, Artificial Sequence
  mmSKRIPTE0005625_Zbtb7b_4
  gRNA
gcaatggggaaaccgcagtg

SEQ ID NO: 134847 - DNA, 20 bp, Artificial Sequence
  mmSKRIPTE0005626_Zbtb7b_5
  gRNA
ggacaccacgccaagcaacg

SEQ ID NO: 134848 - DNA, 20 bp, Artificial Sequence
  mmSKRIPTE0005627_Zbtb7b_6
  gRNA
gttcgattctgataccaaca

SEQ ID NO: 134849 - DNA, 20 bp, Artificial Sequence
  mmSKRIPTE0005628_Zbtb7b_7
  gRNA
cgacgggcaacaggtcgagg

SEQ ID NO: 134850 - DNA, 20 bp, Artificial Sequence
  mmSKRIPTE0005629_Zbtb7b_8
  gRNA
gaaacccgcatagccgaagt

SEQ ID NO: 134851 - DNA, 20 bp, Artificial Sequence
  mmSKRIPTE0005630_Zbtb7b_9
  gRNA
gtcattcctagtacgagcag

SEQ ID NO: 134852 - DNA, 20 bp, Artificial Sequence
  mmSKRIPTE0005631_Pum1_1
  gRNA
ctctaacactgcgagcacct

SEQ ID NO: 134853 - DNA, 20 bp, Artificial Sequence
  mmSKRIPTE0005632_Pum1_2
  gRNA
gctttgtctacgcacccgta

SEQ ID NO: 134854 - DNA, 20 bp, Artificial Sequence
  mmSKRIPTE0005633_Pum1_3
  gRNA
gcacaacgttaggcggagaa

SEQ ID NO: 134855 - DNA, 20 bp, Artificial Sequence
  mmSKRIPTE0005634_Pum1_4
  gRNA
gcctcccaaacacgtacgag

SEQ ID NO: 134856 - DNA, 20 bp, Artificial Sequence
  mmSKRIPTE0005635_Pum1_5
  gRNA
aggccctattgttatccgcg

SEQ ID NO: 134857 - DNA, 20 bp, Artificial Sequence
  mmSKRIPTE0005636_Pum1_6
  gRNA
cattccatatcgcaaacgag

SEQ ID NO: 134858 - DNA, 20 bp, Artificial Sequence
  mmSKRIPTE0005637_Pum1_7
  gRNA
gtccaccatagcgtcgtcct

SEQ ID NO: 134859 - DNA, 20 bp, Artificial Sequence
  mmSKRIPTE0005638_Pum1_8
  gRNA
tgccaagactggataacctg

SEQ ID NO: 134860 - DNA, 20 bp, Artificial Sequence
  mmSKRIPTE0005639_Pum1_9
  gRNA
ctgccaaacgccaatacgag

SEQ ID NO: 134861 - DNA, 20 bp, Artificial Sequence
  mmSKRIPTE0005640_Oasl2_1
  gRNA
ccacgtgacttacggctctg

SEQ ID NO: 134862 - DNA, 20 bp, Artificial Sequence
  mmSKRIPTE0005641_Oasl2_2
  gRNA
tagattgattgatactcgga

SEQ ID NO: 134863 - DNA, 20 bp, Artificial Sequence
  mmSKRIPTE0005642_Oasl2_3
  gRNA
gtacctgatcctccgcacaa

SEQ ID NO: 134864 - DNA, 20 bp, Artificial Sequence
  mmSKRIPTE0005643_Oasl2_4
  gRNA
tccagctgcagggcccatcg

SEQ ID NO: 134865 - DNA, 20 bp, Artificial Sequence
  mmSKRIPTE0005644_Oasl2_5
  gRNA
tacatgggctgatggcacgg

SEQ ID NO: 134866 - DNA, 20 bp, Artificial Sequence
  mmSKRIPTE0005645_Oasl2_6
  gRNA
tcgagcgatagggttaggct

SEQ ID NO: 134867 - DNA, 20 bp, Artificial Sequence
  mmSKRIPTE0005646_Oasl2_7
  gRNA
gaggtcggtagttaggaatg

SEQ ID NO: 134868 - DNA, 20 bp, Artificial Sequence
  mmSKRIPTE0005647_Oasl2_8
  gRNA
gaggcgtaagactctaggca

SEQ ID NO: 134869 - DNA, 20 bp, Artificial Sequence
  mmSKRIPTE0005648_Oasl2_9
  gRNA
ctgggagacataacgaacaa

SEQ ID NO: 134870 - DNA, 20 bp, Artificial Sequence
  mmSKRIPTE0005649_Ccl26_1
  gRNA
accatgctgcccctccagcg

SEQ ID NO: 134871 - DNA, 20 bp, Artificial Sequence
  mmSKRIPTE0005650_Ccl26_2
  gRNA
gaattcatcaggttccatga

SEQ ID NO: 134872 - DNA, 20 bp, Artificial Sequence
  mmSKRIPTE0005651_Ccl26_3
  gRNA
gagaaccagctacatacatg

SEQ ID NO: 134873 - DNA, 20 bp, Artificial Sequence
  mmSKRIPTE0005652_Ccl26_4
  gRNA
tcggccacatcattgagcaa

SEQ ID NO: 134874 - DNA, 20 bp, Artificial Sequence
  mmSKRIPTE0005653_Ccl26_5
  gRNA
gcaattctgtgtccagccag

SEQ ID NO: 134875 - DNA, 20 bp, Artificial Sequence
  mmSKRIPTE0005654_Ccl26_6
  gRNA
tgtctgacaagaccatccca

SEQ ID NO: 134876 - DNA, 20 bp, Artificial Sequence
  mmSKRIPTE0005655_Ccl26_7
  gRNA
aactagaacagactataacc

SEQ ID NO: 134877 - DNA, 20 bp, Artificial Sequence
  mmSKRIPTE0005656_Ccl26_8
  gRNA
caggagttgtgacaggaatg

SEQ ID NO: 134878 - DNA, 20 bp, Artificial Sequence
  mmSKRIPTE0005657_Ccl26_9
  gRNA
atgagggcatgagtaggcag

SEQ ID NO: 134879 - DNA, 20 bp, Artificial Sequence
  mmSKRIPTE0005658_Gimap1_1
  gRNA
taaacccttccttgtagacg

SEQ ID NO: 134880 - DNA, 20 bp, Artificial Sequence
  mmSKRIPTE0005659_Gimap1_2
  gRNA
cttctgcactcacaagcgaa

SEQ ID NO: 134881 - DNA, 20 bp, Artificial Sequence
  mmSKRIPTE0005660_Gimap1_3
  gRNA
tgagcatagaggaagtcgct

SEQ ID NO: 134882 - DNA, 20 bp, Artificial Sequence
  mmSKRIPTE0005661_Gimap1_4
  gRNA
atgcggaccatcaagcacag

SEQ ID NO: 134883 - DNA, 20 bp, Artificial Sequence
  mmSKRIPTE0005662_Gimap1_5
  gRNA
cgtgttccctgtgtaaacgc

SEQ ID NO: 134884 - DNA, 20 bp, Artificial Sequence
  mmSKRIPTE0005663_Gimap1_6
  gRNA
gagctggcttgagacaagcg

SEQ ID NO: 134885 - DNA, 20 bp, Artificial Sequence
  mmSKRIPTE0005664_Gimap1_7
  gRNA
gggcgcgcactactccaatg

SEQ ID NO: 134886 - DNA, 20 bp, Artificial Sequence
  mmSKRIPTE0005665_Gimap1_8
  gRNA
tcttcagctccgagatcccg

SEQ ID NO: 134887 - DNA, 20 bp, Artificial Sequence
  mmSKRIPTE0005666_Gimap1_9
  gRNA
ttatcgcccgagatttcact

SEQ ID NO: 134888 - DNA, 20 bp, Artificial Sequence
  mmSKRIPTE0005667_Aicda_1
  gRNA
aagtcatcgacttcgtacaa

SEQ ID NO: 134889 - DNA, 20 bp, Artificial Sequence
  mmSKRIPTE0005668_Aicda_2
  gRNA
ttcacagaagtagaggcgcg

SEQ ID NO: 134890 - DNA, 20 bp, Artificial Sequence
  mmSKRIPTE0005669_Aicda_3
  gRNA
aggaggtgaaccaggtgacg

SEQ ID NO: 134891 - DNA, 20 bp, Artificial Sequence
  mmSKRIPTE0005670_Aicda_4
  gRNA
tcccgatctggaccccagcg

SEQ ID NO: 134892 - DNA, 20 bp, Artificial Sequence
  mmSKRIPTE0005671_Aicda_5
  gRNA
ggaaagtgtctaaacgaagt

SEQ ID NO: 134893 - DNA, 20 bp, Artificial Sequence
  mmSKRIPTE0005672_Aicda_6
  gRNA
caggcacttccgggacacga

SEQ ID NO: 134894 - DNA, 20 bp, Artificial Sequence
  mmSKRIPTE0005673_Aicda_7
  gRNA
ccgctgacactcactctgag

SEQ ID NO: 134895 - DNA, 20 bp, Artificial Sequence
  mmSKRIPTE0005674_Aicda_8
  gRNA
attattctggcgccacctag

SEQ ID NO: 134896 - DNA, 20 bp, Artificial Sequence
  mmSKRIPTE0005675_Aicda_9
  gRNA
gtaggaacaacaattccacg

SEQ ID NO: 134897 - DNA, 20 bp, Artificial Sequence
  mmSKRIPTE0005676_Trim28_1
  gRNA
cggcgccgtcgtctgtacag

SEQ ID NO: 134898 - DNA, 20 bp, Artificial Sequence
  mmSKRIPTE0005677_Trim28_2
  gRNA
ttaagaatacacacgtgagt

SEQ ID NO: 134899 - DNA, 20 bp, Artificial Sequence
  mmSKRIPTE0005678_Trim28_3
  gRNA
gttaccaggtctggacaccg

SEQ ID NO: 134900 - DNA, 20 bp, Artificial Sequence
  mmSKRIPTE0005679_Trim28_4
  gRNA
gtcaggtctagggtaccacc

SEQ ID NO: 134901 - DNA, 20 bp, Artificial Sequence
  mmSKRIPTE0005680_Trim28_5
  gRNA
atggacaagacaatcaagca

SEQ ID NO: 134902 - DNA, 20 bp, Artificial Sequence
  mmSKRIPTE0005681_Trim28_6
  gRNA
gcgcctgtgcgagagtatgg

SEQ ID NO: 134903 - DNA, 20 bp, Artificial Sequence
  mmSKRIPTE0005682_Trim28_7
  gRNA
tcggtagccagctgatgcaa

SEQ ID NO: 134904 - DNA, 20 bp, Artificial Sequence
  mmSKRIPTE0005683_Trim28_8
  gRNA
caggaagttcccgccgaacg

SEQ ID NO: 134905 - DNA, 20 bp, Artificial Sequence
  mmSKRIPTE0005684_Trim28_9
  gRNA
cgccgcagcgaataattcgg

SEQ ID NO: 134906 - DNA, 20 bp, Artificial Sequence
  mmSKRIPTE0005685_Igf2_1
  gRNA
gacacctggagacagtccgc

SEQ ID NO: 134907 - DNA, 20 bp, Artificial Sequence
  mmSKRIPTE0005686_Igf2_2
  gRNA
ttgggtggtaacacgatcag

SEQ ID NO: 134908 - DNA, 20 bp, Artificial Sequence
  mmSKRIPTE0005687_Igf2_3
  gRNA
gagattacgaccttgcccgg

SEQ ID NO: 134909 - DNA, 20 bp, Artificial Sequence
  mmSKRIPTE0005688_Igf2_4
  gRNA
cgtacttccggtaggtagcg

SEQ ID NO: 134910 - DNA, 20 bp, Artificial Sequence
  mmSKRIPTE0005689_Igf2_5
  gRNA
tggggtgacaattagtacac

SEQ ID NO: 134911 - DNA, 20 bp, Artificial Sequence
  mmSKRIPTE0005690_Igf2_6
  gRNA
gttgctggacatctccgaag

SEQ ID NO: 134912 - DNA, 20 bp, Artificial Sequence
  mmSKRIPTE0005691_Igf2_7
  gRNA
cggagagactctgtgcggag

SEQ ID NO: 134913 - DNA, 20 bp, Artificial Sequence
  mmSKRIPTE0005692_Igf2_8
  gRNA
aagcccaacctcggaccgtg

SEQ ID NO: 134914 - DNA, 20 bp, Artificial Sequence
  mmSKRIPTE0005693_Igf2_9
  gRNA
cagtttgtctgttcggaccg

SEQ ID NO: 134915 - DNA, 20 bp, Artificial Sequence
  mmSKRIPTE0005694_Ubash3b_1
  gRNA
tatccggtttgctaaccatg

SEQ ID NO: 134916 - DNA, 20 bp, Artificial Sequence
  mmSKRIPTE0005695_Ubash3b_2
  gRNA
tcatccccgctgcacaagcg

SEQ ID NO: 134917 - DNA, 20 bp, Artificial Sequence
  mmSKRIPTE0005696_Ubash3b_3
  gRNA
gctaaggatccgaccaccgt

SEQ ID NO: 134918 - DNA, 20 bp, Artificial Sequence
  mmSKRIPTE0005697_Ubash3b_4
  gRNA
aaatagcacaaagggctgcg

SEQ ID NO: 134919 - DNA, 20 bp, Artificial Sequence
  mmSKRIPTE0005698_Ubash3b_5
  gRNA
aaagcgtgtttgcacccccg

SEQ ID NO: 134920 - DNA, 20 bp, Artificial Sequence
  mmSKRIPTE0005699_Ubash3b_6
  gRNA
gctgagtgtgcactgctacg

SEQ ID NO: 134921 - DNA, 20 bp, Artificial Sequence
  mmSKRIPTE0005700_Ubash3b_7
  gRNA
ccaacatcatcatgacctcg

SEQ ID NO: 134922 - DNA, 20 bp, Artificial Sequence
  mmSKRIPTE0005701_Ubash3b_8
  gRNA
cgtcaagctaggatgcgact

SEQ ID NO: 134923 - DNA, 20 bp, Artificial Sequence
  mmSKRIPTE0005702_Ubash3b_9
  gRNA
tatgtgcagtctgaacgcag

SEQ ID NO: 134924 - DNA, 20 bp, Artificial Sequence
  mmSKRIPTE0005703_G6pdx_1
  gRNA
gcgcgcatcaaagggactcg

SEQ ID NO: 134925 - DNA, 20 bp, Artificial Sequence
  mmSKRIPTE0005704_G6pdx_2
  gRNA
ttgcgatctcgaaattgtag

SEQ ID NO: 134926 - DNA, 20 bp, Artificial Sequence
  mmSKRIPTE0005705_G6pdx_3
  gRNA
aggctggaaccgcatcatcg

SEQ ID NO: 134927 - DNA, 20 bp, Artificial Sequence
  mmSKRIPTE0005706_G6pdx_4
  gRNA
atgggcagcctccttaccaa

SEQ ID NO: 134928 - DNA, 20 bp, Artificial Sequence
  mmSKRIPTE0005707_G6pdx_5
  gRNA
tagatatatttctagctgag

SEQ ID NO: 134929 - DNA, 20 bp, Artificial Sequence
  mmSKRIPTE0005708_G6pdx_6
  gRNA
gatgagtagatgacactgct

SEQ ID NO: 134930 - DNA, 20 bp, Artificial Sequence
  mmSKRIPTE0005709_G6pdx_7
  gRNA
cagatacagccactatactg

SEQ ID NO: 134931 - DNA, 20 bp, Artificial Sequence
  mmSKRIPTE0005710_G6pdx_8
  gRNA
ctttggaagatatggcaaag

SEQ ID NO: 134932 - DNA, 20 bp, Artificial Sequence
  mmSKRIPTE0005711_G6pdx_9
  gRNA
gatgtccgtgatgagaaggt

SEQ ID NO: 134933 - DNA, 20 bp, Artificial Sequence
  mmSKRIPTE0005712_Pigr_1
  gRNA
ctcgccatgaggtaccgtgg

SEQ ID NO: 134934 - DNA, 20 bp, Artificial Sequence
  mmSKRIPTE0005713_Pigr_2
  gRNA
actgttagttatacccagcg

SEQ ID NO: 134935 - DNA, 20 bp, Artificial Sequence
  mmSKRIPTE0005714_Pigr_3
  gRNA
caggaaaggcgattctcatg

SEQ ID NO: 134936 - DNA, 20 bp, Artificial Sequence
  mmSKRIPTE0005715_Pigr_4
  gRNA
tggctgctagaggatccagt

SEQ ID NO: 134937 - DNA, 20 bp, Artificial Sequence
  mmSKRIPTE0005716_Pigr_5
  gRNA
cgtaggagaaaagttgcttg

SEQ ID NO: 134938 - DNA, 20 bp, Artificial Sequence
  mmSKRIPTE0005717_Pigr_6
  gRNA
tgggttacaggaaaatcacg

SEQ ID NO: 134939 - DNA, 20 bp, Artificial Sequence
  mmSKRIPTE0005718_Pigr_7
  gRNA
tggtagtcacgatttctgca

SEQ ID NO: 134940 - DNA, 20 bp, Artificial Sequence
  mmSKRIPTE0005719_Pigr_8
  gRNA
aggtcttgaagacagatcgt

SEQ ID NO: 134941 - DNA, 20 bp, Artificial Sequence
  mmSKRIPTE0005720_Pigr_9
  gRNA
gggtggccagagtccgacat

SEQ ID NO: 134942 - DNA, 20 bp, Artificial Sequence
  mmSKRIPTE0005721_Prtn3_1
  gRNA
ggcgcattcgcggatcacga

SEQ ID NO: 134943 - DNA, 20 bp, Artificial Sequence
  mmSKRIPTE0005722_Prtn3_2
  gRNA
tggattcaaaacgtgctgcg

SEQ ID NO: 134944 - DNA, 20 bp, Artificial Sequence
  mmSKRIPTE0005723_Prtn3_3
  gRNA
ggaacacaacgtgtgcacgc

SEQ ID NO: 134945 - DNA, 20 bp, Artificial Sequence
  mmSKRIPTE0005724_Prtn3_4
  gRNA
tcccccagtgagcgactagg

SEQ ID NO: 134946 - DNA, 20 bp, Artificial Sequence
  mmSKRIPTE0005725_Prtn3_5
  gRNA
ctgctgcactccaagcgccg

SEQ ID NO: 134947 - DNA, 20 bp, Artificial Sequence
  mmSKRIPTE0005726_Prtn3_6
  gRNA
agctgttgatatgtccggca

SEQ ID NO: 134948 - DNA, 20 bp, Artificial Sequence
  mmSKRIPTE0005727_Prtn3_7
  gRNA
ccatggagccgtcatagtgt

SEQ ID NO: 134949 - DNA, 20 bp, Artificial Sequence
  mmSKRIPTE0005728_Prtn3_8
  gRNA
atagatcccaagtctatgcg

SEQ ID NO: 134950 - DNA, 20 bp, Artificial Sequence
  mmSKRIPTE0005729_Prtn3_9
  gRNA
gaggcctggactgcgcctag

SEQ ID NO: 134951 - DNA, 20 bp, Artificial Sequence
  mmSKRIPTE0005730_Kitl_1
  gRNA
tacatgaatttagctaccgg

SEQ ID NO: 134952 - DNA, 20 bp, Artificial Sequence
  mmSKRIPTE0005731_Kitl_2
  gRNA
agtgacggctgcaattcttg

SEQ ID NO: 134953 - DNA, 20 bp, Artificial Sequence
  mmSKRIPTE0005732_Kitl_3
  gRNA
gaactgcataacctagactt

SEQ ID NO: 134954 - DNA, 20 bp, Artificial Sequence
  mmSKRIPTE0005733_Kitl_4
  gRNA
acattgttaccttcgcacag

SEQ ID NO: 134955 - DNA, 20 bp, Artificial Sequence
  mmSKRIPTE0005734_Kitl_5
  gRNA
ccttggccgttgctttcccg

SEQ ID NO: 134956 - DNA, 20 bp, Artificial Sequence
  mmSKRIPTE0005735_Kitl_6
  gRNA
aaatcgctccgggagccccg

SEQ ID NO: 134957 - DNA, 20 bp, Artificial Sequence
  mmSKRIPTE0005736_Kitl_7
  gRNA
cctcaactatgtcgccggga

SEQ ID NO: 134958 - DNA, 20 bp, Artificial Sequence
  mmSKRIPTE0005737_Kitl_8
  gRNA
tctcgtagccaacaatgact

SEQ ID NO: 134959 - DNA, 20 bp, Artificial Sequence
  mmSKRIPTE0005738_Kitl_9
  gRNA
aaggtgtacgcatctcccat

SEQ ID NO: 134960 - DNA, 20 bp, Artificial Sequence
  mmSKRIPTE0005739_Ikzf3_1
  gRNA
gctcaccttccatgtcgccg

SEQ ID NO: 134961 - DNA, 20 bp, Artificial Sequence
  mmSKRIPTE0005740_Ikzf3_2
  gRNA
gcagtcgtgtatacacgagc

SEQ ID NO: 134962 - DNA, 20 bp, Artificial Sequence
  mmSKRIPTE0005741_Ikzf3_3
  gRNA
cagagaccggcattacctgt

SEQ ID NO: 134963 - DNA, 20 bp, Artificial Sequence
  mmSKRIPTE0005742_Ikzf3_4
  gRNA
attccgtggcaacaattctg

SEQ ID NO: 134964 - DNA, 20 bp, Artificial Sequence
  mmSKRIPTE0005743_Ikzf3_5
  gRNA
tgtagcaggtgcttaagccg

SEQ ID NO: 134965 - DNA, 20 bp, Artificial Sequence
  mmSKRIPTE0005744_Ikzf3_6
  gRNA
aggttcacccttgtgaccgt

SEQ ID NO: 134966 - DNA, 20 bp, Artificial Sequence
  mmSKRIPTE0005745_Ikzf3_7
  gRNA
tgggcggctcttccgctgtg

SEQ ID NO: 134967 - DNA, 20 bp, Artificial Sequence
  mmSKRIPTE0005746_Ikzf3_8
  gRNA
cagtgtgcaggtgtcacgcg

SEQ ID NO: 134968 - DNA, 20 bp, Artificial Sequence
  mmSKRIPTE0005747_Ikzf3_9
  gRNA
gttccagtgtaatcagtgcg

SEQ ID NO: 134969 - DNA, 20 bp, Artificial Sequence
  mmSKRIPTE0005748_Ighv3-4_1
  gRNA
ctggtggaactggatccggc

SEQ ID NO: 134970 - DNA, 20 bp, Artificial Sequence
  mmSKRIPTE0005749_Ighv3-4_2
  gRNA
gagattccacagtccaggag

SEQ ID NO: 134971 - DNA, 20 bp, Artificial Sequence
  mmSKRIPTE0005750_Ighv3-4_3
  gRNA
agtggcaacacttaccagga

SEQ ID NO: 134972 - DNA, 20 bp, Artificial Sequence
  mmSKRIPTE0005751_Ighv3-4_4
  gRNA
acaggaaatctacattaggg

SEQ ID NO: 134973 - DNA, 20 bp, Artificial Sequence
  mmSKRIPTE0005752_Ighv3-4_5
  gRNA
tgtctgagaaggcttcacca

SEQ ID NO: 134974 - DNA, 20 bp, Artificial Sequence
  mmSKRIPTE0005753_Ighv3-4_6
  gRNA
ggagcgtgatctctcaagga

SEQ ID NO: 134975 - DNA, 20 bp, Artificial Sequence
  mmSKRIPTE0005754_Ighv3-4_7
  gRNA
cttgtcttcataattgggga

SEQ ID NO: 134976 - DNA, 20 bp, Artificial Sequence
  mmSKRIPTE0005755_Ighv3-4_8
  gRNA
tgtagagatgctctataagg

SEQ ID NO: 134977 - DNA, 20 bp, Artificial Sequence
  mmSKRIPTE0005756_Ighv3-4_9
  gRNA
atagggtacataagctccag

SEQ ID NO: 134978 - DNA, 20 bp, Artificial Sequence
  mmSKRIPTE0005757_Blk_1
  gRNA
agccagtgaaaggtggaccg

SEQ ID NO: 134979 - DNA, 20 bp, Artificial Sequence
  mmSKRIPTE0005758_Blk_2
  gRNA
gactgatttcgggactatcg

SEQ ID NO: 134980 - DNA, 20 bp, Artificial Sequence
  mmSKRIPTE0005759_Blk_3
  gRNA
acatctcaggatcgacttag

SEQ ID NO: 134981 - DNA, 20 bp, Artificial Sequence
  mmSKRIPTE0005760_Blk_4
  gRNA
gctggttcgtctctacgctg

SEQ ID NO: 134982 - DNA, 20 bp, Artificial Sequence
  mmSKRIPTE0005761_Blk_5
  gRNA
gtggttgaagaactttctag

SEQ ID NO: 134983 - DNA, 20 bp, Artificial Sequence
  mmSKRIPTE0005762_Blk_6
  gRNA
tatgggcgcgttccctaccc

SEQ ID NO: 134984 - DNA, 20 bp, Artificial Sequence
  mmSKRIPTE0005763_Blk_7
  gRNA
cttcctcagaaacacctccg

SEQ ID NO: 134985 - DNA, 20 bp, Artificial Sequence
  mmSKRIPTE0005764_Blk_8
  gRNA
atatcattgtacaactccgg

SEQ ID NO: 134986 - DNA, 20 bp, Artificial Sequence
  mmSKRIPTE0005765_Blk_9
  gRNA
cttcaggaccatcagccgga

SEQ ID NO: 134987 - DNA, 20 bp, Artificial Sequence
  mmSKRIPTE0005766_Plg_1
  gRNA
ttattgccgcaaccctgacg

SEQ ID NO: 134988 - DNA, 20 bp, Artificial Sequence
  mmSKRIPTE0005767_Plg_2
  gRNA
agcgatgggcagagctatcg

SEQ ID NO: 134989 - DNA, 20 bp, Artificial Sequence
  mmSKRIPTE0005768_Plg_3
  gRNA
ctgaggtttcccgcactcaa

SEQ ID NO: 134990 - DNA, 20 bp, Artificial Sequence
  mmSKRIPTE0005769_Plg_4
  gRNA
ggaagaggtgaaaattaccg

SEQ ID NO: 134991 - DNA, 20 bp, Artificial Sequence
  mmSKRIPTE0005770_Plg_5
  gRNA
gagcttacttgggtacgtgg

SEQ ID NO: 134992 - DNA, 20 bp, Artificial Sequence
  mmSKRIPTE0005771_Plg_6
  gRNA
aaggcgggtatcctcccgct

SEQ ID NO: 134993 - DNA, 20 bp, Artificial Sequence
  mmSKRIPTE0005772_Plg_7
  gRNA
ttgagaaataggcctgaacg

SEQ ID NO: 134994 - DNA, 20 bp, Artificial Sequence
  mmSKRIPTE0005773_Plg_8
  gRNA
gtcatcttattcgaaaagag

SEQ ID NO: 134995 - DNA, 20 bp, Artificial Sequence
  mmSKRIPTE0005774_Plg_9
  gRNA
ctacaccggtatattatggg

SEQ ID NO: 134996 - DNA, 20 bp, Artificial Sequence
  mmSKRIPTE0005775_Nfkbil1_1
  gRNA
ttgtgattaggtctccggag

SEQ ID NO: 134997 - DNA, 20 bp, Artificial Sequence
  mmSKRIPTE0005776_Nfkbil1_2
  gRNA
tcctacttaagctggtggtg

SEQ ID NO: 134998 - DNA, 20 bp, Artificial Sequence
  mmSKRIPTE0005777_Nfkbil1_3
  gRNA
gcacacgcgcaagtttcggg

SEQ ID NO: 134999 - DNA, 20 bp, Artificial Sequence
  mmSKRIPTE0005778_Nfkbil1_4
  gRNA
gtggtgacccataacaaggt

SEQ ID NO: 135000 - DNA, 20 bp, Artificial Sequence
  mmSKRIPTE0005779_Nfkbil1_5
  gRNA
gttcggtacgatttccggga

SEQ ID NO: 135001 - DNA, 20 bp, Artificial Sequence
  mmSKRIPTE0005780_Nfkbil1_6
  gRNA
gtgccaagggcaagaaaacg

SEQ ID NO: 135002 - DNA, 20 bp, Artificial Sequence
  mmSKRIPTE0005781_Nfkbil1_7
  gRNA
aatccaagatggcagcctcg

SEQ ID NO: 135003 - DNA, 20 bp, Artificial Sequence
  mmSKRIPTE0005782_Nfkbil1_8
  gRNA
tcacaccatagccgccatgt

SEQ ID NO: 135004 - DNA, 20 bp, Artificial Sequence
  mmSKRIPTE0005783_Nfkbil1_9
  gRNA
ttgttgacgtctctctaccg

SEQ ID NO: 135005 - DNA, 20 bp, Artificial Sequence
  mmSKRIPTE0005784_H2-T3_1
  gRNA
cgtgcgcttcaacagctcag

SEQ ID NO: 135006 - DNA, 20 bp, Artificial Sequence
  mmSKRIPTE0005785_H2-T3_2
  gRNA
actgacgtcacacgtcacag

SEQ ID NO: 135007 - DNA, 20 bp, Artificial Sequence
  mmSKRIPTE0005786_H2-T3_3
  gRNA
gcatagtctgcagattctcg

SEQ ID NO: 135008 - DNA, 20 bp, Artificial Sequence
  mmSKRIPTE0005787_H2-T3_4
  gRNA
gacctgcaatcagcgaaccg

SEQ ID NO: 135009 - DNA, 20 bp, Artificial Sequence
  mmSKRIPTE0005788_H2-T3_5
  gRNA
tagacacactgtgccgtgtg

SEQ ID NO: 135010 - DNA, 20 bp, Artificial Sequence
  mmSKRIPTE0005789_H2-T3_6
  gRNA
ctggttatacagagctccgt

SEQ ID NO: 135011 - DNA, 20 bp, Artificial Sequence
  mmSKRIPTE0005790_H2-T3_7
  gRNA
acagccatacatcacctgga

SEQ ID NO: 135012 - DNA, 20 bp, Artificial Sequence
  mmSKRIPTE0005791_H2-T3_8
  gRNA
gtgcctcagattcagcccga

SEQ ID NO: 135013 - DNA, 20 bp, Artificial Sequence
  mmSKRIPTE0005792_H2-T3_9
  gRNA
agccatgctgctcataagcg

SEQ ID NO: 135014 - DNA, 20 bp, Artificial Sequence
  mmSKRIPTE0005793_Cd44_1
  gRNA
atatggcattccttatccca

SEQ ID NO: 135015 - DNA, 20 bp, Artificial Sequence
  mmSKRIPTE0005794_Cd44_2
  gRNA
ataagcgccgccccaaccag

SEQ ID NO: 135016 - DNA, 20 bp, Artificial Sequence
  mmSKRIPTE0005795_Cd44_3
  gRNA
catggaatacacctgcgtag

SEQ ID NO: 135017 - DNA, 20 bp, Artificial Sequence
  mmSKRIPTE0005796_Cd44_4
  gRNA
gttcatggtactaatgtgcc

SEQ ID NO: 135018 - DNA, 20 bp, Artificial Sequence
  mmSKRIPTE0005797_Cd44_5
  gRNA
gctcatccatagatacctag

SEQ ID NO: 135019 - DNA, 20 bp, Artificial Sequence
  mmSKRIPTE0005798_Cd44_6
  gRNA
ttatttctgtaacaggtcgg

SEQ ID NO: 135020 - DNA, 20 bp, Artificial Sequence
  mmSKRIPTE0005799_Cd44_7
  gRNA
cacctttgtgaatcataggg

SEQ ID NO: 135021 - DNA, 20 bp, Artificial Sequence
  mmSKRIPTE0005800_Cd44_8
  gRNA
cccagggcgattcaacccag

SEQ ID NO: 135022 - DNA, 20 bp, Artificial Sequence
  mmSKRIPTE0005801_Cd44_9
  gRNA
cgaacccccggaatctgatg

SEQ ID NO: 135023 - DNA, 20 bp, Artificial Sequence
  mmSKRIPTE0005802_Il1b_1
  gRNA
ccacggtagacatattctca

SEQ ID NO: 135024 - DNA, 20 bp, Artificial Sequence
  mmSKRIPTE0005803_Il1b_2
  gRNA
attggtcatagcccgcactg

SEQ ID NO: 135025 - DNA, 20 bp, Artificial Sequence
  mmSKRIPTE0005804_Il1b_3
  gRNA
tccagcgttagctccccgag

SEQ ID NO: 135026 - DNA, 20 bp, Artificial Sequence
  mmSKRIPTE0005805_Il1b_4
  gRNA
aatttaattggcctacccag

SEQ ID NO: 135027 - DNA, 20 bp, Artificial Sequence
  mmSKRIPTE0005806_Il1b_5
  gRNA
catatgggtccgacagcacg

SEQ ID NO: 135028 - DNA, 20 bp, Artificial Sequence
  mmSKRIPTE0005807_Il1b_6
  gRNA
acacaagatatggactagca

SEQ ID NO: 135029 - DNA, 20 bp, Artificial Sequence
  mmSKRIPTE0005808_Il1b_7
  gRNA
gctgagaaggaccagagcga

SEQ ID NO: 135030 - DNA, 20 bp, Artificial Sequence
  mmSKRIPTE0005809_Il1b_8
  gRNA
agctacctgtgtctttcccg

SEQ ID NO: 135031 - DNA, 20 bp, Artificial Sequence
  mmSKRIPTE0005810_Il1b_9
  gRNA
tgtgccgtctttcattacac

SEQ ID NO: 135032 - DNA, 20 bp, Artificial Sequence
  mmSKRIPTE0005811_Fcgr1_1
  gRNA
caaatgcccttagaccacgc

SEQ ID NO: 135033 - DNA, 20 bp, Artificial Sequence
  mmSKRIPTE0005812_Fcgr1_2
  gRNA
tgggatgctataactaggcg

SEQ ID NO: 135034 - DNA, 20 bp, Artificial Sequence
  mmSKRIPTE0005813_Fcgr1_3
  gRNA
tattgggacctttataacca

SEQ ID NO: 135035 - DNA, 20 bp, Artificial Sequence
  mmSKRIPTE0005814_Fcgr1_4
  gRNA
acaccaaaagaagcgcccga

SEQ ID NO: 135036 - DNA, 20 bp, Artificial Sequence
  mmSKRIPTE0005815_Fcgr1_5
  gRNA
tccgttgataaaccattgtg

SEQ ID NO: 135037 - DNA, 20 bp, Artificial Sequence
  mmSKRIPTE0005816_Fcgr1_6
  gRNA
tgaaaggagacctataccaa

SEQ ID NO: 135038 - DNA, 20 bp, Artificial Sequence
  mmSKRIPTE0005817_Fcgr1_7
  gRNA
cgtctgctcccctgacacgc

SEQ ID NO: 135039 - DNA, 20 bp, Artificial Sequence
  mmSKRIPTE0005818_Fcgr1_8
  gRNA
agcagccaatctgaaaagtg

SEQ ID NO: 135040 - DNA, 20 bp, Artificial Sequence
  mmSKRIPTE0005819_Fcgr1_9
  gRNA
ggaagctgagtcctacgacg

SEQ ID NO: 135041 - DNA, 20 bp, Artificial Sequence
  mmSKRIPTE0005820_Lmo4_1
  gRNA
atcaagaggttctttacgcg

SEQ ID NO: 135042 - DNA, 20 bp, Artificial Sequence
  mmSKRIPTE0005821_Lmo4_2
  gRNA
gagtttgcgtagctcctcga

SEQ ID NO: 135043 - DNA, 20 bp, Artificial Sequence
  mmSKRIPTE0005822_Lmo4_3
  gRNA
gatgaaaaaagatccaccga

SEQ ID NO: 135044 - DNA, 20 bp, Artificial Sequence
  mmSKRIPTE0005823_Lmo4_4
  gRNA
tgtgcagattcgctgcagca

SEQ ID NO: 135045 - DNA, 20 bp, Artificial Sequence
  mmSKRIPTE0005824_Lmo4_5
  gRNA
cgggttcctcgacttcgggg

SEQ ID NO: 135046 - DNA, 20 bp, Artificial Sequence
  mmSKRIPTE0005825_Lmo4_6
  gRNA
ctaaggacaacgaggtagtg

SEQ ID NO: 135047 - DNA, 20 bp, Artificial Sequence
  mmSKRIPTE0005826_Lmo4_7
  gRNA
aattaactctccaacgcaca

SEQ ID NO: 135048 - DNA, 20 bp, Artificial Sequence
  mmSKRIPTE0005827_Lmo4_8
  gRNA
gacgaattctcaaaactccg

SEQ ID NO: 135049 - DNA, 20 bp, Artificial Sequence
  mmSKRIPTE0005828_Lmo4_9
  gRNA
gcaaccgggagatatacccc

SEQ ID NO: 135050 - DNA, 20 bp, Artificial Sequence
  mmSKRIPTE0005829_Crcp_1
  gRNA
cgttagtaactggaacacct

SEQ ID NO: 135051 - DNA, 20 bp, Artificial Sequence
  mmSKRIPTE0005830_Crcp_2
  gRNA
aatggagtatcgctgccacg

SEQ ID NO: 135052 - DNA, 20 bp, Artificial Sequence
  mmSKRIPTE0005831_Crcp_3
  gRNA
gcagccgagtcaccttgcgt

SEQ ID NO: 135053 - DNA, 20 bp, Artificial Sequence
  mmSKRIPTE0005832_Crcp_4
  gRNA
caaaagcactagcaatgacg

SEQ ID NO: 135054 - DNA, 20 bp, Artificial Sequence
  mmSKRIPTE0005833_Crcp_5
  gRNA
aagtgtaagcgacacgacca

SEQ ID NO: 135055 - DNA, 20 bp, Artificial Sequence
  mmSKRIPTE0005834_Crcp_6
  gRNA
atcatctggggaccgcgaag

SEQ ID NO: 135056 - DNA, 20 bp, Artificial Sequence
  mmSKRIPTE0005835_Crcp_7
  gRNA
gcttcacttaaggcacgggt

SEQ ID NO: 135057 - DNA, 20 bp, Artificial Sequence
  mmSKRIPTE0005836_Crcp_8
  gRNA
ggatcccaagaccgtgcacg

SEQ ID NO: 135058 - DNA, 20 bp, Artificial Sequence
  mmSKRIPTE0005837_Crcp_9
  gRNA
atccacagtaggatgacacc

SEQ ID NO: 135059 - DNA, 20 bp, Artificial Sequence
  mmSKRIPTE0005838_Clec4f_1
  gRNA
caatagaggcctgttaagtg

SEQ ID NO: 135060 - DNA, 20 bp, Artificial Sequence
  mmSKRIPTE0005839_Clec4f_2
  gRNA
attccacccaggtcgaggag

SEQ ID NO: 135061 - DNA, 20 bp, Artificial Sequence
  mmSKRIPTE0005840_Clec4f_3
  gRNA
gctatgacttcccagacccg

SEQ ID NO: 135062 - DNA, 20 bp, Artificial Sequence
  mmSKRIPTE0005841_Clec4f_4
  gRNA
aatgacctggacgtgccgca

SEQ ID NO: 135063 - DNA, 20 bp, Artificial Sequence
  mmSKRIPTE0005842_Clec4f_5
  gRNA
ggaaactatcttatacccag

SEQ ID NO: 135064 - DNA, 20 bp, Artificial Sequence
  mmSKRIPTE0005843_Clec4f_6
  gRNA
ccggcagcagtggaacgaca

SEQ ID NO: 135065 - DNA, 20 bp, Artificial Sequence
  mmSKRIPTE0005844_Clec4f_7
  gRNA
gacagtgagtagttccagtg

SEQ ID NO: 135066 - DNA, 20 bp, Artificial Sequence
  mmSKRIPTE0005845_Clec4f_8
  gRNA
ggcagcattctagggcacct

SEQ ID NO: 135067 - DNA, 20 bp, Artificial Sequence
  mmSKRIPTE0005846_Clec4f_9
  gRNA
atgggtcagaataaacaggt

SEQ ID NO: 135068 - DNA, 20 bp, Artificial Sequence
  mmSKRIPTE0005847_Bcl3_1
  gRNA
tccaaggaggctgatacggt

SEQ ID NO: 135069 - DNA, 20 bp, Artificial Sequence
  mmSKRIPTE0005848_Bcl3_2
  gRNA
tggcgcggacatcgatgcag

SEQ ID NO: 135070 - DNA, 20 bp, Artificial Sequence
  mmSKRIPTE0005849_Bcl3_3
  gRNA
ggctgtgtcaaaaatgacgt

SEQ ID NO: 135071 - DNA, 20 bp, Artificial Sequence
  mmSKRIPTE0005850_Bcl3_4
  gRNA
gcgtttgcggagtggcagcg

SEQ ID NO: 135072 - DNA, 20 bp, Artificial Sequence
  mmSKRIPTE0005851_Bcl3_5
  gRNA
cgctcttgatatcctgcgag

SEQ ID NO: 135073 - DNA, 20 bp, Artificial Sequence
  mmSKRIPTE0005852_Bcl3_6
  gRNA
taaaggtcgcaatggccttg

SEQ ID NO: 135074 - DNA, 20 bp, Artificial Sequence
  mmSKRIPTE0005853_Bcl3_7
  gRNA
tgaccgggtagatccccgac

SEQ ID NO: 135075 - DNA, 20 bp, Artificial Sequence
  mmSKRIPTE0005854_Bcl3_8
  gRNA
tcctggtagagcaagacaag

SEQ ID NO: 135076 - DNA, 20 bp, Artificial Sequence
  mmSKRIPTE0005855_Bcl3_9
  gRNA
tagacgtccataacaacctg

SEQ ID NO: 135077 - DNA, 20 bp, Artificial Sequence
  mmSKRIPTE0005856_Klf2_1
  gRNA
ctggccgcgaaatgaacccg

SEQ ID NO: 135078 - DNA, 20 bp, Artificial Sequence
  mmSKRIPTE0005857_Klf2_2
  gRNA
ttagccgcggtatataagcc

SEQ ID NO: 135079 - DNA, 20 bp, Artificial Sequence
  mmSKRIPTE0005858_Klf2_3
  gRNA
ctagcctcgatcctctagtg

SEQ ID NO: 135080 - DNA, 20 bp, Artificial Sequence
  mmSKRIPTE0005859_Klf2_4
  gRNA
tgtggcaggttccacgcgcg

SEQ ID NO: 135081 - DNA, 20 bp, Artificial Sequence
  mmSKRIPTE0005860_Klf2_5
  gRNA
gaggcccgtagtgcaacgcg

SEQ ID NO: 135082 - DNA, 20 bp, Artificial Sequence
  mmSKRIPTE0005861_Klf2_6
  gRNA
acctaatctcagaatgttag

SEQ ID NO: 135083 - DNA, 20 bp, Artificial Sequence
  mmSKRIPTE0005862_Klf2_7
  gRNA
agtctatgacactgccaagg

SEQ ID NO: 135084 - DNA, 20 bp, Artificial Sequence
  mmSKRIPTE0005863_Klf2_8
  gRNA
gcttctcacctgcatcagag

SEQ ID NO: 135085 - DNA, 20 bp, Artificial Sequence
  mmSKRIPTE0005864_Klf2_9
  gRNA
agtttggctaaaccccaaga

SEQ ID NO: 135086 - DNA, 20 bp, Artificial Sequence
  mmSKRIPTE0005865_Bcap31_1
  gRNA
agggaccagtattatcacac

SEQ ID NO: 135087 - DNA, 20 bp, Artificial Sequence
  mmSKRIPTE0005866_Bcap31_2
  gRNA
ggctgactttcggaccaacg

SEQ ID NO: 135088 - DNA, 20 bp, Artificial Sequence
  mmSKRIPTE0005867_Bcap31_3
  gRNA
gagatgagccactagcactg

SEQ ID NO: 135089 - DNA, 20 bp, Artificial Sequence
  mmSKRIPTE0005868_Bcap31_4
  gRNA
gctcttctgcagtggctacg

SEQ ID NO: 135090 - DNA, 20 bp, Artificial Sequence
  mmSKRIPTE0005869_Bcap31_5
  gRNA
acaatgggcggagccgttag

SEQ ID NO: 135091 - DNA, 20 bp, Artificial Sequence
  mmSKRIPTE0005870_Bcap31_6
  gRNA
aagttaaagattgcccagga

SEQ ID NO: 135092 - DNA, 20 bp, Artificial Sequence
  mmSKRIPTE0005871_Bcap31_7
  gRNA
tgtccgaagtgtcagaggcg

SEQ ID NO: 135093 - DNA, 20 bp, Artificial Sequence
  mmSKRIPTE0005872_Bcap31_8
  gRNA
cctgccctaaactccgaagt

SEQ ID NO: 135094 - DNA, 20 bp, Artificial Sequence
  mmSKRIPTE0005873_Bcap31_9
  gRNA
aagtaccagagggatagtct

SEQ ID NO: 135095 - DNA, 20 bp, Artificial Sequence
  mmSKRIPTE0005874_Ccl5_1
  gRNA
tgtagaaatactccttgacg

SEQ ID NO: 135096 - DNA, 20 bp, Artificial Sequence
  mmSKRIPTE0005875_Ccl5_2
  gRNA
ccctgagaaggatcacggcg

SEQ ID NO: 135097 - DNA, 20 bp, Artificial Sequence
  mmSKRIPTE0005876_Ccl5_3
  gRNA
tgcctcaccatgtaagtcga

SEQ ID NO: 135098 - DNA, 20 bp, Artificial Sequence
  mmSKRIPTE0005877_Ccl5_4
  gRNA
aacctttgcctaatcctctg

SEQ ID NO: 135099 - DNA, 20 bp, Artificial Sequence
  mmSKRIPTE0005878_Ccl5_5
  gRNA
cctgtctatgctaacgacac

SEQ ID NO: 135100 - DNA, 20 bp, Artificial Sequence
  mmSKRIPTE0005879_Ccl5_6
  gRNA
atgacagggtagccgtgtca

SEQ ID NO: 135101 - DNA, 20 bp, Artificial Sequence
  mmSKRIPTE0005880_Ccl5_7
  gRNA
tgcttagacttcaaccctag

SEQ ID NO: 135102 - DNA, 20 bp, Artificial Sequence
  mmSKRIPTE0005881_Ccl5_8
  gRNA
tgggcatctcagctgctccg

SEQ ID NO: 135103 - DNA, 20 bp, Artificial Sequence
  mmSKRIPTE0005882_Ccl5_9
  gRNA
atggcttctataccccacag

SEQ ID NO: 135104 - DNA, 20 bp, Artificial Sequence
  mmSKRIPTE0005883_Acvr1b_1
  gRNA
gaggaaatggattagcacgg

SEQ ID NO: 135105 - DNA, 20 bp, Artificial Sequence
  mmSKRIPTE0005884_Acvr1b_2
  gRNA
tcttagctacgcaataaccc

SEQ ID NO: 135106 - DNA, 20 bp, Artificial Sequence
  mmSKRIPTE0005885_Acvr1b_3
  gRNA
agccagaccctgacgtggag

SEQ ID NO: 135107 - DNA, 20 bp, Artificial Sequence
  mmSKRIPTE0005886_Acvr1b_4
  gRNA
agggaatggaatcatgcgat

SEQ ID NO: 135108 - DNA, 20 bp, Artificial Sequence
  mmSKRIPTE0005887_Acvr1b_5
  gRNA
cggttcggggaagtatggcg

SEQ ID NO: 135109 - DNA, 20 bp, Artificial Sequence
  mmSKRIPTE0005888_Acvr1b_6
  gRNA
aaaagcctcaacgcatcacg

SEQ ID NO: 135110 - DNA, 20 bp, Artificial Sequence
  mmSKRIPTE0005889_Acvr1b_7
  gRNA
cttgtgctgttgcctcaccg

SEQ ID NO: 135111 - DNA, 20 bp, Artificial Sequence
  mmSKRIPTE0005890_Acvr1b_8
  gRNA
gccacacttctatggaacca

SEQ ID NO: 135112 - DNA, 20 bp, Artificial Sequence
  mmSKRIPTE0005891_Acvr1b_9
  gRNA
gtgtctaccataaccgccag

SEQ ID NO: 135113 - DNA, 20 bp, Artificial Sequence
  mmSKRIPTE0005892_Pitx2_1
  gRNA
ttcaagtctcggctaacacg

SEQ ID NO: 135114 - DNA, 20 bp, Artificial Sequence
  mmSKRIPTE0005893_Pitx2_2
  gRNA
agagcgctaccgagaaccgg

SEQ ID NO: 135115 - DNA, 20 bp, Artificial Sequence
  mmSKRIPTE0005894_Pitx2_3
  gRNA
aagtcgccccctcctaggga

SEQ ID NO: 135116 - DNA, 20 bp, Artificial Sequence
  mmSKRIPTE0005895_Pitx2_4
  gRNA
ctcgcgaagaaatcgccgtg

SEQ ID NO: 135117 - DNA, 20 bp, Artificial Sequence
  mmSKRIPTE0005896_Pitx2_5
  gRNA
aaaccctccagaaacacgca

SEQ ID NO: 135118 - DNA, 20 bp, Artificial Sequence
  mmSKRIPTE0005897_Pitx2_6
  gRNA
aaaagagttcggcagccgaa

SEQ ID NO: 135119 - DNA, 20 bp, Artificial Sequence
  mmSKRIPTE0005898_Pitx2_7
  gRNA
gcagtatcctggtttaacgc

SEQ ID NO: 135120 - DNA, 20 bp, Artificial Sequence
  mmSKRIPTE0005899_Pitx2_8
  gRNA
ttgctcgctggtctttaccg

SEQ ID NO: 135121 - DNA, 20 bp, Artificial Sequence
  mmSKRIPTE0005900_Pitx2_9
  gRNA
ttggaggagtccaaggagcg

SEQ ID NO: 135122 - DNA, 20 bp, Artificial Sequence
  mmSKRIPTE0005901_Rab34_1
  gRNA
gtgtcattgtaggatccgcg

SEQ ID NO: 135123 - DNA, 20 bp, Artificial Sequence
  mmSKRIPTE0005902_Rab34_2
  gRNA
acaaccctagacgcgcagcg

SEQ ID NO: 135124 - DNA, 20 bp, Artificial Sequence
  mmSKRIPTE0005903_Rab34_3
  gRNA
ggggtaccgacaatcacccg

SEQ ID NO: 135125 - DNA, 20 bp, Artificial Sequence
  mmSKRIPTE0005904_Rab34_4
  gRNA
ggagacccgacgattatccg

SEQ ID NO: 135126 - DNA, 20 bp, Artificial Sequence
  mmSKRIPTE0005905_Rab34_5
  gRNA
ttgtgggagacctatctgtg

SEQ ID NO: 135127 - DNA, 20 bp, Artificial Sequence
  mmSKRIPTE0005906_Rab34_6
  gRNA
gcgtcccgaagaccactcgg

SEQ ID NO: 135128 - DNA, 20 bp, Artificial Sequence
  mmSKRIPTE0005907_Rab34_7
  gRNA
gagttgtcgtcgggtctccg

SEQ ID NO: 135129 - DNA, 20 bp, Artificial Sequence
  mmSKRIPTE0005908_Rab34_8
  gRNA
gtgttgcaacgctcgcagag

SEQ ID NO: 135130 - DNA, 20 bp, Artificial Sequence
  mmSKRIPTE0005909_Rab34_9
  gRNA
tgaacattctggcgcccgtg

SEQ ID NO: 135131 - DNA, 20 bp, Artificial Sequence
  mmSKRIPTE0005910_Wnt5a_1
  gRNA
tctcataggaacccttagcg

SEQ ID NO: 135132 - DNA, 20 bp, Artificial Sequence
  mmSKRIPTE0005911_Wnt5a_2
  gRNA
gcaatgaaggacgatactcc

SEQ ID NO: 135133 - DNA, 20 bp, Artificial Sequence
  mmSKRIPTE0005912_Wnt5a_3
  gRNA
ttcgcagtgctcaactacat

SEQ ID NO: 135134 - DNA, 20 bp, Artificial Sequence
  mmSKRIPTE0005913_Wnt5a_4
  gRNA
tgagacactccctaacccag

SEQ ID NO: 135135 - DNA, 20 bp, Artificial Sequence
  mmSKRIPTE0005914_Wnt5a_5
  gRNA
caaggagaagtatgatagcg

SEQ ID NO: 135136 - DNA, 20 bp, Artificial Sequence
  mmSKRIPTE0005915_Wnt5a_6
  gRNA
tgcctgcgattaaggatgag

SEQ ID NO: 135137 - DNA, 20 bp, Artificial Sequence
  mmSKRIPTE0005916_Wnt5a_7
  gRNA
agagacggccttcacgtacg

SEQ ID NO: 135138 - DNA, 20 bp, Artificial Sequence
  mmSKRIPTE0005917_Wnt5a_8
  gRNA
catgagccgagcatgccggg

SEQ ID NO: 135139 - DNA, 20 bp, Artificial Sequence
  mmSKRIPTE0005918_Wnt5a_9
  gRNA
gcagggtgatgcaaataggt

SEQ ID NO: 135140 - DNA, 20 bp, Artificial Sequence
  mmSKRIPTE0005919_Cd86_1
  gRNA
gctttcctagagagtacgga

SEQ ID NO: 135141 - DNA, 20 bp, Artificial Sequence
  mmSKRIPTE0005920_Cd86_2
  gRNA
ttaacactaacaccgtaaca

SEQ ID NO: 135142 - DNA, 20 bp, Artificial Sequence
  mmSKRIPTE0005921_Cd86_3
  gRNA
acttacggaagcacccacga

SEQ ID NO: 135143 - DNA, 20 bp, Artificial Sequence
  mmSKRIPTE0005922_Cd86_4
  gRNA
tgtgtggtccctgagcgccg

SEQ ID NO: 135144 - DNA, 20 bp, Artificial Sequence
  mmSKRIPTE0005923_Cd86_5
  gRNA
tctgccgtgcccatttacaa

SEQ ID NO: 135145 - DNA, 20 bp, Artificial Sequence
  mmSKRIPTE0005924_Cd86_6
  gRNA
ttaagaaaaagtcaaccacc

SEQ ID NO: 135146 - DNA, 20 bp, Artificial Sequence
  mmSKRIPTE0005925_Cd86_7
  gRNA
catagtgtatctatacggca

SEQ ID NO: 135147 - DNA, 20 bp, Artificial Sequence
  mmSKRIPTE0005926_Cd86_8
  gRNA
ccggccagctagctctccga

SEQ ID NO: 135148 - DNA, 20 bp, Artificial Sequence
  mmSKRIPTE0005927_Cd86_9
  gRNA
caaacataactagaatcgta

SEQ ID NO: 135149 - DNA, 20 bp, Artificial Sequence
  mmSKRIPTE0005928_Zfp35_1
  gRNA
ggggctgttcgacttcacgc

SEQ ID NO: 135150 - DNA, 20 bp, Artificial Sequence
  mmSKRIPTE0005929_Zfp35_2
  gRNA
gggctggtggaataacgaag

SEQ ID NO: 135151 - DNA, 20 bp, Artificial Sequence
  mmSKRIPTE0005930_Zfp35_3
  gRNA
agcttccctaccgatcacct

SEQ ID NO: 135152 - DNA, 20 bp, Artificial Sequence
  mmSKRIPTE0005931_Zfp35_4
  gRNA
gactcccagctttagcatag

SEQ ID NO: 135153 - DNA, 20 bp, Artificial Sequence
  mmSKRIPTE0005932_Zfp35_5
  gRNA
cagggctgagctcatccgaa

SEQ ID NO: 135154 - DNA, 20 bp, Artificial Sequence
  mmSKRIPTE0005933_Zfp35_6
  gRNA
aattcacagagcgcgtactt

SEQ ID NO: 135155 - DNA, 20 bp, Artificial Sequence
  mmSKRIPTE0005934_Zfp35_7
  gRNA
cagtgcatttcaggttacgt

SEQ ID NO: 135156 - DNA, 20 bp, Artificial Sequence
  mmSKRIPTE0005935_Zfp35_8
  gRNA
tgcagacgttacagtaagag

SEQ ID NO: 135157 - DNA, 20 bp, Artificial Sequence
  mmSKRIPTE0005936_Zfp35_9
  gRNA
tgttctaaaagcttcagtcg

SEQ ID NO: 135158 - DNA, 20 bp, Artificial Sequence
  mmSKRIPTE0005937_Il7_1
  gRNA
gtgtggccgtacccaccctg

SEQ ID NO: 135159 - DNA, 20 bp, Artificial Sequence
  mmSKRIPTE0005938_Il7_2
  gRNA
attcattggtgaaccactgg

SEQ ID NO: 135160 - DNA, 20 bp, Artificial Sequence
  mmSKRIPTE0005939_Il7_3
  gRNA
ttgcccatctcctagacttg

SEQ ID NO: 135161 - DNA, 20 bp, Artificial Sequence
  mmSKRIPTE0005940_Il7_4
  gRNA
agtcaccccaggaatgtctg

SEQ ID NO: 135162 - DNA, 20 bp, Artificial Sequence
  mmSKRIPTE0005941_Il7_5
  gRNA
atggcccagcatgttacatg

SEQ ID NO: 135163 - DNA, 20 bp, Artificial Sequence
  mmSKRIPTE0005942_Il7_6
  gRNA
atgaaaggggtatagttcat

SEQ ID NO: 135164 - DNA, 20 bp, Artificial Sequence
  mmSKRIPTE0005943_Il7_7
  gRNA
aggcatgactcgctttccaa

SEQ ID NO: 135165 - DNA, 20 bp, Artificial Sequence
  mmSKRIPTE0005944_Il7_8
  gRNA
atgaacactctcgagagtaa

SEQ ID NO: 135166 - DNA, 20 bp, Artificial Sequence
  mmSKRIPTE0005945_Il7_9
  gRNA
acccagcaattaatgagcag

SEQ ID NO: 135167 - DNA, 20 bp, Artificial Sequence
  mmSKRIPTE0005946_Dennd1b_1
  gRNA
attagttgggcatgccaacg

SEQ ID NO: 135168 - DNA, 20 bp, Artificial Sequence
  mmSKRIPTE0005947_Dennd1b_2
  gRNA
attccctcctaggccctgcg

SEQ ID NO: 135169 - DNA, 20 bp, Artificial Sequence
  mmSKRIPTE0005948_Dennd1b_3
  gRNA
acttcttacagttagcaacg

SEQ ID NO: 135170 - DNA, 20 bp, Artificial Sequence
  mmSKRIPTE0005949_Dennd1b_4
  gRNA
ttgaataagaactgtcaacc

SEQ ID NO: 135171 - DNA, 20 bp, Artificial Sequence
  mmSKRIPTE0005950_Dennd1b_5
  gRNA
actatggctattcctaggtg

SEQ ID NO: 135172 - DNA, 20 bp, Artificial Sequence
  mmSKRIPTE0005951_Dennd1b_6
  gRNA
ttgagtaggtctaatgagag

SEQ ID NO: 135173 - DNA, 20 bp, Artificial Sequence
  mmSKRIPTE0005952_Dennd1b_7
  gRNA
tgtaatgtgaggaagcgtca

SEQ ID NO: 135174 - DNA, 20 bp, Artificial Sequence
  mmSKRIPTE0005953_Dennd1b_8
  gRNA
tcactcaccggaattagtga

SEQ ID NO: 135175 - DNA, 20 bp, Artificial Sequence
  mmSKRIPTE0005954_Dennd1b_9
  gRNA
accttcgtgtaatggctctg

SEQ ID NO: 135176 - DNA, 20 bp, Artificial Sequence
  mmSKRIPTE0005955_Enpp1_1
  gRNA
attgtttggaaacggtcgag

SEQ ID NO: 135177 - DNA, 20 bp, Artificial Sequence
  mmSKRIPTE0005956_Enpp1_2
  gRNA
ggaaggtgtaagacgcccag

SEQ ID NO: 135178 - DNA, 20 bp, Artificial Sequence
  mmSKRIPTE0005957_Enpp1_3
  gRNA
cagacactttcgctaatgga

SEQ ID NO: 135179 - DNA, 20 bp, Artificial Sequence
  mmSKRIPTE0005958_Enpp1_4
  gRNA
ttgcagctatactcacccaa

SEQ ID NO: 135180 - DNA, 20 bp, Artificial Sequence
  mmSKRIPTE0005959_Enpp1_5
  gRNA
tcaatgagaaaccttcacga

SEQ ID NO: 135181 - DNA, 20 bp, Artificial Sequence
  mmSKRIPTE0005960_Enpp1_6
  gRNA
aaggtggcgaggtacttact

SEQ ID NO: 135182 - DNA, 20 bp, Artificial Sequence
  mmSKRIPTE0005961_Enpp1_7
  gRNA
cttcagcgttgagtactgaa

SEQ ID NO: 135183 - DNA, 20 bp, Artificial Sequence
  mmSKRIPTE0005962_Enpp1_8
  gRNA
gcggctgttatccgtgagtg

SEQ ID NO: 135184 - DNA, 20 bp, Artificial Sequence
  mmSKRIPTE0005963_Enpp1_9
  gRNA
atatgactgtaccctacggg

SEQ ID NO: 135185 - DNA, 20 bp, Artificial Sequence
  mmSKRIPTE0005964_Nr1h4_1
  gRNA
tgcagtaggagagcccacgt

SEQ ID NO: 135186 - DNA, 20 bp, Artificial Sequence
  mmSKRIPTE0005965_Nr1h4_2
  gRNA
ctagtctgtatttacaaccg

SEQ ID NO: 135187 - DNA, 20 bp, Artificial Sequence
  mmSKRIPTE0005966_Nr1h4_3
  gRNA
ctgaaacaaactaatgacga

SEQ ID NO: 135188 - DNA, 20 bp, Artificial Sequence
  mmSKRIPTE0005967_Nr1h4_4
  gRNA
tgtgacaaagaagccgcgaa

SEQ ID NO: 135189 - DNA, 20 bp, Artificial Sequence
  mmSKRIPTE0005968_Nr1h4_5
  gRNA
tttgctcaaagggtccgcag

SEQ ID NO: 135190 - DNA, 20 bp, Artificial Sequence
  mmSKRIPTE0005969_Nr1h4_6
  gRNA
gctccttctcagttgccgtg

SEQ ID NO: 135191 - DNA, 20 bp, Artificial Sequence
  mmSKRIPTE0005970_Nr1h4_7
  gRNA
cctactgtcagttgatgcga

SEQ ID NO: 135192 - DNA, 20 bp, Artificial Sequence
  mmSKRIPTE0005971_Nr1h4_8
  gRNA
taagacgaggaggaaatctg

SEQ ID NO: 135193 - DNA, 20 bp, Artificial Sequence
  mmSKRIPTE0005972_Nr1h4_9
  gRNA
ctaatgaggacgacagcgaa

SEQ ID NO: 135194 - DNA, 20 bp, Artificial Sequence
  mmSKRIPTE0005973_Pawr_1
  gRNA
cggcgtggtcaacatccccg

SEQ ID NO: 135195 - DNA, 20 bp, Artificial Sequence
  mmSKRIPTE0005974_Pawr_2
  gRNA
ccactcctccaggaagtccg

SEQ ID NO: 135196 - DNA, 20 bp, Artificial Sequence
  mmSKRIPTE0005975_Pawr_3
  gRNA
taacactccctgaggacacg

SEQ ID NO: 135197 - DNA, 20 bp, Artificial Sequence
  mmSKRIPTE0005976_Pawr_4
  gRNA
tcactttgaacgctcacctg

SEQ ID NO: 135198 - DNA, 20 bp, Artificial Sequence
  mmSKRIPTE0005977_Pawr_5
  gRNA
tgcctggaactgttctcgac

SEQ ID NO: 135199 - DNA, 20 bp, Artificial Sequence
  mmSKRIPTE0005978_Pawr_6
  gRNA
cgggaagcgagaatgcgctg

SEQ ID NO: 135200 - DNA, 20 bp, Artificial Sequence
  mmSKRIPTE0005979_Pawr_7
  gRNA
tcagtaaggatttagacggc

SEQ ID NO: 135201 - DNA, 20 bp, Artificial Sequence
  mmSKRIPTE0005980_Pawr_8
  gRNA
ggacaaaggtgaatctcaca

SEQ ID NO: 135202 - DNA, 20 bp, Artificial Sequence
  mmSKRIPTE0005981_Pawr_9
  gRNA
ataccgaagactcttactgg

SEQ ID NO: 135203 - DNA, 20 bp, Artificial Sequence
  mmSKRIPTE0005982_Ikzf1_1
  gRNA
gctgctgtgtaggataaggt

SEQ ID NO: 135204 - DNA, 20 bp, Artificial Sequence
  mmSKRIPTE0005983_Ikzf1_2
  gRNA
gaacatggaacacatgatcg

SEQ ID NO: 135205 - DNA, 20 bp, Artificial Sequence
  mmSKRIPTE0005984_Ikzf1_3
  gRNA
tccgtgatgatttgacaacc

SEQ ID NO: 135206 - DNA, 20 bp, Artificial Sequence
  mmSKRIPTE0005985_Ikzf1_4
  gRNA
attgtggcatgctctccggt

SEQ ID NO: 135207 - DNA, 20 bp, Artificial Sequence
  mmSKRIPTE0005986_Ikzf1_5
  gRNA
cagaactccaagagtgatcg

SEQ ID NO: 135208 - DNA, 20 bp, Artificial Sequence
  mmSKRIPTE0005987_Ikzf1_6
  gRNA
gagatgcaaagagatcccga

SEQ ID NO: 135209 - DNA, 20 bp, Artificial Sequence
  mmSKRIPTE0005988_Ikzf1_7
  gRNA
actctaacagcaattcaacc

SEQ ID NO: 135210 - DNA, 20 bp, Artificial Sequence
  mmSKRIPTE0005989_Ikzf1_8
  gRNA
gttatgacataaagcaccac

SEQ ID NO: 135211 - DNA, 20 bp, Artificial Sequence
  mmSKRIPTE0005990_Ikzf1_9
  gRNA
tgttatgtgactgacctcag

SEQ ID NO: 135212 - DNA, 20 bp, Artificial Sequence
  mmSKRIPTE0005991_Traf3_1
  gRNA
cagcgagcggttactacaga

SEQ ID NO: 135213 - DNA, 20 bp, Artificial Sequence
  mmSKRIPTE0005992_Traf3_2
  gRNA
ccttggtgctcaccacccgg

SEQ ID NO: 135214 - DNA, 20 bp, Artificial Sequence
  mmSKRIPTE0005993_Traf3_3
  gRNA
gtgtagagcaccgtgaagtg

SEQ ID NO: 135215 - DNA, 20 bp, Artificial Sequence
  mmSKRIPTE0005994_Traf3_4
  gRNA
gcatagcaaaaggggcaccg

SEQ ID NO: 135216 - DNA, 20 bp, Artificial Sequence
  mmSKRIPTE0005995_Traf3_5
  gRNA
gaatggagcctatagcacac

SEQ ID NO: 135217 - DNA, 20 bp, Artificial Sequence
  mmSKRIPTE0005996_Traf3_6
  gRNA
atacccgggtccccaaccgg

SEQ ID NO: 135218 - DNA, 20 bp, Artificial Sequence
  mmSKRIPTE0005997_Traf3_7
  gRNA
cacacaccctacaggcacgg

SEQ ID NO: 135219 - DNA, 20 bp, Artificial Sequence
  mmSKRIPTE0005998_Traf3_8
  gRNA
tcaaggctccttcctatgcg

SEQ ID NO: 135220 - DNA, 20 bp, Artificial Sequence
  mmSKRIPTE0005999_Traf3_9
  gRNA
tctagactccttacagcgca

SEQ ID NO: 135221 - DNA, 20 bp, Artificial Sequence
  mmSKRIPTE0006000_Smad5_1
  gRNA
acacaaagtttagcgcagcg

SEQ ID NO: 135222 - DNA, 20 bp, Artificial Sequence
  mmSKRIPTE0006001_Smad5_2
  gRNA
ctttacatgattagatacag

SEQ ID NO: 135223 - DNA, 20 bp, Artificial Sequence
  mmSKRIPTE0006002_Smad5_3
  gRNA
agaaatcccaacctattctg

SEQ ID NO: 135224 - DNA, 20 bp, Artificial Sequence
  mmSKRIPTE0006003_Smad5_4
  gRNA
gagtccaaggcaacttacgt

SEQ ID NO: 135225 - DNA, 20 bp, Artificial Sequence
  mmSKRIPTE0006004_Smad5_5
  gRNA
aacttgcagacgtccatcca

SEQ ID NO: 135226 - DNA, 20 bp, Artificial Sequence
  mmSKRIPTE0006005_Smad5_6
  gRNA
agcatgctctgaccctaaga

SEQ ID NO: 135227 - DNA, 20 bp, Artificial Sequence
  mmSKRIPTE0006006_Smad5_7
  gRNA
ggattgaattcattgtgacg

SEQ ID NO: 135228 - DNA, 20 bp, Artificial Sequence
  mmSKRIPTE0006007_Smad5_8
  gRNA
taatgctcataacattgtag

SEQ ID NO: 135229 - DNA, 20 bp, Artificial Sequence
  mmSKRIPTE0006008_Smad5_9
  gRNA
tcactctccggacgtcgcag

SEQ ID NO: 135230 - DNA, 20 bp, Artificial Sequence
  mmSKRIPTE0006009_Trim13_1
  gRNA
agtttcgagacttggcgccg

SEQ ID NO: 135231 - DNA, 20 bp, Artificial Sequence
  mmSKRIPTE0006010_Trim13_2
  gRNA
agccctccagttactcacga

SEQ ID NO: 135232 - DNA, 20 bp, Artificial Sequence
  mmSKRIPTE0006011_Trim13_3
  gRNA
gtgctccgagtagggaccgg

SEQ ID NO: 135233 - DNA, 20 bp, Artificial Sequence
  mmSKRIPTE0006012_Trim13_4
  gRNA
tctctggaagaggaacacgt

SEQ ID NO: 135234 - DNA, 20 bp, Artificial Sequence
  mmSKRIPTE0006013_Trim13_5
  gRNA
gcaatccaaactcggcgcgt

SEQ ID NO: 135235 - DNA, 20 bp, Artificial Sequence
  mmSKRIPTE0006014_Trim13_6
  gRNA
ggaatgtgcggaattccctg

SEQ ID NO: 135236 - DNA, 20 bp, Artificial Sequence
  mmSKRIPTE0006015_Trim13_7
  gRNA
gcgccggtgcaaaatggaca

SEQ ID NO: 135237 - DNA, 20 bp, Artificial Sequence
  mmSKRIPTE0006016_Trim13_8
  gRNA
tgtaggtcaaccttgactag

SEQ ID NO: 135238 - DNA, 20 bp, Artificial Sequence
  mmSKRIPTE0006017_Trim13_9
  gRNA
agtcctaggaccattccaga

SEQ ID NO: 135239 - DNA, 20 bp, Artificial Sequence
  mmSKRIPTE0006018_Adipoq_1
  gRNA
gtatcgctcagcgttcagtg

SEQ ID NO: 135240 - DNA, 20 bp, Artificial Sequence
  mmSKRIPTE0006019_Adipoq_2
  gRNA
gtaccatctagtcccactca

SEQ ID NO: 135241 - DNA, 20 bp, Artificial Sequence
  mmSKRIPTE0006020_Adipoq_3
  gRNA
gacccaagctggattaaacc

SEQ ID NO: 135242 - DNA, 20 bp, Artificial Sequence
  mmSKRIPTE0006021_Adipoq_4
  gRNA
acgtcatcttcggcatgact

SEQ ID NO: 135243 - DNA, 20 bp, Artificial Sequence
  mmSKRIPTE0006022_Adipoq_5
  gRNA
tacattgggaacagtgacgc

SEQ ID NO: 135244 - DNA, 20 bp, Artificial Sequence
  mmSKRIPTE0006023_Adipoq_6
  gRNA
agtaccagactaatgagacc

SEQ ID NO: 135245 - DNA, 20 bp, Artificial Sequence
  mmSKRIPTE0006024_Adipoq_7
  gRNA
ttgctaccatgtaagagtcg

SEQ ID NO: 135246 - DNA, 20 bp, Artificial Sequence
  mmSKRIPTE0006025_Adipoq_8
  gRNA
ctttcatgtacaccgtgatg

SEQ ID NO: 135247 - DNA, 20 bp, Artificial Sequence
  mmSKRIPTE0006026_Adipoq_9
  gRNA
tagaagagtcctgaatttgg

SEQ ID NO: 135248 - DNA, 20 bp, Artificial Sequence
  mmSKRIPTE0006027_Dlg1_1
  gRNA
caactgagactagaccgtag

SEQ ID NO: 135249 - DNA, 20 bp, Artificial Sequence
  mmSKRIPTE0006028_Dlg1_2
  gRNA
gacatcaatgtataacgcca

SEQ ID NO: 135250 - DNA, 20 bp, Artificial Sequence
  mmSKRIPTE0006029_Dlg1_3
  gRNA
gttgcgcaatatcgacccga

SEQ ID NO: 135251 - DNA, 20 bp, Artificial Sequence
  mmSKRIPTE0006030_Dlg1_4
  gRNA
caggagatccctgacgacat

SEQ ID NO: 135252 - DNA, 20 bp, Artificial Sequence
  mmSKRIPTE0006031_Dlg1_5
  gRNA
gtgatcagcgcactaaacaa

SEQ ID NO: 135253 - DNA, 20 bp, Artificial Sequence
  mmSKRIPTE0006032_Dlg1_6
  gRNA
cagtggctgtattcctacca

SEQ ID NO: 135254 - DNA, 20 bp, Artificial Sequence
  mmSKRIPTE0006033_Dlg1_7
  gRNA
cttgaagtcagtgtgttccg

SEQ ID NO: 135255 - DNA, 20 bp, Artificial Sequence
  mmSKRIPTE0006034_Dlg1_8
  gRNA
caaaattatcacaggcggag

SEQ ID NO: 135256 - DNA, 20 bp, Artificial Sequence
  mmSKRIPTE0006035_Dlg1_9
  gRNA
tcagtgtccctgcatacggt

SEQ ID NO: 135257 - DNA, 20 bp, Artificial Sequence
  mmSKRIPTE0006036_C8g_1
  gRNA
gtctgtgaaactatacggtg

SEQ ID NO: 135258 - DNA, 20 bp, Artificial Sequence
  mmSKRIPTE0006037_C8g_2
  gRNA
tacacatcctgaacggtgag

SEQ ID NO: 135259 - DNA, 20 bp, Artificial Sequence
  mmSKRIPTE0006038_C8g_3
  gRNA
gcagtctcgcagaaacctag

SEQ ID NO: 135260 - DNA, 20 bp, Artificial Sequence
  mmSKRIPTE0006039_C8g_4
  gRNA
ctggcagtgagcggactgtg

SEQ ID NO: 135261 - DNA, 20 bp, Artificial Sequence
  mmSKRIPTE0006040_C8g_5
  gRNA
tgggactcacagctttcgga

SEQ ID NO: 135262 - DNA, 20 bp, Artificial Sequence
  mmSKRIPTE0006041_C8g_6
  gRNA
acctactgtccgtagcaggt

SEQ ID NO: 135263 - DNA, 20 bp, Artificial Sequence
  mmSKRIPTE0006042_C8g_7
  gRNA
tccactagatggccttatcg

SEQ ID NO: 135264 - DNA, 20 bp, Artificial Sequence
  mmSKRIPTE0006043_C8g_8
  gRNA
ctggggagctgcgtgcaatg

SEQ ID NO: 135265 - DNA, 20 bp, Artificial Sequence
  mmSKRIPTE0006044_C8g_9
  gRNA
tccctgttccaggtacagga

SEQ ID NO: 135266 - DNA, 20 bp, Artificial Sequence
  mmSKRIPTE0006045_Cd2_1
  gRNA
taaaacaacacctagaggtg

SEQ ID NO: 135267 - DNA, 20 bp, Artificial Sequence
  mmSKRIPTE0006046_Cd2_2
  gRNA
ggcaaaggtaagcattcgcg

SEQ ID NO: 135268 - DNA, 20 bp, Artificial Sequence
  mmSKRIPTE0006047_Cd2_3
  gRNA
gagccgggattatggaacca

SEQ ID NO: 135269 - DNA, 20 bp, Artificial Sequence
  mmSKRIPTE0006048_Cd2_4
  gRNA
aatgactgatgatattgatg

SEQ ID NO: 135270 - DNA, 20 bp, Artificial Sequence
  mmSKRIPTE0006049_Cd2_5
  gRNA
ccgatgatgagaaacgacag

SEQ ID NO: 135271 - DNA, 20 bp, Artificial Sequence
  mmSKRIPTE0006050_Cd2_6
  gRNA
gcctcttcttagatctgtcg

SEQ ID NO: 135272 - DNA, 20 bp, Artificial Sequence
  mmSKRIPTE0006051_Cd2_7
  gRNA
aaagcccggccattgtacat

SEQ ID NO: 135273 - DNA, 20 bp, Artificial Sequence
  mmSKRIPTE0006052_Cd2_8
  gRNA
acccactcctttatcgctgt

SEQ ID NO: 135274 - DNA, 20 bp, Artificial Sequence
  mmSKRIPTE0006053_Cd2_9
  gRNA
ctgaggtctcgggactacgg

SEQ ID NO: 135275 - DNA, 20 bp, Artificial Sequence
  mmSKRIPTE0006054_Cdkn2b_1
  gRNA
tggaacttaccgtggccggt

SEQ ID NO: 135276 - DNA, 20 bp, Artificial Sequence
  mmSKRIPTE0006055_Cdkn2b_2
  gRNA
gatacctcgcaatgtcacgg

SEQ ID NO: 135277 - DNA, 20 bp, Artificial Sequence
  mmSKRIPTE0006056_Cdkn2b_3
  gRNA
gttacaactcacagccgcgg

SEQ ID NO: 135278 - DNA, 20 bp, Artificial Sequence
  mmSKRIPTE0006057_Cdkn2b_4
  gRNA
cgtcatgagacaaataggcg

SEQ ID NO: 135279 - DNA, 20 bp, Artificial Sequence
  mmSKRIPTE0006058_Cdkn2b_5
  gRNA
agtcgtctgtgccggcggtg

SEQ ID NO: 135280 - DNA, 20 bp, Artificial Sequence
  mmSKRIPTE0006059_Cdkn2b_6
  gRNA
gcccatcatcatgacctgag

SEQ ID NO: 135281 - DNA, 20 bp, Artificial Sequence
  mmSKRIPTE0006060_Cdkn2b_7
  gRNA
ctggatgtgtgtgacgcctg

SEQ ID NO: 135282 - DNA, 20 bp, Artificial Sequence
  mmSKRIPTE0006061_Cdkn2b_8
  gRNA
tccagctgcagaaaatgcgt

SEQ ID NO: 135283 - DNA, 20 bp, Artificial Sequence
  mmSKRIPTE0006062_Cdkn2b_9
  gRNA
cgcagttgggttctgctccg

SEQ ID NO: 135284 - DNA, 20 bp, Artificial Sequence
  mmSKRIPTE0006063_Oasl1_1
  gRNA
agcgtgaactagggatcacg

SEQ ID NO: 135285 - DNA, 20 bp, Artificial Sequence
  mmSKRIPTE0006064_Oasl1_2
  gRNA
tcctgtccaagacgacggag

SEQ ID NO: 135286 - DNA, 20 bp, Artificial Sequence
  mmSKRIPTE0006065_Oasl1_3
  gRNA
gatcagatttgcgtagacct

SEQ ID NO: 135287 - DNA, 20 bp, Artificial Sequence
  mmSKRIPTE0006066_Oasl1_4
  gRNA
aatgcctacttagtccacgc

SEQ ID NO: 135288 - DNA, 20 bp, Artificial Sequence
  mmSKRIPTE0006067_Oasl1_5
  gRNA
acagacatcaggtttcccga

SEQ ID NO: 135289 - DNA, 20 bp, Artificial Sequence
  mmSKRIPTE0006068_Oasl1_6
  gRNA
tgtgtctgcacccgtgacgt

SEQ ID NO: 135290 - DNA, 20 bp, Artificial Sequence
  mmSKRIPTE0006069_Oasl1_7
  gRNA
gcgggtggatcgcataggcg

SEQ ID NO: 135291 - DNA, 20 bp, Artificial Sequence
  mmSKRIPTE0006070_Oasl1_8
  gRNA
ctgacacagtcttgacagtg

SEQ ID NO: 135292 - DNA, 20 bp, Artificial Sequence
  mmSKRIPTE0006071_Oasl1_9
  gRNA
tgtcatggtaggtgtgccga

SEQ ID NO: 135293 - DNA, 20 bp, Artificial Sequence
  mmSKRIPTE0006072_Sh2b2_1
  gRNA
cgtcgcgtccatttgtcacg

SEQ ID NO: 135294 - DNA, 20 bp, Artificial Sequence
  mmSKRIPTE0006073_Sh2b2_2
  gRNA
cttcatggtggcagacgacg

SEQ ID NO: 135295 - DNA, 20 bp, Artificial Sequence
  mmSKRIPTE0006074_Sh2b2_3
  gRNA
caccgctgtcgtcgtctcgg

SEQ ID NO: 135296 - DNA, 20 bp, Artificial Sequence
  mmSKRIPTE0006075_Sh2b2_4
  gRNA
ccgtcaaagggggaatacag

SEQ ID NO: 135297 - DNA, 20 bp, Artificial Sequence
  mmSKRIPTE0006076_Sh2b2_5
  gRNA
tggccgagctcgtgacaccg

SEQ ID NO: 135298 - DNA, 20 bp, Artificial Sequence
  mmSKRIPTE0006077_Sh2b2_6
  gRNA
cggtcttggcggtcctggtg

SEQ ID NO: 135299 - DNA, 20 bp, Artificial Sequence
  mmSKRIPTE0006078_Sh2b2_7
  gRNA
ggcctccagaacactcaccc

SEQ ID NO: 135300 - DNA, 20 bp, Artificial Sequence
  mmSKRIPTE0006079_Sh2b2_8
  gRNA
ccgggtagagtaaaggaccg

SEQ ID NO: 135301 - DNA, 20 bp, Artificial Sequence
  mmSKRIPTE0006080_Sh2b2_9
  gRNA
gtggcttgatctaattgaca

SEQ ID NO: 135302 - DNA, 20 bp, Artificial Sequence
  mmSKRIPTE0006081_Flt1_1
  gRNA
aacaatacctcagcaccggt

SEQ ID NO: 135303 - DNA, 20 bp, Artificial Sequence
  mmSKRIPTE0006082_Flt1_2
  gRNA
aaacccgtctaatatcatag

SEQ ID NO: 135304 - DNA, 20 bp, Artificial Sequence
  mmSKRIPTE0006083_Flt1_3
  gRNA
atcgcgtctaacgcggacag

SEQ ID NO: 135305 - DNA, 20 bp, Artificial Sequence
  mmSKRIPTE0006084_Flt1_4
  gRNA
cccatgacatccgacctacg

SEQ ID NO: 135306 - DNA, 20 bp, Artificial Sequence
  mmSKRIPTE0006085_Flt1_5
  gRNA
cacgtaagacgctgtagccg

SEQ ID NO: 135307 - DNA, 20 bp, Artificial Sequence
  mmSKRIPTE0006086_Flt1_6
  gRNA
agggtactgccgttcctgtg

SEQ ID NO: 135308 - DNA, 20 bp, Artificial Sequence
  mmSKRIPTE0006087_Flt1_7
  gRNA
gagcatctctcagcgcatga

SEQ ID NO: 135309 - DNA, 20 bp, Artificial Sequence
  mmSKRIPTE0006088_Flt1_8
  gRNA
gacgtgtatacattctagtg

SEQ ID NO: 135310 - DNA, 20 bp, Artificial Sequence
  mmSKRIPTE0006089_Flt1_9
  gRNA
ccaccacggagctcaatacg

SEQ ID NO: 135311 - DNA, 20 bp, Artificial Sequence
  mmSKRIPTE0006090_Rps3_1
  gRNA
cgtagagcccttcgatgaag

SEQ ID NO: 135312 - DNA, 20 bp, Artificial Sequence
  mmSKRIPTE0006091_Rps3_2
  gRNA
agttgtacctcggataggag

SEQ ID NO: 135313 - DNA, 20 bp, Artificial Sequence
  mmSKRIPTE0006092_Rps3_3
  gRNA
tggagtaaatgaaggcacgc

SEQ ID NO: 135314 - DNA, 20 bp, Artificial Sequence
  mmSKRIPTE0006093_Rps3_4
  gRNA
ggcacttgtagaacccgcgg

SEQ ID NO: 135315 - DNA, 20 bp, Artificial Sequence
  mmSKRIPTE0006094_Rps3_5
  gRNA
cacgtcatgtgcatgctgca

SEQ ID NO: 135316 - DNA, 20 bp, Artificial Sequence
  mmSKRIPTE0006095_Rps3_6
  gRNA
ctaccccccaatcttcgcac

SEQ ID NO: 135317 - DNA, 20 bp, Artificial Sequence
  mmSKRIPTE0006096_Rps3_7
  gRNA
ttgcgtctaaaacggcgtag

SEQ ID NO: 135318 - DNA, 20 bp, Artificial Sequence
  mmSKRIPTE0006097_Rps3_8
  gRNA
agcacacctagaagacgcca

SEQ ID NO: 135319 - DNA, 20 bp, Artificial Sequence
  mmSKRIPTE0006098_Rps3_9
  gRNA
cagggaccaagagcaagacg

SEQ ID NO: 135320 - DNA, 20 bp, Artificial Sequence
  mmSKRIPTE0006099_Kars_1
  gRNA
ccccaggaggatcaactgcg

SEQ ID NO: 135321 - DNA, 20 bp, Artificial Sequence
  mmSKRIPTE0006100_Kars_2
  gRNA
acccttccgaagaatcagca

SEQ ID NO: 135322 - DNA, 20 bp, Artificial Sequence
  mmSKRIPTE0006101_Kars_3
  gRNA
aagaggttccactttacggg

SEQ ID NO: 135323 - DNA, 20 bp, Artificial Sequence
  mmSKRIPTE0006102_Kars_4
  gRNA
cttaacgtgagtctaggcct

SEQ ID NO: 135324 - DNA, 20 bp, Artificial Sequence
  mmSKRIPTE0006103_Kars_5
  gRNA
acagagacgtgtagtcagag

SEQ ID NO: 135325 - DNA, 20 bp, Artificial Sequence
  mmSKRIPTE0006104_Kars_6
  gRNA
ccagatggacggcgccacac

SEQ ID NO: 135326 - DNA, 20 bp, Artificial Sequence
  mmSKRIPTE0006105_Kars_7
  gRNA
tgtggctattgactaccttg

SEQ ID NO: 135327 - DNA, 20 bp, Artificial Sequence
  mmSKRIPTE0006106_Kars_8
  gRNA
taggccgcatccacgccaag

SEQ ID NO: 135328 - DNA, 20 bp, Artificial Sequence
  mmSKRIPTE0006107_Kars_9
  gRNA
gaagagcagagcatctgccg

SEQ ID NO: 135329 - DNA, 20 bp, Artificial Sequence
  mmSKRIPTE0006108_Nedd4_1
  gRNA
acgttgacacacacggccag

SEQ ID NO: 135330 - DNA, 20 bp, Artificial Sequence
  mmSKRIPTE0006109_Nedd4_2
  gRNA
tgatacaaccaactggtgtg

SEQ ID NO: 135331 - DNA, 20 bp, Artificial Sequence
  mmSKRIPTE0006110_Nedd4_3
  gRNA
acaccccgtgaagttatgtg

SEQ ID NO: 135332 - DNA, 20 bp, Artificial Sequence
  mmSKRIPTE0006111_Nedd4_4
  gRNA
gtacggccactccatgccaa

SEQ ID NO: 135333 - DNA, 20 bp, Artificial Sequence
  mmSKRIPTE0006112_Nedd4_5
  gRNA
cggtgttgaaaaagctcgtg

SEQ ID NO: 135334 - DNA, 20 bp, Artificial Sequence
  mmSKRIPTE0006113_Nedd4_6
  gRNA
tgatgcggttggcaagcaag

SEQ ID NO: 135335 - DNA, 20 bp, Artificial Sequence
  mmSKRIPTE0006114_Nedd4_7
  gRNA
gcatcacataagacgacata

SEQ ID NO: 135336 - DNA, 20 bp, Artificial Sequence
  mmSKRIPTE0006115_Nedd4_8
  gRNA
gtggtggctgcacatcagag

SEQ ID NO: 135337 - DNA, 20 bp, Artificial Sequence
  mmSKRIPTE0006116_Nedd4_9
  gRNA
tgattcgagtaggcgtatag

SEQ ID NO: 135338 - DNA, 20 bp, Artificial Sequence
  mmSKRIPTE0006117_Hyal2_1
  gRNA
acgcgtcccacatacacccg

SEQ ID NO: 135339 - DNA, 20 bp, Artificial Sequence
  mmSKRIPTE0006118_Hyal2_2
  gRNA
aaagttgcggctgtgtacgg

SEQ ID NO: 135340 - DNA, 20 bp, Artificial Sequence
  mmSKRIPTE0006119_Hyal2_3
  gRNA
gtcccggctgcatcaaaacg

SEQ ID NO: 135341 - DNA, 20 bp, Artificial Sequence
  mmSKRIPTE0006120_Hyal2_4
  gRNA
tgtctcgtccaggtacacag

SEQ ID NO: 135342 - DNA, 20 bp, Artificial Sequence
  mmSKRIPTE0006121_Hyal2_5
  gRNA
gttcaacatgaactgccgag

SEQ ID NO: 135343 - DNA, 20 bp, Artificial Sequence
  mmSKRIPTE0006122_Hyal2_6
  gRNA
cctgtccctagtgagaagcg

SEQ ID NO: 135344 - DNA, 20 bp, Artificial Sequence
  mmSKRIPTE0006123_Hyal2_7
  gRNA
aagcatgcagtggctcccgg

SEQ ID NO: 135345 - DNA, 20 bp, Artificial Sequence
  mmSKRIPTE0006124_Hyal2_8
  gRNA
ggaacgctacatccagaccc

SEQ ID NO: 135346 - DNA, 20 bp, Artificial Sequence
  mmSKRIPTE0006125_Hyal2_9
  gRNA
tatcaccacagtttccgtcg

SEQ ID NO: 135347 - DNA, 20 bp, Artificial Sequence
  mmSKRIPTE0006126_Eda_1
  gRNA
ttacttcggacaaccagtag

SEQ ID NO: 135348 - DNA, 20 bp, Artificial Sequence
  mmSKRIPTE0006127_Eda_2
  gRNA
atatggtgcaggccacctag

SEQ ID NO: 135349 - DNA, 20 bp, Artificial Sequence
  mmSKRIPTE0006128_Eda_3
  gRNA
ttaactagtagtacattcag

SEQ ID NO: 135350 - DNA, 20 bp, Artificial Sequence
  mmSKRIPTE0006129_Eda_4
  gRNA
gactagaacaaaatacacga

SEQ ID NO: 135351 - DNA, 20 bp, Artificial Sequence
  mmSKRIPTE0006130_Eda_5
  gRNA
gtggccgatttcacactggg

SEQ ID NO: 135352 - DNA, 20 bp, Artificial Sequence
  mmSKRIPTE0006131_Eda_6
  gRNA
atgctacccctttggcacag

SEQ ID NO: 135353 - DNA, 20 bp, Artificial Sequence
  mmSKRIPTE0006132_Eda_7
  gRNA
ctagaaatgaagtccccatg

SEQ ID NO: 135354 - DNA, 20 bp, Artificial Sequence
  mmSKRIPTE0006133_Eda_8
  gRNA
tccgaattgcggcgggaacg

SEQ ID NO: 135355 - DNA, 20 bp, Artificial Sequence
  mmSKRIPTE0006134_Eda_9
  gRNA
tctgagagcatttcgtcaag

SEQ ID NO: 135356 - DNA, 20 bp, Artificial Sequence
  mmSKRIPTE0006135_Tsc22d3_1
  gRNA
gtgtactgtgttacgtgcag

SEQ ID NO: 135357 - DNA, 20 bp, Artificial Sequence
  mmSKRIPTE0006136_Tsc22d3_2
  gRNA
agggagccccataaaccgcg

SEQ ID NO: 135358 - DNA, 20 bp, Artificial Sequence
  mmSKRIPTE0006137_Tsc22d3_3
  gRNA
caggcaaacctaccgaactc

SEQ ID NO: 135359 - DNA, 20 bp, Artificial Sequence
  mmSKRIPTE0006138_Tsc22d3_4
  gRNA
tcccaggatgctacaccgcg

SEQ ID NO: 135360 - DNA, 20 bp, Artificial Sequence
  mmSKRIPTE0006139_Tsc22d3_5
  gRNA
ttcaccacgcagcagccgca

SEQ ID NO: 135361 - DNA, 20 bp, Artificial Sequence
  mmSKRIPTE0006140_Tsc22d3_6
  gRNA
ccctagtccaggttctgcag

SEQ ID NO: 135362 - DNA, 20 bp, Artificial Sequence
  mmSKRIPTE0006141_Tsc22d3_7
  gRNA
acaggatttgtgccatacca

SEQ ID NO: 135363 - DNA, 20 bp, Artificial Sequence
  mmSKRIPTE0006142_Tsc22d3_8
  gRNA
tagtcatcacagcccgtccg

SEQ ID NO: 135364 - DNA, 20 bp, Artificial Sequence
  mmSKRIPTE0006143_Tsc22d3_9
  gRNA
acatcaggtggttcttcacg

SEQ ID NO: 135365 - DNA, 20 bp, Artificial Sequence
  mmSKRIPTE0006144_Dyrk3_1
  gRNA
atgtcttaatgcttgagccg

SEQ ID NO: 135366 - DNA, 20 bp, Artificial Sequence
  mmSKRIPTE0006145_Dyrk3_2
  gRNA
tatctacccagacggacggg

SEQ ID NO: 135367 - DNA, 20 bp, Artificial Sequence
  mmSKRIPTE0006146_Dyrk3_3
  gRNA
accactgagccactcacgag

SEQ ID NO: 135368 - DNA, 20 bp, Artificial Sequence
  mmSKRIPTE0006147_Dyrk3_4
  gRNA
tcgaactcacgtattaccct

SEQ ID NO: 135369 - DNA, 20 bp, Artificial Sequence
  mmSKRIPTE0006148_Dyrk3_5
  gRNA
ccgaatgccaaaaagcggca

SEQ ID NO: 135370 - DNA, 20 bp, Artificial Sequence
  mmSKRIPTE0006149_Dyrk3_6
  gRNA
cagcaccttagacggcctgg

SEQ ID NO: 135371 - DNA, 20 bp, Artificial Sequence
  mmSKRIPTE0006150_Dyrk3_7
  gRNA
tcacgcaggggtaaaaagcg

SEQ ID NO: 135372 - DNA, 20 bp, Artificial Sequence
  mmSKRIPTE0006151_Dyrk3_8
  gRNA
ttactggctatcccaacgac

SEQ ID NO: 135373 - DNA, 20 bp, Artificial Sequence
  mmSKRIPTE0006152_Dyrk3_9
  gRNA
gctggcttcgctacaagacg

SEQ ID NO: 135374 - DNA, 20 bp, Artificial Sequence
  mmSKRIPTE0006153_Osm_1
  gRNA
cagccactttatgcccgacg

SEQ ID NO: 135375 - DNA, 20 bp, Artificial Sequence
  mmSKRIPTE0006154_Osm_2
  gRNA
ctgtggtgcaaacggttgtg

SEQ ID NO: 135376 - DNA, 20 bp, Artificial Sequence
  mmSKRIPTE0006155_Osm_3
  gRNA
agtgtcccctactaccactc

SEQ ID NO: 135377 - DNA, 20 bp, Artificial Sequence
  mmSKRIPTE0006156_Osm_4
  gRNA
gaaaggaccaacagcccgag

SEQ ID NO: 135378 - DNA, 20 bp, Artificial Sequence
  mmSKRIPTE0006157_Osm_5
  gRNA
ttaaaacacaagctctagcg

SEQ ID NO: 135379 - DNA, 20 bp, Artificial Sequence
  mmSKRIPTE0006158_Osm_6
  gRNA
ggaaaacctccggccccacg

SEQ ID NO: 135380 - DNA, 20 bp, Artificial Sequence
  mmSKRIPTE0006159_Osm_7
  gRNA
acacaagctgattcaccaca

SEQ ID NO: 135381 - DNA, 20 bp, Artificial Sequence
  mmSKRIPTE0006160_Osm_8
  gRNA
taagggctgaggcttacata

SEQ ID NO: 135382 - DNA, 20 bp, Artificial Sequence
  mmSKRIPTE0006161_Osm_9
  gRNA
atacaggatgtcgctctcag

SEQ ID NO: 135383 - DNA, 20 bp, Artificial Sequence
  mmSKRIPTE0006162_Actr2_1
  gRNA
ccaatgagagctgtccggcg

SEQ ID NO: 135384 - DNA, 20 bp, Artificial Sequence
  mmSKRIPTE0006163_Actr2_2
  gRNA
ctacctactaggttacactc

SEQ ID NO: 135385 - DNA, 20 bp, Artificial Sequence
  mmSKRIPTE0006164_Actr2_3
  gRNA
ggtgtgcgacaacggcactg

SEQ ID NO: 135386 - DNA, 20 bp, Artificial Sequence
  mmSKRIPTE0006165_Actr2_4
  gRNA
gttactaggagacacttcag

SEQ ID NO: 135387 - DNA, 20 bp, Artificial Sequence
  mmSKRIPTE0006166_Actr2_5
  gRNA
atatagcgagactctcagga

SEQ ID NO: 135388 - DNA, 20 bp, Artificial Sequence
  mmSKRIPTE0006167_Actr2_6
  gRNA
taaatgcaggctcccacaag

SEQ ID NO: 135389 - DNA, 20 bp, Artificial Sequence
  mmSKRIPTE0006168_Actr2_7
  gRNA
aatacattatgggtgtaaag

SEQ ID NO: 135390 - DNA, 20 bp, Artificial Sequence
  mmSKRIPTE0006169_Actr2_8
  gRNA
agccaccagaacaaacctgg

SEQ ID NO: 135391 - DNA, 20 bp, Artificial Sequence
  mmSKRIPTE0006170_Actr2_9
  gRNA
ccaaccaaaatagcttgaca

SEQ ID NO: 135392 - DNA, 20 bp, Artificial Sequence
  mmSKRIPTE0006171_Mink1_1
  gRNA
ggggcaactccattacctag

SEQ ID NO: 135393 - DNA, 20 bp, Artificial Sequence
  mmSKRIPTE0006172_Mink1_2
  gRNA
cccacactactgtctgaccg

SEQ ID NO: 135394 - DNA, 20 bp, Artificial Sequence
  mmSKRIPTE0006173_Mink1_3
  gRNA
actcacacgctggaccacca

SEQ ID NO: 135395 - DNA, 20 bp, Artificial Sequence
  mmSKRIPTE0006174_Mink1_4
  gRNA
tcgccgcttctcccccatcg

SEQ ID NO: 135396 - DNA, 20 bp, Artificial Sequence
  mmSKRIPTE0006175_Mink1_5
  gRNA
gacaaaagcagtacttacgg

SEQ ID NO: 135397 - DNA, 20 bp, Artificial Sequence
  mmSKRIPTE0006176_Mink1_6
  gRNA
cttagaatgcaccttccgtg

SEQ ID NO: 135398 - DNA, 20 bp, Artificial Sequence
  mmSKRIPTE0006177_Mink1_7
  gRNA
ctataagcgagcaattggcg

SEQ ID NO: 135399 - DNA, 20 bp, Artificial Sequence
  mmSKRIPTE0006178_Mink1_8
  gRNA
gagcggaaccgaaaccgtgt

SEQ ID NO: 135400 - DNA, 20 bp, Artificial Sequence
  mmSKRIPTE0006179_Mink1_9
  gRNA
cccaacagtaccagtctcgt

SEQ ID NO: 135401 - DNA, 20 bp, Artificial Sequence
  mmSKRIPTE0006180_Nlrp1b_1
  gRNA
gaaaggaacctgtaccggtg

SEQ ID NO: 135402 - DNA, 20 bp, Artificial Sequence
  mmSKRIPTE0006181_Nlrp1b_2
  gRNA
agcgttgcatacgaggcctg

SEQ ID NO: 135403 - DNA, 20 bp, Artificial Sequence
  mmSKRIPTE0006182_Nlrp1b_3
  gRNA
actccctctaatgccccgtg

SEQ ID NO: 135404 - DNA, 20 bp, Artificial Sequence
  mmSKRIPTE0006183_Nlrp1b_4
  gRNA
ttggcagccagggtatatca

SEQ ID NO: 135405 - DNA, 20 bp, Artificial Sequence
  mmSKRIPTE0006184_Nlrp1b_5
  gRNA
ctgtaagcaagggttagacg

SEQ ID NO: 135406 - DNA, 20 bp, Artificial Sequence
  mmSKRIPTE0006185_Nlrp1b_6
  gRNA
gggtcctcatatgatgcact

SEQ ID NO: 135407 - DNA, 20 bp, Artificial Sequence
  mmSKRIPTE0006186_Nlrp1b_7
  gRNA
acaaagtggagtcttgtgct

SEQ ID NO: 135408 - DNA, 20 bp, Artificial Sequence
  mmSKRIPTE0006187_Nlrp1b_8
  gRNA
accgcattctcaaatgagca

SEQ ID NO: 135409 - DNA, 20 bp, Artificial Sequence
  mmSKRIPTE0006188_Nlrp1b_9
  gRNA
aggattgcccaagccctcaa

SEQ ID NO: 135410 - DNA, 20 bp, Artificial Sequence
  mmSKRIPTE0006189_Grb2_1
  gRNA
aatacttcccggctccgtcg

SEQ ID NO: 135411 - DNA, 20 bp, Artificial Sequence
  mmSKRIPTE0006190_Grb2_2
  gRNA
aggccgacctcatggcagtg

SEQ ID NO: 135412 - DNA, 20 bp, Artificial Sequence
  mmSKRIPTE0006191_Grb2_3
  gRNA
agaactcctgctcatacgtg

SEQ ID NO: 135413 - DNA, 20 bp, Artificial Sequence
  mmSKRIPTE0006192_Grb2_4
  gRNA
gtgcaggcacgtgactacag

SEQ ID NO: 135414 - DNA, 20 bp, Artificial Sequence
  mmSKRIPTE0006193_Grb2_5
  gRNA
tctcgggtgaaccccaacca

SEQ ID NO: 135415 - DNA, 20 bp, Artificial Sequence
  mmSKRIPTE0006194_Grb2_6
  gRNA
tccaaacacaagacggtcag

SEQ ID NO: 135416 - DNA, 20 bp, Artificial Sequence
  mmSKRIPTE0006195_Grb2_7
  gRNA
ccctcactgtggtaacacaa

SEQ ID NO: 135417 - DNA, 20 bp, Artificial Sequence
  mmSKRIPTE0006196_Grb2_8
  gRNA
aaacacttacttgacggaca

SEQ ID NO: 135418 - DNA, 20 bp, Artificial Sequence
  mmSKRIPTE0006197_Grb2_9
  gRNA
atgtaggcctataagagtga

SEQ ID NO: 135419 - DNA, 20 bp, Artificial Sequence
  mmSKRIPTE0006198_Actn1_1
  gRNA
caactcccacctgcgcaaag

SEQ ID NO: 135420 - DNA, 20 bp, Artificial Sequence
  mmSKRIPTE0006199_Actn1_2
  gRNA
tcaaagccagaaatgccgct

SEQ ID NO: 135421 - DNA, 20 bp, Artificial Sequence
  mmSKRIPTE0006200_Actn1_3
  gRNA
agtggaatctgagtccacgt

SEQ ID NO: 135422 - DNA, 20 bp, Artificial Sequence
  mmSKRIPTE0006201_Actn1_4
  gRNA
gcagcggccggaaagcaacg

SEQ ID NO: 135423 - DNA, 20 bp, Artificial Sequence
  mmSKRIPTE0006202_Actn1_5
  gRNA
agtttacgacctaatagttg

SEQ ID NO: 135424 - DNA, 20 bp, Artificial Sequence
  mmSKRIPTE0006203_Actn1_6
  gRNA
cacagggtaaggatgcgcaa

SEQ ID NO: 135425 - DNA, 20 bp, Artificial Sequence
  mmSKRIPTE0006204_Actn1_7
  gRNA
taagaaacgctttggccgag

SEQ ID NO: 135426 - DNA, 20 bp, Artificial Sequence
  mmSKRIPTE0006205_Actn1_8
  gRNA
atgtgagttaataggctgaa

SEQ ID NO: 135427 - DNA, 20 bp, Artificial Sequence
  mmSKRIPTE0006206_Actn1_9
  gRNA
aacgtgccggagtgatcctg

SEQ ID NO: 135428 - DNA, 20 bp, Artificial Sequence
  mmSKRIPTE0006207_Pgf_1
  gRNA
agtgtacttagtgcgcgggg

SEQ ID NO: 135429 - DNA, 20 bp, Artificial Sequence
  mmSKRIPTE0006208_Pgf_2
  gRNA
ggttcctcgtgctcggacag

SEQ ID NO: 135430 - DNA, 20 bp, Artificial Sequence
  mmSKRIPTE0006209_Pgf_3
  gRNA
tcccggcagagacaaccggt

SEQ ID NO: 135431 - DNA, 20 bp, Artificial Sequence
  mmSKRIPTE0006210_Pgf_4
  gRNA
gaaatgtggatcccgattgg

SEQ ID NO: 135432 - DNA, 20 bp, Artificial Sequence
  mmSKRIPTE0006211_Pgf_5
  gRNA
gggatgccttagctgcttcg

SEQ ID NO: 135433 - DNA, 20 bp, Artificial Sequence
  mmSKRIPTE0006212_Pgf_6
  gRNA
agggggcacgtcattcagca

SEQ ID NO: 135434 - DNA, 20 bp, Artificial Sequence
  mmSKRIPTE0006213_Pgf_7
  gRNA
gttgctccagcgccgctagg

SEQ ID NO: 135435 - DNA, 20 bp, Artificial Sequence
  mmSKRIPTE0006214_Pgf_8
  gRNA
gtgcctttcaacgaagtgtg

SEQ ID NO: 135436 - DNA, 20 bp, Artificial Sequence
  mmSKRIPTE0006215_Pgf_9
  gRNA
cgagtcggctaataaataga

SEQ ID NO: 135437 - DNA, 20 bp, Artificial Sequence
  mmSKRIPTE0006216_Yy1_1
  gRNA
cataaagtaagtaatgcgag

SEQ ID NO: 135438 - DNA, 20 bp, Artificial Sequence
  mmSKRIPTE0006217_Yy1_2
  gRNA
ccacttcttattccccgggt

SEQ ID NO: 135439 - DNA, 20 bp, Artificial Sequence
  mmSKRIPTE0006218_Yy1_3
  gRNA
cgactacatagagcagacgc

SEQ ID NO: 135440 - DNA, 20 bp, Artificial Sequence
  mmSKRIPTE0006219_Yy1_4
  gRNA
actgtgatgaggtccgtgca

SEQ ID NO: 135441 - DNA, 20 bp, Artificial Sequence
  mmSKRIPTE0006220_Yy1_5
  gRNA
tctcgggattcagggcacgt

SEQ ID NO: 135442 - DNA, 20 bp, Artificial Sequence
  mmSKRIPTE0006221_Yy1_6
  gRNA
tcttattacaaccgtcgaag

SEQ ID NO: 135443 - DNA, 20 bp, Artificial Sequence
  mmSKRIPTE0006222_Yy1_7
  gRNA
gtcacatgcagtaagtaacc

SEQ ID NO: 135444 - DNA, 20 bp, Artificial Sequence
  mmSKRIPTE0006223_Yy1_8
  gRNA
tgggtcgtctgtgtactctg

SEQ ID NO: 135445 - DNA, 20 bp, Artificial Sequence
  mmSKRIPTE0006224_Yy1_9
  gRNA
gcttagtgttggtgctacaa

SEQ ID NO: 135446 - DNA, 20 bp, Artificial Sequence
  mmSKRIPTE0006225_Rcor1_1
  gRNA
atgcaacgctcgctggacaa

SEQ ID NO: 135447 - DNA, 20 bp, Artificial Sequence
  mmSKRIPTE0006226_Rcor1_2
  gRNA
gtatgataaaggtgacgatg

SEQ ID NO: 135448 - DNA, 20 bp, Artificial Sequence
  mmSKRIPTE0006227_Rcor1_3
  gRNA
gtccagctgtctcagcaccg

SEQ ID NO: 135449 - DNA, 20 bp, Artificial Sequence
  mmSKRIPTE0006228_Rcor1_4
  gRNA
atgacctacccacgtcagca

SEQ ID NO: 135450 - DNA, 20 bp, Artificial Sequence
  mmSKRIPTE0006229_Rcor1_5
  gRNA
gtgttggccttcggtccgcg

SEQ ID NO: 135451 - DNA, 20 bp, Artificial Sequence
  mmSKRIPTE0006230_Rcor1_6
  gRNA
ttaatatactaatgtacggg

SEQ ID NO: 135452 - DNA, 20 bp, Artificial Sequence
  mmSKRIPTE0006231_Rcor1_7
  gRNA
ctgaggtccacgttcccatg

SEQ ID NO: 135453 - DNA, 20 bp, Artificial Sequence
  mmSKRIPTE0006232_Rcor1_8
  gRNA
gcaaaaaggaaacctccgaa

SEQ ID NO: 135454 - DNA, 20 bp, Artificial Sequence
  mmSKRIPTE0006233_Rcor1_9
  gRNA
agagaagcacgggtacaaca

SEQ ID NO: 135455 - DNA, 20 bp, Artificial Sequence
  mmSKRIPTE0006234_Ighv8-5_1
  gRNA
ctgcacgattgtgagtacac

SEQ ID NO: 135456 - DNA, 20 bp, Artificial Sequence
  mmSKRIPTE0006235_Ighv8-5_2
  gRNA
gaacatcttaataaggacct

SEQ ID NO: 135457 - DNA, 20 bp, Artificial Sequence
  mmSKRIPTE0006236_Ighv8-5_3
  gRNA
tactatacagctgataactg

SEQ ID NO: 135458 - DNA, 20 bp, Artificial Sequence
  mmSKRIPTE0006237_Ighv8-5_4
  gRNA
cttctaatatgggtataggc

SEQ ID NO: 135459 - DNA, 20 bp, Artificial Sequence
  mmSKRIPTE0006238_Ighv8-5_5
  gRNA
tatcttacgatataataaga

SEQ ID NO: 135460 - DNA, 20 bp, Artificial Sequence
  mmSKRIPTE0006239_Bmpr1a_1
  gRNA
gtggccgactagcccgtgtg

SEQ ID NO: 135461 - DNA, 20 bp, Artificial Sequence
  mmSKRIPTE0006240_Bmpr1a_2
  gRNA
gccatcaaagaacggacctg

SEQ ID NO: 135462 - DNA, 20 bp, Artificial Sequence
  mmSKRIPTE0006241_Bmpr1a_3
  gRNA
tgacctacctataacaacag

SEQ ID NO: 135463 - DNA, 20 bp, Artificial Sequence
  mmSKRIPTE0006242_Bmpr1a_4
  gRNA
actccctgcaggaatcgtgg

SEQ ID NO: 135464 - DNA, 20 bp, Artificial Sequence
  mmSKRIPTE0006243_Bmpr1a_5
  gRNA
gtcgttgtattacaggaggt

SEQ ID NO: 135465 - DNA, 20 bp, Artificial Sequence
  mmSKRIPTE0006244_Bmpr1a_6
  gRNA
gggtaccataaatttctgtg

SEQ ID NO: 135466 - DNA, 20 bp, Artificial Sequence
  mmSKRIPTE0006245_Bmpr1a_7
  gRNA
tcatttgtatcactaagaca

SEQ ID NO: 135467 - DNA, 20 bp, Artificial Sequence
  mmSKRIPTE0006246_Bmpr1a_8
  gRNA
ttctgctgcatcgtacaaag

SEQ ID NO: 135468 - DNA, 20 bp, Artificial Sequence
  mmSKRIPTE0006247_Bmpr1a_9
  gRNA
gatgtgacgttgttgctaag

SEQ ID NO: 135469 - DNA, 20 bp, Artificial Sequence
  mmSKRIPTE0006248_Tob2_1
  gRNA
ctgccagacgagtacatcca

SEQ ID NO: 135470 - DNA, 20 bp, Artificial Sequence
  mmSKRIPTE0006249_Tob2_2
  gRNA
ctacagagggaagacccgcg

SEQ ID NO: 135471 - DNA, 20 bp, Artificial Sequence
  mmSKRIPTE0006250_Tob2_3
  gRNA
tccctgccacgtcctcagcg

SEQ ID NO: 135472 - DNA, 20 bp, Artificial Sequence
  mmSKRIPTE0006251_Tob2_4
  gRNA
acttcagcaactccgctgcg

SEQ ID NO: 135473 - DNA, 20 bp, Artificial Sequence
  mmSKRIPTE0006252_Tob2_5
  gRNA
gctaggaaaaggattcgccc

SEQ ID NO: 135474 - DNA, 20 bp, Artificial Sequence
  mmSKRIPTE0006253_Tob2_6
  gRNA
ggaaagcagattcatgcgca

SEQ ID NO: 135475 - DNA, 20 bp, Artificial Sequence
  mmSKRIPTE0006254_Tob2_7
  gRNA
tgagtgtcgtgggaaccgag

SEQ ID NO: 135476 - DNA, 20 bp, Artificial Sequence
  mmSKRIPTE0006255_Tob2_8
  gRNA
tggaatcccaacctacgact

SEQ ID NO: 135477 - DNA, 20 bp, Artificial Sequence
  mmSKRIPTE0006256_Tob2_9
  gRNA
ggagagagacctccgtcccg

SEQ ID NO: 135478 - DNA, 20 bp, Artificial Sequence
  mmSKRIPTE0006257_Il1rap_1
  gRNA
tttcataatgtactacccga

SEQ ID NO: 135479 - DNA, 20 bp, Artificial Sequence
  mmSKRIPTE0006258_Il1rap_2
  gRNA
cggagcgcgattcaccgcgt

SEQ ID NO: 135480 - DNA, 20 bp, Artificial Sequence
  mmSKRIPTE0006259_Il1rap_3
  gRNA
cacactactaactagtaggg

SEQ ID NO: 135481 - DNA, 20 bp, Artificial Sequence
  mmSKRIPTE0006260_Il1rap_4
  gRNA
agttcacagagtcatcggct

SEQ ID NO: 135482 - DNA, 20 bp, Artificial Sequence
  mmSKRIPTE0006261_Il1rap_5
  gRNA
ttacagtcacagtcctggtg

SEQ ID NO: 135483 - DNA, 20 bp, Artificial Sequence
  mmSKRIPTE0006262_Il1rap_6
  gRNA
gttgcgcctgagatcctccg

SEQ ID NO: 135484 - DNA, 20 bp, Artificial Sequence
  mmSKRIPTE0006263_Il1rap_7
  gRNA
agtcacagactccacccacg

SEQ ID NO: 135485 - DNA, 20 bp, Artificial Sequence
  mmSKRIPTE0006264_Il1rap_8
  gRNA
tgagacacggagcgagactg

SEQ ID NO: 135486 - DNA, 20 bp, Artificial Sequence
  mmSKRIPTE0006265_Il1rap_9
  gRNA
gcaattacacctgcatgttg

SEQ ID NO: 135487 - DNA, 20 bp, Artificial Sequence
  mmSKRIPTE0006266_Tnk2_1
  gRNA
ttggagcctatgttccctcg

SEQ ID NO: 135488 - DNA, 20 bp, Artificial Sequence
  mmSKRIPTE0006267_Tnk2_2
  gRNA
tcagaggactgagctcccga

SEQ ID NO: 135489 - DNA, 20 bp, Artificial Sequence
  mmSKRIPTE0006268_Tnk2_3
  gRNA
tcgaaatgtcgtgacctccg

SEQ ID NO: 135490 - DNA, 20 bp, Artificial Sequence
  mmSKRIPTE0006269_Tnk2_4
  gRNA
aatacgcggaccctgtgtgt

SEQ ID NO: 135491 - DNA, 20 bp, Artificial Sequence
  mmSKRIPTE0006270_Tnk2_5
  gRNA
cacactcatcgacttcggtg

SEQ ID NO: 135492 - DNA, 20 bp, Artificial Sequence
  mmSKRIPTE0006271_Tnk2_6
  gRNA
agtggcatacttagggtctg

SEQ ID NO: 135493 - DNA, 20 bp, Artificial Sequence
  mmSKRIPTE0006272_Tnk2_7
  gRNA
tccatacgagatcttgtgtg

SEQ ID NO: 135494 - DNA, 20 bp, Artificial Sequence
  mmSKRIPTE0006273_Tnk2_8
  gRNA
tggtaaataccgggtatagg

SEQ ID NO: 135495 - DNA, 20 bp, Artificial Sequence
  mmSKRIPTE0006274_Tnk2_9
  gRNA
ctgtcagtctaatcccccag

SEQ ID NO: 135496 - DNA, 20 bp, Artificial Sequence
  mmSKRIPTE0006275_Cxadr_1
  gRNA
tagccaaagaacggtaccag

SEQ ID NO: 135497 - DNA, 20 bp, Artificial Sequence
  mmSKRIPTE0006276_Cxadr_2
  gRNA
gagcctggtacactcccgac

SEQ ID NO: 135498 - DNA, 20 bp, Artificial Sequence
  mmSKRIPTE0006277_Cxadr_3
  gRNA
gcggcctcccgggaacaatg

SEQ ID NO: 135499 - DNA, 20 bp, Artificial Sequence
  mmSKRIPTE0006278_Cxadr_4
  gRNA
cgcaagcgactgggacggag

SEQ ID NO: 135500 - DNA, 20 bp, Artificial Sequence
  mmSKRIPTE0006279_Cxadr_5
  gRNA
catcaatggactcattacaa

SEQ ID NO: 135501 - DNA, 20 bp, Artificial Sequence
  mmSKRIPTE0006280_Cxadr_6
  gRNA
tctcttatctgagtagtgtg

SEQ ID NO: 135502 - DNA, 20 bp, Artificial Sequence
  mmSKRIPTE0006281_Cxadr_7
  gRNA
tgctcccatgaatagccccg

SEQ ID NO: 135503 - DNA, 20 bp, Artificial Sequence
  mmSKRIPTE0006282_Cxadr_8
  gRNA
gcatcactacacccgaacag

SEQ ID NO: 135504 - DNA, 20 bp, Artificial Sequence
  mmSKRIPTE0006283_Cxadr_9
  gRNA
atcgttcctattatccacag

SEQ ID NO: 135505 - DNA, 20 bp, Artificial Sequence
  mmSKRIPTE0006284_Dll1_1
  gRNA
atgcttgataaccggaagtg

SEQ ID NO: 135506 - DNA, 20 bp, Artificial Sequence
  mmSKRIPTE0006285_Dll1_2
  gRNA
ccatgcgagaacacacaccg

SEQ ID NO: 135507 - DNA, 20 bp, Artificial Sequence
  mmSKRIPTE0006286_Dll1_3
  gRNA
atccccaagtcaattccgtg

SEQ ID NO: 135508 - DNA, 20 bp, Artificial Sequence
  mmSKRIPTE0006287_Dll1_4
  gRNA
cagcgtaagaaagccgcgtg

SEQ ID NO: 135509 - DNA, 20 bp, Artificial Sequence
  mmSKRIPTE0006288_Dll1_5
  gRNA
agtatcaccaggtggaactg

SEQ ID NO: 135510 - DNA, 20 bp, Artificial Sequence
  mmSKRIPTE0006289_Dll1_6
  gRNA
tccccggcaagagctctacg

SEQ ID NO: 135511 - DNA, 20 bp, Artificial Sequence
  mmSKRIPTE0006290_Dll1_7
  gRNA
tctaacggtgaggggcaatg

SEQ ID NO: 135512 - DNA, 20 bp, Artificial Sequence
  mmSKRIPTE0006291_Dll1_8
  gRNA
ccttcatgaagacatcgatg

SEQ ID NO: 135513 - DNA, 20 bp, Artificial Sequence
  mmSKRIPTE0006292_Dll1_9
  gRNA
gtctggaaatcccaccggtg

SEQ ID NO: 135514 - DNA, 20 bp, Artificial Sequence
  mmSKRIPTE0006293_Il1f6_1
  gRNA
aggatcttagtagtcgtgtg

SEQ ID NO: 135515 - DNA, 20 bp, Artificial Sequence
  mmSKRIPTE0006294_Il1f6_2
  gRNA
gagctgcctgttctgcacaa

SEQ ID NO: 135516 - DNA, 20 bp, Artificial Sequence
  mmSKRIPTE0006295_Il1f6_3
  gRNA
cactgacttcgagatgattg

SEQ ID NO: 135517 - DNA, 20 bp, Artificial Sequence
  mmSKRIPTE0006296_Il1f6_4
  gRNA
cctaagtcacagtttgaccc

SEQ ID NO: 135518 - DNA, 20 bp, Artificial Sequence
  mmSKRIPTE0006297_Il1f6_5
  gRNA
caggttagaaacgcagcctg

SEQ ID NO: 135519 - DNA, 20 bp, Artificial Sequence
  mmSKRIPTE0006298_Il1f6_6
  gRNA
acacaccagtgggctcagag

SEQ ID NO: 135520 - DNA, 20 bp, Artificial Sequence
  mmSKRIPTE0006299_Il1f6_7
  gRNA
ctgcatctgattcaccacca

SEQ ID NO: 135521 - DNA, 20 bp, Artificial Sequence
  mmSKRIPTE0006300_Il1f6_8
  gRNA
agagtgtccagatattggca

SEQ ID NO: 135522 - DNA, 20 bp, Artificial Sequence
  mmSKRIPTE0006301_Il1f6_9
  gRNA
cagcagtcctaggtgcactg

SEQ ID NO: 135523 - DNA, 20 bp, Artificial Sequence
  mmSKRIPTE0006302_Vcam1_1
  gRNA
acttacagtagatgtccacg

SEQ ID NO: 135524 - DNA, 20 bp, Artificial Sequence
  mmSKRIPTE0006303_Vcam1_2
  gRNA
gacaatgacctgttccagcg

SEQ ID NO: 135525 - DNA, 20 bp, Artificial Sequence
  mmSKRIPTE0006304_Vcam1_3
  gRNA
agccactcccaggaattcag

SEQ ID NO: 135526 - DNA, 20 bp, Artificial Sequence
  mmSKRIPTE0006305_Vcam1_4
  gRNA
gtggtggtctgcgattggga

SEQ ID NO: 135527 - DNA, 20 bp, Artificial Sequence
  mmSKRIPTE0006306_Vcam1_5
  gRNA
cagctgaaggggttaacgtg

SEQ ID NO: 135528 - DNA, 20 bp, Artificial Sequence
  mmSKRIPTE0006307_Vcam1_6
  gRNA
agacagcccactaaacgcga

SEQ ID NO: 135529 - DNA, 20 bp, Artificial Sequence
  mmSKRIPTE0006308_Vcam1_7
  gRNA
atacagctgatgtttgagga

SEQ ID NO: 135530 - DNA, 20 bp, Artificial Sequence
  mmSKRIPTE0006309_Vcam1_8
  gRNA
gagtcattacgaaattagac

SEQ ID NO: 135531 - DNA, 20 bp, Artificial Sequence
  mmSKRIPTE0006310_Vcam1_9
  gRNA
ttaggtaacggtaagacggt

SEQ ID NO: 135532 - DNA, 20 bp, Artificial Sequence
  mmSKRIPTE0006311_Tgfbr1_1
  gRNA
agagcgttcatggttccgag

SEQ ID NO: 135533 - DNA, 20 bp, Artificial Sequence
  mmSKRIPTE0006312_Tgfbr1_2
  gRNA
cctcttcatttggcacacgg

SEQ ID NO: 135534 - DNA, 20 bp, Artificial Sequence
  mmSKRIPTE0006313_Tgfbr1_3
  gRNA
tttcttccctttcgacacag

SEQ ID NO: 135535 - DNA, 20 bp, Artificial Sequence
  mmSKRIPTE0006314_Tgfbr1_4
  gRNA
aaaatgtaactgaaacaccg

SEQ ID NO: 135536 - DNA, 20 bp, Artificial Sequence
  mmSKRIPTE0006315_Tgfbr1_5
  gRNA
gtttggcgaggcaaatggcg

SEQ ID NO: 135537 - DNA, 20 bp, Artificial Sequence
  mmSKRIPTE0006316_Tgfbr1_6
  gRNA
gtgttctgacgtgcagacaa

SEQ ID NO: 135538 - DNA, 20 bp, Artificial Sequence
  mmSKRIPTE0006317_Tgfbr1_7
  gRNA
tgtctgctgctataaatccc

SEQ ID NO: 135539 - DNA, 20 bp, Artificial Sequence
  mmSKRIPTE0006318_Tgfbr1_8
  gRNA
ggtatgccaatggagcagca

SEQ ID NO: 135540 - DNA, 20 bp, Artificial Sequence
  mmSKRIPTE0006319_Tgfbr1_9
  gRNA
aaggaatagtacttgcctgt

SEQ ID NO: 135541 - DNA, 20 bp, Artificial Sequence
  mmSKRIPTE0006320_Tlr6_1
  gRNA
ccattgatgttacaacaatg

SEQ ID NO: 135542 - DNA, 20 bp, Artificial Sequence
  mmSKRIPTE0006321_Tlr6_2
  gRNA
ctactgagaagggcaaacgt

SEQ ID NO: 135543 - DNA, 20 bp, Artificial Sequence
  mmSKRIPTE0006322_Tlr6_3
  gRNA
taaatattgaggtactccac

SEQ ID NO: 135544 - DNA, 20 bp, Artificial Sequence
  mmSKRIPTE0006323_Tlr6_4
  gRNA
ctcaagttcattagagaacg

SEQ ID NO: 135545 - DNA, 20 bp, Artificial Sequence
  mmSKRIPTE0006324_Tlr6_5
  gRNA
gagttatcatataaaaggcg

SEQ ID NO: 135546 - DNA, 20 bp, Artificial Sequence
  mmSKRIPTE0006325_Tlr6_6
  gRNA
ggaaccacggtacttaggag

SEQ ID NO: 135547 - DNA, 20 bp, Artificial Sequence
  mmSKRIPTE0006326_Tlr6_7
  gRNA
atatgacaggacatgcgcct

SEQ ID NO: 135548 - DNA, 20 bp, Artificial Sequence
  mmSKRIPTE0006327_Tlr6_8
  gRNA
gataactgagagaatcgaca

SEQ ID NO: 135549 - DNA, 20 bp, Artificial Sequence
  mmSKRIPTE0006328_Tlr6_9
  gRNA
gtttcagctcttgatgccaa

SEQ ID NO: 135550 - DNA, 20 bp, Artificial Sequence
  mmSKRIPTE0006329_Tac1_1
  gRNA
ctccacaaagtctaccgggg

SEQ ID NO: 135551 - DNA, 20 bp, Artificial Sequence
  mmSKRIPTE0006330_Tac1_2
  gRNA
ctcactgcggtcagaccgcg

SEQ ID NO: 135552 - DNA, 20 bp, Artificial Sequence
  mmSKRIPTE0006331_Tac1_3
  gRNA
tttccgagacggtaacccgt

SEQ ID NO: 135553 - DNA, 20 bp, Artificial Sequence
  mmSKRIPTE0006332_Tac1_4
  gRNA
tcactaactctagatcgtgg

SEQ ID NO: 135554 - DNA, 20 bp, Artificial Sequence
  mmSKRIPTE0006333_Tac1_5
  gRNA
gtttggagaagtgttcgacc

SEQ ID NO: 135555 - DNA, 20 bp, Artificial Sequence
  mmSKRIPTE0006334_Tac1_6
  gRNA
gtgatgtagagtttccgaga

SEQ ID NO: 135556 - DNA, 20 bp, Artificial Sequence
  mmSKRIPTE0006335_Tac1_7
  gRNA
taagccttgtaattctaatg

SEQ ID NO: 135557 - DNA, 20 bp, Artificial Sequence
  mmSKRIPTE0006336_Tac1_8
  gRNA
cctaactgtgaacagtaggg

SEQ ID NO: 135558 - DNA, 20 bp, Artificial Sequence
  mmSKRIPTE0006337_Tac1_9
  gRNA
tcgcgggtttgtcccccagg

SEQ ID NO: 135559 - DNA, 20 bp, Artificial Sequence
  mmSKRIPTE0006338_Raf1_1
  gRNA
ccaactaatgagaccacgtg

SEQ ID NO: 135560 - DNA, 20 bp, Artificial Sequence
  mmSKRIPTE0006339_Raf1_2
  gRNA
tgtggatggctttccaagcg

SEQ ID NO: 135561 - DNA, 20 bp, Artificial Sequence
  mmSKRIPTE0006340_Raf1_3
  gRNA
tcatcttcatggtaggccgt

SEQ ID NO: 135562 - DNA, 20 bp, Artificial Sequence
  mmSKRIPTE0006341_Raf1_4
  gRNA
acctggcgattgtgactcag

SEQ ID NO: 135563 - DNA, 20 bp, Artificial Sequence
  mmSKRIPTE0006342_Raf1_5
  gRNA
gacccagttacgtctcaacc

SEQ ID NO: 135564 - DNA, 20 bp, Artificial Sequence
  mmSKRIPTE0006343_Raf1_6
  gRNA
tggcaacagtgaagtcacgc

SEQ ID NO: 135565 - DNA, 20 bp, Artificial Sequence
  mmSKRIPTE0006344_Raf1_7
  gRNA
ggaagacagattcagcacgt

SEQ ID NO: 135566 - DNA, 20 bp, Artificial Sequence
  mmSKRIPTE0006345_Raf1_8
  gRNA
tttccagaatataagtacgc

SEQ ID NO: 135567 - DNA, 20 bp, Artificial Sequence
  mmSKRIPTE0006346_Raf1_9
  gRNA
gagagactcgagttattact

SEQ ID NO: 135568 - DNA, 20 bp, Artificial Sequence
  mmSKRIPTE0006347_Irf3_1
  gRNA
ccagtggtgcctacaccccg

SEQ ID NO: 135569 - DNA, 20 bp, Artificial Sequence
  mmSKRIPTE0006348_Irf3_2
  gRNA
ttgcccgatcctgcgccctg

SEQ ID NO: 135570 - DNA, 20 bp, Artificial Sequence
  mmSKRIPTE0006349_Irf3_3
  gRNA
gttaggatcctttaaagacg

SEQ ID NO: 135571 - DNA, 20 bp, Artificial Sequence
  mmSKRIPTE0006350_Irf3_4
  gRNA
aggcttccgtctacaacgcg

SEQ ID NO: 135572 - DNA, 20 bp, Artificial Sequence
  mmSKRIPTE0006351_Irf3_5
  gRNA
tcttccgcgttacctaccag

SEQ ID NO: 135573 - DNA, 20 bp, Artificial Sequence
  mmSKRIPTE0006352_Irf3_6
  gRNA
tcttggggcactatccactg

SEQ ID NO: 135574 - DNA, 20 bp, Artificial Sequence
  mmSKRIPTE0006353_Irf3_7
  gRNA
gaaccacagagtgtagcgtg

SEQ ID NO: 135575 - DNA, 20 bp, Artificial Sequence
  mmSKRIPTE0006354_Irf3_8
  gRNA
acgacttagactctggcccg

SEQ ID NO: 135576 - DNA, 20 bp, Artificial Sequence
  mmSKRIPTE0006355_Irf3_9
  gRNA
agcctcttcactgaaaaccg

SEQ ID NO: 135577 - DNA, 20 bp, Artificial Sequence
  mmSKRIPTE0006356_Rab6a_1
  gRNA
caatcccggctcctcccgtg

SEQ ID NO: 135578 - DNA, 20 bp, Artificial Sequence
  mmSKRIPTE0006357_Rab6a_2
  gRNA
ccttccctcagaacgcggcg

SEQ ID NO: 135579 - DNA, 20 bp, Artificial Sequence
  mmSKRIPTE0006358_Rab6a_3
  gRNA
tgctaggcgactctgcgggg

SEQ ID NO: 135580 - DNA, 20 bp, Artificial Sequence
  mmSKRIPTE0006359_Rab6a_4
  gRNA
tgagcgtactggtacaaaca

SEQ ID NO: 135581 - DNA, 20 bp, Artificial Sequence
  mmSKRIPTE0006360_Rab6a_5
  gRNA
cctgatagatcctagcgagg

SEQ ID NO: 135582 - DNA, 20 bp, Artificial Sequence
  mmSKRIPTE0006361_Rab6a_6
  gRNA
taggaagagcgaggccggcg

SEQ ID NO: 135583 - DNA, 20 bp, Artificial Sequence
  mmSKRIPTE0006362_Rab6a_7
  gRNA
acaagtaggtatactgcgat

SEQ ID NO: 135584 - DNA, 20 bp, Artificial Sequence
  mmSKRIPTE0006363_Rab6a_8
  gRNA
gagacttcgggaatccgctg

SEQ ID NO: 135585 - DNA, 20 bp, Artificial Sequence
  mmSKRIPTE0006364_Rab6a_9
  gRNA
gctccaacccgctaacgaag

SEQ ID NO: 135586 - DNA, 20 bp, Artificial Sequence
  mmSKRIPTE0006365_Cklf_1
  gRNA
gccttgcgtctggaaaggcg

SEQ ID NO: 135587 - DNA, 20 bp, Artificial Sequence
  mmSKRIPTE0006366_Cklf_2
  gRNA
cggtagtcaggagtgctccg

SEQ ID NO: 135588 - DNA, 20 bp, Artificial Sequence
  mmSKRIPTE0006367_Cklf_3
  gRNA
gaaagagccattaatcgaga

SEQ ID NO: 135589 - DNA, 20 bp, Artificial Sequence
  mmSKRIPTE0006368_Cklf_4
  gRNA
gctaatcaatccaagcttgg

SEQ ID NO: 135590 - DNA, 20 bp, Artificial Sequence
  mmSKRIPTE0006369_Cklf_5
  gRNA
ttcctagtcttatacacgtg

SEQ ID NO: 135591 - DNA, 20 bp, Artificial Sequence
  mmSKRIPTE0006370_Cklf_6
  gRNA
cacggccggtcgtaagccgt

SEQ ID NO: 135592 - DNA, 20 bp, Artificial Sequence
  mmSKRIPTE0006371_Cklf_7
  gRNA
agttaggaacttaagagacc

SEQ ID NO: 135593 - DNA, 20 bp, Artificial Sequence
  mmSKRIPTE0006372_Cklf_8
  gRNA
gcaaggcattgattgctctg

SEQ ID NO: 135594 - DNA, 20 bp, Artificial Sequence
  mmSKRIPTE0006373_Cklf_9
  gRNA
accagggcgggaatgcaggg

SEQ ID NO: 135595 - DNA, 20 bp, Artificial Sequence
  mmSKRIPTE0006374_Hprt_1
  gRNA
ctagaatgatcagtcaacgg

SEQ ID NO: 135596 - DNA, 20 bp, Artificial Sequence
  mmSKRIPTE0006375_Hprt_2
  gRNA
atgacctgcaatacttgctg

SEQ ID NO: 135597 - DNA, 20 bp, Artificial Sequence
  mmSKRIPTE0006376_Hprt_3
  gRNA
ataagcgacaatctaccaga

SEQ ID NO: 135598 - DNA, 20 bp, Artificial Sequence
  mmSKRIPTE0006377_Hprt_4
  gRNA
tccaggtggtgatcagtcgg

SEQ ID NO: 135599 - DNA, 20 bp, Artificial Sequence
  mmSKRIPTE0006378_Hprt_5
  gRNA
atcagtcgggtcaaattacg

SEQ ID NO: 135600 - DNA, 20 bp, Artificial Sequence
  mmSKRIPTE0006379_Hprt_6
  gRNA
tcgcggcaaaaagcggtctg

SEQ ID NO: 135601 - DNA, 20 bp, Artificial Sequence
  mmSKRIPTE0006380_Hprt_7
  gRNA
ttcagcagtaagacgcagca

SEQ ID NO: 135602 - DNA, 20 bp, Artificial Sequence
  mmSKRIPTE0006381_Hprt_8
  gRNA
tagcaggtgttctagtcctg

SEQ ID NO: 135603 - DNA, 20 bp, Artificial Sequence
  mmSKRIPTE0006382_Hprt_9
  gRNA
atggataaatgattggccaa

SEQ ID NO: 135604 - DNA, 20 bp, Artificial Sequence
  mmSKRIPTE0006383_Irak1_1
  gRNA
ctcctcaggcaagtaggcga

SEQ ID NO: 135605 - DNA, 20 bp, Artificial Sequence
  mmSKRIPTE0006384_Irak1_2
  gRNA
ttggcttctgctcaccaccg

SEQ ID NO: 135606 - DNA, 20 bp, Artificial Sequence
  mmSKRIPTE0006385_Irak1_3
  gRNA
gcgcacgatcaaggccgctg

SEQ ID NO: 135607 - DNA, 20 bp, Artificial Sequence
  mmSKRIPTE0006386_Irak1_4
  gRNA
caaactcctcagtagcccaa

SEQ ID NO: 135608 - DNA, 20 bp, Artificial Sequence
  mmSKRIPTE0006387_Irak1_5
  gRNA
cccaccgaactggcaccagt

SEQ ID NO: 135609 - DNA, 20 bp, Artificial Sequence
  mmSKRIPTE0006388_Irak1_6
  gRNA
gctgggttgatgatgatctg

SEQ ID NO: 135610 - DNA, 20 bp, Artificial Sequence
  mmSKRIPTE0006389_Irak1_7
  gRNA
aagagaccatggaccaggcg

SEQ ID NO: 135611 - DNA, 20 bp, Artificial Sequence
  mmSKRIPTE0006390_Irak1_8
  gRNA
gctcttgtggtcactactag

SEQ ID NO: 135612 - DNA, 20 bp, Artificial Sequence
  mmSKRIPTE0006391_Irak1_9
  gRNA
gggtctccagtattacctag

SEQ ID NO: 135613 - DNA, 20 bp, Artificial Sequence
  mmSKRIPTE0006392_Rab5b_1
  gRNA
caaacaagacgactattgag

SEQ ID NO: 135614 - DNA, 20 bp, Artificial Sequence
  mmSKRIPTE0006393_Rab5b_2
  gRNA
attactatattatgggtcca

SEQ ID NO: 135615 - DNA, 20 bp, Artificial Sequence
  mmSKRIPTE0006394_Rab5b_3
  gRNA
gcaagatcacccgcctaccg

SEQ ID NO: 135616 - DNA, 20 bp, Artificial Sequence
  mmSKRIPTE0006395_Rab5b_4
  gRNA
acactaaccctgtagctggt

SEQ ID NO: 135617 - DNA, 20 bp, Artificial Sequence
  mmSKRIPTE0006396_Rab5b_5
  gRNA
ctcgtgtaggtattggcttg

SEQ ID NO: 135618 - DNA, 20 bp, Artificial Sequence
  mmSKRIPTE0006397_Rab5b_6
  gRNA
tcgactagttagaggtgcca

SEQ ID NO: 135619 - DNA, 20 bp, Artificial Sequence
  mmSKRIPTE0006398_Rab5b_7
  gRNA
cgagctgatggagcccacaa

SEQ ID NO: 135620 - DNA, 20 bp, Artificial Sequence
  mmSKRIPTE0006399_Rab5b_8
  gRNA
ggctgagaaagtgatgattg

SEQ ID NO: 135621 - DNA, 20 bp, Artificial Sequence
  mmSKRIPTE0006400_Rab5b_9
  gRNA
tcagcgcccactaggcctgt

SEQ ID NO: 135622 - DNA, 20 bp, Artificial Sequence
  mmSKRIPTE0006401_Lif_1
  gRNA
acactacctactatgctcgg

SEQ ID NO: 135623 - DNA, 20 bp, Artificial Sequence
  mmSKRIPTE0006402_Lif_2
  gRNA
cgctaccatgcaagactccg

SEQ ID NO: 135624 - DNA, 20 bp, Artificial Sequence
  mmSKRIPTE0006403_Lif_3
  gRNA
atgaggtgccactaagagag
